United States Patent Application Publication US 2019/0048337 A1 - sequence listing, part 13

SEQ ID NO: 414556 - RNA, 24 nt, Artificial Sequence
  Synthetic
cuucuugaagcucagugacacguu

SEQ ID NO: 414557 - RNA, 18 nt, Artificial Sequence
  Synthetic
auacgcuucauacacguu

SEQ ID NO: 414558 - RNA, 19 nt, Artificial Sequence
  Synthetic
cauacgcuucauacacguu

SEQ ID NO: 414559 - RNA, 20 nt, Artificial Sequence
  Synthetic
acauacgcuucauacacguu

SEQ ID NO: 414560 - RNA, 21 nt, Artificial Sequence
  Synthetic
cacauacgcuucauacacguu

SEQ ID NO: 414561 - RNA, 22 nt, Artificial Sequence
  Synthetic
acacauacgcuucauacacguu

SEQ ID NO: 414562 - RNA, 23 nt, Artificial Sequence
  Synthetic
aacacauacgcuucauacacguu

SEQ ID NO: 414563 - RNA, 24 nt, Artificial Sequence
  Synthetic
aaacacauacgcuucauacacguu

SEQ ID NO: 414564 - RNA, 18 nt, Artificial Sequence
  Synthetic
ucccaaacugugcacguu

SEQ ID NO: 414565 - RNA, 19 nt, Artificial Sequence
  Synthetic
gucccaaacugugcacguu

SEQ ID NO: 414566 - RNA, 20 nt, Artificial Sequence
  Synthetic
ugucccaaacugugcacguu

SEQ ID NO: 414567 - RNA, 21 nt, Artificial Sequence
  Synthetic
augucccaaacugugcacguu

SEQ ID NO: 414568 - RNA, 22 nt, Artificial Sequence
  Synthetic
caugucccaaacugugcacguu

SEQ ID NO: 414569 - RNA, 23 nt, Artificial Sequence
  Synthetic
acaugucccaaacugugcacguu

SEQ ID NO: 414570 - RNA, 24 nt, Artificial Sequence
  Synthetic
cacaugucccaaacugugcacguu

SEQ ID NO: 414571 - RNA, 18 nt, Artificial Sequence
  Synthetic
uucucaaucucugacguu

SEQ ID NO: 414572 - RNA, 19 nt, Artificial Sequence
  Synthetic
uuucucaaucucugacguu

SEQ ID NO: 414573 - RNA, 20 nt, Artificial Sequence
  Synthetic
guuucucaaucucugacguu

SEQ ID NO: 414574 - RNA, 21 nt, Artificial Sequence
  Synthetic
uguuucucaaucucugacguu

SEQ ID NO: 414575 - RNA, 22 nt, Artificial Sequence
  Synthetic
auguuucucaaucucugacguu

SEQ ID NO: 414576 - RNA, 23 nt, Artificial Sequence
  Synthetic
aauguuucucaaucucugacguu

SEQ ID NO: 414577 - RNA, 24 nt, Artificial Sequence
  Synthetic
caauguuucucaaucucugacguu

SEQ ID NO: 414578 - RNA, 18 nt, Artificial Sequence
  Synthetic
uauacaaagugauacguu

SEQ ID NO: 414579 - RNA, 19 nt, Artificial Sequence
  Synthetic
cuauacaaagugauacguu

SEQ ID NO: 414580 - RNA, 20 nt, Artificial Sequence
  Synthetic
acuauacaaagugauacguu

SEQ ID NO: 414581 - RNA, 21 nt, Artificial Sequence
  Synthetic
aacuauacaaagugauacguu

SEQ ID NO: 414582 - RNA, 22 nt, Artificial Sequence
  Synthetic
aaacuauacaaagugauacguu

SEQ ID NO: 414583 - RNA, 23 nt, Artificial Sequence
  Synthetic
aaaacuauacaaagugauacguu

SEQ ID NO: 414584 - RNA, 24 nt, Artificial Sequence
  Synthetic
aaaaacuauacaaagugauacguu

SEQ ID NO: 414585 - RNA, 18 nt, Artificial Sequence
  Synthetic
auaaucccauuguacguu

SEQ ID NO: 414586 - RNA, 19 nt, Artificial Sequence
  Synthetic
aauaaucccauuguacguu

SEQ ID NO: 414587 - RNA, 20 nt, Artificial Sequence
  Synthetic
aaauaaucccauuguacguu

SEQ ID NO: 414588 - RNA, 21 nt, Artificial Sequence
  Synthetic
gaaauaaucccauuguacguu

SEQ ID NO: 414589 - RNA, 22 nt, Artificial Sequence
  Synthetic
ggaaauaaucccauuguacguu

SEQ ID NO: 414590 - RNA, 23 nt, Artificial Sequence
  Synthetic
aggaaauaaucccauuguacguu

SEQ ID NO: 414591 - RNA, 24 nt, Artificial Sequence
  Synthetic
caggaaauaaucccauuguacguu

SEQ ID NO: 414592 - RNA, 18 nt, Artificial Sequence
  Synthetic
aucgcuuccacuuacguu

SEQ ID NO: 414593 - RNA, 19 nt, Artificial Sequence
  Synthetic
caucgcuuccacuuacguu

SEQ ID NO: 414594 - RNA, 20 nt, Artificial Sequence
  Synthetic
ucaucgcuuccacuuacguu

SEQ ID NO: 414595 - RNA, 21 nt, Artificial Sequence
  Synthetic
uucaucgcuuccacuuacguu

SEQ ID NO: 414596 - RNA, 22 nt, Artificial Sequence
  Synthetic
uuucaucgcuuccacuuacguu

SEQ ID NO: 414597 - RNA, 23 nt, Artificial Sequence
  Synthetic
uuuucaucgcuuccacuuacguu

SEQ ID NO: 414598 - RNA, 24 nt, Artificial Sequence
  Synthetic
auuuucaucgcuuccacuuacguu

SEQ ID NO: 414599 - RNA, 18 nt, Artificial Sequence
  Synthetic
auuauuauacuuuacguu

SEQ ID NO: 414600 - RNA, 19 nt, Artificial Sequence
  Synthetic
uauuauuauacuuuacguu

SEQ ID NO: 414601 - RNA, 20 nt, Artificial Sequence
  Synthetic
uuauuauuauacuuuacguu

SEQ ID NO: 414602 - RNA, 21 nt, Artificial Sequence
  Synthetic
auuauuauuauacuuuacguu

SEQ ID NO: 414603 - RNA, 22 nt, Artificial Sequence
  Synthetic
aauuauuauuauacuuuacguu

SEQ ID NO: 414604 - RNA, 23 nt, Artificial Sequence
  Synthetic
uaauuauuauuauacuuuacguu

SEQ ID NO: 414605 - RNA, 24 nt, Artificial Sequence
  Synthetic
uuaauuauuauuauacuuuacguu

SEQ ID NO: 414606 - RNA, 18 nt, Artificial Sequence
  Synthetic
aacuagaagcucaccguu

SEQ ID NO: 414607 - RNA, 19 nt, Artificial Sequence
  Synthetic
gaacuagaagcucaccguu

SEQ ID NO: 414608 - RNA, 20 nt, Artificial Sequence
  Synthetic
agaacuagaagcucaccguu

SEQ ID NO: 414609 - RNA, 21 nt, Artificial Sequence
  Synthetic
cagaacuagaagcucaccguu

SEQ ID NO: 414610 - RNA, 22 nt, Artificial Sequence
  Synthetic
gcagaacuagaagcucaccguu

SEQ ID NO: 414611 - RNA, 23 nt, Artificial Sequence
  Synthetic
agcagaacuagaagcucaccguu

SEQ ID NO: 414612 - RNA, 24 nt, Artificial Sequence
  Synthetic
gagcagaacuagaagcucaccguu

SEQ ID NO: 414613 - RNA, 18 nt, Artificial Sequence
  Synthetic
ccuuuauuucucaccguu

SEQ ID NO: 414614 - RNA, 19 nt, Artificial Sequence
  Synthetic
accuuuauuucucaccguu

SEQ ID NO: 414615 - RNA, 20 nt, Artificial Sequence
  Synthetic
gaccuuuauuucucaccguu

SEQ ID NO: 414616 - RNA, 21 nt, Artificial Sequence
  Synthetic
agaccuuuauuucucaccguu

SEQ ID NO: 414617 - RNA, 22 nt, Artificial Sequence
  Synthetic
cagaccuuuauuucucaccguu

SEQ ID NO: 414618 - RNA, 23 nt, Artificial Sequence
  Synthetic
acagaccuuuauuucucaccguu

SEQ ID NO: 414619 - RNA, 24 nt, Artificial Sequence
  Synthetic
aacagaccuuuauuucucaccguu

SEQ ID NO: 414620 - RNA, 18 nt, Artificial Sequence
  Synthetic
gggccucagcugaccguu

SEQ ID NO: 414621 - RNA, 19 nt, Artificial Sequence
  Synthetic
agggccucagcugaccguu

SEQ ID NO: 414622 - RNA, 20 nt, Artificial Sequence
  Synthetic
aagggccucagcugaccguu

SEQ ID NO: 414623 - RNA, 21 nt, Artificial Sequence
  Synthetic
uaagggccucagcugaccguu

SEQ ID NO: 414624 - RNA, 22 nt, Artificial Sequence
  Synthetic
guaagggccucagcugaccguu

SEQ ID NO: 414625 - RNA, 23 nt, Artificial Sequence
  Synthetic
aguaagggccucagcugaccguu

SEQ ID NO: 414626 - RNA, 24 nt, Artificial Sequence
  Synthetic
uaguaagggccucagcugaccguu

SEQ ID NO: 414627 - RNA, 18 nt, Artificial Sequence
  Synthetic
uuuaaguguuguaccguu

SEQ ID NO: 414628 - RNA, 19 nt, Artificial Sequence
  Synthetic
uuuuaaguguuguaccguu

SEQ ID NO: 414629 - RNA, 20 nt, Artificial Sequence
  Synthetic
auuuuaaguguuguaccguu

SEQ ID NO: 414630 - RNA, 21 nt, Artificial Sequence
  Synthetic
gauuuuaaguguuguaccguu

SEQ ID NO: 414631 - RNA, 22 nt, Artificial Sequence
  Synthetic
ugauuuuaaguguuguaccguu

SEQ ID NO: 414632 - RNA, 23 nt, Artificial Sequence
  Synthetic
uugauuuuaaguguuguaccguu

SEQ ID NO: 414633 - RNA, 24 nt, Artificial Sequence
  Synthetic
uuugauuuuaaguguuguaccguu

SEQ ID NO: 414634 - RNA, 18 nt, Artificial Sequence
  Synthetic
cuagaguuccaacccguu

SEQ ID NO: 414635 - RNA, 19 nt, Artificial Sequence
  Synthetic
ucuagaguuccaacccguu

SEQ ID NO: 414636 - RNA, 20 nt, Artificial Sequence
  Synthetic
cucuagaguuccaacccguu

SEQ ID NO: 414637 - RNA, 21 nt, Artificial Sequence
  Synthetic
gcucuagaguuccaacccguu

SEQ ID NO: 414638 - RNA, 22 nt, Artificial Sequence
  Synthetic
ggcucuagaguuccaacccguu

SEQ ID NO: 414639 - RNA, 23 nt, Artificial Sequence
  Synthetic
aggcucuagaguuccaacccguu

SEQ ID NO: 414640 - RNA, 24 nt, Artificial Sequence
  Synthetic
caggcucuagaguuccaacccguu

SEQ ID NO: 414641 - RNA, 18 nt, Artificial Sequence
  Synthetic
acagauauaacucccguu

SEQ ID NO: 414642 - RNA, 19 nt, Artificial Sequence
  Synthetic
gacagauauaacucccguu

SEQ ID NO: 414643 - RNA, 20 nt, Artificial Sequence
  Synthetic
ugacagauauaacucccguu

SEQ ID NO: 414644 - RNA, 21 nt, Artificial Sequence
  Synthetic
gugacagauauaacucccguu

SEQ ID NO: 414645 - RNA, 22 nt, Artificial Sequence
  Synthetic
ggugacagauauaacucccguu

SEQ ID NO: 414646 - RNA, 23 nt, Artificial Sequence
  Synthetic
aggugacagauauaacucccguu

SEQ ID NO: 414647 - RNA, 24 nt, Artificial Sequence
  Synthetic
uaggugacagauauaacucccguu

SEQ ID NO: 414648 - RNA, 18 nt, Artificial Sequence
  Synthetic
aaacuacuuuguuccguu

SEQ ID NO: 414649 - RNA, 19 nt, Artificial Sequence
  Synthetic
gaaacuacuuuguuccguu

SEQ ID NO: 414650 - RNA, 20 nt, Artificial Sequence
  Synthetic
cgaaacuacuuuguuccguu

SEQ ID NO: 414651 - RNA, 21 nt, Artificial Sequence
  Synthetic
ucgaaacuacuuuguuccguu

SEQ ID NO: 414652 - RNA, 22 nt, Artificial Sequence
  Synthetic
aucgaaacuacuuuguuccguu

SEQ ID NO: 414653 - RNA, 23 nt, Artificial Sequence
  Synthetic
aaucgaaacuacuuuguuccguu

SEQ ID NO: 414654 - RNA, 24 nt, Artificial Sequence
  Synthetic
uaaucgaaacuacuuuguuccguu

SEQ ID NO: 414655 - RNA, 18 nt, Artificial Sequence
  Synthetic
aaagcagauaucagcguu

SEQ ID NO: 414656 - RNA, 19 nt, Artificial Sequence
  Synthetic
gaaagcagauaucagcguu

SEQ ID NO: 414657 - RNA, 20 nt, Artificial Sequence
  Synthetic
ugaaagcagauaucagcguu

SEQ ID NO: 414658 - RNA, 21 nt, Artificial Sequence
  Synthetic
cugaaagcagauaucagcguu

SEQ ID NO: 414659 - RNA, 22 nt, Artificial Sequence
  Synthetic
gcugaaagcagauaucagcguu

SEQ ID NO: 414660 - RNA, 23 nt, Artificial Sequence
  Synthetic
ggcugaaagcagauaucagcguu

SEQ ID NO: 414661 - RNA, 24 nt, Artificial Sequence
  Synthetic
aggcugaaagcagauaucagcguu

SEQ ID NO: 414662 - RNA, 18 nt, Artificial Sequence
  Synthetic
ggggggagggauagcguu

SEQ ID NO: 414663 - RNA, 19 nt, Artificial Sequence
  Synthetic
aggggggagggauagcguu

SEQ ID NO: 414664 - RNA, 20 nt, Artificial Sequence
  Synthetic
gaggggggagggauagcguu

SEQ ID NO: 414665 - RNA, 21 nt, Artificial Sequence
  Synthetic
ggaggggggagggauagcguu

SEQ ID NO: 414666 - RNA, 22 nt, Artificial Sequence
  Synthetic
gggaggggggagggauagcguu

SEQ ID NO: 414667 - RNA, 23 nt, Artificial Sequence
  Synthetic
ggggaggggggagggauagcguu

SEQ ID NO: 414668 - RNA, 24 nt, Artificial Sequence
  Synthetic
gggggaggggggagggauagcguu

SEQ ID NO: 414669 - RNA, 18 nt, Artificial Sequence
  Synthetic
auugaaugucacaucguu

SEQ ID NO: 414670 - RNA, 19 nt, Artificial Sequence
  Synthetic
aauugaaugucacaucguu

SEQ ID NO: 414671 - RNA, 20 nt, Artificial Sequence
  Synthetic
aaauugaaugucacaucguu

SEQ ID NO: 414672 - RNA, 21 nt, Artificial Sequence
  Synthetic
uaaauugaaugucacaucguu

SEQ ID NO: 414673 - RNA, 22 nt, Artificial Sequence
  Synthetic
auaaauugaaugucacaucguu

SEQ ID NO: 414674 - RNA, 23 nt, Artificial Sequence
  Synthetic
uauaaauugaaugucacaucguu

SEQ ID NO: 414675 - RNA, 24 nt, Artificial Sequence
  Synthetic
cuauaaauugaaugucacaucguu

SEQ ID NO: 414676 - RNA, 18 nt, Artificial Sequence
  Synthetic
uuugaaacauagaucguu

SEQ ID NO: 414677 - RNA, 19 nt, Artificial Sequence
  Synthetic
cuuugaaacauagaucguu

SEQ ID NO: 414678 - RNA, 20 nt, Artificial Sequence
  Synthetic
ccuuugaaacauagaucguu

SEQ ID NO: 414679 - RNA, 21 nt, Artificial Sequence
  Synthetic
accuuugaaacauagaucguu

SEQ ID NO: 414680 - RNA, 22 nt, Artificial Sequence
  Synthetic
uaccuuugaaacauagaucguu

SEQ ID NO: 414681 - RNA, 23 nt, Artificial Sequence
  Synthetic
auaccuuugaaacauagaucguu

SEQ ID NO: 414682 - RNA, 24 nt, Artificial Sequence
  Synthetic
uauaccuuugaaacauagaucguu

SEQ ID NO: 414683 - RNA, 18 nt, Artificial Sequence
  Synthetic
cguucauauugacucguu

SEQ ID NO: 414684 - RNA, 19 nt, Artificial Sequence
  Synthetic
gcguucauauugacucguu

SEQ ID NO: 414685 - RNA, 20 nt, Artificial Sequence
  Synthetic
agcguucauauugacucguu

SEQ ID NO: 414686 - RNA, 21 nt, Artificial Sequence
  Synthetic
aagcguucauauugacucguu

SEQ ID NO: 414687 - RNA, 22 nt, Artificial Sequence
  Synthetic
uaagcguucauauugacucguu

SEQ ID NO: 414688 - RNA, 23 nt, Artificial Sequence
  Synthetic
uuaagcguucauauugacucguu

SEQ ID NO: 414689 - RNA, 24 nt, Artificial Sequence
  Synthetic
cuuaagcguucauauugacucguu

SEQ ID NO: 414690 - RNA, 18 nt, Artificial Sequence
  Synthetic
auauucucaaaccucguu

SEQ ID NO: 414691 - RNA, 19 nt, Artificial Sequence
  Synthetic
aauauucucaaaccucguu

SEQ ID NO: 414692 - RNA, 20 nt, Artificial Sequence
  Synthetic
aaauauucucaaaccucguu

SEQ ID NO: 414693 - RNA, 21 nt, Artificial Sequence
  Synthetic
uaaauauucucaaaccucguu

SEQ ID NO: 414694 - RNA, 22 nt, Artificial Sequence
  Synthetic
auaaauauucucaaaccucguu

SEQ ID NO: 414695 - RNA, 23 nt, Artificial Sequence
  Synthetic
aauaaauauucucaaaccucguu

SEQ ID NO: 414696 - RNA, 24 nt, Artificial Sequence
  Synthetic
aaauaaauauucucaaaccucguu

SEQ ID NO: 414697 - RNA, 18 nt, Artificial Sequence
  Synthetic
uacuguuccucccucguu

SEQ ID NO: 414698 - RNA, 19 nt, Artificial Sequence
  Synthetic
guacuguuccucccucguu

SEQ ID NO: 414699 - RNA, 20 nt, Artificial Sequence
  Synthetic
uguacuguuccucccucguu

SEQ ID NO: 414700 - RNA, 21 nt, Artificial Sequence
  Synthetic
guguacuguuccucccucguu

SEQ ID NO: 414701 - RNA, 22 nt, Artificial Sequence
  Synthetic
aguguacuguuccucccucguu

SEQ ID NO: 414702 - RNA, 23 nt, Artificial Sequence
  Synthetic
aaguguacuguuccucccucguu

SEQ ID NO: 414703 - RNA, 24 nt, Artificial Sequence
  Synthetic
uaaguguacuguuccucccucguu

SEQ ID NO: 414704 - RNA, 18 nt, Artificial Sequence
  Synthetic
aguuuaagacugcucguu

SEQ ID NO: 414705 - RNA, 19 nt, Artificial Sequence
  Synthetic
gaguuuaagacugcucguu

SEQ ID NO: 414706 - RNA, 20 nt, Artificial Sequence
  Synthetic
ggaguuuaagacugcucguu

SEQ ID NO: 414707 - RNA, 21 nt, Artificial Sequence
  Synthetic
cggaguuuaagacugcucguu

SEQ ID NO: 414708 - RNA, 22 nt, Artificial Sequence
  Synthetic
ucggaguuuaagacugcucguu

SEQ ID NO: 414709 - RNA, 23 nt, Artificial Sequence
  Synthetic
uucggaguuuaagacugcucguu

SEQ ID NO: 414710 - RNA, 24 nt, Artificial Sequence
  Synthetic
auucggaguuuaagacugcucguu

SEQ ID NO: 414711 - RNA, 18 nt, Artificial Sequence
  Synthetic
gcugagaaguccaagguu

SEQ ID NO: 414712 - RNA, 19 nt, Artificial Sequence
  Synthetic
ggcugagaaguccaagguu

SEQ ID NO: 414713 - RNA, 20 nt, Artificial Sequence
  Synthetic
aggcugagaaguccaagguu

SEQ ID NO: 414714 - RNA, 21 nt, Artificial Sequence
  Synthetic
gaggcugagaaguccaagguu

SEQ ID NO: 414715 - RNA, 22 nt, Artificial Sequence
  Synthetic
ggaggcugagaaguccaagguu

SEQ ID NO: 414716 - RNA, 23 nt, Artificial Sequence
  Synthetic
cggaggcugagaaguccaagguu

SEQ ID NO: 414717 - RNA, 24 nt, Artificial Sequence
  Synthetic
acggaggcugagaaguccaagguu

SEQ ID NO: 414718 - RNA, 18 nt, Artificial Sequence
  Synthetic
agaaagguaaucaagguu

SEQ ID NO: 414719 - RNA, 19 nt, Artificial Sequence
  Synthetic
uagaaagguaaucaagguu

SEQ ID NO: 414720 - RNA, 20 nt, Artificial Sequence
  Synthetic
guagaaagguaaucaagguu

SEQ ID NO: 414721 - RNA, 21 nt, Artificial Sequence
  Synthetic
uguagaaagguaaucaagguu

SEQ ID NO: 414722 - RNA, 22 nt, Artificial Sequence
  Synthetic
uuguagaaagguaaucaagguu

SEQ ID NO: 414723 - RNA, 23 nt, Artificial Sequence
  Synthetic
cuuguagaaagguaaucaagguu

SEQ ID NO: 414724 - RNA, 24 nt, Artificial Sequence
  Synthetic
ucuuguagaaagguaaucaagguu

SEQ ID NO: 414725 - RNA, 18 nt, Artificial Sequence
  Synthetic
ugagcccaggcgaagguu

SEQ ID NO: 414726 - RNA, 19 nt, Artificial Sequence
  Synthetic
augagcccaggcgaagguu

SEQ ID NO: 414727 - RNA, 20 nt, Artificial Sequence
  Synthetic
gaugagcccaggcgaagguu

SEQ ID NO: 414728 - RNA, 21 nt, Artificial Sequence
  Synthetic
agaugagcccaggcgaagguu

SEQ ID NO: 414729 - RNA, 22 nt, Artificial Sequence
  Synthetic
aagaugagcccaggcgaagguu

SEQ ID NO: 414730 - RNA, 23 nt, Artificial Sequence
  Synthetic
aaagaugagcccaggcgaagguu

SEQ ID NO: 414731 - RNA, 24 nt, Artificial Sequence
  Synthetic
caaagaugagcccaggcgaagguu

SEQ ID NO: 414732 - RNA, 18 nt, Artificial Sequence
  Synthetic
aacagauucaggaagguu

SEQ ID NO: 414733 - RNA, 19 nt, Artificial Sequence
  Synthetic
aaacagauucaggaagguu

SEQ ID NO: 414734 - RNA, 20 nt, Artificial Sequence
  Synthetic
gaaacagauucaggaagguu

SEQ ID NO: 414735 - RNA, 21 nt, Artificial Sequence
  Synthetic
agaaacagauucaggaagguu

SEQ ID NO: 414736 - RNA, 22 nt, Artificial Sequence
  Synthetic
aagaaacagauucaggaagguu

SEQ ID NO: 414737 - RNA, 23 nt, Artificial Sequence
  Synthetic
gaagaaacagauucaggaagguu

SEQ ID NO: 414738 - RNA, 24 nt, Artificial Sequence
  Synthetic
ugaagaaacagauucaggaagguu

SEQ ID NO: 414739 - RNA, 18 nt, Artificial Sequence
  Synthetic
uuucuuuguuggaagguu

SEQ ID NO: 414740 - RNA, 19 nt, Artificial Sequence
  Synthetic
uuuucuuuguuggaagguu

SEQ ID NO: 414741 - RNA, 20 nt, Artificial Sequence
  Synthetic
cuuuucuuuguuggaagguu

SEQ ID NO: 414742 - RNA, 21 nt, Artificial Sequence
  Synthetic
gcuuuucuuuguuggaagguu

SEQ ID NO: 414743 - RNA, 22 nt, Artificial Sequence
  Synthetic
ggcuuuucuuuguuggaagguu

SEQ ID NO: 414744 - RNA, 23 nt, Artificial Sequence
  Synthetic
gggcuuuucuuuguuggaagguu

SEQ ID NO: 414745 - RNA, 24 nt, Artificial Sequence
  Synthetic
ugggcuuuucuuuguuggaagguu

SEQ ID NO: 414746 - RNA, 18 nt, Artificial Sequence
  Synthetic
gggguucaugugaagguu

SEQ ID NO: 414747 - RNA, 19 nt, Artificial Sequence
  Synthetic
ugggguucaugugaagguu

SEQ ID NO: 414748 - RNA, 20 nt, Artificial Sequence
  Synthetic
augggguucaugugaagguu

SEQ ID NO: 414749 - RNA, 21 nt, Artificial Sequence
  Synthetic
caugggguucaugugaagguu

SEQ ID NO: 414750 - RNA, 22 nt, Artificial Sequence
  Synthetic
ucaugggguucaugugaagguu

SEQ ID NO: 414751 - RNA, 23 nt, Artificial Sequence
  Synthetic
cucaugggguucaugugaagguu

SEQ ID NO: 414752 - RNA, 24 nt, Artificial Sequence
  Synthetic
ucucaugggguucaugugaagguu

SEQ ID NO: 414753 - RNA, 18 nt, Artificial Sequence
  Synthetic
cagaguguagcuaagguu

SEQ ID NO: 414754 - RNA, 19 nt, Artificial Sequence
  Synthetic
ccagaguguagcuaagguu

SEQ ID NO: 414755 - RNA, 20 nt, Artificial Sequence
  Synthetic
cccagaguguagcuaagguu

SEQ ID NO: 414756 - RNA, 21 nt, Artificial Sequence
  Synthetic
ucccagaguguagcuaagguu

SEQ ID NO: 414757 - RNA, 22 nt, Artificial Sequence
  Synthetic
aucccagaguguagcuaagguu

SEQ ID NO: 414758 - RNA, 23 nt, Artificial Sequence
  Synthetic
gaucccagaguguagcuaagguu

SEQ ID NO: 414759 - RNA, 24 nt, Artificial Sequence
  Synthetic
ugaucccagaguguagcuaagguu

SEQ ID NO: 414760 - RNA, 18 nt, Artificial Sequence
  Synthetic
gaauguaaaucuaagguu

SEQ ID NO: 414761 - RNA, 19 nt, Artificial Sequence
  Synthetic
ugaauguaaaucuaagguu

SEQ ID NO: 414762 - RNA, 20 nt, Artificial Sequence
  Synthetic
gugaauguaaaucuaagguu

SEQ ID NO: 414763 - RNA, 21 nt, Artificial Sequence
  Synthetic
ugugaauguaaaucuaagguu

SEQ ID NO: 414764 - RNA, 22 nt, Artificial Sequence
  Synthetic
uugugaauguaaaucuaagguu

SEQ ID NO: 414765 - RNA, 23 nt, Artificial Sequence
  Synthetic
guugugaauguaaaucuaagguu

SEQ ID NO: 414766 - RNA, 24 nt, Artificial Sequence
  Synthetic
aguugugaauguaaaucuaagguu

SEQ ID NO: 414767 - RNA, 18 nt, Artificial Sequence
  Synthetic
aaagaugaaaaccagguu

SEQ ID NO: 414768 - RNA, 19 nt, Artificial Sequence
  Synthetic
uaaagaugaaaaccagguu

SEQ ID NO: 414769 - RNA, 20 nt, Artificial Sequence
  Synthetic
uuaaagaugaaaaccagguu

SEQ ID NO: 414770 - RNA, 21 nt, Artificial Sequence
  Synthetic
auuaaagaugaaaaccagguu

SEQ ID NO: 414771 - RNA, 22 nt, Artificial Sequence
  Synthetic
aauuaaagaugaaaaccagguu

SEQ ID NO: 414772 - RNA, 23 nt, Artificial Sequence
  Synthetic
caauuaaagaugaaaaccagguu

SEQ ID NO: 414773 - RNA, 24 nt, Artificial Sequence
  Synthetic
ucaauuaaagaugaaaaccagguu

SEQ ID NO: 414774 - RNA, 18 nt, Artificial Sequence
  Synthetic
agaaaaucugaccagguu

SEQ ID NO: 414775 - RNA, 19 nt, Artificial Sequence
  Synthetic
aagaaaaucugaccagguu

SEQ ID NO: 414776 - RNA, 20 nt, Artificial Sequence
  Synthetic
gaagaaaaucugaccagguu

SEQ ID NO: 414777 - RNA, 21 nt, Artificial Sequence
  Synthetic
ugaagaaaaucugaccagguu

SEQ ID NO: 414778 - RNA, 22 nt, Artificial Sequence
  Synthetic
cugaagaaaaucugaccagguu

SEQ ID NO: 414779 - RNA, 23 nt, Artificial Sequence
  Synthetic
ucugaagaaaaucugaccagguu

SEQ ID NO: 414780 - RNA, 24 nt, Artificial Sequence
  Synthetic
uucugaagaaaaucugaccagguu

SEQ ID NO: 414781 - RNA, 18 nt, Artificial Sequence
  Synthetic
auguuuaaagcccagguu

SEQ ID NO: 414782 - RNA, 19 nt, Artificial Sequence
  Synthetic
aauguuuaaagcccagguu

SEQ ID NO: 414783 - RNA, 20 nt, Artificial Sequence
  Synthetic
uaauguuuaaagcccagguu

SEQ ID NO: 414784 - RNA, 21 nt, Artificial Sequence
  Synthetic
auaauguuuaaagcccagguu

SEQ ID NO: 414785 - RNA, 22 nt, Artificial Sequence
  Synthetic
uauaauguuuaaagcccagguu

SEQ ID NO: 414786 - RNA, 23 nt, Artificial Sequence
  Synthetic
uuauaauguuuaaagcccagguu

SEQ ID NO: 414787 - RNA, 24 nt, Artificial Sequence
  Synthetic
uuuauaauguuuaaagcccagguu

SEQ ID NO: 414788 - RNA, 18 nt, Artificial Sequence
  Synthetic
uccaaauguaggcagguu

SEQ ID NO: 414789 - RNA, 19 nt, Artificial Sequence
  Synthetic
uuccaaauguaggcagguu

SEQ ID NO: 414790 - RNA, 20 nt, Artificial Sequence
  Synthetic
uuuccaaauguaggcagguu

SEQ ID NO: 414791 - RNA, 21 nt, Artificial Sequence
  Synthetic
cuuuccaaauguaggcagguu

SEQ ID NO: 414792 - RNA, 22 nt, Artificial Sequence
  Synthetic
acuuuccaaauguaggcagguu

SEQ ID NO: 414793 - RNA, 23 nt, Artificial Sequence
  Synthetic
uacuuuccaaauguaggcagguu

SEQ ID NO: 414794 - RNA, 24 nt, Artificial Sequence
  Synthetic
auacuuuccaaauguaggcagguu

SEQ ID NO: 414795 - RNA, 18 nt, Artificial Sequence
  Synthetic
augaaggacuggcagguu

SEQ ID NO: 414796 - RNA, 19 nt, Artificial Sequence
  Synthetic
caugaaggacuggcagguu

SEQ ID NO: 414797 - RNA, 20 nt, Artificial Sequence
  Synthetic
ccaugaaggacuggcagguu

SEQ ID NO: 414798 - RNA, 21 nt, Artificial Sequence
  Synthetic
accaugaaggacuggcagguu

SEQ ID NO: 414799 - RNA, 22 nt, Artificial Sequence
  Synthetic
aaccaugaaggacuggcagguu

SEQ ID NO: 414800 - RNA, 23 nt, Artificial Sequence
  Synthetic
aaaccaugaaggacuggcagguu

SEQ ID NO: 414801 - RNA, 24 nt, Artificial Sequence
  Synthetic
gaaaccaugaaggacuggcagguu

SEQ ID NO: 414802 - RNA, 18 nt, Artificial Sequence
  Synthetic
cuucuuaaagaucagguu

SEQ ID NO: 414803 - RNA, 19 nt, Artificial Sequence
  Synthetic
acuucuuaaagaucagguu

SEQ ID NO: 414804 - RNA, 20 nt, Artificial Sequence
  Synthetic
aacuucuuaaagaucagguu

SEQ ID NO: 414805 - RNA, 21 nt, Artificial Sequence
  Synthetic
uaacuucuuaaagaucagguu

SEQ ID NO: 414806 - RNA, 22 nt, Artificial Sequence
  Synthetic
uuaacuucuuaaagaucagguu

SEQ ID NO: 414807 - RNA, 23 nt, Artificial Sequence
  Synthetic
uuuaacuucuuaaagaucagguu

SEQ ID NO: 414808 - RNA, 24 nt, Artificial Sequence
  Synthetic
cuuuaacuucuuaaagaucagguu

SEQ ID NO: 414809 - RNA, 18 nt, Artificial Sequence
  Synthetic
ggcuggauguaagagguu

SEQ ID NO: 414810 - RNA, 19 nt, Artificial Sequence
  Synthetic
aggcuggauguaagagguu

SEQ ID NO: 414811 - RNA, 20 nt, Artificial Sequence
  Synthetic
caggcuggauguaagagguu

SEQ ID NO: 414812 - RNA, 21 nt, Artificial Sequence
  Synthetic
ccaggcuggauguaagagguu

SEQ ID NO: 414813 - RNA, 22 nt, Artificial Sequence
  Synthetic
gccaggcuggauguaagagguu

SEQ ID NO: 414814 - RNA, 23 nt, Artificial Sequence
  Synthetic
ggccaggcuggauguaagagguu

SEQ ID NO: 414815 - RNA, 24 nt, Artificial Sequence
  Synthetic
aggccaggcuggauguaagagguu

SEQ ID NO: 414816 - RNA, 18 nt, Artificial Sequence
  Synthetic
aaguaagugagagagguu

SEQ ID NO: 414817 - RNA, 19 nt, Artificial Sequence
  Synthetic
gaaguaagugagagagguu

SEQ ID NO: 414818 - RNA, 20 nt, Artificial Sequence
  Synthetic
ugaaguaagugagagagguu

SEQ ID NO: 414819 - RNA, 21 nt, Artificial Sequence
  Synthetic
gugaaguaagugagagagguu

SEQ ID NO: 414820 - RNA, 22 nt, Artificial Sequence
  Synthetic
agugaaguaagugagagagguu

SEQ ID NO: 414821 - RNA, 23 nt, Artificial Sequence
  Synthetic
gagugaaguaagugagagagguu

SEQ ID NO: 414822 - RNA, 24 nt, Artificial Sequence
  Synthetic
agagugaaguaagugagagagguu

SEQ ID NO: 414823 - RNA, 18 nt, Artificial Sequence
  Synthetic
ugugaaugcuuagagguu

SEQ ID NO: 414824 - RNA, 19 nt, Artificial Sequence
  Synthetic
cugugaaugcuuagagguu

SEQ ID NO: 414825 - RNA, 20 nt, Artificial Sequence
  Synthetic
ucugugaaugcuuagagguu

SEQ ID NO: 414826 - RNA, 21 nt, Artificial Sequence
  Synthetic
gucugugaaugcuuagagguu

SEQ ID NO: 414827 - RNA, 22 nt, Artificial Sequence
  Synthetic
ugucugugaaugcuuagagguu

SEQ ID NO: 414828 - RNA, 23 nt, Artificial Sequence
  Synthetic
augucugugaaugcuuagagguu

SEQ ID NO: 414829 - RNA, 24 nt, Artificial Sequence
  Synthetic
caugucugugaaugcuuagagguu

SEQ ID NO: 414830 - RNA, 18 nt, Artificial Sequence
  Synthetic
cccacaucccacgagguu

SEQ ID NO: 414831 - RNA, 19 nt, Artificial Sequence
  Synthetic
ucccacaucccacgagguu

SEQ ID NO: 414832 - RNA, 20 nt, Artificial Sequence
  Synthetic
cucccacaucccacgagguu

SEQ ID NO: 414833 - RNA, 21 nt, Artificial Sequence
  Synthetic
ucucccacaucccacgagguu

SEQ ID NO: 414834 - RNA, 22 nt, Artificial Sequence
  Synthetic
cucucccacaucccacgagguu

SEQ ID NO: 414835 - RNA, 23 nt, Artificial Sequence
  Synthetic
acucucccacaucccacgagguu

SEQ ID NO: 414836 - RNA, 24 nt, Artificial Sequence
  Synthetic
aacucucccacaucccacgagguu

SEQ ID NO: 414837 - RNA, 18 nt, Artificial Sequence
  Synthetic
cgggcagaucacgagguu

SEQ ID NO: 414838 - RNA, 19 nt, Artificial Sequence
  Synthetic
gcgggcagaucacgagguu

SEQ ID NO: 414839 - RNA, 20 nt, Artificial Sequence
  Synthetic
ggcgggcagaucacgagguu

SEQ ID NO: 414840 - RNA, 21 nt, Artificial Sequence
  Synthetic
aggcgggcagaucacgagguu

SEQ ID NO: 414841 - RNA, 22 nt, Artificial Sequence
  Synthetic
aaggcgggcagaucacgagguu

SEQ ID NO: 414842 - RNA, 23 nt, Artificial Sequence
  Synthetic
caaggcgggcagaucacgagguu

SEQ ID NO: 414843 - RNA, 24 nt, Artificial Sequence
  Synthetic
ccaaggcgggcagaucacgagguu

SEQ ID NO: 414844 - RNA, 18 nt, Artificial Sequence
  Synthetic
gucgaggggugggagguu

SEQ ID NO: 414845 - RNA, 19 nt, Artificial Sequence
  Synthetic
ugucgaggggugggagguu

SEQ ID NO: 414846 - RNA, 20 nt, Artificial Sequence
  Synthetic
cugucgaggggugggagguu

SEQ ID NO: 414847 - RNA, 21 nt, Artificial Sequence
  Synthetic
ccugucgaggggugggagguu

SEQ ID NO: 414848 - RNA, 22 nt, Artificial Sequence
  Synthetic
gccugucgaggggugggagguu

SEQ ID NO: 414849 - RNA, 23 nt, Artificial Sequence
  Synthetic
ggccugucgaggggugggagguu

SEQ ID NO: 414850 - RNA, 24 nt, Artificial Sequence
  Synthetic
gggccugucgaggggugggagguu

SEQ ID NO: 414851 - RNA, 18 nt, Artificial Sequence
  Synthetic
guggggauuauggagguu

SEQ ID NO: 414852 - RNA, 19 nt, Artificial Sequence
  Synthetic
cguggggauuauggagguu

SEQ ID NO: 414853 - RNA, 20 nt, Artificial Sequence
  Synthetic
acguggggauuauggagguu

SEQ ID NO: 414854 - RNA, 21 nt, Artificial Sequence
  Synthetic
cacguggggauuauggagguu

SEQ ID NO: 414855 - RNA, 22 nt, Artificial Sequence
  Synthetic
acacguggggauuauggagguu

SEQ ID NO: 414856 - RNA, 23 nt, Artificial Sequence
  Synthetic
gacacguggggauuauggagguu

SEQ ID NO: 414857 - RNA, 24 nt, Artificial Sequence
  Synthetic
ugacacguggggauuauggagguu

SEQ ID NO: 414858 - RNA, 18 nt, Artificial Sequence
  Synthetic
uucacgguucuggagguu

SEQ ID NO: 414859 - RNA, 19 nt, Artificial Sequence
  Synthetic
uuucacgguucuggagguu

SEQ ID NO: 414860 - RNA, 20 nt, Artificial Sequence
  Synthetic
uuuucacgguucuggagguu

SEQ ID NO: 414861 - RNA, 21 nt, Artificial Sequence
  Synthetic
uuuuucacgguucuggagguu

SEQ ID NO: 414862 - RNA, 22 nt, Artificial Sequence
  Synthetic
guuuuucacgguucuggagguu

SEQ ID NO: 414863 - RNA, 23 nt, Artificial Sequence
  Synthetic
uguuuuucacgguucuggagguu

SEQ ID NO: 414864 - RNA, 24 nt, Artificial Sequence
  Synthetic
uuguuuuucacgguucuggagguu

SEQ ID NO: 414865 - RNA, 18 nt, Artificial Sequence
  Synthetic
cucacuguucuggagguu

SEQ ID NO: 414866 - RNA, 19 nt, Artificial Sequence
  Synthetic
ucucacuguucuggagguu

SEQ ID NO: 414867 - RNA, 20 nt, Artificial Sequence
  Synthetic
uucucacuguucuggagguu

SEQ ID NO: 414868 - RNA, 21 nt, Artificial Sequence
  Synthetic
uuucucacuguucuggagguu

SEQ ID NO: 414869 - RNA, 22 nt, Artificial Sequence
  Synthetic
auuucucacuguucuggagguu

SEQ ID NO: 414870 - RNA, 23 nt, Artificial Sequence
  Synthetic
uauuucucacuguucuggagguu

SEQ ID NO: 414871 - RNA, 24 nt, Artificial Sequence
  Synthetic
uuauuucucacuguucuggagguu

SEQ ID NO: 414872 - RNA, 18 nt, Artificial Sequence
  Synthetic
auuagcauaaaugagguu

SEQ ID NO: 414873 - RNA, 19 nt, Artificial Sequence
  Synthetic
aauuagcauaaaugagguu

SEQ ID NO: 414874 - RNA, 20 nt, Artificial Sequence
  Synthetic
aaauuagcauaaaugagguu

SEQ ID NO: 414875 - RNA, 21 nt, Artificial Sequence
  Synthetic
aaaauuagcauaaaugagguu

SEQ ID NO: 414876 - RNA, 22 nt, Artificial Sequence
  Synthetic
aaaaauuagcauaaaugagguu

SEQ ID NO: 414877 - RNA, 23 nt, Artificial Sequence
  Synthetic
gaaaaauuagcauaaaugagguu

SEQ ID NO: 414878 - RNA, 24 nt, Artificial Sequence
  Synthetic
agaaaaauuagcauaaaugagguu

SEQ ID NO: 414879 - RNA, 18 nt, Artificial Sequence
  Synthetic
aaaauuaaaacugagguu

SEQ ID NO: 414880 - RNA, 19 nt, Artificial Sequence
  Synthetic
gaaaauuaaaacugagguu

SEQ ID NO: 414881 - RNA, 20 nt, Artificial Sequence
  Synthetic
agaaaauuaaaacugagguu

SEQ ID NO: 414882 - RNA, 21 nt, Artificial Sequence
  Synthetic
uagaaaauuaaaacugagguu

SEQ ID NO: 414883 - RNA, 22 nt, Artificial Sequence
  Synthetic
auagaaaauuaaaacugagguu

SEQ ID NO: 414884 - RNA, 23 nt, Artificial Sequence
  Synthetic
gauagaaaauuaaaacugagguu

SEQ ID NO: 414885 - RNA, 24 nt, Artificial Sequence
  Synthetic
ugauagaaaauuaaaacugagguu

SEQ ID NO: 414886 - RNA, 18 nt, Artificial Sequence
  Synthetic
auuaaggagccugagguu

SEQ ID NO: 414887 - RNA, 19 nt, Artificial Sequence
  Synthetic
gauuaaggagccugagguu

SEQ ID NO: 414888 - RNA, 20 nt, Artificial Sequence
  Synthetic
agauuaaggagccugagguu

SEQ ID NO: 414889 - RNA, 21 nt, Artificial Sequence
  Synthetic
aagauuaaggagccugagguu

SEQ ID NO: 414890 - RNA, 22 nt, Artificial Sequence
  Synthetic
aaagauuaaggagccugagguu

SEQ ID NO: 414891 - RNA, 23 nt, Artificial Sequence
  Synthetic
uaaagauuaaggagccugagguu

SEQ ID NO: 414892 - RNA, 24 nt, Artificial Sequence
  Synthetic
uuaaagauuaaggagccugagguu

SEQ ID NO: 414893 - RNA, 18 nt, Artificial Sequence
  Synthetic
cauuuguaaagugagguu

SEQ ID NO: 414894 - RNA, 19 nt, Artificial Sequence
  Synthetic
ccauuuguaaagugagguu

SEQ ID NO: 414895 - RNA, 20 nt, Artificial Sequence
  Synthetic
uccauuuguaaagugagguu

SEQ ID NO: 414896 - RNA, 21 nt, Artificial Sequence
  Synthetic
cuccauuuguaaagugagguu

SEQ ID NO: 414897 - RNA, 22 nt, Artificial Sequence
  Synthetic
ucuccauuuguaaagugagguu

SEQ ID NO: 414898 - RNA, 23 nt, Artificial Sequence
  Synthetic
uucuccauuuguaaagugagguu

SEQ ID NO: 414899 - RNA, 24 nt, Artificial Sequence
  Synthetic
uuucuccauuuguaaagugagguu

SEQ ID NO: 414900 - RNA, 18 nt, Artificial Sequence
  Synthetic
gucaguuguggugagguu

SEQ ID NO: 414901 - RNA, 19 nt, Artificial Sequence
  Synthetic
ugucaguuguggugagguu

SEQ ID NO: 414902 - RNA, 20 nt, Artificial Sequence
  Synthetic
augucaguuguggugagguu

SEQ ID NO: 414903 - RNA, 21 nt, Artificial Sequence
  Synthetic
aaugucaguuguggugagguu

SEQ ID NO: 414904 - RNA, 22 nt, Artificial Sequence
  Synthetic
aaaugucaguuguggugagguu

SEQ ID NO: 414905 - RNA, 23 nt, Artificial Sequence
  Synthetic
aaaaugucaguuguggugagguu

SEQ ID NO: 414906 - RNA, 24 nt, Artificial Sequence
  Synthetic
caaaaugucaguuguggugagguu

SEQ ID NO: 414907 - RNA, 18 nt, Artificial Sequence
  Synthetic
auaauacaaagcuagguu

SEQ ID NO: 414908 - RNA, 19 nt, Artificial Sequence
  Synthetic
aauaauacaaagcuagguu

SEQ ID NO: 414909 - RNA, 20 nt, Artificial Sequence
  Synthetic
aaauaauacaaagcuagguu

SEQ ID NO: 414910 - RNA, 21 nt, Artificial Sequence
  Synthetic
aaaauaauacaaagcuagguu

SEQ ID NO: 414911 - RNA, 22 nt, Artificial Sequence
  Synthetic
caaaauaauacaaagcuagguu

SEQ ID NO: 414912 - RNA, 23 nt, Artificial Sequence
  Synthetic
gcaaaauaauacaaagcuagguu

SEQ ID NO: 414913 - RNA, 24 nt, Artificial Sequence
  Synthetic
ugcaaaauaauacaaagcuagguu

SEQ ID NO: 414914 - RNA, 18 nt, Artificial Sequence
  Synthetic
uaugacuaaagcuagguu

SEQ ID NO: 414915 - RNA, 19 nt, Artificial Sequence
  Synthetic
uuaugacuaaagcuagguu

SEQ ID NO: 414916 - RNA, 20 nt, Artificial Sequence
  Synthetic
guuaugacuaaagcuagguu

SEQ ID NO: 414917 - RNA, 21 nt, Artificial Sequence
  Synthetic
uguuaugacuaaagcuagguu

SEQ ID NO: 414918 - RNA, 22 nt, Artificial Sequence
  Synthetic
uuguuaugacuaaagcuagguu

SEQ ID NO: 414919 - RNA, 23 nt, Artificial Sequence
  Synthetic
uuuguuaugacuaaagcuagguu

SEQ ID NO: 414920 - RNA, 24 nt, Artificial Sequence
  Synthetic
guuuguuaugacuaaagcuagguu

SEQ ID NO: 414921 - RNA, 18 nt, Artificial Sequence
  Synthetic
uugucagaugaguagguu

SEQ ID NO: 414922 - RNA, 19 nt, Artificial Sequence
  Synthetic
uuugucagaugaguagguu

SEQ ID NO: 414923 - RNA, 20 nt, Artificial Sequence
  Synthetic
cuuugucagaugaguagguu

SEQ ID NO: 414924 - RNA, 18 nt, Artificial Sequence
  Synthetic
gggccagacagguagguu

SEQ ID NO: 414925 - RNA, 19 nt, Artificial Sequence
  Synthetic
ugggccagacagguagguu

SEQ ID NO: 414926 - RNA, 20 nt, Artificial Sequence
  Synthetic
augggccagacagguagguu

SEQ ID NO: 414927 - RNA, 21 nt, Artificial Sequence
  Synthetic
caugggccagacagguagguu

SEQ ID NO: 414928 - RNA, 22 nt, Artificial Sequence
  Synthetic
gcaugggccagacagguagguu

SEQ ID NO: 414929 - RNA, 23 nt, Artificial Sequence
  Synthetic
agcaugggccagacagguagguu

SEQ ID NO: 414930 - RNA, 24 nt, Artificial Sequence
  Synthetic
uagcaugggccagacagguagguu

SEQ ID NO: 414931 - RNA, 18 nt, Artificial Sequence
  Synthetic
auagaucaccuguagguu

SEQ ID NO: 414932 - RNA, 19 nt, Artificial Sequence
  Synthetic
uauagaucaccuguagguu

SEQ ID NO: 414933 - RNA, 20 nt, Artificial Sequence
  Synthetic
uuauagaucaccuguagguu

SEQ ID NO: 414934 - RNA, 21 nt, Artificial Sequence
  Synthetic
cuuauagaucaccuguagguu

SEQ ID NO: 414935 - RNA, 22 nt, Artificial Sequence
  Synthetic
gcuuauagaucaccuguagguu

SEQ ID NO: 414936 - RNA, 23 nt, Artificial Sequence
  Synthetic
ggcuuauagaucaccuguagguu

SEQ ID NO: 414937 - RNA, 24 nt, Artificial Sequence
  Synthetic
aggcuuauagaucaccuguagguu

SEQ ID NO: 414938 - RNA, 18 nt, Artificial Sequence
  Synthetic
uaguagucucuguagguu

SEQ ID NO: 414939 - RNA, 19 nt, Artificial Sequence
  Synthetic
uuaguagucucuguagguu

SEQ ID NO: 414940 - RNA, 20 nt, Artificial Sequence
  Synthetic
uuuaguagucucuguagguu

SEQ ID NO: 414941 - RNA, 21 nt, Artificial Sequence
  Synthetic
uuuuaguagucucuguagguu

SEQ ID NO: 414942 - RNA, 22 nt, Artificial Sequence
  Synthetic
uuuuuaguagucucuguagguu

SEQ ID NO: 414943 - RNA, 23 nt, Artificial Sequence
  Synthetic
uuuuuuaguagucucuguagguu

SEQ ID NO: 414944 - RNA, 24 nt, Artificial Sequence
  Synthetic
uuuuuuuaguagucucuguagguu

SEQ ID NO: 414945 - RNA, 18 nt, Artificial Sequence
  Synthetic
acagggacagauuagguu

SEQ ID NO: 414946 - RNA, 19 nt, Artificial Sequence
  Synthetic
aacagggacagauuagguu

SEQ ID NO: 414947 - RNA, 20 nt, Artificial Sequence
  Synthetic
aaacagggacagauuagguu

SEQ ID NO: 414948 - RNA, 21 nt, Artificial Sequence
  Synthetic
uaaacagggacagauuagguu

SEQ ID NO: 414949 - RNA, 22 nt, Artificial Sequence
  Synthetic
uuaaacagggacagauuagguu

SEQ ID NO: 414950 - RNA, 23 nt, Artificial Sequence
  Synthetic
auuaaacagggacagauuagguu

SEQ ID NO: 414951 - RNA, 24 nt, Artificial Sequence
  Synthetic
aauuaaacagggacagauuagguu

SEQ ID NO: 414952 - RNA, 18 nt, Artificial Sequence
  Synthetic
caguuguuuuucacgguu

SEQ ID NO: 414953 - RNA, 19 nt, Artificial Sequence
  Synthetic
gcaguuguuuuucacgguu

SEQ ID NO: 414954 - RNA, 20 nt, Artificial Sequence
  Synthetic
ggcaguuguuuuucacgguu

SEQ ID NO: 414955 - RNA, 21 nt, Artificial Sequence
  Synthetic
aggcaguuguuuuucacgguu

SEQ ID NO: 414956 - RNA, 22 nt, Artificial Sequence
  Synthetic
caggcaguuguuuuucacgguu

SEQ ID NO: 414957 - RNA, 23 nt, Artificial Sequence
  Synthetic
acaggcaguuguuuuucacgguu

SEQ ID NO: 414958 - RNA, 24 nt, Artificial Sequence
  Synthetic
aacaggcaguuguuuuucacgguu

SEQ ID NO: 414959 - RNA, 18 nt, Artificial Sequence
  Synthetic
gaauuuagaucagcgguu

SEQ ID NO: 414960 - RNA, 19 nt, Artificial Sequence
  Synthetic
agaauuuagaucagcgguu

SEQ ID NO: 414961 - RNA, 20 nt, Artificial Sequence
  Synthetic
cagaauuuagaucagcgguu

SEQ ID NO: 414962 - RNA, 21 nt, Artificial Sequence
  Synthetic
ucagaauuuagaucagcgguu

SEQ ID NO: 414963 - RNA, 22 nt, Artificial Sequence
  Synthetic
uucagaauuuagaucagcgguu

SEQ ID NO: 414964 - RNA, 23 nt, Artificial Sequence
  Synthetic
auucagaauuuagaucagcgguu

SEQ ID NO: 414965 - RNA, 24 nt, Artificial Sequence
  Synthetic
aauucagaauuuagaucagcgguu

SEQ ID NO: 414966 - RNA, 18 nt, Artificial Sequence
  Synthetic
gccaugcuaggugcgguu

SEQ ID NO: 414967 - RNA, 19 nt, Artificial Sequence
  Synthetic
agccaugcuaggugcgguu

SEQ ID NO: 414968 - RNA, 20 nt, Artificial Sequence
  Synthetic
gagccaugcuaggugcgguu

SEQ ID NO: 414969 - RNA, 21 nt, Artificial Sequence
  Synthetic
agagccaugcuaggugcgguu

SEQ ID NO: 414970 - RNA, 22 nt, Artificial Sequence
  Synthetic
uagagccaugcuaggugcgguu

SEQ ID NO: 414971 - RNA, 23 nt, Artificial Sequence
  Synthetic
uuagagccaugcuaggugcgguu

SEQ ID NO: 414972 - RNA, 24 nt, Artificial Sequence
  Synthetic
cuuagagccaugcuaggugcgguu

SEQ ID NO: 414973 - RNA, 18 nt, Artificial Sequence
  Synthetic
aauguaaacagcucgguu

SEQ ID NO: 414974 - RNA, 19 nt, Artificial Sequence
  Synthetic
uaauguaaacagcucgguu

SEQ ID NO: 414975 - RNA, 20 nt, Artificial Sequence
  Synthetic
auaauguaaacagcucgguu

SEQ ID NO: 414976 - RNA, 21 nt, Artificial Sequence
  Synthetic
uauaauguaaacagcucgguu

SEQ ID NO: 414977 - RNA, 22 nt, Artificial Sequence
  Synthetic
cuauaauguaaacagcucgguu

SEQ ID NO: 414978 - RNA, 23 nt, Artificial Sequence
  Synthetic
ccuauaauguaaacagcucgguu

SEQ ID NO: 414979 - RNA, 24 nt, Artificial Sequence
  Synthetic
cccuauaauguaaacagcucgguu

SEQ ID NO: 414980 - RNA, 18 nt, Artificial Sequence
  Synthetic
acuauuuuaacaaggguu

SEQ ID NO: 414981 - RNA, 19 nt, Artificial Sequence
  Synthetic
uacuauuuuaacaaggguu

SEQ ID NO: 414982 - RNA, 20 nt, Artificial Sequence
  Synthetic
guacuauuuuaacaaggguu

SEQ ID NO: 414983 - RNA, 21 nt, Artificial Sequence
  Synthetic
uguacuauuuuaacaaggguu

SEQ ID NO: 414984 - RNA, 22 nt, Artificial Sequence
  Synthetic
auguacuauuuuaacaaggguu

SEQ ID NO: 414985 - RNA, 23 nt, Artificial Sequence
  Synthetic
uauguacuauuuuaacaaggguu

SEQ ID NO: 414986 - RNA, 24 nt, Artificial Sequence
  Synthetic
uuauguacuauuuuaacaaggguu

SEQ ID NO: 414987 - RNA, 18 nt, Artificial Sequence
  Synthetic
acuggaaaacuaaggguu

SEQ ID NO: 414988 - RNA, 19 nt, Artificial Sequence
  Synthetic
uacuggaaaacuaaggguu

SEQ ID NO: 414989 - RNA, 20 nt, Artificial Sequence
  Synthetic
guacuggaaaacuaaggguu

SEQ ID NO: 414990 - RNA, 21 nt, Artificial Sequence
  Synthetic
uguacuggaaaacuaaggguu

SEQ ID NO: 414991 - RNA, 22 nt, Artificial Sequence
  Synthetic
guguacuggaaaacuaaggguu

SEQ ID NO: 414992 - RNA, 23 nt, Artificial Sequence
  Synthetic
uguguacuggaaaacuaaggguu

SEQ ID NO: 414993 - RNA, 24 nt, Artificial Sequence
  Synthetic
cuguguacuggaaaacuaaggguu

SEQ ID NO: 414994 - RNA, 18 nt, Artificial Sequence
  Synthetic
auccagaaacacaggguu

SEQ ID NO: 414995 - RNA, 19 nt, Artificial Sequence
  Synthetic
aauccagaaacacaggguu

SEQ ID NO: 414996 - RNA, 20 nt, Artificial Sequence
  Synthetic
aaauccagaaacacaggguu

SEQ ID NO: 414997 - RNA, 21 nt, Artificial Sequence
  Synthetic
aaaauccagaaacacaggguu

SEQ ID NO: 414998 - RNA, 22 nt, Artificial Sequence
  Synthetic
gaaaauccagaaacacaggguu

SEQ ID NO: 414999 - RNA, 23 nt, Artificial Sequence
  Synthetic
ugaaaauccagaaacacaggguu

SEQ ID NO: 415000 - RNA, 24 nt, Artificial Sequence
  Synthetic
uugaaaauccagaaacacaggguu

SEQ ID NO: 415001 - RNA, 18 nt, Artificial Sequence
  Synthetic
ucuguuggaaucaggguu

SEQ ID NO: 415002 - RNA, 19 nt, Artificial Sequence
  Synthetic
aucuguuggaaucaggguu

SEQ ID NO: 415003 - RNA, 20 nt, Artificial Sequence
  Synthetic
aaucuguuggaaucaggguu

SEQ ID NO: 415004 - RNA, 21 nt, Artificial Sequence
  Synthetic
caaucuguuggaaucaggguu

SEQ ID NO: 415005 - RNA, 22 nt, Artificial Sequence
  Synthetic
gcaaucuguuggaaucaggguu

SEQ ID NO: 415006 - RNA, 23 nt, Artificial Sequence
  Synthetic
ggcaaucuguuggaaucaggguu

SEQ ID NO: 415007 - RNA, 24 nt, Artificial Sequence
  Synthetic
uggcaaucuguuggaaucaggguu

SEQ ID NO: 415008 - RNA, 18 nt, Artificial Sequence
  Synthetic
caaauugugaucaggguu

SEQ ID NO: 415009 - RNA, 19 nt, Artificial Sequence
  Synthetic
gcaaauugugaucaggguu

SEQ ID NO: 415010 - RNA, 20 nt, Artificial Sequence
  Synthetic
ugcaaauugugaucaggguu

SEQ ID NO: 415011 - RNA, 21 nt, Artificial Sequence
  Synthetic
uugcaaauugugaucaggguu

SEQ ID NO: 415012 - RNA, 22 nt, Artificial Sequence
  Synthetic
cuugcaaauugugaucaggguu

SEQ ID NO: 415013 - RNA, 23 nt, Artificial Sequence
  Synthetic
acuugcaaauugugaucaggguu

SEQ ID NO: 415014 - RNA, 24 nt, Artificial Sequence
  Synthetic
uacuugcaaauugugaucaggguu

SEQ ID NO: 415015 - RNA, 18 nt, Artificial Sequence
  Synthetic
agacagcagaagaggguu

SEQ ID NO: 415016 - RNA, 19 nt, Artificial Sequence
  Synthetic
aagacagcagaagaggguu

SEQ ID NO: 415017 - RNA, 20 nt, Artificial Sequence
  Synthetic
gaagacagcagaagaggguu

SEQ ID NO: 415018 - RNA, 21 nt, Artificial Sequence
  Synthetic
ugaagacagcagaagaggguu

SEQ ID NO: 415019 - RNA, 22 nt, Artificial Sequence
  Synthetic
gugaagacagcagaagaggguu

SEQ ID NO: 415020 - RNA, 23 nt, Artificial Sequence
  Synthetic
ugugaagacagcagaagaggguu

SEQ ID NO: 415021 - RNA, 24 nt, Artificial Sequence
  Synthetic
augugaagacagcagaagaggguu

SEQ ID NO: 415022 - RNA, 18 nt, Artificial Sequence
  Synthetic
cggcuagaagagaggguu

SEQ ID NO: 415023 - RNA, 19 nt, Artificial Sequence
  Synthetic
acggcuagaagagaggguu

SEQ ID NO: 415024 - RNA, 20 nt, Artificial Sequence
  Synthetic
aacggcuagaagagaggguu

SEQ ID NO: 415025 - RNA, 21 nt, Artificial Sequence
  Synthetic
aaacggcuagaagagaggguu

SEQ ID NO: 415026 - RNA, 22 nt, Artificial Sequence
  Synthetic
aaaacggcuagaagagaggguu

SEQ ID NO: 415027 - RNA, 23 nt, Artificial Sequence
  Synthetic
caaaacggcuagaagagaggguu

SEQ ID NO: 415028 - RNA, 24 nt, Artificial Sequence
  Synthetic
ucaaaacggcuagaagagaggguu

SEQ ID NO: 415029 - RNA, 18 nt, Artificial Sequence
  Synthetic
aguuugaagcugaggguu

SEQ ID NO: 415030 - RNA, 19 nt, Artificial Sequence
  Synthetic
caguuugaagcugaggguu

SEQ ID NO: 415031 - RNA, 20 nt, Artificial Sequence
  Synthetic
acaguuugaagcugaggguu

SEQ ID NO: 415032 - RNA, 21 nt, Artificial Sequence
  Synthetic
aacaguuugaagcugaggguu

SEQ ID NO: 415033 - RNA, 22 nt, Artificial Sequence
  Synthetic
aaacaguuugaagcugaggguu

SEQ ID NO: 415034 - RNA, 23 nt, Artificial Sequence
  Synthetic
uaaacaguuugaagcugaggguu

SEQ ID NO: 415035 - RNA, 24 nt, Artificial Sequence
  Synthetic
cuaaacaguuugaagcugaggguu

SEQ ID NO: 415036 - RNA, 18 nt, Artificial Sequence
  Synthetic
ucaaacaaugugaggguu

SEQ ID NO: 415037 - RNA, 19 nt, Artificial Sequence
  Synthetic
cucaaacaaugugaggguu

SEQ ID NO: 415038 - RNA, 20 nt, Artificial Sequence
  Synthetic
ccucaaacaaugugaggguu

SEQ ID NO: 415039 - RNA, 21 nt, Artificial Sequence
  Synthetic
cccucaaacaaugugaggguu

SEQ ID NO: 415040 - RNA, 22 nt, Artificial Sequence
  Synthetic
acccucaaacaaugugaggguu

SEQ ID NO: 415041 - RNA, 23 nt, Artificial Sequence
  Synthetic
gacccucaaacaaugugaggguu

SEQ ID NO: 415042 - RNA, 24 nt, Artificial Sequence
  Synthetic
ugacccucaaacaaugugaggguu

SEQ ID NO: 415043 - RNA, 18 nt, Artificial Sequence
  Synthetic
ucaaacagugugaggguu

SEQ ID NO: 415044 - RNA, 19 nt, Artificial Sequence
  Synthetic
cucaaacagugugaggguu

SEQ ID NO: 415045 - RNA, 20 nt, Artificial Sequence
  Synthetic
ccucaaacagugugaggguu

SEQ ID NO: 415046 - RNA, 21 nt, Artificial Sequence
  Synthetic
cccucaaacagugugaggguu

SEQ ID NO: 415047 - RNA, 22 nt, Artificial Sequence
  Synthetic
acccucaaacagugugaggguu

SEQ ID NO: 415048 - RNA, 23 nt, Artificial Sequence
  Synthetic
gacccucaaacagugugaggguu

SEQ ID NO: 415049 - RNA, 24 nt, Artificial Sequence
  Synthetic
ugacccucaaacagugugaggguu

SEQ ID NO: 415050 - RNA, 18 nt, Artificial Sequence
  Synthetic
cuugggaaguugaggguu

SEQ ID NO: 415051 - RNA, 19 nt, Artificial Sequence
  Synthetic
acuugggaaguugaggguu

SEQ ID NO: 415052 - RNA, 20 nt, Artificial Sequence
  Synthetic
uacuugggaaguugaggguu

SEQ ID NO: 415053 - RNA, 21 nt, Artificial Sequence
  Synthetic
uuacuugggaaguugaggguu

SEQ ID NO: 415054 - RNA, 22 nt, Artificial Sequence
  Synthetic
auuacuugggaaguugaggguu

SEQ ID NO: 415055 - RNA, 23 nt, Artificial Sequence
  Synthetic
uauuacuugggaaguugaggguu

SEQ ID NO: 415056 - RNA, 24 nt, Artificial Sequence
  Synthetic
guauuacuugggaaguugaggguu

SEQ ID NO: 415057 - RNA, 18 nt, Artificial Sequence
  Synthetic
gcacuggauuauaggguu

SEQ ID NO: 415058 - RNA, 19 nt, Artificial Sequence
  Synthetic
ggcacuggauuauaggguu

SEQ ID NO: 415059 - RNA, 20 nt, Artificial Sequence
  Synthetic
uggcacuggauuauaggguu

SEQ ID NO: 415060 - RNA, 21 nt, Artificial Sequence
  Synthetic
uuggcacuggauuauaggguu

SEQ ID NO: 415061 - RNA, 22 nt, Artificial Sequence
  Synthetic
guuggcacuggauuauaggguu

SEQ ID NO: 415062 - RNA, 23 nt, Artificial Sequence
  Synthetic
aguuggcacuggauuauaggguu

SEQ ID NO: 415063 - RNA, 24 nt, Artificial Sequence
  Synthetic
caguuggcacuggauuauaggguu

SEQ ID NO: 415064 - RNA, 18 nt, Artificial Sequence
  Synthetic
uucccaugcacuaggguu

SEQ ID NO: 415065 - RNA, 19 nt, Artificial Sequence
  Synthetic
guucccaugcacuaggguu

SEQ ID NO: 415066 - RNA, 20 nt, Artificial Sequence
  Synthetic
uguucccaugcacuaggguu

SEQ ID NO: 415067 - RNA, 21 nt, Artificial Sequence
  Synthetic
uuguucccaugcacuaggguu

SEQ ID NO: 415068 - RNA, 22 nt, Artificial Sequence
  Synthetic
auuguucccaugcacuaggguu

SEQ ID NO: 415069 - RNA, 23 nt, Artificial Sequence
  Synthetic
uauuguucccaugcacuaggguu

SEQ ID NO: 415070 - RNA, 24 nt, Artificial Sequence
  Synthetic
auauuguucccaugcacuaggguu

SEQ ID NO: 415071 - RNA, 18 nt, Artificial Sequence
  Synthetic
auggaguauuuuaggguu

SEQ ID NO: 415072 - RNA, 19 nt, Artificial Sequence
  Synthetic
uauggaguauuuuaggguu

SEQ ID NO: 415073 - RNA, 20 nt, Artificial Sequence
  Synthetic
cuauggaguauuuuaggguu

SEQ ID NO: 415074 - RNA, 21 nt, Artificial Sequence
  Synthetic
acuauggaguauuuuaggguu

SEQ ID NO: 415075 - RNA, 22 nt, Artificial Sequence
  Synthetic
aacuauggaguauuuuaggguu

SEQ ID NO: 415076 - RNA, 23 nt, Artificial Sequence
  Synthetic
aaacuauggaguauuuuaggguu

SEQ ID NO: 415077 - RNA, 24 nt, Artificial Sequence
  Synthetic
uaaacuauggaguauuuuaggguu

SEQ ID NO: 415078 - RNA, 18 nt, Artificial Sequence
  Synthetic
cauaccagucgagggguu

SEQ ID NO: 415079 - RNA, 19 nt, Artificial Sequence
  Synthetic
acauaccagucgagggguu

SEQ ID NO: 415080 - RNA, 20 nt, Artificial Sequence
  Synthetic
gacauaccagucgagggguu

SEQ ID NO: 415081 - RNA, 21 nt, Artificial Sequence
  Synthetic
agacauaccagucgagggguu

SEQ ID NO: 415082 - RNA, 22 nt, Artificial Sequence
  Synthetic
aagacauaccagucgagggguu

SEQ ID NO: 415083 - RNA, 23 nt, Artificial Sequence
  Synthetic
gaagacauaccagucgagggguu

SEQ ID NO: 415084 - RNA, 24 nt, Artificial Sequence
  Synthetic
agaagacauaccagucgagggguu

SEQ ID NO: 415085 - RNA, 18 nt, Artificial Sequence
  Synthetic
uauuagaagguggggguu

SEQ ID NO: 415086 - RNA, 19 nt, Artificial Sequence
  Synthetic
guauuagaagguggggguu

SEQ ID NO: 415087 - RNA, 20 nt, Artificial Sequence
  Synthetic
gguauuagaagguggggguu

SEQ ID NO: 415088 - RNA, 21 nt, Artificial Sequence
  Synthetic
ugguauuagaagguggggguu

SEQ ID NO: 415089 - RNA, 22 nt, Artificial Sequence
  Synthetic
augguauuagaagguggggguu

SEQ ID NO: 415090 - RNA, 23 nt, Artificial Sequence
  Synthetic
gaugguauuagaagguggggguu

SEQ ID NO: 415091 - RNA, 24 nt, Artificial Sequence
  Synthetic
ugaugguauuagaagguggggguu

SEQ ID NO: 415092 - RNA, 18 nt, Artificial Sequence
  Synthetic
ccaggacguguggggguu

SEQ ID NO: 415093 - RNA, 19 nt, Artificial Sequence
  Synthetic
cccaggacguguggggguu

SEQ ID NO: 415094 - RNA, 20 nt, Artificial Sequence
  Synthetic
ucccaggacguguggggguu

SEQ ID NO: 415095 - RNA, 21 nt, Artificial Sequence
  Synthetic
cucccaggacguguggggguu

SEQ ID NO: 415096 - RNA, 22 nt, Artificial Sequence
  Synthetic
ccucccaggacguguggggguu

SEQ ID NO: 415097 - RNA, 23 nt, Artificial Sequence
  Synthetic
cccucccaggacguguggggguu

SEQ ID NO: 415098 - RNA, 24 nt, Artificial Sequence
  Synthetic
ucccucccaggacguguggggguu

SEQ ID NO: 415099 - RNA, 18 nt, Artificial Sequence
  Synthetic
ggcuaugguuuggggguu

SEQ ID NO: 415100 - RNA, 19 nt, Artificial Sequence
  Synthetic
uggcuaugguuuggggguu

SEQ ID NO: 415101 - RNA, 20 nt, Artificial Sequence
  Synthetic
uuggcuaugguuuggggguu

SEQ ID NO: 415102 - RNA, 21 nt, Artificial Sequence
  Synthetic
guuggcuaugguuuggggguu

SEQ ID NO: 415103 - RNA, 22 nt, Artificial Sequence
  Synthetic
uguuggcuaugguuuggggguu

SEQ ID NO: 415104 - RNA, 23 nt, Artificial Sequence
  Synthetic
uuguuggcuaugguuuggggguu

SEQ ID NO: 415105 - RNA, 24 nt, Artificial Sequence
  Synthetic
cuuguuggcuaugguuuggggguu

SEQ ID NO: 415106 - RNA, 18 nt, Artificial Sequence
  Synthetic
caacauaugaaugggguu

SEQ ID NO: 415107 - RNA, 19 nt, Artificial Sequence
  Synthetic
ucaacauaugaaugggguu

SEQ ID NO: 415108 - RNA, 20 nt, Artificial Sequence
  Synthetic
uucaacauaugaaugggguu

SEQ ID NO: 415109 - RNA, 21 nt, Artificial Sequence
  Synthetic
cuucaacauaugaaugggguu

SEQ ID NO: 415110 - RNA, 22 nt, Artificial Sequence
  Synthetic
acuucaacauaugaaugggguu

SEQ ID NO: 415111 - RNA, 23 nt, Artificial Sequence
  Synthetic
aacuucaacauaugaaugggguu

SEQ ID NO: 415112 - RNA, 24 nt, Artificial Sequence
  Synthetic
aaacuucaacauaugaaugggguu

SEQ ID NO: 415113 - RNA, 18 nt, Artificial Sequence
  Synthetic
caaaaaguacaugggguu

SEQ ID NO: 415114 - RNA, 19 nt, Artificial Sequence
  Synthetic
ucaaaaaguacaugggguu

SEQ ID NO: 415115 - RNA, 20 nt, Artificial Sequence
  Synthetic
uucaaaaaguacaugggguu

SEQ ID NO: 415116 - RNA, 21 nt, Artificial Sequence
  Synthetic
uuucaaaaaguacaugggguu

SEQ ID NO: 415117 - RNA, 22 nt, Artificial Sequence
  Synthetic
auuucaaaaaguacaugggguu

SEQ ID NO: 415118 - RNA, 23 nt, Artificial Sequence
  Synthetic
uauuucaaaaaguacaugggguu

SEQ ID NO: 415119 - RNA, 24 nt, Artificial Sequence
  Synthetic
auauuucaaaaaguacaugggguu

SEQ ID NO: 415120 - RNA, 18 nt, Artificial Sequence
  Synthetic
guuauuggaggugggguu

SEQ ID NO: 415121 - RNA, 19 nt, Artificial Sequence
  Synthetic
gguuauuggaggugggguu

SEQ ID NO: 415122 - RNA, 20 nt, Artificial Sequence
  Synthetic
ugguuauuggaggugggguu

SEQ ID NO: 415123 - RNA, 21 nt, Artificial Sequence
  Synthetic
gugguuauuggaggugggguu

SEQ ID NO: 415124 - RNA, 22 nt, Artificial Sequence
  Synthetic
ggugguuauuggaggugggguu

SEQ ID NO: 415125 - RNA, 23 nt, Artificial Sequence
  Synthetic
uggugguuauuggaggugggguu

SEQ ID NO: 415126 - RNA, 24 nt, Artificial Sequence
  Synthetic
guggugguuauuggaggugggguu

SEQ ID NO: 415127 - RNA, 18 nt, Artificial Sequence
  Synthetic
gcacacaguggugggguu

SEQ ID NO: 415128 - RNA, 19 nt, Artificial Sequence
  Synthetic
cgcacacaguggugggguu

SEQ ID NO: 415129 - RNA, 20 nt, Artificial Sequence
  Synthetic
ccgcacacaguggugggguu

SEQ ID NO: 415130 - RNA, 21 nt, Artificial Sequence
  Synthetic
gccgcacacaguggugggguu

SEQ ID NO: 415131 - RNA, 22 nt, Artificial Sequence
  Synthetic
ugccgcacacaguggugggguu

SEQ ID NO: 415132 - RNA, 23 nt, Artificial Sequence
  Synthetic
augccgcacacaguggugggguu

SEQ ID NO: 415133 - RNA, 24 nt, Artificial Sequence
  Synthetic
gaugccgcacacaguggugggguu

SEQ ID NO: 415134 - RNA, 18 nt, Artificial Sequence
  Synthetic
auguaugugugugggguu

SEQ ID NO: 415135 - RNA, 19 nt, Artificial Sequence
  Synthetic
aauguaugugugugggguu

SEQ ID NO: 415136 - RNA, 20 nt, Artificial Sequence
  Synthetic
aaauguaugugugugggguu

SEQ ID NO: 415137 - RNA, 21 nt, Artificial Sequence
  Synthetic
aaaauguaugugugugggguu

SEQ ID NO: 415138 - RNA, 22 nt, Artificial Sequence
  Synthetic
aaaaauguaugugugugggguu

SEQ ID NO: 415139 - RNA, 23 nt, Artificial Sequence
  Synthetic
aaaaaauguaugugugugggguu

SEQ ID NO: 415140 - RNA, 24 nt, Artificial Sequence
  Synthetic
aaaaaaauguaugugugugggguu

SEQ ID NO: 415141 - RNA, 18 nt, Artificial Sequence
  Synthetic
aaauuugaguuugggguu

SEQ ID NO: 415142 - RNA, 19 nt, Artificial Sequence
  Synthetic
gaaauuugaguuugggguu

SEQ ID NO: 415143 - RNA, 20 nt, Artificial Sequence
  Synthetic
ggaaauuugaguuugggguu

SEQ ID NO: 415144 - RNA, 21 nt, Artificial Sequence
  Synthetic
uggaaauuugaguuugggguu

SEQ ID NO: 415145 - RNA, 22 nt, Artificial Sequence
  Synthetic
auggaaauuugaguuugggguu

SEQ ID NO: 415146 - RNA, 23 nt, Artificial Sequence
  Synthetic
cauggaaauuugaguuugggguu

SEQ ID NO: 415147 - RNA, 24 nt, Artificial Sequence
  Synthetic
ccauggaaauuugaguuugggguu

SEQ ID NO: 415148 - RNA, 18 nt, Artificial Sequence
  Synthetic
augugccaggcauggguu

SEQ ID NO: 415149 - RNA, 19 nt, Artificial Sequence
  Synthetic
uaugugccaggcauggguu

SEQ ID NO: 415150 - RNA, 20 nt, Artificial Sequence
  Synthetic
cuaugugccaggcauggguu

SEQ ID NO: 415151 - RNA, 21 nt, Artificial Sequence
  Synthetic
ccuaugugccaggcauggguu

SEQ ID NO: 415152 - RNA, 22 nt, Artificial Sequence
  Synthetic
accuaugugccaggcauggguu

SEQ ID NO: 415153 - RNA, 23 nt, Artificial Sequence
  Synthetic
caccuaugugccaggcauggguu

SEQ ID NO: 415154 - RNA, 24 nt, Artificial Sequence
  Synthetic
acaccuaugugccaggcauggguu

SEQ ID NO: 415155 - RNA, 18 nt, Artificial Sequence
  Synthetic
auaacuaucucauggguu

SEQ ID NO: 415156 - RNA, 19 nt, Artificial Sequence
  Synthetic
uauaacuaucucauggguu

SEQ ID NO: 415157 - RNA, 20 nt, Artificial Sequence
  Synthetic
uuauaacuaucucauggguu

SEQ ID NO: 415158 - RNA, 21 nt, Artificial Sequence
  Synthetic
cuuauaacuaucucauggguu

SEQ ID NO: 415159 - RNA, 22 nt, Artificial Sequence
  Synthetic
acuuauaacuaucucauggguu

SEQ ID NO: 415160 - RNA, 23 nt, Artificial Sequence
  Synthetic
cacuuauaacuaucucauggguu

SEQ ID NO: 415161 - RNA, 24 nt, Artificial Sequence
  Synthetic
ucacuuauaacuaucucauggguu

SEQ ID NO: 415162 - RNA, 18 nt, Artificial Sequence
  Synthetic
gagaaagucagcuggguu

SEQ ID NO: 415163 - RNA, 19 nt, Artificial Sequence
  Synthetic
ggagaaagucagcuggguu

SEQ ID NO: 415164 - RNA, 20 nt, Artificial Sequence
  Synthetic
uggagaaagucagcuggguu

SEQ ID NO: 415165 - RNA, 21 nt, Artificial Sequence
  Synthetic
auggagaaagucagcuggguu

SEQ ID NO: 415166 - RNA, 22 nt, Artificial Sequence
  Synthetic
aauggagaaagucagcuggguu

SEQ ID NO: 415167 - RNA, 23 nt, Artificial Sequence
  Synthetic
aaauggagaaagucagcuggguu

SEQ ID NO: 415168 - RNA, 24 nt, Artificial Sequence
  Synthetic
gaaauggagaaagucagcuggguu

SEQ ID NO: 415169 - RNA, 18 nt, Artificial Sequence
  Synthetic
ugugggccccucuggguu

SEQ ID NO: 415170 - RNA, 19 nt, Artificial Sequence
  Synthetic
cugugggccccucuggguu

SEQ ID NO: 415171 - RNA, 20 nt, Artificial Sequence
  Synthetic
acugugggccccucuggguu

SEQ ID NO: 415172 - RNA, 21 nt, Artificial Sequence
  Synthetic
gacugugggccccucuggguu

SEQ ID NO: 415173 - RNA, 22 nt, Artificial Sequence
  Synthetic
ugacugugggccccucuggguu

SEQ ID NO: 415174 - RNA, 23 nt, Artificial Sequence
  Synthetic
augacugugggccccucuggguu

SEQ ID NO: 415175 - RNA, 24 nt, Artificial Sequence
  Synthetic
aaugacugugggccccucuggguu

SEQ ID NO: 415176 - RNA, 18 nt, Artificial Sequence
  Synthetic
cugauagaaauguggguu

SEQ ID NO: 415177 - RNA, 19 nt, Artificial Sequence
  Synthetic
acugauagaaauguggguu

SEQ ID NO: 415178 - RNA, 20 nt, Artificial Sequence
  Synthetic
cacugauagaaauguggguu

SEQ ID NO: 415179 - RNA, 21 nt, Artificial Sequence
  Synthetic
ccacugauagaaauguggguu

SEQ ID NO: 415180 - RNA, 22 nt, Artificial Sequence
  Synthetic
accacugauagaaauguggguu

SEQ ID NO: 415181 - RNA, 23 nt, Artificial Sequence
  Synthetic
aaccacugauagaaauguggguu

SEQ ID NO: 415182 - RNA, 24 nt, Artificial Sequence
  Synthetic
gaaccacugauagaaauguggguu

SEQ ID NO: 415183 - RNA, 18 nt, Artificial Sequence
  Synthetic
ucuaauacaauguggguu

SEQ ID NO: 415184 - RNA, 19 nt, Artificial Sequence
  Synthetic
gucuaauacaauguggguu

SEQ ID NO: 415185 - RNA, 20 nt, Artificial Sequence
  Synthetic
ugucuaauacaauguggguu

SEQ ID NO: 415186 - RNA, 21 nt, Artificial Sequence
  Synthetic
cugucuaauacaauguggguu

SEQ ID NO: 415187 - RNA, 22 nt, Artificial Sequence
  Synthetic
ccugucuaauacaauguggguu

SEQ ID NO: 415188 - RNA, 23 nt, Artificial Sequence
  Synthetic
cccugucuaauacaauguggguu

SEQ ID NO: 415189 - RNA, 24 nt, Artificial Sequence
  Synthetic
gcccugucuaauacaauguggguu

SEQ ID NO: 415190 - RNA, 18 nt, Artificial Sequence
  Synthetic
uaaaguugguuguggguu

SEQ ID NO: 415191 - RNA, 19 nt, Artificial Sequence
  Synthetic
auaaaguugguuguggguu

SEQ ID NO: 415192 - RNA, 20 nt, Artificial Sequence
  Synthetic
gauaaaguugguuguggguu

SEQ ID NO: 415193 - RNA, 21 nt, Artificial Sequence
  Synthetic
ugauaaaguugguuguggguu

SEQ ID NO: 415194 - RNA, 22 nt, Artificial Sequence
  Synthetic
augauaaaguugguuguggguu

SEQ ID NO: 415195 - RNA, 23 nt, Artificial Sequence
  Synthetic
aaugauaaaguugguuguggguu

SEQ ID NO: 415196 - RNA, 24 nt, Artificial Sequence
  Synthetic
aaaugauaaaguugguuguggguu

SEQ ID NO: 415197 - RNA, 18 nt, Artificial Sequence
  Synthetic
auagcagcuuuguggguu

SEQ ID NO: 415198 - RNA, 19 nt, Artificial Sequence
  Synthetic
aauagcagcuuuguggguu

SEQ ID NO: 415199 - RNA, 20 nt, Artificial Sequence
  Synthetic
caauagcagcuuuguggguu

SEQ ID NO: 415200 - RNA, 21 nt, Artificial Sequence
  Synthetic
acaauagcagcuuuguggguu

SEQ ID NO: 415201 - RNA, 22 nt, Artificial Sequence
  Synthetic
uacaauagcagcuuuguggguu

SEQ ID NO: 415202 - RNA, 23 nt, Artificial Sequence
  Synthetic
auacaauagcagcuuuguggguu

SEQ ID NO: 415203 - RNA, 24 nt, Artificial Sequence
  Synthetic
uauacaauagcagcuuuguggguu

SEQ ID NO: 415204 - RNA, 18 nt, Artificial Sequence
  Synthetic
ugucuacaggguuggguu

SEQ ID NO: 415205 - RNA, 19 nt, Artificial Sequence
  Synthetic
uugucuacaggguuggguu

SEQ ID NO: 415206 - RNA, 20 nt, Artificial Sequence
  Synthetic
auugucuacaggguuggguu

SEQ ID NO: 415207 - RNA, 21 nt, Artificial Sequence
  Synthetic
gauugucuacaggguuggguu

SEQ ID NO: 415208 - RNA, 22 nt, Artificial Sequence
  Synthetic
agauugucuacaggguuggguu

SEQ ID NO: 415209 - RNA, 23 nt, Artificial Sequence
  Synthetic
aagauugucuacaggguuggguu

SEQ ID NO: 415210 - RNA, 24 nt, Artificial Sequence
  Synthetic
uaagauugucuacaggguuggguu

SEQ ID NO: 415211 - RNA, 18 nt, Artificial Sequence
  Synthetic
aaugucaauauuuggguu

SEQ ID NO: 415212 - RNA, 19 nt, Artificial Sequence
  Synthetic
uaaugucaauauuuggguu

SEQ ID NO: 415213 - RNA, 20 nt, Artificial Sequence
  Synthetic
auaaugucaauauuuggguu

SEQ ID NO: 415214 - RNA, 21 nt, Artificial Sequence
  Synthetic
aauaaugucaauauuuggguu

SEQ ID NO: 415215 - RNA, 22 nt, Artificial Sequence
  Synthetic
uaauaaugucaauauuuggguu

SEQ ID NO: 415216 - RNA, 23 nt, Artificial Sequence
  Synthetic
uuaauaaugucaauauuuggguu

SEQ ID NO: 415217 - RNA, 24 nt, Artificial Sequence
  Synthetic
auuaauaaugucaauauuuggguu

SEQ ID NO: 415218 - RNA, 18 nt, Artificial Sequence
  Synthetic
cuuuaucaaagaaugguu

SEQ ID NO: 415219 - RNA, 19 nt, Artificial Sequence
  Synthetic
gcuuuaucaaagaaugguu

SEQ ID NO: 415220 - RNA, 20 nt, Artificial Sequence
  Synthetic
ugcuuuaucaaagaaugguu

SEQ ID NO: 415221 - RNA, 21 nt, Artificial Sequence
  Synthetic
augcuuuaucaaagaaugguu

SEQ ID NO: 415222 - RNA, 22 nt, Artificial Sequence
  Synthetic
aaugcuuuaucaaagaaugguu

SEQ ID NO: 415223 - RNA, 23 nt, Artificial Sequence
  Synthetic
aaaugcuuuaucaaagaaugguu

SEQ ID NO: 415224 - RNA, 24 nt, Artificial Sequence
  Synthetic
uaaaugcuuuaucaaagaaugguu

SEQ ID NO: 415225 - RNA, 18 nt, Artificial Sequence
  Synthetic
gaaguguggagaaugguu

SEQ ID NO: 415226 - RNA, 19 nt, Artificial Sequence
  Synthetic
ugaaguguggagaaugguu

SEQ ID NO: 415227 - RNA, 20 nt, Artificial Sequence
  Synthetic
cugaaguguggagaaugguu

SEQ ID NO: 415228 - RNA, 21 nt, Artificial Sequence
  Synthetic
gcugaaguguggagaaugguu

SEQ ID NO: 415229 - RNA, 22 nt, Artificial Sequence
  Synthetic
cgcugaaguguggagaaugguu

SEQ ID NO: 415230 - RNA, 23 nt, Artificial Sequence
  Synthetic
ucgcugaaguguggagaaugguu

SEQ ID NO: 415231 - RNA, 24 nt, Artificial Sequence
  Synthetic
uucgcugaaguguggagaaugguu

SEQ ID NO: 415232 - RNA, 18 nt, Artificial Sequence
  Synthetic
agccaaaacguaaugguu

SEQ ID NO: 415233 - RNA, 19 nt, Artificial Sequence
  Synthetic
aagccaaaacguaaugguu

SEQ ID NO: 415234 - RNA, 20 nt, Artificial Sequence
  Synthetic
aaagccaaaacguaaugguu

SEQ ID NO: 415235 - RNA, 21 nt, Artificial Sequence
  Synthetic
aaaagccaaaacguaaugguu

SEQ ID NO: 415236 - RNA, 22 nt, Artificial Sequence
  Synthetic
caaaagccaaaacguaaugguu

SEQ ID NO: 415237 - RNA, 23 nt, Artificial Sequence
  Synthetic
gcaaaagccaaaacguaaugguu

SEQ ID NO: 415238 - RNA, 24 nt, Artificial Sequence
  Synthetic
ggcaaaagccaaaacguaaugguu

SEQ ID NO: 415239 - RNA, 18 nt, Artificial Sequence
  Synthetic
guggucauccucaugguu

SEQ ID NO: 415240 - RNA, 19 nt, Artificial Sequence
  Synthetic
cguggucauccucaugguu

SEQ ID NO: 415241 - RNA, 20 nt, Artificial Sequence
  Synthetic
ucguggucauccucaugguu

SEQ ID NO: 415242 - RNA, 21 nt, Artificial Sequence
  Synthetic
aucguggucauccucaugguu

SEQ ID NO: 415243 - RNA, 22 nt, Artificial Sequence
  Synthetic
gaucguggucauccucaugguu

SEQ ID NO: 415244 - RNA, 23 nt, Artificial Sequence
  Synthetic
ugaucguggucauccucaugguu

SEQ ID NO: 415245 - RNA, 24 nt, Artificial Sequence
  Synthetic
augaucguggucauccucaugguu

SEQ ID NO: 415246 - RNA, 18 nt, Artificial Sequence
  Synthetic
guuaaauucaagaugguu

SEQ ID NO: 415247 - RNA, 19 nt, Artificial Sequence
  Synthetic
aguuaaauucaagaugguu

SEQ ID NO: 415248 - RNA, 20 nt, Artificial Sequence
  Synthetic
uaguuaaauucaagaugguu

SEQ ID NO: 415249 - RNA, 21 nt, Artificial Sequence
  Synthetic
guaguuaaauucaagaugguu

SEQ ID NO: 415250 - RNA, 22 nt, Artificial Sequence
  Synthetic
aguaguuaaauucaagaugguu

SEQ ID NO: 415251 - RNA, 23 nt, Artificial Sequence
  Synthetic
aaguaguuaaauucaagaugguu

SEQ ID NO: 415252 - RNA, 24 nt, Artificial Sequence
  Synthetic
uaaguaguuaaauucaagaugguu

SEQ ID NO: 415253 - RNA, 18 nt, Artificial Sequence
  Synthetic
gaagacaaccagaugguu

SEQ ID NO: 415254 - RNA, 19 nt, Artificial Sequence
  Synthetic
ggaagacaaccagaugguu

SEQ ID NO: 415255 - RNA, 20 nt, Artificial Sequence
  Synthetic
aggaagacaaccagaugguu

SEQ ID NO: 415256 - RNA, 21 nt, Artificial Sequence
  Synthetic
aaggaagacaaccagaugguu

SEQ ID NO: 415257 - RNA, 22 nt, Artificial Sequence
  Synthetic
gaaggaagacaaccagaugguu

SEQ ID NO: 415258 - RNA, 23 nt, Artificial Sequence
  Synthetic
ugaaggaagacaaccagaugguu

SEQ ID NO: 415259 - RNA, 24 nt, Artificial Sequence
  Synthetic
uugaaggaagacaaccagaugguu

SEQ ID NO: 415260 - RNA, 18 nt, Artificial Sequence
  Synthetic
acuuaaacccauaugguu

SEQ ID NO: 415261 - RNA, 19 nt, Artificial Sequence
  Synthetic
cacuuaaacccauaugguu

SEQ ID NO: 415262 - RNA, 20 nt, Artificial Sequence
  Synthetic
ccacuuaaacccauaugguu

SEQ ID NO: 415263 - RNA, 21 nt, Artificial Sequence
  Synthetic
gccacuuaaacccauaugguu

SEQ ID NO: 415264 - RNA, 22 nt, Artificial Sequence
  Synthetic
agccacuuaaacccauaugguu

SEQ ID NO: 415265 - RNA, 23 nt, Artificial Sequence
  Synthetic
aagccacuuaaacccauaugguu

SEQ ID NO: 415266 - RNA, 24 nt, Artificial Sequence
  Synthetic
uaagccacuuaaacccauaugguu

SEQ ID NO: 415267 - RNA, 18 nt, Artificial Sequence
  Synthetic
cucuuguuggcuaugguu

SEQ ID NO: 415268 - RNA, 19 nt, Artificial Sequence
  Synthetic
ucucuuguuggcuaugguu

SEQ ID NO: 415269 - RNA, 20 nt, Artificial Sequence
  Synthetic
aucucuuguuggcuaugguu

SEQ ID NO: 415270 - RNA, 21 nt, Artificial Sequence
  Synthetic
gaucucuuguuggcuaugguu

SEQ ID NO: 415271 - RNA, 22 nt, Artificial Sequence
  Synthetic
ugaucucuuguuggcuaugguu

SEQ ID NO: 415272 - RNA, 23 nt, Artificial Sequence
  Synthetic
uugaucucuuguuggcuaugguu

SEQ ID NO: 415273 - RNA, 24 nt, Artificial Sequence
  Synthetic
uuugaucucuuguuggcuaugguu

SEQ ID NO: 415274 - RNA, 18 nt, Artificial Sequence
  Synthetic
uguaggggagguaugguu

SEQ ID NO: 415275 - RNA, 19 nt, Artificial Sequence
  Synthetic
auguaggggagguaugguu

SEQ ID NO: 415276 - RNA, 20 nt, Artificial Sequence
  Synthetic
cauguaggggagguaugguu

SEQ ID NO: 415277 - RNA, 21 nt, Artificial Sequence
  Synthetic
acauguaggggagguaugguu

SEQ ID NO: 415278 - RNA, 22 nt, Artificial Sequence
  Synthetic
cacauguaggggagguaugguu

SEQ ID NO: 415279 - RNA, 23 nt, Artificial Sequence
  Synthetic
acacauguaggggagguaugguu

SEQ ID NO: 415280 - RNA, 24 nt, Artificial Sequence
  Synthetic
cacacauguaggggagguaugguu

SEQ ID NO: 415281 - RNA, 18 nt, Artificial Sequence
  Synthetic
uuuauccaccuuaugguu

SEQ ID NO: 415282 - RNA, 19 nt, Artificial Sequence
  Synthetic
auuuauccaccuuaugguu

SEQ ID NO: 415283 - RNA, 20 nt, Artificial Sequence
  Synthetic
cauuuauccaccuuaugguu

SEQ ID NO: 415284 - RNA, 21 nt, Artificial Sequence
  Synthetic
ucauuuauccaccuuaugguu

SEQ ID NO: 415285 - RNA, 22 nt, Artificial Sequence
  Synthetic
cucauuuauccaccuuaugguu

SEQ ID NO: 415286 - RNA, 23 nt, Artificial Sequence
  Synthetic
ccucauuuauccaccuuaugguu

SEQ ID NO: 415287 - RNA, 24 nt, Artificial Sequence
  Synthetic
cccucauuuauccaccuuaugguu

SEQ ID NO: 415288 - RNA, 18 nt, Artificial Sequence
  Synthetic
guuaagacuguuaugguu

SEQ ID NO: 415289 - RNA, 19 nt, Artificial Sequence
  Synthetic
aguuaagacuguuaugguu

SEQ ID NO: 415290 - RNA, 20 nt, Artificial Sequence
  Synthetic
uaguuaagacuguuaugguu

SEQ ID NO: 415291 - RNA, 21 nt, Artificial Sequence
  Synthetic
cuaguuaagacuguuaugguu

SEQ ID NO: 415292 - RNA, 22 nt, Artificial Sequence
  Synthetic
ucuaguuaagacuguuaugguu

SEQ ID NO: 415293 - RNA, 23 nt, Artificial Sequence
  Synthetic
cucuaguuaagacuguuaugguu

SEQ ID NO: 415294 - RNA, 24 nt, Artificial Sequence
  Synthetic
gcucuaguuaagacuguuaugguu

SEQ ID NO: 415295 - RNA, 18 nt, Artificial Sequence
  Synthetic
auucuuuaagcccugguu

SEQ ID NO: 415296 - RNA, 19 nt, Artificial Sequence
  Synthetic
cauucuuuaagcccugguu

SEQ ID NO: 415297 - RNA, 20 nt, Artificial Sequence
  Synthetic
acauucuuuaagcccugguu

SEQ ID NO: 415298 - RNA, 21 nt, Artificial Sequence
  Synthetic
uacauucuuuaagcccugguu

SEQ ID NO: 415299 - RNA, 22 nt, Artificial Sequence
  Synthetic
cuacauucuuuaagcccugguu

SEQ ID NO: 415300 - RNA, 23 nt, Artificial Sequence
  Synthetic
ccuacauucuuuaagcccugguu

SEQ ID NO: 415301 - RNA, 24 nt, Artificial Sequence
  Synthetic
gccuacauucuuuaagcccugguu

SEQ ID NO: 415302 - RNA, 18 nt, Artificial Sequence
  Synthetic
aagucauuacgccugguu

SEQ ID NO: 415303 - RNA, 19 nt, Artificial Sequence
  Synthetic
gaagucauuacgccugguu

SEQ ID NO: 415304 - RNA, 20 nt, Artificial Sequence
  Synthetic
agaagucauuacgccugguu

SEQ ID NO: 415305 - RNA, 21 nt, Artificial Sequence
  Synthetic
aagaagucauuacgccugguu

SEQ ID NO: 415306 - RNA, 22 nt, Artificial Sequence
  Synthetic
aaagaagucauuacgccugguu

SEQ ID NO: 415307 - RNA, 23 nt, Artificial Sequence
  Synthetic
aaaagaagucauuacgccugguu

SEQ ID NO: 415308 - RNA, 24 nt, Artificial Sequence
  Synthetic
uaaaagaagucauuacgccugguu

SEQ ID NO: 415309 - RNA, 18 nt, Artificial Sequence
  Synthetic
uaaaaagaguuccugguu

SEQ ID NO: 415310 - RNA, 19 nt, Artificial Sequence
  Synthetic
guaaaaagaguuccugguu

SEQ ID NO: 415311 - RNA, 20 nt, Artificial Sequence
  Synthetic
gguaaaaagaguuccugguu

SEQ ID NO: 415312 - RNA, 21 nt, Artificial Sequence
  Synthetic
agguaaaaagaguuccugguu

SEQ ID NO: 415313 - RNA, 22 nt, Artificial Sequence
  Synthetic
gagguaaaaagaguuccugguu

SEQ ID NO: 415314 - RNA, 23 nt, Artificial Sequence
  Synthetic
ggagguaaaaagaguuccugguu

SEQ ID NO: 415315 - RNA, 24 nt, Artificial Sequence
  Synthetic
uggagguaaaaagaguuccugguu

SEQ ID NO: 415316 - RNA, 18 nt, Artificial Sequence
  Synthetic
aacauuucuuuccugguu

SEQ ID NO: 415317 - RNA, 19 nt, Artificial Sequence
  Synthetic
aaacauuucuuuccugguu

SEQ ID NO: 415318 - RNA, 20 nt, Artificial Sequence
  Synthetic
gaaacauuucuuuccugguu

SEQ ID NO: 415319 - RNA, 21 nt, Artificial Sequence
  Synthetic
ugaaacauuucuuuccugguu

SEQ ID NO: 415320 - RNA, 22 nt, Artificial Sequence
  Synthetic
gugaaacauuucuuuccugguu

SEQ ID NO: 415321 - RNA, 23 nt, Artificial Sequence
  Synthetic
ugugaaacauuucuuuccugguu

SEQ ID NO: 415322 - RNA, 24 nt, Artificial Sequence
  Synthetic
augugaaacauuucuuuccugguu

SEQ ID NO: 415323 - RNA, 18 nt, Artificial Sequence
  Synthetic
uuggaaauaaagcugguu

SEQ ID NO: 415324 - RNA, 19 nt, Artificial Sequence
  Synthetic
auuggaaauaaagcugguu

SEQ ID NO: 415325 - RNA, 20 nt, Artificial Sequence
  Synthetic
uauuggaaauaaagcugguu

SEQ ID NO: 415326 - RNA, 21 nt, Artificial Sequence
  Synthetic
auauuggaaauaaagcugguu

SEQ ID NO: 415327 - RNA, 22 nt, Artificial Sequence
  Synthetic
cauauuggaaauaaagcugguu

SEQ ID NO: 415328 - RNA, 23 nt, Artificial Sequence
  Synthetic
ccauauuggaaauaaagcugguu

SEQ ID NO: 415329 - RNA, 24 nt, Artificial Sequence
  Synthetic
uccauauuggaaauaaagcugguu

SEQ ID NO: 415330 - RNA, 18 nt, Artificial Sequence
  Synthetic
auuguacagcugcugguu

SEQ ID NO: 415331 - RNA, 19 nt, Artificial Sequence
  Synthetic
aauuguacagcugcugguu

SEQ ID NO: 415332 - RNA, 20 nt, Artificial Sequence
  Synthetic
aaauuguacagcugcugguu

SEQ ID NO: 415333 - RNA, 21 nt, Artificial Sequence
  Synthetic
uaaauuguacagcugcugguu

SEQ ID NO: 415334 - RNA, 22 nt, Artificial Sequence
  Synthetic
auaaauuguacagcugcugguu

SEQ ID NO: 415335 - RNA, 23 nt, Artificial Sequence
  Synthetic
cauaaauuguacagcugcugguu

SEQ ID NO: 415336 - RNA, 24 nt, Artificial Sequence
  Synthetic
gcauaaauuguacagcugcugguu

SEQ ID NO: 415337 - RNA, 18 nt, Artificial Sequence
  Synthetic
aucacugagcugcugguu

SEQ ID NO: 415338 - RNA, 19 nt, Artificial Sequence
  Synthetic
aaucacugagcugcugguu

SEQ ID NO: 415339 - RNA, 20 nt, Artificial Sequence
  Synthetic
gaaucacugagcugcugguu

SEQ ID NO: 415340 - RNA, 21 nt, Artificial Sequence
  Synthetic
agaaucacugagcugcugguu

SEQ ID NO: 415341 - RNA, 22 nt, Artificial Sequence
  Synthetic
uagaaucacugagcugcugguu

SEQ ID NO: 415342 - RNA, 23 nt, Artificial Sequence
  Synthetic
uuagaaucacugagcugcugguu

SEQ ID NO: 415343 - RNA, 24 nt, Artificial Sequence
  Synthetic
guuagaaucacugagcugcugguu

SEQ ID NO: 415344 - RNA, 18 nt, Artificial Sequence
  Synthetic
uucaugaugcugcugguu

SEQ ID NO: 415345 - RNA, 19 nt, Artificial Sequence
  Synthetic
guucaugaugcugcugguu

SEQ ID NO: 415346 - RNA, 20 nt, Artificial Sequence
  Synthetic
uguucaugaugcugcugguu

SEQ ID NO: 415347 - RNA, 21 nt, Artificial Sequence
  Synthetic
guguucaugaugcugcugguu

SEQ ID NO: 415348 - RNA, 22 nt, Artificial Sequence
  Synthetic
gguguucaugaugcugcugguu

SEQ ID NO: 415349 - RNA, 23 nt, Artificial Sequence
  Synthetic
agguguucaugaugcugcugguu

SEQ ID NO: 415350 - RNA, 24 nt, Artificial Sequence
  Synthetic
cagguguucaugaugcugcugguu

SEQ ID NO: 415351 - RNA, 18 nt, Artificial Sequence
  Synthetic
cauuagguggugcugguu

SEQ ID NO: 415352 - RNA, 19 nt, Artificial Sequence
  Synthetic
acauuagguggugcugguu

SEQ ID NO: 415353 - RNA, 20 nt, Artificial Sequence
  Synthetic
gacauuagguggugcugguu

SEQ ID NO: 415354 - RNA, 21 nt, Artificial Sequence
  Synthetic
ugacauuagguggugcugguu

SEQ ID NO: 415355 - RNA, 22 nt, Artificial Sequence
  Synthetic
cugacauuagguggugcugguu

SEQ ID NO: 415356 - RNA, 23 nt, Artificial Sequence
  Synthetic
ccugacauuagguggugcugguu

SEQ ID NO: 415357 - RNA, 24 nt, Artificial Sequence
  Synthetic
gccugacauuagguggugcugguu

SEQ ID NO: 415358 - RNA, 18 nt, Artificial Sequence
  Synthetic
gcauuuucugaucugguu

SEQ ID NO: 415359 - RNA, 19 nt, Artificial Sequence
  Synthetic
ugcauuuucugaucugguu

SEQ ID NO: 415360 - RNA, 20 nt, Artificial Sequence
  Synthetic
cugcauuuucugaucugguu

SEQ ID NO: 415361 - RNA, 21 nt, Artificial Sequence
  Synthetic
acugcauuuucugaucugguu

SEQ ID NO: 415362 - RNA, 22 nt, Artificial Sequence
  Synthetic
aacugcauuuucugaucugguu

SEQ ID NO: 415363 - RNA, 23 nt, Artificial Sequence
  Synthetic
caacugcauuuucugaucugguu

SEQ ID NO: 415364 - RNA, 24 nt, Artificial Sequence
  Synthetic
ccaacugcauuuucugaucugguu

SEQ ID NO: 415365 - RNA, 18 nt, Artificial Sequence
  Synthetic
gucucucccucucugguu

SEQ ID NO: 415366 - RNA, 19 nt, Artificial Sequence
  Synthetic
agucucucccucucugguu

SEQ ID NO: 415367 - RNA, 20 nt, Artificial Sequence
  Synthetic
aagucucucccucucugguu

SEQ ID NO: 415368 - RNA, 21 nt, Artificial Sequence
  Synthetic
uaagucucucccucucugguu

SEQ ID NO: 415369 - RNA, 22 nt, Artificial Sequence
  Synthetic
auaagucucucccucucugguu

SEQ ID NO: 415370 - RNA, 23 nt, Artificial Sequence
  Synthetic
aauaagucucucccucucugguu

SEQ ID NO: 415371 - RNA, 24 nt, Artificial Sequence
  Synthetic
caauaagucucucccucucugguu

SEQ ID NO: 415372 - RNA, 18 nt, Artificial Sequence
  Synthetic
agcugaacucuucugguu

SEQ ID NO: 415373 - RNA, 19 nt, Artificial Sequence
  Synthetic
gagcugaacucuucugguu

SEQ ID NO: 415374 - RNA, 20 nt, Artificial Sequence
  Synthetic
agagcugaacucuucugguu

SEQ ID NO: 415375 - RNA, 21 nt, Artificial Sequence
  Synthetic
uagagcugaacucuucugguu

SEQ ID NO: 415376 - RNA, 22 nt, Artificial Sequence
  Synthetic
uuagagcugaacucuucugguu

SEQ ID NO: 415377 - RNA, 23 nt, Artificial Sequence
  Synthetic
guuagagcugaacucuucugguu

SEQ ID NO: 415378 - RNA, 24 nt, Artificial Sequence
  Synthetic
uguuagagcugaacucuucugguu

SEQ ID NO: 415379 - RNA, 18 nt, Artificial Sequence
  Synthetic
uagucagucuuucugguu

SEQ ID NO: 415380 - RNA, 19 nt, Artificial Sequence
  Synthetic
cuagucagucuuucugguu

SEQ ID NO: 415381 - RNA, 20 nt, Artificial Sequence
  Synthetic
ucuagucagucuuucugguu

SEQ ID NO: 415382 - RNA, 21 nt, Artificial Sequence
  Synthetic
uucuagucagucuuucugguu

SEQ ID NO: 415383 - RNA, 22 nt, Artificial Sequence
  Synthetic
uuucuagucagucuuucugguu

SEQ ID NO: 415384 - RNA, 23 nt, Artificial Sequence
  Synthetic
cuuucuagucagucuuucugguu

SEQ ID NO: 415385 - RNA, 24 nt, Artificial Sequence
  Synthetic
ucuuucuagucagucuuucugguu

SEQ ID NO: 415386 - RNA, 18 nt, Artificial Sequence
  Synthetic
uaugucaauaaagugguu

SEQ ID NO: 415387 - RNA, 19 nt, Artificial Sequence
  Synthetic
uuaugucaauaaagugguu

SEQ ID NO: 415388 - RNA, 20 nt, Artificial Sequence
  Synthetic
uuuaugucaauaaagugguu

SEQ ID NO: 415389 - RNA, 21 nt, Artificial Sequence
  Synthetic
uuuuaugucaauaaagugguu

SEQ ID NO: 415390 - RNA, 22 nt, Artificial Sequence
  Synthetic
uuuuuaugucaauaaagugguu

SEQ ID NO: 415391 - RNA, 23 nt, Artificial Sequence
  Synthetic
cuuuuuaugucaauaaagugguu

SEQ ID NO: 415392 - RNA, 24 nt, Artificial Sequence
  Synthetic
gcuuuuuaugucaauaaagugguu

SEQ ID NO: 415393 - RNA, 18 nt, Artificial Sequence
  Synthetic
gucuuagcugaagugguu

SEQ ID NO: 415394 - RNA, 19 nt, Artificial Sequence
  Synthetic
agucuuagcugaagugguu

SEQ ID NO: 415395 - RNA, 20 nt, Artificial Sequence
  Synthetic
gagucuuagcugaagugguu

SEQ ID NO: 415396 - RNA, 21 nt, Artificial Sequence
  Synthetic
agagucuuagcugaagugguu

SEQ ID NO: 415397 - RNA, 22 nt, Artificial Sequence
  Synthetic
aagagucuuagcugaagugguu

SEQ ID NO: 415398 - RNA, 23 nt, Artificial Sequence
  Synthetic
aaagagucuuagcugaagugguu

SEQ ID NO: 415399 - RNA, 24 nt, Artificial Sequence
  Synthetic
aaaagagucuuagcugaagugguu

SEQ ID NO: 415400 - RNA, 18 nt, Artificial Sequence
  Synthetic
gaacuauucccagugguu

SEQ ID NO: 415401 - RNA, 19 nt, Artificial Sequence
  Synthetic
ugaacuauucccagugguu

SEQ ID NO: 415402 - RNA, 20 nt, Artificial Sequence
  Synthetic
gugaacuauucccagugguu

SEQ ID NO: 415403 - RNA, 21 nt, Artificial Sequence
  Synthetic
agugaacuauucccagugguu

SEQ ID NO: 415404 - RNA, 22 nt, Artificial Sequence
  Synthetic
cagugaacuauucccagugguu

SEQ ID NO: 415405 - RNA, 23 nt, Artificial Sequence
  Synthetic
gcagugaacuauucccagugguu

SEQ ID NO: 415406 - RNA, 24 nt, Artificial Sequence
  Synthetic
ggcagugaacuauucccagugguu

SEQ ID NO: 415407 - RNA, 18 nt, Artificial Sequence
  Synthetic
aucauucugguagugguu

SEQ ID NO: 415408 - RNA, 19 nt, Artificial Sequence
  Synthetic
gaucauucugguagugguu

SEQ ID NO: 415409 - RNA, 20 nt, Artificial Sequence
  Synthetic
agaucauucugguagugguu

SEQ ID NO: 415410 - RNA, 21 nt, Artificial Sequence
  Synthetic
aagaucauucugguagugguu

SEQ ID NO: 415411 - RNA, 22 nt, Artificial Sequence
  Synthetic
aaagaucauucugguagugguu

SEQ ID NO: 415412 - RNA, 23 nt, Artificial Sequence
  Synthetic
aaaagaucauucugguagugguu

SEQ ID NO: 415413 - RNA, 24 nt, Artificial Sequence
  Synthetic
uaaaagaucauucugguagugguu

SEQ ID NO: 415414 - RNA, 18 nt, Artificial Sequence
  Synthetic
uccccuccauacgugguu

SEQ ID NO: 415415 - RNA, 19 nt, Artificial Sequence
  Synthetic
auccccuccauacgugguu

SEQ ID NO: 415416 - RNA, 20 nt, Artificial Sequence
  Synthetic
cauccccuccauacgugguu

SEQ ID NO: 415417 - RNA, 21 nt, Artificial Sequence
  Synthetic
ucauccccuccauacgugguu

SEQ ID NO: 415418 - RNA, 22 nt, Artificial Sequence
  Synthetic
uucauccccuccauacgugguu

SEQ ID NO: 415419 - RNA, 23 nt, Artificial Sequence
  Synthetic
uuucauccccuccauacgugguu

SEQ ID NO: 415420 - RNA, 24 nt, Artificial Sequence
  Synthetic
cuuucauccccuccauacgugguu

SEQ ID NO: 415421 - RNA, 18 nt, Artificial Sequence
  Synthetic
ccuaaaguuaaauugguu

SEQ ID NO: 415422 - RNA, 19 nt, Artificial Sequence
  Synthetic
accuaaaguuaaauugguu

SEQ ID NO: 415423 - RNA, 20 nt, Artificial Sequence
  Synthetic
aaccuaaaguuaaauugguu

SEQ ID NO: 415424 - RNA, 21 nt, Artificial Sequence
  Synthetic
uaaccuaaaguuaaauugguu

SEQ ID NO: 415425 - RNA, 22 nt, Artificial Sequence
  Synthetic
auaaccuaaaguuaaauugguu

SEQ ID NO: 415426 - RNA, 23 nt, Artificial Sequence
  Synthetic
aauaaccuaaaguuaaauugguu

SEQ ID NO: 415427 - RNA, 24 nt, Artificial Sequence
  Synthetic
aaauaaccuaaaguuaaauugguu

SEQ ID NO: 415428 - RNA, 18 nt, Artificial Sequence
  Synthetic
uaaccucuagaauugguu

SEQ ID NO: 415429 - RNA, 19 nt, Artificial Sequence
  Synthetic
auaaccucuagaauugguu

SEQ ID NO: 415430 - RNA, 20 nt, Artificial Sequence
  Synthetic
uauaaccucuagaauugguu

SEQ ID NO: 415431 - RNA, 21 nt, Artificial Sequence
  Synthetic
guauaaccucuagaauugguu

SEQ ID NO: 415432 - RNA, 22 nt, Artificial Sequence
  Synthetic
uguauaaccucuagaauugguu

SEQ ID NO: 415433 - RNA, 23 nt, Artificial Sequence
  Synthetic
auguauaaccucuagaauugguu

SEQ ID NO: 415434 - RNA, 24 nt, Artificial Sequence
  Synthetic
aauguauaaccucuagaauugguu

SEQ ID NO: 415435 - RNA, 18 nt, Artificial Sequence
  Synthetic
uccugcuagucauugguu

SEQ ID NO: 415436 - RNA, 19 nt, Artificial Sequence
  Synthetic
auccugcuagucauugguu

SEQ ID NO: 415437 - RNA, 20 nt, Artificial Sequence
  Synthetic
aauccugcuagucauugguu

SEQ ID NO: 415438 - RNA, 21 nt, Artificial Sequence
  Synthetic
aaauccugcuagucauugguu

SEQ ID NO: 415439 - RNA, 22 nt, Artificial Sequence
  Synthetic
aaaauccugcuagucauugguu

SEQ ID NO: 415440 - RNA, 23 nt, Artificial Sequence
  Synthetic
caaaauccugcuagucauugguu

SEQ ID NO: 415441 - RNA, 24 nt, Artificial Sequence
  Synthetic
acaaaauccugcuagucauugguu

SEQ ID NO: 415442 - RNA, 18 nt, Artificial Sequence
  Synthetic
aguuuuagcugauugguu

SEQ ID NO: 415443 - RNA, 19 nt, Artificial Sequence
  Synthetic
aaguuuuagcugauugguu

SEQ ID NO: 415444 - RNA, 20 nt, Artificial Sequence
  Synthetic
aaaguuuuagcugauugguu

SEQ ID NO: 415445 - RNA, 21 nt, Artificial Sequence
  Synthetic
caaaguuuuagcugauugguu

SEQ ID NO: 415446 - RNA, 22 nt, Artificial Sequence
  Synthetic
acaaaguuuuagcugauugguu

SEQ ID NO: 415447 - RNA, 23 nt, Artificial Sequence
  Synthetic
gacaaaguuuuagcugauugguu

SEQ ID NO: 415448 - RNA, 24 nt, Artificial Sequence
  Synthetic
ugacaaaguuuuagcugauugguu

SEQ ID NO: 415449 - RNA, 18 nt, Artificial Sequence
  Synthetic
uaaauacucugauugguu

SEQ ID NO: 415450 - RNA, 19 nt, Artificial Sequence
  Synthetic
auaaauacucugauugguu

SEQ ID NO: 415451 - RNA, 20 nt, Artificial Sequence
  Synthetic
aauaaauacucugauugguu

SEQ ID NO: 415452 - RNA, 21 nt, Artificial Sequence
  Synthetic
aaauaaauacucugauugguu

SEQ ID NO: 415453 - RNA, 22 nt, Artificial Sequence
  Synthetic
uaaauaaauacucugauugguu

SEQ ID NO: 415454 - RNA, 23 nt, Artificial Sequence
  Synthetic
uuaaauaaauacucugauugguu

SEQ ID NO: 415455 - RNA, 24 nt, Artificial Sequence
  Synthetic
guuaaauaaauacucugauugguu

SEQ ID NO: 415456 - RNA, 18 nt, Artificial Sequence
  Synthetic
aguacucuguuauugguu

SEQ ID NO: 415457 - RNA, 19 nt, Artificial Sequence
  Synthetic
aaguacucuguuauugguu

SEQ ID NO: 415458 - RNA, 20 nt, Artificial Sequence
  Synthetic
gaaguacucuguuauugguu

SEQ ID NO: 415459 - RNA, 21 nt, Artificial Sequence
  Synthetic
agaaguacucuguuauugguu

SEQ ID NO: 415460 - RNA, 22 nt, Artificial Sequence
  Synthetic
cagaaguacucuguuauugguu

SEQ ID NO: 415461 - RNA, 23 nt, Artificial Sequence
  Synthetic
acagaaguacucuguuauugguu

SEQ ID NO: 415462 - RNA, 24 nt, Artificial Sequence
  Synthetic
cacagaaguacucuguuauugguu

SEQ ID NO: 415463 - RNA, 18 nt, Artificial Sequence
  Synthetic
uucaugcauugcuugguu

SEQ ID NO: 415464 - RNA, 19 nt, Artificial Sequence
  Synthetic
auucaugcauugcuugguu

SEQ ID NO: 415465 - RNA, 20 nt, Artificial Sequence
  Synthetic
gauucaugcauugcuugguu

SEQ ID NO: 415466 - RNA, 21 nt, Artificial Sequence
  Synthetic
ggauucaugcauugcuugguu

SEQ ID NO: 415467 - RNA, 22 nt, Artificial Sequence
  Synthetic
aggauucaugcauugcuugguu

SEQ ID NO: 415468 - RNA, 23 nt, Artificial Sequence
  Synthetic
caggauucaugcauugcuugguu

SEQ ID NO: 415469 - RNA, 24 nt, Artificial Sequence
  Synthetic
ucaggauucaugcauugcuugguu

SEQ ID NO: 415470 - RNA, 18 nt, Artificial Sequence
  Synthetic
aauaauuaagucuugguu

SEQ ID NO: 415471 - RNA, 19 nt, Artificial Sequence
  Synthetic
gaauaauuaagucuugguu

SEQ ID NO: 415472 - RNA, 20 nt, Artificial Sequence
  Synthetic
ugaauaauuaagucuugguu

SEQ ID NO: 415473 - RNA, 21 nt, Artificial Sequence
  Synthetic
uugaauaauuaagucuugguu

SEQ ID NO: 415474 - RNA, 22 nt, Artificial Sequence
  Synthetic
uuugaauaauuaagucuugguu

SEQ ID NO: 415475 - RNA, 23 nt, Artificial Sequence
  Synthetic
uuuugaauaauuaagucuugguu

SEQ ID NO: 415476 - RNA, 24 nt, Artificial Sequence
  Synthetic
auuuugaauaauuaagucuugguu

SEQ ID NO: 415477 - RNA, 18 nt, Artificial Sequence
  Synthetic
cuuaggauagucuugguu

SEQ ID NO: 415478 - RNA, 19 nt, Artificial Sequence
  Synthetic
ccuuaggauagucuugguu

SEQ ID NO: 415479 - RNA, 20 nt, Artificial Sequence
  Synthetic
uccuuaggauagucuugguu

SEQ ID NO: 415480 - RNA, 21 nt, Artificial Sequence
  Synthetic
uuccuuaggauagucuugguu

SEQ ID NO: 415481 - RNA, 22 nt, Artificial Sequence
  Synthetic
auuccuuaggauagucuugguu

SEQ ID NO: 415482 - RNA, 23 nt, Artificial Sequence
  Synthetic
aauuccuuaggauagucuugguu

SEQ ID NO: 415483 - RNA, 24 nt, Artificial Sequence
  Synthetic
gaauuccuuaggauagucuugguu

SEQ ID NO: 415484 - RNA, 18 nt, Artificial Sequence
  Synthetic
aauaggcuguucuugguu

SEQ ID NO: 415485 - RNA, 19 nt, Artificial Sequence
  Synthetic
aaauaggcuguucuugguu

SEQ ID NO: 415486 - RNA, 20 nt, Artificial Sequence
  Synthetic
aaaauaggcuguucuugguu

SEQ ID NO: 415487 - RNA, 21 nt, Artificial Sequence
  Synthetic
uaaaauaggcuguucuugguu

SEQ ID NO: 415488 - RNA, 22 nt, Artificial Sequence
  Synthetic
uuaaaauaggcuguucuugguu

SEQ ID NO: 415489 - RNA, 23 nt, Artificial Sequence
  Synthetic
auuaaaauaggcuguucuugguu

SEQ ID NO: 415490 - RNA, 24 nt, Artificial Sequence
  Synthetic
aauuaaaauaggcuguucuugguu

SEQ ID NO: 415491 - RNA, 18 nt, Artificial Sequence
  Synthetic
auauuuaugaaguugguu

SEQ ID NO: 415492 - RNA, 19 nt, Artificial Sequence
  Synthetic
gauauuuaugaaguugguu

SEQ ID NO: 415493 - RNA, 20 nt, Artificial Sequence
  Synthetic
agauauuuaugaaguugguu

SEQ ID NO: 415494 - RNA, 21 nt, Artificial Sequence
  Synthetic
aagauauuuaugaaguugguu

SEQ ID NO: 415495 - RNA, 22 nt, Artificial Sequence
  Synthetic
gaagauauuuaugaaguugguu

SEQ ID NO: 415496 - RNA, 23 nt, Artificial Sequence
  Synthetic
ggaagauauuuaugaaguugguu

SEQ ID NO: 415497 - RNA, 24 nt, Artificial Sequence
  Synthetic
uggaagauauuuaugaaguugguu

SEQ ID NO: 415498 - RNA, 18 nt, Artificial Sequence
  Synthetic
agugguagucaguugguu

SEQ ID NO: 415499 - RNA, 19 nt, Artificial Sequence
  Synthetic
aagugguagucaguugguu

SEQ ID NO: 415500 - RNA, 20 nt, Artificial Sequence
  Synthetic
gaagugguagucaguugguu

SEQ ID NO: 415501 - RNA, 21 nt, Artificial Sequence
  Synthetic
agaagugguagucaguugguu

SEQ ID NO: 415502 - RNA, 22 nt, Artificial Sequence
  Synthetic
aagaagugguagucaguugguu

SEQ ID NO: 415503 - RNA, 23 nt, Artificial Sequence
  Synthetic
gaagaagugguagucaguugguu

SEQ ID NO: 415504 - RNA, 24 nt, Artificial Sequence
  Synthetic
ugaagaagugguagucaguugguu

SEQ ID NO: 415505 - RNA, 18 nt, Artificial Sequence
  Synthetic
ggaagcuaauaguugguu

SEQ ID NO: 415506 - RNA, 19 nt, Artificial Sequence
  Synthetic
aggaagcuaauaguugguu

SEQ ID NO: 415507 - RNA, 20 nt, Artificial Sequence
  Synthetic
uaggaagcuaauaguugguu

SEQ ID NO: 415508 - RNA, 21 nt, Artificial Sequence
  Synthetic
cuaggaagcuaauaguugguu

SEQ ID NO: 415509 - RNA, 22 nt, Artificial Sequence
  Synthetic
ccuaggaagcuaauaguugguu

SEQ ID NO: 415510 - RNA, 23 nt, Artificial Sequence
  Synthetic
accuaggaagcuaauaguugguu

SEQ ID NO: 415511 - RNA, 24 nt, Artificial Sequence
  Synthetic
gaccuaggaagcuaauaguugguu

SEQ ID NO: 415512 - RNA, 18 nt, Artificial Sequence
  Synthetic
uuagcuuugugguugguu

SEQ ID NO: 415513 - RNA, 19 nt, Artificial Sequence
  Synthetic
guuagcuuugugguugguu

SEQ ID NO: 415514 - RNA, 20 nt, Artificial Sequence
  Synthetic
gguuagcuuugugguugguu

SEQ ID NO: 415515 - RNA, 21 nt, Artificial Sequence
  Synthetic
agguuagcuuugugguugguu

SEQ ID NO: 415516 - RNA, 22 nt, Artificial Sequence
  Synthetic
gagguuagcuuugugguugguu

SEQ ID NO: 415517 - RNA, 23 nt, Artificial Sequence
  Synthetic
ugagguuagcuuugugguugguu

SEQ ID NO: 415518 - RNA, 24 nt, Artificial Sequence
  Synthetic
cugagguuagcuuugugguugguu

SEQ ID NO: 415519 - RNA, 18 nt, Artificial Sequence
  Synthetic
auauauuuccuguugguu

SEQ ID NO: 415520 - RNA, 19 nt, Artificial Sequence
  Synthetic
aauauauuuccuguugguu

SEQ ID NO: 415521 - RNA, 20 nt, Artificial Sequence
  Synthetic
uaauauauuuccuguugguu

SEQ ID NO: 415522 - RNA, 21 nt, Artificial Sequence
  Synthetic
cuaauauauuuccuguugguu

SEQ ID NO: 415523 - RNA, 22 nt, Artificial Sequence
  Synthetic
ucuaauauauuuccuguugguu

SEQ ID NO: 415524 - RNA, 23 nt, Artificial Sequence
  Synthetic
uucuaauauauuuccuguugguu

SEQ ID NO: 415525 - RNA, 24 nt, Artificial Sequence
  Synthetic
uuucuaauauauuuccuguugguu

SEQ ID NO: 415526 - RNA, 18 nt, Artificial Sequence
  Synthetic
auucaagguguguugguu

SEQ ID NO: 415527 - RNA, 19 nt, Artificial Sequence
  Synthetic
gauucaagguguguugguu

SEQ ID NO: 415528 - RNA, 20 nt, Artificial Sequence
  Synthetic
ggauucaagguguguugguu

SEQ ID NO: 415529 - RNA, 21 nt, Artificial Sequence
  Synthetic
uggauucaagguguguugguu

SEQ ID NO: 415530 - RNA, 22 nt, Artificial Sequence
  Synthetic
auggauucaagguguguugguu

SEQ ID NO: 415531 - RNA, 23 nt, Artificial Sequence
  Synthetic
gauggauucaagguguguugguu

SEQ ID NO: 415532 - RNA, 24 nt, Artificial Sequence
  Synthetic
ugauggauucaagguguguugguu

SEQ ID NO: 415533 - RNA, 18 nt, Artificial Sequence
  Synthetic
guucauggacauuugguu

SEQ ID NO: 415534 - RNA, 19 nt, Artificial Sequence
  Synthetic
gguucauggacauuugguu

SEQ ID NO: 415535 - RNA, 20 nt, Artificial Sequence
  Synthetic
agguucauggacauuugguu

SEQ ID NO: 415536 - RNA, 21 nt, Artificial Sequence
  Synthetic
cagguucauggacauuugguu

SEQ ID NO: 415537 - RNA, 22 nt, Artificial Sequence
  Synthetic
ccagguucauggacauuugguu

SEQ ID NO: 415538 - RNA, 23 nt, Artificial Sequence
  Synthetic
cccagguucauggacauuugguu

SEQ ID NO: 415539 - RNA, 24 nt, Artificial Sequence
  Synthetic
ucccagguucauggacauuugguu

SEQ ID NO: 415540 - RNA, 18 nt, Artificial Sequence
  Synthetic
gggaggugauuuuugguu

SEQ ID NO: 415541 - RNA, 19 nt, Artificial Sequence
  Synthetic
ggggaggugauuuuugguu

SEQ ID NO: 415542 - RNA, 20 nt, Artificial Sequence
  Synthetic
gggggaggugauuuuugguu

SEQ ID NO: 415543 - RNA, 21 nt, Artificial Sequence
  Synthetic
ugggggaggugauuuuugguu

SEQ ID NO: 415544 - RNA, 22 nt, Artificial Sequence
  Synthetic
uugggggaggugauuuuugguu

SEQ ID NO: 415545 - RNA, 23 nt, Artificial Sequence
  Synthetic
uuugggggaggugauuuuugguu

SEQ ID NO: 415546 - RNA, 24 nt, Artificial Sequence
  Synthetic
auuugggggaggugauuuuugguu

SEQ ID NO: 415547 - RNA, 18 nt, Artificial Sequence
  Synthetic
aaugaaggaaaaaauguu

SEQ ID NO: 415548 - RNA, 19 nt, Artificial Sequence
  Synthetic
aaaugaaggaaaaaauguu

SEQ ID NO: 415549 - RNA, 20 nt, Artificial Sequence
  Synthetic
gaaaugaaggaaaaaauguu

SEQ ID NO: 415550 - RNA, 21 nt, Artificial Sequence
  Synthetic
ugaaaugaaggaaaaaauguu

SEQ ID NO: 415551 - RNA, 22 nt, Artificial Sequence
  Synthetic
uugaaaugaaggaaaaaauguu

SEQ ID NO: 415552 - RNA, 23 nt, Artificial Sequence
  Synthetic
guugaaaugaaggaaaaaauguu

SEQ ID NO: 415553 - RNA, 24 nt, Artificial Sequence
  Synthetic
gguugaaaugaaggaaaaaauguu

SEQ ID NO: 415554 - RNA, 18 nt, Artificial Sequence
  Synthetic
gcaguauuacaaaauguu

SEQ ID NO: 415555 - RNA, 19 nt, Artificial Sequence
  Synthetic
agcaguauuacaaaauguu

SEQ ID NO: 415556 - RNA, 20 nt, Artificial Sequence
  Synthetic
gagcaguauuacaaaauguu

SEQ ID NO: 415557 - RNA, 21 nt, Artificial Sequence
  Synthetic
agagcaguauuacaaaauguu

SEQ ID NO: 415558 - RNA, 22 nt, Artificial Sequence
  Synthetic
uagagcaguauuacaaaauguu

SEQ ID NO: 415559 - RNA, 23 nt, Artificial Sequence
  Synthetic
guagagcaguauuacaaaauguu

SEQ ID NO: 415560 - RNA, 24 nt, Artificial Sequence
  Synthetic
aguagagcaguauuacaaaauguu

SEQ ID NO: 415561 - RNA, 18 nt, Artificial Sequence
  Synthetic
auggucaaagaaaauguu

SEQ ID NO: 415562 - RNA, 19 nt, Artificial Sequence
  Synthetic
cauggucaaagaaaauguu

SEQ ID NO: 415563 - RNA, 20 nt, Artificial Sequence
  Synthetic
acauggucaaagaaaauguu

SEQ ID NO: 415564 - RNA, 21 nt, Artificial Sequence
  Synthetic
aacauggucaaagaaaauguu

SEQ ID NO: 415565 - RNA, 22 nt, Artificial Sequence
  Synthetic
uaacauggucaaagaaaauguu

SEQ ID NO: 415566 - RNA, 23 nt, Artificial Sequence
  Synthetic
uuaacauggucaaagaaaauguu

SEQ ID NO: 415567 - RNA, 24 nt, Artificial Sequence
  Synthetic
cuuaacauggucaaagaaaauguu

SEQ ID NO: 415568 - RNA, 18 nt, Artificial Sequence
  Synthetic
agaguuauauaaaauguu

SEQ ID NO: 415569 - RNA, 19 nt, Artificial Sequence
  Synthetic
uagaguuauauaaaauguu

SEQ ID NO: 415570 - RNA, 20 nt, Artificial Sequence
  Synthetic
uuagaguuauauaaaauguu

SEQ ID NO: 415571 - RNA, 21 nt, Artificial Sequence
  Synthetic
auuagaguuauauaaaauguu

SEQ ID NO: 415572 - RNA, 22 nt, Artificial Sequence
  Synthetic
uauuagaguuauauaaaauguu

SEQ ID NO: 415573 - RNA, 23 nt, Artificial Sequence
  Synthetic
auauuagaguuauauaaaauguu

SEQ ID NO: 415574 - RNA, 24 nt, Artificial Sequence
  Synthetic
cauauuagaguuauauaaaauguu

SEQ ID NO: 415575 - RNA, 18 nt, Artificial Sequence
  Synthetic
ucaauggggacaaauguu

SEQ ID NO: 415576 - RNA, 19 nt, Artificial Sequence
  Synthetic
gucaauggggacaaauguu

SEQ ID NO: 415577 - RNA, 20 nt, Artificial Sequence
  Synthetic
agucaauggggacaaauguu

SEQ ID NO: 415578 - RNA, 21 nt, Artificial Sequence
  Synthetic
gagucaauggggacaaauguu

SEQ ID NO: 415579 - RNA, 22 nt, Artificial Sequence
  Synthetic
ggagucaauggggacaaauguu

SEQ ID NO: 415580 - RNA, 23 nt, Artificial Sequence
  Synthetic
gggagucaauggggacaaauguu

SEQ ID NO: 415581 - RNA, 24 nt, Artificial Sequence
  Synthetic
agggagucaauggggacaaauguu

SEQ ID NO: 415582 - RNA, 18 nt, Artificial Sequence
  Synthetic
gggaaaauuagaaauguu

SEQ ID NO: 415583 - RNA, 19 nt, Artificial Sequence
  Synthetic
ugggaaaauuagaaauguu

SEQ ID NO: 415584 - RNA, 20 nt, Artificial Sequence
  Synthetic
augggaaaauuagaaauguu

SEQ ID NO: 415585 - RNA, 21 nt, Artificial Sequence
  Synthetic
aaugggaaaauuagaaauguu

SEQ ID NO: 415586 - RNA, 22 nt, Artificial Sequence
  Synthetic
aaaugggaaaauuagaaauguu

SEQ ID NO: 415587 - RNA, 23 nt, Artificial Sequence
  Synthetic
gaaaugggaaaauuagaaauguu

SEQ ID NO: 415588 - RNA, 24 nt, Artificial Sequence
  Synthetic
agaaaugggaaaauuagaaauguu

SEQ ID NO: 415589 - RNA, 18 nt, Artificial Sequence
  Synthetic
gagaaaauuauaaauguu

SEQ ID NO: 415590 - RNA, 19 nt, Artificial Sequence
  Synthetic
ugagaaaauuauaaauguu

SEQ ID NO: 415591 - RNA, 20 nt, Artificial Sequence
  Synthetic
uugagaaaauuauaaauguu

SEQ ID NO: 415592 - RNA, 21 nt, Artificial Sequence
  Synthetic
uuugagaaaauuauaaauguu

SEQ ID NO: 415593 - RNA, 22 nt, Artificial Sequence
  Synthetic
cuuugagaaaauuauaaauguu

SEQ ID NO: 415594 - RNA, 23 nt, Artificial Sequence
  Synthetic
ccuuugagaaaauuauaaauguu

SEQ ID NO: 415595 - RNA, 24 nt, Artificial Sequence
  Synthetic
cccuuugagaaaauuauaaauguu

SEQ ID NO: 415596 - RNA, 18 nt, Artificial Sequence
  Synthetic
aaguagauguacaauguu

SEQ ID NO: 415597 - RNA, 19 nt, Artificial Sequence
  Synthetic
aaaguagauguacaauguu

SEQ ID NO: 415598 - RNA, 20 nt, Artificial Sequence
  Synthetic
uaaaguagauguacaauguu

SEQ ID NO: 415599 - RNA, 21 nt, Artificial Sequence
  Synthetic
cuaaaguagauguacaauguu

SEQ ID NO: 415600 - RNA, 22 nt, Artificial Sequence
  Synthetic
ccuaaaguagauguacaauguu

SEQ ID NO: 415601 - RNA, 23 nt, Artificial Sequence
  Synthetic
gccuaaaguagauguacaauguu

SEQ ID NO: 415602 - RNA, 24 nt, Artificial Sequence
  Synthetic
ugccuaaaguagauguacaauguu

SEQ ID NO: 415603 - RNA, 18 nt, Artificial Sequence
  Synthetic
auaaacaauggcaauguu

SEQ ID NO: 415604 - RNA, 19 nt, Artificial Sequence
  Synthetic
gauaaacaauggcaauguu

SEQ ID NO: 415605 - RNA, 20 nt, Artificial Sequence
  Synthetic
agauaaacaauggcaauguu

SEQ ID NO: 415606 - RNA, 21 nt, Artificial Sequence
  Synthetic
uagauaaacaauggcaauguu

SEQ ID NO: 415607 - RNA, 22 nt, Artificial Sequence
  Synthetic
cuagauaaacaauggcaauguu

SEQ ID NO: 415608 - RNA, 23 nt, Artificial Sequence
  Synthetic
ucuagauaaacaauggcaauguu

SEQ ID NO: 415609 - RNA, 24 nt, Artificial Sequence
  Synthetic
uucuagauaaacaauggcaauguu

SEQ ID NO: 415610 - RNA, 18 nt, Artificial Sequence
  Synthetic
cacacucaaaugaauguu

SEQ ID NO: 415611 - RNA, 19 nt, Artificial Sequence
  Synthetic
ccacacucaaaugaauguu

SEQ ID NO: 415612 - RNA, 20 nt, Artificial Sequence
  Synthetic
accacacucaaaugaauguu

SEQ ID NO: 415613 - RNA, 21 nt, Artificial Sequence
  Synthetic
aaccacacucaaaugaauguu

SEQ ID NO: 415614 - RNA, 22 nt, Artificial Sequence
  Synthetic
gaaccacacucaaaugaauguu

SEQ ID NO: 415615 - RNA, 23 nt, Artificial Sequence
  Synthetic
agaaccacacucaaaugaauguu

SEQ ID NO: 415616 - RNA, 24 nt, Artificial Sequence
  Synthetic
cagaaccacacucaaaugaauguu

SEQ ID NO: 415617 - RNA, 18 nt, Artificial Sequence
  Synthetic
caaagauaugugaauguu

SEQ ID NO: 415618 - RNA, 19 nt, Artificial Sequence
  Synthetic
ucaaagauaugugaauguu

SEQ ID NO: 415619 - RNA, 20 nt, Artificial Sequence
  Synthetic
uucaaagauaugugaauguu

SEQ ID NO: 415620 - RNA, 21 nt, Artificial Sequence
  Synthetic
auucaaagauaugugaauguu

SEQ ID NO: 415621 - RNA, 22 nt, Artificial Sequence
  Synthetic
gauucaaagauaugugaauguu

SEQ ID NO: 415622 - RNA, 23 nt, Artificial Sequence
  Synthetic
agauucaaagauaugugaauguu

SEQ ID NO: 415623 - RNA, 24 nt, Artificial Sequence
  Synthetic
gagauucaaagauaugugaauguu

SEQ ID NO: 415624 - RNA, 18 nt, Artificial Sequence
  Synthetic
aaugagauuaauaauguu

SEQ ID NO: 415625 - RNA, 19 nt, Artificial Sequence
  Synthetic
uaaugagauuaauaauguu

SEQ ID NO: 415626 - RNA, 20 nt, Artificial Sequence
  Synthetic
auaaugagauuaauaauguu

SEQ ID NO: 415627 - RNA, 21 nt, Artificial Sequence
  Synthetic
cauaaugagauuaauaauguu

SEQ ID NO: 415628 - RNA, 22 nt, Artificial Sequence
  Synthetic
acauaaugagauuaauaauguu

SEQ ID NO: 415629 - RNA, 23 nt, Artificial Sequence
  Synthetic
cacauaaugagauuaauaauguu

SEQ ID NO: 415630 - RNA, 24 nt, Artificial Sequence
  Synthetic
gcacauaaugagauuaauaauguu

SEQ ID NO: 415631 - RNA, 18 nt, Artificial Sequence
  Synthetic
ccaauaugguauaauguu

SEQ ID NO: 415632 - RNA, 19 nt, Artificial Sequence
  Synthetic
uccaauaugguauaauguu

SEQ ID NO: 415633 - RNA, 20 nt, Artificial Sequence
  Synthetic
uuccaauaugguauaauguu

SEQ ID NO: 415634 - RNA, 21 nt, Artificial Sequence
  Synthetic
uuuccaauaugguauaauguu

SEQ ID NO: 415635 - RNA, 22 nt, Artificial Sequence
  Synthetic
guuuccaauaugguauaauguu

SEQ ID NO: 415636 - RNA, 23 nt, Artificial Sequence
  Synthetic
uguuuccaauaugguauaauguu

SEQ ID NO: 415637 - RNA, 24 nt, Artificial Sequence
  Synthetic
guguuuccaauaugguauaauguu

SEQ ID NO: 415638 - RNA, 18 nt, Artificial Sequence
  Synthetic
agaccaagaaguaauguu

SEQ ID NO: 415639 - RNA, 19 nt, Artificial Sequence
  Synthetic
gagaccaagaaguaauguu

SEQ ID NO: 415640 - RNA, 20 nt, Artificial Sequence
  Synthetic
ggagaccaagaaguaauguu

SEQ ID NO: 415641 - RNA, 21 nt, Artificial Sequence
  Synthetic
uggagaccaagaaguaauguu

SEQ ID NO: 415642 - RNA, 22 nt, Artificial Sequence
  Synthetic
guggagaccaagaaguaauguu

SEQ ID NO: 415643 - RNA, 23 nt, Artificial Sequence
  Synthetic
uguggagaccaagaaguaauguu

SEQ ID NO: 415644 - RNA, 24 nt, Artificial Sequence
  Synthetic
cuguggagaccaagaaguaauguu

SEQ ID NO: 415645 - RNA, 18 nt, Artificial Sequence
  Synthetic
uagauuuggaguaauguu

SEQ ID NO: 415646 - RNA, 19 nt, Artificial Sequence
  Synthetic
guagauuuggaguaauguu

SEQ ID NO: 415647 - RNA, 20 nt, Artificial Sequence
  Synthetic
uguagauuuggaguaauguu

SEQ ID NO: 415648 - RNA, 21 nt, Artificial Sequence
  Synthetic
cuguagauuuggaguaauguu

SEQ ID NO: 415649 - RNA, 22 nt, Artificial Sequence
  Synthetic
ucuguagauuuggaguaauguu

SEQ ID NO: 415650 - RNA, 23 nt, Artificial Sequence
  Synthetic
cucuguagauuuggaguaauguu

SEQ ID NO: 415651 - RNA, 24 nt, Artificial Sequence
  Synthetic
ucucuguagauuuggaguaauguu

SEQ ID NO: 415652 - RNA, 18 nt, Artificial Sequence
  Synthetic
gaaguugcucguaauguu

SEQ ID NO: 415653 - RNA, 19 nt, Artificial Sequence
  Synthetic
ugaaguugcucguaauguu

SEQ ID NO: 415654 - RNA, 20 nt, Artificial Sequence
  Synthetic
cugaaguugcucguaauguu

SEQ ID NO: 415655 - RNA, 21 nt, Artificial Sequence
  Synthetic
gcugaaguugcucguaauguu

SEQ ID NO: 415656 - RNA, 22 nt, Artificial Sequence
  Synthetic
ggcugaaguugcucguaauguu

SEQ ID NO: 415657 - RNA, 23 nt, Artificial Sequence
  Synthetic
uggcugaaguugcucguaauguu

SEQ ID NO: 415658 - RNA, 24 nt, Artificial Sequence
  Synthetic
uuggcugaaguugcucguaauguu

SEQ ID NO: 415659 - RNA, 18 nt, Artificial Sequence
  Synthetic
auaauaagauguaauguu

SEQ ID NO: 415660 - RNA, 19 nt, Artificial Sequence
  Synthetic
uauaauaagauguaauguu

SEQ ID NO: 415661 - RNA, 20 nt, Artificial Sequence
  Synthetic
auauaauaagauguaauguu

SEQ ID NO: 415662 - RNA, 21 nt, Artificial Sequence
  Synthetic
aauauaauaagauguaauguu

SEQ ID NO: 415663 - RNA, 22 nt, Artificial Sequence
  Synthetic
caauauaauaagauguaauguu

SEQ ID NO: 415664 - RNA, 23 nt, Artificial Sequence
  Synthetic
ucaauauaauaagauguaauguu

SEQ ID NO: 415665 - RNA, 24 nt, Artificial Sequence
  Synthetic
cucaauauaauaagauguaauguu

SEQ ID NO: 415666 - RNA, 18 nt, Artificial Sequence
  Synthetic
gguuuuuaguuuaauguu

SEQ ID NO: 415667 - RNA, 19 nt, Artificial Sequence
  Synthetic
ugguuuuuaguuuaauguu

SEQ ID NO: 415668 - RNA, 20 nt, Artificial Sequence
  Synthetic
augguuuuuaguuuaauguu

SEQ ID NO: 415669 - RNA, 21 nt, Artificial Sequence
  Synthetic
aaugguuuuuaguuuaauguu

SEQ ID NO: 415670 - RNA, 22 nt, Artificial Sequence
  Synthetic
aaaugguuuuuaguuuaauguu

SEQ ID NO: 415671 - RNA, 23 nt, Artificial Sequence
  Synthetic
aaaaugguuuuuaguuuaauguu

SEQ ID NO: 415672 - RNA, 24 nt, Artificial Sequence
  Synthetic
gaaaaugguuuuuaguuuaauguu

SEQ ID NO: 415673 - RNA, 18 nt, Artificial Sequence
  Synthetic
ccauuuaacaaacauguu

SEQ ID NO: 415674 - RNA, 19 nt, Artificial Sequence
  Synthetic
uccauuuaacaaacauguu

SEQ ID NO: 415675 - RNA, 20 nt, Artificial Sequence
  Synthetic
auccauuuaacaaacauguu

SEQ ID NO: 415676 - RNA, 21 nt, Artificial Sequence
  Synthetic
uauccauuuaacaaacauguu

SEQ ID NO: 415677 - RNA, 22 nt, Artificial Sequence
  Synthetic
uuauccauuuaacaaacauguu

SEQ ID NO: 415678 - RNA, 23 nt, Artificial Sequence
  Synthetic
uuuauccauuuaacaaacauguu

SEQ ID NO: 415679 - RNA, 24 nt, Artificial Sequence
  Synthetic
cuuuauccauuuaacaaacauguu

SEQ ID NO: 415680 - RNA, 18 nt, Artificial Sequence
  Synthetic
uggugauacaaacauguu

SEQ ID NO: 415681 - RNA, 19 nt, Artificial Sequence
  Synthetic
cuggugauacaaacauguu

SEQ ID NO: 415682 - RNA, 20 nt, Artificial Sequence
  Synthetic
ucuggugauacaaacauguu

SEQ ID NO: 415683 - RNA, 21 nt, Artificial Sequence
  Synthetic
gucuggugauacaaacauguu

SEQ ID NO: 415684 - RNA, 22 nt, Artificial Sequence
  Synthetic
ggucuggugauacaaacauguu

SEQ ID NO: 415685 - RNA, 23 nt, Artificial Sequence
  Synthetic
aggucuggugauacaaacauguu

SEQ ID NO: 415686 - RNA, 24 nt, Artificial Sequence
  Synthetic
uaggucuggugauacaaacauguu

SEQ ID NO: 415687 - RNA, 18 nt, Artificial Sequence
  Synthetic
uauuccaggagacauguu

SEQ ID NO: 415688 - RNA, 19 nt, Artificial Sequence
  Synthetic
auauuccaggagacauguu

SEQ ID NO: 415689 - RNA, 20 nt, Artificial Sequence
  Synthetic
cauauuccaggagacauguu

SEQ ID NO: 415690 - RNA, 21 nt, Artificial Sequence
  Synthetic
ucauauuccaggagacauguu

SEQ ID NO: 415691 - RNA, 22 nt, Artificial Sequence
  Synthetic
uucauauuccaggagacauguu

SEQ ID NO: 415692 - RNA, 23 nt, Artificial Sequence
  Synthetic
guucauauuccaggagacauguu

SEQ ID NO: 415693 - RNA, 24 nt, Artificial Sequence
  Synthetic
uguucauauuccaggagacauguu

SEQ ID NO: 415694 - RNA, 18 nt, Artificial Sequence
  Synthetic
guuucucuaggacauguu

SEQ ID NO: 415695 - RNA, 19 nt, Artificial Sequence
  Synthetic
uguuucucuaggacauguu

SEQ ID NO: 415696 - RNA, 20 nt, Artificial Sequence
  Synthetic
auguuucucuaggacauguu

SEQ ID NO: 415697 - RNA, 21 nt, Artificial Sequence
  Synthetic
gauguuucucuaggacauguu

SEQ ID NO: 415698 - RNA, 22 nt, Artificial Sequence
  Synthetic
ugauguuucucuaggacauguu

SEQ ID NO: 415699 - RNA, 23 nt, Artificial Sequence
  Synthetic
cugauguuucucuaggacauguu

SEQ ID NO: 415700 - RNA, 24 nt, Artificial Sequence
  Synthetic
ccugauguuucucuaggacauguu

SEQ ID NO: 415701 - RNA, 18 nt, Artificial Sequence
  Synthetic
cuguuuccuguacauguu

SEQ ID NO: 415702 - RNA, 19 nt, Artificial Sequence
  Synthetic
gcuguuuccuguacauguu

SEQ ID NO: 415703 - RNA, 20 nt, Artificial Sequence
  Synthetic
ugcuguuuccuguacauguu

SEQ ID NO: 415704 - RNA, 21 nt, Artificial Sequence
  Synthetic
uugcuguuuccuguacauguu

SEQ ID NO: 415705 - RNA, 22 nt, Artificial Sequence
  Synthetic
uuugcuguuuccuguacauguu

SEQ ID NO: 415706 - RNA, 23 nt, Artificial Sequence
  Synthetic
auuugcuguuuccuguacauguu

SEQ ID NO: 415707 - RNA, 24 nt, Artificial Sequence
  Synthetic
uauuugcuguuuccuguacauguu

SEQ ID NO: 415708 - RNA, 18 nt, Artificial Sequence
  Synthetic
gugacaaagaaccauguu

SEQ ID NO: 415709 - RNA, 19 nt, Artificial Sequence
  Synthetic
ugugacaaagaaccauguu

SEQ ID NO: 415710 - RNA, 20 nt, Artificial Sequence
  Synthetic
cugugacaaagaaccauguu

SEQ ID NO: 415711 - RNA, 21 nt, Artificial Sequence
  Synthetic
gcugugacaaagaaccauguu

SEQ ID NO: 415712 - RNA, 22 nt, Artificial Sequence
  Synthetic
ugcugugacaaagaaccauguu

SEQ ID NO: 415713 - RNA, 23 nt, Artificial Sequence
  Synthetic
cugcugugacaaagaaccauguu

SEQ ID NO: 415714 - RNA, 24 nt, Artificial Sequence
  Synthetic
ucugcugugacaaagaaccauguu

SEQ ID NO: 415715 - RNA, 18 nt, Artificial Sequence
  Synthetic
gaguggcaggcccauguu

SEQ ID NO: 415716 - RNA, 19 nt, Artificial Sequence
  Synthetic
agaguggcaggcccauguu

SEQ ID NO: 415717 - RNA, 20 nt, Artificial Sequence
  Synthetic
cagaguggcaggcccauguu

SEQ ID NO: 415718 - RNA, 21 nt, Artificial Sequence
  Synthetic
ccagaguggcaggcccauguu

SEQ ID NO: 415719 - RNA, 22 nt, Artificial Sequence
  Synthetic
accagaguggcaggcccauguu

SEQ ID NO: 415720 - RNA, 23 nt, Artificial Sequence
  Synthetic
gaccagaguggcaggcccauguu

SEQ ID NO: 415721 - RNA, 24 nt, Artificial Sequence
  Synthetic
ugaccagaguggcaggcccauguu

SEQ ID NO: 415722 - RNA, 18 nt, Artificial Sequence
  Synthetic
uacuaggaacagcauguu

SEQ ID NO: 415723 - RNA, 19 nt, Artificial Sequence
  Synthetic
auacuaggaacagcauguu

SEQ ID NO: 415724 - RNA, 20 nt, Artificial Sequence
  Synthetic
aauacuaggaacagcauguu

SEQ ID NO: 415725 - RNA, 21 nt, Artificial Sequence
  Synthetic
uaauacuaggaacagcauguu

SEQ ID NO: 415726 - RNA, 22 nt, Artificial Sequence
  Synthetic
auaauacuaggaacagcauguu

SEQ ID NO: 415727 - RNA, 23 nt, Artificial Sequence
  Synthetic
gauaauacuaggaacagcauguu

SEQ ID NO: 415728 - RNA, 24 nt, Artificial Sequence
  Synthetic
agauaauacuaggaacagcauguu

SEQ ID NO: 415729 - RNA, 18 nt, Artificial Sequence
  Synthetic
auuaauaaccagcauguu

SEQ ID NO: 415730 - RNA, 19 nt, Artificial Sequence
  Synthetic
aauuaauaaccagcauguu

SEQ ID NO: 415731 - RNA, 20 nt, Artificial Sequence
  Synthetic
uaauuaauaaccagcauguu

SEQ ID NO: 415732 - RNA, 21 nt, Artificial Sequence
  Synthetic
guaauuaauaaccagcauguu

SEQ ID NO: 415733 - RNA, 22 nt, Artificial Sequence
  Synthetic
aguaauuaauaaccagcauguu

SEQ ID NO: 415734 - RNA, 23 nt, Artificial Sequence
  Synthetic
gaguaauuaauaaccagcauguu

SEQ ID NO: 415735 - RNA, 24 nt, Artificial Sequence
  Synthetic
ggaguaauuaauaaccagcauguu

SEQ ID NO: 415736 - RNA, 18 nt, Artificial Sequence
  Synthetic
uuaauaggacaucauguu

SEQ ID NO: 415737 - RNA, 19 nt, Artificial Sequence
  Synthetic
auuaauaggacaucauguu

SEQ ID NO: 415738 - RNA, 20 nt, Artificial Sequence
  Synthetic
aauuaauaggacaucauguu

SEQ ID NO: 415739 - RNA, 21 nt, Artificial Sequence
  Synthetic
uaauuaauaggacaucauguu

SEQ ID NO: 415740 - RNA, 22 nt, Artificial Sequence
  Synthetic
uuaauuaauaggacaucauguu

SEQ ID NO: 415741 - RNA, 23 nt, Artificial Sequence
  Synthetic
uuuaauuaauaggacaucauguu

SEQ ID NO: 415742 - RNA, 24 nt, Artificial Sequence
  Synthetic
uuuuaauuaauaggacaucauguu

SEQ ID NO: 415743 - RNA, 18 nt, Artificial Sequence
  Synthetic
gccuaaauuauucauguu

SEQ ID NO: 415744 - RNA, 19 nt, Artificial Sequence
  Synthetic
ugccuaaauuauucauguu

SEQ ID NO: 415745 - RNA, 20 nt, Artificial Sequence
  Synthetic
cugccuaaauuauucauguu

SEQ ID NO: 415746 - RNA, 21 nt, Artificial Sequence
  Synthetic
ccugccuaaauuauucauguu

SEQ ID NO: 415747 - RNA, 22 nt, Artificial Sequence
  Synthetic
uccugccuaaauuauucauguu

SEQ ID NO: 415748 - RNA, 23 nt, Artificial Sequence
  Synthetic
cuccugccuaaauuauucauguu

SEQ ID NO: 415749 - RNA, 24 nt, Artificial Sequence
  Synthetic
ucuccugccuaaauuauucauguu

SEQ ID NO: 415750 - RNA, 18 nt, Artificial Sequence
  Synthetic
aggaugaaaaaagauguu

SEQ ID NO: 415751 - RNA, 19 nt, Artificial Sequence
  Synthetic
uaggaugaaaaaagauguu

SEQ ID NO: 415752 - RNA, 20 nt, Artificial Sequence
  Synthetic
guaggaugaaaaaagauguu

SEQ ID NO: 415753 - RNA, 21 nt, Artificial Sequence
  Synthetic
aguaggaugaaaaaagauguu

SEQ ID NO: 415754 - RNA, 22 nt, Artificial Sequence
  Synthetic
uaguaggaugaaaaaagauguu

SEQ ID NO: 415755 - RNA, 23 nt, Artificial Sequence
  Synthetic
uuaguaggaugaaaaaagauguu

SEQ ID NO: 415756 - RNA, 24 nt, Artificial Sequence
  Synthetic
cuuaguaggaugaaaaaagauguu

SEQ ID NO: 415757 - RNA, 18 nt, Artificial Sequence
  Synthetic
cauuuaaaaccagauguu

SEQ ID NO: 415758 - RNA, 19 nt, Artificial Sequence
  Synthetic
gcauuuaaaaccagauguu

SEQ ID NO: 415759 - RNA, 20 nt, Artificial Sequence
  Synthetic
agcauuuaaaaccagauguu

SEQ ID NO: 415760 - RNA, 21 nt, Artificial Sequence
  Synthetic
uagcauuuaaaaccagauguu

SEQ ID NO: 415761 - RNA, 22 nt, Artificial Sequence
  Synthetic
auagcauuuaaaaccagauguu

SEQ ID NO: 415762 - RNA, 23 nt, Artificial Sequence
  Synthetic
aauagcauuuaaaaccagauguu

SEQ ID NO: 415763 - RNA, 24 nt, Artificial Sequence
  Synthetic
uaauagcauuuaaaaccagauguu

SEQ ID NO: 415764 - RNA, 18 nt, Artificial Sequence
  Synthetic
aacauugaaccagauguu

SEQ ID NO: 415765 - RNA, 19 nt, Artificial Sequence
  Synthetic
gaacauugaaccagauguu

SEQ ID NO: 415766 - RNA, 20 nt, Artificial Sequence
  Synthetic
ugaacauugaaccagauguu

SEQ ID NO: 415767 - RNA, 21 nt, Artificial Sequence
  Synthetic
gugaacauugaaccagauguu

SEQ ID NO: 415768 - RNA, 22 nt, Artificial Sequence
  Synthetic
ugugaacauugaaccagauguu

SEQ ID NO: 415769 - RNA, 23 nt, Artificial Sequence
  Synthetic
cugugaacauugaaccagauguu

SEQ ID NO: 415770 - RNA, 24 nt, Artificial Sequence
  Synthetic
gcugugaacauugaaccagauguu

SEQ ID NO: 415771 - RNA, 18 nt, Artificial Sequence
  Synthetic
cugagacacucagauguu

SEQ ID NO: 415772 - RNA, 19 nt, Artificial Sequence
  Synthetic
ccugagacacucagauguu

SEQ ID NO: 415773 - RNA, 20 nt, Artificial Sequence
  Synthetic
cccugagacacucagauguu

SEQ ID NO: 415774 - RNA, 21 nt, Artificial Sequence
  Synthetic
gcccugagacacucagauguu

SEQ ID NO: 415775 - RNA, 22 nt, Artificial Sequence
  Synthetic
agcccugagacacucagauguu

SEQ ID NO: 415776 - RNA, 23 nt, Artificial Sequence
  Synthetic
aagcccugagacacucagauguu

SEQ ID NO: 415777 - RNA, 24 nt, Artificial Sequence
  Synthetic
caagcccugagacacucagauguu

SEQ ID NO: 415778 - RNA, 18 nt, Artificial Sequence
  Synthetic
cucccuaagagagauguu

SEQ ID NO: 415779 - RNA, 19 nt, Artificial Sequence
  Synthetic
ccucccuaagagagauguu

SEQ ID NO: 415780 - RNA, 20 nt, Artificial Sequence
  Synthetic
uccucccuaagagagauguu

SEQ ID NO: 415781 - RNA, 21 nt, Artificial Sequence
  Synthetic
uuccucccuaagagagauguu

SEQ ID NO: 415782 - RNA, 22 nt, Artificial Sequence
  Synthetic
auuccucccuaagagagauguu

SEQ ID NO: 415783 - RNA, 23 nt, Artificial Sequence
  Synthetic
cauuccucccuaagagagauguu

SEQ ID NO: 415784 - RNA, 24 nt, Artificial Sequence
  Synthetic
acauuccucccuaagagagauguu

SEQ ID NO: 415785 - RNA, 18 nt, Artificial Sequence
  Synthetic
agauauacuuuagauguu

SEQ ID NO: 415786 - RNA, 19 nt, Artificial Sequence
  Synthetic
aagauauacuuuagauguu

SEQ ID NO: 415787 - RNA, 20 nt, Artificial Sequence
  Synthetic
gaagauauacuuuagauguu

SEQ ID NO: 415788 - RNA, 21 nt, Artificial Sequence
  Synthetic
ggaagauauacuuuagauguu

SEQ ID NO: 415789 - RNA, 22 nt, Artificial Sequence
  Synthetic
aggaagauauacuuuagauguu

SEQ ID NO: 415790 - RNA, 23 nt, Artificial Sequence
  Synthetic
caggaagauauacuuuagauguu

SEQ ID NO: 415791 - RNA, 24 nt, Artificial Sequence
  Synthetic
ucaggaagauauacuuuagauguu

SEQ ID NO: 415792 - RNA, 18 nt, Artificial Sequence
  Synthetic
ugggugaauagggauguu

SEQ ID NO: 415793 - RNA, 19 nt, Artificial Sequence
  Synthetic
uugggugaauagggauguu

SEQ ID NO: 415794 - RNA, 20 nt, Artificial Sequence
  Synthetic
uuugggugaauagggauguu

SEQ ID NO: 415795 - RNA, 21 nt, Artificial Sequence
  Synthetic
cuuugggugaauagggauguu

SEQ ID NO: 415796 - RNA, 22 nt, Artificial Sequence
  Synthetic
ucuuugggugaauagggauguu

SEQ ID NO: 415797 - RNA, 23 nt, Artificial Sequence
  Synthetic
aucuuugggugaauagggauguu

SEQ ID NO: 415798 - RNA, 24 nt, Artificial Sequence
  Synthetic
aaucuuugggugaauagggauguu

SEQ ID NO: 415799 - RNA, 18 nt, Artificial Sequence
  Synthetic
uggaagcagugggauguu

SEQ ID NO: 415800 - RNA, 19 nt, Artificial Sequence
  Synthetic
cuggaagcagugggauguu

SEQ ID NO: 415801 - RNA, 20 nt, Artificial Sequence
  Synthetic
acuggaagcagugggauguu

SEQ ID NO: 415802 - RNA, 21 nt, Artificial Sequence
  Synthetic
aacuggaagcagugggauguu

SEQ ID NO: 415803 - RNA, 22 nt, Artificial Sequence
  Synthetic
caacuggaagcagugggauguu

SEQ ID NO: 415804 - RNA, 23 nt, Artificial Sequence
  Synthetic
gcaacuggaagcagugggauguu

SEQ ID NO: 415805 - RNA, 24 nt, Artificial Sequence
  Synthetic
agcaacuggaagcagugggauguu

SEQ ID NO: 415806 - RNA, 18 nt, Artificial Sequence
  Synthetic
uggaauuguaaugauguu

SEQ ID NO: 415807 - RNA, 19 nt, Artificial Sequence
  Synthetic
auggaauuguaaugauguu

SEQ ID NO: 415808 - RNA, 20 nt, Artificial Sequence
  Synthetic
aauggaauuguaaugauguu

SEQ ID NO: 415809 - RNA, 21 nt, Artificial Sequence
  Synthetic
aaauggaauuguaaugauguu

SEQ ID NO: 415810 - RNA, 22 nt, Artificial Sequence
  Synthetic
gaaauggaauuguaaugauguu

SEQ ID NO: 415811 - RNA, 23 nt, Artificial Sequence
  Synthetic
ugaaauggaauuguaaugauguu

SEQ ID NO: 415812 - RNA, 24 nt, Artificial Sequence
  Synthetic
uugaaauggaauuguaaugauguu

SEQ ID NO: 415813 - RNA, 18 nt, Artificial Sequence
  Synthetic
ugcuccagcacugauguu

SEQ ID NO: 415814 - RNA, 19 nt, Artificial Sequence
  Synthetic
cugcuccagcacugauguu

SEQ ID NO: 415815 - RNA, 20 nt, Artificial Sequence
  Synthetic
ucugcuccagcacugauguu

SEQ ID NO: 415816 - RNA, 21 nt, Artificial Sequence
  Synthetic
uucugcuccagcacugauguu

SEQ ID NO: 415817 - RNA, 22 nt, Artificial Sequence
  Synthetic
guucugcuccagcacugauguu

SEQ ID NO: 415818 - RNA, 23 nt, Artificial Sequence
  Synthetic
gguucugcuccagcacugauguu

SEQ ID NO: 415819 - RNA, 24 nt, Artificial Sequence
  Synthetic
ggguucugcuccagcacugauguu

SEQ ID NO: 415820 - RNA, 18 nt, Artificial Sequence
  Synthetic
cugccuuagacugauguu

SEQ ID NO: 415821 - RNA, 19 nt, Artificial Sequence
  Synthetic
acugccuuagacugauguu

SEQ ID NO: 415822 - RNA, 20 nt, Artificial Sequence
  Synthetic
cacugccuuagacugauguu

SEQ ID NO: 415823 - RNA, 21 nt, Artificial Sequence
  Synthetic
ucacugccuuagacugauguu

SEQ ID NO: 415824 - RNA, 22 nt, Artificial Sequence
  Synthetic
aucacugccuuagacugauguu

SEQ ID NO: 415825 - RNA, 23 nt, Artificial Sequence
  Synthetic
aaucacugccuuagacugauguu

SEQ ID NO: 415826 - RNA, 24 nt, Artificial Sequence
  Synthetic
gaaucacugccuuagacugauguu

SEQ ID NO: 415827 - RNA, 18 nt, Artificial Sequence
  Synthetic
ugggaucaggcugauguu

SEQ ID NO: 415828 - RNA, 19 nt, Artificial Sequence
  Synthetic
gugggaucaggcugauguu

SEQ ID NO: 415829 - RNA, 20 nt, Artificial Sequence
  Synthetic
agugggaucaggcugauguu

SEQ ID NO: 415830 - RNA, 21 nt, Artificial Sequence
  Synthetic
cagugggaucaggcugauguu

SEQ ID NO: 415831 - RNA, 22 nt, Artificial Sequence
  Synthetic
gcagugggaucaggcugauguu

SEQ ID NO: 415832 - RNA, 23 nt, Artificial Sequence
  Synthetic
agcagugggaucaggcugauguu

SEQ ID NO: 415833 - RNA, 24 nt, Artificial Sequence
  Synthetic
uagcagugggaucaggcugauguu

SEQ ID NO: 415834 - RNA, 18 nt, Artificial Sequence
  Synthetic
agaguuuccguugauguu

SEQ ID NO: 415835 - RNA, 19 nt, Artificial Sequence
  Synthetic
cagaguuuccguugauguu

SEQ ID NO: 415836 - RNA, 20 nt, Artificial Sequence
  Synthetic
ucagaguuuccguugauguu

SEQ ID NO: 415837 - RNA, 21 nt, Artificial Sequence
  Synthetic
uucagaguuuccguugauguu

SEQ ID NO: 415838 - RNA, 22 nt, Artificial Sequence
  Synthetic
uuucagaguuuccguugauguu

SEQ ID NO: 415839 - RNA, 23 nt, Artificial Sequence
  Synthetic
auuucagaguuuccguugauguu

SEQ ID NO: 415840 - RNA, 24 nt, Artificial Sequence
  Synthetic
aauuucagaguuuccguugauguu

SEQ ID NO: 415841 - RNA, 18 nt, Artificial Sequence
  Synthetic
uucaauaauguugauguu

SEQ ID NO: 415842 - RNA, 19 nt, Artificial Sequence
  Synthetic
uuucaauaauguugauguu

SEQ ID NO: 415843 - RNA, 20 nt, Artificial Sequence
  Synthetic
guuucaauaauguugauguu

SEQ ID NO: 415844 - RNA, 21 nt, Artificial Sequence
  Synthetic
uguuucaauaauguugauguu

SEQ ID NO: 415845 - RNA, 22 nt, Artificial Sequence
  Synthetic
auguuucaauaauguugauguu

SEQ ID NO: 415846 - RNA, 23 nt, Artificial Sequence
  Synthetic
uauguuucaauaauguugauguu

SEQ ID NO: 415847 - RNA, 24 nt, Artificial Sequence
  Synthetic
cuauguuucaauaauguugauguu

SEQ ID NO: 415848 - RNA, 18 nt, Artificial Sequence
  Synthetic
auuacuuucaaauauguu

SEQ ID NO: 415849 - RNA, 19 nt, Artificial Sequence
  Synthetic
cauuacuuucaaauauguu

SEQ ID NO: 415850 - RNA, 20 nt, Artificial Sequence
  Synthetic
ucauuacuuucaaauauguu

SEQ ID NO: 415851 - RNA, 21 nt, Artificial Sequence
  Synthetic
uucauuacuuucaaauauguu

SEQ ID NO: 415852 - RNA, 22 nt, Artificial Sequence
  Synthetic
cuucauuacuuucaaauauguu

SEQ ID NO: 415853 - RNA, 23 nt, Artificial Sequence
  Synthetic
ccuucauuacuuucaaauauguu

SEQ ID NO: 415854 - RNA, 24 nt, Artificial Sequence
  Synthetic
cccuucauuacuuucaaauauguu

SEQ ID NO: 415855 - RNA, 18 nt, Artificial Sequence
  Synthetic
acuaguugucaauauguu

SEQ ID NO: 415856 - RNA, 19 nt, Artificial Sequence
  Synthetic
gacuaguugucaauauguu

SEQ ID NO: 415857 - RNA, 20 nt, Artificial Sequence
  Synthetic
ugacuaguugucaauauguu

SEQ ID NO: 415858 - RNA, 21 nt, Artificial Sequence
  Synthetic
augacuaguugucaauauguu

SEQ ID NO: 415859 - RNA, 22 nt, Artificial Sequence
  Synthetic
aaugacuaguugucaauauguu

SEQ ID NO: 415860 - RNA, 23 nt, Artificial Sequence
  Synthetic
aaaugacuaguugucaauauguu

SEQ ID NO: 415861 - RNA, 24 nt, Artificial Sequence
  Synthetic
gaaaugacuaguugucaauauguu

SEQ ID NO: 415862 - RNA, 18 nt, Artificial Sequence
  Synthetic
gaaauuauugaauauguu

SEQ ID NO: 415863 - RNA, 19 nt, Artificial Sequence
  Synthetic
ggaaauuauugaauauguu

SEQ ID NO: 415864 - RNA, 20 nt, Artificial Sequence
  Synthetic
uggaaauuauugaauauguu

SEQ ID NO: 415865 - RNA, 21 nt, Artificial Sequence
  Synthetic
guggaaauuauugaauauguu

SEQ ID NO: 415866 - RNA, 22 nt, Artificial Sequence
  Synthetic
uguggaaauuauugaauauguu

SEQ ID NO: 415867 - RNA, 23 nt, Artificial Sequence
  Synthetic
guguggaaauuauugaauauguu

SEQ ID NO: 415868 - RNA, 24 nt, Artificial Sequence
  Synthetic
aguguggaaauuauugaauauguu

SEQ ID NO: 415869 - RNA, 18 nt, Artificial Sequence
  Synthetic
cuauguuaagcauauguu

SEQ ID NO: 415870 - RNA, 19 nt, Artificial Sequence
  Synthetic
ucuauguuaagcauauguu

SEQ ID NO: 415871 - RNA, 20 nt, Artificial Sequence
  Synthetic
cucuauguuaagcauauguu

SEQ ID NO: 415872 - RNA, 21 nt, Artificial Sequence
  Synthetic
acucuauguuaagcauauguu

SEQ ID NO: 415873 - RNA, 22 nt, Artificial Sequence
  Synthetic
uacucuauguuaagcauauguu

SEQ ID NO: 415874 - RNA, 23 nt, Artificial Sequence
  Synthetic
cuacucuauguuaagcauauguu

SEQ ID NO: 415875 - RNA, 24 nt, Artificial Sequence
  Synthetic
ccuacucuauguuaagcauauguu

SEQ ID NO: 415876 - RNA, 18 nt, Artificial Sequence
  Synthetic
uaacaaaugagauauguu

SEQ ID NO: 415877 - RNA, 19 nt, Artificial Sequence
  Synthetic
uuaacaaaugagauauguu

SEQ ID NO: 415878 - RNA, 20 nt, Artificial Sequence
  Synthetic
cuuaacaaaugagauauguu

SEQ ID NO: 415879 - RNA, 21 nt, Artificial Sequence
  Synthetic
ucuuaacaaaugagauauguu

SEQ ID NO: 415880 - RNA, 22 nt, Artificial Sequence
  Synthetic
uucuuaacaaaugagauauguu

SEQ ID NO: 415881 - RNA, 23 nt, Artificial Sequence
  Synthetic
uuucuuaacaaaugagauauguu

SEQ ID NO: 415882 - RNA, 24 nt, Artificial Sequence
  Synthetic
auuucuuaacaaaugagauauguu

SEQ ID NO: 415883 - RNA, 18 nt, Artificial Sequence
  Synthetic
aauuuuaucaacuauguu

SEQ ID NO: 415884 - RNA, 19 nt, Artificial Sequence
  Synthetic
gaauuuuaucaacuauguu

SEQ ID NO: 415885 - RNA, 20 nt, Artificial Sequence
  Synthetic
ggaauuuuaucaacuauguu

SEQ ID NO: 415886 - RNA, 21 nt, Artificial Sequence
  Synthetic
aggaauuuuaucaacuauguu

SEQ ID NO: 415887 - RNA, 22 nt, Artificial Sequence
  Synthetic
aaggaauuuuaucaacuauguu

SEQ ID NO: 415888 - RNA, 23 nt, Artificial Sequence
  Synthetic
gaaggaauuuuaucaacuauguu

SEQ ID NO: 415889 - RNA, 24 nt, Artificial Sequence
  Synthetic
agaaggaauuuuaucaacuauguu

SEQ ID NO: 415890 - RNA, 18 nt, Artificial Sequence
  Synthetic
accauaaaacgcuauguu

SEQ ID NO: 415891 - RNA, 19 nt, Artificial Sequence
  Synthetic
caccauaaaacgcuauguu

SEQ ID NO: 415892 - RNA, 20 nt, Artificial Sequence
  Synthetic
ucaccauaaaacgcuauguu

SEQ ID NO: 415893 - RNA, 21 nt, Artificial Sequence
  Synthetic
gucaccauaaaacgcuauguu

SEQ ID NO: 415894 - RNA, 22 nt, Artificial Sequence
  Synthetic
agucaccauaaaacgcuauguu

SEQ ID NO: 415895 - RNA, 23 nt, Artificial Sequence
  Synthetic
aagucaccauaaaacgcuauguu

SEQ ID NO: 415896 - RNA, 24 nt, Artificial Sequence
  Synthetic
aaagucaccauaaaacgcuauguu

SEQ ID NO: 415897 - RNA, 18 nt, Artificial Sequence
  Synthetic
gauacuggaaaguauguu

SEQ ID NO: 415898 - RNA, 19 nt, Artificial Sequence
  Synthetic
agauacuggaaaguauguu

SEQ ID NO: 415899 - RNA, 20 nt, Artificial Sequence
  Synthetic
aagauacuggaaaguauguu

SEQ ID NO: 415900 - RNA, 21 nt, Artificial Sequence
  Synthetic
aaagauacuggaaaguauguu

SEQ ID NO: 415901 - RNA, 22 nt, Artificial Sequence
  Synthetic
gaaagauacuggaaaguauguu

SEQ ID NO: 415902 - RNA, 23 nt, Artificial Sequence
  Synthetic
ugaaagauacuggaaaguauguu

SEQ ID NO: 415903 - RNA, 24 nt, Artificial Sequence
  Synthetic
uugaaagauacuggaaaguauguu

SEQ ID NO: 415904 - RNA, 18 nt, Artificial Sequence
  Synthetic
gcuguauccucguauguu

SEQ ID NO: 415905 - RNA, 19 nt, Artificial Sequence
  Synthetic
ugcuguauccucguauguu

SEQ ID NO: 415906 - RNA, 20 nt, Artificial Sequence
  Synthetic
uugcuguauccucguauguu

SEQ ID NO: 415907 - RNA, 21 nt, Artificial Sequence
  Synthetic
cuugcuguauccucguauguu

SEQ ID NO: 415908 - RNA, 22 nt, Artificial Sequence
  Synthetic
ucuugcuguauccucguauguu

SEQ ID NO: 415909 - RNA, 23 nt, Artificial Sequence
  Synthetic
uucuugcuguauccucguauguu

SEQ ID NO: 415910 - RNA, 24 nt, Artificial Sequence
  Synthetic
cuucuugcuguauccucguauguu

SEQ ID NO: 415911 - RNA, 18 nt, Artificial Sequence
  Synthetic
auugcucuaagguauguu

SEQ ID NO: 415912 - RNA, 19 nt, Artificial Sequence
  Synthetic
uauugcucuaagguauguu

SEQ ID NO: 415913 - RNA, 20 nt, Artificial Sequence
  Synthetic
guauugcucuaagguauguu

SEQ ID NO: 415914 - RNA, 21 nt, Artificial Sequence
  Synthetic
aguauugcucuaagguauguu

SEQ ID NO: 415915 - RNA, 22 nt, Artificial Sequence
  Synthetic
gaguauugcucuaagguauguu

SEQ ID NO: 415916 - RNA, 23 nt, Artificial Sequence
  Synthetic
agaguauugcucuaagguauguu

SEQ ID NO: 415917 - RNA, 24 nt, Artificial Sequence
  Synthetic
cagaguauugcucuaagguauguu

SEQ ID NO: 415918 - RNA, 18 nt, Artificial Sequence
  Synthetic
auacauaccauguauguu

SEQ ID NO: 415919 - RNA, 19 nt, Artificial Sequence
  Synthetic
cauacauaccauguauguu

SEQ ID NO: 415920 - RNA, 20 nt, Artificial Sequence
  Synthetic
acauacauaccauguauguu

SEQ ID NO: 415921 - RNA, 21 nt, Artificial Sequence
  Synthetic
uacauacauaccauguauguu

SEQ ID NO: 415922 - RNA, 22 nt, Artificial Sequence
  Synthetic
auacauacauaccauguauguu

SEQ ID NO: 415923 - RNA, 23 nt, Artificial Sequence
  Synthetic
uauacauacauaccauguauguu

SEQ ID NO: 415924 - RNA, 24 nt, Artificial Sequence
  Synthetic
auauacauacauaccauguauguu

SEQ ID NO: 415925 - RNA, 18 nt, Artificial Sequence
  Synthetic
gugacagcagauuauguu

SEQ ID NO: 415926 - RNA, 19 nt, Artificial Sequence
  Synthetic
ugugacagcagauuauguu

SEQ ID NO: 415927 - RNA, 20 nt, Artificial Sequence
  Synthetic
augugacagcagauuauguu

SEQ ID NO: 415928 - RNA, 21 nt, Artificial Sequence
  Synthetic
aaugugacagcagauuauguu

SEQ ID NO: 415929 - RNA, 22 nt, Artificial Sequence
  Synthetic
gaaugugacagcagauuauguu

SEQ ID NO: 415930 - RNA, 23 nt, Artificial Sequence
  Synthetic
agaaugugacagcagauuauguu

SEQ ID NO: 415931 - RNA, 24 nt, Artificial Sequence
  Synthetic
aagaaugugacagcagauuauguu

SEQ ID NO: 415932 - RNA, 18 nt, Artificial Sequence
  Synthetic
caagacuuagauuauguu

SEQ ID NO: 415933 - RNA, 19 nt, Artificial Sequence
  Synthetic
ccaagacuuagauuauguu

SEQ ID NO: 415934 - RNA, 20 nt, Artificial Sequence
  Synthetic
cccaagacuuagauuauguu

SEQ ID NO: 415935 - RNA, 21 nt, Artificial Sequence
  Synthetic
acccaagacuuagauuauguu

SEQ ID NO: 415936 - RNA, 22 nt, Artificial Sequence
  Synthetic
aacccaagacuuagauuauguu

SEQ ID NO: 415937 - RNA, 23 nt, Artificial Sequence
  Synthetic
gaacccaagacuuagauuauguu

SEQ ID NO: 415938 - RNA, 24 nt, Artificial Sequence
  Synthetic
ggaacccaagacuuagauuauguu

SEQ ID NO: 415939 - RNA, 18 nt, Artificial Sequence
  Synthetic
uaugcucucauuuauguu

SEQ ID NO: 415940 - RNA, 19 nt, Artificial Sequence
  Synthetic
uuaugcucucauuuauguu

SEQ ID NO: 415941 - RNA, 20 nt, Artificial Sequence
  Synthetic
uuuaugcucucauuuauguu

SEQ ID NO: 415942 - RNA, 21 nt, Artificial Sequence
  Synthetic
uuuuaugcucucauuuauguu

SEQ ID NO: 415943 - RNA, 22 nt, Artificial Sequence
  Synthetic
uuuuuaugcucucauuuauguu

SEQ ID NO: 415944 - RNA, 23 nt, Artificial Sequence
  Synthetic
auuuuuaugcucucauuuauguu

SEQ ID NO: 415945 - RNA, 24 nt, Artificial Sequence
  Synthetic
aauuuuuaugcucucauuuauguu

SEQ ID NO: 415946 - RNA, 18 nt, Artificial Sequence
  Synthetic
ugaaaacuccuuuauguu

SEQ ID NO: 415947 - RNA, 19 nt, Artificial Sequence
  Synthetic
uugaaaacuccuuuauguu

SEQ ID NO: 415948 - RNA, 20 nt, Artificial Sequence
  Synthetic
uuugaaaacuccuuuauguu

SEQ ID NO: 415949 - RNA, 21 nt, Artificial Sequence
  Synthetic
uuuugaaaacuccuuuauguu

SEQ ID NO: 415950 - RNA, 22 nt, Artificial Sequence
  Synthetic
auuuugaaaacuccuuuauguu

SEQ ID NO: 415951 - RNA, 23 nt, Artificial Sequence
  Synthetic
uauuuugaaaacuccuuuauguu

SEQ ID NO: 415952 - RNA, 24 nt, Artificial Sequence
  Synthetic
auauuuugaaaacuccuuuauguu

SEQ ID NO: 415953 - RNA, 18 nt, Artificial Sequence
  Synthetic
ugagugcagcuuuauguu

SEQ ID NO: 415954 - RNA, 19 nt, Artificial Sequence
  Synthetic
uugagugcagcuuuauguu

SEQ ID NO: 415955 - RNA, 20 nt, Artificial Sequence
  Synthetic
uuugagugcagcuuuauguu

SEQ ID NO: 415956 - RNA, 21 nt, Artificial Sequence
  Synthetic
auuugagugcagcuuuauguu

SEQ ID NO: 415957 - RNA, 22 nt, Artificial Sequence
  Synthetic
aauuugagugcagcuuuauguu

SEQ ID NO: 415958 - RNA, 23 nt, Artificial Sequence
  Synthetic
uaauuugagugcagcuuuauguu

SEQ ID NO: 415959 - RNA, 24 nt, Artificial Sequence
  Synthetic
uuaauuugagugcagcuuuauguu

SEQ ID NO: 415960 - RNA, 18 nt, Artificial Sequence
  Synthetic
gucaauaguguuuauguu

SEQ ID NO: 415961 - RNA, 19 nt, Artificial Sequence
  Synthetic
ugucaauaguguuuauguu

SEQ ID NO: 415962 - RNA, 20 nt, Artificial Sequence
  Synthetic
gugucaauaguguuuauguu

SEQ ID NO: 415963 - RNA, 21 nt, Artificial Sequence
  Synthetic
agugucaauaguguuuauguu

SEQ ID NO: 415964 - RNA, 22 nt, Artificial Sequence
  Synthetic
aagugucaauaguguuuauguu

SEQ ID NO: 415965 - RNA, 23 nt, Artificial Sequence
  Synthetic
aaagugucaauaguguuuauguu

SEQ ID NO: 415966 - RNA, 24 nt, Artificial Sequence
  Synthetic
caaagugucaauaguguuuauguu

SEQ ID NO: 415967 - RNA, 18 nt, Artificial Sequence
  Synthetic
accuuucacuuuuauguu

SEQ ID NO: 415968 - RNA, 19 nt, Artificial Sequence
  Synthetic
caccuuucacuuuuauguu

SEQ ID NO: 415969 - RNA, 20 nt, Artificial Sequence
  Synthetic
ccaccuuucacuuuuauguu

SEQ ID NO: 415970 - RNA, 21 nt, Artificial Sequence
  Synthetic
uccaccuuucacuuuuauguu

SEQ ID NO: 415971 - RNA, 22 nt, Artificial Sequence
  Synthetic
cuccaccuuucacuuuuauguu

SEQ ID NO: 415972 - RNA, 23 nt, Artificial Sequence
  Synthetic
gcuccaccuuucacuuuuauguu

SEQ ID NO: 415973 - RNA, 24 nt, Artificial Sequence
  Synthetic
ugcuccaccuuucacuuuuauguu

SEQ ID NO: 415974 - RNA, 18 nt, Artificial Sequence
  Synthetic
uaauucuauuuuuauguu

SEQ ID NO: 415975 - RNA, 19 nt, Artificial Sequence
  Synthetic
auaauucuauuuuuauguu

SEQ ID NO: 415976 - RNA, 20 nt, Artificial Sequence
  Synthetic
gauaauucuauuuuuauguu

SEQ ID NO: 415977 - RNA, 21 nt, Artificial Sequence
  Synthetic
ugauaauucuauuuuuauguu

SEQ ID NO: 415978 - RNA, 22 nt, Artificial Sequence
  Synthetic
augauaauucuauuuuuauguu

SEQ ID NO: 415979 - RNA, 23 nt, Artificial Sequence
  Synthetic
uaugauaauucuauuuuuauguu

SEQ ID NO: 415980 - RNA, 24 nt, Artificial Sequence
  Synthetic
auaugauaauucuauuuuuauguu

SEQ ID NO: 415981 - RNA, 18 nt, Artificial Sequence
  Synthetic
uuuauucuucccacuguu

SEQ ID NO: 415982 - RNA, 19 nt, Artificial Sequence
  Synthetic
guuuauucuucccacuguu

SEQ ID NO: 415983 - RNA, 20 nt, Artificial Sequence
  Synthetic
uguuuauucuucccacuguu

SEQ ID NO: 415984 - RNA, 21 nt, Artificial Sequence
  Synthetic
uuguuuauucuucccacuguu

SEQ ID NO: 415985 - RNA, 22 nt, Artificial Sequence
  Synthetic
auuguuuauucuucccacuguu

SEQ ID NO: 415986 - RNA, 23 nt, Artificial Sequence
  Synthetic
uauuguuuauucuucccacuguu

SEQ ID NO: 415987 - RNA, 24 nt, Artificial Sequence
  Synthetic
guauuguuuauucuucccacuguu

SEQ ID NO: 415988 - RNA, 18 nt, Artificial Sequence
  Synthetic
aaaauaagacucacuguu

SEQ ID NO: 415989 - RNA, 19 nt, Artificial Sequence
  Synthetic
caaaauaagacucacuguu

SEQ ID NO: 415990 - RNA, 20 nt, Artificial Sequence
  Synthetic
acaaaauaagacucacuguu

SEQ ID NO: 415991 - RNA, 21 nt, Artificial Sequence
  Synthetic
cacaaaauaagacucacuguu

SEQ ID NO: 415992 - RNA, 22 nt, Artificial Sequence
  Synthetic
acacaaaauaagacucacuguu

SEQ ID NO: 415993 - RNA, 23 nt, Artificial Sequence
  Synthetic
aacacaaaauaagacucacuguu

SEQ ID NO: 415994 - RNA, 24 nt, Artificial Sequence
  Synthetic
gaacacaaaauaagacucacuguu

SEQ ID NO: 415995 - RNA, 18 nt, Artificial Sequence
  Synthetic
aacuuauuucucacuguu

SEQ ID NO: 415996 - RNA, 19 nt, Artificial Sequence
  Synthetic
aaacuuauuucucacuguu

SEQ ID NO: 415997 - RNA, 20 nt, Artificial Sequence
  Synthetic
aaaacuuauuucucacuguu

SEQ ID NO: 415998 - RNA, 21 nt, Artificial Sequence
  Synthetic
aaaaacuuauuucucacuguu

SEQ ID NO: 415999 - RNA, 22 nt, Artificial Sequence
  Synthetic
caaaaacuuauuucucacuguu

SEQ ID NO: 416000 - RNA, 23 nt, Artificial Sequence
  Synthetic
acaaaaacuuauuucucacuguu

SEQ ID NO: 416001 - RNA, 24 nt, Artificial Sequence
  Synthetic
aacaaaaacuuauuucucacuguu

SEQ ID NO: 416002 - RNA, 18 nt, Artificial Sequence
  Synthetic
ggaggagguuucacuguu

SEQ ID NO: 416003 - RNA, 19 nt, Artificial Sequence
  Synthetic
uggaggagguuucacuguu

SEQ ID NO: 416004 - RNA, 20 nt, Artificial Sequence
  Synthetic
auggaggagguuucacuguu

SEQ ID NO: 416005 - RNA, 21 nt, Artificial Sequence
  Synthetic
aauggaggagguuucacuguu

SEQ ID NO: 416006 - RNA, 22 nt, Artificial Sequence
  Synthetic
uaauggaggagguuucacuguu

SEQ ID NO: 416007 - RNA, 23 nt, Artificial Sequence
  Synthetic
uuaauggaggagguuucacuguu

SEQ ID NO: 416008 - RNA, 24 nt, Artificial Sequence
  Synthetic
cuuaauggaggagguuucacuguu

SEQ ID NO: 416009 - RNA, 18 nt, Artificial Sequence
  Synthetic
aauguuugaaggacuguu

SEQ ID NO: 416010 - RNA, 19 nt, Artificial Sequence
  Synthetic
aaauguuugaaggacuguu

SEQ ID NO: 416011 - RNA, 20 nt, Artificial Sequence
  Synthetic
caaauguuugaaggacuguu

SEQ ID NO: 416012 - RNA, 21 nt, Artificial Sequence
  Synthetic
ucaaauguuugaaggacuguu

SEQ ID NO: 416013 - RNA, 22 nt, Artificial Sequence
  Synthetic
uucaaauguuugaaggacuguu

SEQ ID NO: 416014 - RNA, 23 nt, Artificial Sequence
  Synthetic
cuucaaauguuugaaggacuguu

SEQ ID NO: 416015 - RNA, 24 nt, Artificial Sequence
  Synthetic
ucuucaaauguuugaaggacuguu

SEQ ID NO: 416016 - RNA, 18 nt, Artificial Sequence
  Synthetic
cacacucuggggacuguu

SEQ ID NO: 416017 - RNA, 19 nt, Artificial Sequence
  Synthetic
ucacacucuggggacuguu

SEQ ID NO: 416018 - RNA, 20 nt, Artificial Sequence
  Synthetic
aucacacucuggggacuguu

SEQ ID NO: 416019 - RNA, 21 nt, Artificial Sequence
  Synthetic
caucacacucuggggacuguu

SEQ ID NO: 416020 - RNA, 22 nt, Artificial Sequence
  Synthetic
acaucacacucuggggacuguu

SEQ ID NO: 416021 - RNA, 23 nt, Artificial Sequence
  Synthetic
aacaucacacucuggggacuguu

SEQ ID NO: 416022 - RNA, 24 nt, Artificial Sequence
  Synthetic
gaacaucacacucuggggacuguu

SEQ ID NO: 416023 - RNA, 18 nt, Artificial Sequence
  Synthetic
agacuuugggugacuguu

SEQ ID NO: 416024 - RNA, 19 nt, Artificial Sequence
  Synthetic
aagacuuugggugacuguu

SEQ ID NO: 416025 - RNA, 20 nt, Artificial Sequence
  Synthetic
uaagacuuugggugacuguu

SEQ ID NO: 416026 - RNA, 21 nt, Artificial Sequence
  Synthetic
uuaagacuuugggugacuguu

SEQ ID NO: 416027 - RNA, 22 nt, Artificial Sequence
  Synthetic
guuaagacuuugggugacuguu

SEQ ID NO: 416028 - RNA, 23 nt, Artificial Sequence
  Synthetic
aguuaagacuuugggugacuguu

SEQ ID NO: 416029 - RNA, 24 nt, Artificial Sequence
  Synthetic
gaguuaagacuuugggugacuguu

SEQ ID NO: 416030 - RNA, 18 nt, Artificial Sequence
  Synthetic
cuuccuuuuuugacuguu

SEQ ID NO: 416031 - RNA, 19 nt, Artificial Sequence
  Synthetic
gcuuccuuuuuugacuguu

SEQ ID NO: 416032 - RNA, 20 nt, Artificial Sequence
  Synthetic
cgcuuccuuuuuugacuguu

SEQ ID NO: 416033 - RNA, 21 nt, Artificial Sequence
  Synthetic
acgcuuccuuuuuugacuguu

SEQ ID NO: 416034 - RNA, 22 nt, Artificial Sequence
  Synthetic
aacgcuuccuuuuuugacuguu

SEQ ID NO: 416035 - RNA, 23 nt, Artificial Sequence
  Synthetic
aaacgcuuccuuuuuugacuguu

SEQ ID NO: 416036 - RNA, 24 nt, Artificial Sequence
  Synthetic
aaaacgcuuccuuuuuugacuguu

SEQ ID NO: 416037 - RNA, 18 nt, Artificial Sequence
  Synthetic
cuguauuuuccuacuguu

SEQ ID NO: 416038 - RNA, 19 nt, Artificial Sequence
  Synthetic
ucuguauuuuccuacuguu

SEQ ID NO: 416039 - RNA, 20 nt, Artificial Sequence
  Synthetic
aucuguauuuuccuacuguu

SEQ ID NO: 416040 - RNA, 21 nt, Artificial Sequence
  Synthetic
aaucuguauuuuccuacuguu

SEQ ID NO: 416041 - RNA, 22 nt, Artificial Sequence
  Synthetic
gaaucuguauuuuccuacuguu

SEQ ID NO: 416042 - RNA, 23 nt, Artificial Sequence
  Synthetic
agaaucuguauuuuccuacuguu

SEQ ID NO: 416043 - RNA, 24 nt, Artificial Sequence
  Synthetic
aagaaucuguauuuuccuacuguu

SEQ ID NO: 416044 - RNA, 18 nt, Artificial Sequence
  Synthetic
auuuguuauuuuacuguu

SEQ ID NO: 416045 - RNA, 19 nt, Artificial Sequence
  Synthetic
cauuuguuauuuuacuguu

SEQ ID NO: 416046 - RNA, 20 nt, Artificial Sequence
  Synthetic
ucauuuguuauuuuacuguu

SEQ ID NO: 416047 - RNA, 21 nt, Artificial Sequence
  Synthetic
cucauuuguuauuuuacuguu

SEQ ID NO: 416048 - RNA, 22 nt, Artificial Sequence
  Synthetic
ucucauuuguuauuuuacuguu

SEQ ID NO: 416049 - RNA, 23 nt, Artificial Sequence
  Synthetic
aucucauuuguuauuuuacuguu

SEQ ID NO: 416050 - RNA, 24 nt, Artificial Sequence
  Synthetic
uaucucauuuguuauuuuacuguu

SEQ ID NO: 416051 - RNA, 18 nt, Artificial Sequence
  Synthetic
acucccuaaaaaccuguu

SEQ ID NO: 416052 - RNA, 19 nt, Artificial Sequence
  Synthetic
aacucccuaaaaaccuguu

SEQ ID NO: 416053 - RNA, 20 nt, Artificial Sequence
  Synthetic
uaacucccuaaaaaccuguu

SEQ ID NO: 416054 - RNA, 21 nt, Artificial Sequence
  Synthetic
auaacucccuaaaaaccuguu

SEQ ID NO: 416055 - RNA, 22 nt, Artificial Sequence
  Synthetic
aauaacucccuaaaaaccuguu

SEQ ID NO: 416056 - RNA, 23 nt, Artificial Sequence
  Synthetic
uaauaacucccuaaaaaccuguu

SEQ ID NO: 416057 - RNA, 24 nt, Artificial Sequence
  Synthetic
uuaauaacucccuaaaaaccuguu

SEQ ID NO: 416058 - RNA, 18 nt, Artificial Sequence
  Synthetic
acaggucagugaccuguu

SEQ ID NO: 416059 - RNA, 19 nt, Artificial Sequence
  Synthetic
uacaggucagugaccuguu

SEQ ID NO: 416060 - RNA, 20 nt, Artificial Sequence
  Synthetic
guacaggucagugaccuguu

SEQ ID NO: 416061 - RNA, 21 nt, Artificial Sequence
  Synthetic
aguacaggucagugaccuguu

SEQ ID NO: 416062 - RNA, 22 nt, Artificial Sequence
  Synthetic
caguacaggucagugaccuguu

SEQ ID NO: 416063 - RNA, 23 nt, Artificial Sequence
  Synthetic
ccaguacaggucagugaccuguu

SEQ ID NO: 416064 - RNA, 24 nt, Artificial Sequence
  Synthetic
accaguacaggucagugaccuguu

SEQ ID NO: 416065 - RNA, 18 nt, Artificial Sequence
  Synthetic
cacacaccagggccuguu

SEQ ID NO: 416066 - RNA, 19 nt, Artificial Sequence
  Synthetic
ucacacaccagggccuguu

SEQ ID NO: 416067 - RNA, 20 nt, Artificial Sequence
  Synthetic
aucacacaccagggccuguu

SEQ ID NO: 416068 - RNA, 21 nt, Artificial Sequence
  Synthetic
caucacacaccagggccuguu

SEQ ID NO: 416069 - RNA, 22 nt, Artificial Sequence
  Synthetic
acaucacacaccagggccuguu

SEQ ID NO: 416070 - RNA, 23 nt, Artificial Sequence
  Synthetic
aacaucacacaccagggccuguu

SEQ ID NO: 416071 - RNA, 24 nt, Artificial Sequence
  Synthetic
gaacaucacacaccagggccuguu

SEQ ID NO: 416072 - RNA, 18 nt, Artificial Sequence
  Synthetic
cacacaccggggccuguu

SEQ ID NO: 416073 - RNA, 19 nt, Artificial Sequence
  Synthetic
ucacacaccggggccuguu

SEQ ID NO: 416074 - RNA, 20 nt, Artificial Sequence
  Synthetic
aucacacaccggggccuguu

SEQ ID NO: 416075 - RNA, 18 nt, Artificial Sequence
  Synthetic
uaaagaaagaugccuguu

SEQ ID NO: 416076 - RNA, 19 nt, Artificial Sequence
  Synthetic
uuaaagaaagaugccuguu

SEQ ID NO: 416077 - RNA, 20 nt, Artificial Sequence
  Synthetic
cuuaaagaaagaugccuguu

SEQ ID NO: 416078 - RNA, 21 nt, Artificial Sequence
  Synthetic
ucuuaaagaaagaugccuguu

SEQ ID NO: 416079 - RNA, 22 nt, Artificial Sequence
  Synthetic
cucuuaaagaaagaugccuguu

SEQ ID NO: 416080 - RNA, 23 nt, Artificial Sequence
  Synthetic
ucucuuaaagaaagaugccuguu

SEQ ID NO: 416081 - RNA, 24 nt, Artificial Sequence
  Synthetic
gucucuuaaagaaagaugccuguu

SEQ ID NO: 416082 - RNA, 18 nt, Artificial Sequence
  Synthetic
uuccaaaucuugccuguu

SEQ ID NO: 416083 - RNA, 19 nt, Artificial Sequence
  Synthetic
cuuccaaaucuugccuguu

SEQ ID NO: 416084 - RNA, 20 nt, Artificial Sequence
  Synthetic
gcuuccaaaucuugccuguu

SEQ ID NO: 416085 - RNA, 21 nt, Artificial Sequence
  Synthetic
ugcuuccaaaucuugccuguu

SEQ ID NO: 416086 - RNA, 22 nt, Artificial Sequence
  Synthetic
uugcuuccaaaucuugccuguu

SEQ ID NO: 416087 - RNA, 23 nt, Artificial Sequence
  Synthetic
cuugcuuccaaaucuugccuguu

SEQ ID NO: 416088 - RNA, 24 nt, Artificial Sequence
  Synthetic
gcuugcuuccaaaucuugccuguu

SEQ ID NO: 416089 - RNA, 18 nt, Artificial Sequence
  Synthetic
accaauccguugccuguu

SEQ ID NO: 416090 - RNA, 19 nt, Artificial Sequence
  Synthetic
uaccaauccguugccuguu

SEQ ID NO: 416091 - RNA, 20 nt, Artificial Sequence
  Synthetic
guaccaauccguugccuguu

SEQ ID NO: 416092 - RNA, 21 nt, Artificial Sequence
  Synthetic
cguaccaauccguugccuguu

SEQ ID NO: 416093 - RNA, 22 nt, Artificial Sequence
  Synthetic
ccguaccaauccguugccuguu

SEQ ID NO: 416094 - RNA, 23 nt, Artificial Sequence
  Synthetic
cccguaccaauccguugccuguu

SEQ ID NO: 416095 - RNA, 24 nt, Artificial Sequence
  Synthetic
acccguaccaauccguugccuguu

SEQ ID NO: 416096 - RNA, 18 nt, Artificial Sequence
  Synthetic
gaaccugccaguccuguu

SEQ ID NO: 416097 - RNA, 19 nt, Artificial Sequence
  Synthetic
agaaccugccaguccuguu

SEQ ID NO: 416098 - RNA, 20 nt, Artificial Sequence
  Synthetic
aagaaccugccaguccuguu

SEQ ID NO: 416099 - RNA, 21 nt, Artificial Sequence
  Synthetic
uaagaaccugccaguccuguu

SEQ ID NO: 416100 - RNA, 22 nt, Artificial Sequence
  Synthetic
uuaagaaccugccaguccuguu

SEQ ID NO: 416101 - RNA, 23 nt, Artificial Sequence
  Synthetic
guuaagaaccugccaguccuguu

SEQ ID NO: 416102 - RNA, 24 nt, Artificial Sequence
  Synthetic
aguuaagaaccugccaguccuguu

SEQ ID NO: 416103 - RNA, 18 nt, Artificial Sequence
  Synthetic
uuuaggacguguccuguu

SEQ ID NO: 416104 - RNA, 19 nt, Artificial Sequence
  Synthetic
auuuaggacguguccuguu

SEQ ID NO: 416105 - RNA, 20 nt, Artificial Sequence
  Synthetic
gauuuaggacguguccuguu

SEQ ID NO: 416106 - RNA, 21 nt, Artificial Sequence
  Synthetic
ugauuuaggacguguccuguu

SEQ ID NO: 416107 - RNA, 22 nt, Artificial Sequence
  Synthetic
cugauuuaggacguguccuguu

SEQ ID NO: 416108 - RNA, 23 nt, Artificial Sequence
  Synthetic
acugauuuaggacguguccuguu

SEQ ID NO: 416109 - RNA, 24 nt, Artificial Sequence
  Synthetic
cacugauuuaggacguguccuguu

SEQ ID NO: 416110 - RNA, 18 nt, Artificial Sequence
  Synthetic
auuuaacugauuccuguu

SEQ ID NO: 416111 - RNA, 19 nt, Artificial Sequence
  Synthetic
aauuuaacugauuccuguu

SEQ ID NO: 416112 - RNA, 20 nt, Artificial Sequence
  Synthetic
aaauuuaacugauuccuguu

SEQ ID NO: 416113 - RNA, 21 nt, Artificial Sequence
  Synthetic
gaaauuuaacugauuccuguu

SEQ ID NO: 416114 - RNA, 22 nt, Artificial Sequence
  Synthetic
agaaauuuaacugauuccuguu

SEQ ID NO: 416115 - RNA, 23 nt, Artificial Sequence
  Synthetic
gagaaauuuaacugauuccuguu

SEQ ID NO: 416116 - RNA, 24 nt, Artificial Sequence
  Synthetic
ggagaaauuuaacugauuccuguu

SEQ ID NO: 416117 - RNA, 18 nt, Artificial Sequence
  Synthetic
cauaaaucauuuccuguu

SEQ ID NO: 416118 - RNA, 19 nt, Artificial Sequence
  Synthetic
ucauaaaucauuuccuguu

SEQ ID NO: 416119 - RNA, 20 nt, Artificial Sequence
  Synthetic
gucauaaaucauuuccuguu

SEQ ID NO: 416120 - RNA, 21 nt, Artificial Sequence
  Synthetic
agucauaaaucauuuccuguu

SEQ ID NO: 416121 - RNA, 22 nt, Artificial Sequence
  Synthetic
aagucauaaaucauuuccuguu

SEQ ID NO: 416122 - RNA, 23 nt, Artificial Sequence
  Synthetic
uaagucauaaaucauuuccuguu

SEQ ID NO: 416123 - RNA, 24 nt, Artificial Sequence
  Synthetic
auaagucauaaaucauuuccuguu

SEQ ID NO: 416124 - RNA, 18 nt, Artificial Sequence
  Synthetic
aauuuuggcaaagcuguu

SEQ ID NO: 416125 - RNA, 19 nt, Artificial Sequence
  Synthetic
aaauuuuggcaaagcuguu

SEQ ID NO: 416126 - RNA, 20 nt, Artificial Sequence
  Synthetic
gaaauuuuggcaaagcuguu

SEQ ID NO: 416127 - RNA, 21 nt, Artificial Sequence
  Synthetic
ggaaauuuuggcaaagcuguu

SEQ ID NO: 416128 - RNA, 22 nt, Artificial Sequence
  Synthetic
aggaaauuuuggcaaagcuguu

SEQ ID NO: 416129 - RNA, 23 nt, Artificial Sequence
  Synthetic
aaggaaauuuuggcaaagcuguu

SEQ ID NO: 416130 - RNA, 24 nt, Artificial Sequence
  Synthetic
gaaggaaauuuuggcaaagcuguu

SEQ ID NO: 416131 - RNA, 18 nt, Artificial Sequence
  Synthetic
uacugaacccuggcuguu

SEQ ID NO: 416132 - RNA, 19 nt, Artificial Sequence
  Synthetic
auacugaacccuggcuguu

SEQ ID NO: 416133 - RNA, 20 nt, Artificial Sequence
  Synthetic
aauacugaacccuggcuguu

SEQ ID NO: 416134 - RNA, 21 nt, Artificial Sequence
  Synthetic
uaauacugaacccuggcuguu

SEQ ID NO: 416135 - RNA, 22 nt, Artificial Sequence
  Synthetic
auaauacugaacccuggcuguu

SEQ ID NO: 416136 - RNA, 23 nt, Artificial Sequence
  Synthetic
aauaauacugaacccuggcuguu

SEQ ID NO: 416137 - RNA, 24 nt, Artificial Sequence
  Synthetic
uaauaauacugaacccuggcuguu

SEQ ID NO: 416138 - RNA, 18 nt, Artificial Sequence
  Synthetic
auagcuaauaaugcuguu

SEQ ID NO: 416139 - RNA, 19 nt, Artificial Sequence
  Synthetic
uauagcuaauaaugcuguu

SEQ ID NO: 416140 - RNA, 20 nt, Artificial Sequence
  Synthetic
cuauagcuaauaaugcuguu

SEQ ID NO: 416141 - RNA, 21 nt, Artificial Sequence
  Synthetic
ccuauagcuaauaaugcuguu

SEQ ID NO: 416142 - RNA, 22 nt, Artificial Sequence
  Synthetic
gccuauagcuaauaaugcuguu

SEQ ID NO: 416143 - RNA, 23 nt, Artificial Sequence
  Synthetic
ugccuauagcuaauaaugcuguu

SEQ ID NO: 416144 - RNA, 24 nt, Artificial Sequence
  Synthetic
gugccuauagcuaauaaugcuguu

SEQ ID NO: 416145 - RNA, 18 nt, Artificial Sequence
  Synthetic
aucgguuuaucugcuguu

SEQ ID NO: 416146 - RNA, 19 nt, Artificial Sequence
  Synthetic
caucgguuuaucugcuguu

SEQ ID NO: 416147 - RNA, 20 nt, Artificial Sequence
  Synthetic
ccaucgguuuaucugcuguu

SEQ ID NO: 416148 - RNA, 21 nt, Artificial Sequence
  Synthetic
gccaucgguuuaucugcuguu

SEQ ID NO: 416149 - RNA, 22 nt, Artificial Sequence
  Synthetic
agccaucgguuuaucugcuguu

SEQ ID NO: 416150 - RNA, 23 nt, Artificial Sequence
  Synthetic
aagccaucgguuuaucugcuguu

SEQ ID NO: 416151 - RNA, 24 nt, Artificial Sequence
  Synthetic
uaagccaucgguuuaucugcuguu

SEQ ID NO: 416152 - RNA, 18 nt, Artificial Sequence
  Synthetic
cuugaacacuuugcuguu

SEQ ID NO: 416153 - RNA, 19 nt, Artificial Sequence
  Synthetic
ucuugaacacuuugcuguu

SEQ ID NO: 416154 - RNA, 20 nt, Artificial Sequence
  Synthetic
aucuugaacacuuugcuguu

SEQ ID NO: 416155 - RNA, 21 nt, Artificial Sequence
  Synthetic
aaucuugaacacuuugcuguu

SEQ ID NO: 416156 - RNA, 22 nt, Artificial Sequence
  Synthetic
aaaucuugaacacuuugcuguu

SEQ ID NO: 416157 - RNA, 23 nt, Artificial Sequence
  Synthetic
caaaucuugaacacuuugcuguu

SEQ ID NO: 416158 - RNA, 24 nt, Artificial Sequence
  Synthetic
ucaaaucuugaacacuuugcuguu

SEQ ID NO: 416159 - RNA, 18 nt, Artificial Sequence
  Synthetic
aaaaaaccagaaucuguu

SEQ ID NO: 416160 - RNA, 19 nt, Artificial Sequence
  Synthetic
aaaaaaaccagaaucuguu

SEQ ID NO: 416161 - RNA, 20 nt, Artificial Sequence
  Synthetic
aaaaaaaaccagaaucuguu

SEQ ID NO: 416162 - RNA, 21 nt, Artificial Sequence
  Synthetic
aaaaaaaaaccagaaucuguu

SEQ ID NO: 416163 - RNA, 22 nt, Artificial Sequence
  Synthetic
aaaaaaaaaaccagaaucuguu

SEQ ID NO: 416164 - RNA, 23 nt, Artificial Sequence
  Synthetic
aaaaaaaaaaaccagaaucuguu

SEQ ID NO: 416165 - RNA, 24 nt, Artificial Sequence
  Synthetic
aaaaaaaaaaaaccagaaucuguu

SEQ ID NO: 416166 - RNA, 18 nt, Artificial Sequence
  Synthetic
agcuggaagacaucuguu

SEQ ID NO: 416167 - RNA, 19 nt, Artificial Sequence
  Synthetic
aagcuggaagacaucuguu

SEQ ID NO: 416168 - RNA, 20 nt, Artificial Sequence
  Synthetic
aaagcuggaagacaucuguu

SEQ ID NO: 416169 - RNA, 21 nt, Artificial Sequence
  Synthetic
aaaagcuggaagacaucuguu

SEQ ID NO: 416170 - RNA, 22 nt, Artificial Sequence
  Synthetic
uaaaagcuggaagacaucuguu

SEQ ID NO: 416171 - RNA, 23 nt, Artificial Sequence
  Synthetic
cuaaaagcuggaagacaucuguu

SEQ ID NO: 416172 - RNA, 24 nt, Artificial Sequence
  Synthetic
ccuaaaagcuggaagacaucuguu

SEQ ID NO: 416173 - RNA, 18 nt, Artificial Sequence
  Synthetic
cgauuugacagaucuguu

SEQ ID NO: 416174 - RNA, 19 nt, Artificial Sequence
  Synthetic
gcgauuugacagaucuguu

SEQ ID NO: 416175 - RNA, 20 nt, Artificial Sequence
  Synthetic
ggcgauuugacagaucuguu

SEQ ID NO: 416176 - RNA, 21 nt, Artificial Sequence
  Synthetic
aggcgauuugacagaucuguu

SEQ ID NO: 416177 - RNA, 22 nt, Artificial Sequence
  Synthetic
caggcgauuugacagaucuguu

SEQ ID NO: 416178 - RNA, 23 nt, Artificial Sequence
  Synthetic
gcaggcgauuugacagaucuguu

SEQ ID NO: 416179 - RNA, 24 nt, Artificial Sequence
  Synthetic
ugcaggcgauuugacagaucuguu

SEQ ID NO: 416180 - RNA, 18 nt, Artificial Sequence
  Synthetic
cacuccuccguaucuguu

SEQ ID NO: 416181 - RNA, 19 nt, Artificial Sequence
  Synthetic
ucacuccuccguaucuguu

SEQ ID NO: 416182 - RNA, 20 nt, Artificial Sequence
  Synthetic
aucacuccuccguaucuguu

SEQ ID NO: 416183 - RNA, 21 nt, Artificial Sequence
  Synthetic
aaucacuccuccguaucuguu

SEQ ID NO: 416184 - RNA, 22 nt, Artificial Sequence
  Synthetic
aaaucacuccuccguaucuguu

SEQ ID NO: 416185 - RNA, 23 nt, Artificial Sequence
  Synthetic
caaaucacuccuccguaucuguu

SEQ ID NO: 416186 - RNA, 24 nt, Artificial Sequence
  Synthetic
ucaaaucacuccuccguaucuguu

SEQ ID NO: 416187 - RNA, 18 nt, Artificial Sequence
  Synthetic
guauaugcugacucuguu

SEQ ID NO: 416188 - RNA, 19 nt, Artificial Sequence
  Synthetic
gguauaugcugacucuguu

SEQ ID NO: 416189 - RNA, 20 nt, Artificial Sequence
  Synthetic
ugguauaugcugacucuguu

SEQ ID NO: 416190 - RNA, 21 nt, Artificial Sequence
  Synthetic
gugguauaugcugacucuguu

SEQ ID NO: 416191 - RNA, 22 nt, Artificial Sequence
  Synthetic
agugguauaugcugacucuguu

SEQ ID NO: 416192 - RNA, 23 nt, Artificial Sequence
  Synthetic
aagugguauaugcugacucuguu

SEQ ID NO: 416193 - RNA, 24 nt, Artificial Sequence
  Synthetic
aaagugguauaugcugacucuguu

SEQ ID NO: 416194 - RNA, 18 nt, Artificial Sequence
  Synthetic
ccagugagaaccucuguu

SEQ ID NO: 416195 - RNA, 19 nt, Artificial Sequence
  Synthetic
uccagugagaaccucuguu

SEQ ID NO: 416196 - RNA, 20 nt, Artificial Sequence
  Synthetic
guccagugagaaccucuguu

SEQ ID NO: 416197 - RNA, 21 nt, Artificial Sequence
  Synthetic
uguccagugagaaccucuguu

SEQ ID NO: 416198 - RNA, 22 nt, Artificial Sequence
  Synthetic
uuguccagugagaaccucuguu

SEQ ID NO: 416199 - RNA, 23 nt, Artificial Sequence
  Synthetic
auuguccagugagaaccucuguu

SEQ ID NO: 416200 - RNA, 24 nt, Artificial Sequence
  Synthetic
uauuguccagugagaaccucuguu

SEQ ID NO: 416201 - RNA, 18 nt, Artificial Sequence
  Synthetic
cagggaagcuugucuguu

SEQ ID NO: 416202 - RNA, 19 nt, Artificial Sequence
  Synthetic
ucagggaagcuugucuguu

SEQ ID NO: 416203 - RNA, 20 nt, Artificial Sequence
  Synthetic
gucagggaagcuugucuguu

SEQ ID NO: 416204 - RNA, 21 nt, Artificial Sequence
  Synthetic
ggucagggaagcuugucuguu

SEQ ID NO: 416205 - RNA, 22 nt, Artificial Sequence
  Synthetic
uggucagggaagcuugucuguu

SEQ ID NO: 416206 - RNA, 23 nt, Artificial Sequence
  Synthetic
guggucagggaagcuugucuguu

SEQ ID NO: 416207 - RNA, 24 nt, Artificial Sequence
  Synthetic
uguggucagggaagcuugucuguu

SEQ ID NO: 416208 - RNA, 18 nt, Artificial Sequence
  Synthetic
aacuaugcuaauucuguu

SEQ ID NO: 416209 - RNA, 19 nt, Artificial Sequence
  Synthetic
caacuaugcuaauucuguu

SEQ ID NO: 416210 - RNA, 20 nt, Artificial Sequence
  Synthetic
acaacuaugcuaauucuguu

SEQ ID NO: 416211 - RNA, 21 nt, Artificial Sequence
  Synthetic
cacaacuaugcuaauucuguu

SEQ ID NO: 416212 - RNA, 22 nt, Artificial Sequence
  Synthetic
acacaacuaugcuaauucuguu

SEQ ID NO: 416213 - RNA, 23 nt, Artificial Sequence
  Synthetic
aacacaacuaugcuaauucuguu

SEQ ID NO: 416214 - RNA, 24 nt, Artificial Sequence
  Synthetic
gaacacaacuaugcuaauucuguu

SEQ ID NO: 416215 - RNA, 18 nt, Artificial Sequence
  Synthetic
auagggggcuauucuguu

SEQ ID NO: 416216 - RNA, 19 nt, Artificial Sequence
  Synthetic
gauagggggcuauucuguu

SEQ ID NO: 416217 - RNA, 20 nt, Artificial Sequence
  Synthetic
agauagggggcuauucuguu

SEQ ID NO: 416218 - RNA, 21 nt, Artificial Sequence
  Synthetic
uagauagggggcuauucuguu

SEQ ID NO: 416219 - RNA, 22 nt, Artificial Sequence
  Synthetic
auagauagggggcuauucuguu

SEQ ID NO: 416220 - RNA, 23 nt, Artificial Sequence
  Synthetic
cauagauagggggcuauucuguu

SEQ ID NO: 416221 - RNA, 24 nt, Artificial Sequence
  Synthetic
ucauagauagggggcuauucuguu

SEQ ID NO: 416222 - RNA, 18 nt, Artificial Sequence
  Synthetic
aggagggcaccuucuguu

SEQ ID NO: 416223 - RNA, 19 nt, Artificial Sequence
  Synthetic
gaggagggcaccuucuguu

SEQ ID NO: 416224 - RNA, 20 nt, Artificial Sequence
  Synthetic
ugaggagggcaccuucuguu

SEQ ID NO: 416225 - RNA, 21 nt, Artificial Sequence
  Synthetic
gugaggagggcaccuucuguu

SEQ ID NO: 416226 - RNA, 22 nt, Artificial Sequence
  Synthetic
agugaggagggcaccuucuguu

SEQ ID NO: 416227 - RNA, 23 nt, Artificial Sequence
  Synthetic
uagugaggagggcaccuucuguu

SEQ ID NO: 416228 - RNA, 24 nt, Artificial Sequence
  Synthetic
guagugaggagggcaccuucuguu

SEQ ID NO: 416229 - RNA, 18 nt, Artificial Sequence
  Synthetic
ccauacuauuuuucuguu

SEQ ID NO: 416230 - RNA, 19 nt, Artificial Sequence
  Synthetic
uccauacuauuuuucuguu

SEQ ID NO: 416231 - RNA, 20 nt, Artificial Sequence
  Synthetic
uuccauacuauuuuucuguu

SEQ ID NO: 416232 - RNA, 21 nt, Artificial Sequence
  Synthetic
uuuccauacuauuuuucuguu

SEQ ID NO: 416233 - RNA, 22 nt, Artificial Sequence
  Synthetic
uuuuccauacuauuuuucuguu

SEQ ID NO: 416234 - RNA, 23 nt, Artificial Sequence
  Synthetic
guuuuccauacuauuuuucuguu

SEQ ID NO: 416235 - RNA, 24 nt, Artificial Sequence
  Synthetic
uguuuuccauacuauuuuucuguu

SEQ ID NO: 416236 - RNA, 18 nt, Artificial Sequence
  Synthetic
uaaagacuaaaaaguguu

SEQ ID NO: 416237 - RNA, 19 nt, Artificial Sequence
  Synthetic
uuaaagacuaaaaaguguu

SEQ ID NO: 416238 - RNA, 20 nt, Artificial Sequence
  Synthetic
guuaaagacuaaaaaguguu

SEQ ID NO: 416239 - RNA, 21 nt, Artificial Sequence
  Synthetic
cguuaaagacuaaaaaguguu

SEQ ID NO: 416240 - RNA, 22 nt, Artificial Sequence
  Synthetic
acguuaaagacuaaaaaguguu

SEQ ID NO: 416241 - RNA, 23 nt, Artificial Sequence
  Synthetic
aacguuaaagacuaaaaaguguu

SEQ ID NO: 416242 - RNA, 24 nt, Artificial Sequence
  Synthetic
aaacguuaaagacuaaaaaguguu

SEQ ID NO: 416243 - RNA, 18 nt, Artificial Sequence
  Synthetic
aaaucuuaacaaaguguu

SEQ ID NO: 416244 - RNA, 19 nt, Artificial Sequence
  Synthetic
aaaaucuuaacaaaguguu

SEQ ID NO: 416245 - RNA, 20 nt, Artificial Sequence
  Synthetic
uaaaaucuuaacaaaguguu

SEQ ID NO: 416246 - RNA, 21 nt, Artificial Sequence
  Synthetic
uuaaaaucuuaacaaaguguu

SEQ ID NO: 416247 - RNA, 22 nt, Artificial Sequence
  Synthetic
uuuaaaaucuuaacaaaguguu

SEQ ID NO: 416248 - RNA, 23 nt, Artificial Sequence
  Synthetic
uuuuaaaaucuuaacaaaguguu

SEQ ID NO: 416249 - RNA, 24 nt, Artificial Sequence
  Synthetic
guuuuaaaaucuuaacaaaguguu

SEQ ID NO: 416250 - RNA, 18 nt, Artificial Sequence
  Synthetic
uggaaguauuaaaguguu

SEQ ID NO: 416251 - RNA, 19 nt, Artificial Sequence
  Synthetic
auggaaguauuaaaguguu

SEQ ID NO: 416252 - RNA, 20 nt, Artificial Sequence
  Synthetic
aauggaaguauuaaaguguu

SEQ ID NO: 416253 - RNA, 21 nt, Artificial Sequence
  Synthetic
aaauggaaguauuaaaguguu

SEQ ID NO: 416254 - RNA, 22 nt, Artificial Sequence
  Synthetic
caaauggaaguauuaaaguguu

SEQ ID NO: 416255 - RNA, 23 nt, Artificial Sequence
  Synthetic
ucaaauggaaguauuaaaguguu

SEQ ID NO: 416256 - RNA, 24 nt, Artificial Sequence
  Synthetic
uucaaauggaaguauuaaaguguu

SEQ ID NO: 416257 - RNA, 18 nt, Artificial Sequence
  Synthetic
cagacaauaacaaguguu

SEQ ID NO: 416258 - RNA, 19 nt, Artificial Sequence
  Synthetic
acagacaauaacaaguguu

SEQ ID NO: 416259 - RNA, 20 nt, Artificial Sequence
  Synthetic
uacagacaauaacaaguguu

SEQ ID NO: 416260 - RNA, 21 nt, Artificial Sequence
  Synthetic
auacagacaauaacaaguguu

SEQ ID NO: 416261 - RNA, 22 nt, Artificial Sequence
  Synthetic
aauacagacaauaacaaguguu

SEQ ID NO: 416262 - RNA, 23 nt, Artificial Sequence
  Synthetic
aaauacagacaauaacaaguguu

SEQ ID NO: 416263 - RNA, 24 nt, Artificial Sequence
  Synthetic
aaaauacagacaauaacaaguguu

SEQ ID NO: 416264 - RNA, 18 nt, Artificial Sequence
  Synthetic
gugagaccuccaaguguu

SEQ ID NO: 416265 - RNA, 19 nt, Artificial Sequence
  Synthetic
cgugagaccuccaaguguu

SEQ ID NO: 416266 - RNA, 20 nt, Artificial Sequence
  Synthetic
ucgugagaccuccaaguguu

SEQ ID NO: 416267 - RNA, 21 nt, Artificial Sequence
  Synthetic
cucgugagaccuccaaguguu

SEQ ID NO: 416268 - RNA, 22 nt, Artificial Sequence
  Synthetic
ucucgugagaccuccaaguguu

SEQ ID NO: 416269 - RNA, 23 nt, Artificial Sequence
  Synthetic
gucucgugagaccuccaaguguu

SEQ ID NO: 416270 - RNA, 24 nt, Artificial Sequence
  Synthetic
agucucgugagaccuccaaguguu

SEQ ID NO: 416271 - RNA, 18 nt, Artificial Sequence
  Synthetic
uaaugagggugaaguguu

SEQ ID NO: 416272 - RNA, 19 nt, Artificial Sequence
  Synthetic
cuaaugagggugaaguguu

SEQ ID NO: 416273 - RNA, 20 nt, Artificial Sequence
  Synthetic
ccuaaugagggugaaguguu

SEQ ID NO: 416274 - RNA, 21 nt, Artificial Sequence
  Synthetic
accuaaugagggugaaguguu

SEQ ID NO: 416275 - RNA, 22 nt, Artificial Sequence
  Synthetic
aaccuaaugagggugaaguguu

SEQ ID NO: 416276 - RNA, 23 nt, Artificial Sequence
  Synthetic
aaaccuaaugagggugaaguguu

SEQ ID NO: 416277 - RNA, 24 nt, Artificial Sequence
  Synthetic
uaaaccuaaugagggugaaguguu

SEQ ID NO: 416278 - RNA, 18 nt, Artificial Sequence
  Synthetic
uggauacugauaaguguu

SEQ ID NO: 416279 - RNA, 19 nt, Artificial Sequence
  Synthetic
guggauacugauaaguguu

SEQ ID NO: 416280 - RNA, 20 nt, Artificial Sequence
  Synthetic
aguggauacugauaaguguu

SEQ ID NO: 416281 - RNA, 21 nt, Artificial Sequence
  Synthetic
gaguggauacugauaaguguu

SEQ ID NO: 416282 - RNA, 22 nt, Artificial Sequence
  Synthetic
agaguggauacugauaaguguu

SEQ ID NO: 416283 - RNA, 23 nt, Artificial Sequence
  Synthetic
uagaguggauacugauaaguguu

SEQ ID NO: 416284 - RNA, 24 nt, Artificial Sequence
  Synthetic
guagaguggauacugauaaguguu

SEQ ID NO: 416285 - RNA, 18 nt, Artificial Sequence
  Synthetic
auauagaagaacaguguu

SEQ ID NO: 416286 - RNA, 19 nt, Artificial Sequence
  Synthetic
aauauagaagaacaguguu

SEQ ID NO: 416287 - RNA, 20 nt, Artificial Sequence
  Synthetic
aaauauagaagaacaguguu

SEQ ID NO: 416288 - RNA, 21 nt, Artificial Sequence
  Synthetic
caaauauagaagaacaguguu

SEQ ID NO: 416289 - RNA, 22 nt, Artificial Sequence
  Synthetic
ucaaauauagaagaacaguguu

SEQ ID NO: 416290 - RNA, 23 nt, Artificial Sequence
  Synthetic
gucaaauauagaagaacaguguu

SEQ ID NO: 416291 - RNA, 24 nt, Artificial Sequence
  Synthetic
ugucaaauauagaagaacaguguu

SEQ ID NO: 416292 - RNA, 18 nt, Artificial Sequence
  Synthetic
ccuucugagaacaguguu

SEQ ID NO: 416293 - RNA, 19 nt, Artificial Sequence
  Synthetic
cccuucugagaacaguguu

SEQ ID NO: 416294 - RNA, 20 nt, Artificial Sequence
  Synthetic
gcccuucugagaacaguguu

SEQ ID NO: 416295 - RNA, 21 nt, Artificial Sequence
  Synthetic
ugcccuucugagaacaguguu

SEQ ID NO: 416296 - RNA, 22 nt, Artificial Sequence
  Synthetic
cugcccuucugagaacaguguu

SEQ ID NO: 416297 - RNA, 23 nt, Artificial Sequence
  Synthetic
acugcccuucugagaacaguguu

SEQ ID NO: 416298 - RNA, 24 nt, Artificial Sequence
  Synthetic
uacugcccuucugagaacaguguu

SEQ ID NO: 416299 - RNA, 18 nt, Artificial Sequence
  Synthetic
cacugaauaaucaguguu

SEQ ID NO: 416300 - RNA, 19 nt, Artificial Sequence
  Synthetic
ccacugaauaaucaguguu

SEQ ID NO: 416301 - RNA, 20 nt, Artificial Sequence
  Synthetic
accacugaauaaucaguguu

SEQ ID NO: 416302 - RNA, 21 nt, Artificial Sequence
  Synthetic
gaccacugaauaaucaguguu

SEQ ID NO: 416303 - RNA, 22 nt, Artificial Sequence
  Synthetic
ugaccacugaauaaucaguguu

SEQ ID NO: 416304 - RNA, 23 nt, Artificial Sequence
  Synthetic
augaccacugaauaaucaguguu

SEQ ID NO: 416305 - RNA, 24 nt, Artificial Sequence
  Synthetic
aaugaccacugaauaaucaguguu

SEQ ID NO: 416306 - RNA, 18 nt, Artificial Sequence
  Synthetic
auuugggcaucuaguguu

SEQ ID NO: 416307 - RNA, 19 nt, Artificial Sequence
  Synthetic
uauuugggcaucuaguguu

SEQ ID NO: 416308 - RNA, 20 nt, Artificial Sequence
  Synthetic
uuauuugggcaucuaguguu

SEQ ID NO: 416309 - RNA, 21 nt, Artificial Sequence
  Synthetic
cuuauuugggcaucuaguguu

SEQ ID NO: 416310 - RNA, 22 nt, Artificial Sequence
  Synthetic
ccuuauuugggcaucuaguguu

SEQ ID NO: 416311 - RNA, 23 nt, Artificial Sequence
  Synthetic
uccuuauuugggcaucuaguguu

SEQ ID NO: 416312 - RNA, 24 nt, Artificial Sequence
  Synthetic
guccuuauuugggcaucuaguguu

SEQ ID NO: 416313 - RNA, 18 nt, Artificial Sequence
  Synthetic
ucauauucugaacguguu

SEQ ID NO: 416314 - RNA, 19 nt, Artificial Sequence
  Synthetic
gucauauucugaacguguu

SEQ ID NO: 416315 - RNA, 20 nt, Artificial Sequence
  Synthetic
agucauauucugaacguguu

SEQ ID NO: 416316 - RNA, 21 nt, Artificial Sequence
  Synthetic
uagucauauucugaacguguu

SEQ ID NO: 416317 - RNA, 22 nt, Artificial Sequence
  Synthetic
auagucauauucugaacguguu

SEQ ID NO: 416318 - RNA, 23 nt, Artificial Sequence
  Synthetic
aauagucauauucugaacguguu

SEQ ID NO: 416319 - RNA, 24 nt, Artificial Sequence
  Synthetic
aaauagucauauucugaacguguu

SEQ ID NO: 416320 - RNA, 18 nt, Artificial Sequence
  Synthetic
ccuuugggacaagguguu

SEQ ID NO: 416321 - RNA, 19 nt, Artificial Sequence
  Synthetic
accuuugggacaagguguu

SEQ ID NO: 416322 - RNA, 20 nt, Artificial Sequence
  Synthetic
uaccuuugggacaagguguu

SEQ ID NO: 416323 - RNA, 21 nt, Artificial Sequence
  Synthetic
guaccuuugggacaagguguu

SEQ ID NO: 416324 - RNA, 22 nt, Artificial Sequence
  Synthetic
uguaccuuugggacaagguguu

SEQ ID NO: 416325 - RNA, 23 nt, Artificial Sequence
  Synthetic
cuguaccuuugggacaagguguu

SEQ ID NO: 416326 - RNA, 24 nt, Artificial Sequence
  Synthetic
gcuguaccuuugggacaagguguu

SEQ ID NO: 416327 - RNA, 18 nt, Artificial Sequence
  Synthetic
gugaaugcuacagguguu

SEQ ID NO: 416328 - RNA, 19 nt, Artificial Sequence
  Synthetic
ugugaaugcuacagguguu

SEQ ID NO: 416329 - RNA, 20 nt, Artificial Sequence
  Synthetic
gugugaaugcuacagguguu

SEQ ID NO: 416330 - RNA, 21 nt, Artificial Sequence
  Synthetic
ugugugaaugcuacagguguu

SEQ ID NO: 416331 - RNA, 22 nt, Artificial Sequence
  Synthetic
uugugugaaugcuacagguguu

SEQ ID NO: 416332 - RNA, 23 nt, Artificial Sequence
  Synthetic
uuugugugaaugcuacagguguu

SEQ ID NO: 416333 - RNA, 24 nt, Artificial Sequence
  Synthetic
auuugugugaaugcuacagguguu

SEQ ID NO: 416334 - RNA, 18 nt, Artificial Sequence
  Synthetic
gcaaaucacaaggguguu

SEQ ID NO: 416335 - RNA, 19 nt, Artificial Sequence
  Synthetic
ggcaaaucacaaggguguu

SEQ ID NO: 416336 - RNA, 20 nt, Artificial Sequence
  Synthetic
aggcaaaucacaaggguguu

SEQ ID NO: 416337 - RNA, 21 nt, Artificial Sequence
  Synthetic
uaggcaaaucacaaggguguu

SEQ ID NO: 416338 - RNA, 22 nt, Artificial Sequence
  Synthetic
uuaggcaaaucacaaggguguu

SEQ ID NO: 416339 - RNA, 23 nt, Artificial Sequence
  Synthetic
cuuaggcaaaucacaaggguguu

SEQ ID NO: 416340 - RNA, 24 nt, Artificial Sequence
  Synthetic
ucuuaggcaaaucacaaggguguu

SEQ ID NO: 416341 - RNA, 18 nt, Artificial Sequence
  Synthetic
uuucuuacucaggguguu

SEQ ID NO: 416342 - RNA, 19 nt, Artificial Sequence
  Synthetic
auuucuuacucaggguguu

SEQ ID NO: 416343 - RNA, 20 nt, Artificial Sequence
  Synthetic
cauuucuuacucaggguguu

SEQ ID NO: 416344 - RNA, 21 nt, Artificial Sequence
  Synthetic
ucauuucuuacucaggguguu

SEQ ID NO: 416345 - RNA, 22 nt, Artificial Sequence
  Synthetic
cucauuucuuacucaggguguu

SEQ ID NO: 416346 - RNA, 23 nt, Artificial Sequence
  Synthetic
ucucauuucuuacucaggguguu

SEQ ID NO: 416347 - RNA, 24 nt, Artificial Sequence
  Synthetic
uucucauuucuuacucaggguguu

SEQ ID NO: 416348 - RNA, 18 nt, Artificial Sequence
  Synthetic
acaagggcuauggguguu

SEQ ID NO: 416349 - RNA, 19 nt, Artificial Sequence
  Synthetic
aacaagggcuauggguguu

SEQ ID NO: 416350 - RNA, 20 nt, Artificial Sequence
  Synthetic
uaacaagggcuauggguguu

SEQ ID NO: 416351 - RNA, 21 nt, Artificial Sequence
  Synthetic
guaacaagggcuauggguguu

SEQ ID NO: 416352 - RNA, 22 nt, Artificial Sequence
  Synthetic
uguaacaagggcuauggguguu

SEQ ID NO: 416353 - RNA, 23 nt, Artificial Sequence
  Synthetic
cuguaacaagggcuauggguguu

SEQ ID NO: 416354 - RNA, 24 nt, Artificial Sequence
  Synthetic
acuguaacaagggcuauggguguu

SEQ ID NO: 416355 - RNA, 18 nt, Artificial Sequence
  Synthetic
uuuuuuaaaagugguguu

SEQ ID NO: 416356 - RNA, 19 nt, Artificial Sequence
  Synthetic
auuuuuuaaaagugguguu

SEQ ID NO: 416357 - RNA, 20 nt, Artificial Sequence
  Synthetic
aauuuuuuaaaagugguguu

SEQ ID NO: 416358 - RNA, 21 nt, Artificial Sequence
  Synthetic
aaauuuuuuaaaagugguguu

SEQ ID NO: 416359 - RNA, 22 nt, Artificial Sequence
  Synthetic
aaaauuuuuuaaaagugguguu

SEQ ID NO: 416360 - RNA, 23 nt, Artificial Sequence
  Synthetic
aaaaauuuuuuaaaagugguguu

SEQ ID NO: 416361 - RNA, 24 nt, Artificial Sequence
  Synthetic
aaaaaauuuuuuaaaagugguguu

SEQ ID NO: 416362 - RNA, 18 nt, Artificial Sequence
  Synthetic
gccauugcuuuugguguu

SEQ ID NO: 416363 - RNA, 19 nt, Artificial Sequence
  Synthetic
ugccauugcuuuugguguu

SEQ ID NO: 416364 - RNA, 20 nt, Artificial Sequence
  Synthetic
uugccauugcuuuugguguu

SEQ ID NO: 416365 - RNA, 18 nt, Artificial Sequence
  Synthetic
ugaaacauuuaauguguu

SEQ ID NO: 416366 - RNA, 19 nt, Artificial Sequence
  Synthetic
augaaacauuuaauguguu

SEQ ID NO: 416367 - RNA, 20 nt, Artificial Sequence
  Synthetic
gaugaaacauuuaauguguu

SEQ ID NO: 416368 - RNA, 21 nt, Artificial Sequence
  Synthetic
cgaugaaacauuuaauguguu

SEQ ID NO: 416369 - RNA, 22 nt, Artificial Sequence
  Synthetic
acgaugaaacauuuaauguguu

SEQ ID NO: 416370 - RNA, 23 nt, Artificial Sequence
  Synthetic
cacgaugaaacauuuaauguguu

SEQ ID NO: 416371 - RNA, 24 nt, Artificial Sequence
  Synthetic
ccacgaugaaacauuuaauguguu

SEQ ID NO: 416372 - RNA, 18 nt, Artificial Sequence
  Synthetic
cuguaauucccauguguu

SEQ ID NO: 416373 - RNA, 19 nt, Artificial Sequence
  Synthetic
ccuguaauucccauguguu

SEQ ID NO: 416374 - RNA, 20 nt, Artificial Sequence
  Synthetic
cccuguaauucccauguguu

SEQ ID NO: 416375 - RNA, 21 nt, Artificial Sequence
  Synthetic
ucccuguaauucccauguguu

SEQ ID NO: 416376 - RNA, 22 nt, Artificial Sequence
  Synthetic
aucccuguaauucccauguguu

SEQ ID NO: 416377 - RNA, 23 nt, Artificial Sequence
  Synthetic
aaucccuguaauucccauguguu

SEQ ID NO: 416378 - RNA, 24 nt, Artificial Sequence
  Synthetic
uaaucccuguaauucccauguguu

SEQ ID NO: 416379 - RNA, 18 nt, Artificial Sequence
  Synthetic
gaaggucuuucauguguu

SEQ ID NO: 416380 - RNA, 19 nt, Artificial Sequence
  Synthetic
agaaggucuuucauguguu

SEQ ID NO: 416381 - RNA, 20 nt, Artificial Sequence
  Synthetic
cagaaggucuuucauguguu

SEQ ID NO: 416382 - RNA, 21 nt, Artificial Sequence
  Synthetic
gcagaaggucuuucauguguu

SEQ ID NO: 416383 - RNA, 22 nt, Artificial Sequence
  Synthetic
ugcagaaggucuuucauguguu

SEQ ID NO: 416384 - RNA, 23 nt, Artificial Sequence
  Synthetic
uugcagaaggucuuucauguguu

SEQ ID NO: 416385 - RNA, 24 nt, Artificial Sequence
  Synthetic
uuugcagaaggucuuucauguguu

SEQ ID NO: 416386 - RNA, 18 nt, Artificial Sequence
  Synthetic
gauuaauugugauguguu

SEQ ID NO: 416387 - RNA, 19 nt, Artificial Sequence
  Synthetic
ugauuaauugugauguguu

SEQ ID NO: 416388 - RNA, 20 nt, Artificial Sequence
  Synthetic
gugauuaauugugauguguu

SEQ ID NO: 416389 - RNA, 21 nt, Artificial Sequence
  Synthetic
ugugauuaauugugauguguu

SEQ ID NO: 416390 - RNA, 22 nt, Artificial Sequence
  Synthetic
augugauuaauugugauguguu

SEQ ID NO: 416391 - RNA, 23 nt, Artificial Sequence
  Synthetic
aaugugauuaauugugauguguu

SEQ ID NO: 416392 - RNA, 24 nt, Artificial Sequence
  Synthetic
uaaugugauuaauugugauguguu

SEQ ID NO: 416393 - RNA, 18 nt, Artificial Sequence
  Synthetic
gaaugcuuuugauguguu

SEQ ID NO: 416394 - RNA, 19 nt, Artificial Sequence
  Synthetic
agaaugcuuuugauguguu

SEQ ID NO: 416395 - RNA, 20 nt, Artificial Sequence
  Synthetic
cagaaugcuuuugauguguu

SEQ ID NO: 416396 - RNA, 21 nt, Artificial Sequence
  Synthetic
ucagaaugcuuuugauguguu

SEQ ID NO: 416397 - RNA, 22 nt, Artificial Sequence
  Synthetic
aucagaaugcuuuugauguguu

SEQ ID NO: 416398 - RNA, 23 nt, Artificial Sequence
  Synthetic
aaucagaaugcuuuugauguguu

SEQ ID NO: 416399 - RNA, 24 nt, Artificial Sequence
  Synthetic
uaaucagaaugcuuuugauguguu

SEQ ID NO: 416400 - RNA, 18 nt, Artificial Sequence
  Synthetic
ugaucugauuuauguguu

SEQ ID NO: 416401 - RNA, 19 nt, Artificial Sequence
  Synthetic
gugaucugauuuauguguu

SEQ ID NO: 416402 - RNA, 20 nt, Artificial Sequence
  Synthetic
ugugaucugauuuauguguu

SEQ ID NO: 416403 - RNA, 21 nt, Artificial Sequence
  Synthetic
augugaucugauuuauguguu

SEQ ID NO: 416404 - RNA, 22 nt, Artificial Sequence
  Synthetic
gaugugaucugauuuauguguu

SEQ ID NO: 416405 - RNA, 23 nt, Artificial Sequence
  Synthetic
ugaugugaucugauuuauguguu

SEQ ID NO: 416406 - RNA, 24 nt, Artificial Sequence
  Synthetic
augaugugaucugauuuauguguu

SEQ ID NO: 416407 - RNA, 18 nt, Artificial Sequence
  Synthetic
caaauacguagcuguguu

SEQ ID NO: 416408 - RNA, 19 nt, Artificial Sequence
  Synthetic
ccaaauacguagcuguguu

SEQ ID NO: 416409 - RNA, 20 nt, Artificial Sequence
  Synthetic
uccaaauacguagcuguguu

SEQ ID NO: 416410 - RNA, 21 nt, Artificial Sequence
  Synthetic
guccaaauacguagcuguguu

SEQ ID NO: 416411 - RNA, 22 nt, Artificial Sequence
  Synthetic
gguccaaauacguagcuguguu

SEQ ID NO: 416412 - RNA, 23 nt, Artificial Sequence
  Synthetic
ugguccaaauacguagcuguguu

SEQ ID NO: 416413 - RNA, 24 nt, Artificial Sequence
  Synthetic
uugguccaaauacguagcuguguu

SEQ ID NO: 416414 - RNA, 18 nt, Artificial Sequence
  Synthetic
uugaaagacaucuguguu

SEQ ID NO: 416415 - RNA, 19 nt, Artificial Sequence
  Synthetic
auugaaagacaucuguguu

SEQ ID NO: 416416 - RNA, 20 nt, Artificial Sequence
  Synthetic
gauugaaagacaucuguguu

SEQ ID NO: 416417 - RNA, 21 nt, Artificial Sequence
  Synthetic
ugauugaaagacaucuguguu

SEQ ID NO: 416418 - RNA, 22 nt, Artificial Sequence
  Synthetic
augauugaaagacaucuguguu

SEQ ID NO: 416419 - RNA, 23 nt, Artificial Sequence
  Synthetic
caugauugaaagacaucuguguu

SEQ ID NO: 416420 - RNA, 24 nt, Artificial Sequence
  Synthetic
acaugauugaaagacaucuguguu

SEQ ID NO: 416421 - RNA, 18 nt, Artificial Sequence
  Synthetic
uuaagucagcucuguguu

SEQ ID NO: 416422 - RNA, 19 nt, Artificial Sequence
  Synthetic
uuuaagucagcucuguguu

SEQ ID NO: 416423 - RNA, 20 nt, Artificial Sequence
  Synthetic
auuuaagucagcucuguguu

SEQ ID NO: 416424 - RNA, 21 nt, Artificial Sequence
  Synthetic
gauuuaagucagcucuguguu

SEQ ID NO: 416425 - RNA, 22 nt, Artificial Sequence
  Synthetic
agauuuaagucagcucuguguu

SEQ ID NO: 416426 - RNA, 23 nt, Artificial Sequence
  Synthetic
aagauuuaagucagcucuguguu

SEQ ID NO: 416427 - RNA, 24 nt, Artificial Sequence
  Synthetic
uaagauuuaagucagcucuguguu

SEQ ID NO: 416428 - RNA, 18 nt, Artificial Sequence
  Synthetic
cccuugaggcucuguguu

SEQ ID NO: 416429 - RNA, 19 nt, Artificial Sequence
  Synthetic
ccccuugaggcucuguguu

SEQ ID NO: 416430 - RNA, 20 nt, Artificial Sequence
  Synthetic
accccuugaggcucuguguu

SEQ ID NO: 416431 - RNA, 21 nt, Artificial Sequence
  Synthetic
caccccuugaggcucuguguu

SEQ ID NO: 416432 - RNA, 22 nt, Artificial Sequence
  Synthetic
ccaccccuugaggcucuguguu

SEQ ID NO: 416433 - RNA, 23 nt, Artificial Sequence
  Synthetic
uccaccccuugaggcucuguguu

SEQ ID NO: 416434 - RNA, 24 nt, Artificial Sequence
  Synthetic
guccaccccuugaggcucuguguu

SEQ ID NO: 416435 - RNA, 18 nt, Artificial Sequence
  Synthetic
uuguuugugcucuguguu

SEQ ID NO: 416436 - RNA, 19 nt, Artificial Sequence
  Synthetic
uuuguuugugcucuguguu

SEQ ID NO: 416437 - RNA, 20 nt, Artificial Sequence
  Synthetic
uuuuguuugugcucuguguu

SEQ ID NO: 416438 - RNA, 21 nt, Artificial Sequence
  Synthetic
uuuuuguuugugcucuguguu

SEQ ID NO: 416439 - RNA, 22 nt, Artificial Sequence
  Synthetic
uuuuuuguuugugcucuguguu

SEQ ID NO: 416440 - RNA, 23 nt, Artificial Sequence
  Synthetic
auuuuuuguuugugcucuguguu

SEQ ID NO: 416441 - RNA, 24 nt, Artificial Sequence
  Synthetic
cauuuuuuguuugugcucuguguu

SEQ ID NO: 416442 - RNA, 18 nt, Artificial Sequence
  Synthetic
gaaugcauacaguguguu

SEQ ID NO: 416443 - RNA, 19 nt, Artificial Sequence
  Synthetic
ggaaugcauacaguguguu

SEQ ID NO: 416444 - RNA, 20 nt, Artificial Sequence
  Synthetic
uggaaugcauacaguguguu

SEQ ID NO: 416445 - RNA, 21 nt, Artificial Sequence
  Synthetic
auggaaugcauacaguguguu

SEQ ID NO: 416446 - RNA, 22 nt, Artificial Sequence
  Synthetic
aauggaaugcauacaguguguu

SEQ ID NO: 416447 - RNA, 23 nt, Artificial Sequence
  Synthetic
caauggaaugcauacaguguguu

SEQ ID NO: 416448 - RNA, 24 nt, Artificial Sequence
  Synthetic
ucaauggaaugcauacaguguguu

SEQ ID NO: 416449 - RNA, 18 nt, Artificial Sequence
  Synthetic
cauugauuacuguguguu

SEQ ID NO: 416450 - RNA, 19 nt, Artificial Sequence
  Synthetic
ccauugauuacuguguguu

SEQ ID NO: 416451 - RNA, 20 nt, Artificial Sequence
  Synthetic
gccauugauuacuguguguu

SEQ ID NO: 416452 - RNA, 21 nt, Artificial Sequence
  Synthetic
ugccauugauuacuguguguu

SEQ ID NO: 416453 - RNA, 22 nt, Artificial Sequence
  Synthetic
uugccauugauuacuguguguu

SEQ ID NO: 416454 - RNA, 23 nt, Artificial Sequence
  Synthetic
uuugccauugauuacuguguguu

SEQ ID NO: 416455 - RNA, 24 nt, Artificial Sequence
  Synthetic
cuuugccauugauuacuguguguu

SEQ ID NO: 416456 - RNA, 18 nt, Artificial Sequence
  Synthetic
uuguguaagguguguguu

SEQ ID NO: 416457 - RNA, 19 nt, Artificial Sequence
  Synthetic
uuuguguaagguguguguu

SEQ ID NO: 416458 - RNA, 20 nt, Artificial Sequence
  Synthetic
cuuuguguaagguguguguu

SEQ ID NO: 416459 - RNA, 21 nt, Artificial Sequence
  Synthetic
ccuuuguguaagguguguguu

SEQ ID NO: 416460 - RNA, 22 nt, Artificial Sequence
  Synthetic
gccuuuguguaagguguguguu

SEQ ID NO: 416461 - RNA, 23 nt, Artificial Sequence
  Synthetic
ugccuuuguguaagguguguguu

SEQ ID NO: 416462 - RNA, 24 nt, Artificial Sequence
  Synthetic
augccuuuguguaagguguguguu

SEQ ID NO: 416463 - RNA, 18 nt, Artificial Sequence
  Synthetic
uguguguguguguguguu

SEQ ID NO: 416464 - RNA, 19 nt, Artificial Sequence
  Synthetic
guguguguguguguguguu

SEQ ID NO: 416465 - RNA, 20 nt, Artificial Sequence
  Synthetic
uguguguguguguguguguu

SEQ ID NO: 416466 - RNA, 21 nt, Artificial Sequence
  Synthetic
guguguguguguguguguguu

SEQ ID NO: 416467 - RNA, 22 nt, Artificial Sequence
  Synthetic
uguguguguguguguguguguu

SEQ ID NO: 416468 - RNA, 23 nt, Artificial Sequence
  Synthetic
guguguguguguguguguguguu

SEQ ID NO: 416469 - RNA, 24 nt, Artificial Sequence
  Synthetic
uguguguguguguguguguguguu

SEQ ID NO: 416470 - RNA, 18 nt, Artificial Sequence
  Synthetic
uacuauuguguguguguu

SEQ ID NO: 416471 - RNA, 19 nt, Artificial Sequence
  Synthetic
uuacuauuguguguguguu

SEQ ID NO: 416472 - RNA, 20 nt, Artificial Sequence
  Synthetic
guuacuauuguguguguguu

SEQ ID NO: 416473 - RNA, 21 nt, Artificial Sequence
  Synthetic
aguuacuauuguguguguguu

SEQ ID NO: 416474 - RNA, 22 nt, Artificial Sequence
  Synthetic
uaguuacuauuguguguguguu

SEQ ID NO: 416475 - RNA, 23 nt, Artificial Sequence
  Synthetic
auaguuacuauuguguguguguu

SEQ ID NO: 416476 - RNA, 24 nt, Artificial Sequence
  Synthetic
aauaguuacuauuguguguguguu

SEQ ID NO: 416477 - RNA, 18 nt, Artificial Sequence
  Synthetic
uuuuguguugauuguguu

SEQ ID NO: 416478 - RNA, 19 nt, Artificial Sequence
  Synthetic
uuuuuguguugauuguguu

SEQ ID NO: 416479 - RNA, 20 nt, Artificial Sequence
  Synthetic
auuuuuguguugauuguguu

SEQ ID NO: 416480 - RNA, 21 nt, Artificial Sequence
  Synthetic
uauuuuuguguugauuguguu

SEQ ID NO: 416481 - RNA, 22 nt, Artificial Sequence
  Synthetic
cuauuuuuguguugauuguguu

SEQ ID NO: 416482 - RNA, 23 nt, Artificial Sequence
  Synthetic
ccuauuuuuguguugauuguguu

SEQ ID NO: 416483 - RNA, 24 nt, Artificial Sequence
  Synthetic
accuauuuuuguguugauuguguu

SEQ ID NO: 416484 - RNA, 18 nt, Artificial Sequence
  Synthetic
ggaaggcauuauuguguu

SEQ ID NO: 416485 - RNA, 19 nt, Artificial Sequence
  Synthetic
gggaaggcauuauuguguu

SEQ ID NO: 416486 - RNA, 20 nt, Artificial Sequence
  Synthetic
ugggaaggcauuauuguguu

SEQ ID NO: 416487 - RNA, 21 nt, Artificial Sequence
  Synthetic
uugggaaggcauuauuguguu

SEQ ID NO: 416488 - RNA, 22 nt, Artificial Sequence
  Synthetic
guugggaaggcauuauuguguu

SEQ ID NO: 416489 - RNA, 23 nt, Artificial Sequence
  Synthetic
uguugggaaggcauuauuguguu

SEQ ID NO: 416490 - RNA, 24 nt, Artificial Sequence
  Synthetic
cuguugggaaggcauuauuguguu

SEQ ID NO: 416491 - RNA, 18 nt, Artificial Sequence
  Synthetic
uggcuugguccuuguguu

SEQ ID NO: 416492 - RNA, 19 nt, Artificial Sequence
  Synthetic
uuggcuugguccuuguguu

SEQ ID NO: 416493 - RNA, 20 nt, Artificial Sequence
  Synthetic
auuggcuugguccuuguguu

SEQ ID NO: 416494 - RNA, 21 nt, Artificial Sequence
  Synthetic
uauuggcuugguccuuguguu

SEQ ID NO: 416495 - RNA, 22 nt, Artificial Sequence
  Synthetic
cuauuggcuugguccuuguguu

SEQ ID NO: 416496 - RNA, 23 nt, Artificial Sequence
  Synthetic
ucuauuggcuugguccuuguguu

SEQ ID NO: 416497 - RNA, 24 nt, Artificial Sequence
  Synthetic
gucuauuggcuugguccuuguguu

SEQ ID NO: 416498 - RNA, 18 nt, Artificial Sequence
  Synthetic
uggucauuuauuuguguu

SEQ ID NO: 416499 - RNA, 19 nt, Artificial Sequence
  Synthetic
uuggucauuuauuuguguu

SEQ ID NO: 416500 - RNA, 20 nt, Artificial Sequence
  Synthetic
auuggucauuuauuuguguu

SEQ ID NO: 416501 - RNA, 21 nt, Artificial Sequence
  Synthetic
cauuggucauuuauuuguguu

SEQ ID NO: 416502 - RNA, 22 nt, Artificial Sequence
  Synthetic
acauuggucauuuauuuguguu

SEQ ID NO: 416503 - RNA, 23 nt, Artificial Sequence
  Synthetic
aacauuggucauuuauuuguguu

SEQ ID NO: 416504 - RNA, 24 nt, Artificial Sequence
  Synthetic
aaacauuggucauuuauuuguguu

SEQ ID NO: 416505 - RNA, 18 nt, Artificial Sequence
  Synthetic
uuaccauugcuuuguguu

SEQ ID NO: 416506 - RNA, 19 nt, Artificial Sequence
  Synthetic
uuuaccauugcuuuguguu

SEQ ID NO: 416507 - RNA, 20 nt, Artificial Sequence
  Synthetic
auuuaccauugcuuuguguu

SEQ ID NO: 416508 - RNA, 21 nt, Artificial Sequence
  Synthetic
cauuuaccauugcuuuguguu

SEQ ID NO: 416509 - RNA, 22 nt, Artificial Sequence
  Synthetic
acauuuaccauugcuuuguguu

SEQ ID NO: 416510 - RNA, 23 nt, Artificial Sequence
  Synthetic
aacauuuaccauugcuuuguguu

SEQ ID NO: 416511 - RNA, 24 nt, Artificial Sequence
  Synthetic
aaacauuuaccauugcuuuguguu

SEQ ID NO: 416512 - RNA, 18 nt, Artificial Sequence
  Synthetic
ucuaaaauguuuuguguu

SEQ ID NO: 416513 - RNA, 19 nt, Artificial Sequence
  Synthetic
uucuaaaauguuuuguguu

SEQ ID NO: 416514 - RNA, 20 nt, Artificial Sequence
  Synthetic
uuucuaaaauguuuuguguu

SEQ ID NO: 416515 - RNA, 21 nt, Artificial Sequence
  Synthetic
uuuucuaaaauguuuuguguu

SEQ ID NO: 416516 - RNA, 22 nt, Artificial Sequence
  Synthetic
uuuuucuaaaauguuuuguguu

SEQ ID NO: 416517 - RNA, 23 nt, Artificial Sequence
  Synthetic
auuuuucuaaaauguuuuguguu

SEQ ID NO: 416518 - RNA, 24 nt, Artificial Sequence
  Synthetic
aauuuuucuaaaauguuuuguguu

SEQ ID NO: 416519 - RNA, 18 nt, Artificial Sequence
  Synthetic
uugcccagagaaauuguu

SEQ ID NO: 416520 - RNA, 19 nt, Artificial Sequence
  Synthetic
cuugcccagagaaauuguu

SEQ ID NO: 416521 - RNA, 20 nt, Artificial Sequence
  Synthetic
acuugcccagagaaauuguu

SEQ ID NO: 416522 - RNA, 21 nt, Artificial Sequence
  Synthetic
aacuugcccagagaaauuguu

SEQ ID NO: 416523 - RNA, 22 nt, Artificial Sequence
  Synthetic
aaacuugcccagagaaauuguu

SEQ ID NO: 416524 - RNA, 23 nt, Artificial Sequence
  Synthetic
caaacuugcccagagaaauuguu

SEQ ID NO: 416525 - RNA, 24 nt, Artificial Sequence
  Synthetic
acaaacuugcccagagaaauuguu

SEQ ID NO: 416526 - RNA, 18 nt, Artificial Sequence
  Synthetic
cguauuuuuuaaauuguu

SEQ ID NO: 416527 - RNA, 19 nt, Artificial Sequence
  Synthetic
ccguauuuuuuaaauuguu

SEQ ID NO: 416528 - RNA, 20 nt, Artificial Sequence
  Synthetic
accguauuuuuuaaauuguu

SEQ ID NO: 416529 - RNA, 21 nt, Artificial Sequence
  Synthetic
uaccguauuuuuuaaauuguu

SEQ ID NO: 416530 - RNA, 22 nt, Artificial Sequence
  Synthetic
uuaccguauuuuuuaaauuguu

SEQ ID NO: 416531 - RNA, 23 nt, Artificial Sequence
  Synthetic
guuaccguauuuuuuaaauuguu

SEQ ID NO: 416532 - RNA, 24 nt, Artificial Sequence
  Synthetic
uguuaccguauuuuuuaaauuguu

SEQ ID NO: 416533 - RNA, 18 nt, Artificial Sequence
  Synthetic
agaaugcacccaauuguu

SEQ ID NO: 416534 - RNA, 19 nt, Artificial Sequence
  Synthetic
uagaaugcacccaauuguu

SEQ ID NO: 416535 - RNA, 20 nt, Artificial Sequence
  Synthetic
guagaaugcacccaauuguu

SEQ ID NO: 416536 - RNA, 21 nt, Artificial Sequence
  Synthetic
uguagaaugcacccaauuguu

SEQ ID NO: 416537 - RNA, 22 nt, Artificial Sequence
  Synthetic
auguagaaugcacccaauuguu

SEQ ID NO: 416538 - RNA, 23 nt, Artificial Sequence
  Synthetic
uauguagaaugcacccaauuguu

SEQ ID NO: 416539 - RNA, 24 nt, Artificial Sequence
  Synthetic
uuauguagaaugcacccaauuguu

SEQ ID NO: 416540 - RNA, 18 nt, Artificial Sequence
  Synthetic
cagaucaauccaauuguu

SEQ ID NO: 416541 - RNA, 19 nt, Artificial Sequence
  Synthetic
acagaucaauccaauuguu

SEQ ID NO: 416542 - RNA, 20 nt, Artificial Sequence
  Synthetic
cacagaucaauccaauuguu

SEQ ID NO: 416543 - RNA, 21 nt, Artificial Sequence
  Synthetic
acacagaucaauccaauuguu

SEQ ID NO: 416544 - RNA, 22 nt, Artificial Sequence
  Synthetic
uacacagaucaauccaauuguu

SEQ ID NO: 416545 - RNA, 23 nt, Artificial Sequence
  Synthetic
uuacacagaucaauccaauuguu

SEQ ID NO: 416546 - RNA, 24 nt, Artificial Sequence
  Synthetic
guuacacagaucaauccaauuguu

SEQ ID NO: 416547 - RNA, 18 nt, Artificial Sequence
  Synthetic
uuugacccaauaauuguu

SEQ ID NO: 416548 - RNA, 19 nt, Artificial Sequence
  Synthetic
uuuugacccaauaauuguu

SEQ ID NO: 416549 - RNA, 20 nt, Artificial Sequence
  Synthetic
cuuuugacccaauaauuguu

SEQ ID NO: 416550 - RNA, 21 nt, Artificial Sequence
  Synthetic
ucuuuugacccaauaauuguu

SEQ ID NO: 416551 - RNA, 22 nt, Artificial Sequence
  Synthetic
uucuuuugacccaauaauuguu

SEQ ID NO: 416552 - RNA, 23 nt, Artificial Sequence
  Synthetic
cuucuuuugacccaauaauuguu

SEQ ID NO: 416553 - RNA, 24 nt, Artificial Sequence
  Synthetic
ucuucuuuugacccaauaauuguu

SEQ ID NO: 416554 - RNA, 18 nt, Artificial Sequence
  Synthetic
guauauucuauaauuguu

SEQ ID NO: 416555 - RNA, 19 nt, Artificial Sequence
  Synthetic
uguauauucuauaauuguu

SEQ ID NO: 416556 - RNA, 20 nt, Artificial Sequence
  Synthetic
auguauauucuauaauuguu

SEQ ID NO: 416557 - RNA, 21 nt, Artificial Sequence
  Synthetic
aauguauauucuauaauuguu

SEQ ID NO: 416558 - RNA, 22 nt, Artificial Sequence
  Synthetic
gaauguauauucuauaauuguu

SEQ ID NO: 416559 - RNA, 23 nt, Artificial Sequence
  Synthetic
agaauguauauucuauaauuguu

SEQ ID NO: 416560 - RNA, 24 nt, Artificial Sequence
  Synthetic
aagaauguauauucuauaauuguu

SEQ ID NO: 416561 - RNA, 18 nt, Artificial Sequence
  Synthetic
guuacuauuguaauuguu

SEQ ID NO: 416562 - RNA, 19 nt, Artificial Sequence
  Synthetic
uguuacuauuguaauuguu

SEQ ID NO: 416563 - RNA, 20 nt, Artificial Sequence
  Synthetic
auguuacuauuguaauuguu

SEQ ID NO: 416564 - RNA, 21 nt, Artificial Sequence
  Synthetic
gauguuacuauuguaauuguu

SEQ ID NO: 416565 - RNA, 22 nt, Artificial Sequence
  Synthetic
ugauguuacuauuguaauuguu

SEQ ID NO: 416566 - RNA, 23 nt, Artificial Sequence
  Synthetic
uugauguuacuauuguaauuguu

SEQ ID NO: 416567 - RNA, 24 nt, Artificial Sequence
  Synthetic
uuugauguuacuauuguaauuguu

SEQ ID NO: 416568 - RNA, 18 nt, Artificial Sequence
  Synthetic
ugagaucuauccauuguu

SEQ ID NO: 416569 - RNA, 19 nt, Artificial Sequence
  Synthetic
uugagaucuauccauuguu

SEQ ID NO: 416570 - RNA, 20 nt, Artificial Sequence
  Synthetic
uuugagaucuauccauuguu

SEQ ID NO: 416571 - RNA, 21 nt, Artificial Sequence
  Synthetic
uuuugagaucuauccauuguu

SEQ ID NO: 416572 - RNA, 22 nt, Artificial Sequence
  Synthetic
auuuugagaucuauccauuguu

SEQ ID NO: 416573 - RNA, 23 nt, Artificial Sequence
  Synthetic
cauuuugagaucuauccauuguu

SEQ ID NO: 416574 - RNA, 24 nt, Artificial Sequence
  Synthetic
ccauuuugagaucuauccauuguu

SEQ ID NO: 416575 - RNA, 18 nt, Artificial Sequence
  Synthetic
cguuuauuucucauuguu

SEQ ID NO: 416576 - RNA, 19 nt, Artificial Sequence
  Synthetic
ccguuuauuucucauuguu

SEQ ID NO: 416577 - RNA, 20 nt, Artificial Sequence
  Synthetic
accguuuauuucucauuguu

SEQ ID NO: 416578 - RNA, 21 nt, Artificial Sequence
  Synthetic
uaccguuuauuucucauuguu

SEQ ID NO: 416579 - RNA, 22 nt, Artificial Sequence
  Synthetic
guaccguuuauuucucauuguu

SEQ ID NO: 416580 - RNA, 23 nt, Artificial Sequence
  Synthetic
uguaccguuuauuucucauuguu

SEQ ID NO: 416581 - RNA, 24 nt, Artificial Sequence
  Synthetic
uuguaccguuuauuucucauuguu

SEQ ID NO: 416582 - RNA, 18 nt, Artificial Sequence
  Synthetic
ucauacauauucauuguu

SEQ ID NO: 416583 - RNA, 19 nt, Artificial Sequence
  Synthetic
uucauacauauucauuguu

SEQ ID NO: 416584 - RNA, 20 nt, Artificial Sequence
  Synthetic
uuucauacauauucauuguu

SEQ ID NO: 416585 - RNA, 21 nt, Artificial Sequence
  Synthetic
guuucauacauauucauuguu

SEQ ID NO: 416586 - RNA, 22 nt, Artificial Sequence
  Synthetic
uguuucauacauauucauuguu

SEQ ID NO: 416587 - RNA, 23 nt, Artificial Sequence
  Synthetic
guguuucauacauauucauuguu

SEQ ID NO: 416588 - RNA, 24 nt, Artificial Sequence
  Synthetic
gguguuucauacauauucauuguu

SEQ ID NO: 416589 - RNA, 18 nt, Artificial Sequence
  Synthetic
gcuuuagaaaagauuguu

SEQ ID NO: 416590 - RNA, 19 nt, Artificial Sequence
  Synthetic
ggcuuuagaaaagauuguu

SEQ ID NO: 416591 - RNA, 20 nt, Artificial Sequence
  Synthetic
uggcuuuagaaaagauuguu

SEQ ID NO: 416592 - RNA, 21 nt, Artificial Sequence
  Synthetic
guggcuuuagaaaagauuguu

SEQ ID NO: 416593 - RNA, 22 nt, Artificial Sequence
  Synthetic
uguggcuuuagaaaagauuguu

SEQ ID NO: 416594 - RNA, 23 nt, Artificial Sequence
  Synthetic
uuguggcuuuagaaaagauuguu

SEQ ID NO: 416595 - RNA, 24 nt, Artificial Sequence
  Synthetic
uuuguggcuuuagaaaagauuguu

SEQ ID NO: 416596 - RNA, 18 nt, Artificial Sequence
  Synthetic
agauagcgucagauuguu

SEQ ID NO: 416597 - RNA, 19 nt, Artificial Sequence
  Synthetic
aagauagcgucagauuguu

SEQ ID NO: 416598 - RNA, 20 nt, Artificial Sequence
  Synthetic
gaagauagcgucagauuguu

SEQ ID NO: 416599 - RNA, 21 nt, Artificial Sequence
  Synthetic
ggaagauagcgucagauuguu

SEQ ID NO: 416600 - RNA, 22 nt, Artificial Sequence
  Synthetic
uggaagauagcgucagauuguu

SEQ ID NO: 416601 - RNA, 23 nt, Artificial Sequence
  Synthetic
auggaagauagcgucagauuguu

SEQ ID NO: 416602 - RNA, 24 nt, Artificial Sequence
  Synthetic
aauggaagauagcgucagauuguu

SEQ ID NO: 416603 - RNA, 18 nt, Artificial Sequence
  Synthetic
gagaagaaagauauuguu

SEQ ID NO: 416604 - RNA, 19 nt, Artificial Sequence
  Synthetic
ugagaagaaagauauuguu

SEQ ID NO: 416605 - RNA, 20 nt, Artificial Sequence
  Synthetic
cugagaagaaagauauuguu

SEQ ID NO: 416606 - RNA, 21 nt, Artificial Sequence
  Synthetic
ccugagaagaaagauauuguu

SEQ ID NO: 416607 - RNA, 22 nt, Artificial Sequence
  Synthetic
cccugagaagaaagauauuguu

SEQ ID NO: 416608 - RNA, 23 nt, Artificial Sequence
  Synthetic
acccugagaagaaagauauuguu

SEQ ID NO: 416609 - RNA, 24 nt, Artificial Sequence
  Synthetic
uacccugagaagaaagauauuguu

SEQ ID NO: 416610 - RNA, 18 nt, Artificial Sequence
  Synthetic
gcuauaauuuauauuguu

SEQ ID NO: 416611 - RNA, 19 nt, Artificial Sequence
  Synthetic
ggcuauaauuuauauuguu

SEQ ID NO: 416612 - RNA, 20 nt, Artificial Sequence
  Synthetic
uggcuauaauuuauauuguu

SEQ ID NO: 416613 - RNA, 21 nt, Artificial Sequence
  Synthetic
uuggcuauaauuuauauuguu

SEQ ID NO: 416614 - RNA, 22 nt, Artificial Sequence
  Synthetic
cuuggcuauaauuuauauuguu

SEQ ID NO: 416615 - RNA, 23 nt, Artificial Sequence
  Synthetic
acuuggcuauaauuuauauuguu

SEQ ID NO: 416616 - RNA, 24 nt, Artificial Sequence
  Synthetic
uacuuggcuauaauuuauauuguu

SEQ ID NO: 416617 - RNA, 18 nt, Artificial Sequence
  Synthetic
ccaaaugagacuauuguu

SEQ ID NO: 416618 - RNA, 19 nt, Artificial Sequence
  Synthetic
accaaaugagacuauuguu

SEQ ID NO: 416619 - RNA, 20 nt, Artificial Sequence
  Synthetic
uaccaaaugagacuauuguu

SEQ ID NO: 416620 - RNA, 21 nt, Artificial Sequence
  Synthetic
uuaccaaaugagacuauuguu

SEQ ID NO: 416621 - RNA, 22 nt, Artificial Sequence
  Synthetic
uuuaccaaaugagacuauuguu

SEQ ID NO: 416622 - RNA, 23 nt, Artificial Sequence
  Synthetic
auuuaccaaaugagacuauuguu

SEQ ID NO: 416623 - RNA, 24 nt, Artificial Sequence
  Synthetic
uauuuaccaaaugagacuauuguu

SEQ ID NO: 416624 - RNA, 18 nt, Artificial Sequence
  Synthetic
uuguuaugcaguauuguu

SEQ ID NO: 416625 - RNA, 19 nt, Artificial Sequence
  Synthetic
guuguuaugcaguauuguu

SEQ ID NO: 416626 - RNA, 20 nt, Artificial Sequence
  Synthetic
aguuguuaugcaguauuguu

SEQ ID NO: 416627 - RNA, 21 nt, Artificial Sequence
  Synthetic
uaguuguuaugcaguauuguu

SEQ ID NO: 416628 - RNA, 22 nt, Artificial Sequence
  Synthetic
auaguuguuaugcaguauuguu

SEQ ID NO: 416629 - RNA, 23 nt, Artificial Sequence
  Synthetic
aauaguuguuaugcaguauuguu

SEQ ID NO: 416630 - RNA, 24 nt, Artificial Sequence
  Synthetic
aaauaguuguuaugcaguauuguu

SEQ ID NO: 416631 - RNA, 18 nt, Artificial Sequence
  Synthetic
aacaugguuuuuauuguu

SEQ ID NO: 416632 - RNA, 19 nt, Artificial Sequence
  Synthetic
caacaugguuuuuauuguu

SEQ ID NO: 416633 - RNA, 20 nt, Artificial Sequence
  Synthetic
ucaacaugguuuuuauuguu

SEQ ID NO: 416634 - RNA, 21 nt, Artificial Sequence
  Synthetic
uucaacaugguuuuuauuguu

SEQ ID NO: 416635 - RNA, 22 nt, Artificial Sequence
  Synthetic
auucaacaugguuuuuauuguu

SEQ ID NO: 416636 - RNA, 23 nt, Artificial Sequence
  Synthetic
aauucaacaugguuuuuauuguu

SEQ ID NO: 416637 - RNA, 24 nt, Artificial Sequence
  Synthetic
uaauucaacaugguuuuuauuguu

SEQ ID NO: 416638 - RNA, 18 nt, Artificial Sequence
  Synthetic
cuucucgaaaaacuuguu

SEQ ID NO: 416639 - RNA, 19 nt, Artificial Sequence
  Synthetic
ucuucucgaaaaacuuguu

SEQ ID NO: 416640 - RNA, 20 nt, Artificial Sequence
  Synthetic
uucuucucgaaaaacuuguu

SEQ ID NO: 416641 - RNA, 21 nt, Artificial Sequence
  Synthetic
auucuucucgaaaaacuuguu

SEQ ID NO: 416642 - RNA, 22 nt, Artificial Sequence
  Synthetic
gauucuucucgaaaaacuuguu

SEQ ID NO: 416643 - RNA, 23 nt, Artificial Sequence
  Synthetic
ggauucuucucgaaaaacuuguu

SEQ ID NO: 416644 - RNA, 24 nt, Artificial Sequence
  Synthetic
uggauucuucucgaaaaacuuguu

SEQ ID NO: 416645 - RNA, 18 nt, Artificial Sequence
  Synthetic
ccauaauuccuacuuguu

SEQ ID NO: 416646 - RNA, 19 nt, Artificial Sequence
  Synthetic
cccauaauuccuacuuguu

SEQ ID NO: 416647 - RNA, 20 nt, Artificial Sequence
  Synthetic
ucccauaauuccuacuuguu

SEQ ID NO: 416648 - RNA, 21 nt, Artificial Sequence
  Synthetic
cucccauaauuccuacuuguu

SEQ ID NO: 416649 - RNA, 22 nt, Artificial Sequence
  Synthetic
acucccauaauuccuacuuguu

SEQ ID NO: 416650 - RNA, 23 nt, Artificial Sequence
  Synthetic
uacucccauaauuccuacuuguu

SEQ ID NO: 416651 - RNA, 24 nt, Artificial Sequence
  Synthetic
cuacucccauaauuccuacuuguu

SEQ ID NO: 416652 - RNA, 18 nt, Artificial Sequence
  Synthetic
ccaccuccuuuacuuguu

SEQ ID NO: 416653 - RNA, 19 nt, Artificial Sequence
  Synthetic
accaccuccuuuacuuguu

SEQ ID NO: 416654 - RNA, 20 nt, Artificial Sequence
  Synthetic
caccaccuccuuuacuuguu

SEQ ID NO: 416655 - RNA, 21 nt, Artificial Sequence
  Synthetic
gcaccaccuccuuuacuuguu

SEQ ID NO: 416656 - RNA, 22 nt, Artificial Sequence
  Synthetic
ugcaccaccuccuuuacuuguu

SEQ ID NO: 416657 - RNA, 23 nt, Artificial Sequence
  Synthetic
cugcaccaccuccuuuacuuguu

SEQ ID NO: 416658 - RNA, 24 nt, Artificial Sequence
  Synthetic
ucugcaccaccuccuuuacuuguu

SEQ ID NO: 416659 - RNA, 18 nt, Artificial Sequence
  Synthetic
aaauauggccuccuuguu

SEQ ID NO: 416660 - RNA, 19 nt, Artificial Sequence
  Synthetic
uaaauauggccuccuuguu

SEQ ID NO: 416661 - RNA, 20 nt, Artificial Sequence
  Synthetic
cuaaauauggccuccuuguu

SEQ ID NO: 416662 - RNA, 21 nt, Artificial Sequence
  Synthetic
ucuaaauauggccuccuuguu

SEQ ID NO: 416663 - RNA, 22 nt, Artificial Sequence
  Synthetic
aucuaaauauggccuccuuguu

SEQ ID NO: 416664 - RNA, 23 nt, Artificial Sequence
  Synthetic
aaucuaaauauggccuccuuguu

SEQ ID NO: 416665 - RNA, 24 nt, Artificial Sequence
  Synthetic
uaaucuaaauauggccuccuuguu

SEQ ID NO: 416666 - RNA, 18 nt, Artificial Sequence
  Synthetic
uaggaguuuuuccuuguu

SEQ ID NO: 416667 - RNA, 19 nt, Artificial Sequence
  Synthetic
uuaggaguuuuuccuuguu

SEQ ID NO: 416668 - RNA, 20 nt, Artificial Sequence
  Synthetic
uuuaggaguuuuuccuuguu

SEQ ID NO: 416669 - RNA, 21 nt, Artificial Sequence
  Synthetic
uuuuaggaguuuuuccuuguu

SEQ ID NO: 416670 - RNA, 22 nt, Artificial Sequence
  Synthetic
guuuuaggaguuuuuccuuguu

SEQ ID NO: 416671 - RNA, 23 nt, Artificial Sequence
  Synthetic
uguuuuaggaguuuuuccuuguu

SEQ ID NO: 416672 - RNA, 24 nt, Artificial Sequence
  Synthetic
guguuuuaggaguuuuuccuuguu

SEQ ID NO: 416673 - RNA, 18 nt, Artificial Sequence
  Synthetic
auuagauaacagcuuguu

SEQ ID NO: 416674 - RNA, 19 nt, Artificial Sequence
  Synthetic
aauuagauaacagcuuguu

SEQ ID NO: 416675 - RNA, 20 nt, Artificial Sequence
  Synthetic
caauuagauaacagcuuguu

SEQ ID NO: 416676 - RNA, 21 nt, Artificial Sequence
  Synthetic
acaauuagauaacagcuuguu

SEQ ID NO: 416677 - RNA, 22 nt, Artificial Sequence
  Synthetic
aacaauuagauaacagcuuguu

SEQ ID NO: 416678 - RNA, 23 nt, Artificial Sequence
  Synthetic
uaacaauuagauaacagcuuguu

SEQ ID NO: 416679 - RNA, 24 nt, Artificial Sequence
  Synthetic
auaacaauuagauaacagcuuguu

SEQ ID NO: 416680 - RNA, 18 nt, Artificial Sequence
  Synthetic
uaauucuaacaucuuguu

SEQ ID NO: 416681 - RNA, 19 nt, Artificial Sequence
  Synthetic
uuaauucuaacaucuuguu

SEQ ID NO: 416682 - RNA, 20 nt, Artificial Sequence
  Synthetic
uuuaauucuaacaucuuguu

SEQ ID NO: 416683 - RNA, 21 nt, Artificial Sequence
  Synthetic
uuuuaauucuaacaucuuguu

SEQ ID NO: 416684 - RNA, 22 nt, Artificial Sequence
  Synthetic
auuuuaauucuaacaucuuguu

SEQ ID NO: 416685 - RNA, 23 nt, Artificial Sequence
  Synthetic
uauuuuaauucuaacaucuuguu

SEQ ID NO: 416686 - RNA, 24 nt, Artificial Sequence
  Synthetic
uuauuuuaauucuaacaucuuguu

SEQ ID NO: 416687 - RNA, 18 nt, Artificial Sequence
  Synthetic
cugcauaaaugucuuguu

SEQ ID NO: 416688 - RNA, 19 nt, Artificial Sequence
  Synthetic
gcugcauaaaugucuuguu

SEQ ID NO: 416689 - RNA, 20 nt, Artificial Sequence
  Synthetic
ggcugcauaaaugucuuguu

SEQ ID NO: 416690 - RNA, 21 nt, Artificial Sequence
  Synthetic
uggcugcauaaaugucuuguu

SEQ ID NO: 416691 - RNA, 22 nt, Artificial Sequence
  Synthetic
cuggcugcauaaaugucuuguu

SEQ ID NO: 416692 - RNA, 23 nt, Artificial Sequence
  Synthetic
gcuggcugcauaaaugucuuguu

SEQ ID NO: 416693 - RNA, 24 nt, Artificial Sequence
  Synthetic
ugcuggcugcauaaaugucuuguu

SEQ ID NO: 416694 - RNA, 18 nt, Artificial Sequence
  Synthetic
acuggcguuuuucuuguu

SEQ ID NO: 416695 - RNA, 19 nt, Artificial Sequence
  Synthetic
aacuggcguuuuucuuguu

SEQ ID NO: 416696 - RNA, 20 nt, Artificial Sequence
  Synthetic
uaacuggcguuuuucuuguu

SEQ ID NO: 416697 - RNA, 21 nt, Artificial Sequence
  Synthetic
cuaacuggcguuuuucuuguu

SEQ ID NO: 416698 - RNA, 22 nt, Artificial Sequence
  Synthetic
gcuaacuggcguuuuucuuguu

SEQ ID NO: 416699 - RNA, 23 nt, Artificial Sequence
  Synthetic
agcuaacuggcguuuuucuuguu

SEQ ID NO: 416700 - RNA, 24 nt, Artificial Sequence
  Synthetic
aagcuaacuggcguuuuucuuguu

SEQ ID NO: 416701 - RNA, 18 nt, Artificial Sequence
  Synthetic
uguuuaugcuaaguuguu

SEQ ID NO: 416702 - RNA, 19 nt, Artificial Sequence
  Synthetic
uuguuuaugcuaaguuguu

SEQ ID NO: 416703 - RNA, 20 nt, Artificial Sequence
  Synthetic
uuuguuuaugcuaaguuguu

SEQ ID NO: 416704 - RNA, 21 nt, Artificial Sequence
  Synthetic
guuuguuuaugcuaaguuguu

SEQ ID NO: 416705 - RNA, 22 nt, Artificial Sequence
  Synthetic
aguuuguuuaugcuaaguuguu

SEQ ID NO: 416706 - RNA, 23 nt, Artificial Sequence
  Synthetic
uaguuuguuuaugcuaaguuguu

SEQ ID NO: 416707 - RNA, 24 nt, Artificial Sequence
  Synthetic
cuaguuuguuuaugcuaaguuguu

SEQ ID NO: 416708 - RNA, 18 nt, Artificial Sequence
  Synthetic
agugguuuuuaaguuguu

SEQ ID NO: 416709 - RNA, 19 nt, Artificial Sequence
  Synthetic
aagugguuuuuaaguuguu

SEQ ID NO: 416710 - RNA, 20 nt, Artificial Sequence
  Synthetic
gaagugguuuuuaaguuguu

SEQ ID NO: 416711 - RNA, 21 nt, Artificial Sequence
  Synthetic
agaagugguuuuuaaguuguu

SEQ ID NO: 416712 - RNA, 22 nt, Artificial Sequence
  Synthetic
aagaagugguuuuuaaguuguu

SEQ ID NO: 416713 - RNA, 23 nt, Artificial Sequence
  Synthetic
aaagaagugguuuuuaaguuguu

SEQ ID NO: 416714 - RNA, 24 nt, Artificial Sequence
  Synthetic
aaaagaagugguuuuuaaguuguu

SEQ ID NO: 416715 - RNA, 18 nt, Artificial Sequence
  Synthetic
ucugaauucuuaguuguu

SEQ ID NO: 416716 - RNA, 19 nt, Artificial Sequence
  Synthetic
uucugaauucuuaguuguu

SEQ ID NO: 416717 - RNA, 20 nt, Artificial Sequence
  Synthetic
cuucugaauucuuaguuguu

SEQ ID NO: 416718 - RNA, 21 nt, Artificial Sequence
  Synthetic
ucuucugaauucuuaguuguu

SEQ ID NO: 416719 - RNA, 22 nt, Artificial Sequence
  Synthetic
uucuucugaauucuuaguuguu

SEQ ID NO: 416720 - RNA, 23 nt, Artificial Sequence
  Synthetic
uuucuucugaauucuuaguuguu

SEQ ID NO: 416721 - RNA, 24 nt, Artificial Sequence
  Synthetic
auuucuucugaauucuuaguuguu

SEQ ID NO: 416722 - RNA, 18 nt, Artificial Sequence
  Synthetic
agaccugaagccguuguu

SEQ ID NO: 416723 - RNA, 19 nt, Artificial Sequence
  Synthetic
uagaccugaagccguuguu

SEQ ID NO: 416724 - RNA, 20 nt, Artificial Sequence
  Synthetic
cuagaccugaagccguuguu

SEQ ID NO: 416725 - RNA, 21 nt, Artificial Sequence
  Synthetic
ccuagaccugaagccguuguu

SEQ ID NO: 416726 - RNA, 22 nt, Artificial Sequence
  Synthetic
uccuagaccugaagccguuguu

SEQ ID NO: 416727 - RNA, 23 nt, Artificial Sequence
  Synthetic
cuccuagaccugaagccguuguu

SEQ ID NO: 416728 - RNA, 24 nt, Artificial Sequence
  Synthetic
ucuccuagaccugaagccguuguu

SEQ ID NO: 416729 - RNA, 18 nt, Artificial Sequence
  Synthetic
cuauacuucaagguuguu

SEQ ID NO: 416730 - RNA, 19 nt, Artificial Sequence
  Synthetic
ccuauacuucaagguuguu

SEQ ID NO: 416731 - RNA, 20 nt, Artificial Sequence
  Synthetic
gccuauacuucaagguuguu

SEQ ID NO: 416732 - RNA, 21 nt, Artificial Sequence
  Synthetic
ugccuauacuucaagguuguu

SEQ ID NO: 416733 - RNA, 22 nt, Artificial Sequence
  Synthetic
uugccuauacuucaagguuguu

SEQ ID NO: 416734 - RNA, 23 nt, Artificial Sequence
  Synthetic
cuugccuauacuucaagguuguu

SEQ ID NO: 416735 - RNA, 24 nt, Artificial Sequence
  Synthetic
ucuugccuauacuucaagguuguu

SEQ ID NO: 416736 - RNA, 18 nt, Artificial Sequence
  Synthetic
cuaccucuucagguuguu

SEQ ID NO: 416737 - RNA, 19 nt, Artificial Sequence
  Synthetic
gcuaccucuucagguuguu

SEQ ID NO: 416738 - RNA, 20 nt, Artificial Sequence
  Synthetic
agcuaccucuucagguuguu

SEQ ID NO: 416739 - RNA, 21 nt, Artificial Sequence
  Synthetic
cagcuaccucuucagguuguu

SEQ ID NO: 416740 - RNA, 22 nt, Artificial Sequence
  Synthetic
acagcuaccucuucagguuguu

SEQ ID NO: 416741 - RNA, 23 nt, Artificial Sequence
  Synthetic
gacagcuaccucuucagguuguu

SEQ ID NO: 416742 - RNA, 24 nt, Artificial Sequence
  Synthetic
ugacagcuaccucuucagguuguu

SEQ ID NO: 416743 - RNA, 18 nt, Artificial Sequence
  Synthetic
cuaugucacaggguuguu

SEQ ID NO: 416744 - RNA, 19 nt, Artificial Sequence
  Synthetic
ucuaugucacaggguuguu

SEQ ID NO: 416745 - RNA, 20 nt, Artificial Sequence
  Synthetic
gucuaugucacaggguuguu

SEQ ID NO: 416746 - RNA, 21 nt, Artificial Sequence
  Synthetic
ugucuaugucacaggguuguu

SEQ ID NO: 416747 - RNA, 22 nt, Artificial Sequence
  Synthetic
gugucuaugucacaggguuguu

SEQ ID NO: 416748 - RNA, 23 nt, Artificial Sequence
  Synthetic
agugucuaugucacaggguuguu

SEQ ID NO: 416749 - RNA, 24 nt, Artificial Sequence
  Synthetic
uagugucuaugucacaggguuguu

SEQ ID NO: 416750 - RNA, 18 nt, Artificial Sequence
  Synthetic
aaaagcugcaggguuguu

SEQ ID NO: 416751 - RNA, 19 nt, Artificial Sequence
  Synthetic
gaaaagcugcaggguuguu

SEQ ID NO: 416752 - RNA, 20 nt, Artificial Sequence
  Synthetic
agaaaagcugcaggguuguu

SEQ ID NO: 416753 - RNA, 21 nt, Artificial Sequence
  Synthetic
cagaaaagcugcaggguuguu

SEQ ID NO: 416754 - RNA, 22 nt, Artificial Sequence
  Synthetic
ucagaaaagcugcaggguuguu

SEQ ID NO: 416755 - RNA, 23 nt, Artificial Sequence
  Synthetic
uucagaaaagcugcaggguuguu

SEQ ID NO: 416756 - RNA, 24 nt, Artificial Sequence
  Synthetic
cuucagaaaagcugcaggguuguu

SEQ ID NO: 416757 - RNA, 18 nt, Artificial Sequence
  Synthetic
cuacccuagaggguuguu

SEQ ID NO: 416758 - RNA, 19 nt, Artificial Sequence
  Synthetic
ccuacccuagaggguuguu

SEQ ID NO: 416759 - RNA, 20 nt, Artificial Sequence
  Synthetic
cccuacccuagaggguuguu

SEQ ID NO: 416760 - RNA, 21 nt, Artificial Sequence
  Synthetic
ccccuacccuagaggguuguu

SEQ ID NO: 416761 - RNA, 22 nt, Artificial Sequence
  Synthetic
gccccuacccuagaggguuguu

SEQ ID NO: 416762 - RNA, 23 nt, Artificial Sequence
  Synthetic
agccccuacccuagaggguuguu

SEQ ID NO: 416763 - RNA, 24 nt, Artificial Sequence
  Synthetic
uagccccuacccuagaggguuguu

SEQ ID NO: 416764 - RNA, 18 nt, Artificial Sequence
  Synthetic
agacuaauaaugguuguu

SEQ ID NO: 416765 - RNA, 19 nt, Artificial Sequence
  Synthetic
aagacuaauaaugguuguu

SEQ ID NO: 416766 - RNA, 20 nt, Artificial Sequence
  Synthetic
aaagacuaauaaugguuguu

SEQ ID NO: 416767 - RNA, 21 nt, Artificial Sequence
  Synthetic
aaaagacuaauaaugguuguu

SEQ ID NO: 416768 - RNA, 22 nt, Artificial Sequence
  Synthetic
caaaagacuaauaaugguuguu

SEQ ID NO: 416769 - RNA, 23 nt, Artificial Sequence
  Synthetic
acaaaagacuaauaaugguuguu

SEQ ID NO: 416770 - RNA, 24 nt, Artificial Sequence
  Synthetic
uacaaaagacuaauaaugguuguu

SEQ ID NO: 416771 - RNA, 18 nt, Artificial Sequence
  Synthetic
aaaggaauuuugguuguu

SEQ ID NO: 416772 - RNA, 19 nt, Artificial Sequence
  Synthetic
aaaaggaauuuugguuguu

SEQ ID NO: 416773 - RNA, 20 nt, Artificial Sequence
  Synthetic
aaaaaggaauuuugguuguu

SEQ ID NO: 416774 - RNA, 21 nt, Artificial Sequence
  Synthetic
aaaaaaggaauuuugguuguu

SEQ ID NO: 416775 - RNA, 22 nt, Artificial Sequence
  Synthetic
uaaaaaaggaauuuugguuguu

SEQ ID NO: 416776 - RNA, 23 nt, Artificial Sequence
  Synthetic
guaaaaaaggaauuuugguuguu

SEQ ID NO: 416777 - RNA, 24 nt, Artificial Sequence
  Synthetic
aguaaaaaaggaauuuugguuguu

SEQ ID NO: 416778 - RNA, 18 nt, Artificial Sequence
  Synthetic
agugugcacucuguuguu

SEQ ID NO: 416779 - RNA, 19 nt, Artificial Sequence
  Synthetic
cagugugcacucuguuguu

SEQ ID NO: 416780 - RNA, 20 nt, Artificial Sequence
  Synthetic
gcagugugcacucuguuguu

SEQ ID NO: 416781 - RNA, 21 nt, Artificial Sequence
  Synthetic
agcagugugcacucuguuguu

SEQ ID NO: 416782 - RNA, 22 nt, Artificial Sequence
  Synthetic
aagcagugugcacucuguuguu

SEQ ID NO: 416783 - RNA, 23 nt, Artificial Sequence
  Synthetic
caagcagugugcacucuguuguu

SEQ ID NO: 416784 - RNA, 24 nt, Artificial Sequence
  Synthetic
acaagcagugugcacucuguuguu

SEQ ID NO: 416785 - RNA, 18 nt, Artificial Sequence
  Synthetic
cauuaauuuauuguuguu

SEQ ID NO: 416786 - RNA, 19 nt, Artificial Sequence
  Synthetic
acauuaauuuauuguuguu

SEQ ID NO: 416787 - RNA, 20 nt, Artificial Sequence
  Synthetic
gacauuaauuuauuguuguu

SEQ ID NO: 416788 - RNA, 21 nt, Artificial Sequence
  Synthetic
ugacauuaauuuauuguuguu

SEQ ID NO: 416789 - RNA, 22 nt, Artificial Sequence
  Synthetic
gugacauuaauuuauuguuguu

SEQ ID NO: 416790 - RNA, 23 nt, Artificial Sequence
  Synthetic
agugacauuaauuuauuguuguu

SEQ ID NO: 416791 - RNA, 24 nt, Artificial Sequence
  Synthetic
cagugacauuaauuuauuguuguu

SEQ ID NO: 416792 - RNA, 18 nt, Artificial Sequence
  Synthetic
auuuggagguaauuuguu

SEQ ID NO: 416793 - RNA, 19 nt, Artificial Sequence
  Synthetic
cauuuggagguaauuuguu

SEQ ID NO: 416794 - RNA, 20 nt, Artificial Sequence
  Synthetic
ucauuuggagguaauuuguu

SEQ ID NO: 416795 - RNA, 21 nt, Artificial Sequence
  Synthetic
aucauuuggagguaauuuguu

SEQ ID NO: 416796 - RNA, 22 nt, Artificial Sequence
  Synthetic
gaucauuuggagguaauuuguu

SEQ ID NO: 416797 - RNA, 23 nt, Artificial Sequence
  Synthetic
ugaucauuuggagguaauuuguu

SEQ ID NO: 416798 - RNA, 24 nt, Artificial Sequence
  Synthetic
uugaucauuuggagguaauuuguu

SEQ ID NO: 416799 - RNA, 18 nt, Artificial Sequence
  Synthetic
auguucaaccuauuuguu

SEQ ID NO: 416800 - RNA, 19 nt, Artificial Sequence
  Synthetic
uauguucaaccuauuuguu

SEQ ID NO: 416801 - RNA, 20 nt, Artificial Sequence
  Synthetic
uuauguucaaccuauuuguu

SEQ ID NO: 416802 - RNA, 21 nt, Artificial Sequence
  Synthetic
uuuauguucaaccuauuuguu

SEQ ID NO: 416803 - RNA, 22 nt, Artificial Sequence
  Synthetic
auuuauguucaaccuauuuguu

SEQ ID NO: 416804 - RNA, 23 nt, Artificial Sequence
  Synthetic
cauuuauguucaaccuauuuguu

SEQ ID NO: 416805 - RNA, 24 nt, Artificial Sequence
  Synthetic
gcauuuauguucaaccuauuuguu

SEQ ID NO: 416806 - RNA, 18 nt, Artificial Sequence
  Synthetic
uuuaugcauuacuuuguu

SEQ ID NO: 416807 - RNA, 19 nt, Artificial Sequence
  Synthetic
guuuaugcauuacuuuguu

SEQ ID NO: 416808 - RNA, 20 nt, Artificial Sequence
  Synthetic
uguuuaugcauuacuuuguu

SEQ ID NO: 416809 - RNA, 21 nt, Artificial Sequence
  Synthetic
uuguuuaugcauuacuuuguu

SEQ ID NO: 416810 - RNA, 22 nt, Artificial Sequence
  Synthetic
uuuguuuaugcauuacuuuguu

SEQ ID NO: 416811 - RNA, 23 nt, Artificial Sequence
  Synthetic
uuuuguuuaugcauuacuuuguu

SEQ ID NO: 416812 - RNA, 24 nt, Artificial Sequence
  Synthetic
uuuuuguuuaugcauuacuuuguu

SEQ ID NO: 416813 - RNA, 18 nt, Artificial Sequence
  Synthetic
aaacaacgucccuuuguu

SEQ ID NO: 416814 - RNA, 19 nt, Artificial Sequence
  Synthetic
aaaacaacgucccuuuguu

SEQ ID NO: 416815 - RNA, 20 nt, Artificial Sequence
  Synthetic
gaaaacaacgucccuuuguu

SEQ ID NO: 416816 - RNA, 21 nt, Artificial Sequence
  Synthetic
agaaaacaacgucccuuuguu

SEQ ID NO: 416817 - RNA, 22 nt, Artificial Sequence
  Synthetic
aagaaaacaacgucccuuuguu

SEQ ID NO: 416818 - RNA, 23 nt, Artificial Sequence
  Synthetic
aaagaaaacaacgucccuuuguu

SEQ ID NO: 416819 - RNA, 24 nt, Artificial Sequence
  Synthetic
uaaagaaaacaacgucccuuuguu

SEQ ID NO: 416820 - RNA, 18 nt, Artificial Sequence
  Synthetic
aagaauauucccuuuguu

SEQ ID NO: 416821 - RNA, 19 nt, Artificial Sequence
  Synthetic
caagaauauucccuuuguu

SEQ ID NO: 416822 - RNA, 20 nt, Artificial Sequence
  Synthetic
gcaagaauauucccuuuguu

SEQ ID NO: 416823 - RNA, 21 nt, Artificial Sequence
  Synthetic
ggcaagaauauucccuuuguu

SEQ ID NO: 416824 - RNA, 22 nt, Artificial Sequence
  Synthetic
aggcaagaauauucccuuuguu

SEQ ID NO: 416825 - RNA, 23 nt, Artificial Sequence
  Synthetic
uaggcaagaauauucccuuuguu

SEQ ID NO: 416826 - RNA, 24 nt, Artificial Sequence
  Synthetic
auaggcaagaauauucccuuuguu

SEQ ID NO: 416827 - RNA, 18 nt, Artificial Sequence
  Synthetic
cagucuguguccuuuguu

SEQ ID NO: 416828 - RNA, 19 nt, Artificial Sequence
  Synthetic
ccagucuguguccuuuguu

SEQ ID NO: 416829 - RNA, 20 nt, Artificial Sequence
  Synthetic
uccagucuguguccuuuguu

SEQ ID NO: 416830 - RNA, 21 nt, Artificial Sequence
  Synthetic
guccagucuguguccuuuguu

SEQ ID NO: 416831 - RNA, 22 nt, Artificial Sequence
  Synthetic
gguccagucuguguccuuuguu

SEQ ID NO: 416832 - RNA, 23 nt, Artificial Sequence
  Synthetic
ugguccagucuguguccuuuguu

SEQ ID NO: 416833 - RNA, 24 nt, Artificial Sequence
  Synthetic
augguccagucuguguccuuuguu

SEQ ID NO: 416834 - RNA, 18 nt, Artificial Sequence
  Synthetic
aucuugucuuucuuuguu

SEQ ID NO: 416835 - RNA, 19 nt, Artificial Sequence
  Synthetic
gaucuugucuuucuuuguu

SEQ ID NO: 416836 - RNA, 20 nt, Artificial Sequence
  Synthetic
ggaucuugucuuucuuuguu

SEQ ID NO: 416837 - RNA, 21 nt, Artificial Sequence
  Synthetic
uggaucuugucuuucuuuguu

SEQ ID NO: 416838 - RNA, 22 nt, Artificial Sequence
  Synthetic
guggaucuugucuuucuuuguu

SEQ ID NO: 416839 - RNA, 23 nt, Artificial Sequence
  Synthetic
gguggaucuugucuuucuuuguu

SEQ ID NO: 416840 - RNA, 24 nt, Artificial Sequence
  Synthetic
agguggaucuugucuuucuuuguu

SEQ ID NO: 416841 - RNA, 18 nt, Artificial Sequence
  Synthetic
aguuagggagaguuuguu

SEQ ID NO: 416842 - RNA, 19 nt, Artificial Sequence
  Synthetic
gaguuagggagaguuuguu

SEQ ID NO: 416843 - RNA, 20 nt, Artificial Sequence
  Synthetic
ggaguuagggagaguuuguu

SEQ ID NO: 416844 - RNA, 21 nt, Artificial Sequence
  Synthetic
aggaguuagggagaguuuguu

SEQ ID NO: 416845 - RNA, 22 nt, Artificial Sequence
  Synthetic
uaggaguuagggagaguuuguu

SEQ ID NO: 416846 - RNA, 23 nt, Artificial Sequence
  Synthetic
guaggaguuagggagaguuuguu

SEQ ID NO: 416847 - RNA, 24 nt, Artificial Sequence
  Synthetic
aguaggaguuagggagaguuuguu

SEQ ID NO: 416848 - RNA, 18 nt, Artificial Sequence
  Synthetic
gugugcauaagguuuguu

SEQ ID NO: 416849 - RNA, 19 nt, Artificial Sequence
  Synthetic
ugugugcauaagguuuguu

SEQ ID NO: 416850 - RNA, 20 nt, Artificial Sequence
  Synthetic
uugugugcauaagguuuguu

SEQ ID NO: 416851 - RNA, 21 nt, Artificial Sequence
  Synthetic
guugugugcauaagguuuguu

SEQ ID NO: 416852 - RNA, 22 nt, Artificial Sequence
  Synthetic
aguugugugcauaagguuuguu

SEQ ID NO: 416853 - RNA, 23 nt, Artificial Sequence
  Synthetic
gaguugugugcauaagguuuguu

SEQ ID NO: 416854 - RNA, 24 nt, Artificial Sequence
  Synthetic
agaguugugugcauaagguuuguu

SEQ ID NO: 416855 - RNA, 18 nt, Artificial Sequence
  Synthetic
uaaagcuauuuguuuguu

SEQ ID NO: 416856 - RNA, 19 nt, Artificial Sequence
  Synthetic
auaaagcuauuuguuuguu

SEQ ID NO: 416857 - RNA, 20 nt, Artificial Sequence
  Synthetic
gauaaagcuauuuguuuguu

SEQ ID NO: 416858 - RNA, 21 nt, Artificial Sequence
  Synthetic
ggauaaagcuauuuguuuguu

SEQ ID NO: 416859 - RNA, 22 nt, Artificial Sequence
  Synthetic
uggauaaagcuauuuguuuguu

SEQ ID NO: 416860 - RNA, 23 nt, Artificial Sequence
  Synthetic
auggauaaagcuauuuguuuguu

SEQ ID NO: 416861 - RNA, 24 nt, Artificial Sequence
  Synthetic
aauggauaaagcuauuuguuuguu

SEQ ID NO: 416862 - RNA, 18 nt, Artificial Sequence
  Synthetic
uggcaagguuuguuuguu

SEQ ID NO: 416863 - RNA, 19 nt, Artificial Sequence
  Synthetic
uuggcaagguuuguuuguu

SEQ ID NO: 416864 - RNA, 20 nt, Artificial Sequence
  Synthetic
cuuggcaagguuuguuuguu

SEQ ID NO: 416865 - RNA, 21 nt, Artificial Sequence
  Synthetic
gcuuggcaagguuuguuuguu

SEQ ID NO: 416866 - RNA, 22 nt, Artificial Sequence
  Synthetic
agcuuggcaagguuuguuuguu

SEQ ID NO: 416867 - RNA, 23 nt, Artificial Sequence
  Synthetic
gagcuuggcaagguuuguuuguu

SEQ ID NO: 416868 - RNA, 24 nt, Artificial Sequence
  Synthetic
agagcuuggcaagguuuguuuguu

SEQ ID NO: 416869 - RNA, 18 nt, Artificial Sequence
  Synthetic
cuuaaauuuuuguuuguu

SEQ ID NO: 416870 - RNA, 19 nt, Artificial Sequence
  Synthetic
ccuuaaauuuuuguuuguu

SEQ ID NO: 416871 - RNA, 20 nt, Artificial Sequence
  Synthetic
uccuuaaauuuuuguuuguu

SEQ ID NO: 416872 - RNA, 21 nt, Artificial Sequence
  Synthetic
cuccuuaaauuuuuguuuguu

SEQ ID NO: 416873 - RNA, 22 nt, Artificial Sequence
  Synthetic
gcuccuuaaauuuuuguuuguu

SEQ ID NO: 416874 - RNA, 23 nt, Artificial Sequence
  Synthetic
ugcuccuuaaauuuuuguuuguu

SEQ ID NO: 416875 - RNA, 24 nt, Artificial Sequence
  Synthetic
cugcuccuuaaauuuuuguuuguu

SEQ ID NO: 416876 - RNA, 18 nt, Artificial Sequence
  Synthetic
aaaaguugaaauuuuguu

SEQ ID NO: 416877 - RNA, 19 nt, Artificial Sequence
  Synthetic
aaaaaguugaaauuuuguu

SEQ ID NO: 416878 - RNA, 20 nt, Artificial Sequence
  Synthetic
uaaaaaguugaaauuuuguu

SEQ ID NO: 416879 - RNA, 21 nt, Artificial Sequence
  Synthetic
auaaaaaguugaaauuuuguu

SEQ ID NO: 416880 - RNA, 22 nt, Artificial Sequence
  Synthetic
gauaaaaaguugaaauuuuguu

SEQ ID NO: 416881 - RNA, 23 nt, Artificial Sequence
  Synthetic
ggauaaaaaguugaaauuuuguu

SEQ ID NO: 416882 - RNA, 24 nt, Artificial Sequence
  Synthetic
gggauaaaaaguugaaauuuuguu

SEQ ID NO: 416883 - RNA, 18 nt, Artificial Sequence
  Synthetic
aaauccaucaauuuuguu

SEQ ID NO: 416884 - RNA, 19 nt, Artificial Sequence
  Synthetic
aaaauccaucaauuuuguu

SEQ ID NO: 416885 - RNA, 20 nt, Artificial Sequence
  Synthetic
gaaaauccaucaauuuuguu

SEQ ID NO: 416886 - RNA, 21 nt, Artificial Sequence
  Synthetic
agaaaauccaucaauuuuguu

SEQ ID NO: 416887 - RNA, 22 nt, Artificial Sequence
  Synthetic
gagaaaauccaucaauuuuguu

SEQ ID NO: 416888 - RNA, 23 nt, Artificial Sequence
  Synthetic
agagaaaauccaucaauuuuguu

SEQ ID NO: 416889 - RNA, 24 nt, Artificial Sequence
  Synthetic
uagagaaaauccaucaauuuuguu

SEQ ID NO: 416890 - RNA, 18 nt, Artificial Sequence
  Synthetic
ggaagcaauaauuuuguu

SEQ ID NO: 416891 - RNA, 19 nt, Artificial Sequence
  Synthetic
uggaagcaauaauuuuguu

SEQ ID NO: 416892 - RNA, 20 nt, Artificial Sequence
  Synthetic
guggaagcaauaauuuuguu

SEQ ID NO: 416893 - RNA, 21 nt, Artificial Sequence
  Synthetic
gguggaagcaauaauuuuguu

SEQ ID NO: 416894 - RNA, 22 nt, Artificial Sequence
  Synthetic
agguggaagcaauaauuuuguu

SEQ ID NO: 416895 - RNA, 23 nt, Artificial Sequence
  Synthetic
aagguggaagcaauaauuuuguu

SEQ ID NO: 416896 - RNA, 24 nt, Artificial Sequence
  Synthetic
aaagguggaagcaauaauuuuguu

SEQ ID NO: 416897 - RNA, 18 nt, Artificial Sequence
  Synthetic
uggcaagaucauuuuguu

SEQ ID NO: 416898 - RNA, 19 nt, Artificial Sequence
  Synthetic
uuggcaagaucauuuuguu

SEQ ID NO: 416899 - RNA, 20 nt, Artificial Sequence
  Synthetic
auuggcaagaucauuuuguu

SEQ ID NO: 416900 - RNA, 21 nt, Artificial Sequence
  Synthetic
cauuggcaagaucauuuuguu

SEQ ID NO: 416901 - RNA, 22 nt, Artificial Sequence
  Synthetic
acauuggcaagaucauuuuguu

SEQ ID NO: 416902 - RNA, 23 nt, Artificial Sequence
  Synthetic
aacauuggcaagaucauuuuguu

SEQ ID NO: 416903 - RNA, 24 nt, Artificial Sequence
  Synthetic
aaacauuggcaagaucauuuuguu

SEQ ID NO: 416904 - RNA, 18 nt, Artificial Sequence
  Synthetic
gcaagguaagauuuuguu

SEQ ID NO: 416905 - RNA, 19 nt, Artificial Sequence
  Synthetic
ggcaagguaagauuuuguu

SEQ ID NO: 416906 - RNA, 20 nt, Artificial Sequence
  Synthetic
aggcaagguaagauuuuguu

SEQ ID NO: 416907 - RNA, 21 nt, Artificial Sequence
  Synthetic
uaggcaagguaagauuuuguu

SEQ ID NO: 416908 - RNA, 22 nt, Artificial Sequence
  Synthetic
auaggcaagguaagauuuuguu

SEQ ID NO: 416909 - RNA, 23 nt, Artificial Sequence
  Synthetic
aauaggcaagguaagauuuuguu

SEQ ID NO: 416910 - RNA, 24 nt, Artificial Sequence
  Synthetic
aaauaggcaagguaagauuuuguu

SEQ ID NO: 416911 - RNA, 18 nt, Artificial Sequence
  Synthetic
uaucagcuaucuuuuguu

SEQ ID NO: 416912 - RNA, 19 nt, Artificial Sequence
  Synthetic
auaucagcuaucuuuuguu

SEQ ID NO: 416913 - RNA, 20 nt, Artificial Sequence
  Synthetic
uauaucagcuaucuuuuguu

SEQ ID NO: 416914 - RNA, 21 nt, Artificial Sequence
  Synthetic
uuauaucagcuaucuuuuguu

SEQ ID NO: 416915 - RNA, 22 nt, Artificial Sequence
  Synthetic
uuuauaucagcuaucuuuuguu

SEQ ID NO: 416916 - RNA, 23 nt, Artificial Sequence
  Synthetic
guuuauaucagcuaucuuuuguu

SEQ ID NO: 416917 - RNA, 24 nt, Artificial Sequence
  Synthetic
aguuuauaucagcuaucuuuuguu

SEQ ID NO: 416918 - RNA, 18 nt, Artificial Sequence
  Synthetic
uuuuuauuacuuuuuguu

SEQ ID NO: 416919 - RNA, 19 nt, Artificial Sequence
  Synthetic
cuuuuuauuacuuuuuguu

SEQ ID NO: 416920 - RNA, 20 nt, Artificial Sequence
  Synthetic
ucuuuuuauuacuuuuuguu

SEQ ID NO: 416921 - RNA, 21 nt, Artificial Sequence
  Synthetic
gucuuuuuauuacuuuuuguu

SEQ ID NO: 416922 - RNA, 22 nt, Artificial Sequence
  Synthetic
ggucuuuuuauuacuuuuuguu

SEQ ID NO: 416923 - RNA, 23 nt, Artificial Sequence
  Synthetic
uggucuuuuuauuacuuuuuguu

SEQ ID NO: 416924 - RNA, 24 nt, Artificial Sequence
  Synthetic
uuggucuuuuuauuacuuuuuguu

SEQ ID NO: 416925 - RNA, 18 nt, Artificial Sequence
  Synthetic
gcaacaagccuuuuuguu

SEQ ID NO: 416926 - RNA, 19 nt, Artificial Sequence
  Synthetic
agcaacaagccuuuuuguu

SEQ ID NO: 416927 - RNA, 20 nt, Artificial Sequence
  Synthetic
cagcaacaagccuuuuuguu

SEQ ID NO: 416928 - RNA, 21 nt, Artificial Sequence
  Synthetic
acagcaacaagccuuuuuguu

SEQ ID NO: 416929 - RNA, 22 nt, Artificial Sequence
  Synthetic
aacagcaacaagccuuuuuguu

SEQ ID NO: 416930 - RNA, 23 nt, Artificial Sequence
  Synthetic
uaacagcaacaagccuuuuuguu

SEQ ID NO: 416931 - RNA, 24 nt, Artificial Sequence
  Synthetic
uuaacagcaacaagccuuuuuguu

SEQ ID NO: 416932 - RNA, 18 nt, Artificial Sequence
  Synthetic
ccuucugagguuuuuguu

SEQ ID NO: 416933 - RNA, 19 nt, Artificial Sequence
  Synthetic
gccuucugagguuuuuguu

SEQ ID NO: 416934 - RNA, 20 nt, Artificial Sequence
  Synthetic
ugccuucugagguuuuuguu

SEQ ID NO: 416935 - RNA, 21 nt, Artificial Sequence
  Synthetic
uugccuucugagguuuuuguu

SEQ ID NO: 416936 - RNA, 22 nt, Artificial Sequence
  Synthetic
cuugccuucugagguuuuuguu

SEQ ID NO: 416937 - RNA, 23 nt, Artificial Sequence
  Synthetic
acuugccuucugagguuuuuguu

SEQ ID NO: 416938 - RNA, 24 nt, Artificial Sequence
  Synthetic
uacuugccuucugagguuuuuguu

SEQ ID NO: 416939 - RNA, 18 nt, Artificial Sequence
  Synthetic
uuuguuuuuguuuuuguu

SEQ ID NO: 416940 - RNA, 19 nt, Artificial Sequence
  Synthetic
uuuuguuuuuguuuuuguu

SEQ ID NO: 416941 - RNA, 20 nt, Artificial Sequence
  Synthetic
uuuuuguuuuuguuuuuguu

SEQ ID NO: 416942 - RNA, 21 nt, Artificial Sequence
  Synthetic
guuuuuguuuuuguuuuuguu

SEQ ID NO: 416943 - RNA, 22 nt, Artificial Sequence
  Synthetic
uguuuuuguuuuuguuuuuguu

SEQ ID NO: 416944 - RNA, 23 nt, Artificial Sequence
  Synthetic
uuguuuuuguuuuuguuuuuguu

SEQ ID NO: 416945 - RNA, 24 nt, Artificial Sequence
  Synthetic
guuguuuuuguuuuuguuuuuguu

SEQ ID NO: 416946 - RNA, 24 nt, Artificial Sequence
  Synthetic
uuuguuuuuguuuuuguuuuuguu

SEQ ID NO: 416947 - RNA, 18 nt, Artificial Sequence
  Synthetic
aaaaaaaaaaaaaaauuu

SEQ ID NO: 416948 - RNA, 19 nt, Artificial Sequence
  Synthetic
aaaaaaaaaaaaaaaauuu

SEQ ID NO: 416949 - RNA, 20 nt, Artificial Sequence
  Synthetic
aaaaaaaaaaaaaaaaauuu

SEQ ID NO: 416950 - RNA, 21 nt, Artificial Sequence
  Synthetic
aaaaaaaaaaaaaaaaaauuu

SEQ ID NO: 416951 - RNA, 22 nt, Artificial Sequence
  Synthetic
aaaaaaaaaaaaaaaaaaauuu

SEQ ID NO: 416952 - RNA, 23 nt, Artificial Sequence
  Synthetic
aaaaaaaaaaaaaaaaaaaauuu

SEQ ID NO: 416953 - RNA, 24 nt, Artificial Sequence
  Synthetic
aaaaaaaaaaaaaaaaaaaaauuu

SEQ ID NO: 416954 - RNA, 18 nt, Artificial Sequence
  Synthetic
ucagaaaaaaaaaaauuu

SEQ ID NO: 416955 - RNA, 19 nt, Artificial Sequence
  Synthetic
cucagaaaaaaaaaaauuu

SEQ ID NO: 416956 - RNA, 20 nt, Artificial Sequence
  Synthetic
ucucagaaaaaaaaaaauuu

SEQ ID NO: 416957 - RNA, 21 nt, Artificial Sequence
  Synthetic
aucucagaaaaaaaaaaauuu

SEQ ID NO: 416958 - RNA, 22 nt, Artificial Sequence
  Synthetic
caucucagaaaaaaaaaaauuu

SEQ ID NO: 416959 - RNA, 23 nt, Artificial Sequence
  Synthetic
ccaucucagaaaaaaaaaaauuu

SEQ ID NO: 416960 - RNA, 24 nt, Artificial Sequence
  Synthetic
uccaucucagaaaaaaaaaaauuu

SEQ ID NO: 416961 - RNA, 18 nt, Artificial Sequence
  Synthetic
uggacagacaaaaaauuu

SEQ ID NO: 416962 - RNA, 19 nt, Artificial Sequence
  Synthetic
uuggacagacaaaaaauuu

SEQ ID NO: 416963 - RNA, 20 nt, Artificial Sequence
  Synthetic
auuggacagacaaaaaauuu

SEQ ID NO: 416964 - RNA, 21 nt, Artificial Sequence
  Synthetic
uauuggacagacaaaaaauuu

SEQ ID NO: 416965 - RNA, 22 nt, Artificial Sequence
  Synthetic
auauuggacagacaaaaaauuu

SEQ ID NO: 416966 - RNA, 23 nt, Artificial Sequence
  Synthetic
gauauuggacagacaaaaaauuu

SEQ ID NO: 416967 - RNA, 24 nt, Artificial Sequence
  Synthetic
ggauauuggacagacaaaaaauuu

SEQ ID NO: 416968 - RNA, 18 nt, Artificial Sequence
  Synthetic
cugcuccucaaaaaauuu

SEQ ID NO: 416969 - RNA, 19 nt, Artificial Sequence
  Synthetic
ucugcuccucaaaaaauuu

SEQ ID NO: 416970 - RNA, 20 nt, Artificial Sequence
  Synthetic
aucugcuccucaaaaaauuu

SEQ ID NO: 416971 - RNA, 21 nt, Artificial Sequence
  Synthetic
aaucugcuccucaaaaaauuu

SEQ ID NO: 416972 - RNA, 22 nt, Artificial Sequence
  Synthetic
aaaucugcuccucaaaaaauuu

SEQ ID NO: 416973 - RNA, 23 nt, Artificial Sequence
  Synthetic
uaaaucugcuccucaaaaaauuu

SEQ ID NO: 416974 - RNA, 24 nt, Artificial Sequence
  Synthetic
guaaaucugcuccucaaaaaauuu

SEQ ID NO: 416975 - RNA, 18 nt, Artificial Sequence
  Synthetic
uuuucucuuaaaaaauuu

SEQ ID NO: 416976 - RNA, 19 nt, Artificial Sequence
  Synthetic
uuuuucucuuaaaaaauuu

SEQ ID NO: 416977 - RNA, 20 nt, Artificial Sequence
  Synthetic
auuuuucucuuaaaaaauuu

SEQ ID NO: 416978 - RNA, 21 nt, Artificial Sequence
  Synthetic
cauuuuucucuuaaaaaauuu

SEQ ID NO: 416979 - RNA, 22 nt, Artificial Sequence
  Synthetic
acauuuuucucuuaaaaaauuu

SEQ ID NO: 416980 - RNA, 23 nt, Artificial Sequence
  Synthetic
cacauuuuucucuuaaaaaauuu

SEQ ID NO: 416981 - RNA, 24 nt, Artificial Sequence
  Synthetic
ucacauuuuucucuuaaaaaauuu

SEQ ID NO: 416982 - RNA, 18 nt, Artificial Sequence
  Synthetic
acucuuagacaaaaauuu

SEQ ID NO: 416983 - RNA, 19 nt, Artificial Sequence
  Synthetic
aacucuuagacaaaaauuu

SEQ ID NO: 416984 - RNA, 20 nt, Artificial Sequence
  Synthetic
uaacucuuagacaaaaauuu

SEQ ID NO: 416985 - RNA, 21 nt, Artificial Sequence
  Synthetic
auaacucuuagacaaaaauuu

SEQ ID NO: 416986 - RNA, 22 nt, Artificial Sequence
  Synthetic
uauaacucuuagacaaaaauuu

SEQ ID NO: 416987 - RNA, 23 nt, Artificial Sequence
  Synthetic
uuauaacucuuagacaaaaauuu

SEQ ID NO: 416988 - RNA, 24 nt, Artificial Sequence
  Synthetic
cuuauaacucuuagacaaaaauuu

SEQ ID NO: 416989 - RNA, 18 nt, Artificial Sequence
  Synthetic
uaauggaaagaaaaauuu

SEQ ID NO: 416990 - RNA, 19 nt, Artificial Sequence
  Synthetic
auaauggaaagaaaaauuu

SEQ ID NO: 416991 - RNA, 20 nt, Artificial Sequence
  Synthetic
uauaauggaaagaaaaauuu

SEQ ID NO: 416992 - RNA, 21 nt, Artificial Sequence
  Synthetic
uuauaauggaaagaaaaauuu

SEQ ID NO: 416993 - RNA, 22 nt, Artificial Sequence
  Synthetic
uuuauaauggaaagaaaaauuu

SEQ ID NO: 416994 - RNA, 23 nt, Artificial Sequence
  Synthetic
cuuuauaauggaaagaaaaauuu

SEQ ID NO: 416995 - RNA, 24 nt, Artificial Sequence
  Synthetic
ucuuuauaauggaaagaaaaauuu

SEQ ID NO: 416996 - RNA, 18 nt, Artificial Sequence
  Synthetic
aagguaagagaaaaauuu

SEQ ID NO: 416997 - RNA, 19 nt, Artificial Sequence
  Synthetic
gaagguaagagaaaaauuu

SEQ ID NO: 416998 - RNA, 20 nt, Artificial Sequence
  Synthetic
ggaagguaagagaaaaauuu

SEQ ID NO: 416999 - RNA, 21 nt, Artificial Sequence
  Synthetic
aggaagguaagagaaaaauuu

SEQ ID NO: 417000 - RNA, 22 nt, Artificial Sequence
  Synthetic
aaggaagguaagagaaaaauuu

SEQ ID NO: 417001 - RNA, 23 nt, Artificial Sequence
  Synthetic
uaaggaagguaagagaaaaauuu

SEQ ID NO: 417002 - RNA, 24 nt, Artificial Sequence
  Synthetic
auaaggaagguaagagaaaaauuu

SEQ ID NO: 417003 - RNA, 18 nt, Artificial Sequence
  Synthetic
aaggaaccgccaaaauuu

SEQ ID NO: 417004 - RNA, 19 nt, Artificial Sequence
  Synthetic
aaaggaaccgccaaaauuu

SEQ ID NO: 417005 - RNA, 20 nt, Artificial Sequence
  Synthetic
uaaaggaaccgccaaaauuu

SEQ ID NO: 417006 - RNA, 21 nt, Artificial Sequence
  Synthetic
uuaaaggaaccgccaaaauuu

SEQ ID NO: 417007 - RNA, 22 nt, Artificial Sequence
  Synthetic
uuuaaaggaaccgccaaaauuu

SEQ ID NO: 417008 - RNA, 23 nt, Artificial Sequence
  Synthetic
uuuuaaaggaaccgccaaaauuu

SEQ ID NO: 417009 - RNA, 24 nt, Artificial Sequence
  Synthetic
auuuuaaaggaaccgccaaaauuu

SEQ ID NO: 417010 - RNA, 18 nt, Artificial Sequence
  Synthetic
auaaaacuaucaaaauuu

SEQ ID NO: 417011 - RNA, 19 nt, Artificial Sequence
  Synthetic
cauaaaacuaucaaaauuu

SEQ ID NO: 417012 - RNA, 20 nt, Artificial Sequence
  Synthetic
acauaaaacuaucaaaauuu

SEQ ID NO: 417013 - RNA, 21 nt, Artificial Sequence
  Synthetic
aacauaaaacuaucaaaauuu

SEQ ID NO: 417014 - RNA, 22 nt, Artificial Sequence
  Synthetic
aaacauaaaacuaucaaaauuu

SEQ ID NO: 417015 - RNA, 23 nt, Artificial Sequence
  Synthetic
aaaacauaaaacuaucaaaauuu

SEQ ID NO: 417016 - RNA, 24 nt, Artificial Sequence
  Synthetic
uaaaacauaaaacuaucaaaauuu

SEQ ID NO: 417017 - RNA, 18 nt, Artificial Sequence
  Synthetic
gaagggcaaagaaaauuu

SEQ ID NO: 417018 - RNA, 19 nt, Artificial Sequence
  Synthetic
agaagggcaaagaaaauuu

SEQ ID NO: 417019 - RNA, 20 nt, Artificial Sequence
  Synthetic
gagaagggcaaagaaaauuu

SEQ ID NO: 417020 - RNA, 21 nt, Artificial Sequence
  Synthetic
agagaagggcaaagaaaauuu

SEQ ID NO: 417021 - RNA, 22 nt, Artificial Sequence
  Synthetic
aagagaagggcaaagaaaauuu

SEQ ID NO: 417022 - RNA, 23 nt, Artificial Sequence
  Synthetic
aaagagaagggcaaagaaaauuu

SEQ ID NO: 417023 - RNA, 24 nt, Artificial Sequence
  Synthetic
aaaagagaagggcaaagaaaauuu

SEQ ID NO: 417024 - RNA, 18 nt, Artificial Sequence
  Synthetic
cacccaaugggaaaauuu

SEQ ID NO: 417025 - RNA, 19 nt, Artificial Sequence
  Synthetic
acacccaaugggaaaauuu

SEQ ID NO: 417026 - RNA, 20 nt, Artificial Sequence
  Synthetic
cacacccaaugggaaaauuu

SEQ ID NO: 417027 - RNA, 21 nt, Artificial Sequence
  Synthetic
acacacccaaugggaaaauuu

SEQ ID NO: 417028 - RNA, 22 nt, Artificial Sequence
  Synthetic
cacacacccaaugggaaaauuu

SEQ ID NO: 417029 - RNA, 23 nt, Artificial Sequence
  Synthetic
ccacacacccaaugggaaaauuu

SEQ ID NO: 417030 - RNA, 24 nt, Artificial Sequence
  Synthetic
uccacacacccaaugggaaaauuu

SEQ ID NO: 417031 - RNA, 18 nt, Artificial Sequence
  Synthetic
cuaugcauauuaaaauuu

SEQ ID NO: 417032 - RNA, 19 nt, Artificial Sequence
  Synthetic
ucuaugcauauuaaaauuu

SEQ ID NO: 417033 - RNA, 20 nt, Artificial Sequence
  Synthetic
uucuaugcauauuaaaauuu

SEQ ID NO: 417034 - RNA, 21 nt, Artificial Sequence
  Synthetic
uuucuaugcauauuaaaauuu

SEQ ID NO: 417035 - RNA, 22 nt, Artificial Sequence
  Synthetic
auuucuaugcauauuaaaauuu

SEQ ID NO: 417036 - RNA, 23 nt, Artificial Sequence
  Synthetic
uauuucuaugcauauuaaaauuu

SEQ ID NO: 417037 - RNA, 24 nt, Artificial Sequence
  Synthetic
uuauuucuaugcauauuaaaauuu

SEQ ID NO: 417038 - RNA, 18 nt, Artificial Sequence
  Synthetic
uucugauuuuuaaaauuu

SEQ ID NO: 417039 - RNA, 19 nt, Artificial Sequence
  Synthetic
auucugauuuuuaaaauuu

SEQ ID NO: 417040 - RNA, 20 nt, Artificial Sequence
  Synthetic
uauucugauuuuuaaaauuu

SEQ ID NO: 417041 - RNA, 21 nt, Artificial Sequence
  Synthetic
uuauucugauuuuuaaaauuu

SEQ ID NO: 417042 - RNA, 22 nt, Artificial Sequence
  Synthetic
uuuauucugauuuuuaaaauuu

SEQ ID NO: 417043 - RNA, 23 nt, Artificial Sequence
  Synthetic
cuuuauucugauuuuuaaaauuu

SEQ ID NO: 417044 - RNA, 24 nt, Artificial Sequence
  Synthetic
acuuuauucugauuuuuaaaauuu

SEQ ID NO: 417045 - RNA, 18 nt, Artificial Sequence
  Synthetic
auggagcgagacaaauuu

SEQ ID NO: 417046 - RNA, 19 nt, Artificial Sequence
  Synthetic
aauggagcgagacaaauuu

SEQ ID NO: 417047 - RNA, 20 nt, Artificial Sequence
  Synthetic
uaauggagcgagacaaauuu

SEQ ID NO: 417048 - RNA, 21 nt, Artificial Sequence
  Synthetic
uuaauggagcgagacaaauuu

SEQ ID NO: 417049 - RNA, 22 nt, Artificial Sequence
  Synthetic
auuaauggagcgagacaaauuu

SEQ ID NO: 417050 - RNA, 23 nt, Artificial Sequence
  Synthetic
aauuaauggagcgagacaaauuu

SEQ ID NO: 417051 - RNA, 24 nt, Artificial Sequence
  Synthetic
caauuaauggagcgagacaaauuu

SEQ ID NO: 417052 - RNA, 18 nt, Artificial Sequence
  Synthetic
ucuguuaaugacaaauuu

SEQ ID NO: 417053 - RNA, 19 nt, Artificial Sequence
  Synthetic
gucuguuaaugacaaauuu

SEQ ID NO: 417054 - RNA, 20 nt, Artificial Sequence
  Synthetic
agucuguuaaugacaaauuu

SEQ ID NO: 417055 - RNA, 21 nt, Artificial Sequence
  Synthetic
uagucuguuaaugacaaauuu

SEQ ID NO: 417056 - RNA, 22 nt, Artificial Sequence
  Synthetic
auagucuguuaaugacaaauuu

SEQ ID NO: 417057 - RNA, 23 nt, Artificial Sequence
  Synthetic
aauagucuguuaaugacaaauuu

SEQ ID NO: 417058 - RNA, 24 nt, Artificial Sequence
  Synthetic
caauagucuguuaaugacaaauuu

SEQ ID NO: 417059 - RNA, 18 nt, Artificial Sequence
  Synthetic
aacgaauuuuacaaauuu

SEQ ID NO: 417060 - RNA, 19 nt, Artificial Sequence
  Synthetic
uaacgaauuuuacaaauuu

SEQ ID NO: 417061 - RNA, 20 nt, Artificial Sequence
  Synthetic
guaacgaauuuuacaaauuu

SEQ ID NO: 417062 - RNA, 21 nt, Artificial Sequence
  Synthetic
gguaacgaauuuuacaaauuu

SEQ ID NO: 417063 - RNA, 22 nt, Artificial Sequence
  Synthetic
agguaacgaauuuuacaaauuu

SEQ ID NO: 417064 - RNA, 23 nt, Artificial Sequence
  Synthetic
uagguaacgaauuuuacaaauuu

SEQ ID NO: 417065 - RNA, 24 nt, Artificial Sequence
  Synthetic
guagguaacgaauuuuacaaauuu

SEQ ID NO: 417066 - RNA, 18 nt, Artificial Sequence
  Synthetic
acuuuuaugaccaaauuu

SEQ ID NO: 417067 - RNA, 19 nt, Artificial Sequence
  Synthetic
gacuuuuaugaccaaauuu

SEQ ID NO: 417068 - RNA, 20 nt, Artificial Sequence
  Synthetic
agacuuuuaugaccaaauuu

SEQ ID NO: 417069 - RNA, 21 nt, Artificial Sequence
  Synthetic
aagacuuuuaugaccaaauuu

SEQ ID NO: 417070 - RNA, 22 nt, Artificial Sequence
  Synthetic
gaagacuuuuaugaccaaauuu

SEQ ID NO: 417071 - RNA, 23 nt, Artificial Sequence
  Synthetic
agaagacuuuuaugaccaaauuu

SEQ ID NO: 417072 - RNA, 24 nt, Artificial Sequence
  Synthetic
aagaagacuuuuaugaccaaauuu

SEQ ID NO: 417073 - RNA, 18 nt, Artificial Sequence
  Synthetic
aaauucauuggcaaauuu

SEQ ID NO: 417074 - RNA, 19 nt, Artificial Sequence
  Synthetic
uaaauucauuggcaaauuu

SEQ ID NO: 417075 - RNA, 20 nt, Artificial Sequence
  Synthetic
auaaauucauuggcaaauuu

SEQ ID NO: 417076 - RNA, 21 nt, Artificial Sequence
  Synthetic
aauaaauucauuggcaaauuu

SEQ ID NO: 417077 - RNA, 22 nt, Artificial Sequence
  Synthetic
uaauaaauucauuggcaaauuu

SEQ ID NO: 417078 - RNA, 23 nt, Artificial Sequence
  Synthetic
cuaauaaauucauuggcaaauuu

SEQ ID NO: 417079 - RNA, 24 nt, Artificial Sequence
  Synthetic
ucuaauaaauucauuggcaaauuu

SEQ ID NO: 417080 - RNA, 18 nt, Artificial Sequence
  Synthetic
ugucuugaaaucaaauuu

SEQ ID NO: 417081 - RNA, 19 nt, Artificial Sequence
  Synthetic
gugucuugaaaucaaauuu

SEQ ID NO: 417082 - RNA, 20 nt, Artificial Sequence
  Synthetic
ugugucuugaaaucaaauuu

SEQ ID NO: 417083 - RNA, 21 nt, Artificial Sequence
  Synthetic
cugugucuugaaaucaaauuu

SEQ ID NO: 417084 - RNA, 22 nt, Artificial Sequence
  Synthetic
acugugucuugaaaucaaauuu

SEQ ID NO: 417085 - RNA, 23 nt, Artificial Sequence
  Synthetic
gacugugucuugaaaucaaauuu

SEQ ID NO: 417086 - RNA, 24 nt, Artificial Sequence
  Synthetic
ugacugugucuugaaaucaaauuu

SEQ ID NO: 417087 - RNA, 18 nt, Artificial Sequence
  Synthetic
uugcuauaacucaaauuu

SEQ ID NO: 417088 - RNA, 19 nt, Artificial Sequence
  Synthetic
auugcuauaacucaaauuu

SEQ ID NO: 417089 - RNA, 20 nt, Artificial Sequence
  Synthetic
aauugcuauaacucaaauuu

SEQ ID NO: 417090 - RNA, 21 nt, Artificial Sequence
  Synthetic
aaauugcuauaacucaaauuu

SEQ ID NO: 417091 - RNA, 22 nt, Artificial Sequence
  Synthetic
aaaauugcuauaacucaaauuu

SEQ ID NO: 417092 - RNA, 23 nt, Artificial Sequence
  Synthetic
aaaaauugcuauaacucaaauuu

SEQ ID NO: 417093 - RNA, 24 nt, Artificial Sequence
  Synthetic
aaaaaauugcuauaacucaaauuu

SEQ ID NO: 417094 - RNA, 18 nt, Artificial Sequence
  Synthetic
ucuauuuucuucaaauuu

SEQ ID NO: 417095 - RNA, 19 nt, Artificial Sequence
  Synthetic
uucuauuuucuucaaauuu

SEQ ID NO: 417096 - RNA, 20 nt, Artificial Sequence
  Synthetic
auucuauuuucuucaaauuu

SEQ ID NO: 417097 - RNA, 21 nt, Artificial Sequence
  Synthetic
uauucuauuuucuucaaauuu

SEQ ID NO: 417098 - RNA, 22 nt, Artificial Sequence
  Synthetic
auauucuauuuucuucaaauuu

SEQ ID NO: 417099 - RNA, 23 nt, Artificial Sequence
  Synthetic
gauauucuauuuucuucaaauuu

SEQ ID NO: 417100 - RNA, 24 nt, Artificial Sequence
  Synthetic
cgauauucuauuuucuucaaauuu

SEQ ID NO: 417101 - RNA, 18 nt, Artificial Sequence
  Synthetic
aauaaagcuuucaaauuu

SEQ ID NO: 417102 - RNA, 19 nt, Artificial Sequence
  Synthetic
aaauaaagcuuucaaauuu

SEQ ID NO: 417103 - RNA, 20 nt, Artificial Sequence
  Synthetic
uaaauaaagcuuucaaauuu

SEQ ID NO: 417104 - RNA, 21 nt, Artificial Sequence
  Synthetic
auaaauaaagcuuucaaauuu

SEQ ID NO: 417105 - RNA, 22 nt, Artificial Sequence
  Synthetic
cauaaauaaagcuuucaaauuu

SEQ ID NO: 417106 - RNA, 23 nt, Artificial Sequence
  Synthetic
ucauaaauaaagcuuucaaauuu

SEQ ID NO: 417107 - RNA, 24 nt, Artificial Sequence
  Synthetic
aucauaaauaaagcuuucaaauuu

SEQ ID NO: 417108 - RNA, 18 nt, Artificial Sequence
  Synthetic
acguagauuucgaaauuu

SEQ ID NO: 417109 - RNA, 19 nt, Artificial Sequence
  Synthetic
aacguagauuucgaaauuu

SEQ ID NO: 417110 - RNA, 20 nt, Artificial Sequence
  Synthetic
aaacguagauuucgaaauuu

SEQ ID NO: 417111 - RNA, 21 nt, Artificial Sequence
  Synthetic
gaaacguagauuucgaaauuu

SEQ ID NO: 417112 - RNA, 22 nt, Artificial Sequence
  Synthetic
ggaaacguagauuucgaaauuu

SEQ ID NO: 417113 - RNA, 23 nt, Artificial Sequence
  Synthetic
uggaaacguagauuucgaaauuu

SEQ ID NO: 417114 - RNA, 24 nt, Artificial Sequence
  Synthetic
uuggaaacguagauuucgaaauuu

SEQ ID NO: 417115 - RNA, 18 nt, Artificial Sequence
  Synthetic
uuccaacacaugaaauuu

SEQ ID NO: 417116 - RNA, 19 nt, Artificial Sequence
  Synthetic
uuuccaacacaugaaauuu

SEQ ID NO: 417117 - RNA, 20 nt, Artificial Sequence
  Synthetic
guuuccaacacaugaaauuu

SEQ ID NO: 417118 - RNA, 21 nt, Artificial Sequence
  Synthetic
aguuuccaacacaugaaauuu

SEQ ID NO: 417119 - RNA, 22 nt, Artificial Sequence
  Synthetic
aaguuuccaacacaugaaauuu

SEQ ID NO: 417120 - RNA, 23 nt, Artificial Sequence
  Synthetic
uaaguuuccaacacaugaaauuu

SEQ ID NO: 417121 - RNA, 24 nt, Artificial Sequence
  Synthetic
uuaaguuuccaacacaugaaauuu

SEQ ID NO: 417122 - RNA, 18 nt, Artificial Sequence
  Synthetic
gagguaccucugaaauuu

SEQ ID NO: 417123 - RNA, 19 nt, Artificial Sequence
  Synthetic
ugagguaccucugaaauuu

SEQ ID NO: 417124 - RNA, 20 nt, Artificial Sequence
  Synthetic
uugagguaccucugaaauuu

SEQ ID NO: 417125 - RNA, 21 nt, Artificial Sequence
  Synthetic
auugagguaccucugaaauuu

SEQ ID NO: 417126 - RNA, 22 nt, Artificial Sequence
  Synthetic
aauugagguaccucugaaauuu

SEQ ID NO: 417127 - RNA, 23 nt, Artificial Sequence
  Synthetic
aaauugagguaccucugaaauuu

SEQ ID NO: 417128 - RNA, 24 nt, Artificial Sequence
  Synthetic
uaaauugagguaccucugaaauuu

SEQ ID NO: 417129 - RNA, 18 nt, Artificial Sequence
  Synthetic
gauuuuacuuugaaauuu

SEQ ID NO: 417130 - RNA, 19 nt, Artificial Sequence
  Synthetic
agauuuuacuuugaaauuu

SEQ ID NO: 417131 - RNA, 20 nt, Artificial Sequence
  Synthetic
gagauuuuacuuugaaauuu

SEQ ID NO: 417132 - RNA, 21 nt, Artificial Sequence
  Synthetic
ugagauuuuacuuugaaauuu

SEQ ID NO: 417133 - RNA, 22 nt, Artificial Sequence
  Synthetic
gugagauuuuacuuugaaauuu

SEQ ID NO: 417134 - RNA, 23 nt, Artificial Sequence
  Synthetic
ggugagauuuuacuuugaaauuu

SEQ ID NO: 417135 - RNA, 24 nt, Artificial Sequence
  Synthetic
uggugagauuuuacuuugaaauuu

SEQ ID NO: 417136 - RNA, 18 nt, Artificial Sequence
  Synthetic
cuaguuucuuugaaauuu

SEQ ID NO: 417137 - RNA, 19 nt, Artificial Sequence
  Synthetic
ucuaguuucuuugaaauuu

SEQ ID NO: 417138 - RNA, 20 nt, Artificial Sequence
  Synthetic
uucuaguuucuuugaaauuu

SEQ ID NO: 417139 - RNA, 21 nt, Artificial Sequence
  Synthetic
uuucuaguuucuuugaaauuu

SEQ ID NO: 417140 - RNA, 22 nt, Artificial Sequence
  Synthetic
cuuucuaguuucuuugaaauuu

SEQ ID NO: 417141 - RNA, 23 nt, Artificial Sequence
  Synthetic
ucuuucuaguuucuuugaaauuu

SEQ ID NO: 417142 - RNA, 24 nt, Artificial Sequence
  Synthetic
uucuuucuaguuucuuugaaauuu

SEQ ID NO: 417143 - RNA, 18 nt, Artificial Sequence
  Synthetic
ucgaggcuuuugaaauuu

SEQ ID NO: 417144 - RNA, 19 nt, Artificial Sequence
  Synthetic
aucgaggcuuuugaaauuu

SEQ ID NO: 417145 - RNA, 20 nt, Artificial Sequence
  Synthetic
aaucgaggcuuuugaaauuu

SEQ ID NO: 417146 - RNA, 21 nt, Artificial Sequence
  Synthetic
aaaucgaggcuuuugaaauuu

SEQ ID NO: 417147 - RNA, 22 nt, Artificial Sequence
  Synthetic
caaaucgaggcuuuugaaauuu

SEQ ID NO: 417148 - RNA, 23 nt, Artificial Sequence
  Synthetic
ucaaaucgaggcuuuugaaauuu

SEQ ID NO: 417149 - RNA, 24 nt, Artificial Sequence
  Synthetic
uucaaaucgaggcuuuugaaauuu

SEQ ID NO: 417150 - RNA, 18 nt, Artificial Sequence
  Synthetic
gguucuuugaauaaauuu

SEQ ID NO: 417151 - RNA, 19 nt, Artificial Sequence
  Synthetic
ugguucuuugaauaaauuu

SEQ ID NO: 417152 - RNA, 20 nt, Artificial Sequence
  Synthetic
uugguucuuugaauaaauuu

SEQ ID NO: 417153 - RNA, 21 nt, Artificial Sequence
  Synthetic
uuugguucuuugaauaaauuu

SEQ ID NO: 417154 - RNA, 22 nt, Artificial Sequence
  Synthetic
uuuugguucuuugaauaaauuu

SEQ ID NO: 417155 - RNA, 23 nt, Artificial Sequence
  Synthetic
cuuuugguucuuugaauaaauuu

SEQ ID NO: 417156 - RNA, 24 nt, Artificial Sequence
  Synthetic
acuuuugguucuuugaauaaauuu

SEQ ID NO: 417157 - RNA, 18 nt, Artificial Sequence
  Synthetic
caaauaugagauaaauuu

SEQ ID NO: 417158 - RNA, 19 nt, Artificial Sequence
  Synthetic
acaaauaugagauaaauuu

SEQ ID NO: 417159 - RNA, 20 nt, Artificial Sequence
  Synthetic
cacaaauaugagauaaauuu

SEQ ID NO: 417160 - RNA, 21 nt, Artificial Sequence
  Synthetic
ccacaaauaugagauaaauuu

SEQ ID NO: 417161 - RNA, 22 nt, Artificial Sequence
  Synthetic
accacaaauaugagauaaauuu

SEQ ID NO: 417162 - RNA, 23 nt, Artificial Sequence
  Synthetic
uaccacaaauaugagauaaauuu

SEQ ID NO: 417163 - RNA, 24 nt, Artificial Sequence
  Synthetic
cuaccacaaauaugagauaaauuu

SEQ ID NO: 417164 - RNA, 18 nt, Artificial Sequence
  Synthetic
uuuuauuuauauaaauuu

SEQ ID NO: 417165 - RNA, 19 nt, Artificial Sequence
  Synthetic
guuuuauuuauauaaauuu

SEQ ID NO: 417166 - RNA, 20 nt, Artificial Sequence
  Synthetic
uguuuuauuuauauaaauuu

SEQ ID NO: 417167 - RNA, 21 nt, Artificial Sequence
  Synthetic
uuguuuuauuuauauaaauuu

SEQ ID NO: 417168 - RNA, 22 nt, Artificial Sequence
  Synthetic
uuuguuuuauuuauauaaauuu

SEQ ID NO: 417169 - RNA, 23 nt, Artificial Sequence
  Synthetic
auuuguuuuauuuauauaaauuu

SEQ ID NO: 417170 - RNA, 24 nt, Artificial Sequence
  Synthetic
uauuuguuuuauuuauauaaauuu

SEQ ID NO: 417171 - RNA, 18 nt, Artificial Sequence
  Synthetic
aguauucaguauaaauuu

SEQ ID NO: 417172 - RNA, 19 nt, Artificial Sequence
  Synthetic
gaguauucaguauaaauuu

SEQ ID NO: 417173 - RNA, 20 nt, Artificial Sequence
  Synthetic
ugaguauucaguauaaauuu

SEQ ID NO: 417174 - RNA, 21 nt, Artificial Sequence
  Synthetic
cugaguauucaguauaaauuu

SEQ ID NO: 417175 - RNA, 22 nt, Artificial Sequence
  Synthetic
acugaguauucaguauaaauuu

SEQ ID NO: 417176 - RNA, 23 nt, Artificial Sequence
  Synthetic
cacugaguauucaguauaaauuu

SEQ ID NO: 417177 - RNA, 24 nt, Artificial Sequence
  Synthetic
gcacugaguauucaguauaaauuu

SEQ ID NO: 417178 - RNA, 18 nt, Artificial Sequence
  Synthetic
uuaggcugcacuaaauuu

SEQ ID NO: 417179 - RNA, 19 nt, Artificial Sequence
  Synthetic
guuaggcugcacuaaauuu

SEQ ID NO: 417180 - RNA, 20 nt, Artificial Sequence
  Synthetic
aguuaggcugcacuaaauuu

SEQ ID NO: 417181 - RNA, 21 nt, Artificial Sequence
  Synthetic
uaguuaggcugcacuaaauuu

SEQ ID NO: 417182 - RNA, 22 nt, Artificial Sequence
  Synthetic
auaguuaggcugcacuaaauuu

SEQ ID NO: 417183 - RNA, 23 nt, Artificial Sequence
  Synthetic
uauaguuaggcugcacuaaauuu

SEQ ID NO: 417184 - RNA, 24 nt, Artificial Sequence
  Synthetic
guauaguuaggcugcacuaaauuu

SEQ ID NO: 417185 - RNA, 18 nt, Artificial Sequence
  Synthetic
cacuucuguacuaaauuu

SEQ ID NO: 417186 - RNA, 19 nt, Artificial Sequence
  Synthetic
acacuucuguacuaaauuu

SEQ ID NO: 417187 - RNA, 20 nt, Artificial Sequence
  Synthetic
cacacuucuguacuaaauuu

SEQ ID NO: 417188 - RNA, 21 nt, Artificial Sequence
  Synthetic
acacacuucuguacuaaauuu

SEQ ID NO: 417189 - RNA, 22 nt, Artificial Sequence
  Synthetic
cacacacuucuguacuaaauuu

SEQ ID NO: 417190 - RNA, 23 nt, Artificial Sequence
  Synthetic
acacacacuucuguacuaaauuu

SEQ ID NO: 417191 - RNA, 24 nt, Artificial Sequence
  Synthetic
uacacacacuucuguacuaaauuu

SEQ ID NO: 417192 - RNA, 18 nt, Artificial Sequence
  Synthetic
aaaauuuaaaguaaauuu

SEQ ID NO: 417193 - RNA, 19 nt, Artificial Sequence
  Synthetic
gaaaauuuaaaguaaauuu

SEQ ID NO: 417194 - RNA, 20 nt, Artificial Sequence
  Synthetic
ggaaaauuuaaaguaaauuu

SEQ ID NO: 417195 - RNA, 21 nt, Artificial Sequence
  Synthetic
aggaaaauuuaaaguaaauuu

SEQ ID NO: 417196 - RNA, 22 nt, Artificial Sequence
  Synthetic
aaggaaaauuuaaaguaaauuu

SEQ ID NO: 417197 - RNA, 23 nt, Artificial Sequence
  Synthetic
aaaggaaaauuuaaaguaaauuu

SEQ ID NO: 417198 - RNA, 24 nt, Artificial Sequence
  Synthetic
uaaaggaaaauuuaaaguaaauuu

SEQ ID NO: 417199 - RNA, 18 nt, Artificial Sequence
  Synthetic
ggaacauguaguaaauuu

SEQ ID NO: 417200 - RNA, 19 nt, Artificial Sequence
  Synthetic
gggaacauguaguaaauuu

SEQ ID NO: 417201 - RNA, 20 nt, Artificial Sequence
  Synthetic
ugggaacauguaguaaauuu

SEQ ID NO: 417202 - RNA, 21 nt, Artificial Sequence
  Synthetic
augggaacauguaguaaauuu

SEQ ID NO: 417203 - RNA, 22 nt, Artificial Sequence
  Synthetic
aaugggaacauguaguaaauuu

SEQ ID NO: 417204 - RNA, 23 nt, Artificial Sequence
  Synthetic
aaaugggaacauguaguaaauuu

SEQ ID NO: 417205 - RNA, 24 nt, Artificial Sequence
  Synthetic
aaaaugggaacauguaguaaauuu

SEQ ID NO: 417206 - RNA, 18 nt, Artificial Sequence
  Synthetic
gagggacacauuaaauuu

SEQ ID NO: 417207 - RNA, 19 nt, Artificial Sequence
  Synthetic
agagggacacauuaaauuu

SEQ ID NO: 417208 - RNA, 20 nt, Artificial Sequence
  Synthetic
cagagggacacauuaaauuu

SEQ ID NO: 417209 - RNA, 21 nt, Artificial Sequence
  Synthetic
acagagggacacauuaaauuu

SEQ ID NO: 417210 - RNA, 22 nt, Artificial Sequence
  Synthetic
gacagagggacacauuaaauuu

SEQ ID NO: 417211 - RNA, 23 nt, Artificial Sequence
  Synthetic
ggacagagggacacauuaaauuu

SEQ ID NO: 417212 - RNA, 24 nt, Artificial Sequence
  Synthetic
gggacagagggacacauuaaauuu

SEQ ID NO: 417213 - RNA, 18 nt, Artificial Sequence
  Synthetic
acauuauggauuaaauuu

SEQ ID NO: 417214 - RNA, 19 nt, Artificial Sequence
  Synthetic
aacauuauggauuaaauuu

SEQ ID NO: 417215 - RNA, 20 nt, Artificial Sequence
  Synthetic
aaacauuauggauuaaauuu

SEQ ID NO: 417216 - RNA, 21 nt, Artificial Sequence
  Synthetic
aaaacauuauggauuaaauuu

SEQ ID NO: 417217 - RNA, 22 nt, Artificial Sequence
  Synthetic
caaaacauuauggauuaaauuu

SEQ ID NO: 417218 - RNA, 23 nt, Artificial Sequence
  Synthetic
acaaaacauuauggauuaaauuu

SEQ ID NO: 417219 - RNA, 24 nt, Artificial Sequence
  Synthetic
aacaaaacauuauggauuaaauuu

SEQ ID NO: 417220 - RNA, 18 nt, Artificial Sequence
  Synthetic
agucugaugauuaaauuu

SEQ ID NO: 417221 - RNA, 19 nt, Artificial Sequence
  Synthetic
cagucugaugauuaaauuu

SEQ ID NO: 417222 - RNA, 20 nt, Artificial Sequence
  Synthetic
ucagucugaugauuaaauuu

SEQ ID NO: 417223 - RNA, 21 nt, Artificial Sequence
  Synthetic
uucagucugaugauuaaauuu

SEQ ID NO: 417224 - RNA, 22 nt, Artificial Sequence
  Synthetic
guucagucugaugauuaaauuu

SEQ ID NO: 417225 - RNA, 23 nt, Artificial Sequence
  Synthetic
gguucagucugaugauuaaauuu

SEQ ID NO: 417226 - RNA, 24 nt, Artificial Sequence
  Synthetic
ggguucagucugaugauuaaauuu

SEQ ID NO: 417227 - RNA, 18 nt, Artificial Sequence
  Synthetic
uugugcccacuuaaauuu

SEQ ID NO: 417228 - RNA, 19 nt, Artificial Sequence
  Synthetic
cuugugcccacuuaaauuu

SEQ ID NO: 417229 - RNA, 20 nt, Artificial Sequence
  Synthetic
ucuugugcccacuuaaauuu

SEQ ID NO: 417230 - RNA, 21 nt, Artificial Sequence
  Synthetic
uucuugugcccacuuaaauuu

SEQ ID NO: 417231 - RNA, 22 nt, Artificial Sequence
  Synthetic
guucuugugcccacuuaaauuu

SEQ ID NO: 417232 - RNA, 23 nt, Artificial Sequence
  Synthetic
aguucuugugcccacuuaaauuu

SEQ ID NO: 417233 - RNA, 24 nt, Artificial Sequence
  Synthetic
uaguucuugugcccacuuaaauuu

SEQ ID NO: 417234 - RNA, 18 nt, Artificial Sequence
  Synthetic
gguuggacguuuaaauuu

SEQ ID NO: 417235 - RNA, 19 nt, Artificial Sequence
  Synthetic
agguuggacguuuaaauuu

SEQ ID NO: 417236 - RNA, 20 nt, Artificial Sequence
  Synthetic
cagguuggacguuuaaauuu

SEQ ID NO: 417237 - RNA, 21 nt, Artificial Sequence
  Synthetic
ccagguuggacguuuaaauuu

SEQ ID NO: 417238 - RNA, 22 nt, Artificial Sequence
  Synthetic
uccagguuggacguuuaaauuu

SEQ ID NO: 417239 - RNA, 23 nt, Artificial Sequence
  Synthetic
guccagguuggacguuuaaauuu

SEQ ID NO: 417240 - RNA, 24 nt, Artificial Sequence
  Synthetic
gguccagguuggacguuuaaauuu

SEQ ID NO: 417241 - RNA, 18 nt, Artificial Sequence
  Synthetic
ggugaaauguuuaaauuu

SEQ ID NO: 417242 - RNA, 19 nt, Artificial Sequence
  Synthetic
gggugaaauguuuaaauuu

SEQ ID NO: 417243 - RNA, 20 nt, Artificial Sequence
  Synthetic
ugggugaaauguuuaaauuu

SEQ ID NO: 417244 - RNA, 21 nt, Artificial Sequence
  Synthetic
cugggugaaauguuuaaauuu

SEQ ID NO: 417245 - RNA, 22 nt, Artificial Sequence
  Synthetic
gcugggugaaauguuuaaauuu

SEQ ID NO: 417246 - RNA, 23 nt, Artificial Sequence
  Synthetic
ggcugggugaaauguuuaaauuu

SEQ ID NO: 417247 - RNA, 24 nt, Artificial Sequence
  Synthetic
uggcugggugaaauguuuaaauuu

SEQ ID NO: 417248 - RNA, 18 nt, Artificial Sequence
  Synthetic
aaaaagauguuuaaauuu

SEQ ID NO: 417249 - RNA, 19 nt, Artificial Sequence
  Synthetic
uaaaaagauguuuaaauuu

SEQ ID NO: 417250 - RNA, 20 nt, Artificial Sequence
  Synthetic
uuaaaaagauguuuaaauuu

SEQ ID NO: 417251 - RNA, 21 nt, Artificial Sequence
  Synthetic
uuuaaaaagauguuuaaauuu

SEQ ID NO: 417252 - RNA, 22 nt, Artificial Sequence
  Synthetic
cuuuaaaaagauguuuaaauuu

SEQ ID NO: 417253 - RNA, 23 nt, Artificial Sequence
  Synthetic
acuuuaaaaagauguuuaaauuu

SEQ ID NO: 417254 - RNA, 24 nt, Artificial Sequence
  Synthetic
uacuuuaaaaagauguuuaaauuu

SEQ ID NO: 417255 - RNA, 18 nt, Artificial Sequence
  Synthetic
cccauuugcaaacaauuu

SEQ ID NO: 417256 - RNA, 19 nt, Artificial Sequence
  Synthetic
ucccauuugcaaacaauuu

SEQ ID NO: 417257 - RNA, 20 nt, Artificial Sequence
  Synthetic
gucccauuugcaaacaauuu

SEQ ID NO: 417258 - RNA, 21 nt, Artificial Sequence
  Synthetic
ugucccauuugcaaacaauuu

SEQ ID NO: 417259 - RNA, 22 nt, Artificial Sequence
  Synthetic
cugucccauuugcaaacaauuu

SEQ ID NO: 417260 - RNA, 23 nt, Artificial Sequence
  Synthetic
ccugucccauuugcaaacaauuu

SEQ ID NO: 417261 - RNA, 24 nt, Artificial Sequence
  Synthetic
cccugucccauuugcaaacaauuu

SEQ ID NO: 417262 - RNA, 18 nt, Artificial Sequence
  Synthetic
aaaggcuggcaacaauuu

SEQ ID NO: 417263 - RNA, 19 nt, Artificial Sequence
  Synthetic
caaaggcuggcaacaauuu

SEQ ID NO: 417264 - RNA, 20 nt, Artificial Sequence
  Synthetic
ccaaaggcuggcaacaauuu

SEQ ID NO: 417265 - RNA, 21 nt, Artificial Sequence
  Synthetic
accaaaggcuggcaacaauuu

SEQ ID NO: 417266 - RNA, 22 nt, Artificial Sequence
  Synthetic
aaccaaaggcuggcaacaauuu

SEQ ID NO: 417267 - RNA, 23 nt, Artificial Sequence
  Synthetic
uaaccaaaggcuggcaacaauuu

SEQ ID NO: 417268 - RNA, 24 nt, Artificial Sequence
  Synthetic
uuaaccaaaggcuggcaacaauuu

SEQ ID NO: 417269 - RNA, 18 nt, Artificial Sequence
  Synthetic
ugauuauugccacaauuu

SEQ ID NO: 417270 - RNA, 19 nt, Artificial Sequence
  Synthetic
uugauuauugccacaauuu

SEQ ID NO: 417271 - RNA, 20 nt, Artificial Sequence
  Synthetic
auugauuauugccacaauuu

SEQ ID NO: 417272 - RNA, 21 nt, Artificial Sequence
  Synthetic
uauugauuauugccacaauuu

SEQ ID NO: 417273 - RNA, 22 nt, Artificial Sequence
  Synthetic
auauugauuauugccacaauuu

SEQ ID NO: 417274 - RNA, 23 nt, Artificial Sequence
  Synthetic
aauauugauuauugccacaauuu

SEQ ID NO: 417275 - RNA, 24 nt, Artificial Sequence
  Synthetic
aaauauugauuauugccacaauuu

SEQ ID NO: 417276 - RNA, 18 nt, Artificial Sequence
  Synthetic
guaacuaaaagacaauuu

SEQ ID NO: 417277 - RNA, 19 nt, Artificial Sequence
  Synthetic
aguaacuaaaagacaauuu

SEQ ID NO: 417278 - RNA, 20 nt, Artificial Sequence
  Synthetic
uaguaacuaaaagacaauuu

SEQ ID NO: 417279 - RNA, 21 nt, Artificial Sequence
  Synthetic
uuaguaacuaaaagacaauuu

SEQ ID NO: 417280 - RNA, 22 nt, Artificial Sequence
  Synthetic
auuaguaacuaaaagacaauuu

SEQ ID NO: 417281 - RNA, 23 nt, Artificial Sequence
  Synthetic
gauuaguaacuaaaagacaauuu

SEQ ID NO: 417282 - RNA, 24 nt, Artificial Sequence
  Synthetic
agauuaguaacuaaaagacaauuu

SEQ ID NO: 417283 - RNA, 18 nt, Artificial Sequence
  Synthetic
guuaacccaagacaauuu

SEQ ID NO: 417284 - RNA, 19 nt, Artificial Sequence
  Synthetic
uguuaacccaagacaauuu

SEQ ID NO: 417285 - RNA, 20 nt, Artificial Sequence
  Synthetic
auguuaacccaagacaauuu

SEQ ID NO: 417286 - RNA, 21 nt, Artificial Sequence
  Synthetic
uauguuaacccaagacaauuu

SEQ ID NO: 417287 - RNA, 22 nt, Artificial Sequence
  Synthetic
guauguuaacccaagacaauuu

SEQ ID NO: 417288 - RNA, 23 nt, Artificial Sequence
  Synthetic
aguauguuaacccaagacaauuu

SEQ ID NO: 417289 - RNA, 24 nt, Artificial Sequence
  Synthetic
caguauguuaacccaagacaauuu

SEQ ID NO: 417290 - RNA, 18 nt, Artificial Sequence
  Synthetic
aaccacuucucccaauuu

SEQ ID NO: 417291 - RNA, 19 nt, Artificial Sequence
  Synthetic
uaaccacuucucccaauuu

SEQ ID NO: 417292 - RNA, 20 nt, Artificial Sequence
  Synthetic
cuaaccacuucucccaauuu

SEQ ID NO: 417293 - RNA, 21 nt, Artificial Sequence
  Synthetic
ucuaaccacuucucccaauuu

SEQ ID NO: 417294 - RNA, 22 nt, Artificial Sequence
  Synthetic
uucuaaccacuucucccaauuu

SEQ ID NO: 417295 - RNA, 23 nt, Artificial Sequence
  Synthetic
uuucuaaccacuucucccaauuu

SEQ ID NO: 417296 - RNA, 24 nt, Artificial Sequence
  Synthetic
uuuucuaaccacuucucccaauuu

SEQ ID NO: 417297 - RNA, 18 nt, Artificial Sequence
  Synthetic
uaaaacgugucccaauuu

SEQ ID NO: 417298 - RNA, 19 nt, Artificial Sequence
  Synthetic
auaaaacgugucccaauuu

SEQ ID NO: 417299 - RNA, 20 nt, Artificial Sequence
  Synthetic
uauaaaacgugucccaauuu

SEQ ID NO: 417300 - RNA, 21 nt, Artificial Sequence
  Synthetic
uuauaaaacgugucccaauuu

SEQ ID NO: 417301 - RNA, 22 nt, Artificial Sequence
  Synthetic
uuuauaaaacgugucccaauuu

SEQ ID NO: 417302 - RNA, 23 nt, Artificial Sequence
  Synthetic
auuuauaaaacgugucccaauuu

SEQ ID NO: 417303 - RNA, 24 nt, Artificial Sequence
  Synthetic
cauuuauaaaacgugucccaauuu

SEQ ID NO: 417304 - RNA, 18 nt, Artificial Sequence
  Synthetic
gaauacgcacuccaauuu

SEQ ID NO: 417305 - RNA, 19 nt, Artificial Sequence
  Synthetic
ugaauacgcacuccaauuu

SEQ ID NO: 417306 - RNA, 20 nt, Artificial Sequence
  Synthetic
uugaauacgcacuccaauuu

SEQ ID NO: 417307 - RNA, 21 nt, Artificial Sequence
  Synthetic
uuugaauacgcacuccaauuu

SEQ ID NO: 417308 - RNA, 22 nt, Artificial Sequence
  Synthetic
uuuugaauacgcacuccaauuu

SEQ ID NO: 417309 - RNA, 23 nt, Artificial Sequence
  Synthetic
cuuuugaauacgcacuccaauuu

SEQ ID NO: 417310 - RNA, 24 nt, Artificial Sequence
  Synthetic
ucuuuugaauacgcacuccaauuu

SEQ ID NO: 417311 - RNA, 18 nt, Artificial Sequence
  Synthetic
caauuuauuguccaauuu

SEQ ID NO: 417312 - RNA, 19 nt, Artificial Sequence
  Synthetic
acaauuuauuguccaauuu

SEQ ID NO: 417313 - RNA, 20 nt, Artificial Sequence
  Synthetic
uacaauuuauuguccaauuu

SEQ ID NO: 417314 - RNA, 21 nt, Artificial Sequence
  Synthetic
uuacaauuuauuguccaauuu

SEQ ID NO: 417315 - RNA, 22 nt, Artificial Sequence
  Synthetic
auuacaauuuauuguccaauuu

SEQ ID NO: 417316 - RNA, 23 nt, Artificial Sequence
  Synthetic
uauuacaauuuauuguccaauuu

SEQ ID NO: 417317 - RNA, 24 nt, Artificial Sequence
  Synthetic
uuauuacaauuuauuguccaauuu

SEQ ID NO: 417318 - RNA, 18 nt, Artificial Sequence
  Synthetic
uauuaauuuuuccaauuu

SEQ ID NO: 417319 - RNA, 19 nt, Artificial Sequence
  Synthetic
auauuaauuuuuccaauuu

SEQ ID NO: 417320 - RNA, 20 nt, Artificial Sequence
  Synthetic
aauauuaauuuuuccaauuu

SEQ ID NO: 417321 - RNA, 21 nt, Artificial Sequence
  Synthetic
caauauuaauuuuuccaauuu

SEQ ID NO: 417322 - RNA, 22 nt, Artificial Sequence
  Synthetic
acaauauuaauuuuuccaauuu

SEQ ID NO: 417323 - RNA, 23 nt, Artificial Sequence
  Synthetic
aacaauauuaauuuuuccaauuu

SEQ ID NO: 417324 - RNA, 24 nt, Artificial Sequence
  Synthetic
uaacaauauuaauuuuuccaauuu

SEQ ID NO: 417325 - RNA, 18 nt, Artificial Sequence
  Synthetic
gagcagguacagcaauuu

SEQ ID NO: 417326 - RNA, 19 nt, Artificial Sequence
  Synthetic
agagcagguacagcaauuu

SEQ ID NO: 417327 - RNA, 20 nt, Artificial Sequence
  Synthetic
gagagcagguacagcaauuu

SEQ ID NO: 417328 - RNA, 21 nt, Artificial Sequence
  Synthetic
ggagagcagguacagcaauuu

SEQ ID NO: 417329 - RNA, 22 nt, Artificial Sequence
  Synthetic
aggagagcagguacagcaauuu

SEQ ID NO: 417330 - RNA, 23 nt, Artificial Sequence
  Synthetic
gaggagagcagguacagcaauuu

SEQ ID NO: 417331 - RNA, 24 nt, Artificial Sequence
  Synthetic
ugaggagagcagguacagcaauuu

SEQ ID NO: 417332 - RNA, 18 nt, Artificial Sequence
  Synthetic
cuguaaucccagcaauuu

SEQ ID NO: 417333 - RNA, 19 nt, Artificial Sequence
  Synthetic
acuguaaucccagcaauuu

SEQ ID NO: 417334 - RNA, 20 nt, Artificial Sequence
  Synthetic
gacuguaaucccagcaauuu

SEQ ID NO: 417335 - RNA, 21 nt, Artificial Sequence
  Synthetic
cgacuguaaucccagcaauuu

SEQ ID NO: 417336 - RNA, 22 nt, Artificial Sequence
  Synthetic
acgacuguaaucccagcaauuu

SEQ ID NO: 417337 - RNA, 23 nt, Artificial Sequence
  Synthetic
cacgacuguaaucccagcaauuu

SEQ ID NO: 417338 - RNA, 24 nt, Artificial Sequence
  Synthetic
ucacgacuguaaucccagcaauuu

SEQ ID NO: 417339 - RNA, 19 nt, Artificial Sequence
  Synthetic
ccuguaaucccagcaauuu

SEQ ID NO: 417340 - RNA, 20 nt, Artificial Sequence
  Synthetic
gccuguaaucccagcaauuu

SEQ ID NO: 417341 - RNA, 21 nt, Artificial Sequence
  Synthetic
cgccuguaaucccagcaauuu

SEQ ID NO: 417342 - RNA, 22 nt, Artificial Sequence
  Synthetic
ucgccuguaaucccagcaauuu

SEQ ID NO: 417343 - RNA, 23 nt, Artificial Sequence
  Synthetic
cucgccuguaaucccagcaauuu

SEQ ID NO: 417344 - RNA, 24 nt, Artificial Sequence
  Synthetic
ucucgccuguaaucccagcaauuu

SEQ ID NO: 417345 - RNA, 18 nt, Artificial Sequence
  Synthetic
gggauaaauuggcaauuu

SEQ ID NO: 417346 - RNA, 19 nt, Artificial Sequence
  Synthetic
agggauaaauuggcaauuu

SEQ ID NO: 417347 - RNA, 20 nt, Artificial Sequence
  Synthetic
gagggauaaauuggcaauuu

SEQ ID NO: 417348 - RNA, 21 nt, Artificial Sequence
  Synthetic
ugagggauaaauuggcaauuu

SEQ ID NO: 417349 - RNA, 22 nt, Artificial Sequence
  Synthetic
cugagggauaaauuggcaauuu

SEQ ID NO: 417350 - RNA, 23 nt, Artificial Sequence
  Synthetic
gcugagggauaaauuggcaauuu

SEQ ID NO: 417351 - RNA, 24 nt, Artificial Sequence
  Synthetic
cgcugagggauaaauuggcaauuu

SEQ ID NO: 417352 - RNA, 18 nt, Artificial Sequence
  Synthetic
gacucagcagaucaauuu

SEQ ID NO: 417353 - RNA, 19 nt, Artificial Sequence
  Synthetic
ggacucagcagaucaauuu

SEQ ID NO: 417354 - RNA, 20 nt, Artificial Sequence
  Synthetic
uggacucagcagaucaauuu

SEQ ID NO: 417355 - RNA, 21 nt, Artificial Sequence
  Synthetic
cuggacucagcagaucaauuu

SEQ ID NO: 417356 - RNA, 22 nt, Artificial Sequence
  Synthetic
gcuggacucagcagaucaauuu

SEQ ID NO: 417357 - RNA, 23 nt, Artificial Sequence
  Synthetic
ugcuggacucagcagaucaauuu

SEQ ID NO: 417358 - RNA, 24 nt, Artificial Sequence
  Synthetic
cugcuggacucagcagaucaauuu

SEQ ID NO: 417359 - RNA, 18 nt, Artificial Sequence
  Synthetic
cuauuacugccucaauuu

SEQ ID NO: 417360 - RNA, 19 nt, Artificial Sequence
  Synthetic
gcuauuacugccucaauuu

SEQ ID NO: 417361 - RNA, 20 nt, Artificial Sequence
  Synthetic
ggcuauuacugccucaauuu

SEQ ID NO: 417362 - RNA, 21 nt, Artificial Sequence
  Synthetic
aggcuauuacugccucaauuu

SEQ ID NO: 417363 - RNA, 22 nt, Artificial Sequence
  Synthetic
uaggcuauuacugccucaauuu

SEQ ID NO: 417364 - RNA, 23 nt, Artificial Sequence
  Synthetic
guaggcuauuacugccucaauuu

SEQ ID NO: 417365 - RNA, 24 nt, Artificial Sequence
  Synthetic
cguaggcuauuacugccucaauuu

SEQ ID NO: 417366 - RNA, 18 nt, Artificial Sequence
  Synthetic
uaauuauugccucaauuu

SEQ ID NO: 417367 - RNA, 19 nt, Artificial Sequence
  Synthetic
uuaauuauugccucaauuu

SEQ ID NO: 417368 - RNA, 20 nt, Artificial Sequence
  Synthetic
auuaauuauugccucaauuu

SEQ ID NO: 417369 - RNA, 21 nt, Artificial Sequence
  Synthetic
uauuaauuauugccucaauuu

SEQ ID NO: 417370 - RNA, 22 nt, Artificial Sequence
  Synthetic
cuauuaauuauugccucaauuu

SEQ ID NO: 417371 - RNA, 23 nt, Artificial Sequence
  Synthetic
gcuauuaauuauugccucaauuu

SEQ ID NO: 417372 - RNA, 24 nt, Artificial Sequence
  Synthetic
ggcuauuaauuauugccucaauuu

SEQ ID NO: 417373 - RNA, 18 nt, Artificial Sequence
  Synthetic
auuaagaaacgucaauuu

SEQ ID NO: 417374 - RNA, 19 nt, Artificial Sequence
  Synthetic
uauuaagaaacgucaauuu

SEQ ID NO: 417375 - RNA, 20 nt, Artificial Sequence
  Synthetic
auauuaagaaacgucaauuu

SEQ ID NO: 417376 - RNA, 21 nt, Artificial Sequence
  Synthetic
aauauuaagaaacgucaauuu

SEQ ID NO: 417377 - RNA, 22 nt, Artificial Sequence
  Synthetic
uaauauuaagaaacgucaauuu

SEQ ID NO: 417378 - RNA, 23 nt, Artificial Sequence
  Synthetic
auaauauuaagaaacgucaauuu

SEQ ID NO: 417379 - RNA, 24 nt, Artificial Sequence
  Synthetic
cauaauauuaagaaacgucaauuu

SEQ ID NO: 417380 - RNA, 18 nt, Artificial Sequence
  Synthetic
aguaauuuaauucaauuu

SEQ ID NO: 417381 - RNA, 19 nt, Artificial Sequence
  Synthetic
gaguaauuuaauucaauuu

SEQ ID NO: 417382 - RNA, 20 nt, Artificial Sequence
  Synthetic
agaguaauuuaauucaauuu

SEQ ID NO: 417383 - RNA, 21 nt, Artificial Sequence
  Synthetic
cagaguaauuuaauucaauuu

SEQ ID NO: 417384 - RNA, 22 nt, Artificial Sequence
  Synthetic
gcagaguaauuuaauucaauuu

SEQ ID NO: 417385 - RNA, 23 nt, Artificial Sequence
  Synthetic
agcagaguaauuuaauucaauuu

SEQ ID NO: 417386 - RNA, 24 nt, Artificial Sequence
  Synthetic
uagcagaguaauuuaauucaauuu

SEQ ID NO: 417387 - RNA, 18 nt, Artificial Sequence
  Synthetic
gguugagagcuucaauuu

SEQ ID NO: 417388 - RNA, 19 nt, Artificial Sequence
  Synthetic
ugguugagagcuucaauuu

SEQ ID NO: 417389 - RNA, 20 nt, Artificial Sequence
  Synthetic
cugguugagagcuucaauuu

SEQ ID NO: 417390 - RNA, 21 nt, Artificial Sequence
  Synthetic
ccugguugagagcuucaauuu

SEQ ID NO: 417391 - RNA, 22 nt, Artificial Sequence
  Synthetic
uccugguugagagcuucaauuu

SEQ ID NO: 417392 - RNA, 23 nt, Artificial Sequence
  Synthetic
uuccugguugagagcuucaauuu

SEQ ID NO: 417393 - RNA, 24 nt, Artificial Sequence
  Synthetic
guuccugguugagagcuucaauuu

SEQ ID NO: 417394 - RNA, 18 nt, Artificial Sequence
  Synthetic
aauuuuucugaagaauuu

SEQ ID NO: 417395 - RNA, 19 nt, Artificial Sequence
  Synthetic
uaauuuuucugaagaauuu

SEQ ID NO: 417396 - RNA, 20 nt, Artificial Sequence
  Synthetic
uuaauuuuucugaagaauuu

SEQ ID NO: 417397 - RNA, 21 nt, Artificial Sequence
  Synthetic
uuuaauuuuucugaagaauuu

SEQ ID NO: 417398 - RNA, 22 nt, Artificial Sequence
  Synthetic
cuuuaauuuuucugaagaauuu

SEQ ID NO: 417399 - RNA, 23 nt, Artificial Sequence
  Synthetic
ucuuuaauuuuucugaagaauuu

SEQ ID NO: 417400 - RNA, 24 nt, Artificial Sequence
  Synthetic
cucuuuaauuuuucugaagaauuu

SEQ ID NO: 417401 - RNA, 18 nt, Artificial Sequence
  Synthetic
acuguccaauaagaauuu

SEQ ID NO: 417402 - RNA, 19 nt, Artificial Sequence
  Synthetic
cacuguccaauaagaauuu

SEQ ID NO: 417403 - RNA, 20 nt, Artificial Sequence
  Synthetic
ucacuguccaauaagaauuu

SEQ ID NO: 417404 - RNA, 21 nt, Artificial Sequence
  Synthetic
uucacuguccaauaagaauuu

SEQ ID NO: 417405 - RNA, 22 nt, Artificial Sequence
  Synthetic
guucacuguccaauaagaauuu

SEQ ID NO: 417406 - RNA, 23 nt, Artificial Sequence
  Synthetic
aguucacuguccaauaagaauuu

SEQ ID NO: 417407 - RNA, 24 nt, Artificial Sequence
  Synthetic
caguucacuguccaauaagaauuu

SEQ ID NO: 417408 - RNA, 18 nt, Artificial Sequence
  Synthetic
uagacacucuaagaauuu

SEQ ID NO: 417409 - RNA, 19 nt, Artificial Sequence
  Synthetic
uuagacacucuaagaauuu

SEQ ID NO: 417410 - RNA, 20 nt, Artificial Sequence
  Synthetic
uuuagacacucuaagaauuu

SEQ ID NO: 417411 - RNA, 21 nt, Artificial Sequence
  Synthetic
uuuuagacacucuaagaauuu

SEQ ID NO: 417412 - RNA, 22 nt, Artificial Sequence
  Synthetic
auuuuagacacucuaagaauuu

SEQ ID NO: 417413 - RNA, 23 nt, Artificial Sequence
  Synthetic
aauuuuagacacucuaagaauuu

SEQ ID NO: 417414 - RNA, 24 nt, Artificial Sequence
  Synthetic
uaauuuuagacacucuaagaauuu

SEQ ID NO: 417415 - RNA, 18 nt, Artificial Sequence
  Synthetic
gaagguuuuuaagaauuu

SEQ ID NO: 417416 - RNA, 19 nt, Artificial Sequence
  Synthetic
agaagguuuuuaagaauuu

SEQ ID NO: 417417 - RNA, 20 nt, Artificial Sequence
  Synthetic
cagaagguuuuuaagaauuu

SEQ ID NO: 417418 - RNA, 21 nt, Artificial Sequence
  Synthetic
gcagaagguuuuuaagaauuu

SEQ ID NO: 417419 - RNA, 22 nt, Artificial Sequence
  Synthetic
agcagaagguuuuuaagaauuu

SEQ ID NO: 417420 - RNA, 23 nt, Artificial Sequence
  Synthetic
aagcagaagguuuuuaagaauuu

SEQ ID NO: 417421 - RNA, 24 nt, Artificial Sequence
  Synthetic
aaagcagaagguuuuuaagaauuu

SEQ ID NO: 417422 - RNA, 18 nt, Artificial Sequence
  Synthetic
gauccagagacagaauuu

SEQ ID NO: 417423 - RNA, 19 nt, Artificial Sequence
  Synthetic
ugauccagagacagaauuu

SEQ ID NO: 417424 - RNA, 20 nt, Artificial Sequence
  Synthetic
uugauccagagacagaauuu

SEQ ID NO: 417425 - RNA, 21 nt, Artificial Sequence
  Synthetic
auugauccagagacagaauuu

SEQ ID NO: 417426 - RNA, 22 nt, Artificial Sequence
  Synthetic
gauugauccagagacagaauuu

SEQ ID NO: 417427 - RNA, 23 nt, Artificial Sequence
  Synthetic
agauugauccagagacagaauuu

SEQ ID NO: 417428 - RNA, 24 nt, Artificial Sequence
  Synthetic
cagauugauccagagacagaauuu

SEQ ID NO: 417429 - RNA, 18 nt, Artificial Sequence
  Synthetic
uuugagcagccagaauuu

SEQ ID NO: 417430 - RNA, 19 nt, Artificial Sequence
  Synthetic
auuugagcagccagaauuu

SEQ ID NO: 417431 - RNA, 20 nt, Artificial Sequence
  Synthetic
gauuugagcagccagaauuu

SEQ ID NO: 417432 - RNA, 21 nt, Artificial Sequence
  Synthetic
ggauuugagcagccagaauuu

SEQ ID NO: 417433 - RNA, 22 nt, Artificial Sequence
  Synthetic
gggauuugagcagccagaauuu

SEQ ID NO: 417434 - RNA, 23 nt, Artificial Sequence
  Synthetic
ugggauuugagcagccagaauuu

SEQ ID NO: 417435 - RNA, 24 nt, Artificial Sequence
  Synthetic
uugggauuugagcagccagaauuu

SEQ ID NO: 417436 - RNA, 18 nt, Artificial Sequence
  Synthetic
aacauccuuggagaauuu

SEQ ID NO: 417437 - RNA, 19 nt, Artificial Sequence
  Synthetic
caacauccuuggagaauuu

SEQ ID NO: 417438 - RNA, 20 nt, Artificial Sequence
  Synthetic
gcaacauccuuggagaauuu

SEQ ID NO: 417439 - RNA, 21 nt, Artificial Sequence
  Synthetic
ugcaacauccuuggagaauuu

SEQ ID NO: 417440 - RNA, 22 nt, Artificial Sequence
  Synthetic
gugcaacauccuuggagaauuu

SEQ ID NO: 417441 - RNA, 23 nt, Artificial Sequence
  Synthetic
agugcaacauccuuggagaauuu

SEQ ID NO: 417442 - RNA, 24 nt, Artificial Sequence
  Synthetic
cagugcaacauccuuggagaauuu

SEQ ID NO: 417443 - RNA, 18 nt, Artificial Sequence
  Synthetic
uaaaguaaaugagaauuu

SEQ ID NO: 417444 - RNA, 19 nt, Artificial Sequence
  Synthetic
guaaaguaaaugagaauuu

SEQ ID NO: 417445 - RNA, 20 nt, Artificial Sequence
  Synthetic
gguaaaguaaaugagaauuu

SEQ ID NO: 417446 - RNA, 21 nt, Artificial Sequence
  Synthetic
ggguaaaguaaaugagaauuu

SEQ ID NO: 417447 - RNA, 22 nt, Artificial Sequence
  Synthetic
uggguaaaguaaaugagaauuu

SEQ ID NO: 417448 - RNA, 23 nt, Artificial Sequence
  Synthetic
auggguaaaguaaaugagaauuu

SEQ ID NO: 417449 - RNA, 24 nt, Artificial Sequence
  Synthetic
uauggguaaaguaaaugagaauuu

SEQ ID NO: 417450 - RNA, 18 nt, Artificial Sequence
  Synthetic
uugaaagugauagaauuu

SEQ ID NO: 417451 - RNA, 19 nt, Artificial Sequence
  Synthetic
auugaaagugauagaauuu

SEQ ID NO: 417452 - RNA, 20 nt, Artificial Sequence
  Synthetic
uauugaaagugauagaauuu

SEQ ID NO: 417453 - RNA, 21 nt, Artificial Sequence
  Synthetic
auauugaaagugauagaauuu

SEQ ID NO: 417454 - RNA, 22 nt, Artificial Sequence
  Synthetic
aauauugaaagugauagaauuu

SEQ ID NO: 417455 - RNA, 23 nt, Artificial Sequence
  Synthetic
uaauauugaaagugauagaauuu

SEQ ID NO: 417456 - RNA, 24 nt, Artificial Sequence
  Synthetic
auaauauugaaagugauagaauuu

SEQ ID NO: 417457 - RNA, 18 nt, Artificial Sequence
  Synthetic
aagacaugaaaggaauuu

SEQ ID NO: 417458 - RNA, 19 nt, Artificial Sequence
  Synthetic
gaagacaugaaaggaauuu

SEQ ID NO: 417459 - RNA, 20 nt, Artificial Sequence
  Synthetic
ugaagacaugaaaggaauuu

SEQ ID NO: 417460 - RNA, 21 nt, Artificial Sequence
  Synthetic
augaagacaugaaaggaauuu

SEQ ID NO: 417461 - RNA, 22 nt, Artificial Sequence
  Synthetic
gaugaagacaugaaaggaauuu

SEQ ID NO: 417462 - RNA, 23 nt, Artificial Sequence
  Synthetic
agaugaagacaugaaaggaauuu

SEQ ID NO: 417463 - RNA, 24 nt, Artificial Sequence
  Synthetic
gagaugaagacaugaaaggaauuu

SEQ ID NO: 417464 - RNA, 18 nt, Artificial Sequence
  Synthetic
uuuacauuuaaggaauuu

SEQ ID NO: 417465 - RNA, 19 nt, Artificial Sequence
  Synthetic
guuuacauuuaaggaauuu

SEQ ID NO: 417466 - RNA, 20 nt, Artificial Sequence
  Synthetic
gguuuacauuuaaggaauuu

SEQ ID NO: 417467 - RNA, 21 nt, Artificial Sequence
  Synthetic
ugguuuacauuuaaggaauuu

SEQ ID NO: 417468 - RNA, 22 nt, Artificial Sequence
  Synthetic
uugguuuacauuuaaggaauuu

SEQ ID NO: 417469 - RNA, 23 nt, Artificial Sequence
  Synthetic
guugguuuacauuuaaggaauuu

SEQ ID NO: 417470 - RNA, 24 nt, Artificial Sequence
  Synthetic
aguugguuuacauuuaaggaauuu

SEQ ID NO: 417471 - RNA, 18 nt, Artificial Sequence
  Synthetic
augugugcucaggaauuu

SEQ ID NO: 417472 - RNA, 19 nt, Artificial Sequence
  Synthetic
uaugugugcucaggaauuu

SEQ ID NO: 417473 - RNA, 20 nt, Artificial Sequence
  Synthetic
auaugugugcucaggaauuu

SEQ ID NO: 417474 - RNA, 21 nt, Artificial Sequence
  Synthetic
aauaugugugcucaggaauuu

SEQ ID NO: 417475 - RNA, 22 nt, Artificial Sequence
  Synthetic
uaauaugugugcucaggaauuu

SEQ ID NO: 417476 - RNA, 23 nt, Artificial Sequence
  Synthetic
uuaauaugugugcucaggaauuu

SEQ ID NO: 417477 - RNA, 24 nt, Artificial Sequence
  Synthetic
auuaauaugugugcucaggaauuu

SEQ ID NO: 417478 - RNA, 18 nt, Artificial Sequence
  Synthetic
auuucaacauaggaauuu

SEQ ID NO: 417479 - RNA, 19 nt, Artificial Sequence
  Synthetic
gauuucaacauaggaauuu

SEQ ID NO: 417480 - RNA, 20 nt, Artificial Sequence
  Synthetic
ggauuucaacauaggaauuu

SEQ ID NO: 417481 - RNA, 21 nt, Artificial Sequence
  Synthetic
aggauuucaacauaggaauuu

SEQ ID NO: 417482 - RNA, 22 nt, Artificial Sequence
  Synthetic
uaggauuucaacauaggaauuu

SEQ ID NO: 417483 - RNA, 23 nt, Artificial Sequence
  Synthetic
uuaggauuucaacauaggaauuu

SEQ ID NO: 417484 - RNA, 24 nt, Artificial Sequence
  Synthetic
uuuaggauuucaacauaggaauuu

SEQ ID NO: 417485 - RNA, 18 nt, Artificial Sequence
  Synthetic
caacagcgacuggaauuu

SEQ ID NO: 417486 - RNA, 19 nt, Artificial Sequence
  Synthetic
gcaacagcgacuggaauuu

SEQ ID NO: 417487 - RNA, 20 nt, Artificial Sequence
  Synthetic
ggcaacagcgacuggaauuu

SEQ ID NO: 417488 - RNA, 21 nt, Artificial Sequence
  Synthetic
aggcaacagcgacuggaauuu

SEQ ID NO: 417489 - RNA, 22 nt, Artificial Sequence
  Synthetic
gaggcaacagcgacuggaauuu

SEQ ID NO: 417490 - RNA, 23 nt, Artificial Sequence
  Synthetic
agaggcaacagcgacuggaauuu

SEQ ID NO: 417491 - RNA, 24 nt, Artificial Sequence
  Synthetic
uagaggcaacagcgacuggaauuu

SEQ ID NO: 417492 - RNA, 18 nt, Artificial Sequence
  Synthetic
gugguuucauaugaauuu

SEQ ID NO: 417493 - RNA, 19 nt, Artificial Sequence
  Synthetic
ugugguuucauaugaauuu

SEQ ID NO: 417494 - RNA, 20 nt, Artificial Sequence
  Synthetic
uugugguuucauaugaauuu

SEQ ID NO: 417495 - RNA, 21 nt, Artificial Sequence
  Synthetic
uuugugguuucauaugaauuu

SEQ ID NO: 417496 - RNA, 22 nt, Artificial Sequence
  Synthetic
guuugugguuucauaugaauuu

SEQ ID NO: 417497 - RNA, 23 nt, Artificial Sequence
  Synthetic
cguuugugguuucauaugaauuu

SEQ ID NO: 417498 - RNA, 24 nt, Artificial Sequence
  Synthetic
ucguuugugguuucauaugaauuu

SEQ ID NO: 417499 - RNA, 18 nt, Artificial Sequence
  Synthetic
gaaauaggcuaugaauuu

SEQ ID NO: 417500 - RNA, 19 nt, Artificial Sequence
  Synthetic
ugaaauaggcuaugaauuu

SEQ ID NO: 417501 - RNA, 20 nt, Artificial Sequence
  Synthetic
augaaauaggcuaugaauuu

SEQ ID NO: 417502 - RNA, 21 nt, Artificial Sequence
  Synthetic
gaugaaauaggcuaugaauuu

SEQ ID NO: 417503 - RNA, 22 nt, Artificial Sequence
  Synthetic
ugaugaaauaggcuaugaauuu

SEQ ID NO: 417504 - RNA, 23 nt, Artificial Sequence
  Synthetic
augaugaaauaggcuaugaauuu

SEQ ID NO: 417505 - RNA, 24 nt, Artificial Sequence
  Synthetic
gaugaugaaauaggcuaugaauuu

SEQ ID NO: 417506 - RNA, 18 nt, Artificial Sequence
  Synthetic
ggugauuuguaugaauuu

SEQ ID NO: 417507 - RNA, 19 nt, Artificial Sequence
  Synthetic
aggugauuuguaugaauuu

SEQ ID NO: 417508 - RNA, 20 nt, Artificial Sequence
  Synthetic
uaggugauuuguaugaauuu

SEQ ID NO: 417509 - RNA, 21 nt, Artificial Sequence
  Synthetic
auaggugauuuguaugaauuu

SEQ ID NO: 417510 - RNA, 22 nt, Artificial Sequence
  Synthetic
uauaggugauuuguaugaauuu

SEQ ID NO: 417511 - RNA, 23 nt, Artificial Sequence
  Synthetic
cuauaggugauuuguaugaauuu

SEQ ID NO: 417512 - RNA, 24 nt, Artificial Sequence
  Synthetic
acuauaggugauuuguaugaauuu

SEQ ID NO: 417513 - RNA, 18 nt, Artificial Sequence
  Synthetic
uauacauuuuaugaauuu

SEQ ID NO: 417514 - RNA, 19 nt, Artificial Sequence
  Synthetic
uuauacauuuuaugaauuu

SEQ ID NO: 417515 - RNA, 20 nt, Artificial Sequence
  Synthetic
uuuauacauuuuaugaauuu

SEQ ID NO: 417516 - RNA, 21 nt, Artificial Sequence
  Synthetic
auuuauacauuuuaugaauuu

SEQ ID NO: 417517 - RNA, 22 nt, Artificial Sequence
  Synthetic
aauuuauacauuuuaugaauuu

SEQ ID NO: 417518 - RNA, 23 nt, Artificial Sequence
  Synthetic
caauuuauacauuuuaugaauuu

SEQ ID NO: 417519 - RNA, 24 nt, Artificial Sequence
  Synthetic
ucaauuuauacauuuuaugaauuu

SEQ ID NO: 417520 - RNA, 18 nt, Artificial Sequence
  Synthetic
cuucacaggccugaauuu

SEQ ID NO: 417521 - RNA, 19 nt, Artificial Sequence
  Synthetic
acuucacaggccugaauuu

SEQ ID NO: 417522 - RNA, 20 nt, Artificial Sequence
  Synthetic
gacuucacaggccugaauuu

SEQ ID NO: 417523 - RNA, 21 nt, Artificial Sequence
  Synthetic
ugacuucacaggccugaauuu

SEQ ID NO: 417524 - RNA, 22 nt, Artificial Sequence
  Synthetic
augacuucacaggccugaauuu

SEQ ID NO: 417525 - RNA, 23 nt, Artificial Sequence
  Synthetic
aaugacuucacaggccugaauuu

SEQ ID NO: 417526 - RNA, 24 nt, Artificial Sequence
  Synthetic
caaugacuucacaggccugaauuu

SEQ ID NO: 417527 - RNA, 18 nt, Artificial Sequence
  Synthetic
cuuuacauuucugaauuu

SEQ ID NO: 417528 - RNA, 19 nt, Artificial Sequence
  Synthetic
ucuuuacauuucugaauuu

SEQ ID NO: 417529 - RNA, 20 nt, Artificial Sequence
  Synthetic
uucuuuacauuucugaauuu

SEQ ID NO: 417530 - RNA, 21 nt, Artificial Sequence
  Synthetic
uuucuuuacauuucugaauuu

SEQ ID NO: 417531 - RNA, 22 nt, Artificial Sequence
  Synthetic
auuucuuuacauuucugaauuu

SEQ ID NO: 417532 - RNA, 23 nt, Artificial Sequence
  Synthetic
uauuucuuuacauuucugaauuu

SEQ ID NO: 417533 - RNA, 24 nt, Artificial Sequence
  Synthetic
guauuucuuuacauuucugaauuu

SEQ ID NO: 417534 - RNA, 18 nt, Artificial Sequence
  Synthetic
uuguucucgauugaauuu

SEQ ID NO: 417535 - RNA, 19 nt, Artificial Sequence
  Synthetic
cuuguucucgauugaauuu

SEQ ID NO: 417536 - RNA, 20 nt, Artificial Sequence
  Synthetic
acuuguucucgauugaauuu

SEQ ID NO: 417537 - RNA, 21 nt, Artificial Sequence
  Synthetic
aacuuguucucgauugaauuu

SEQ ID NO: 417538 - RNA, 22 nt, Artificial Sequence
  Synthetic
gaacuuguucucgauugaauuu

SEQ ID NO: 417539 - RNA, 23 nt, Artificial Sequence
  Synthetic
agaacuuguucucgauugaauuu

SEQ ID NO: 417540 - RNA, 24 nt, Artificial Sequence
  Synthetic
cagaacuuguucucgauugaauuu

SEQ ID NO: 417541 - RNA, 18 nt, Artificial Sequence
  Synthetic
gauaauuuacuugaauuu

SEQ ID NO: 417542 - RNA, 19 nt, Artificial Sequence
  Synthetic
ugauaauuuacuugaauuu

SEQ ID NO: 417543 - RNA, 20 nt, Artificial Sequence
  Synthetic
augauaauuuacuugaauuu

SEQ ID NO: 417544 - RNA, 21 nt, Artificial Sequence
  Synthetic
aaugauaauuuacuugaauuu

SEQ ID NO: 417545 - RNA, 22 nt, Artificial Sequence
  Synthetic
aaaugauaauuuacuugaauuu

SEQ ID NO: 417546 - RNA, 23 nt, Artificial Sequence
  Synthetic
aaaaugauaauuuacuugaauuu

SEQ ID NO: 417547 - RNA, 24 nt, Artificial Sequence
  Synthetic
caaaaugauaauuuacuugaauuu

SEQ ID NO: 417548 - RNA, 18 nt, Artificial Sequence
  Synthetic
gauugcagaguugaauuu

SEQ ID NO: 417549 - RNA, 19 nt, Artificial Sequence
  Synthetic
cgauugcagaguugaauuu

SEQ ID NO: 417550 - RNA, 20 nt, Artificial Sequence
  Synthetic
acgauugcagaguugaauuu

SEQ ID NO: 417551 - RNA, 21 nt, Artificial Sequence
  Synthetic
aacgauugcagaguugaauuu

SEQ ID NO: 417552 - RNA, 22 nt, Artificial Sequence
  Synthetic
gaacgauugcagaguugaauuu

SEQ ID NO: 417553 - RNA, 23 nt, Artificial Sequence
  Synthetic
ugaacgauugcagaguugaauuu

SEQ ID NO: 417554 - RNA, 24 nt, Artificial Sequence
  Synthetic
uugaacgauugcagaguugaauuu

SEQ ID NO: 417555 - RNA, 18 nt, Artificial Sequence
  Synthetic
ggauuauaauuugaauuu

SEQ ID NO: 417556 - RNA, 19 nt, Artificial Sequence
  Synthetic
aggauuauaauuugaauuu

SEQ ID NO: 417557 - RNA, 20 nt, Artificial Sequence
  Synthetic
caggauuauaauuugaauuu

SEQ ID NO: 417558 - RNA, 21 nt, Artificial Sequence
  Synthetic
gcaggauuauaauuugaauuu

SEQ ID NO: 417559 - RNA, 22 nt, Artificial Sequence
  Synthetic
ugcaggauuauaauuugaauuu

SEQ ID NO: 417560 - RNA, 23 nt, Artificial Sequence
  Synthetic
uugcaggauuauaauuugaauuu

SEQ ID NO: 417561 - RNA, 24 nt, Artificial Sequence
  Synthetic
cuugcaggauuauaauuugaauuu

SEQ ID NO: 417562 - RNA, 18 nt, Artificial Sequence
  Synthetic
agacaaacauuugaauuu

SEQ ID NO: 417563 - RNA, 19 nt, Artificial Sequence
  Synthetic
aagacaaacauuugaauuu

SEQ ID NO: 417564 - RNA, 20 nt, Artificial Sequence
  Synthetic
caagacaaacauuugaauuu

SEQ ID NO: 417565 - RNA, 21 nt, Artificial Sequence
  Synthetic
gcaagacaaacauuugaauuu

SEQ ID NO: 417566 - RNA, 22 nt, Artificial Sequence
  Synthetic
agcaagacaaacauuugaauuu

SEQ ID NO: 417567 - RNA, 23 nt, Artificial Sequence
  Synthetic
uagcaagacaaacauuugaauuu

SEQ ID NO: 417568 - RNA, 24 nt, Artificial Sequence
  Synthetic
uuagcaagacaaacauuugaauuu

SEQ ID NO: 417569 - RNA, 18 nt, Artificial Sequence
  Synthetic
aagaaagcuuuugaauuu

SEQ ID NO: 417570 - RNA, 19 nt, Artificial Sequence
  Synthetic
aaagaaagcuuuugaauuu

SEQ ID NO: 417571 - RNA, 20 nt, Artificial Sequence
  Synthetic
uaaagaaagcuuuugaauuu

SEQ ID NO: 417572 - RNA, 21 nt, Artificial Sequence
  Synthetic
guaaagaaagcuuuugaauuu

SEQ ID NO: 417573 - RNA, 22 nt, Artificial Sequence
  Synthetic
uguaaagaaagcuuuugaauuu

SEQ ID NO: 417574 - RNA, 23 nt, Artificial Sequence
  Synthetic
uuguaaagaaagcuuuugaauuu

SEQ ID NO: 417575 - RNA, 24 nt, Artificial Sequence
  Synthetic
auuguaaagaaagcuuuugaauuu

SEQ ID NO: 417576 - RNA, 18 nt, Artificial Sequence
  Synthetic
auagggaagaaauaauuu

SEQ ID NO: 417577 - RNA, 19 nt, Artificial Sequence
  Synthetic
aauagggaagaaauaauuu

SEQ ID NO: 417578 - RNA, 20 nt, Artificial Sequence
  Synthetic
gaauagggaagaaauaauuu

SEQ ID NO: 417579 - RNA, 21 nt, Artificial Sequence
  Synthetic
ugaauagggaagaaauaauuu

SEQ ID NO: 417580 - RNA, 22 nt, Artificial Sequence
  Synthetic
augaauagggaagaaauaauuu

SEQ ID NO: 417581 - RNA, 23 nt, Artificial Sequence
  Synthetic
caugaauagggaagaaauaauuu

SEQ ID NO: 417582 - RNA, 24 nt, Artificial Sequence
  Synthetic
ccaugaauagggaagaaauaauuu

SEQ ID NO: 417583 - RNA, 18 nt, Artificial Sequence
  Synthetic
acaagauccacauaauuu

SEQ ID NO: 417584 - RNA, 19 nt, Artificial Sequence
  Synthetic
gacaagauccacauaauuu

SEQ ID NO: 417585 - RNA, 20 nt, Artificial Sequence
  Synthetic
ggacaagauccacauaauuu

SEQ ID NO: 417586 - RNA, 21 nt, Artificial Sequence
  Synthetic
uggacaagauccacauaauuu

SEQ ID NO: 417587 - RNA, 22 nt, Artificial Sequence
  Synthetic
cuggacaagauccacauaauuu

SEQ ID NO: 417588 - RNA, 23 nt, Artificial Sequence
  Synthetic
ccuggacaagauccacauaauuu

SEQ ID NO: 417589 - RNA, 24 nt, Artificial Sequence
  Synthetic
accuggacaagauccacauaauuu

SEQ ID NO: 417590 - RNA, 18 nt, Artificial Sequence
  Synthetic
gacaagaguacauaauuu

SEQ ID NO: 417591 - RNA, 19 nt, Artificial Sequence
  Synthetic
agacaagaguacauaauuu

SEQ ID NO: 417592 - RNA, 20 nt, Artificial Sequence
  Synthetic
cagacaagaguacauaauuu

SEQ ID NO: 417593 - RNA, 21 nt, Artificial Sequence
  Synthetic
acagacaagaguacauaauuu

SEQ ID NO: 417594 - RNA, 22 nt, Artificial Sequence
  Synthetic
aacagacaagaguacauaauuu

SEQ ID NO: 417595 - RNA, 23 nt, Artificial Sequence
  Synthetic
uaacagacaagaguacauaauuu

SEQ ID NO: 417596 - RNA, 24 nt, Artificial Sequence
  Synthetic
auaacagacaagaguacauaauuu

SEQ ID NO: 417597 - RNA, 18 nt, Artificial Sequence
  Synthetic
gcuaaucuggcauaauuu

SEQ ID NO: 417598 - RNA, 19 nt, Artificial Sequence
  Synthetic
ugcuaaucuggcauaauuu

SEQ ID NO: 417599 - RNA, 20 nt, Artificial Sequence
  Synthetic
augcuaaucuggcauaauuu

SEQ ID NO: 417600 - RNA, 21 nt, Artificial Sequence
  Synthetic
aaugcuaaucuggcauaauuu

SEQ ID NO: 417601 - RNA, 22 nt, Artificial Sequence
  Synthetic
aaaugcuaaucuggcauaauuu

SEQ ID NO: 417602 - RNA, 23 nt, Artificial Sequence
  Synthetic
gaaaugcuaaucuggcauaauuu

SEQ ID NO: 417603 - RNA, 24 nt, Artificial Sequence
  Synthetic
ugaaaugcuaaucuggcauaauuu

SEQ ID NO: 417604 - RNA, 18 nt, Artificial Sequence
  Synthetic
ggauuuaugucauaauuu

SEQ ID NO: 417605 - RNA, 19 nt, Artificial Sequence
  Synthetic
aggauuuaugucauaauuu

SEQ ID NO: 417606 - RNA, 20 nt, Artificial Sequence
  Synthetic
aaggauuuaugucauaauuu

SEQ ID NO: 417607 - RNA, 21 nt, Artificial Sequence
  Synthetic
aaaggauuuaugucauaauuu

SEQ ID NO: 417608 - RNA, 22 nt, Artificial Sequence
  Synthetic
uaaaggauuuaugucauaauuu

SEQ ID NO: 417609 - RNA, 23 nt, Artificial Sequence
  Synthetic
auaaaggauuuaugucauaauuu

SEQ ID NO: 417610 - RNA, 24 nt, Artificial Sequence
  Synthetic
aauaaaggauuuaugucauaauuu

SEQ ID NO: 417611 - RNA, 18 nt, Artificial Sequence
  Synthetic
caaagcacuucauaauuu

SEQ ID NO: 417612 - RNA, 19 nt, Artificial Sequence
  Synthetic
acaaagcacuucauaauuu

SEQ ID NO: 417613 - RNA, 20 nt, Artificial Sequence
  Synthetic
aacaaagcacuucauaauuu

SEQ ID NO: 417614 - RNA, 21 nt, Artificial Sequence
  Synthetic
uaacaaagcacuucauaauuu

SEQ ID NO: 417615 - RNA, 22 nt, Artificial Sequence
  Synthetic
auaacaaagcacuucauaauuu

SEQ ID NO: 417616 - RNA, 23 nt, Artificial Sequence
  Synthetic
cauaacaaagcacuucauaauuu

SEQ ID NO: 417617 - RNA, 24 nt, Artificial Sequence
  Synthetic
acauaacaaagcacuucauaauuu

SEQ ID NO: 417618 - RNA, 18 nt, Artificial Sequence
  Synthetic
aaagaaagcugauaauuu

SEQ ID NO: 417619 - RNA, 19 nt, Artificial Sequence
  Synthetic
aaaagaaagcugauaauuu

SEQ ID NO: 417620 - RNA, 20 nt, Artificial Sequence
  Synthetic
aaaaagaaagcugauaauuu

SEQ ID NO: 417621 - RNA, 21 nt, Artificial Sequence
  Synthetic
uaaaaagaaagcugauaauuu

SEQ ID NO: 417622 - RNA, 22 nt, Artificial Sequence
  Synthetic
guaaaaagaaagcugauaauuu

SEQ ID NO: 417623 - RNA, 23 nt, Artificial Sequence
  Synthetic
aguaaaaagaaagcugauaauuu

SEQ ID NO: 417624 - RNA, 24 nt, Artificial Sequence
  Synthetic
uaguaaaaagaaagcugauaauuu

SEQ ID NO: 417625 - RNA, 18 nt, Artificial Sequence
  Synthetic
auccucacuugauaauuu

SEQ ID NO: 417626 - RNA, 19 nt, Artificial Sequence
  Synthetic
uauccucacuugauaauuu

SEQ ID NO: 417627 - RNA, 20 nt, Artificial Sequence
  Synthetic
auauccucacuugauaauuu

SEQ ID NO: 417628 - RNA, 21 nt, Artificial Sequence
  Synthetic
aauauccucacuugauaauuu

SEQ ID NO: 417629 - RNA, 22 nt, Artificial Sequence
  Synthetic
uaauauccucacuugauaauuu

SEQ ID NO: 417630 - RNA, 23 nt, Artificial Sequence
  Synthetic
uuaauauccucacuugauaauuu

SEQ ID NO: 417631 - RNA, 24 nt, Artificial Sequence
  Synthetic
cuuaauauccucacuugauaauuu

SEQ ID NO: 417632 - RNA, 18 nt, Artificial Sequence
  Synthetic
gcacuaugucuauaauuu

SEQ ID NO: 417633 - RNA, 19 nt, Artificial Sequence
  Synthetic
cgcacuaugucuauaauuu

SEQ ID NO: 417634 - RNA, 20 nt, Artificial Sequence
  Synthetic
ucgcacuaugucuauaauuu

SEQ ID NO: 417635 - RNA, 21 nt, Artificial Sequence
  Synthetic
uucgcacuaugucuauaauuu

SEQ ID NO: 417636 - RNA, 22 nt, Artificial Sequence
  Synthetic
cuucgcacuaugucuauaauuu

SEQ ID NO: 417637 - RNA, 23 nt, Artificial Sequence
  Synthetic
ucuucgcacuaugucuauaauuu

SEQ ID NO: 417638 - RNA, 24 nt, Artificial Sequence
  Synthetic
cucuucgcacuaugucuauaauuu

SEQ ID NO: 417639 - RNA, 18 nt, Artificial Sequence
  Synthetic
uguuauuuucuauaauuu

SEQ ID NO: 417640 - RNA, 19 nt, Artificial Sequence
  Synthetic
guguuauuuucuauaauuu

SEQ ID NO: 417641 - RNA, 20 nt, Artificial Sequence
  Synthetic
aguguuauuuucuauaauuu

SEQ ID NO: 417642 - RNA, 21 nt, Artificial Sequence
  Synthetic
caguguuauuuucuauaauuu

SEQ ID NO: 417643 - RNA, 22 nt, Artificial Sequence
  Synthetic
acaguguuauuuucuauaauuu

SEQ ID NO: 417644 - RNA, 23 nt, Artificial Sequence
  Synthetic
aacaguguuauuuucuauaauuu

SEQ ID NO: 417645 - RNA, 24 nt, Artificial Sequence
  Synthetic
uaacaguguuauuuucuauaauuu

SEQ ID NO: 417646 - RNA, 18 nt, Artificial Sequence
  Synthetic
auguugcacuuauaauuu

SEQ ID NO: 417647 - RNA, 19 nt, Artificial Sequence
  Synthetic
aauguugcacuuauaauuu

SEQ ID NO: 417648 - RNA, 20 nt, Artificial Sequence
  Synthetic
gaauguugcacuuauaauuu

SEQ ID NO: 417649 - RNA, 21 nt, Artificial Sequence
  Synthetic
ugaauguugcacuuauaauuu

SEQ ID NO: 417650 - RNA, 22 nt, Artificial Sequence
  Synthetic
cugaauguugcacuuauaauuu

SEQ ID NO: 417651 - RNA, 23 nt, Artificial Sequence
  Synthetic
gcugaauguugcacuuauaauuu

SEQ ID NO: 417652 - RNA, 24 nt, Artificial Sequence
  Synthetic
agcugaauguugcacuuauaauuu

SEQ ID NO: 417653 - RNA, 18 nt, Artificial Sequence
  Synthetic
aggauuuuguuauaauuu

SEQ ID NO: 417654 - RNA, 19 nt, Artificial Sequence
  Synthetic
gaggauuuuguuauaauuu

SEQ ID NO: 417655 - RNA, 20 nt, Artificial Sequence
  Synthetic
ggaggauuuuguuauaauuu

SEQ ID NO: 417656 - RNA, 21 nt, Artificial Sequence
  Synthetic
gggaggauuuuguuauaauuu

SEQ ID NO: 417657 - RNA, 22 nt, Artificial Sequence
  Synthetic
ggggaggauuuuguuauaauuu

SEQ ID NO: 417658 - RNA, 23 nt, Artificial Sequence
  Synthetic
uggggaggauuuuguuauaauuu

SEQ ID NO: 417659 - RNA, 24 nt, Artificial Sequence
  Synthetic
auggggaggauuuuguuauaauuu

SEQ ID NO: 417660 - RNA, 18 nt, Artificial Sequence
  Synthetic
ucuugaguucacuaauuu

SEQ ID NO: 417661 - RNA, 19 nt, Artificial Sequence
  Synthetic
uucuugaguucacuaauuu

SEQ ID NO: 417662 - RNA, 20 nt, Artificial Sequence
  Synthetic
cuucuugaguucacuaauuu

SEQ ID NO: 417663 - RNA, 21 nt, Artificial Sequence
  Synthetic
acuucuugaguucacuaauuu

SEQ ID NO: 417664 - RNA, 22 nt, Artificial Sequence
  Synthetic
uacuucuugaguucacuaauuu

SEQ ID NO: 417665 - RNA, 23 nt, Artificial Sequence
  Synthetic
guacuucuugaguucacuaauuu

SEQ ID NO: 417666 - RNA, 24 nt, Artificial Sequence
  Synthetic
gguacuucuugaguucacuaauuu

SEQ ID NO: 417667 - RNA, 18 nt, Artificial Sequence
  Synthetic
aauugguauuacuaauuu

SEQ ID NO: 417668 - RNA, 19 nt, Artificial Sequence
  Synthetic
uaauugguauuacuaauuu

SEQ ID NO: 417669 - RNA, 20 nt, Artificial Sequence
  Synthetic
uuaauugguauuacuaauuu

SEQ ID NO: 417670 - RNA, 21 nt, Artificial Sequence
  Synthetic
uuuaauugguauuacuaauuu

SEQ ID NO: 417671 - RNA, 22 nt, Artificial Sequence
  Synthetic
auuuaauugguauuacuaauuu

SEQ ID NO: 417672 - RNA, 23 nt, Artificial Sequence
  Synthetic
uauuuaauugguauuacuaauuu

SEQ ID NO: 417673 - RNA, 24 nt, Artificial Sequence
  Synthetic
uuauuuaauugguauuacuaauuu

SEQ ID NO: 417674 - RNA, 18 nt, Artificial Sequence
  Synthetic
uacugagucaucuaauuu

SEQ ID NO: 417675 - RNA, 19 nt, Artificial Sequence
  Synthetic
auacugagucaucuaauuu

SEQ ID NO: 417676 - RNA, 20 nt, Artificial Sequence
  Synthetic
gauacugagucaucuaauuu

SEQ ID NO: 417677 - RNA, 21 nt, Artificial Sequence
  Synthetic
cgauacugagucaucuaauuu

SEQ ID NO: 417678 - RNA, 22 nt, Artificial Sequence
  Synthetic
acgauacugagucaucuaauuu

SEQ ID NO: 417679 - RNA, 23 nt, Artificial Sequence
  Synthetic
uacgauacugagucaucuaauuu

SEQ ID NO: 417680 - RNA, 24 nt, Artificial Sequence
  Synthetic
uuacgauacugagucaucuaauuu

SEQ ID NO: 417681 - RNA, 18 nt, Artificial Sequence
  Synthetic
aaaaaaaaaaaguaauuu

SEQ ID NO: 417682 - RNA, 19 nt, Artificial Sequence
  Synthetic
aaaaaaaaaaaaguaauuu

SEQ ID NO: 417683 - RNA, 20 nt, Artificial Sequence
  Synthetic
aaaaaaaaaaaaaguaauuu

SEQ ID NO: 417684 - RNA, 21 nt, Artificial Sequence
  Synthetic
aaaaaaaaaaaaaaguaauuu

SEQ ID NO: 417685 - RNA, 22 nt, Artificial Sequence
  Synthetic
uaaaaaaaaaaaaaaguaauuu

SEQ ID NO: 417686 - RNA, 23 nt, Artificial Sequence
  Synthetic
uuaaaaaaaaaaaaaaguaauuu

SEQ ID NO: 417687 - RNA, 24 nt, Artificial Sequence
  Synthetic
uuuaaaaaaaaaaaaaaguaauuu

SEQ ID NO: 417688 - RNA, 18 nt, Artificial Sequence
  Synthetic
guucuuuagugguaauuu

SEQ ID NO: 417689 - RNA, 19 nt, Artificial Sequence
  Synthetic
aguucuuuagugguaauuu

SEQ ID NO: 417690 - RNA, 20 nt, Artificial Sequence
  Synthetic
aaguucuuuagugguaauuu

SEQ ID NO: 417691 - RNA, 21 nt, Artificial Sequence
  Synthetic
uaaguucuuuagugguaauuu

SEQ ID NO: 417692 - RNA, 22 nt, Artificial Sequence
  Synthetic
guaaguucuuuagugguaauuu

SEQ ID NO: 417693 - RNA, 23 nt, Artificial Sequence
  Synthetic
aguaaguucuuuagugguaauuu

SEQ ID NO: 417694 - RNA, 24 nt, Artificial Sequence
  Synthetic
gaguaaguucuuuagugguaauuu

SEQ ID NO: 417695 - RNA, 18 nt, Artificial Sequence
  Synthetic
aauauagugugguaauuu

SEQ ID NO: 417696 - RNA, 19 nt, Artificial Sequence
  Synthetic
aaauauagugugguaauuu

SEQ ID NO: 417697 - RNA, 20 nt, Artificial Sequence
  Synthetic
aaaauauagugugguaauuu

SEQ ID NO: 417698 - RNA, 21 nt, Artificial Sequence
  Synthetic
aaaaauauagugugguaauuu

SEQ ID NO: 417699 - RNA, 22 nt, Artificial Sequence
  Synthetic
gaaaaauauagugugguaauuu

SEQ ID NO: 417700 - RNA, 23 nt, Artificial Sequence
  Synthetic
ugaaaaauauagugugguaauuu

SEQ ID NO: 417701 - RNA, 24 nt, Artificial Sequence
  Synthetic
gugaaaaauauagugugguaauuu

SEQ ID NO: 417702 - RNA, 18 nt, Artificial Sequence
  Synthetic
ugcccugauauguaauuu

SEQ ID NO: 417703 - RNA, 19 nt, Artificial Sequence
  Synthetic
uugcccugauauguaauuu

SEQ ID NO: 417704 - RNA, 20 nt, Artificial Sequence
  Synthetic
uuugcccugauauguaauuu

SEQ ID NO: 417705 - RNA, 21 nt, Artificial Sequence
  Synthetic
uuuugcccugauauguaauuu

SEQ ID NO: 417706 - RNA, 22 nt, Artificial Sequence
  Synthetic
cuuuugcccugauauguaauuu

SEQ ID NO: 417707 - RNA, 23 nt, Artificial Sequence
  Synthetic
ucuuuugcccugauauguaauuu

SEQ ID NO: 417708 - RNA, 24 nt, Artificial Sequence
  Synthetic
uucuuuugcccugauauguaauuu

SEQ ID NO: 417709 - RNA, 18 nt, Artificial Sequence
  Synthetic
cuauuaaaacauuaauuu

SEQ ID NO: 417710 - RNA, 19 nt, Artificial Sequence
  Synthetic
acuauuaaaacauuaauuu

SEQ ID NO: 417711 - RNA, 20 nt, Artificial Sequence
  Synthetic
uacuauuaaaacauuaauuu

SEQ ID NO: 417712 - RNA, 21 nt, Artificial Sequence
  Synthetic
auacuauuaaaacauuaauuu

SEQ ID NO: 417713 - RNA, 22 nt, Artificial Sequence
  Synthetic
aauacuauuaaaacauuaauuu

SEQ ID NO: 417714 - RNA, 23 nt, Artificial Sequence
  Synthetic
uaauacuauuaaaacauuaauuu

SEQ ID NO: 417715 - RNA, 24 nt, Artificial Sequence
  Synthetic
cuaauacuauuaaaacauuaauuu

SEQ ID NO: 417716 - RNA, 18 nt, Artificial Sequence
  Synthetic
gaagaaauugauuaauuu

SEQ ID NO: 417717 - RNA, 19 nt, Artificial Sequence
  Synthetic
agaagaaauugauuaauuu

SEQ ID NO: 417718 - RNA, 20 nt, Artificial Sequence
  Synthetic
uagaagaaauugauuaauuu

SEQ ID NO: 417719 - RNA, 21 nt, Artificial Sequence
  Synthetic
cuagaagaaauugauuaauuu

SEQ ID NO: 417720 - RNA, 22 nt, Artificial Sequence
  Synthetic
ucuagaagaaauugauuaauuu

SEQ ID NO: 417721 - RNA, 23 nt, Artificial Sequence
  Synthetic
aucuagaagaaauugauuaauuu

SEQ ID NO: 417722 - RNA, 24 nt, Artificial Sequence
  Synthetic
aaucuagaagaaauugauuaauuu

SEQ ID NO: 417723 - RNA, 18 nt, Artificial Sequence
  Synthetic
uaaaauauguauuaauuu

SEQ ID NO: 417724 - RNA, 19 nt, Artificial Sequence
  Synthetic
auaaaauauguauuaauuu

SEQ ID NO: 417725 - RNA, 20 nt, Artificial Sequence
  Synthetic
aauaaaauauguauuaauuu

SEQ ID NO: 417726 - RNA, 21 nt, Artificial Sequence
  Synthetic
aaauaaaauauguauuaauuu

SEQ ID NO: 417727 - RNA, 22 nt, Artificial Sequence
  Synthetic
aaaauaaaauauguauuaauuu

SEQ ID NO: 417728 - RNA, 23 nt, Artificial Sequence
  Synthetic
caaaauaaaauauguauuaauuu

SEQ ID NO: 417729 - RNA, 24 nt, Artificial Sequence
  Synthetic
acaaaauaaaauauguauuaauuu

SEQ ID NO: 417730 - RNA, 18 nt, Artificial Sequence
  Synthetic
ucaagagaaccuuaauuu

SEQ ID NO: 417731 - RNA, 19 nt, Artificial Sequence
  Synthetic
cucaagagaaccuuaauuu

SEQ ID NO: 417732 - RNA, 20 nt, Artificial Sequence
  Synthetic
ucucaagagaaccuuaauuu

SEQ ID NO: 417733 - RNA, 21 nt, Artificial Sequence
  Synthetic
uucucaagagaaccuuaauuu

SEQ ID NO: 417734 - RNA, 22 nt, Artificial Sequence
  Synthetic
auucucaagagaaccuuaauuu

SEQ ID NO: 417735 - RNA, 23 nt, Artificial Sequence
  Synthetic
cauucucaagagaaccuuaauuu

SEQ ID NO: 417736 - RNA, 24 nt, Artificial Sequence
  Synthetic
ucauucucaagagaaccuuaauuu

SEQ ID NO: 417737 - RNA, 18 nt, Artificial Sequence
  Synthetic
uugcugaugguuuaauuu

SEQ ID NO: 417738 - RNA, 19 nt, Artificial Sequence
  Synthetic
guugcugaugguuuaauuu

SEQ ID NO: 417739 - RNA, 20 nt, Artificial Sequence
  Synthetic
cguugcugaugguuuaauuu

SEQ ID NO: 417740 - RNA, 21 nt, Artificial Sequence
  Synthetic
acguugcugaugguuuaauuu

SEQ ID NO: 417741 - RNA, 22 nt, Artificial Sequence
  Synthetic
cacguugcugaugguuuaauuu

SEQ ID NO: 417742 - RNA, 23 nt, Artificial Sequence
  Synthetic
acacguugcugaugguuuaauuu

SEQ ID NO: 417743 - RNA, 24 nt, Artificial Sequence
  Synthetic
aacacguugcugaugguuuaauuu

SEQ ID NO: 417744 - RNA, 18 nt, Artificial Sequence
  Synthetic
uuaauuuaacaaacauuu

SEQ ID NO: 417745 - RNA, 19 nt, Artificial Sequence
  Synthetic
guuaauuuaacaaacauuu

SEQ ID NO: 417746 - RNA, 20 nt, Artificial Sequence
  Synthetic
uguuaauuuaacaaacauuu

SEQ ID NO: 417747 - RNA, 21 nt, Artificial Sequence
  Synthetic
guguuaauuuaacaaacauuu

SEQ ID NO: 417748 - RNA, 22 nt, Artificial Sequence
  Synthetic
cguguuaauuuaacaaacauuu

SEQ ID NO: 417749 - RNA, 23 nt, Artificial Sequence
  Synthetic
acguguuaauuuaacaaacauuu

SEQ ID NO: 417750 - RNA, 24 nt, Artificial Sequence
  Synthetic
cacguguuaauuuaacaaacauuu

SEQ ID NO: 417751 - RNA, 18 nt, Artificial Sequence
  Synthetic
uagggaauagcaacauuu

SEQ ID NO: 417752 - RNA, 19 nt, Artificial Sequence
  Synthetic
cuagggaauagcaacauuu

SEQ ID NO: 417753 - RNA, 20 nt, Artificial Sequence
  Synthetic
ccuagggaauagcaacauuu

SEQ ID NO: 417754 - RNA, 21 nt, Artificial Sequence
  Synthetic
cccuagggaauagcaacauuu

SEQ ID NO: 417755 - RNA, 22 nt, Artificial Sequence
  Synthetic
ccccuagggaauagcaacauuu

SEQ ID NO: 417756 - RNA, 23 nt, Artificial Sequence
  Synthetic
accccuagggaauagcaacauuu

SEQ ID NO: 417757 - RNA, 24 nt, Artificial Sequence
  Synthetic
gaccccuagggaauagcaacauuu

SEQ ID NO: 417758 - RNA, 18 nt, Artificial Sequence
  Synthetic
auaacgugaugaacauuu

SEQ ID NO: 417759 - RNA, 19 nt, Artificial Sequence
  Synthetic
aauaacgugaugaacauuu

SEQ ID NO: 417760 - RNA, 20 nt, Artificial Sequence
  Synthetic
aaauaacgugaugaacauuu

SEQ ID NO: 417761 - RNA, 21 nt, Artificial Sequence
  Synthetic
aaaauaacgugaugaacauuu

SEQ ID NO: 417762 - RNA, 22 nt, Artificial Sequence
  Synthetic
gaaaauaacgugaugaacauuu

SEQ ID NO: 417763 - RNA, 23 nt, Artificial Sequence
  Synthetic
ugaaaauaacgugaugaacauuu

SEQ ID NO: 417764 - RNA, 24 nt, Artificial Sequence
  Synthetic
gugaaaauaacgugaugaacauuu

SEQ ID NO: 417765 - RNA, 18 nt, Artificial Sequence
  Synthetic
aagagucuaugaacauuu

SEQ ID NO: 417766 - RNA, 19 nt, Artificial Sequence
  Synthetic
caagagucuaugaacauuu

SEQ ID NO: 417767 - RNA, 20 nt, Artificial Sequence
  Synthetic
ucaagagucuaugaacauuu

SEQ ID NO: 417768 - RNA, 21 nt, Artificial Sequence
  Synthetic
aucaagagucuaugaacauuu

SEQ ID NO: 417769 - RNA, 22 nt, Artificial Sequence
  Synthetic
aaucaagagucuaugaacauuu

SEQ ID NO: 417770 - RNA, 23 nt, Artificial Sequence
  Synthetic
aaaucaagagucuaugaacauuu

SEQ ID NO: 417771 - RNA, 24 nt, Artificial Sequence
  Synthetic
aaaaucaagagucuaugaacauuu

SEQ ID NO: 417772 - RNA, 18 nt, Artificial Sequence
  Synthetic
gaggacauuauaacauuu

SEQ ID NO: 417773 - RNA, 19 nt, Artificial Sequence
  Synthetic
cgaggacauuauaacauuu

SEQ ID NO: 417774 - RNA, 20 nt, Artificial Sequence
  Synthetic
ccgaggacauuauaacauuu

SEQ ID NO: 417775 - RNA, 21 nt, Artificial Sequence
  Synthetic
accgaggacauuauaacauuu

SEQ ID NO: 417776 - RNA, 22 nt, Artificial Sequence
  Synthetic
aaccgaggacauuauaacauuu

SEQ ID NO: 417777 - RNA, 23 nt, Artificial Sequence
  Synthetic
aaaccgaggacauuauaacauuu

SEQ ID NO: 417778 - RNA, 24 nt, Artificial Sequence
  Synthetic
uaaaccgaggacauuauaacauuu

SEQ ID NO: 417779 - RNA, 18 nt, Artificial Sequence
  Synthetic
ucauuucuacuaacauuu

SEQ ID NO: 417780 - RNA, 19 nt, Artificial Sequence
  Synthetic
uucauuucuacuaacauuu

SEQ ID NO: 417781 - RNA, 20 nt, Artificial Sequence
  Synthetic
auucauuucuacuaacauuu

SEQ ID NO: 417782 - RNA, 21 nt, Artificial Sequence
  Synthetic
cauucauuucuacuaacauuu

SEQ ID NO: 417783 - RNA, 22 nt, Artificial Sequence
  Synthetic
ccauucauuucuacuaacauuu

SEQ ID NO: 417784 - RNA, 23 nt, Artificial Sequence
  Synthetic
uccauucauuucuacuaacauuu

SEQ ID NO: 417785 - RNA, 24 nt, Artificial Sequence
  Synthetic
auccauucauuucuacuaacauuu

SEQ ID NO: 417786 - RNA, 18 nt, Artificial Sequence
  Synthetic
uaugguaugcuaacauuu

SEQ ID NO: 417787 - RNA, 19 nt, Artificial Sequence
  Synthetic
cuaugguaugcuaacauuu

SEQ ID NO: 417788 - RNA, 20 nt, Artificial Sequence
  Synthetic
acuaugguaugcuaacauuu

SEQ ID NO: 417789 - RNA, 21 nt, Artificial Sequence
  Synthetic
aacuaugguaugcuaacauuu

SEQ ID NO: 417790 - RNA, 22 nt, Artificial Sequence
  Synthetic
aaacuaugguaugcuaacauuu

SEQ ID NO: 417791 - RNA, 23 nt, Artificial Sequence
  Synthetic
aaaacuaugguaugcuaacauuu

SEQ ID NO: 417792 - RNA, 24 nt, Artificial Sequence
  Synthetic
gaaaacuaugguaugcuaacauuu

SEQ ID NO: 417793 - RNA, 18 nt, Artificial Sequence
  Synthetic
cugaaucccaacacauuu

SEQ ID NO: 417794 - RNA, 19 nt, Artificial Sequence
  Synthetic
ucugaaucccaacacauuu

SEQ ID NO: 417795 - RNA, 20 nt, Artificial Sequence
  Synthetic
uucugaaucccaacacauuu

SEQ ID NO: 417796 - RNA, 21 nt, Artificial Sequence
  Synthetic
cuucugaaucccaacacauuu

SEQ ID NO: 417797 - RNA, 22 nt, Artificial Sequence
  Synthetic
ucuucugaaucccaacacauuu

SEQ ID NO: 417798 - RNA, 23 nt, Artificial Sequence
  Synthetic
uucuucugaaucccaacacauuu

SEQ ID NO: 417799 - RNA, 24 nt, Artificial Sequence
  Synthetic
auucuucugaaucccaacacauuu

SEQ ID NO: 417800 - RNA, 18 nt, Artificial Sequence
  Synthetic
ucuuccuggaacacauuu

SEQ ID NO: 417801 - RNA, 19 nt, Artificial Sequence
  Synthetic
cucuuccuggaacacauuu

SEQ ID NO: 417802 - RNA, 20 nt, Artificial Sequence
  Synthetic
ucucuuccuggaacacauuu

SEQ ID NO: 417803 - RNA, 21 nt, Artificial Sequence
  Synthetic
cucucuuccuggaacacauuu

SEQ ID NO: 417804 - RNA, 22 nt, Artificial Sequence
  Synthetic
ucucucuuccuggaacacauuu

SEQ ID NO: 417805 - RNA, 23 nt, Artificial Sequence
  Synthetic
aucucucuuccuggaacacauuu

SEQ ID NO: 417806 - RNA, 24 nt, Artificial Sequence
  Synthetic
uaucucucuuccuggaacacauuu

SEQ ID NO: 417807 - RNA, 18 nt, Artificial Sequence
  Synthetic
ucaccuaaugacacauuu

SEQ ID NO: 417808 - RNA, 19 nt, Artificial Sequence
  Synthetic
gucaccuaaugacacauuu

SEQ ID NO: 417809 - RNA, 20 nt, Artificial Sequence
  Synthetic
agucaccuaaugacacauuu

SEQ ID NO: 417810 - RNA, 21 nt, Artificial Sequence
  Synthetic
uagucaccuaaugacacauuu

SEQ ID NO: 417811 - RNA, 22 nt, Artificial Sequence
  Synthetic
guagucaccuaaugacacauuu

SEQ ID NO: 417812 - RNA, 23 nt, Artificial Sequence
  Synthetic
uguagucaccuaaugacacauuu

SEQ ID NO: 417813 - RNA, 24 nt, Artificial Sequence
  Synthetic
uuguagucaccuaaugacacauuu

SEQ ID NO: 417814 - RNA, 18 nt, Artificial Sequence
  Synthetic
guucagcaaaccacauuu

SEQ ID NO: 417815 - RNA, 19 nt, Artificial Sequence
  Synthetic
uguucagcaaaccacauuu

SEQ ID NO: 417816 - RNA, 20 nt, Artificial Sequence
  Synthetic
cuguucagcaaaccacauuu

SEQ ID NO: 417817 - RNA, 21 nt, Artificial Sequence
  Synthetic
acuguucagcaaaccacauuu

SEQ ID NO: 417818 - RNA, 22 nt, Artificial Sequence
  Synthetic
uacuguucagcaaaccacauuu

SEQ ID NO: 417819 - RNA, 23 nt, Artificial Sequence
  Synthetic
cuacuguucagcaaaccacauuu

SEQ ID NO: 417820 - RNA, 24 nt, Artificial Sequence
  Synthetic
acuacuguucagcaaaccacauuu

SEQ ID NO: 417821 - RNA, 18 nt, Artificial Sequence
  Synthetic
gguccccagaccacauuu

SEQ ID NO: 417822 - RNA, 19 nt, Artificial Sequence
  Synthetic
ggguccccagaccacauuu

SEQ ID NO: 417823 - RNA, 20 nt, Artificial Sequence
  Synthetic
gggguccccagaccacauuu

SEQ ID NO: 417824 - RNA, 21 nt, Artificial Sequence
  Synthetic
agggguccccagaccacauuu

SEQ ID NO: 417825 - RNA, 22 nt, Artificial Sequence
  Synthetic
cagggguccccagaccacauuu

SEQ ID NO: 417826 - RNA, 23 nt, Artificial Sequence
  Synthetic
ccagggguccccagaccacauuu

SEQ ID NO: 417827 - RNA, 24 nt, Artificial Sequence
  Synthetic
cccagggguccccagaccacauuu

SEQ ID NO: 417828 - RNA, 18 nt, Artificial Sequence
  Synthetic
ugucagcuagccacauuu

SEQ ID NO: 417829 - RNA, 19 nt, Artificial Sequence
  Synthetic
uugucagcuagccacauuu

SEQ ID NO: 417830 - RNA, 20 nt, Artificial Sequence
  Synthetic
uuugucagcuagccacauuu

SEQ ID NO: 417831 - RNA, 21 nt, Artificial Sequence
  Synthetic
uuuugucagcuagccacauuu

SEQ ID NO: 417832 - RNA, 22 nt, Artificial Sequence
  Synthetic
auuuugucagcuagccacauuu

SEQ ID NO: 417833 - RNA, 23 nt, Artificial Sequence
  Synthetic
uauuuugucagcuagccacauuu

SEQ ID NO: 417834 - RNA, 24 nt, Artificial Sequence
  Synthetic
guauuuugucagcuagccacauuu

SEQ ID NO: 417835 - RNA, 18 nt, Artificial Sequence
  Synthetic
caacauuucuucacauuu

SEQ ID NO: 417836 - RNA, 19 nt, Artificial Sequence
  Synthetic
ucaacauuucuucacauuu

SEQ ID NO: 417837 - RNA, 20 nt, Artificial Sequence
  Synthetic
aucaacauuucuucacauuu

SEQ ID NO: 417838 - RNA, 21 nt, Artificial Sequence
  Synthetic
caucaacauuucuucacauuu

SEQ ID NO: 417839 - RNA, 22 nt, Artificial Sequence
  Synthetic
acaucaacauuucuucacauuu

SEQ ID NO: 417840 - RNA, 23 nt, Artificial Sequence
  Synthetic
uacaucaacauuucuucacauuu

SEQ ID NO: 417841 - RNA, 24 nt, Artificial Sequence
  Synthetic
uuacaucaacauuucuucacauuu

SEQ ID NO: 417842 - RNA, 18 nt, Artificial Sequence
  Synthetic
cccaaguauuucacauuu

SEQ ID NO: 417843 - RNA, 19 nt, Artificial Sequence
  Synthetic
ccccaaguauuucacauuu

SEQ ID NO: 417844 - RNA, 20 nt, Artificial Sequence
  Synthetic
uccccaaguauuucacauuu

SEQ ID NO: 417845 - RNA, 21 nt, Artificial Sequence
  Synthetic
cuccccaaguauuucacauuu

SEQ ID NO: 417846 - RNA, 22 nt, Artificial Sequence
  Synthetic
acuccccaaguauuucacauuu

SEQ ID NO: 417847 - RNA, 23 nt, Artificial Sequence
  Synthetic
uacuccccaaguauuucacauuu

SEQ ID NO: 417848 - RNA, 24 nt, Artificial Sequence
  Synthetic
cuacuccccaaguauuucacauuu

SEQ ID NO: 417849 - RNA, 18 nt, Artificial Sequence
  Synthetic
accagagauaggacauuu

SEQ ID NO: 417850 - RNA, 19 nt, Artificial Sequence
  Synthetic
gaccagagauaggacauuu

SEQ ID NO: 417851 - RNA, 20 nt, Artificial Sequence
  Synthetic
ugaccagagauaggacauuu

SEQ ID NO: 417852 - RNA, 21 nt, Artificial Sequence
  Synthetic
augaccagagauaggacauuu

SEQ ID NO: 417853 - RNA, 22 nt, Artificial Sequence
  Synthetic
caugaccagagauaggacauuu

SEQ ID NO: 417854 - RNA, 23 nt, Artificial Sequence
  Synthetic
gcaugaccagagauaggacauuu

SEQ ID NO: 417855 - RNA, 24 nt, Artificial Sequence
  Synthetic
agcaugaccagagauaggacauuu

SEQ ID NO: 417856 - RNA, 18 nt, Artificial Sequence
  Synthetic
acucuaucuaggacauuu

SEQ ID NO: 417857 - RNA, 19 nt, Artificial Sequence
  Synthetic
aacucuaucuaggacauuu

SEQ ID NO: 417858 - RNA, 20 nt, Artificial Sequence
  Synthetic
gaacucuaucuaggacauuu

SEQ ID NO: 417859 - RNA, 21 nt, Artificial Sequence
  Synthetic
ggaacucuaucuaggacauuu

SEQ ID NO: 417860 - RNA, 22 nt, Artificial Sequence
  Synthetic
gggaacucuaucuaggacauuu

SEQ ID NO: 417861 - RNA, 23 nt, Artificial Sequence
  Synthetic
ggggaacucuaucuaggacauuu

SEQ ID NO: 417862 - RNA, 24 nt, Artificial Sequence
  Synthetic
aggggaacucuaucuaggacauuu

SEQ ID NO: 417863 - RNA, 18 nt, Artificial Sequence
  Synthetic
cugugcacacugacauuu

SEQ ID NO: 417864 - RNA, 19 nt, Artificial Sequence
  Synthetic
ccugugcacacugacauuu

SEQ ID NO: 417865 - RNA, 20 nt, Artificial Sequence
  Synthetic
uccugugcacacugacauuu

SEQ ID NO: 417866 - RNA, 21 nt, Artificial Sequence
  Synthetic
auccugugcacacugacauuu

SEQ ID NO: 417867 - RNA, 22 nt, Artificial Sequence
  Synthetic
aauccugugcacacugacauuu

SEQ ID NO: 417868 - RNA, 23 nt, Artificial Sequence
  Synthetic
gaauccugugcacacugacauuu

SEQ ID NO: 417869 - RNA, 24 nt, Artificial Sequence
  Synthetic
ugaauccugugcacacugacauuu

SEQ ID NO: 417870 - RNA, 18 nt, Artificial Sequence
  Synthetic
uuucccccauugacauuu

SEQ ID NO: 417871 - RNA, 19 nt, Artificial Sequence
  Synthetic
guuucccccauugacauuu

SEQ ID NO: 417872 - RNA, 20 nt, Artificial Sequence
  Synthetic
aguuucccccauugacauuu

SEQ ID NO: 417873 - RNA, 21 nt, Artificial Sequence
  Synthetic
aaguuucccccauugacauuu

SEQ ID NO: 417874 - RNA, 22 nt, Artificial Sequence
  Synthetic
caaguuucccccauugacauuu

SEQ ID NO: 417875 - RNA, 23 nt, Artificial Sequence
  Synthetic
ccaaguuucccccauugacauuu

SEQ ID NO: 417876 - RNA, 24 nt, Artificial Sequence
  Synthetic
uccaaguuucccccauugacauuu

SEQ ID NO: 417877 - RNA, 18 nt, Artificial Sequence
  Synthetic
aacgaagucuugacauuu

SEQ ID NO: 417878 - RNA, 19 nt, Artificial Sequence
  Synthetic
uaacgaagucuugacauuu

SEQ ID NO: 417879 - RNA, 20 nt, Artificial Sequence
  Synthetic
auaacgaagucuugacauuu

SEQ ID NO: 417880 - RNA, 21 nt, Artificial Sequence
  Synthetic
uauaacgaagucuugacauuu

SEQ ID NO: 417881 - RNA, 22 nt, Artificial Sequence
  Synthetic
uuauaacgaagucuugacauuu

SEQ ID NO: 417882 - RNA, 23 nt, Artificial Sequence
  Synthetic
auuauaacgaagucuugacauuu

SEQ ID NO: 417883 - RNA, 24 nt, Artificial Sequence
  Synthetic
aauuauaacgaagucuugacauuu

SEQ ID NO: 417884 - RNA, 18 nt, Artificial Sequence
  Synthetic
ccagcuccugauacauuu

SEQ ID NO: 417885 - RNA, 19 nt, Artificial Sequence
  Synthetic
uccagcuccugauacauuu

SEQ ID NO: 417886 - RNA, 20 nt, Artificial Sequence
  Synthetic
guccagcuccugauacauuu

SEQ ID NO: 417887 - RNA, 21 nt, Artificial Sequence
  Synthetic
gguccagcuccugauacauuu

SEQ ID NO: 417888 - RNA, 22 nt, Artificial Sequence
  Synthetic
ggguccagcuccugauacauuu

SEQ ID NO: 417889 - RNA, 23 nt, Artificial Sequence
  Synthetic
aggguccagcuccugauacauuu

SEQ ID NO: 417890 - RNA, 24 nt, Artificial Sequence
  Synthetic
gaggguccagcuccugauacauuu

SEQ ID NO: 417891 - RNA, 18 nt, Artificial Sequence
  Synthetic
uuggaucauccuacauuu

SEQ ID NO: 417892 - RNA, 19 nt, Artificial Sequence
  Synthetic
guuggaucauccuacauuu

SEQ ID NO: 417893 - RNA, 20 nt, Artificial Sequence
  Synthetic
uguuggaucauccuacauuu

SEQ ID NO: 417894 - RNA, 21 nt, Artificial Sequence
  Synthetic
cuguuggaucauccuacauuu

SEQ ID NO: 417895 - RNA, 22 nt, Artificial Sequence
  Synthetic
acuguuggaucauccuacauuu

SEQ ID NO: 417896 - RNA, 23 nt, Artificial Sequence
  Synthetic
aacuguuggaucauccuacauuu

SEQ ID NO: 417897 - RNA, 24 nt, Artificial Sequence
  Synthetic
gaacuguuggaucauccuacauuu

SEQ ID NO: 417898 - RNA, 18 nt, Artificial Sequence
  Synthetic
gaugagaauucuacauuu

SEQ ID NO: 417899 - RNA, 19 nt, Artificial Sequence
  Synthetic
agaugagaauucuacauuu

SEQ ID NO: 417900 - RNA, 20 nt, Artificial Sequence
  Synthetic
uagaugagaauucuacauuu

SEQ ID NO: 417901 - RNA, 21 nt, Artificial Sequence
  Synthetic
uuagaugagaauucuacauuu

SEQ ID NO: 417902 - RNA, 22 nt, Artificial Sequence
  Synthetic
cuuagaugagaauucuacauuu

SEQ ID NO: 417903 - RNA, 23 nt, Artificial Sequence
  Synthetic
gcuuagaugagaauucuacauuu

SEQ ID NO: 417904 - RNA, 24 nt, Artificial Sequence
  Synthetic
ugcuuagaugagaauucuacauuu

SEQ ID NO: 417905 - RNA, 18 nt, Artificial Sequence
  Synthetic
ucagaauuuaguacauuu

SEQ ID NO: 417906 - RNA, 19 nt, Artificial Sequence
  Synthetic
uucagaauuuaguacauuu

SEQ ID NO: 417907 - RNA, 20 nt, Artificial Sequence
  Synthetic
cuucagaauuuaguacauuu

SEQ ID NO: 417908 - RNA, 21 nt, Artificial Sequence
  Synthetic
ucuucagaauuuaguacauuu

SEQ ID NO: 417909 - RNA, 22 nt, Artificial Sequence
  Synthetic
uucuucagaauuuaguacauuu

SEQ ID NO: 417910 - RNA, 23 nt, Artificial Sequence
  Synthetic
auucuucagaauuuaguacauuu

SEQ ID NO: 417911 - RNA, 24 nt, Artificial Sequence
  Synthetic
uauucuucagaauuuaguacauuu

SEQ ID NO: 417912 - RNA, 18 nt, Artificial Sequence
  Synthetic
aaaacauuaauuacauuu

SEQ ID NO: 417913 - RNA, 19 nt, Artificial Sequence
  Synthetic
aaaaacauuaauuacauuu

SEQ ID NO: 417914 - RNA, 20 nt, Artificial Sequence
  Synthetic
uaaaaacauuaauuacauuu

SEQ ID NO: 417915 - RNA, 21 nt, Artificial Sequence
  Synthetic
cuaaaaacauuaauuacauuu

SEQ ID NO: 417916 - RNA, 22 nt, Artificial Sequence
  Synthetic
gcuaaaaacauuaauuacauuu

SEQ ID NO: 417917 - RNA, 23 nt, Artificial Sequence
  Synthetic
ggcuaaaaacauuaauuacauuu

SEQ ID NO: 417918 - RNA, 24 nt, Artificial Sequence
  Synthetic
aggcuaaaaacauuaauuacauuu

SEQ ID NO: 417919 - RNA, 18 nt, Artificial Sequence
  Synthetic
auugggcguguuacauuu

SEQ ID NO: 417920 - RNA, 19 nt, Artificial Sequence
  Synthetic
cauugggcguguuacauuu

SEQ ID NO: 417921 - RNA, 20 nt, Artificial Sequence
  Synthetic
gcauugggcguguuacauuu

SEQ ID NO: 417922 - RNA, 21 nt, Artificial Sequence
  Synthetic
ggcauugggcguguuacauuu

SEQ ID NO: 417923 - RNA, 22 nt, Artificial Sequence
  Synthetic
gggcauugggcguguuacauuu

SEQ ID NO: 417924 - RNA, 23 nt, Artificial Sequence
  Synthetic
ggggcauugggcguguuacauuu

SEQ ID NO: 417925 - RNA, 24 nt, Artificial Sequence
  Synthetic
uggggcauugggcguguuacauuu

SEQ ID NO: 417926 - RNA, 18 nt, Artificial Sequence
  Synthetic
agaaguugguuuacauuu

SEQ ID NO: 417927 - RNA, 19 nt, Artificial Sequence
  Synthetic
uagaaguugguuuacauuu

SEQ ID NO: 417928 - RNA, 20 nt, Artificial Sequence
  Synthetic
cuagaaguugguuuacauuu

SEQ ID NO: 417929 - RNA, 21 nt, Artificial Sequence
  Synthetic
ccuagaaguugguuuacauuu

SEQ ID NO: 417930 - RNA, 22 nt, Artificial Sequence
  Synthetic
gccuagaaguugguuuacauuu

SEQ ID NO: 417931 - RNA, 23 nt, Artificial Sequence
  Synthetic
agccuagaaguugguuuacauuu

SEQ ID NO: 417932 - RNA, 24 nt, Artificial Sequence
  Synthetic
aagccuagaaguugguuuacauuu

SEQ ID NO: 417933 - RNA, 18 nt, Artificial Sequence
  Synthetic
caagaaauaagaccauuu

SEQ ID NO: 417934 - RNA, 19 nt, Artificial Sequence
  Synthetic
gcaagaaauaagaccauuu

SEQ ID NO: 417935 - RNA, 20 nt, Artificial Sequence
  Synthetic
ugcaagaaauaagaccauuu

SEQ ID NO: 417936 - RNA, 21 nt, Artificial Sequence
  Synthetic
uugcaagaaauaagaccauuu

SEQ ID NO: 417937 - RNA, 22 nt, Artificial Sequence
  Synthetic
uuugcaagaaauaagaccauuu

SEQ ID NO: 417938 - RNA, 23 nt, Artificial Sequence
  Synthetic
guuugcaagaaauaagaccauuu

SEQ ID NO: 417939 - RNA, 24 nt, Artificial Sequence
  Synthetic
uguuugcaagaaauaagaccauuu

SEQ ID NO: 417940 - RNA, 18 nt, Artificial Sequence
  Synthetic
ugugugauuugaccauuu

SEQ ID NO: 417941 - RNA, 19 nt, Artificial Sequence
  Synthetic
uugugugauuugaccauuu

SEQ ID NO: 417942 - RNA, 20 nt, Artificial Sequence
  Synthetic
auugugugauuugaccauuu

SEQ ID NO: 417943 - RNA, 21 nt, Artificial Sequence
  Synthetic
cauugugugauuugaccauuu

SEQ ID NO: 417944 - RNA, 22 nt, Artificial Sequence
  Synthetic
ccauugugugauuugaccauuu

SEQ ID NO: 417945 - RNA, 23 nt, Artificial Sequence
  Synthetic
gccauugugugauuugaccauuu

SEQ ID NO: 417946 - RNA, 24 nt, Artificial Sequence
  Synthetic
agccauugugugauuugaccauuu

SEQ ID NO: 417947 - RNA, 18 nt, Artificial Sequence
  Synthetic
cccccaccacuaccauuu

SEQ ID NO: 417948 - RNA, 19 nt, Artificial Sequence
  Synthetic
acccccaccacuaccauuu

SEQ ID NO: 417949 - RNA, 20 nt, Artificial Sequence
  Synthetic
aacccccaccacuaccauuu

SEQ ID NO: 417950 - RNA, 21 nt, Artificial Sequence
  Synthetic
uaacccccaccacuaccauuu

SEQ ID NO: 417951 - RNA, 22 nt, Artificial Sequence
  Synthetic
guaacccccaccacuaccauuu

SEQ ID NO: 417952 - RNA, 23 nt, Artificial Sequence
  Synthetic
cguaacccccaccacuaccauuu

SEQ ID NO: 417953 - RNA, 24 nt, Artificial Sequence
  Synthetic
ccguaacccccaccacuaccauuu

SEQ ID NO: 417954 - RNA, 18 nt, Artificial Sequence
  Synthetic
ccuuccgagaccccauuu

SEQ ID NO: 417955 - RNA, 19 nt, Artificial Sequence
  Synthetic
gccuuccgagaccccauuu

SEQ ID NO: 417956 - RNA, 20 nt, Artificial Sequence
  Synthetic
cgccuuccgagaccccauuu

SEQ ID NO: 417957 - RNA, 21 nt, Artificial Sequence
  Synthetic
ccgccuuccgagaccccauuu

SEQ ID NO: 417958 - RNA, 22 nt, Artificial Sequence
  Synthetic
cccgccuuccgagaccccauuu

SEQ ID NO: 417959 - RNA, 23 nt, Artificial Sequence
  Synthetic
ccccgccuuccgagaccccauuu

SEQ ID NO: 417960 - RNA, 24 nt, Artificial Sequence
  Synthetic
uccccgccuuccgagaccccauuu

SEQ ID NO: 417961 - RNA, 18 nt, Artificial Sequence
  Synthetic
aaauuacuacucccauuu

SEQ ID NO: 417962 - RNA, 19 nt, Artificial Sequence
  Synthetic
aaaauuacuacucccauuu

SEQ ID NO: 417963 - RNA, 20 nt, Artificial Sequence
  Synthetic
uaaaauuacuacucccauuu

SEQ ID NO: 417964 - RNA, 21 nt, Artificial Sequence
  Synthetic
auaaaauuacuacucccauuu

SEQ ID NO: 417965 - RNA, 22 nt, Artificial Sequence
  Synthetic
gauaaaauuacuacucccauuu

SEQ ID NO: 417966 - RNA, 23 nt, Artificial Sequence
  Synthetic
agauaaaauuacuacucccauuu

SEQ ID NO: 417967 - RNA, 24 nt, Artificial Sequence
  Synthetic
uagauaaaauuacuacucccauuu

SEQ ID NO: 417968 - RNA, 18 nt, Artificial Sequence
  Synthetic
aaaaaucaaaagccauuu

SEQ ID NO: 417969 - RNA, 19 nt, Artificial Sequence
  Synthetic
gaaaaaucaaaagccauuu

SEQ ID NO: 417970 - RNA, 20 nt, Artificial Sequence
  Synthetic
ggaaaaaucaaaagccauuu

SEQ ID NO: 417971 - RNA, 21 nt, Artificial Sequence
  Synthetic
gggaaaaaucaaaagccauuu

SEQ ID NO: 417972 - RNA, 22 nt, Artificial Sequence
  Synthetic
ggggaaaaaucaaaagccauuu

SEQ ID NO: 417973 - RNA, 23 nt, Artificial Sequence
  Synthetic
gggggaaaaaucaaaagccauuu

SEQ ID NO: 417974 - RNA, 24 nt, Artificial Sequence
  Synthetic
agggggaaaaaucaaaagccauuu

SEQ ID NO: 417975 - RNA, 18 nt, Artificial Sequence
  Synthetic
uuuguguacaagccauuu

SEQ ID NO: 417976 - RNA, 19 nt, Artificial Sequence
  Synthetic
auuuguguacaagccauuu

SEQ ID NO: 417977 - RNA, 20 nt, Artificial Sequence
  Synthetic
cauuuguguacaagccauuu

SEQ ID NO: 417978 - RNA, 21 nt, Artificial Sequence
  Synthetic
acauuuguguacaagccauuu

SEQ ID NO: 417979 - RNA, 22 nt, Artificial Sequence
  Synthetic
gacauuuguguacaagccauuu

SEQ ID NO: 417980 - RNA, 23 nt, Artificial Sequence
  Synthetic
ggacauuuguguacaagccauuu

SEQ ID NO: 417981 - RNA, 24 nt, Artificial Sequence
  Synthetic
uggacauuuguguacaagccauuu

SEQ ID NO: 417982 - RNA, 18 nt, Artificial Sequence
  Synthetic
aaagaugugaggccauuu

SEQ ID NO: 417983 - RNA, 19 nt, Artificial Sequence
  Synthetic
uaaagaugugaggccauuu

SEQ ID NO: 417984 - RNA, 20 nt, Artificial Sequence
  Synthetic
auaaagaugugaggccauuu

SEQ ID NO: 417985 - RNA, 21 nt, Artificial Sequence
  Synthetic
uauaaagaugugaggccauuu

SEQ ID NO: 417986 - RNA, 22 nt, Artificial Sequence
  Synthetic
auauaaagaugugaggccauuu

SEQ ID NO: 417987 - RNA, 23 nt, Artificial Sequence
  Synthetic
cauauaaagaugugaggccauuu

SEQ ID NO: 417988 - RNA, 24 nt, Artificial Sequence
  Synthetic
ucauauaaagaugugaggccauuu

SEQ ID NO: 417989 - RNA, 18 nt, Artificial Sequence
  Synthetic
ucccuauaaaauccauuu

SEQ ID NO: 417990 - RNA, 19 nt, Artificial Sequence
  Synthetic
aucccuauaaaauccauuu

SEQ ID NO: 417991 - RNA, 20 nt, Artificial Sequence
  Synthetic
aaucccuauaaaauccauuu

SEQ ID NO: 417992 - RNA, 21 nt, Artificial Sequence
  Synthetic
aaaucccuauaaaauccauuu

SEQ ID NO: 417993 - RNA, 22 nt, Artificial Sequence
  Synthetic
uaaaucccuauaaaauccauuu

SEQ ID NO: 417994 - RNA, 23 nt, Artificial Sequence
  Synthetic
auaaaucccuauaaaauccauuu

SEQ ID NO: 417995 - RNA, 24 nt, Artificial Sequence
  Synthetic
uauaaaucccuauaaaauccauuu

SEQ ID NO: 417996 - RNA, 18 nt, Artificial Sequence
  Synthetic
ccuuuccucacuccauuu

SEQ ID NO: 417997 - RNA, 19 nt, Artificial Sequence
  Synthetic
uccuuuccucacuccauuu

SEQ ID NO: 417998 - RNA, 20 nt, Artificial Sequence
  Synthetic
cuccuuuccucacuccauuu

SEQ ID NO: 417999 - RNA, 21 nt, Artificial Sequence
  Synthetic
ucuccuuuccucacuccauuu

SEQ ID NO: 418000 - RNA, 22 nt, Artificial Sequence
  Synthetic
aucuccuuuccucacuccauuu

SEQ ID NO: 418001 - RNA, 23 nt, Artificial Sequence
  Synthetic
aaucuccuuuccucacuccauuu

SEQ ID NO: 418002 - RNA, 24 nt, Artificial Sequence
  Synthetic
uaaucuccuuuccucacuccauuu

SEQ ID NO: 418003 - RNA, 18 nt, Artificial Sequence
  Synthetic
ugaucagucacuccauuu

SEQ ID NO: 418004 - RNA, 19 nt, Artificial Sequence
  Synthetic
uugaucagucacuccauuu

SEQ ID NO: 418005 - RNA, 20 nt, Artificial Sequence
  Synthetic
uuugaucagucacuccauuu

SEQ ID NO: 418006 - RNA, 21 nt, Artificial Sequence
  Synthetic
uuuugaucagucacuccauuu

SEQ ID NO: 418007 - RNA, 22 nt, Artificial Sequence
  Synthetic
cuuuugaucagucacuccauuu

SEQ ID NO: 418008 - RNA, 23 nt, Artificial Sequence
  Synthetic
ccuuuugaucagucacuccauuu

SEQ ID NO: 418009 - RNA, 24 nt, Artificial Sequence
  Synthetic
accuuuugaucagucacuccauuu

SEQ ID NO: 418010 - RNA, 18 nt, Artificial Sequence
  Synthetic
aucucagaaccuccauuu

SEQ ID NO: 418011 - RNA, 19 nt, Artificial Sequence
  Synthetic
caucucagaaccuccauuu

SEQ ID NO: 418012 - RNA, 20 nt, Artificial Sequence
  Synthetic
ucaucucagaaccuccauuu

SEQ ID NO: 418013 - RNA, 21 nt, Artificial Sequence
  Synthetic
uucaucucagaaccuccauuu

SEQ ID NO: 418014 - RNA, 22 nt, Artificial Sequence
  Synthetic
cuucaucucagaaccuccauuu

SEQ ID NO: 418015 - RNA, 23 nt, Artificial Sequence
  Synthetic
gcuucaucucagaaccuccauuu

SEQ ID NO: 418016 - RNA, 24 nt, Artificial Sequence
  Synthetic
agcuucaucucagaaccuccauuu

SEQ ID NO: 418017 - RNA, 18 nt, Artificial Sequence
  Synthetic
gaauagagaauuccauuu

SEQ ID NO: 418018 - RNA, 19 nt, Artificial Sequence
  Synthetic
ggaauagagaauuccauuu

SEQ ID NO: 418019 - RNA, 20 nt, Artificial Sequence
  Synthetic
gggaauagagaauuccauuu

SEQ ID NO: 418020 - RNA, 21 nt, Artificial Sequence
  Synthetic
ugggaauagagaauuccauuu

SEQ ID NO: 418021 - RNA, 22 nt, Artificial Sequence
  Synthetic
cugggaauagagaauuccauuu

SEQ ID NO: 418022 - RNA, 23 nt, Artificial Sequence
  Synthetic
ucugggaauagagaauuccauuu

SEQ ID NO: 418023 - RNA, 24 nt, Artificial Sequence
  Synthetic
uucugggaauagagaauuccauuu

SEQ ID NO: 418024 - RNA, 18 nt, Artificial Sequence
  Synthetic
aacaacucaguuccauuu

SEQ ID NO: 418025 - RNA, 19 nt, Artificial Sequence
  Synthetic
gaacaacucaguuccauuu

SEQ ID NO: 418026 - RNA, 20 nt, Artificial Sequence
  Synthetic
ggaacaacucaguuccauuu

SEQ ID NO: 418027 - RNA, 21 nt, Artificial Sequence
  Synthetic
aggaacaacucaguuccauuu

SEQ ID NO: 418028 - RNA, 22 nt, Artificial Sequence
  Synthetic
uaggaacaacucaguuccauuu

SEQ ID NO: 418029 - RNA, 23 nt, Artificial Sequence
  Synthetic
uuaggaacaacucaguuccauuu

SEQ ID NO: 418030 - RNA, 24 nt, Artificial Sequence
  Synthetic
cuuaggaacaacucaguuccauuu

SEQ ID NO: 418031 - RNA, 18 nt, Artificial Sequence
  Synthetic
caaguuaauuuuccauuu

SEQ ID NO: 418032 - RNA, 19 nt, Artificial Sequence
  Synthetic
acaaguuaauuuuccauuu

SEQ ID NO: 418033 - RNA, 20 nt, Artificial Sequence
  Synthetic
uacaaguuaauuuuccauuu

SEQ ID NO: 418034 - RNA, 21 nt, Artificial Sequence
  Synthetic
cuacaaguuaauuuuccauuu

SEQ ID NO: 418035 - RNA, 22 nt, Artificial Sequence
  Synthetic
acuacaaguuaauuuuccauuu

SEQ ID NO: 418036 - RNA, 23 nt, Artificial Sequence
  Synthetic
gacuacaaguuaauuuuccauuu

SEQ ID NO: 418037 - RNA, 24 nt, Artificial Sequence
  Synthetic
agacuacaaguuaauuuuccauuu

SEQ ID NO: 418038 - RNA, 18 nt, Artificial Sequence
  Synthetic
cuuuauuauuuuccauuu

SEQ ID NO: 418039 - RNA, 19 nt, Artificial Sequence
  Synthetic
acuuuauuauuuuccauuu

SEQ ID NO: 418040 - RNA, 20 nt, Artificial Sequence
  Synthetic
uacuuuauuauuuuccauuu

SEQ ID NO: 418041 - RNA, 21 nt, Artificial Sequence
  Synthetic
uuacuuuauuauuuuccauuu

SEQ ID NO: 418042 - RNA, 22 nt, Artificial Sequence
  Synthetic
guuacuuuauuauuuuccauuu

SEQ ID NO: 418043 - RNA, 23 nt, Artificial Sequence
  Synthetic
aguuacuuuauuauuuuccauuu

SEQ ID NO: 418044 - RNA, 24 nt, Artificial Sequence
  Synthetic
uaguuacuuuauuauuuuccauuu

SEQ ID NO: 418045 - RNA, 18 nt, Artificial Sequence
  Synthetic
auaaagaaaaaagcauuu

SEQ ID NO: 418046 - RNA, 19 nt, Artificial Sequence
  Synthetic
cauaaagaaaaaagcauuu

SEQ ID NO: 418047 - RNA, 20 nt, Artificial Sequence
  Synthetic
acauaaagaaaaaagcauuu

SEQ ID NO: 418048 - RNA, 21 nt, Artificial Sequence
  Synthetic
cacauaaagaaaaaagcauuu

SEQ ID NO: 418049 - RNA, 22 nt, Artificial Sequence
  Synthetic
gcacauaaagaaaaaagcauuu

SEQ ID NO: 418050 - RNA, 23 nt, Artificial Sequence
  Synthetic
ugcacauaaagaaaaaagcauuu

SEQ ID NO: 418051 - RNA, 24 nt, Artificial Sequence
  Synthetic
gugcacauaaagaaaaaagcauuu

SEQ ID NO: 418052 - RNA, 18 nt, Artificial Sequence
  Synthetic
gaaauuagggaagcauuu

SEQ ID NO: 418053 - RNA, 19 nt, Artificial Sequence
  Synthetic
ugaaauuagggaagcauuu

SEQ ID NO: 418054 - RNA, 20 nt, Artificial Sequence
  Synthetic
cugaaauuagggaagcauuu

SEQ ID NO: 418055 - RNA, 21 nt, Artificial Sequence
  Synthetic
gcugaaauuagggaagcauuu

SEQ ID NO: 418056 - RNA, 22 nt, Artificial Sequence
  Synthetic
ugcugaaauuagggaagcauuu

SEQ ID NO: 418057 - RNA, 23 nt, Artificial Sequence
  Synthetic
augcugaaauuagggaagcauuu

SEQ ID NO: 418058 - RNA, 24 nt, Artificial Sequence
  Synthetic
caugcugaaauuagggaagcauuu

SEQ ID NO: 418059 - RNA, 18 nt, Artificial Sequence
  Synthetic
aauccaucugaagcauuu

SEQ ID NO: 418060 - RNA, 19 nt, Artificial Sequence
  Synthetic
uaauccaucugaagcauuu

SEQ ID NO: 418061 - RNA, 20 nt, Artificial Sequence
  Synthetic
uuaauccaucugaagcauuu

SEQ ID NO: 418062 - RNA, 21 nt, Artificial Sequence
  Synthetic
cuuaauccaucugaagcauuu

SEQ ID NO: 418063 - RNA, 22 nt, Artificial Sequence
  Synthetic
gcuuaauccaucugaagcauuu

SEQ ID NO: 418064 - RNA, 23 nt, Artificial Sequence
  Synthetic
ugcuuaauccaucugaagcauuu

SEQ ID NO: 418065 - RNA, 24 nt, Artificial Sequence
  Synthetic
gugcuuaauccaucugaagcauuu

SEQ ID NO: 418066 - RNA, 18 nt, Artificial Sequence
  Synthetic
ccuguaaucccagcauuu

SEQ ID NO: 418067 - RNA, 19 nt, Artificial Sequence
  Synthetic
accuguaaucccagcauuu

SEQ ID NO: 418068 - RNA, 20 nt, Artificial Sequence
  Synthetic
caccuguaaucccagcauuu

SEQ ID NO: 418069 - RNA, 21 nt, Artificial Sequence
  Synthetic
acaccuguaaucccagcauuu

SEQ ID NO: 418070 - RNA, 22 nt, Artificial Sequence
  Synthetic
cacaccuguaaucccagcauuu

SEQ ID NO: 418071 - RNA, 23 nt, Artificial Sequence
  Synthetic
ucacaccuguaaucccagcauuu

SEQ ID NO: 418072 - RNA, 24 nt, Artificial Sequence
  Synthetic
cucacaccuguaaucccagcauuu

SEQ ID NO: 418073 - RNA, 18 nt, Artificial Sequence
  Synthetic
uuugugaguccagcauuu

SEQ ID NO: 418074 - RNA, 19 nt, Artificial Sequence
  Synthetic
guuugugaguccagcauuu

SEQ ID NO: 418075 - RNA, 20 nt, Artificial Sequence
  Synthetic
gguuugugaguccagcauuu

SEQ ID NO: 418076 - RNA, 21 nt, Artificial Sequence
  Synthetic
ggguuugugaguccagcauuu

SEQ ID NO: 418077 - RNA, 22 nt, Artificial Sequence
  Synthetic
cggguuugugaguccagcauuu

SEQ ID NO: 418078 - RNA, 23 nt, Artificial Sequence
  Synthetic
acggguuugugaguccagcauuu

SEQ ID NO: 418079 - RNA, 24 nt, Artificial Sequence
  Synthetic
gacggguuugugaguccagcauuu

SEQ ID NO: 418080 - RNA, 18 nt, Artificial Sequence
  Synthetic
auuuuucaugcagcauuu

SEQ ID NO: 418081 - RNA, 19 nt, Artificial Sequence
  Synthetic
uauuuuucaugcagcauuu

SEQ ID NO: 418082 - RNA, 20 nt, Artificial Sequence
  Synthetic
uuauuuuucaugcagcauuu

SEQ ID NO: 418083 - RNA, 21 nt, Artificial Sequence
  Synthetic
cuuauuuuucaugcagcauuu

SEQ ID NO: 418084 - RNA, 22 nt, Artificial Sequence
  Synthetic
acuuauuuuucaugcagcauuu

SEQ ID NO: 418085 - RNA, 23 nt, Artificial Sequence
  Synthetic
cacuuauuuuucaugcagcauuu

SEQ ID NO: 418086 - RNA, 24 nt, Artificial Sequence
  Synthetic
gcacuuauuuuucaugcagcauuu

SEQ ID NO: 418087 - RNA, 18 nt, Artificial Sequence
  Synthetic
gacagcacaagagcauuu

SEQ ID NO: 418088 - RNA, 19 nt, Artificial Sequence
  Synthetic
ggacagcacaagagcauuu

SEQ ID NO: 418089 - RNA, 20 nt, Artificial Sequence
  Synthetic
aggacagcacaagagcauuu

SEQ ID NO: 418090 - RNA, 21 nt, Artificial Sequence
  Synthetic
aaggacagcacaagagcauuu

SEQ ID NO: 418091 - RNA, 22 nt, Artificial Sequence
  Synthetic
uaaggacagcacaagagcauuu

SEQ ID NO: 418092 - RNA, 23 nt, Artificial Sequence
  Synthetic
guaaggacagcacaagagcauuu

SEQ ID NO: 418093 - RNA, 24 nt, Artificial Sequence
  Synthetic
gguaaggacagcacaagagcauuu

SEQ ID NO: 418094 - RNA, 18 nt, Artificial Sequence
  Synthetic
aacuugagcuuagcauuu

SEQ ID NO: 418095 - RNA, 19 nt, Artificial Sequence
  Synthetic
aaacuugagcuuagcauuu

SEQ ID NO: 418096 - RNA, 20 nt, Artificial Sequence
  Synthetic
uaaacuugagcuuagcauuu

SEQ ID NO: 418097 - RNA, 21 nt, Artificial Sequence
  Synthetic
uuaaacuugagcuuagcauuu

SEQ ID NO: 418098 - RNA, 22 nt, Artificial Sequence
  Synthetic
uuuaaacuugagcuuagcauuu

SEQ ID NO: 418099 - RNA, 23 nt, Artificial Sequence
  Synthetic
uuuuaaacuugagcuuagcauuu

SEQ ID NO: 418100 - RNA, 24 nt, Artificial Sequence
  Synthetic
guuuuaaacuugagcuuagcauuu

SEQ ID NO: 418101 - RNA, 18 nt, Artificial Sequence
  Synthetic
auacccgauuuagcauuu

SEQ ID NO: 418102 - RNA, 19 nt, Artificial Sequence
  Synthetic
aauacccgauuuagcauuu

SEQ ID NO: 418103 - RNA, 20 nt, Artificial Sequence
  Synthetic
caauacccgauuuagcauuu

SEQ ID NO: 418104 - RNA, 21 nt, Artificial Sequence
  Synthetic
acaauacccgauuuagcauuu

SEQ ID NO: 418105 - RNA, 22 nt, Artificial Sequence
  Synthetic
uacaauacccgauuuagcauuu

SEQ ID NO: 418106 - RNA, 23 nt, Artificial Sequence
  Synthetic
cuacaauacccgauuuagcauuu

SEQ ID NO: 418107 - RNA, 24 nt, Artificial Sequence
  Synthetic
ucuacaauacccgauuuagcauuu

SEQ ID NO: 418108 - RNA, 18 nt, Artificial Sequence
  Synthetic
gggaaaggagacgcauuu

SEQ ID NO: 418109 - RNA, 19 nt, Artificial Sequence
  Synthetic
ggggaaaggagacgcauuu

SEQ ID NO: 418110 - RNA, 20 nt, Artificial Sequence
  Synthetic
gggggaaaggagacgcauuu

SEQ ID NO: 418111 - RNA, 21 nt, Artificial Sequence
  Synthetic
agggggaaaggagacgcauuu

SEQ ID NO: 418112 - RNA, 22 nt, Artificial Sequence
  Synthetic
uagggggaaaggagacgcauuu

SEQ ID NO: 418113 - RNA, 23 nt, Artificial Sequence
  Synthetic
guagggggaaaggagacgcauuu

SEQ ID NO: 418114 - RNA, 24 nt, Artificial Sequence
  Synthetic
gguagggggaaaggagacgcauuu

SEQ ID NO: 418115 - RNA, 18 nt, Artificial Sequence
  Synthetic
uguaaaauuaaggcauuu

SEQ ID NO: 418116 - RNA, 19 nt, Artificial Sequence
  Synthetic
cuguaaaauuaaggcauuu

SEQ ID NO: 418117 - RNA, 20 nt, Artificial Sequence
  Synthetic
acuguaaaauuaaggcauuu

SEQ ID NO: 418118 - RNA, 21 nt, Artificial Sequence
  Synthetic
cacuguaaaauuaaggcauuu

SEQ ID NO: 418119 - RNA, 22 nt, Artificial Sequence
  Synthetic
ccacuguaaaauuaaggcauuu

SEQ ID NO: 418120 - RNA, 23 nt, Artificial Sequence
  Synthetic
accacuguaaaauuaaggcauuu

SEQ ID NO: 418121 - RNA, 24 nt, Artificial Sequence
  Synthetic
aaccacuguaaaauuaaggcauuu

SEQ ID NO: 418122 - RNA, 18 nt, Artificial Sequence
  Synthetic
aagggaagaagggcauuu

SEQ ID NO: 418123 - RNA, 19 nt, Artificial Sequence
  Synthetic
aaagggaagaagggcauuu

SEQ ID NO: 418124 - RNA, 20 nt, Artificial Sequence
  Synthetic
aaaagggaagaagggcauuu

SEQ ID NO: 418125 - RNA, 21 nt, Artificial Sequence
  Synthetic
aaaaagggaagaagggcauuu

SEQ ID NO: 418126 - RNA, 22 nt, Artificial Sequence
  Synthetic
gaaaaagggaagaagggcauuu

SEQ ID NO: 418127 - RNA, 23 nt, Artificial Sequence
  Synthetic
agaaaaagggaagaagggcauuu

SEQ ID NO: 418128 - RNA, 24 nt, Artificial Sequence
  Synthetic
gagaaaaagggaagaagggcauuu

SEQ ID NO: 418129 - RNA, 18 nt, Artificial Sequence
  Synthetic
uguguuuuuguggcauuu

SEQ ID NO: 418130 - RNA, 19 nt, Artificial Sequence
  Synthetic
guguguuuuuguggcauuu

SEQ ID NO: 418131 - RNA, 20 nt, Artificial Sequence
  Synthetic
uguguguuuuuguggcauuu

SEQ ID NO: 418132 - RNA, 21 nt, Artificial Sequence
  Synthetic
cuguguguuuuuguggcauuu

SEQ ID NO: 418133 - RNA, 22 nt, Artificial Sequence
  Synthetic
acuguguguuuuuguggcauuu

SEQ ID NO: 418134 - RNA, 23 nt, Artificial Sequence
  Synthetic
cacuguguguuuuuguggcauuu

SEQ ID NO: 418135 - RNA, 24 nt, Artificial Sequence
  Synthetic
ccacuguguguuuuuguggcauuu

SEQ ID NO: 418136 - RNA, 18 nt, Artificial Sequence
  Synthetic
cacggacagugugcauuu

SEQ ID NO: 418137 - RNA, 19 nt, Artificial Sequence
  Synthetic
ucacggacagugugcauuu

SEQ ID NO: 418138 - RNA, 20 nt, Artificial Sequence
  Synthetic
uucacggacagugugcauuu

SEQ ID NO: 418139 - RNA, 21 nt, Artificial Sequence
  Synthetic
uuucacggacagugugcauuu

SEQ ID NO: 418140 - RNA, 22 nt, Artificial Sequence
  Synthetic
guuucacggacagugugcauuu

SEQ ID NO: 418141 - RNA, 23 nt, Artificial Sequence
  Synthetic
uguuucacggacagugugcauuu

SEQ ID NO: 418142 - RNA, 24 nt, Artificial Sequence
  Synthetic
auguuucacggacagugugcauuu

SEQ ID NO: 418143 - RNA, 18 nt, Artificial Sequence
  Synthetic
aacccaagcauugcauuu

SEQ ID NO: 418144 - RNA, 19 nt, Artificial Sequence
  Synthetic
aaacccaagcauugcauuu

SEQ ID NO: 418145 - RNA, 20 nt, Artificial Sequence
  Synthetic
uaaacccaagcauugcauuu

SEQ ID NO: 418146 - RNA, 21 nt, Artificial Sequence
  Synthetic
auaaacccaagcauugcauuu

SEQ ID NO: 418147 - RNA, 22 nt, Artificial Sequence
  Synthetic
cauaaacccaagcauugcauuu

SEQ ID NO: 418148 - RNA, 23 nt, Artificial Sequence
  Synthetic
ccauaaacccaagcauugcauuu

SEQ ID NO: 418149 - RNA, 24 nt, Artificial Sequence
  Synthetic
cccauaaacccaagcauugcauuu

SEQ ID NO: 418150 - RNA, 18 nt, Artificial Sequence
  Synthetic
aaaaauguuauugcauuu

SEQ ID NO: 418151 - RNA, 19 nt, Artificial Sequence
  Synthetic
uaaaaauguuauugcauuu

SEQ ID NO: 418152 - RNA, 20 nt, Artificial Sequence
  Synthetic
uuaaaaauguuauugcauuu

SEQ ID NO: 418153 - RNA, 21 nt, Artificial Sequence
  Synthetic
uuuaaaaauguuauugcauuu

SEQ ID NO: 418154 - RNA, 22 nt, Artificial Sequence
  Synthetic
uuuuaaaaauguuauugcauuu

SEQ ID NO: 418155 - RNA, 23 nt, Artificial Sequence
  Synthetic
uuuuuaaaaauguuauugcauuu

SEQ ID NO: 418156 - RNA, 24 nt, Artificial Sequence
  Synthetic
auuuuuaaaaauguuauugcauuu

SEQ ID NO: 418157 - RNA, 18 nt, Artificial Sequence
  Synthetic
uuuguaaaccuugcauuu

SEQ ID NO: 418158 - RNA, 19 nt, Artificial Sequence
  Synthetic
cuuuguaaaccuugcauuu

SEQ ID NO: 418159 - RNA, 20 nt, Artificial Sequence
  Synthetic
acuuuguaaaccuugcauuu

SEQ ID NO: 418160 - RNA, 21 nt, Artificial Sequence
  Synthetic
aacuuuguaaaccuugcauuu

SEQ ID NO: 418161 - RNA, 22 nt, Artificial Sequence
  Synthetic
aaacuuuguaaaccuugcauuu

SEQ ID NO: 418162 - RNA, 23 nt, Artificial Sequence
  Synthetic
uaaacuuuguaaaccuugcauuu

SEQ ID NO: 418163 - RNA, 24 nt, Artificial Sequence
  Synthetic
guaaacuuuguaaaccuugcauuu

SEQ ID NO: 418164 - RNA, 18 nt, Artificial Sequence
  Synthetic
uggccucacaaaucauuu

SEQ ID NO: 418165 - RNA, 19 nt, Artificial Sequence
  Synthetic
guggccucacaaaucauuu

SEQ ID NO: 418166 - RNA, 20 nt, Artificial Sequence
  Synthetic
uguggccucacaaaucauuu

SEQ ID NO: 418167 - RNA, 21 nt, Artificial Sequence
  Synthetic
auguggccucacaaaucauuu

SEQ ID NO: 418168 - RNA, 22 nt, Artificial Sequence
  Synthetic
gauguggccucacaaaucauuu

SEQ ID NO: 418169 - RNA, 23 nt, Artificial Sequence
  Synthetic
ggauguggccucacaaaucauuu

SEQ ID NO: 418170 - RNA, 24 nt, Artificial Sequence
  Synthetic
uggauguggccucacaaaucauuu

SEQ ID NO: 418171 - RNA, 18 nt, Artificial Sequence
  Synthetic
ugaugauauaaaucauuu

SEQ ID NO: 418172 - RNA, 19 nt, Artificial Sequence
  Synthetic
augaugauauaaaucauuu

SEQ ID NO: 418173 - RNA, 20 nt, Artificial Sequence
  Synthetic
aaugaugauauaaaucauuu

SEQ ID NO: 418174 - RNA, 21 nt, Artificial Sequence
  Synthetic
aaaugaugauauaaaucauuu

SEQ ID NO: 418175 - RNA, 22 nt, Artificial Sequence
  Synthetic
aaaaugaugauauaaaucauuu

SEQ ID NO: 418176 - RNA, 23 nt, Artificial Sequence
  Synthetic
aaaaaugaugauauaaaucauuu

SEQ ID NO: 418177 - RNA, 24 nt, Artificial Sequence
  Synthetic
aaaaaaugaugauauaaaucauuu

SEQ ID NO: 418178 - RNA, 18 nt, Artificial Sequence
  Synthetic
aaucuaaaacaaucauuu

SEQ ID NO: 418179 - RNA, 19 nt, Artificial Sequence
  Synthetic
gaaucuaaaacaaucauuu

SEQ ID NO: 418180 - RNA, 20 nt, Artificial Sequence
  Synthetic
ugaaucuaaaacaaucauuu

SEQ ID NO: 418181 - RNA, 21 nt, Artificial Sequence
  Synthetic
cugaaucuaaaacaaucauuu

SEQ ID NO: 418182 - RNA, 22 nt, Artificial Sequence
  Synthetic
acugaaucuaaaacaaucauuu

SEQ ID NO: 418183 - RNA, 23 nt, Artificial Sequence
  Synthetic
uacugaaucuaaaacaaucauuu

SEQ ID NO: 418184 - RNA, 24 nt, Artificial Sequence
  Synthetic
auacugaaucuaaaacaaucauuu

SEQ ID NO: 418185 - RNA, 18 nt, Artificial Sequence
  Synthetic
agguuguggagaucauuu

SEQ ID NO: 418186 - RNA, 19 nt, Artificial Sequence
  Synthetic
cagguuguggagaucauuu

SEQ ID NO: 418187 - RNA, 20 nt, Artificial Sequence
  Synthetic
gcagguuguggagaucauuu

SEQ ID NO: 418188 - RNA, 21 nt, Artificial Sequence
  Synthetic
ggcagguuguggagaucauuu

SEQ ID NO: 418189 - RNA, 22 nt, Artificial Sequence
  Synthetic
aggcagguuguggagaucauuu

SEQ ID NO: 418190 - RNA, 23 nt, Artificial Sequence
  Synthetic
uaggcagguuguggagaucauuu

SEQ ID NO: 418191 - RNA, 24 nt, Artificial Sequence
  Synthetic
guaggcagguuguggagaucauuu

SEQ ID NO: 418192 - RNA, 18 nt, Artificial Sequence
  Synthetic
aucaccaaaauaucauuu

SEQ ID NO: 418193 - RNA, 19 nt, Artificial Sequence
  Synthetic
aaucaccaaaauaucauuu

SEQ ID NO: 418194 - RNA, 20 nt, Artificial Sequence
  Synthetic
uaaucaccaaaauaucauuu

SEQ ID NO: 418195 - RNA, 21 nt, Artificial Sequence
  Synthetic
cuaaucaccaaaauaucauuu

SEQ ID NO: 418196 - RNA, 22 nt, Artificial Sequence
  Synthetic
acuaaucaccaaaauaucauuu

SEQ ID NO: 418197 - RNA, 23 nt, Artificial Sequence
  Synthetic
cacuaaucaccaaaauaucauuu

SEQ ID NO: 418198 - RNA, 24 nt, Artificial Sequence
  Synthetic
ucacuaaucaccaaaauaucauuu

SEQ ID NO: 418199 - RNA, 18 nt, Artificial Sequence
  Synthetic
accacaaggguaucauuu

SEQ ID NO: 418200 - RNA, 19 nt, Artificial Sequence
  Synthetic
gaccacaaggguaucauuu

SEQ ID NO: 418201 - RNA, 20 nt, Artificial Sequence
  Synthetic
agaccacaaggguaucauuu

SEQ ID NO: 418202 - RNA, 21 nt, Artificial Sequence
  Synthetic
cagaccacaaggguaucauuu

SEQ ID NO: 418203 - RNA, 22 nt, Artificial Sequence
  Synthetic
ucagaccacaaggguaucauuu

SEQ ID NO: 418204 - RNA, 23 nt, Artificial Sequence
  Synthetic
uucagaccacaaggguaucauuu

SEQ ID NO: 418205 - RNA, 24 nt, Artificial Sequence
  Synthetic
uuucagaccacaaggguaucauuu

SEQ ID NO: 418206 - RNA, 18 nt, Artificial Sequence
  Synthetic
uucuaaguaaacucauuu

SEQ ID NO: 418207 - RNA, 19 nt, Artificial Sequence
  Synthetic
uuucuaaguaaacucauuu

SEQ ID NO: 418208 - RNA, 20 nt, Artificial Sequence
  Synthetic
uuuucuaaguaaacucauuu

SEQ ID NO: 418209 - RNA, 21 nt, Artificial Sequence
  Synthetic
guuuucuaaguaaacucauuu

SEQ ID NO: 418210 - RNA, 22 nt, Artificial Sequence
  Synthetic
aguuuucuaaguaaacucauuu

SEQ ID NO: 418211 - RNA, 23 nt, Artificial Sequence
  Synthetic
gaguuuucuaaguaaacucauuu

SEQ ID NO: 418212 - RNA, 24 nt, Artificial Sequence
  Synthetic
ggaguuuucuaaguaaacucauuu

SEQ ID NO: 418213 - RNA, 18 nt, Artificial Sequence
  Synthetic
auaggacuagccucauuu

SEQ ID NO: 418214 - RNA, 19 nt, Artificial Sequence
  Synthetic
cauaggacuagccucauuu

SEQ ID NO: 418215 - RNA, 20 nt, Artificial Sequence
  Synthetic
ccauaggacuagccucauuu

SEQ ID NO: 418216 - RNA, 21 nt, Artificial Sequence
  Synthetic
uccauaggacuagccucauuu

SEQ ID NO: 418217 - RNA, 22 nt, Artificial Sequence
  Synthetic
guccauaggacuagccucauuu

SEQ ID NO: 418218 - RNA, 23 nt, Artificial Sequence
  Synthetic
uguccauaggacuagccucauuu

SEQ ID NO: 418219 - RNA, 24 nt, Artificial Sequence
  Synthetic
guguccauaggacuagccucauuu

SEQ ID NO: 418220 - RNA, 18 nt, Artificial Sequence
  Synthetic
acguaaaggagcucauuu

SEQ ID NO: 418221 - RNA, 19 nt, Artificial Sequence
  Synthetic
cacguaaaggagcucauuu

SEQ ID NO: 418222 - RNA, 20 nt, Artificial Sequence
  Synthetic
gcacguaaaggagcucauuu

SEQ ID NO: 418223 - RNA, 21 nt, Artificial Sequence
  Synthetic
ggcacguaaaggagcucauuu

SEQ ID NO: 418224 - RNA, 22 nt, Artificial Sequence
  Synthetic
aggcacguaaaggagcucauuu

SEQ ID NO: 418225 - RNA, 23 nt, Artificial Sequence
  Synthetic
gaggcacguaaaggagcucauuu

SEQ ID NO: 418226 - RNA, 24 nt, Artificial Sequence
  Synthetic
agaggcacguaaaggagcucauuu

SEQ ID NO: 418227 - RNA, 18 nt, Artificial Sequence
  Synthetic
aagccuuaucucucauuu

SEQ ID NO: 418228 - RNA, 19 nt, Artificial Sequence
  Synthetic
aaagccuuaucucucauuu

SEQ ID NO: 418229 - RNA, 20 nt, Artificial Sequence
  Synthetic
gaaagccuuaucucucauuu

SEQ ID NO: 418230 - RNA, 21 nt, Artificial Sequence
  Synthetic
agaaagccuuaucucucauuu

SEQ ID NO: 418231 - RNA, 22 nt, Artificial Sequence
  Synthetic
cagaaagccuuaucucucauuu

SEQ ID NO: 418232 - RNA, 23 nt, Artificial Sequence
  Synthetic
gcagaaagccuuaucucucauuu

SEQ ID NO: 418233 - RNA, 24 nt, Artificial Sequence
  Synthetic
agcagaaagccuuaucucucauuu

SEQ ID NO: 418234 - RNA, 18 nt, Artificial Sequence
  Synthetic
acuacacaugucucauuu

SEQ ID NO: 418235 - RNA, 19 nt, Artificial Sequence
  Synthetic
gacuacacaugucucauuu

SEQ ID NO: 418236 - RNA, 20 nt, Artificial Sequence
  Synthetic
agacuacacaugucucauuu

SEQ ID NO: 418237 - RNA, 21 nt, Artificial Sequence
  Synthetic
aagacuacacaugucucauuu

SEQ ID NO: 418238 - RNA, 22 nt, Artificial Sequence
  Synthetic
uaagacuacacaugucucauuu

SEQ ID NO: 418239 - RNA, 23 nt, Artificial Sequence
  Synthetic
guaagacuacacaugucucauuu

SEQ ID NO: 418240 - RNA, 24 nt, Artificial Sequence
  Synthetic
gguaagacuacacaugucucauuu

SEQ ID NO: 418241 - RNA, 18 nt, Artificial Sequence
  Synthetic
auggaacccuagucauuu

SEQ ID NO: 418242 - RNA, 19 nt, Artificial Sequence
  Synthetic
uauggaacccuagucauuu

SEQ ID NO: 418243 - RNA, 20 nt, Artificial Sequence
  Synthetic
auauggaacccuagucauuu

SEQ ID NO: 418244 - RNA, 21 nt, Artificial Sequence
  Synthetic
aauauggaacccuagucauuu

SEQ ID NO: 418245 - RNA, 22 nt, Artificial Sequence
  Synthetic
gaauauggaacccuagucauuu

SEQ ID NO: 418246 - RNA, 23 nt, Artificial Sequence
  Synthetic
agaauauggaacccuagucauuu

SEQ ID NO: 418247 - RNA, 24 nt, Artificial Sequence
  Synthetic
cagaauauggaacccuagucauuu

SEQ ID NO: 418248 - RNA, 18 nt, Artificial Sequence
  Synthetic
accuguauaaugucauuu

SEQ ID NO: 418249 - RNA, 19 nt, Artificial Sequence
  Synthetic
aaccuguauaaugucauuu

SEQ ID NO: 418250 - RNA, 20 nt, Artificial Sequence
  Synthetic
aaaccuguauaaugucauuu

SEQ ID NO: 418251 - RNA, 21 nt, Artificial Sequence
  Synthetic
uaaaccuguauaaugucauuu

SEQ ID NO: 418252 - RNA, 22 nt, Artificial Sequence
  Synthetic
auaaaccuguauaaugucauuu

SEQ ID NO: 418253 - RNA, 23 nt, Artificial Sequence
  Synthetic
uauaaaccuguauaaugucauuu

SEQ ID NO: 418254 - RNA, 24 nt, Artificial Sequence
  Synthetic
guauaaaccuguauaaugucauuu

SEQ ID NO: 418255 - RNA, 18 nt, Artificial Sequence
  Synthetic
gcuuaaagugauucauuu

SEQ ID NO: 418256 - RNA, 19 nt, Artificial Sequence
  Synthetic
agcuuaaagugauucauuu

SEQ ID NO: 418257 - RNA, 20 nt, Artificial Sequence
  Synthetic
cagcuuaaagugauucauuu

SEQ ID NO: 418258 - RNA, 21 nt, Artificial Sequence
  Synthetic
acagcuuaaagugauucauuu

SEQ ID NO: 418259 - RNA, 22 nt, Artificial Sequence
  Synthetic
aacagcuuaaagugauucauuu

SEQ ID NO: 418260 - RNA, 23 nt, Artificial Sequence
  Synthetic
uaacagcuuaaagugauucauuu

SEQ ID NO: 418261 - RNA, 24 nt, Artificial Sequence
  Synthetic
cuaacagcuuaaagugauucauuu

SEQ ID NO: 418262 - RNA, 18 nt, Artificial Sequence
  Synthetic
acauguuuauauucauuu

SEQ ID NO: 418263 - RNA, 19 nt, Artificial Sequence
  Synthetic
cacauguuuauauucauuu

SEQ ID NO: 418264 - RNA, 20 nt, Artificial Sequence
  Synthetic
ccacauguuuauauucauuu

SEQ ID NO: 418265 - RNA, 21 nt, Artificial Sequence
  Synthetic
gccacauguuuauauucauuu

SEQ ID NO: 418266 - RNA, 22 nt, Artificial Sequence
  Synthetic
ugccacauguuuauauucauuu

SEQ ID NO: 418267 - RNA, 23 nt, Artificial Sequence
  Synthetic
augccacauguuuauauucauuu

SEQ ID NO: 418268 - RNA, 24 nt, Artificial Sequence
  Synthetic
gaugccacauguuuauauucauuu

SEQ ID NO: 418269 - RNA, 18 nt, Artificial Sequence
  Synthetic
aagaauaacacuucauuu

SEQ ID NO: 418270 - RNA, 19 nt, Artificial Sequence
  Synthetic
caagaauaacacuucauuu

SEQ ID NO: 418271 - RNA, 20 nt, Artificial Sequence
  Synthetic
ccaagaauaacacuucauuu

SEQ ID NO: 418272 - RNA, 21 nt, Artificial Sequence
  Synthetic
cccaagaauaacacuucauuu

SEQ ID NO: 418273 - RNA, 22 nt, Artificial Sequence
  Synthetic
gcccaagaauaacacuucauuu

SEQ ID NO: 418274 - RNA, 23 nt, Artificial Sequence
  Synthetic
agcccaagaauaacacuucauuu

SEQ ID NO: 418275 - RNA, 24 nt, Artificial Sequence
  Synthetic
uagcccaagaauaacacuucauuu

SEQ ID NO: 418276 - RNA, 18 nt, Artificial Sequence
  Synthetic
gcauuccuuccuucauuu

SEQ ID NO: 418277 - RNA, 19 nt, Artificial Sequence
  Synthetic
ugcauuccuuccuucauuu

SEQ ID NO: 418278 - RNA, 20 nt, Artificial Sequence
  Synthetic
augcauuccuuccuucauuu

SEQ ID NO: 418279 - RNA, 21 nt, Artificial Sequence
  Synthetic
caugcauuccuuccuucauuu

SEQ ID NO: 418280 - RNA, 22 nt, Artificial Sequence
  Synthetic
acaugcauuccuuccuucauuu

SEQ ID NO: 418281 - RNA, 23 nt, Artificial Sequence
  Synthetic
aacaugcauuccuuccuucauuu

SEQ ID NO: 418282 - RNA, 24 nt, Artificial Sequence
  Synthetic
aaacaugcauuccuuccuucauuu

SEQ ID NO: 418283 - RNA, 18 nt, Artificial Sequence
  Synthetic
ggguuugaaauuucauuu

SEQ ID NO: 418284 - RNA, 19 nt, Artificial Sequence
  Synthetic
uggguuugaaauuucauuu

SEQ ID NO: 418285 - RNA, 20 nt, Artificial Sequence
  Synthetic
uuggguuugaaauuucauuu

SEQ ID NO: 418286 - RNA, 21 nt, Artificial Sequence
  Synthetic
uuuggguuugaaauuucauuu

SEQ ID NO: 418287 - RNA, 22 nt, Artificial Sequence
  Synthetic
auuuggguuugaaauuucauuu

SEQ ID NO: 418288 - RNA, 23 nt, Artificial Sequence
  Synthetic
aauuuggguuugaaauuucauuu

SEQ ID NO: 418289 - RNA, 24 nt, Artificial Sequence
  Synthetic
aaauuuggguuugaaauuucauuu

SEQ ID NO: 418290 - RNA, 18 nt, Artificial Sequence
  Synthetic
uuagauauccuuucauuu

SEQ ID NO: 418291 - RNA, 19 nt, Artificial Sequence
  Synthetic
uuuagauauccuuucauuu

SEQ ID NO: 418292 - RNA, 20 nt, Artificial Sequence
  Synthetic
auuuagauauccuuucauuu

SEQ ID NO: 418293 - RNA, 21 nt, Artificial Sequence
  Synthetic
uauuuagauauccuuucauuu

SEQ ID NO: 418294 - RNA, 22 nt, Artificial Sequence
  Synthetic
uuauuuagauauccuuucauuu

SEQ ID NO: 418295 - RNA, 23 nt, Artificial Sequence
  Synthetic
cuuauuuagauauccuuucauuu

SEQ ID NO: 418296 - RNA, 24 nt, Artificial Sequence
  Synthetic
acuuauuuagauauccuuucauuu

SEQ ID NO: 418297 - RNA, 18 nt, Artificial Sequence
  Synthetic
uuauuuccauuuucauuu

SEQ ID NO: 418298 - RNA, 19 nt, Artificial Sequence
  Synthetic
auuauuuccauuuucauuu

SEQ ID NO: 418299 - RNA, 20 nt, Artificial Sequence
  Synthetic
uauuauuuccauuuucauuu

SEQ ID NO: 418300 - RNA, 21 nt, Artificial Sequence
  Synthetic
cuauuauuuccauuuucauuu

SEQ ID NO: 418301 - RNA, 22 nt, Artificial Sequence
  Synthetic
ccuauuauuuccauuuucauuu

SEQ ID NO: 418302 - RNA, 23 nt, Artificial Sequence
  Synthetic
uccuauuauuuccauuuucauuu

SEQ ID NO: 418303 - RNA, 24 nt, Artificial Sequence
  Synthetic
cuccuauuauuuccauuuucauuu

SEQ ID NO: 418304 - RNA, 18 nt, Artificial Sequence
  Synthetic
aauuaucugcaaagauuu

SEQ ID NO: 418305 - RNA, 19 nt, Artificial Sequence
  Synthetic
uaauuaucugcaaagauuu

SEQ ID NO: 418306 - RNA, 20 nt, Artificial Sequence
  Synthetic
cuaauuaucugcaaagauuu

SEQ ID NO: 418307 - RNA, 21 nt, Artificial Sequence
  Synthetic
ucuaauuaucugcaaagauuu

SEQ ID NO: 418308 - RNA, 22 nt, Artificial Sequence
  Synthetic
uucuaauuaucugcaaagauuu

SEQ ID NO: 418309 - RNA, 23 nt, Artificial Sequence
  Synthetic
uuucuaauuaucugcaaagauuu

SEQ ID NO: 418310 - RNA, 24 nt, Artificial Sequence
  Synthetic
cuuucuaauuaucugcaaagauuu

SEQ ID NO: 418311 - RNA, 18 nt, Artificial Sequence
  Synthetic
aagcugaaauaaagauuu

SEQ ID NO: 418312 - RNA, 19 nt, Artificial Sequence
  Synthetic
uaagcugaaauaaagauuu

SEQ ID NO: 418313 - RNA, 20 nt, Artificial Sequence
  Synthetic
uuaagcugaaauaaagauuu

SEQ ID NO: 418314 - RNA, 21 nt, Artificial Sequence
  Synthetic
auuaagcugaaauaaagauuu

SEQ ID NO: 418315 - RNA, 22 nt, Artificial Sequence
  Synthetic
uauuaagcugaaauaaagauuu

SEQ ID NO: 418316 - RNA, 23 nt, Artificial Sequence
  Synthetic
auauuaagcugaaauaaagauuu

SEQ ID NO: 418317 - RNA, 24 nt, Artificial Sequence
  Synthetic
aauauuaagcugaaauaaagauuu

SEQ ID NO: 418318 - RNA, 18 nt, Artificial Sequence
  Synthetic
uguccuucaagaagauuu

SEQ ID NO: 418319 - RNA, 19 nt, Artificial Sequence
  Synthetic
auguccuucaagaagauuu

SEQ ID NO: 418320 - RNA, 20 nt, Artificial Sequence
  Synthetic
cauguccuucaagaagauuu

SEQ ID NO: 418321 - RNA, 21 nt, Artificial Sequence
  Synthetic
ccauguccuucaagaagauuu

SEQ ID NO: 418322 - RNA, 22 nt, Artificial Sequence
  Synthetic
accauguccuucaagaagauuu

SEQ ID NO: 418323 - RNA, 23 nt, Artificial Sequence
  Synthetic
aaccauguccuucaagaagauuu

SEQ ID NO: 418324 - RNA, 24 nt, Artificial Sequence
  Synthetic
aaaccauguccuucaagaagauuu

SEQ ID NO: 418325 - RNA, 18 nt, Artificial Sequence
  Synthetic
uguuuuucaagaagauuu

SEQ ID NO: 418326 - RNA, 19 nt, Artificial Sequence
  Synthetic
uuguuuuucaagaagauuu

SEQ ID NO: 418327 - RNA, 20 nt, Artificial Sequence
  Synthetic
guuguuuuucaagaagauuu

SEQ ID NO: 418328 - RNA, 21 nt, Artificial Sequence
  Synthetic
aguuguuuuucaagaagauuu

SEQ ID NO: 418329 - RNA, 22 nt, Artificial Sequence
  Synthetic
caguuguuuuucaagaagauuu

SEQ ID NO: 418330 - RNA, 23 nt, Artificial Sequence
  Synthetic
ucaguuguuuuucaagaagauuu

SEQ ID NO: 418331 - RNA, 24 nt, Artificial Sequence
  Synthetic
cucaguuguuuuucaagaagauuu

SEQ ID NO: 418332 - RNA, 18 nt, Artificial Sequence
  Synthetic
auggcaguaagaagauuu

SEQ ID NO: 418333 - RNA, 19 nt, Artificial Sequence
  Synthetic
cauggcaguaagaagauuu

SEQ ID NO: 418334 - RNA, 20 nt, Artificial Sequence
  Synthetic
gcauggcaguaagaagauuu

SEQ ID NO: 418335 - RNA, 21 nt, Artificial Sequence
  Synthetic
agcauggcaguaagaagauuu

SEQ ID NO: 418336 - RNA, 22 nt, Artificial Sequence
  Synthetic
gagcauggcaguaagaagauuu

SEQ ID NO: 418337 - RNA, 23 nt, Artificial Sequence
  Synthetic
ugagcauggcaguaagaagauuu

SEQ ID NO: 418338 - RNA, 24 nt, Artificial Sequence
  Synthetic
augagcauggcaguaagaagauuu

SEQ ID NO: 418339 - RNA, 18 nt, Artificial Sequence
  Synthetic
guuagcagguuaagauuu

SEQ ID NO: 418340 - RNA, 19 nt, Artificial Sequence
  Synthetic
aguuagcagguuaagauuu

SEQ ID NO: 418341 - RNA, 20 nt, Artificial Sequence
  Synthetic
gaguuagcagguuaagauuu

SEQ ID NO: 418342 - RNA, 21 nt, Artificial Sequence
  Synthetic
ugaguuagcagguuaagauuu

SEQ ID NO: 418343 - RNA, 22 nt, Artificial Sequence
  Synthetic
augaguuagcagguuaagauuu

SEQ ID NO: 418344 - RNA, 23 nt, Artificial Sequence
  Synthetic
uaugaguuagcagguuaagauuu

SEQ ID NO: 418345 - RNA, 24 nt, Artificial Sequence
  Synthetic
cuaugaguuagcagguuaagauuu

SEQ ID NO: 418346 - RNA, 18 nt, Artificial Sequence
  Synthetic
caucacccccacagauuu

SEQ ID NO: 418347 - RNA, 19 nt, Artificial Sequence
  Synthetic
gcaucacccccacagauuu

SEQ ID NO: 418348 - RNA, 20 nt, Artificial Sequence
  Synthetic
agcaucacccccacagauuu

SEQ ID NO: 418349 - RNA, 21 nt, Artificial Sequence
  Synthetic
cagcaucacccccacagauuu

SEQ ID NO: 418350 - RNA, 22 nt, Artificial Sequence
  Synthetic
gcagcaucacccccacagauuu

SEQ ID NO: 418351 - RNA, 23 nt, Artificial Sequence
  Synthetic
ugcagcaucacccccacagauuu

SEQ ID NO: 418352 - RNA, 24 nt, Artificial Sequence
  Synthetic
augcagcaucacccccacagauuu

SEQ ID NO: 418353 - RNA, 18 nt, Artificial Sequence
  Synthetic
ucugacucuagcagauuu

SEQ ID NO: 418354 - RNA, 19 nt, Artificial Sequence
  Synthetic
uucugacucuagcagauuu

SEQ ID NO: 418355 - RNA, 20 nt, Artificial Sequence
  Synthetic
auucugacucuagcagauuu

SEQ ID NO: 418356 - RNA, 21 nt, Artificial Sequence
  Synthetic
cauucugacucuagcagauuu

SEQ ID NO: 418357 - RNA, 22 nt, Artificial Sequence
  Synthetic
acauucugacucuagcagauuu

SEQ ID NO: 418358 - RNA, 23 nt, Artificial Sequence
  Synthetic
gacauucugacucuagcagauuu

SEQ ID NO: 418359 - RNA, 24 nt, Artificial Sequence
  Synthetic
ugacauucugacucuagcagauuu

SEQ ID NO: 418360 - RNA, 18 nt, Artificial Sequence
  Synthetic
uauaaaaccaucagauuu

SEQ ID NO: 418361 - RNA, 19 nt, Artificial Sequence
  Synthetic
uuauaaaaccaucagauuu

SEQ ID NO: 418362 - RNA, 20 nt, Artificial Sequence
  Synthetic
cuuauaaaaccaucagauuu

SEQ ID NO: 418363 - RNA, 21 nt, Artificial Sequence
  Synthetic
ccuuauaaaaccaucagauuu

SEQ ID NO: 418364 - RNA, 22 nt, Artificial Sequence
  Synthetic
cccuuauaaaaccaucagauuu

SEQ ID NO: 418365 - RNA, 23 nt, Artificial Sequence
  Synthetic
acccuuauaaaaccaucagauuu

SEQ ID NO: 418366 - RNA, 24 nt, Artificial Sequence
  Synthetic
gacccuuauaaaaccaucagauuu

SEQ ID NO: 418367 - RNA, 18 nt, Artificial Sequence
  Synthetic
uauguugauuucagauuu

SEQ ID NO: 418368 - RNA, 19 nt, Artificial Sequence
  Synthetic
auauguugauuucagauuu

SEQ ID NO: 418369 - RNA, 20 nt, Artificial Sequence
  Synthetic
aauauguugauuucagauuu

SEQ ID NO: 418370 - RNA, 21 nt, Artificial Sequence
  Synthetic
aaauauguugauuucagauuu

SEQ ID NO: 418371 - RNA, 22 nt, Artificial Sequence
  Synthetic
aaaauauguugauuucagauuu

SEQ ID NO: 418372 - RNA, 23 nt, Artificial Sequence
  Synthetic
uaaaauauguugauuucagauuu

SEQ ID NO: 418373 - RNA, 24 nt, Artificial Sequence
  Synthetic
auaaaauauguugauuucagauuu

SEQ ID NO: 418374 - RNA, 18 nt, Artificial Sequence
  Synthetic
uauuucuuucagagauuu

SEQ ID NO: 418375 - RNA, 19 nt, Artificial Sequence
  Synthetic
cuauuucuuucagagauuu

SEQ ID NO: 418376 - RNA, 20 nt, Artificial Sequence
  Synthetic
acuauuucuuucagagauuu

SEQ ID NO: 418377 - RNA, 21 nt, Artificial Sequence
  Synthetic
uacuauuucuuucagagauuu

SEQ ID NO: 418378 - RNA, 22 nt, Artificial Sequence
  Synthetic
uuacuauuucuuucagagauuu

SEQ ID NO: 418379 - RNA, 23 nt, Artificial Sequence
  Synthetic
cuuacuauuucuuucagagauuu

SEQ ID NO: 418380 - RNA, 24 nt, Artificial Sequence
  Synthetic
gcuuacuauuucuuucagagauuu

SEQ ID NO: 418381 - RNA, 18 nt, Artificial Sequence
  Synthetic
gcucaguuuuagagauuu

SEQ ID NO: 418382 - RNA, 19 nt, Artificial Sequence
  Synthetic
cgcucaguuuuagagauuu

SEQ ID NO: 418383 - RNA, 20 nt, Artificial Sequence
  Synthetic
ucgcucaguuuuagagauuu

SEQ ID NO: 418384 - RNA, 21 nt, Artificial Sequence
  Synthetic
aucgcucaguuuuagagauuu

SEQ ID NO: 418385 - RNA, 22 nt, Artificial Sequence
  Synthetic
caucgcucaguuuuagagauuu

SEQ ID NO: 418386 - RNA, 23 nt, Artificial Sequence
  Synthetic
ucaucgcucaguuuuagagauuu

SEQ ID NO: 418387 - RNA, 24 nt, Artificial Sequence
  Synthetic
uucaucgcucaguuuuagagauuu

SEQ ID NO: 418388 - RNA, 18 nt, Artificial Sequence
  Synthetic
agggauaagaggagauuu

SEQ ID NO: 418389 - RNA, 19 nt, Artificial Sequence
  Synthetic
aagggauaagaggagauuu

SEQ ID NO: 418390 - RNA, 20 nt, Artificial Sequence
  Synthetic
aaagggauaagaggagauuu

SEQ ID NO: 418391 - RNA, 21 nt, Artificial Sequence
  Synthetic
caaagggauaagaggagauuu

SEQ ID NO: 418392 - RNA, 22 nt, Artificial Sequence
  Synthetic
gcaaagggauaagaggagauuu

SEQ ID NO: 418393 - RNA, 23 nt, Artificial Sequence
  Synthetic
ugcaaagggauaagaggagauuu

SEQ ID NO: 418394 - RNA, 24 nt, Artificial Sequence
  Synthetic
cugcaaagggauaagaggagauuu

SEQ ID NO: 418395 - RNA, 18 nt, Artificial Sequence
  Synthetic
uuaccuaccuggagauuu

SEQ ID NO: 418396 - RNA, 19 nt, Artificial Sequence
  Synthetic
guuaccuaccuggagauuu

SEQ ID NO: 418397 - RNA, 20 nt, Artificial Sequence
  Synthetic
gguuaccuaccuggagauuu

SEQ ID NO: 418398 - RNA, 21 nt, Artificial Sequence
  Synthetic
ugguuaccuaccuggagauuu

SEQ ID NO: 418399 - RNA, 22 nt, Artificial Sequence
  Synthetic
cugguuaccuaccuggagauuu

SEQ ID NO: 418400 - RNA, 23 nt, Artificial Sequence
  Synthetic
ccugguuaccuaccuggagauuu

SEQ ID NO: 418401 - RNA, 24 nt, Artificial Sequence
  Synthetic
uccugguuaccuaccuggagauuu

SEQ ID NO: 418402 - RNA, 18 nt, Artificial Sequence
  Synthetic
ugugaugacaugagauuu

SEQ ID NO: 418403 - RNA, 19 nt, Artificial Sequence
  Synthetic
augugaugacaugagauuu

SEQ ID NO: 418404 - RNA, 20 nt, Artificial Sequence
  Synthetic
aaugugaugacaugagauuu

SEQ ID NO: 418405 - RNA, 21 nt, Artificial Sequence
  Synthetic
aaaugugaugacaugagauuu

SEQ ID NO: 418406 - RNA, 22 nt, Artificial Sequence
  Synthetic
gaaaugugaugacaugagauuu

SEQ ID NO: 418407 - RNA, 23 nt, Artificial Sequence
  Synthetic
ugaaaugugaugacaugagauuu

SEQ ID NO: 418408 - RNA, 24 nt, Artificial Sequence
  Synthetic
uugaaaugugaugacaugagauuu

SEQ ID NO: 418409 - RNA, 18 nt, Artificial Sequence
  Synthetic
acugagacagugagauuu

SEQ ID NO: 418410 - RNA, 19 nt, Artificial Sequence
  Synthetic
aacugagacagugagauuu

SEQ ID NO: 418411 - RNA, 20 nt, Artificial Sequence
  Synthetic
gaacugagacagugagauuu

SEQ ID NO: 418412 - RNA, 21 nt, Artificial Sequence
  Synthetic
agaacugagacagugagauuu

SEQ ID NO: 418413 - RNA, 22 nt, Artificial Sequence
  Synthetic
aagaacugagacagugagauuu

SEQ ID NO: 418414 - RNA, 23 nt, Artificial Sequence
  Synthetic
caagaacugagacagugagauuu

SEQ ID NO: 418415 - RNA, 24 nt, Artificial Sequence
  Synthetic
ccaagaacugagacagugagauuu

SEQ ID NO: 418416 - RNA, 18 nt, Artificial Sequence
  Synthetic
aaaauuuauaauagauuu

SEQ ID NO: 418417 - RNA, 19 nt, Artificial Sequence
  Synthetic
aaaaauuuauaauagauuu

SEQ ID NO: 418418 - RNA, 20 nt, Artificial Sequence
  Synthetic
aaaaaauuuauaauagauuu

SEQ ID NO: 418419 - RNA, 21 nt, Artificial Sequence
  Synthetic
gaaaaaauuuauaauagauuu

SEQ ID NO: 418420 - RNA, 22 nt, Artificial Sequence
  Synthetic
agaaaaaauuuauaauagauuu

SEQ ID NO: 418421 - RNA, 23 nt, Artificial Sequence
  Synthetic
gagaaaaaauuuauaauagauuu

SEQ ID NO: 418422 - RNA, 24 nt, Artificial Sequence
  Synthetic
agagaaaaaauuuauaauagauuu

SEQ ID NO: 418423 - RNA, 18 nt, Artificial Sequence
  Synthetic
cacagaauaacuagauuu

SEQ ID NO: 418424 - RNA, 19 nt, Artificial Sequence
  Synthetic
gcacagaauaacuagauuu

SEQ ID NO: 418425 - RNA, 20 nt, Artificial Sequence
  Synthetic
ugcacagaauaacuagauuu

SEQ ID NO: 418426 - RNA, 21 nt, Artificial Sequence
  Synthetic
uugcacagaauaacuagauuu

SEQ ID NO: 418427 - RNA, 22 nt, Artificial Sequence
  Synthetic
uuugcacagaauaacuagauuu

SEQ ID NO: 418428 - RNA, 23 nt, Artificial Sequence
  Synthetic
uuuugcacagaauaacuagauuu

SEQ ID NO: 418429 - RNA, 24 nt, Artificial Sequence
  Synthetic
uuuuugcacagaauaacuagauuu

SEQ ID NO: 418430 - RNA, 18 nt, Artificial Sequence
  Synthetic
ggaaagaguuguagauuu

SEQ ID NO: 418431 - RNA, 19 nt, Artificial Sequence
  Synthetic
uggaaagaguuguagauuu

SEQ ID NO: 418432 - RNA, 20 nt, Artificial Sequence
  Synthetic
uuggaaagaguuguagauuu

SEQ ID NO: 418433 - RNA, 21 nt, Artificial Sequence
  Synthetic
cuuggaaagaguuguagauuu

SEQ ID NO: 418434 - RNA, 22 nt, Artificial Sequence
  Synthetic
ucuuggaaagaguuguagauuu

SEQ ID NO: 418435 - RNA, 23 nt, Artificial Sequence
  Synthetic
aucuuggaaagaguuguagauuu

SEQ ID NO: 418436 - RNA, 24 nt, Artificial Sequence
  Synthetic
aaucuuggaaagaguuguagauuu

SEQ ID NO: 418437 - RNA, 18 nt, Artificial Sequence
  Synthetic
uucauccuuuguagauuu

SEQ ID NO: 418438 - RNA, 19 nt, Artificial Sequence
  Synthetic
cuucauccuuuguagauuu

SEQ ID NO: 418439 - RNA, 20 nt, Artificial Sequence
  Synthetic
ucuucauccuuuguagauuu

SEQ ID NO: 418440 - RNA, 21 nt, Artificial Sequence
  Synthetic
cucuucauccuuuguagauuu

SEQ ID NO: 418441 - RNA, 22 nt, Artificial Sequence
  Synthetic
ccucuucauccuuuguagauuu

SEQ ID NO: 418442 - RNA, 23 nt, Artificial Sequence
  Synthetic
gccucuucauccuuuguagauuu

SEQ ID NO: 418443 - RNA, 24 nt, Artificial Sequence
  Synthetic
agccucuucauccuuuguagauuu

SEQ ID NO: 418444 - RNA, 18 nt, Artificial Sequence
  Synthetic
uagaguagauuuagauuu

SEQ ID NO: 418445 - RNA, 19 nt, Artificial Sequence
  Synthetic
uuagaguagauuuagauuu

SEQ ID NO: 418446 - RNA, 20 nt, Artificial Sequence
  Synthetic
auuagaguagauuuagauuu

SEQ ID NO: 418447 - RNA, 21 nt, Artificial Sequence
  Synthetic
aauuagaguagauuuagauuu

SEQ ID NO: 418448 - RNA, 22 nt, Artificial Sequence
  Synthetic
aaauuagaguagauuuagauuu

SEQ ID NO: 418449 - RNA, 23 nt, Artificial Sequence
  Synthetic
aaaauuagaguagauuuagauuu

SEQ ID NO: 418450 - RNA, 24 nt, Artificial Sequence
  Synthetic
gaaaauuagaguagauuuagauuu

SEQ ID NO: 418451 - RNA, 18 nt, Artificial Sequence
  Synthetic
cuguaaucccaaggauuu

SEQ ID NO: 418452 - RNA, 19 nt, Artificial Sequence
  Synthetic
ccuguaaucccaaggauuu

SEQ ID NO: 418453 - RNA, 20 nt, Artificial Sequence
  Synthetic
gccuguaaucccaaggauuu

SEQ ID NO: 418454 - RNA, 21 nt, Artificial Sequence
  Synthetic
ugccuguaaucccaaggauuu

SEQ ID NO: 418455 - RNA, 22 nt, Artificial Sequence
  Synthetic
augccuguaaucccaaggauuu

SEQ ID NO: 418456 - RNA, 23 nt, Artificial Sequence
  Synthetic
caugccuguaaucccaaggauuu

SEQ ID NO: 418457 - RNA, 24 nt, Artificial Sequence
  Synthetic
ucaugccuguaaucccaaggauuu

SEQ ID NO: 418458 - RNA, 18 nt, Artificial Sequence
  Synthetic
gaauaugcugaaggauuu

SEQ ID NO: 418459 - RNA, 19 nt, Artificial Sequence
  Synthetic
ggaauaugcugaaggauuu

SEQ ID NO: 418460 - RNA, 20 nt, Artificial Sequence
  Synthetic
aggaauaugcugaaggauuu

SEQ ID NO: 418461 - RNA, 21 nt, Artificial Sequence
  Synthetic
gaggaauaugcugaaggauuu

SEQ ID NO: 418462 - RNA, 22 nt, Artificial Sequence
  Synthetic
agaggaauaugcugaaggauuu

SEQ ID NO: 418463 - RNA, 23 nt, Artificial Sequence
  Synthetic
aagaggaauaugcugaaggauuu

SEQ ID NO: 418464 - RNA, 24 nt, Artificial Sequence
  Synthetic
gaagaggaauaugcugaaggauuu

SEQ ID NO: 418465 - RNA, 18 nt, Artificial Sequence
  Synthetic
ugcauacuugaaggauuu

SEQ ID NO: 418466 - RNA, 19 nt, Artificial Sequence
  Synthetic
augcauacuugaaggauuu

SEQ ID NO: 418467 - RNA, 20 nt, Artificial Sequence
  Synthetic
uaugcauacuugaaggauuu

SEQ ID NO: 418468 - RNA, 21 nt, Artificial Sequence
  Synthetic
uuaugcauacuugaaggauuu

SEQ ID NO: 418469 - RNA, 22 nt, Artificial Sequence
  Synthetic
auuaugcauacuugaaggauuu

SEQ ID NO: 418470 - RNA, 23 nt, Artificial Sequence
  Synthetic
aauuaugcauacuugaaggauuu

SEQ ID NO: 418471 - RNA, 24 nt, Artificial Sequence
  Synthetic
uaauuaugcauacuugaaggauuu

SEQ ID NO: 418472 - RNA, 18 nt, Artificial Sequence
  Synthetic
cuuuaugacucaggauuu

SEQ ID NO: 418473 - RNA, 19 nt, Artificial Sequence
  Synthetic
gcuuuaugacucaggauuu

SEQ ID NO: 418474 - RNA, 20 nt, Artificial Sequence
  Synthetic
ugcuuuaugacucaggauuu

SEQ ID NO: 418475 - RNA, 21 nt, Artificial Sequence
  Synthetic
uugcuuuaugacucaggauuu

SEQ ID NO: 418476 - RNA, 22 nt, Artificial Sequence
  Synthetic
uuugcuuuaugacucaggauuu

SEQ ID NO: 418477 - RNA, 23 nt, Artificial Sequence
  Synthetic
cuuugcuuuaugacucaggauuu

SEQ ID NO: 418478 - RNA, 24 nt, Artificial Sequence
  Synthetic
ccuuugcuuuaugacucaggauuu

SEQ ID NO: 418479 - RNA, 18 nt, Artificial Sequence
  Synthetic
uuaagggcccuaggauuu

SEQ ID NO: 418480 - RNA, 19 nt, Artificial Sequence
  Synthetic
cuuaagggcccuaggauuu

SEQ ID NO: 418481 - RNA, 20 nt, Artificial Sequence
  Synthetic
ucuuaagggcccuaggauuu

SEQ ID NO: 418482 - RNA, 21 nt, Artificial Sequence
  Synthetic
aucuuaagggcccuaggauuu

SEQ ID NO: 418483 - RNA, 22 nt, Artificial Sequence
  Synthetic
aaucuuaagggcccuaggauuu

SEQ ID NO: 418484 - RNA, 23 nt, Artificial Sequence
  Synthetic
uaaucuuaagggcccuaggauuu

SEQ ID NO: 418485 - RNA, 24 nt, Artificial Sequence
  Synthetic
auaaucuuaagggcccuaggauuu

SEQ ID NO: 418486 - RNA, 18 nt, Artificial Sequence
  Synthetic
ugaggugaacugggauuu

SEQ ID NO: 418487 - RNA, 19 nt, Artificial Sequence
  Synthetic
cugaggugaacugggauuu

SEQ ID NO: 418488 - RNA, 20 nt, Artificial Sequence
  Synthetic
ccugaggugaacugggauuu

SEQ ID NO: 418489 - RNA, 21 nt, Artificial Sequence
  Synthetic
cccugaggugaacugggauuu

SEQ ID NO: 418490 - RNA, 22 nt, Artificial Sequence
  Synthetic
ucccugaggugaacugggauuu

SEQ ID NO: 418491 - RNA, 23 nt, Artificial Sequence
  Synthetic
gucccugaggugaacugggauuu

SEQ ID NO: 418492 - RNA, 24 nt, Artificial Sequence
  Synthetic
agucccugaggugaacugggauuu

SEQ ID NO: 418493 - RNA, 18 nt, Artificial Sequence
  Synthetic
uacccagaagugggauuu

SEQ ID NO: 418494 - RNA, 19 nt, Artificial Sequence
  Synthetic
guacccagaagugggauuu

SEQ ID NO: 418495 - RNA, 20 nt, Artificial Sequence
  Synthetic
uguacccagaagugggauuu

SEQ ID NO: 418496 - RNA, 21 nt, Artificial Sequence
  Synthetic
auguacccagaagugggauuu

SEQ ID NO: 418497 - RNA, 22 nt, Artificial Sequence
  Synthetic
uauguacccagaagugggauuu

SEQ ID NO: 418498 - RNA, 23 nt, Artificial Sequence
  Synthetic
guauguacccagaagugggauuu

SEQ ID NO: 418499 - RNA, 24 nt, Artificial Sequence
  Synthetic
aguauguacccagaagugggauuu

SEQ ID NO: 418500 - RNA, 18 nt, Artificial Sequence
  Synthetic
ccuaucagggcuggauuu

SEQ ID NO: 418501 - RNA, 19 nt, Artificial Sequence
  Synthetic
accuaucagggcuggauuu

SEQ ID NO: 418502 - RNA, 20 nt, Artificial Sequence
  Synthetic
aaccuaucagggcuggauuu

SEQ ID NO: 418503 - RNA, 21 nt, Artificial Sequence
  Synthetic
aaaccuaucagggcuggauuu

SEQ ID NO: 418504 - RNA, 22 nt, Artificial Sequence
  Synthetic
aaaaccuaucagggcuggauuu

SEQ ID NO: 418505 - RNA, 23 nt, Artificial Sequence
  Synthetic
aaaaaccuaucagggcuggauuu

SEQ ID NO: 418506 - RNA, 24 nt, Artificial Sequence
  Synthetic
caaaaaccuaucagggcuggauuu

SEQ ID NO: 418507 - RNA, 18 nt, Artificial Sequence
  Synthetic
gaauauaaauguggauuu

SEQ ID NO: 418508 - RNA, 19 nt, Artificial Sequence
  Synthetic
ugaauauaaauguggauuu

SEQ ID NO: 418509 - RNA, 20 nt, Artificial Sequence
  Synthetic
cugaauauaaauguggauuu

SEQ ID NO: 418510 - RNA, 21 nt, Artificial Sequence
  Synthetic
acugaauauaaauguggauuu

SEQ ID NO: 418511 - RNA, 22 nt, Artificial Sequence
  Synthetic
aacugaauauaaauguggauuu

SEQ ID NO: 418512 - RNA, 23 nt, Artificial Sequence
  Synthetic
aaacugaauauaaauguggauuu

SEQ ID NO: 418513 - RNA, 24 nt, Artificial Sequence
  Synthetic
gaaacugaauauaaauguggauuu

SEQ ID NO: 418514 - RNA, 18 nt, Artificial Sequence
  Synthetic
ccuguaacauuuggauuu

SEQ ID NO: 418515 - RNA, 19 nt, Artificial Sequence
  Synthetic
uccuguaacauuuggauuu

SEQ ID NO: 418516 - RNA, 20 nt, Artificial Sequence
  Synthetic
uuccuguaacauuuggauuu

SEQ ID NO: 418517 - RNA, 21 nt, Artificial Sequence
  Synthetic
guuccuguaacauuuggauuu

SEQ ID NO: 418518 - RNA, 22 nt, Artificial Sequence
  Synthetic
cguuccuguaacauuuggauuu

SEQ ID NO: 418519 - RNA, 23 nt, Artificial Sequence
  Synthetic
ucguuccuguaacauuuggauuu

SEQ ID NO: 418520 - RNA, 24 nt, Artificial Sequence
  Synthetic
gucguuccuguaacauuuggauuu

SEQ ID NO: 418521 - RNA, 18 nt, Artificial Sequence
  Synthetic
auuguuuuauuuggauuu

SEQ ID NO: 418522 - RNA, 19 nt, Artificial Sequence
  Synthetic
uauuguuuuauuuggauuu

SEQ ID NO: 418523 - RNA, 20 nt, Artificial Sequence
  Synthetic
cuauuguuuuauuuggauuu

SEQ ID NO: 418524 - RNA, 21 nt, Artificial Sequence
  Synthetic
ucuauuguuuuauuuggauuu

SEQ ID NO: 418525 - RNA, 22 nt, Artificial Sequence
  Synthetic
uucuauuguuuuauuuggauuu

SEQ ID NO: 418526 - RNA, 23 nt, Artificial Sequence
  Synthetic
auucuauuguuuuauuuggauuu

SEQ ID NO: 418527 - RNA, 24 nt, Artificial Sequence
  Synthetic
uauucuauuguuuuauuuggauuu

SEQ ID NO: 418528 - RNA, 18 nt, Artificial Sequence
  Synthetic
gcauaaggaaaaugauuu

SEQ ID NO: 418529 - RNA, 19 nt, Artificial Sequence
  Synthetic
agcauaaggaaaaugauuu

SEQ ID NO: 418530 - RNA, 20 nt, Artificial Sequence
  Synthetic
cagcauaaggaaaaugauuu

SEQ ID NO: 418531 - RNA, 21 nt, Artificial Sequence
  Synthetic
acagcauaaggaaaaugauuu

SEQ ID NO: 418532 - RNA, 22 nt, Artificial Sequence
  Synthetic
aacagcauaaggaaaaugauuu

SEQ ID NO: 418533 - RNA, 23 nt, Artificial Sequence
  Synthetic
aaacagcauaaggaaaaugauuu

SEQ ID NO: 418534 - RNA, 24 nt, Artificial Sequence
  Synthetic
gaaacagcauaaggaaaaugauuu

SEQ ID NO: 418535 - RNA, 18 nt, Artificial Sequence
  Synthetic
gacuucauagaaugauuu

SEQ ID NO: 418536 - RNA, 19 nt, Artificial Sequence
  Synthetic
ugacuucauagaaugauuu

SEQ ID NO: 418537 - RNA, 20 nt, Artificial Sequence
  Synthetic
cugacuucauagaaugauuu

SEQ ID NO: 418538 - RNA, 21 nt, Artificial Sequence
  Synthetic
acugacuucauagaaugauuu

SEQ ID NO: 418539 - RNA, 22 nt, Artificial Sequence
  Synthetic
uacugacuucauagaaugauuu

SEQ ID NO: 418540 - RNA, 23 nt, Artificial Sequence
  Synthetic
auacugacuucauagaaugauuu

SEQ ID NO: 418541 - RNA, 24 nt, Artificial Sequence
  Synthetic
gauacugacuucauagaaugauuu

SEQ ID NO: 418542 - RNA, 18 nt, Artificial Sequence
  Synthetic
aaaaauuccccaugauuu

SEQ ID NO: 418543 - RNA, 19 nt, Artificial Sequence
  Synthetic
aaaaaauuccccaugauuu

SEQ ID NO: 418544 - RNA, 20 nt, Artificial Sequence
  Synthetic
uaaaaaauuccccaugauuu

SEQ ID NO: 418545 - RNA, 21 nt, Artificial Sequence
  Synthetic
auaaaaaauuccccaugauuu

SEQ ID NO: 418546 - RNA, 22 nt, Artificial Sequence
  Synthetic
aauaaaaaauuccccaugauuu

SEQ ID NO: 418547 - RNA, 23 nt, Artificial Sequence
  Synthetic
aaauaaaaaauuccccaugauuu

SEQ ID NO: 418548 - RNA, 24 nt, Artificial Sequence
  Synthetic
aaaauaaaaaauuccccaugauuu

SEQ ID NO: 418549 - RNA, 18 nt, Artificial Sequence
  Synthetic
aucuauucuucaugauuu

SEQ ID NO: 418550 - RNA, 19 nt, Artificial Sequence
  Synthetic
uaucuauucuucaugauuu

SEQ ID NO: 418551 - RNA, 20 nt, Artificial Sequence
  Synthetic
guaucuauucuucaugauuu

SEQ ID NO: 418552 - RNA, 21 nt, Artificial Sequence
  Synthetic
gguaucuauucuucaugauuu

SEQ ID NO: 418553 - RNA, 22 nt, Artificial Sequence
  Synthetic
ugguaucuauucuucaugauuu

SEQ ID NO: 418554 - RNA, 23 nt, Artificial Sequence
  Synthetic
gugguaucuauucuucaugauuu

SEQ ID NO: 418555 - RNA, 24 nt, Artificial Sequence
  Synthetic
agugguaucuauucuucaugauuu

SEQ ID NO: 418556 - RNA, 18 nt, Artificial Sequence
  Synthetic
aagagaacaauaugauuu

SEQ ID NO: 418557 - RNA, 19 nt, Artificial Sequence
  Synthetic
caagagaacaauaugauuu

SEQ ID NO: 418558 - RNA, 20 nt, Artificial Sequence
  Synthetic
acaagagaacaauaugauuu

SEQ ID NO: 418559 - RNA, 21 nt, Artificial Sequence
  Synthetic
cacaagagaacaauaugauuu

SEQ ID NO: 418560 - RNA, 22 nt, Artificial Sequence
  Synthetic
ucacaagagaacaauaugauuu

SEQ ID NO: 418561 - RNA, 23 nt, Artificial Sequence
  Synthetic
aucacaagagaacaauaugauuu

SEQ ID NO: 418562 - RNA, 24 nt, Artificial Sequence
  Synthetic
caucacaagagaacaauaugauuu

SEQ ID NO: 418563 - RNA, 18 nt, Artificial Sequence
  Synthetic
cuaauauuuuuaugauuu

SEQ ID NO: 418564 - RNA, 19 nt, Artificial Sequence
  Synthetic
acuaauauuuuuaugauuu

SEQ ID NO: 418565 - RNA, 20 nt, Artificial Sequence
  Synthetic
aacuaauauuuuuaugauuu

SEQ ID NO: 418566 - RNA, 21 nt, Artificial Sequence
  Synthetic
aaacuaauauuuuuaugauuu

SEQ ID NO: 418567 - RNA, 22 nt, Artificial Sequence
  Synthetic
uaaacuaauauuuuuaugauuu

SEQ ID NO: 418568 - RNA, 23 nt, Artificial Sequence
  Synthetic
uuaaacuaauauuuuuaugauuu

SEQ ID NO: 418569 - RNA, 24 nt, Artificial Sequence
  Synthetic
uuuaaacuaauauuuuuaugauuu

SEQ ID NO: 418570 - RNA, 18 nt, Artificial Sequence
  Synthetic
cuuuuuuucuacugauuu

SEQ ID NO: 418571 - RNA, 19 nt, Artificial Sequence
  Synthetic
ucuuuuuuucuacugauuu

SEQ ID NO: 418572 - RNA, 20 nt, Artificial Sequence
  Synthetic
gucuuuuuuucuacugauuu

SEQ ID NO: 418573 - RNA, 21 nt, Artificial Sequence
  Synthetic
ugucuuuuuuucuacugauuu

SEQ ID NO: 418574 - RNA, 22 nt, Artificial Sequence
  Synthetic
uugucuuuuuuucuacugauuu

SEQ ID NO: 418575 - RNA, 23 nt, Artificial Sequence
  Synthetic
uuugucuuuuuuucuacugauuu

SEQ ID NO: 418576 - RNA, 24 nt, Artificial Sequence
  Synthetic
auuugucuuuuuuucuacugauuu

SEQ ID NO: 418577 - RNA, 18 nt, Artificial Sequence
  Synthetic
auuuuuaugcucugauuu

SEQ ID NO: 418578 - RNA, 19 nt, Artificial Sequence
  Synthetic
uauuuuuaugcucugauuu

SEQ ID NO: 418579 - RNA, 20 nt, Artificial Sequence
  Synthetic
guauuuuuaugcucugauuu

SEQ ID NO: 418580 - RNA, 21 nt, Artificial Sequence
  Synthetic
uguauuuuuaugcucugauuu

SEQ ID NO: 418581 - RNA, 22 nt, Artificial Sequence
  Synthetic
guguauuuuuaugcucugauuu

SEQ ID NO: 418582 - RNA, 23 nt, Artificial Sequence
  Synthetic
uguguauuuuuaugcucugauuu

SEQ ID NO: 418583 - RNA, 24 nt, Artificial Sequence
  Synthetic
guguguauuuuuaugcucugauuu

SEQ ID NO: 418584 - RNA, 18 nt, Artificial Sequence
  Synthetic
aggcuuccucucugauuu

SEQ ID NO: 418585 - RNA, 19 nt, Artificial Sequence
  Synthetic
caggcuuccucucugauuu

SEQ ID NO: 418586 - RNA, 20 nt, Artificial Sequence
  Synthetic
gcaggcuuccucucugauuu

SEQ ID NO: 418587 - RNA, 21 nt, Artificial Sequence
  Synthetic
ggcaggcuuccucucugauuu

SEQ ID NO: 418588 - RNA, 22 nt, Artificial Sequence
  Synthetic
aggcaggcuuccucucugauuu

SEQ ID NO: 418589 - RNA, 23 nt, Artificial Sequence
  Synthetic
uaggcaggcuuccucucugauuu

SEQ ID NO: 418590 - RNA, 24 nt, Artificial Sequence
  Synthetic
guaggcaggcuuccucucugauuu

SEQ ID NO: 418591 - RNA, 18 nt, Artificial Sequence
  Synthetic
gacuauguaaagugauuu

SEQ ID NO: 418592 - RNA, 19 nt, Artificial Sequence
  Synthetic
agacuauguaaagugauuu

SEQ ID NO: 418593 - RNA, 20 nt, Artificial Sequence
  Synthetic
uagacuauguaaagugauuu

SEQ ID NO: 418594 - RNA, 21 nt, Artificial Sequence
  Synthetic
uuagacuauguaaagugauuu

SEQ ID NO: 418595 - RNA, 22 nt, Artificial Sequence
  Synthetic
uuuagacuauguaaagugauuu

SEQ ID NO: 418596 - RNA, 23 nt, Artificial Sequence
  Synthetic
uuuuagacuauguaaagugauuu

SEQ ID NO: 418597 - RNA, 24 nt, Artificial Sequence
  Synthetic
guuuuagacuauguaaagugauuu

SEQ ID NO: 418598 - RNA, 18 nt, Artificial Sequence
  Synthetic
acaauucaguagugauuu

SEQ ID NO: 418599 - RNA, 19 nt, Artificial Sequence
  Synthetic
aacaauucaguagugauuu

SEQ ID NO: 418600 - RNA, 20 nt, Artificial Sequence
  Synthetic
aaacaauucaguagugauuu

SEQ ID NO: 418601 - RNA, 21 nt, Artificial Sequence
  Synthetic
uaaacaauucaguagugauuu

SEQ ID NO: 418602 - RNA, 22 nt, Artificial Sequence
  Synthetic
guaaacaauucaguagugauuu

SEQ ID NO: 418603 - RNA, 23 nt, Artificial Sequence
  Synthetic
uguaaacaauucaguagugauuu

SEQ ID NO: 418604 - RNA, 24 nt, Artificial Sequence
  Synthetic
uuguaaacaauucaguagugauuu

SEQ ID NO: 418605 - RNA, 18 nt, Artificial Sequence
  Synthetic
uugagugaagggugauuu

SEQ ID NO: 418606 - RNA, 19 nt, Artificial Sequence
  Synthetic
guugagugaagggugauuu

SEQ ID NO: 418607 - RNA, 20 nt, Artificial Sequence
  Synthetic
uguugagugaagggugauuu

SEQ ID NO: 418608 - RNA, 21 nt, Artificial Sequence
  Synthetic
guguugagugaagggugauuu

SEQ ID NO: 418609 - RNA, 22 nt, Artificial Sequence
  Synthetic
cguguugagugaagggugauuu

SEQ ID NO: 418610 - RNA, 23 nt, Artificial Sequence
  Synthetic
ccguguugagugaagggugauuu

SEQ ID NO: 418611 - RNA, 24 nt, Artificial Sequence
  Synthetic
accguguugagugaagggugauuu

SEQ ID NO: 418612 - RNA, 18 nt, Artificial Sequence
  Synthetic
uuaacaccauggugauuu

SEQ ID NO: 418613 - RNA, 19 nt, Artificial Sequence
  Synthetic
guuaacaccauggugauuu

SEQ ID NO: 418614 - RNA, 20 nt, Artificial Sequence
  Synthetic
uguuaacaccauggugauuu

SEQ ID NO: 418615 - RNA, 21 nt, Artificial Sequence
  Synthetic
guguuaacaccauggugauuu

SEQ ID NO: 418616 - RNA, 22 nt, Artificial Sequence
  Synthetic
aguguuaacaccauggugauuu

SEQ ID NO: 418617 - RNA, 23 nt, Artificial Sequence
  Synthetic
aaguguuaacaccauggugauuu

SEQ ID NO: 418618 - RNA, 24 nt, Artificial Sequence
  Synthetic
gaaguguuaacaccauggugauuu

SEQ ID NO: 418619 - RNA, 18 nt, Artificial Sequence
  Synthetic
cagaauaaaaugugauuu

SEQ ID NO: 418620 - RNA, 19 nt, Artificial Sequence
  Synthetic
gcagaauaaaaugugauuu

SEQ ID NO: 418621 - RNA, 20 nt, Artificial Sequence
  Synthetic
agcagaauaaaaugugauuu

SEQ ID NO: 418622 - RNA, 21 nt, Artificial Sequence
  Synthetic
aagcagaauaaaaugugauuu

SEQ ID NO: 418623 - RNA, 22 nt, Artificial Sequence
  Synthetic
uaagcagaauaaaaugugauuu

SEQ ID NO: 418624 - RNA, 23 nt, Artificial Sequence
  Synthetic
uuaagcagaauaaaaugugauuu

SEQ ID NO: 418625 - RNA, 24 nt, Artificial Sequence
  Synthetic
uuuaagcagaauaaaaugugauuu

SEQ ID NO: 418626 - RNA, 18 nt, Artificial Sequence
  Synthetic
uuuuuacaaaugugauuu

SEQ ID NO: 418627 - RNA, 19 nt, Artificial Sequence
  Synthetic
guuuuuacaaaugugauuu

SEQ ID NO: 418628 - RNA, 20 nt, Artificial Sequence
  Synthetic
aguuuuuacaaaugugauuu

SEQ ID NO: 418629 - RNA, 21 nt, Artificial Sequence
  Synthetic
uaguuuuuacaaaugugauuu

SEQ ID NO: 418630 - RNA, 22 nt, Artificial Sequence
  Synthetic
cuaguuuuuacaaaugugauuu

SEQ ID NO: 418631 - RNA, 23 nt, Artificial Sequence
  Synthetic
gcuaguuuuuacaaaugugauuu

SEQ ID NO: 418632 - RNA, 24 nt, Artificial Sequence
  Synthetic
cgcuaguuuuuacaaaugugauuu

SEQ ID NO: 418633 - RNA, 18 nt, Artificial Sequence
  Synthetic
uaauaggcauugugauuu

SEQ ID NO: 418634 - RNA, 19 nt, Artificial Sequence
  Synthetic
uuaauaggcauugugauuu

SEQ ID NO: 418635 - RNA, 20 nt, Artificial Sequence
  Synthetic
auuaauaggcauugugauuu

SEQ ID NO: 418636 - RNA, 21 nt, Artificial Sequence
  Synthetic
cauuaauaggcauugugauuu

SEQ ID NO: 418637 - RNA, 22 nt, Artificial Sequence
  Synthetic
acauuaauaggcauugugauuu

SEQ ID NO: 418638 - RNA, 23 nt, Artificial Sequence
  Synthetic
aacauuaauaggcauugugauuu

SEQ ID NO: 418639 - RNA, 24 nt, Artificial Sequence
  Synthetic
uaacauuaauaggcauugugauuu

SEQ ID NO: 418640 - RNA, 18 nt, Artificial Sequence
  Synthetic
auguuuucagauugauuu

SEQ ID NO: 418641 - RNA, 19 nt, Artificial Sequence
  Synthetic
cauguuuucagauugauuu

SEQ ID NO: 418642 - RNA, 20 nt, Artificial Sequence
  Synthetic
gcauguuuucagauugauuu

SEQ ID NO: 418643 - RNA, 21 nt, Artificial Sequence
  Synthetic
agcauguuuucagauugauuu

SEQ ID NO: 418644 - RNA, 22 nt, Artificial Sequence
  Synthetic
cagcauguuuucagauugauuu

SEQ ID NO: 418645 - RNA, 23 nt, Artificial Sequence
  Synthetic
ucagcauguuuucagauugauuu

SEQ ID NO: 418646 - RNA, 24 nt, Artificial Sequence
  Synthetic
uucagcauguuuucagauugauuu

SEQ ID NO: 418647 - RNA, 18 nt, Artificial Sequence
  Synthetic
aggcacuuuuauugauuu

SEQ ID NO: 418648 - RNA, 19 nt, Artificial Sequence
  Synthetic
uaggcacuuuuauugauuu

SEQ ID NO: 418649 - RNA, 20 nt, Artificial Sequence
  Synthetic
cuaggcacuuuuauugauuu

SEQ ID NO: 418650 - RNA, 21 nt, Artificial Sequence
  Synthetic
ccuaggcacuuuuauugauuu

SEQ ID NO: 418651 - RNA, 22 nt, Artificial Sequence
  Synthetic
uccuaggcacuuuuauugauuu

SEQ ID NO: 418652 - RNA, 23 nt, Artificial Sequence
  Synthetic
cuccuaggcacuuuuauugauuu

SEQ ID NO: 418653 - RNA, 24 nt, Artificial Sequence
  Synthetic
ucuccuaggcacuuuuauugauuu

SEQ ID NO: 418654 - RNA, 18 nt, Artificial Sequence
  Synthetic
augucucagucuugauuu

SEQ ID NO: 418655 - RNA, 19 nt, Artificial Sequence
  Synthetic
uaugucucagucuugauuu

SEQ ID NO: 418656 - RNA, 20 nt, Artificial Sequence
  Synthetic
uuaugucucagucuugauuu

SEQ ID NO: 418657 - RNA, 21 nt, Artificial Sequence
  Synthetic
auuaugucucagucuugauuu

SEQ ID NO: 418658 - RNA, 22 nt, Artificial Sequence
  Synthetic
aauuaugucucagucuugauuu

SEQ ID NO: 418659 - RNA, 23 nt, Artificial Sequence
  Synthetic
caauuaugucucagucuugauuu

SEQ ID NO: 418660 - RNA, 24 nt, Artificial Sequence
  Synthetic
acaauuaugucucagucuugauuu

SEQ ID NO: 418661 - RNA, 18 nt, Artificial Sequence
  Synthetic
uguccuuuuucuugauuu

SEQ ID NO: 418662 - RNA, 19 nt, Artificial Sequence
  Synthetic
guguccuuuuucuugauuu

SEQ ID NO: 418663 - RNA, 20 nt, Artificial Sequence
  Synthetic
uguguccuuuuucuugauuu

SEQ ID NO: 418664 - RNA, 21 nt, Artificial Sequence
  Synthetic
auguguccuuuuucuugauuu

SEQ ID NO: 418665 - RNA, 22 nt, Artificial Sequence
  Synthetic
aauguguccuuuuucuugauuu

SEQ ID NO: 418666 - RNA, 23 nt, Artificial Sequence
  Synthetic
uaauguguccuuuuucuugauuu

SEQ ID NO: 418667 - RNA, 24 nt, Artificial Sequence
  Synthetic
auaauguguccuuuuucuugauuu

SEQ ID NO: 418668 - RNA, 18 nt, Artificial Sequence
  Synthetic
aaaauaauuaguugauuu

SEQ ID NO: 418669 - RNA, 19 nt, Artificial Sequence
  Synthetic
gaaaauaauuaguugauuu

SEQ ID NO: 418670 - RNA, 20 nt, Artificial Sequence
  Synthetic
ggaaaauaauuaguugauuu

SEQ ID NO: 418671 - RNA, 21 nt, Artificial Sequence
  Synthetic
uggaaaauaauuaguugauuu

SEQ ID NO: 418672 - RNA, 22 nt, Artificial Sequence
  Synthetic
auggaaaauaauuaguugauuu

SEQ ID NO: 418673 - RNA, 23 nt, Artificial Sequence
  Synthetic
aauggaaaauaauuaguugauuu

SEQ ID NO: 418674 - RNA, 24 nt, Artificial Sequence
  Synthetic
aaauggaaaauaauuaguugauuu

SEQ ID NO: 418675 - RNA, 18 nt, Artificial Sequence
  Synthetic
aaguauucagguugauuu

SEQ ID NO: 418676 - RNA, 19 nt, Artificial Sequence
  Synthetic
gaaguauucagguugauuu

SEQ ID NO: 418677 - RNA, 20 nt, Artificial Sequence
  Synthetic
ugaaguauucagguugauuu

SEQ ID NO: 418678 - RNA, 21 nt, Artificial Sequence
  Synthetic
augaaguauucagguugauuu

SEQ ID NO: 418679 - RNA, 22 nt, Artificial Sequence
  Synthetic
gaugaaguauucagguugauuu

SEQ ID NO: 418680 - RNA, 23 nt, Artificial Sequence
  Synthetic
ugaugaaguauucagguugauuu

SEQ ID NO: 418681 - RNA, 24 nt, Artificial Sequence
  Synthetic
cugaugaaguauucagguugauuu

SEQ ID NO: 418682 - RNA, 18 nt, Artificial Sequence
  Synthetic
uaaaaaauaaaaauauuu

SEQ ID NO: 418683 - RNA, 19 nt, Artificial Sequence
  Synthetic
auaaaaaauaaaaauauuu

SEQ ID NO: 418684 - RNA, 20 nt, Artificial Sequence
  Synthetic
uauaaaaaauaaaaauauuu

SEQ ID NO: 418685 - RNA, 21 nt, Artificial Sequence
  Synthetic
uuauaaaaaauaaaaauauuu

SEQ ID NO: 418686 - RNA, 22 nt, Artificial Sequence
  Synthetic
uuuauaaaaaauaaaaauauuu

SEQ ID NO: 418687 - RNA, 23 nt, Artificial Sequence
  Synthetic
auuuauaaaaaauaaaaauauuu

SEQ ID NO: 418688 - RNA, 24 nt, Artificial Sequence
  Synthetic
uauuuauaaaaaauaaaaauauuu

SEQ ID NO: 418689 - RNA, 18 nt, Artificial Sequence
  Synthetic
aaauauauaaaaauauuu

SEQ ID NO: 418690 - RNA, 19 nt, Artificial Sequence
  Synthetic
aaaauauauaaaaauauuu

SEQ ID NO: 418691 - RNA, 20 nt, Artificial Sequence
  Synthetic
uaaaauauauaaaaauauuu

SEQ ID NO: 418692 - RNA, 21 nt, Artificial Sequence
  Synthetic
uuaaaauauauaaaaauauuu

SEQ ID NO: 418693 - RNA, 22 nt, Artificial Sequence
  Synthetic
auuaaaauauauaaaaauauuu

SEQ ID NO: 418694 - RNA, 23 nt, Artificial Sequence
  Synthetic
cauuaaaauauauaaaaauauuu

SEQ ID NO: 418695 - RNA, 24 nt, Artificial Sequence
  Synthetic
gcauuaaaauauauaaaaauauuu

SEQ ID NO: 418696 - RNA, 18 nt, Artificial Sequence
  Synthetic
uuguuacauaaaauauuu

SEQ ID NO: 418697 - RNA, 19 nt, Artificial Sequence
  Synthetic
uuuguuacauaaaauauuu

SEQ ID NO: 418698 - RNA, 20 nt, Artificial Sequence
  Synthetic
auuuguuacauaaaauauuu

SEQ ID NO: 418699 - RNA, 21 nt, Artificial Sequence
  Synthetic
cauuuguuacauaaaauauuu

SEQ ID NO: 418700 - RNA, 22 nt, Artificial Sequence
  Synthetic
gcauuuguuacauaaaauauuu

SEQ ID NO: 418701 - RNA, 23 nt, Artificial Sequence
  Synthetic
ggcauuuguuacauaaaauauuu

SEQ ID NO: 418702 - RNA, 24 nt, Artificial Sequence
  Synthetic
aggcauuuguuacauaaaauauuu

SEQ ID NO: 418703 - RNA, 18 nt, Artificial Sequence
  Synthetic
acgacugauaaaauauuu

SEQ ID NO: 418704 - RNA, 19 nt, Artificial Sequence
  Synthetic
cacgacugauaaaauauuu

SEQ ID NO: 418705 - RNA, 20 nt, Artificial Sequence
  Synthetic
acacgacugauaaaauauuu

SEQ ID NO: 418706 - RNA, 21 nt, Artificial Sequence
  Synthetic
uacacgacugauaaaauauuu

SEQ ID NO: 418707 - RNA, 22 nt, Artificial Sequence
  Synthetic
uuacacgacugauaaaauauuu

SEQ ID NO: 418708 - RNA, 23 nt, Artificial Sequence
  Synthetic
uuuacacgacugauaaaauauuu

SEQ ID NO: 418709 - RNA, 24 nt, Artificial Sequence
  Synthetic
auuuacacgacugauaaaauauuu

SEQ ID NO: 418710 - RNA, 18 nt, Artificial Sequence
  Synthetic
uaacccuuuaaaauauuu

SEQ ID NO: 418711 - RNA, 19 nt, Artificial Sequence
  Synthetic
cuaacccuuuaaaauauuu

SEQ ID NO: 418712 - RNA, 20 nt, Artificial Sequence
  Synthetic
acuaacccuuuaaaauauuu

SEQ ID NO: 418713 - RNA, 21 nt, Artificial Sequence
  Synthetic
gacuaacccuuuaaaauauuu

SEQ ID NO: 418714 - RNA, 22 nt, Artificial Sequence
  Synthetic
ugacuaacccuuuaaaauauuu

SEQ ID NO: 418715 - RNA, 23 nt, Artificial Sequence
  Synthetic
augacuaacccuuuaaaauauuu

SEQ ID NO: 418716 - RNA, 24 nt, Artificial Sequence
  Synthetic
aaugacuaacccuuuaaaauauuu

SEQ ID NO: 418717 - RNA, 18 nt, Artificial Sequence
  Synthetic
uuuuguuuugaaauauuu

SEQ ID NO: 418718 - RNA, 19 nt, Artificial Sequence
  Synthetic
auuuuguuuugaaauauuu

SEQ ID NO: 418719 - RNA, 20 nt, Artificial Sequence
  Synthetic
aauuuuguuuugaaauauuu

SEQ ID NO: 418720 - RNA, 21 nt, Artificial Sequence
  Synthetic
aaauuuuguuuugaaauauuu

SEQ ID NO: 418721 - RNA, 22 nt, Artificial Sequence
  Synthetic
gaaauuuuguuuugaaauauuu

SEQ ID NO: 418722 - RNA, 23 nt, Artificial Sequence
  Synthetic
ugaaauuuuguuuugaaauauuu

SEQ ID NO: 418723 - RNA, 24 nt, Artificial Sequence
  Synthetic
uugaaauuuuguuuugaaauauuu

SEQ ID NO: 418724 - RNA, 18 nt, Artificial Sequence
  Synthetic
uaggcuauugcaauauuu

SEQ ID NO: 418725 - RNA, 19 nt, Artificial Sequence
  Synthetic
guaggcuauugcaauauuu

SEQ ID NO: 418726 - RNA, 20 nt, Artificial Sequence
  Synthetic
aguaggcuauugcaauauuu

SEQ ID NO: 418727 - RNA, 21 nt, Artificial Sequence
  Synthetic
uaguaggcuauugcaauauuu

SEQ ID NO: 418728 - RNA, 22 nt, Artificial Sequence
  Synthetic
uuaguaggcuauugcaauauuu

SEQ ID NO: 418729 - RNA, 23 nt, Artificial Sequence
  Synthetic
auuaguaggcuauugcaauauuu

SEQ ID NO: 418730 - RNA, 24 nt, Artificial Sequence
  Synthetic
aauuaguaggcuauugcaauauuu

SEQ ID NO: 418731 - RNA, 18 nt, Artificial Sequence
  Synthetic
aaguuuacaucaauauuu

SEQ ID NO: 418732 - RNA, 19 nt, Artificial Sequence
  Synthetic
aaaguuuacaucaauauuu

SEQ ID NO: 418733 - RNA, 20 nt, Artificial Sequence
  Synthetic
aaaaguuuacaucaauauuu

SEQ ID NO: 418734 - RNA, 21 nt, Artificial Sequence
  Synthetic
uaaaaguuuacaucaauauuu

SEQ ID NO: 418735 - RNA, 22 nt, Artificial Sequence
  Synthetic
cuaaaaguuuacaucaauauuu

SEQ ID NO: 418736 - RNA, 23 nt, Artificial Sequence
  Synthetic
gcuaaaaguuuacaucaauauuu

SEQ ID NO: 418737 - RNA, 24 nt, Artificial Sequence
  Synthetic
ggcuaaaaguuuacaucaauauuu

SEQ ID NO: 418738 - RNA, 18 nt, Artificial Sequence
  Synthetic
aguaaucugucaauauuu

SEQ ID NO: 418739 - RNA, 19 nt, Artificial Sequence
  Synthetic
aaguaaucugucaauauuu

SEQ ID NO: 418740 - RNA, 20 nt, Artificial Sequence
  Synthetic
uaaguaaucugucaauauuu

SEQ ID NO: 418741 - RNA, 21 nt, Artificial Sequence
  Synthetic
auaaguaaucugucaauauuu

SEQ ID NO: 418742 - RNA, 22 nt, Artificial Sequence
  Synthetic
aauaaguaaucugucaauauuu

SEQ ID NO: 418743 - RNA, 23 nt, Artificial Sequence
  Synthetic
caauaaguaaucugucaauauuu

SEQ ID NO: 418744 - RNA, 24 nt, Artificial Sequence
  Synthetic
acaauaaguaaucugucaauauuu

SEQ ID NO: 418745 - RNA, 18 nt, Artificial Sequence
  Synthetic
aauauccacagaauauuu

SEQ ID NO: 418746 - RNA, 19 nt, Artificial Sequence
  Synthetic
gaauauccacagaauauuu

SEQ ID NO: 418747 - RNA, 20 nt, Artificial Sequence
  Synthetic
ggaauauccacagaauauuu

SEQ ID NO: 418748 - RNA, 21 nt, Artificial Sequence
  Synthetic
uggaauauccacagaauauuu

SEQ ID NO: 418749 - RNA, 22 nt, Artificial Sequence
  Synthetic
uuggaauauccacagaauauuu

SEQ ID NO: 418750 - RNA, 23 nt, Artificial Sequence
  Synthetic
auuggaauauccacagaauauuu

SEQ ID NO: 418751 - RNA, 24 nt, Artificial Sequence
  Synthetic
aauuggaauauccacagaauauuu

SEQ ID NO: 418752 - RNA, 18 nt, Artificial Sequence
  Synthetic
auaauauugcgaauauuu

SEQ ID NO: 418753 - RNA, 19 nt, Artificial Sequence
  Synthetic
uauaauauugcgaauauuu

SEQ ID NO: 418754 - RNA, 20 nt, Artificial Sequence
  Synthetic
uuauaauauugcgaauauuu

SEQ ID NO: 418755 - RNA, 21 nt, Artificial Sequence
  Synthetic
uuuauaauauugcgaauauuu

SEQ ID NO: 418756 - RNA, 22 nt, Artificial Sequence
  Synthetic
uuuuauaauauugcgaauauuu

SEQ ID NO: 418757 - RNA, 23 nt, Artificial Sequence
  Synthetic
guuuuauaauauugcgaauauuu

SEQ ID NO: 418758 - RNA, 24 nt, Artificial Sequence
  Synthetic
gguuuuauaauauugcgaauauuu

SEQ ID NO: 418759 - RNA, 18 nt, Artificial Sequence
  Synthetic
uuauuguugcuaauauuu

SEQ ID NO: 418760 - RNA, 19 nt, Artificial Sequence
  Synthetic
uuuauuguugcuaauauuu

SEQ ID NO: 418761 - RNA, 20 nt, Artificial Sequence
  Synthetic
uuuuauuguugcuaauauuu

SEQ ID NO: 418762 - RNA, 21 nt, Artificial Sequence
  Synthetic
auuuuauuguugcuaauauuu

SEQ ID NO: 418763 - RNA, 22 nt, Artificial Sequence
  Synthetic
aauuuuauuguugcuaauauuu

SEQ ID NO: 418764 - RNA, 23 nt, Artificial Sequence
  Synthetic
uaauuuuauuguugcuaauauuu

SEQ ID NO: 418765 - RNA, 24 nt, Artificial Sequence
  Synthetic
guaauuuuauuguugcuaauauuu

SEQ ID NO: 418766 - RNA, 18 nt, Artificial Sequence
  Synthetic
guaacauuuuuaauauuu

SEQ ID NO: 418767 - RNA, 19 nt, Artificial Sequence
  Synthetic
cguaacauuuuuaauauuu

SEQ ID NO: 418768 - RNA, 20 nt, Artificial Sequence
  Synthetic
acguaacauuuuuaauauuu

SEQ ID NO: 418769 - RNA, 21 nt, Artificial Sequence
  Synthetic
gacguaacauuuuuaauauuu

SEQ ID NO: 418770 - RNA, 22 nt, Artificial Sequence
  Synthetic
agacguaacauuuuuaauauuu

SEQ ID NO: 418771 - RNA, 23 nt, Artificial Sequence
  Synthetic
gagacguaacauuuuuaauauuu

SEQ ID NO: 418772 - RNA, 24 nt, Artificial Sequence
  Synthetic
agagacguaacauuuuuaauauuu

SEQ ID NO: 418773 - RNA, 18 nt, Artificial Sequence
  Synthetic
accuuguuuuuaauauuu

SEQ ID NO: 418774 - RNA, 19 nt, Artificial Sequence
  Synthetic
caccuuguuuuuaauauuu

SEQ ID NO: 418775 - RNA, 20 nt, Artificial Sequence
  Synthetic
gcaccuuguuuuuaauauuu

SEQ ID NO: 418776 - RNA, 21 nt, Artificial Sequence
  Synthetic
ugcaccuuguuuuuaauauuu

SEQ ID NO: 418777 - RNA, 22 nt, Artificial Sequence
  Synthetic
augcaccuuguuuuuaauauuu

SEQ ID NO: 418778 - RNA, 23 nt, Artificial Sequence
  Synthetic
gaugcaccuuguuuuuaauauuu

SEQ ID NO: 418779 - RNA, 24 nt, Artificial Sequence
  Synthetic
ggaugcaccuuguuuuuaauauuu

SEQ ID NO: 418780 - RNA, 18 nt, Artificial Sequence
  Synthetic
guucguuuuuuaauauuu

SEQ ID NO: 418781 - RNA, 19 nt, Artificial Sequence
  Synthetic
aguucguuuuuuaauauuu

SEQ ID NO: 418782 - RNA, 20 nt, Artificial Sequence
  Synthetic
uaguucguuuuuuaauauuu

SEQ ID NO: 418783 - RNA, 21 nt, Artificial Sequence
  Synthetic
uuaguucguuuuuuaauauuu

SEQ ID NO: 418784 - RNA, 22 nt, Artificial Sequence
  Synthetic
uuuaguucguuuuuuaauauuu

SEQ ID NO: 418785 - RNA, 23 nt, Artificial Sequence
  Synthetic
uuuuaguucguuuuuuaauauuu

SEQ ID NO: 418786 - RNA, 24 nt, Artificial Sequence
  Synthetic
auuuuaguucguuuuuuaauauuu

SEQ ID NO: 418787 - RNA, 18 nt, Artificial Sequence
  Synthetic
uuguguuuuuuaauauuu

SEQ ID NO: 418788 - RNA, 19 nt, Artificial Sequence
  Synthetic
cuuguguuuuuuaauauuu

SEQ ID NO: 418789 - RNA, 20 nt, Artificial Sequence
  Synthetic
ucuuguguuuuuuaauauuu

SEQ ID NO: 418790 - RNA, 21 nt, Artificial Sequence
  Synthetic
cucuuguguuuuuuaauauuu

SEQ ID NO: 418791 - RNA, 22 nt, Artificial Sequence
  Synthetic
ucucuuguguuuuuuaauauuu

SEQ ID NO: 418792 - RNA, 23 nt, Artificial Sequence
  Synthetic
aucucuuguguuuuuuaauauuu

SEQ ID NO: 418793 - RNA, 24 nt, Artificial Sequence
  Synthetic
caucucuuguguuuuuuaauauuu

SEQ ID NO: 418794 - RNA, 18 nt, Artificial Sequence
  Synthetic
ggagaaagaaacauauuu

SEQ ID NO: 418795 - RNA, 19 nt, Artificial Sequence
  Synthetic
gggagaaagaaacauauuu

SEQ ID NO: 418796 - RNA, 20 nt, Artificial Sequence
  Synthetic
ggggagaaagaaacauauuu

SEQ ID NO: 418797 - RNA, 21 nt, Artificial Sequence
  Synthetic
aggggagaaagaaacauauuu

SEQ ID NO: 418798 - RNA, 22 nt, Artificial Sequence
  Synthetic
aaggggagaaagaaacauauuu

SEQ ID NO: 418799 - RNA, 23 nt, Artificial Sequence
  Synthetic
aaaggggagaaagaaacauauuu

SEQ ID NO: 418800 - RNA, 24 nt, Artificial Sequence
  Synthetic
gaaaggggagaaagaaacauauuu

SEQ ID NO: 418801 - RNA, 18 nt, Artificial Sequence
  Synthetic
augaucagcaacauauuu

SEQ ID NO: 418802 - RNA, 19 nt, Artificial Sequence
  Synthetic
caugaucagcaacauauuu

SEQ ID NO: 418803 - RNA, 20 nt, Artificial Sequence
  Synthetic
acaugaucagcaacauauuu

SEQ ID NO: 418804 - RNA, 21 nt, Artificial Sequence
  Synthetic
gacaugaucagcaacauauuu

SEQ ID NO: 418805 - RNA, 22 nt, Artificial Sequence
  Synthetic
ggacaugaucagcaacauauuu

SEQ ID NO: 418806 - RNA, 23 nt, Artificial Sequence
  Synthetic
aggacaugaucagcaacauauuu

SEQ ID NO: 418807 - RNA, 24 nt, Artificial Sequence
  Synthetic
gaggacaugaucagcaacauauuu

SEQ ID NO: 418808 - RNA, 18 nt, Artificial Sequence
  Synthetic
uccaggaguaacauauuu

SEQ ID NO: 418809 - RNA, 19 nt, Artificial Sequence
  Synthetic
cuccaggaguaacauauuu

SEQ ID NO: 418810 - RNA, 20 nt, Artificial Sequence
  Synthetic
gcuccaggaguaacauauuu

SEQ ID NO: 418811 - RNA, 21 nt, Artificial Sequence
  Synthetic
ggcuccaggaguaacauauuu

SEQ ID NO: 418812 - RNA, 22 nt, Artificial Sequence
  Synthetic
aggcuccaggaguaacauauuu

SEQ ID NO: 418813 - RNA, 23 nt, Artificial Sequence
  Synthetic
aaggcuccaggaguaacauauuu

SEQ ID NO: 418814 - RNA, 24 nt, Artificial Sequence
  Synthetic
gaaggcuccaggaguaacauauuu

SEQ ID NO: 418815 - RNA, 18 nt, Artificial Sequence
  Synthetic
auccacauccacauauuu

SEQ ID NO: 418816 - RNA, 19 nt, Artificial Sequence
  Synthetic
aauccacauccacauauuu

SEQ ID NO: 418817 - RNA, 20 nt, Artificial Sequence
  Synthetic
aaauccacauccacauauuu

SEQ ID NO: 418818 - RNA, 21 nt, Artificial Sequence
  Synthetic
caaauccacauccacauauuu

SEQ ID NO: 418819 - RNA, 22 nt, Artificial Sequence
  Synthetic
acaaauccacauccacauauuu

SEQ ID NO: 418820 - RNA, 23 nt, Artificial Sequence
  Synthetic
aacaaauccacauccacauauuu

SEQ ID NO: 418821 - RNA, 24 nt, Artificial Sequence
  Synthetic
caacaaauccacauccacauauuu

SEQ ID NO: 418822 - RNA, 18 nt, Artificial Sequence
  Synthetic
uacuccacagacauauuu

SEQ ID NO: 418823 - RNA, 19 nt, Artificial Sequence
  Synthetic
auacuccacagacauauuu

SEQ ID NO: 418824 - RNA, 20 nt, Artificial Sequence
  Synthetic
gauacuccacagacauauuu

SEQ ID NO: 418825 - RNA, 21 nt, Artificial Sequence
  Synthetic
agauacuccacagacauauuu

SEQ ID NO: 418826 - RNA, 22 nt, Artificial Sequence
  Synthetic
aagauacuccacagacauauuu

SEQ ID NO: 418827 - RNA, 23 nt, Artificial Sequence
  Synthetic
caagauacuccacagacauauuu

SEQ ID NO: 418828 - RNA, 24 nt, Artificial Sequence
  Synthetic
ccaagauacuccacagacauauuu

SEQ ID NO: 418829 - RNA, 18 nt, Artificial Sequence
  Synthetic
uaauaauuguacauauuu

SEQ ID NO: 418830 - RNA, 19 nt, Artificial Sequence
  Synthetic
auaauaauuguacauauuu

SEQ ID NO: 418831 - RNA, 20 nt, Artificial Sequence
  Synthetic
cauaauaauuguacauauuu

SEQ ID NO: 418832 - RNA, 21 nt, Artificial Sequence
  Synthetic
acauaauaauuguacauauuu

SEQ ID NO: 418833 - RNA, 22 nt, Artificial Sequence
  Synthetic
uacauaauaauuguacauauuu

SEQ ID NO: 418834 - RNA, 23 nt, Artificial Sequence
  Synthetic
auacauaauaauuguacauauuu

SEQ ID NO: 418835 - RNA, 24 nt, Artificial Sequence
  Synthetic
gauacauaauaauuguacauauuu

SEQ ID NO: 418836 - RNA, 18 nt, Artificial Sequence
  Synthetic
uuauccauuuacauauuu

SEQ ID NO: 418837 - RNA, 19 nt, Artificial Sequence
  Synthetic
auuauccauuuacauauuu

SEQ ID NO: 418838 - RNA, 20 nt, Artificial Sequence
  Synthetic
aauuauccauuuacauauuu

SEQ ID NO: 418839 - RNA, 21 nt, Artificial Sequence
  Synthetic
aaauuauccauuuacauauuu

SEQ ID NO: 418840 - RNA, 22 nt, Artificial Sequence
  Synthetic
gaaauuauccauuuacauauuu

SEQ ID NO: 418841 - RNA, 23 nt, Artificial Sequence
  Synthetic
agaaauuauccauuuacauauuu

SEQ ID NO: 418842 - RNA, 24 nt, Artificial Sequence
  Synthetic
gagaaauuauccauuuacauauuu

SEQ ID NO: 418843 - RNA, 18 nt, Artificial Sequence
  Synthetic
gaacugggacccauauuu

SEQ ID NO: 418844 - RNA, 19 nt, Artificial Sequence
  Synthetic
agaacugggacccauauuu

SEQ ID NO: 418845 - RNA, 20 nt, Artificial Sequence
  Synthetic
gagaacugggacccauauuu

SEQ ID NO: 418846 - RNA, 21 nt, Artificial Sequence
  Synthetic
agagaacugggacccauauuu

SEQ ID NO: 418847 - RNA, 22 nt, Artificial Sequence
  Synthetic
gagagaacugggacccauauuu

SEQ ID NO: 418848 - RNA, 23 nt, Artificial Sequence
  Synthetic
ugagagaacugggacccauauuu

SEQ ID NO: 418849 - RNA, 24 nt, Artificial Sequence
  Synthetic
cugagagaacugggacccauauuu

SEQ ID NO: 418850 - RNA, 18 nt, Artificial Sequence
  Synthetic
cucaaguuuuccauauuu

SEQ ID NO: 418851 - RNA, 19 nt, Artificial Sequence
  Synthetic
acucaaguuuuccauauuu

SEQ ID NO: 418852 - RNA, 20 nt, Artificial Sequence
  Synthetic
uacucaaguuuuccauauuu

SEQ ID NO: 418853 - RNA, 21 nt, Artificial Sequence
  Synthetic
auacucaaguuuuccauauuu

SEQ ID NO: 418854 - RNA, 22 nt, Artificial Sequence
  Synthetic
cauacucaaguuuuccauauuu

SEQ ID NO: 418855 - RNA, 23 nt, Artificial Sequence
  Synthetic
ucauacucaaguuuuccauauuu

SEQ ID NO: 418856 - RNA, 24 nt, Artificial Sequence
  Synthetic
uucauacucaaguuuuccauauuu

SEQ ID NO: 418857 - RNA, 18 nt, Artificial Sequence
  Synthetic
uaguaaaaaagcauauuu

SEQ ID NO: 418858 - RNA, 19 nt, Artificial Sequence
  Synthetic
uuaguaaaaaagcauauuu

SEQ ID NO: 418859 - RNA, 20 nt, Artificial Sequence
  Synthetic
uuuaguaaaaaagcauauuu

SEQ ID NO: 418860 - RNA, 21 nt, Artificial Sequence
  Synthetic
guuuaguaaaaaagcauauuu

SEQ ID NO: 418861 - RNA, 22 nt, Artificial Sequence
  Synthetic
uguuuaguaaaaaagcauauuu

SEQ ID NO: 418862 - RNA, 23 nt, Artificial Sequence
  Synthetic
cuguuuaguaaaaaagcauauuu

SEQ ID NO: 418863 - RNA, 24 nt, Artificial Sequence
  Synthetic
ucuguuuaguaaaaaagcauauuu

SEQ ID NO: 418864 - RNA, 18 nt, Artificial Sequence
  Synthetic
uagcauaucagcauauuu

SEQ ID NO: 418865 - RNA, 19 nt, Artificial Sequence
  Synthetic
uuagcauaucagcauauuu

SEQ ID NO: 418866 - RNA, 20 nt, Artificial Sequence
  Synthetic
auuagcauaucagcauauuu

SEQ ID NO: 418867 - RNA, 21 nt, Artificial Sequence
  Synthetic
gauuagcauaucagcauauuu

SEQ ID NO: 418868 - RNA, 22 nt, Artificial Sequence
  Synthetic
ugauuagcauaucagcauauuu

SEQ ID NO: 418869 - RNA, 23 nt, Artificial Sequence
  Synthetic
augauuagcauaucagcauauuu

SEQ ID NO: 418870 - RNA, 24 nt, Artificial Sequence
  Synthetic
aaugauuagcauaucagcauauuu

SEQ ID NO: 418871 - RNA, 18 nt, Artificial Sequence
  Synthetic
aacuauuuaggcauauuu

SEQ ID NO: 418872 - RNA, 19 nt, Artificial Sequence
  Synthetic
gaacuauuuaggcauauuu

SEQ ID NO: 418873 - RNA, 20 nt, Artificial Sequence
  Synthetic
agaacuauuuaggcauauuu

SEQ ID NO: 418874 - RNA, 21 nt, Artificial Sequence
  Synthetic
cagaacuauuuaggcauauuu

SEQ ID NO: 418875 - RNA, 22 nt, Artificial Sequence
  Synthetic
ccagaacuauuuaggcauauuu

SEQ ID NO: 418876 - RNA, 23 nt, Artificial Sequence
  Synthetic
accagaacuauuuaggcauauuu

SEQ ID NO: 418877 - RNA, 24 nt, Artificial Sequence
  Synthetic
aaccagaacuauuuaggcauauuu

SEQ ID NO: 418878 - RNA, 18 nt, Artificial Sequence
  Synthetic
auaugugauggcauauuu

SEQ ID NO: 418879 - RNA, 19 nt, Artificial Sequence
  Synthetic
uauaugugauggcauauuu

SEQ ID NO: 418880 - RNA, 20 nt, Artificial Sequence
  Synthetic
auauaugugauggcauauuu

SEQ ID NO: 418881 - RNA, 21 nt, Artificial Sequence
  Synthetic
uauauaugugauggcauauuu

SEQ ID NO: 418882 - RNA, 22 nt, Artificial Sequence
  Synthetic
auauauaugugauggcauauuu

SEQ ID NO: 418883 - RNA, 23 nt, Artificial Sequence
  Synthetic
uauauauaugugauggcauauuu

SEQ ID NO: 418884 - RNA, 24 nt, Artificial Sequence
  Synthetic
auauauauaugugauggcauauuu

SEQ ID NO: 418885 - RNA, 18 nt, Artificial Sequence
  Synthetic
ugaagguccaucauauuu

SEQ ID NO: 418886 - RNA, 19 nt, Artificial Sequence
  Synthetic
gugaagguccaucauauuu

SEQ ID NO: 418887 - RNA, 20 nt, Artificial Sequence
  Synthetic
ggugaagguccaucauauuu

SEQ ID NO: 418888 - RNA, 21 nt, Artificial Sequence
  Synthetic
uggugaagguccaucauauuu

SEQ ID NO: 418889 - RNA, 22 nt, Artificial Sequence
  Synthetic
uuggugaagguccaucauauuu

SEQ ID NO: 418890 - RNA, 23 nt, Artificial Sequence
  Synthetic
uuuggugaagguccaucauauuu

SEQ ID NO: 418891 - RNA, 24 nt, Artificial Sequence
  Synthetic
uuuuggugaagguccaucauauuu

SEQ ID NO: 418892 - RNA, 18 nt, Artificial Sequence
  Synthetic
cuucaaugacucauauuu

SEQ ID NO: 418893 - RNA, 19 nt, Artificial Sequence
  Synthetic
ucuucaaugacucauauuu

SEQ ID NO: 418894 - RNA, 20 nt, Artificial Sequence
  Synthetic
aucuucaaugacucauauuu

SEQ ID NO: 418895 - RNA, 21 nt, Artificial Sequence
  Synthetic
aaucuucaaugacucauauuu

SEQ ID NO: 418896 - RNA, 22 nt, Artificial Sequence
  Synthetic
uaaucuucaaugacucauauuu

SEQ ID NO: 418897 - RNA, 23 nt, Artificial Sequence
  Synthetic
uuaaucuucaaugacucauauuu

SEQ ID NO: 418898 - RNA, 24 nt, Artificial Sequence
  Synthetic
uuuaaucuucaaugacucauauuu

SEQ ID NO: 418899 - RNA, 18 nt, Artificial Sequence
  Synthetic
ugcaguuggaagauauuu

SEQ ID NO: 418900 - RNA, 19 nt, Artificial Sequence
  Synthetic
cugcaguuggaagauauuu

SEQ ID NO: 418901 - RNA, 20 nt, Artificial Sequence
  Synthetic
acugcaguuggaagauauuu

SEQ ID NO: 418902 - RNA, 21 nt, Artificial Sequence
  Synthetic
aacugcaguuggaagauauuu

SEQ ID NO: 418903 - RNA, 22 nt, Artificial Sequence
  Synthetic
uaacugcaguuggaagauauuu

SEQ ID NO: 418904 - RNA, 23 nt, Artificial Sequence
  Synthetic
cuaacugcaguuggaagauauuu

SEQ ID NO: 418905 - RNA, 24 nt, Artificial Sequence
  Synthetic
gcuaacugcaguuggaagauauuu

SEQ ID NO: 418906 - RNA, 18 nt, Artificial Sequence
  Synthetic
uuuauuccacagauauuu

SEQ ID NO: 418907 - RNA, 19 nt, Artificial Sequence
  Synthetic
auuuauuccacagauauuu

SEQ ID NO: 418908 - RNA, 20 nt, Artificial Sequence
  Synthetic
cauuuauuccacagauauuu

SEQ ID NO: 418909 - RNA, 21 nt, Artificial Sequence
  Synthetic
ucauuuauuccacagauauuu

SEQ ID NO: 418910 - RNA, 22 nt, Artificial Sequence
  Synthetic
uucauuuauuccacagauauuu

SEQ ID NO: 418911 - RNA, 23 nt, Artificial Sequence
  Synthetic
guucauuuauuccacagauauuu

SEQ ID NO: 418912 - RNA, 24 nt, Artificial Sequence
  Synthetic
uguucauuuauuccacagauauuu

SEQ ID NO: 418913 - RNA, 18 nt, Artificial Sequence
  Synthetic
cuuggaaacgggauauuu

SEQ ID NO: 418914 - RNA, 19 nt, Artificial Sequence
  Synthetic
acuuggaaacgggauauuu

SEQ ID NO: 418915 - RNA, 20 nt, Artificial Sequence
  Synthetic
gacuuggaaacgggauauuu

SEQ ID NO: 418916 - RNA, 21 nt, Artificial Sequence
  Synthetic
agacuuggaaacgggauauuu

SEQ ID NO: 418917 - RNA, 22 nt, Artificial Sequence
  Synthetic
aagacuuggaaacgggauauuu

SEQ ID NO: 418918 - RNA, 23 nt, Artificial Sequence
  Synthetic
aaagacuuggaaacgggauauuu

SEQ ID NO: 418919 - RNA, 24 nt, Artificial Sequence
  Synthetic
uaaagacuuggaaacgggauauuu

SEQ ID NO: 418920 - RNA, 18 nt, Artificial Sequence
  Synthetic
ucuggucaugggauauuu

SEQ ID NO: 418921 - RNA, 19 nt, Artificial Sequence
  Synthetic
uucuggucaugggauauuu

SEQ ID NO: 418922 - RNA, 20 nt, Artificial Sequence
  Synthetic
cuucuggucaugggauauuu

SEQ ID NO: 418923 - RNA, 21 nt, Artificial Sequence
  Synthetic
ucuucuggucaugggauauuu

SEQ ID NO: 418924 - RNA, 22 nt, Artificial Sequence
  Synthetic
cucuucuggucaugggauauuu

SEQ ID NO: 418925 - RNA, 23 nt, Artificial Sequence
  Synthetic
acucuucuggucaugggauauuu

SEQ ID NO: 418926 - RNA, 24 nt, Artificial Sequence
  Synthetic
uacucuucuggucaugggauauuu

SEQ ID NO: 418927 - RNA, 18 nt, Artificial Sequence
  Synthetic
uuuuauagauggauauuu

SEQ ID NO: 418928 - RNA, 19 nt, Artificial Sequence
  Synthetic
auuuuauagauggauauuu

SEQ ID NO: 418929 - RNA, 20 nt, Artificial Sequence
  Synthetic
aauuuuauagauggauauuu

SEQ ID NO: 418930 - RNA, 21 nt, Artificial Sequence
  Synthetic
gaauuuuauagauggauauuu

SEQ ID NO: 418931 - RNA, 22 nt, Artificial Sequence
  Synthetic
agaauuuuauagauggauauuu

SEQ ID NO: 418932 - RNA, 23 nt, Artificial Sequence
  Synthetic
cagaauuuuauagauggauauuu

SEQ ID NO: 418933 - RNA, 24 nt, Artificial Sequence
  Synthetic
acagaauuuuauagauggauauuu

SEQ ID NO: 418934 - RNA, 18 nt, Artificial Sequence
  Synthetic
aaaaggcacuggauauuu

SEQ ID NO: 418935 - RNA, 19 nt, Artificial Sequence
  Synthetic
gaaaaggcacuggauauuu

SEQ ID NO: 418936 - RNA, 20 nt, Artificial Sequence
  Synthetic
ugaaaaggcacuggauauuu

SEQ ID NO: 418937 - RNA, 21 nt, Artificial Sequence
  Synthetic
gugaaaaggcacuggauauuu

SEQ ID NO: 418938 - RNA, 22 nt, Artificial Sequence
  Synthetic
cgugaaaaggcacuggauauuu

SEQ ID NO: 418939 - RNA, 23 nt, Artificial Sequence
  Synthetic
gcgugaaaaggcacuggauauuu

SEQ ID NO: 418940 - RNA, 24 nt, Artificial Sequence
  Synthetic
ggcgugaaaaggcacuggauauuu

SEQ ID NO: 418941 - RNA, 18 nt, Artificial Sequence
  Synthetic
aaugagaccuggauauuu

SEQ ID NO: 418942 - RNA, 19 nt, Artificial Sequence
  Synthetic
gaaugagaccuggauauuu

SEQ ID NO: 418943 - RNA, 20 nt, Artificial Sequence
  Synthetic
agaaugagaccuggauauuu

SEQ ID NO: 418944 - RNA, 21 nt, Artificial Sequence
  Synthetic
uagaaugagaccuggauauuu

SEQ ID NO: 418945 - RNA, 22 nt, Artificial Sequence
  Synthetic
auagaaugagaccuggauauuu

SEQ ID NO: 418946 - RNA, 23 nt, Artificial Sequence
  Synthetic
aauagaaugagaccuggauauuu

SEQ ID NO: 418947 - RNA, 24 nt, Artificial Sequence
  Synthetic
aaauagaaugagaccuggauauuu

SEQ ID NO: 418948 - RNA, 18 nt, Artificial Sequence
  Synthetic
agauguguggugauauuu

SEQ ID NO: 418949 - RNA, 19 nt, Artificial Sequence
  Synthetic
uagauguguggugauauuu

SEQ ID NO: 418950 - RNA, 20 nt, Artificial Sequence
  Synthetic
guagauguguggugauauuu

SEQ ID NO: 418951 - RNA, 21 nt, Artificial Sequence
  Synthetic
uguagauguguggugauauuu

SEQ ID NO: 418952 - RNA, 22 nt, Artificial Sequence
  Synthetic
uuguagauguguggugauauuu

SEQ ID NO: 418953 - RNA, 23 nt, Artificial Sequence
  Synthetic
guuguagauguguggugauauuu

SEQ ID NO: 418954 - RNA, 24 nt, Artificial Sequence
  Synthetic
gguuguagauguguggugauauuu

SEQ ID NO: 418955 - RNA, 18 nt, Artificial Sequence
  Synthetic
uuuugucucuugauauuu

SEQ ID NO: 418956 - RNA, 19 nt, Artificial Sequence
  Synthetic
auuuugucucuugauauuu

SEQ ID NO: 418957 - RNA, 20 nt, Artificial Sequence
  Synthetic
gauuuugucucuugauauuu

SEQ ID NO: 418958 - RNA, 21 nt, Artificial Sequence
  Synthetic
agauuuugucucuugauauuu

SEQ ID NO: 418959 - RNA, 22 nt, Artificial Sequence
  Synthetic
aagauuuugucucuugauauuu

SEQ ID NO: 418960 - RNA, 23 nt, Artificial Sequence
  Synthetic
aaagauuuugucucuugauauuu

SEQ ID NO: 418961 - RNA, 24 nt, Artificial Sequence
  Synthetic
aaaagauuuugucucuugauauuu

SEQ ID NO: 418962 - RNA, 18 nt, Artificial Sequence
  Synthetic
uucuuuuuuuugauauuu

SEQ ID NO: 418963 - RNA, 19 nt, Artificial Sequence
  Synthetic
guucuuuuuuuugauauuu

SEQ ID NO: 418964 - RNA, 20 nt, Artificial Sequence
  Synthetic
aguucuuuuuuuugauauuu

SEQ ID NO: 418965 - RNA, 21 nt, Artificial Sequence
  Synthetic
aaguucuuuuuuuugauauuu

SEQ ID NO: 418966 - RNA, 22 nt, Artificial Sequence
  Synthetic
uaaguucuuuuuuuugauauuu

SEQ ID NO: 418967 - RNA, 23 nt, Artificial Sequence
  Synthetic
guaaguucuuuuuuuugauauuu

SEQ ID NO: 418968 - RNA, 24 nt, Artificial Sequence
  Synthetic
aguaaguucuuuuuuuugauauuu

SEQ ID NO: 418969 - RNA, 18 nt, Artificial Sequence
  Synthetic
uaauaaguacauauauuu

SEQ ID NO: 418970 - RNA, 19 nt, Artificial Sequence
  Synthetic
auaauaaguacauauauuu

SEQ ID NO: 418971 - RNA, 20 nt, Artificial Sequence
  Synthetic
aauaauaaguacauauauuu

SEQ ID NO: 418972 - RNA, 21 nt, Artificial Sequence
  Synthetic
aaauaauaaguacauauauuu

SEQ ID NO: 418973 - RNA, 22 nt, Artificial Sequence
  Synthetic
caaauaauaaguacauauauuu

SEQ ID NO: 418974 - RNA, 23 nt, Artificial Sequence
  Synthetic
acaaauaauaaguacauauauuu

SEQ ID NO: 418975 - RNA, 24 nt, Artificial Sequence
  Synthetic
gacaaauaauaaguacauauauuu

SEQ ID NO: 418976 - RNA, 18 nt, Artificial Sequence
  Synthetic
auaucuaaauauauauuu

SEQ ID NO: 418977 - RNA, 19 nt, Artificial Sequence
  Synthetic
aauaucuaaauauauauuu

SEQ ID NO: 418978 - RNA, 20 nt, Artificial Sequence
  Synthetic
aaauaucuaaauauauauuu

SEQ ID NO: 418979 - RNA, 21 nt, Artificial Sequence
  Synthetic
aaaauaucuaaauauauauuu

SEQ ID NO: 418980 - RNA, 22 nt, Artificial Sequence
  Synthetic
gaaaauaucuaaauauauauuu

SEQ ID NO: 418981 - RNA, 23 nt, Artificial Sequence
  Synthetic
agaaaauaucuaaauauauauuu

SEQ ID NO: 418982 - RNA, 24 nt, Artificial Sequence
  Synthetic
uagaaaauaucuaaauauauauuu

SEQ ID NO: 418983 - RNA, 18 nt, Artificial Sequence
  Synthetic
caguagguauauauauuu

SEQ ID NO: 418984 - RNA, 19 nt, Artificial Sequence
  Synthetic
acaguagguauauauauuu

SEQ ID NO: 418985 - RNA, 20 nt, Artificial Sequence
  Synthetic
cacaguagguauauauauuu

SEQ ID NO: 418986 - RNA, 21 nt, Artificial Sequence
  Synthetic
acacaguagguauauauauuu

SEQ ID NO: 418987 - RNA, 22 nt, Artificial Sequence
  Synthetic
uacacaguagguauauauauuu

SEQ ID NO: 418988 - RNA, 23 nt, Artificial Sequence
  Synthetic
guacacaguagguauauauauuu

SEQ ID NO: 418989 - RNA, 24 nt, Artificial Sequence
  Synthetic
gguacacaguagguauauauauuu

SEQ ID NO: 418990 - RNA, 18 nt, Artificial Sequence
  Synthetic
uaguagguauauauauuu

SEQ ID NO: 418991 - RNA, 19 nt, Artificial Sequence
  Synthetic
auaguagguauauauauuu

SEQ ID NO: 418992 - RNA, 20 nt, Artificial Sequence
  Synthetic
cauaguagguauauauauuu

SEQ ID NO: 418993 - RNA, 21 nt, Artificial Sequence
  Synthetic
acauaguagguauauauauuu

SEQ ID NO: 418994 - RNA, 22 nt, Artificial Sequence
  Synthetic
uacauaguagguauauauauuu

SEQ ID NO: 418995 - RNA, 23 nt, Artificial Sequence
  Synthetic
guacauaguagguauauauauuu

SEQ ID NO: 418996 - RNA, 24 nt, Artificial Sequence
  Synthetic
gguacauaguagguauauauauuu

SEQ ID NO: 418997 - RNA, 18 nt, Artificial Sequence
  Synthetic
caacugccaauuauauuu

SEQ ID NO: 418998 - RNA, 19 nt, Artificial Sequence
  Synthetic
gcaacugccaauuauauuu

SEQ ID NO: 418999 - RNA, 20 nt, Artificial Sequence
  Synthetic
ggcaacugccaauuauauuu

SEQ ID NO: 419000 - RNA, 21 nt, Artificial Sequence
  Synthetic
aggcaacugccaauuauauuu

SEQ ID NO: 419001 - RNA, 22 nt, Artificial Sequence
  Synthetic
aaggcaacugccaauuauauuu

SEQ ID NO: 419002 - RNA, 23 nt, Artificial Sequence
  Synthetic
uaaggcaacugccaauuauauuu

SEQ ID NO: 419003 - RNA, 24 nt, Artificial Sequence
  Synthetic
auaaggcaacugccaauuauauuu

SEQ ID NO: 419004 - RNA, 18 nt, Artificial Sequence
  Synthetic
gggcauuuuauuauauuu

SEQ ID NO: 419005 - RNA, 19 nt, Artificial Sequence
  Synthetic
agggcauuuuauuauauuu

SEQ ID NO: 419006 - RNA, 20 nt, Artificial Sequence
  Synthetic
cagggcauuuuauuauauuu

SEQ ID NO: 419007 - RNA, 21 nt, Artificial Sequence
  Synthetic
ucagggcauuuuauuauauuu

SEQ ID NO: 419008 - RNA, 22 nt, Artificial Sequence
  Synthetic
aucagggcauuuuauuauauuu

SEQ ID NO: 419009 - RNA, 23 nt, Artificial Sequence
  Synthetic
uaucagggcauuuuauuauauuu

SEQ ID NO: 419010 - RNA, 24 nt, Artificial Sequence
  Synthetic
uuaucagggcauuuuauuauauuu

SEQ ID NO: 419011 - RNA, 18 nt, Artificial Sequence
  Synthetic
uugacagaucuuauauuu

SEQ ID NO: 419012 - RNA, 19 nt, Artificial Sequence
  Synthetic
guugacagaucuuauauuu

SEQ ID NO: 419013 - RNA, 20 nt, Artificial Sequence
  Synthetic
aguugacagaucuuauauuu

SEQ ID NO: 419014 - RNA, 21 nt, Artificial Sequence
  Synthetic
uaguugacagaucuuauauuu

SEQ ID NO: 419015 - RNA, 22 nt, Artificial Sequence
  Synthetic
auaguugacagaucuuauauuu

SEQ ID NO: 419016 - RNA, 23 nt, Artificial Sequence
  Synthetic
aauaguugacagaucuuauauuu

SEQ ID NO: 419017 - RNA, 24 nt, Artificial Sequence
  Synthetic
uaauaguugacagaucuuauauuu

SEQ ID NO: 419018 - RNA, 18 nt, Artificial Sequence
  Synthetic
uuucauuuauuuauauuu

SEQ ID NO: 419019 - RNA, 19 nt, Artificial Sequence
  Synthetic
uuuucauuuauuuauauuu

SEQ ID NO: 419020 - RNA, 20 nt, Artificial Sequence
  Synthetic
auuuucauuuauuuauauuu

SEQ ID NO: 419021 - RNA, 21 nt, Artificial Sequence
  Synthetic
gauuuucauuuauuuauauuu

SEQ ID NO: 419022 - RNA, 22 nt, Artificial Sequence
  Synthetic
ugauuuucauuuauuuauauuu

SEQ ID NO: 419023 - RNA, 23 nt, Artificial Sequence
  Synthetic
uugauuuucauuuauuuauauuu

SEQ ID NO: 419024 - RNA, 24 nt, Artificial Sequence
  Synthetic
auugauuuucauuuauuuauauuu

SEQ ID NO: 419025 - RNA, 18 nt, Artificial Sequence
  Synthetic
aaguuucuaaaacuauuu

SEQ ID NO: 419026 - RNA, 19 nt, Artificial Sequence
  Synthetic
caaguuucuaaaacuauuu

SEQ ID NO: 419027 - RNA, 20 nt, Artificial Sequence
  Synthetic
gcaaguuucuaaaacuauuu

SEQ ID NO: 419028 - RNA, 21 nt, Artificial Sequence
  Synthetic
ugcaaguuucuaaaacuauuu

SEQ ID NO: 419029 - RNA, 22 nt, Artificial Sequence
  Synthetic
gugcaaguuucuaaaacuauuu

SEQ ID NO: 419030 - RNA, 23 nt, Artificial Sequence
  Synthetic
ugugcaaguuucuaaaacuauuu

SEQ ID NO: 419031 - RNA, 24 nt, Artificial Sequence
  Synthetic
uugugcaaguuucuaaaacuauuu

SEQ ID NO: 419032 - RNA, 18 nt, Artificial Sequence
  Synthetic
cauuugauagaacuauuu

SEQ ID NO: 419033 - RNA, 19 nt, Artificial Sequence
  Synthetic
acauuugauagaacuauuu

SEQ ID NO: 419034 - RNA, 20 nt, Artificial Sequence
  Synthetic
uacauuugauagaacuauuu

SEQ ID NO: 419035 - RNA, 21 nt, Artificial Sequence
  Synthetic
uuacauuugauagaacuauuu

SEQ ID NO: 419036 - RNA, 22 nt, Artificial Sequence
  Synthetic
auuacauuugauagaacuauuu

SEQ ID NO: 419037 - RNA, 23 nt, Artificial Sequence
  Synthetic
uauuacauuugauagaacuauuu

SEQ ID NO: 419038 - RNA, 24 nt, Artificial Sequence
  Synthetic
uuauuacauuugauagaacuauuu

SEQ ID NO: 419039 - RNA, 18 nt, Artificial Sequence
  Synthetic
aguuuuaaauaccuauuu

SEQ ID NO: 419040 - RNA, 19 nt, Artificial Sequence
  Synthetic
uaguuuuaaauaccuauuu

SEQ ID NO: 419041 - RNA, 20 nt, Artificial Sequence
  Synthetic
cuaguuuuaaauaccuauuu

SEQ ID NO: 419042 - RNA, 21 nt, Artificial Sequence
  Synthetic
ucuaguuuuaaauaccuauuu

SEQ ID NO: 419043 - RNA, 22 nt, Artificial Sequence
  Synthetic
uucuaguuuuaaauaccuauuu

SEQ ID NO: 419044 - RNA, 23 nt, Artificial Sequence
  Synthetic
cuucuaguuuuaaauaccuauuu

SEQ ID NO: 419045 - RNA, 24 nt, Artificial Sequence
  Synthetic
acuucuaguuuuaaauaccuauuu

SEQ ID NO: 419046 - RNA, 18 nt, Artificial Sequence
  Synthetic
gagguuacagcccuauuu

SEQ ID NO: 419047 - RNA, 19 nt, Artificial Sequence
  Synthetic
ugagguuacagcccuauuu

SEQ ID NO: 419048 - RNA, 20 nt, Artificial Sequence
  Synthetic
uugagguuacagcccuauuu

SEQ ID NO: 419049 - RNA, 21 nt, Artificial Sequence
  Synthetic
guugagguuacagcccuauuu

SEQ ID NO: 419050 - RNA, 22 nt, Artificial Sequence
  Synthetic
gguugagguuacagcccuauuu

SEQ ID NO: 419051 - RNA, 23 nt, Artificial Sequence
  Synthetic
agguugagguuacagcccuauuu

SEQ ID NO: 419052 - RNA, 24 nt, Artificial Sequence
  Synthetic
aagguugagguuacagcccuauuu

SEQ ID NO: 419053 - RNA, 18 nt, Artificial Sequence
  Synthetic
auuugcugaguccuauuu

SEQ ID NO: 419054 - RNA, 19 nt, Artificial Sequence
  Synthetic
cauuugcugaguccuauuu

SEQ ID NO: 419055 - RNA, 20 nt, Artificial Sequence
  Synthetic
ucauuugcugaguccuauuu

SEQ ID NO: 419056 - RNA, 21 nt, Artificial Sequence
  Synthetic
uucauuugcugaguccuauuu

SEQ ID NO: 419057 - RNA, 22 nt, Artificial Sequence
  Synthetic
uuucauuugcugaguccuauuu

SEQ ID NO: 419058 - RNA, 23 nt, Artificial Sequence
  Synthetic
uuuucauuugcugaguccuauuu

SEQ ID NO: 419059 - RNA, 24 nt, Artificial Sequence
  Synthetic
guuuucauuugcugaguccuauuu

SEQ ID NO: 419060 - RNA, 18 nt, Artificial Sequence
  Synthetic
acagagaacaagcuauuu

SEQ ID NO: 419061 - RNA, 19 nt, Artificial Sequence
  Synthetic
gacagagaacaagcuauuu

SEQ ID NO: 419062 - RNA, 20 nt, Artificial Sequence
  Synthetic
ugacagagaacaagcuauuu

SEQ ID NO: 419063 - RNA, 21 nt, Artificial Sequence
  Synthetic
uugacagagaacaagcuauuu

SEQ ID NO: 419064 - RNA, 22 nt, Artificial Sequence
  Synthetic
auugacagagaacaagcuauuu

SEQ ID NO: 419065 - RNA, 23 nt, Artificial Sequence
  Synthetic
cauugacagagaacaagcuauuu

SEQ ID NO: 419066 - RNA, 24 nt, Artificial Sequence
  Synthetic
acauugacagagaacaagcuauuu

SEQ ID NO: 419067 - RNA, 18 nt, Artificial Sequence
  Synthetic
cuguaaucccagcuauuu

SEQ ID NO: 419068 - RNA, 19 nt, Artificial Sequence
  Synthetic
ucuguaaucccagcuauuu

SEQ ID NO: 419069 - RNA, 20 nt, Artificial Sequence
  Synthetic
gucuguaaucccagcuauuu

SEQ ID NO: 419070 - RNA, 21 nt, Artificial Sequence
  Synthetic
ugucuguaaucccagcuauuu

SEQ ID NO: 419071 - RNA, 22 nt, Artificial Sequence
  Synthetic
gugucuguaaucccagcuauuu

SEQ ID NO: 419072 - RNA, 23 nt, Artificial Sequence
  Synthetic
ugugucuguaaucccagcuauuu

SEQ ID NO: 419073 - RNA, 24 nt, Artificial Sequence
  Synthetic
augugucuguaaucccagcuauuu

SEQ ID NO: 419074 - RNA, 18 nt, Artificial Sequence
  Synthetic
aauucuaagcagcuauuu

SEQ ID NO: 419075 - RNA, 19 nt, Artificial Sequence
  Synthetic
aaauucuaagcagcuauuu

SEQ ID NO: 419076 - RNA, 20 nt, Artificial Sequence
  Synthetic
caaauucuaagcagcuauuu

SEQ ID NO: 419077 - RNA, 21 nt, Artificial Sequence
  Synthetic
acaaauucuaagcagcuauuu

SEQ ID NO: 419078 - RNA, 22 nt, Artificial Sequence
  Synthetic
cacaaauucuaagcagcuauuu

SEQ ID NO: 419079 - RNA, 23 nt, Artificial Sequence
  Synthetic
gcacaaauucuaagcagcuauuu

SEQ ID NO: 419080 - RNA, 24 nt, Artificial Sequence
  Synthetic
agcacaaauucuaagcagcuauuu

SEQ ID NO: 419081 - RNA, 18 nt, Artificial Sequence
  Synthetic
ugauguuuugagcuauuu

SEQ ID NO: 419082 - RNA, 19 nt, Artificial Sequence
  Synthetic
cugauguuuugagcuauuu

SEQ ID NO: 419083 - RNA, 20 nt, Artificial Sequence
  Synthetic
acugauguuuugagcuauuu

SEQ ID NO: 419084 - RNA, 21 nt, Artificial Sequence
  Synthetic
gacugauguuuugagcuauuu

SEQ ID NO: 419085 - RNA, 22 nt, Artificial Sequence
  Synthetic
agacugauguuuugagcuauuu

SEQ ID NO: 419086 - RNA, 23 nt, Artificial Sequence
  Synthetic
uagacugauguuuugagcuauuu

SEQ ID NO: 419087 - RNA, 24 nt, Artificial Sequence
  Synthetic
uuagacugauguuuugagcuauuu

SEQ ID NO: 419088 - RNA, 18 nt, Artificial Sequence
  Synthetic
auaaugaagaggcuauuu

SEQ ID NO: 419089 - RNA, 19 nt, Artificial Sequence
  Synthetic
aauaaugaagaggcuauuu

SEQ ID NO: 419090 - RNA, 20 nt, Artificial Sequence
  Synthetic
gaauaaugaagaggcuauuu

SEQ ID NO: 419091 - RNA, 21 nt, Artificial Sequence
  Synthetic
agaauaaugaagaggcuauuu

SEQ ID NO: 419092 - RNA, 22 nt, Artificial Sequence
  Synthetic
uagaauaaugaagaggcuauuu

SEQ ID NO: 419093 - RNA, 23 nt, Artificial Sequence
  Synthetic
auagaauaaugaagaggcuauuu

SEQ ID NO: 419094 - RNA, 24 nt, Artificial Sequence
  Synthetic
aauagaauaaugaagaggcuauuu

SEQ ID NO: 419095 - RNA, 18 nt, Artificial Sequence
  Synthetic
uacaugauuaaucuauuu

SEQ ID NO: 419096 - RNA, 19 nt, Artificial Sequence
  Synthetic
auacaugauuaaucuauuu

SEQ ID NO: 419097 - RNA, 20 nt, Artificial Sequence
  Synthetic
uauacaugauuaaucuauuu

SEQ ID NO: 419098 - RNA, 21 nt, Artificial Sequence
  Synthetic
auauacaugauuaaucuauuu

SEQ ID NO: 419099 - RNA, 22 nt, Artificial Sequence
  Synthetic
gauauacaugauuaaucuauuu

SEQ ID NO: 419100 - RNA, 23 nt, Artificial Sequence
  Synthetic
ugauauacaugauuaaucuauuu

SEQ ID NO: 419101 - RNA, 24 nt, Artificial Sequence
  Synthetic
cugauauacaugauuaaucuauuu

SEQ ID NO: 419102 - RNA, 18 nt, Artificial Sequence
  Synthetic
acauuuugagaucuauuu

SEQ ID NO: 419103 - RNA, 19 nt, Artificial Sequence
  Synthetic
uacauuuugagaucuauuu

SEQ ID NO: 419104 - RNA, 20 nt, Artificial Sequence
  Synthetic
auacauuuugagaucuauuu

SEQ ID NO: 419105 - RNA, 21 nt, Artificial Sequence
  Synthetic
aauacauuuugagaucuauuu

SEQ ID NO: 419106 - RNA, 22 nt, Artificial Sequence
  Synthetic
gaauacauuuugagaucuauuu

SEQ ID NO: 419107 - RNA, 23 nt, Artificial Sequence
  Synthetic
ggaauacauuuugagaucuauuu

SEQ ID NO: 419108 - RNA, 24 nt, Artificial Sequence
  Synthetic
gggaauacauuuugagaucuauuu

SEQ ID NO: 419109 - RNA, 18 nt, Artificial Sequence
  Synthetic
uaccuuguguaucuauuu

SEQ ID NO: 419110 - RNA, 19 nt, Artificial Sequence
  Synthetic
auaccuuguguaucuauuu

SEQ ID NO: 419111 - RNA, 20 nt, Artificial Sequence
  Synthetic
uauaccuuguguaucuauuu

SEQ ID NO: 419112 - RNA, 21 nt, Artificial Sequence
  Synthetic
guauaccuuguguaucuauuu

SEQ ID NO: 419113 - RNA, 22 nt, Artificial Sequence
  Synthetic
aguauaccuuguguaucuauuu

SEQ ID NO: 419114 - RNA, 23 nt, Artificial Sequence
  Synthetic
caguauaccuuguguaucuauuu

SEQ ID NO: 419115 - RNA, 24 nt, Artificial Sequence
  Synthetic
ucaguauaccuuguguaucuauuu

SEQ ID NO: 419116 - RNA, 18 nt, Artificial Sequence
  Synthetic
ugccucuauucucuauuu

SEQ ID NO: 419117 - RNA, 19 nt, Artificial Sequence
  Synthetic
cugccucuauucucuauuu

SEQ ID NO: 419118 - RNA, 20 nt, Artificial Sequence
  Synthetic
acugccucuauucucuauuu

SEQ ID NO: 419119 - RNA, 21 nt, Artificial Sequence
  Synthetic
uacugccucuauucucuauuu

SEQ ID NO: 419120 - RNA, 22 nt, Artificial Sequence
  Synthetic
cuacugccucuauucucuauuu

SEQ ID NO: 419121 - RNA, 23 nt, Artificial Sequence
  Synthetic
ccuacugccucuauucucuauuu

SEQ ID NO: 419122 - RNA, 24 nt, Artificial Sequence
  Synthetic
cccuacugccucuauucucuauuu

SEQ ID NO: 419123 - RNA, 18 nt, Artificial Sequence
  Synthetic
uuccaagauugucuauuu

SEQ ID NO: 419124 - RNA, 19 nt, Artificial Sequence
  Synthetic
uuuccaagauugucuauuu

SEQ ID NO: 419125 - RNA, 20 nt, Artificial Sequence
  Synthetic
uuuuccaagauugucuauuu

SEQ ID NO: 419126 - RNA, 21 nt, Artificial Sequence
  Synthetic
cuuuuccaagauugucuauuu

SEQ ID NO: 419127 - RNA, 22 nt, Artificial Sequence
  Synthetic
acuuuuccaagauugucuauuu

SEQ ID NO: 419128 - RNA, 23 nt, Artificial Sequence
  Synthetic
uacuuuuccaagauugucuauuu

SEQ ID NO: 419129 - RNA, 24 nt, Artificial Sequence
  Synthetic
uuacuuuuccaagauugucuauuu

SEQ ID NO: 419130 - RNA, 18 nt, Artificial Sequence
  Synthetic
acccacugaauucuauuu

SEQ ID NO: 419131 - RNA, 19 nt, Artificial Sequence
  Synthetic
aacccacugaauucuauuu

SEQ ID NO: 419132 - RNA, 20 nt, Artificial Sequence
  Synthetic
uaacccacugaauucuauuu

SEQ ID NO: 419133 - RNA, 21 nt, Artificial Sequence
  Synthetic
uuaacccacugaauucuauuu

SEQ ID NO: 419134 - RNA, 22 nt, Artificial Sequence
  Synthetic
uuuaacccacugaauucuauuu

SEQ ID NO: 419135 - RNA, 23 nt, Artificial Sequence
  Synthetic
guuuaacccacugaauucuauuu

SEQ ID NO: 419136 - RNA, 24 nt, Artificial Sequence
  Synthetic
uguuuaacccacugaauucuauuu

SEQ ID NO: 419137 - RNA, 18 nt, Artificial Sequence
  Synthetic
aagcaguuuauucuauuu

SEQ ID NO: 419138 - RNA, 19 nt, Artificial Sequence
  Synthetic
aaagcaguuuauucuauuu

SEQ ID NO: 419139 - RNA, 20 nt, Artificial Sequence
  Synthetic
aaaagcaguuuauucuauuu

SEQ ID NO: 419140 - RNA, 21 nt, Artificial Sequence
  Synthetic
uaaaagcaguuuauucuauuu

SEQ ID NO: 419141 - RNA, 22 nt, Artificial Sequence
  Synthetic
guaaaagcaguuuauucuauuu

SEQ ID NO: 419142 - RNA, 23 nt, Artificial Sequence
  Synthetic
uguaaaagcaguuuauucuauuu

SEQ ID NO: 419143 - RNA, 24 nt, Artificial Sequence
  Synthetic
auguaaaagcaguuuauucuauuu

SEQ ID NO: 419144 - RNA, 18 nt, Artificial Sequence
  Synthetic
uuaaaauaagaaguauuu

SEQ ID NO: 419145 - RNA, 19 nt, Artificial Sequence
  Synthetic
auuaaaauaagaaguauuu

SEQ ID NO: 419146 - RNA, 20 nt, Artificial Sequence
  Synthetic
uauuaaaauaagaaguauuu

SEQ ID NO: 419147 - RNA, 21 nt, Artificial Sequence
  Synthetic
auauuaaaauaagaaguauuu

SEQ ID NO: 419148 - RNA, 22 nt, Artificial Sequence
  Synthetic
aauauuaaaauaagaaguauuu

SEQ ID NO: 419149 - RNA, 23 nt, Artificial Sequence
  Synthetic
uaauauuaaaauaagaaguauuu

SEQ ID NO: 419150 - RNA, 24 nt, Artificial Sequence
  Synthetic
cuaauauuaaaauaagaaguauuu

SEQ ID NO: 419151 - RNA, 18 nt, Artificial Sequence
  Synthetic
aaaaaugcugaaguauuu

SEQ ID NO: 419152 - RNA, 19 nt, Artificial Sequence
  Synthetic
gaaaaaugcugaaguauuu

SEQ ID NO: 419153 - RNA, 20 nt, Artificial Sequence
  Synthetic
agaaaaaugcugaaguauuu

SEQ ID NO: 419154 - RNA, 21 nt, Artificial Sequence
  Synthetic
gagaaaaaugcugaaguauuu

SEQ ID NO: 419155 - RNA, 22 nt, Artificial Sequence
  Synthetic
agagaaaaaugcugaaguauuu

SEQ ID NO: 419156 - RNA, 23 nt, Artificial Sequence
  Synthetic
aagagaaaaaugcugaaguauuu

SEQ ID NO: 419157 - RNA, 24 nt, Artificial Sequence
  Synthetic
caagagaaaaaugcugaaguauuu

SEQ ID NO: 419158 - RNA, 18 nt, Artificial Sequence
  Synthetic
auauaaagagcaguauuu

SEQ ID NO: 419159 - RNA, 19 nt, Artificial Sequence
  Synthetic
uauauaaagagcaguauuu

SEQ ID NO: 419160 - RNA, 20 nt, Artificial Sequence
  Synthetic
auauauaaagagcaguauuu

SEQ ID NO: 419161 - RNA, 21 nt, Artificial Sequence
  Synthetic
aauauauaaagagcaguauuu

SEQ ID NO: 419162 - RNA, 22 nt, Artificial Sequence
  Synthetic
aaauauauaaagagcaguauuu

SEQ ID NO: 419163 - RNA, 23 nt, Artificial Sequence
  Synthetic
gaaauauauaaagagcaguauuu

SEQ ID NO: 419164 - RNA, 24 nt, Artificial Sequence
  Synthetic
cgaaauauauaaagagcaguauuu

SEQ ID NO: 419165 - RNA, 18 nt, Artificial Sequence
  Synthetic
aaugaaauagcaguauuu

SEQ ID NO: 419166 - RNA, 19 nt, Artificial Sequence
  Synthetic
uaaugaaauagcaguauuu

SEQ ID NO: 419167 - RNA, 20 nt, Artificial Sequence
  Synthetic
uuaaugaaauagcaguauuu

SEQ ID NO: 419168 - RNA, 21 nt, Artificial Sequence
  Synthetic
auuaaugaaauagcaguauuu

SEQ ID NO: 419169 - RNA, 22 nt, Artificial Sequence
  Synthetic
aauuaaugaaauagcaguauuu

SEQ ID NO: 419170 - RNA, 23 nt, Artificial Sequence
  Synthetic
gaauuaaugaaauagcaguauuu

SEQ ID NO: 419171 - RNA, 24 nt, Artificial Sequence
  Synthetic
ugaauuaaugaaauagcaguauuu

SEQ ID NO: 419172 - RNA, 18 nt, Artificial Sequence
  Synthetic
ucaaacauggcaguauuu

SEQ ID NO: 419173 - RNA, 19 nt, Artificial Sequence
  Synthetic
gucaaacauggcaguauuu

SEQ ID NO: 419174 - RNA, 20 nt, Artificial Sequence
  Synthetic
ggucaaacauggcaguauuu

SEQ ID NO: 419175 - RNA, 21 nt, Artificial Sequence
  Synthetic
aggucaaacauggcaguauuu

SEQ ID NO: 419176 - RNA, 22 nt, Artificial Sequence
  Synthetic
gaggucaaacauggcaguauuu

SEQ ID NO: 419177 - RNA, 23 nt, Artificial Sequence
  Synthetic
agaggucaaacauggcaguauuu

SEQ ID NO: 419178 - RNA, 24 nt, Artificial Sequence
  Synthetic
aagaggucaaacauggcaguauuu

SEQ ID NO: 419179 - RNA, 18 nt, Artificial Sequence
  Synthetic
agaacaccaucaguauuu

SEQ ID NO: 419180 - RNA, 19 nt, Artificial Sequence
  Synthetic
aagaacaccaucaguauuu

SEQ ID NO: 419181 - RNA, 20 nt, Artificial Sequence
  Synthetic
gaagaacaccaucaguauuu

SEQ ID NO: 419182 - RNA, 21 nt, Artificial Sequence
  Synthetic
agaagaacaccaucaguauuu

SEQ ID NO: 419183 - RNA, 22 nt, Artificial Sequence
  Synthetic
aagaagaacaccaucaguauuu

SEQ ID NO: 419184 - RNA, 23 nt, Artificial Sequence
  Synthetic
uaagaagaacaccaucaguauuu

SEQ ID NO: 419185 - RNA, 24 nt, Artificial Sequence
  Synthetic
auaagaagaacaccaucaguauuu

SEQ ID NO: 419186 - RNA, 18 nt, Artificial Sequence
  Synthetic
acuaggugauacguauuu

SEQ ID NO: 419187 - RNA, 19 nt, Artificial Sequence
  Synthetic
uacuaggugauacguauuu

SEQ ID NO: 419188 - RNA, 20 nt, Artificial Sequence
  Synthetic
uuacuaggugauacguauuu

SEQ ID NO: 419189 - RNA, 21 nt, Artificial Sequence
  Synthetic
auuacuaggugauacguauuu

SEQ ID NO: 419190 - RNA, 22 nt, Artificial Sequence
  Synthetic
uauuacuaggugauacguauuu

SEQ ID NO: 419191 - RNA, 23 nt, Artificial Sequence
  Synthetic
guauuacuaggugauacguauuu

SEQ ID NO: 419192 - RNA, 24 nt, Artificial Sequence
  Synthetic
cguauuacuaggugauacguauuu

SEQ ID NO: 419193 - RNA, 18 nt, Artificial Sequence
  Synthetic
cauuccgcccagguauuu

SEQ ID NO: 419194 - RNA, 19 nt, Artificial Sequence
  Synthetic
ucauuccgcccagguauuu

SEQ ID NO: 419195 - RNA, 20 nt, Artificial Sequence
  Synthetic
cucauuccgcccagguauuu

SEQ ID NO: 419196 - RNA, 21 nt, Artificial Sequence
  Synthetic
gcucauuccgcccagguauuu

SEQ ID NO: 419197 - RNA, 22 nt, Artificial Sequence
  Synthetic
agcucauuccgcccagguauuu

SEQ ID NO: 419198 - RNA, 23 nt, Artificial Sequence
  Synthetic
uagcucauuccgcccagguauuu

SEQ ID NO: 419199 - RNA, 24 nt, Artificial Sequence
  Synthetic
guagcucauuccgcccagguauuu

SEQ ID NO: 419200 - RNA, 18 nt, Artificial Sequence
  Synthetic
ggagagggaaggguauuu

SEQ ID NO: 419201 - RNA, 19 nt, Artificial Sequence
  Synthetic
uggagagggaaggguauuu

SEQ ID NO: 419202 - RNA, 20 nt, Artificial Sequence
  Synthetic
cuggagagggaaggguauuu

SEQ ID NO: 419203 - RNA, 21 nt, Artificial Sequence
  Synthetic
gcuggagagggaaggguauuu

SEQ ID NO: 419204 - RNA, 22 nt, Artificial Sequence
  Synthetic
agcuggagagggaaggguauuu

SEQ ID NO: 419205 - RNA, 23 nt, Artificial Sequence
  Synthetic
aagcuggagagggaaggguauuu

SEQ ID NO: 419206 - RNA, 24 nt, Artificial Sequence
  Synthetic
gaagcuggagagggaaggguauuu

SEQ ID NO: 419207 - RNA, 18 nt, Artificial Sequence
  Synthetic
agguagcacuggguauuu

SEQ ID NO: 419208 - RNA, 19 nt, Artificial Sequence
  Synthetic
cagguagcacuggguauuu

SEQ ID NO: 419209 - RNA, 20 nt, Artificial Sequence
  Synthetic
gcagguagcacuggguauuu

SEQ ID NO: 419210 - RNA, 21 nt, Artificial Sequence
  Synthetic
cgcagguagcacuggguauuu

SEQ ID NO: 419211 - RNA, 22 nt, Artificial Sequence
  Synthetic
ccgcagguagcacuggguauuu

SEQ ID NO: 419212 - RNA, 23 nt, Artificial Sequence
  Synthetic
uccgcagguagcacuggguauuu

SEQ ID NO: 419213 - RNA, 24 nt, Artificial Sequence
  Synthetic
guccgcagguagcacuggguauuu

SEQ ID NO: 419214 - RNA, 18 nt, Artificial Sequence
  Synthetic
cauggauucuggguauuu

SEQ ID NO: 419215 - RNA, 19 nt, Artificial Sequence
  Synthetic
acauggauucuggguauuu

SEQ ID NO: 419216 - RNA, 20 nt, Artificial Sequence
  Synthetic
uacauggauucuggguauuu

SEQ ID NO: 419217 - RNA, 21 nt, Artificial Sequence
  Synthetic
guacauggauucuggguauuu

SEQ ID NO: 419218 - RNA, 22 nt, Artificial Sequence
  Synthetic
gguacauggauucuggguauuu

SEQ ID NO: 419219 - RNA, 23 nt, Artificial Sequence
  Synthetic
agguacauggauucuggguauuu

SEQ ID NO: 419220 - RNA, 24 nt, Artificial Sequence
  Synthetic
gagguacauggauucuggguauuu

SEQ ID NO: 419221 - RNA, 18 nt, Artificial Sequence
  Synthetic
ccauauugacugguauuu

SEQ ID NO: 419222 - RNA, 19 nt, Artificial Sequence
  Synthetic
accauauugacugguauuu

SEQ ID NO: 419223 - RNA, 20 nt, Artificial Sequence
  Synthetic
uaccauauugacugguauuu

SEQ ID NO: 419224 - RNA, 21 nt, Artificial Sequence
  Synthetic
uuaccauauugacugguauuu

SEQ ID NO: 419225 - RNA, 22 nt, Artificial Sequence
  Synthetic
guuaccauauugacugguauuu

SEQ ID NO: 419226 - RNA, 23 nt, Artificial Sequence
  Synthetic
uguuaccauauugacugguauuu

SEQ ID NO: 419227 - RNA, 24 nt, Artificial Sequence
  Synthetic
uuguuaccauauugacugguauuu

SEQ ID NO: 419228 - RNA, 18 nt, Artificial Sequence
  Synthetic
cuauagaaggugguauuu

SEQ ID NO: 419229 - RNA, 19 nt, Artificial Sequence
  Synthetic
acuauagaaggugguauuu

SEQ ID NO: 419230 - RNA, 20 nt, Artificial Sequence
  Synthetic
gacuauagaaggugguauuu

SEQ ID NO: 419231 - RNA, 21 nt, Artificial Sequence
  Synthetic
agacuauagaaggugguauuu

SEQ ID NO: 419232 - RNA, 22 nt, Artificial Sequence
  Synthetic
gagacuauagaaggugguauuu

SEQ ID NO: 419233 - RNA, 23 nt, Artificial Sequence
  Synthetic
agagacuauagaaggugguauuu

SEQ ID NO: 419234 - RNA, 24 nt, Artificial Sequence
  Synthetic
aagagacuauagaaggugguauuu

SEQ ID NO: 419235 - RNA, 18 nt, Artificial Sequence
  Synthetic
uacugaagaaauguauuu

SEQ ID NO: 419236 - RNA, 19 nt, Artificial Sequence
  Synthetic
auacugaagaaauguauuu

SEQ ID NO: 419237 - RNA, 20 nt, Artificial Sequence
  Synthetic
uauacugaagaaauguauuu

SEQ ID NO: 419238 - RNA, 21 nt, Artificial Sequence
  Synthetic
auauacugaagaaauguauuu

SEQ ID NO: 419239 - RNA, 22 nt, Artificial Sequence
  Synthetic
gauauacugaagaaauguauuu

SEQ ID NO: 419240 - RNA, 23 nt, Artificial Sequence
  Synthetic
agauauacugaagaaauguauuu

SEQ ID NO: 419241 - RNA, 24 nt, Artificial Sequence
  Synthetic
cagauauacugaagaaauguauuu

SEQ ID NO: 419242 - RNA, 18 nt, Artificial Sequence
  Synthetic
uaauaacuauauguauuu

SEQ ID NO: 419243 - RNA, 19 nt, Artificial Sequence
  Synthetic
guaauaacuauauguauuu

SEQ ID NO: 419244 - RNA, 20 nt, Artificial Sequence
  Synthetic
uguaauaacuauauguauuu

SEQ ID NO: 419245 - RNA, 21 nt, Artificial Sequence
  Synthetic
uuguaauaacuauauguauuu

SEQ ID NO: 419246 - RNA, 22 nt, Artificial Sequence
  Synthetic
uuuguaauaacuauauguauuu

SEQ ID NO: 419247 - RNA, 23 nt, Artificial Sequence
  Synthetic
auuuguaauaacuauauguauuu

SEQ ID NO: 419248 - RNA, 24 nt, Artificial Sequence
  Synthetic
uauuuguaauaacuauauguauuu

SEQ ID NO: 419249 - RNA, 18 nt, Artificial Sequence
  Synthetic
uaguagguguauguauuu

SEQ ID NO: 419250 - RNA, 19 nt, Artificial Sequence
  Synthetic
auaguagguguauguauuu

SEQ ID NO: 419251 - RNA, 20 nt, Artificial Sequence
  Synthetic
cauaguagguguauguauuu

SEQ ID NO: 419252 - RNA, 21 nt, Artificial Sequence
  Synthetic
acauaguagguguauguauuu

SEQ ID NO: 419253 - RNA, 22 nt, Artificial Sequence
  Synthetic
uacauaguagguguauguauuu

SEQ ID NO: 419254 - RNA, 23 nt, Artificial Sequence
  Synthetic
guacauaguagguguauguauuu

SEQ ID NO: 419255 - RNA, 24 nt, Artificial Sequence
  Synthetic
gguacauaguagguguauguauuu

SEQ ID NO: 419256 - RNA, 18 nt, Artificial Sequence
  Synthetic
cauugguucacuguauuu

SEQ ID NO: 419257 - RNA, 19 nt, Artificial Sequence
  Synthetic
ucauugguucacuguauuu

SEQ ID NO: 419258 - RNA, 20 nt, Artificial Sequence
  Synthetic
uucauugguucacuguauuu

SEQ ID NO: 419259 - RNA, 21 nt, Artificial Sequence
  Synthetic
auucauugguucacuguauuu

SEQ ID NO: 419260 - RNA, 22 nt, Artificial Sequence
  Synthetic
uauucauugguucacuguauuu

SEQ ID NO: 419261 - RNA, 23 nt, Artificial Sequence
  Synthetic
uuauucauugguucacuguauuu

SEQ ID NO: 419262 - RNA, 24 nt, Artificial Sequence
  Synthetic
uuuauucauugguucacuguauuu

SEQ ID NO: 419263 - RNA, 18 nt, Artificial Sequence
  Synthetic
agugagccugguguauuu

SEQ ID NO: 419264 - RNA, 19 nt, Artificial Sequence
  Synthetic
aagugagccugguguauuu

SEQ ID NO: 419265 - RNA, 20 nt, Artificial Sequence
  Synthetic
gaagugagccugguguauuu

SEQ ID NO: 419266 - RNA, 21 nt, Artificial Sequence
  Synthetic
ggaagugagccugguguauuu

SEQ ID NO: 419267 - RNA, 22 nt, Artificial Sequence
  Synthetic
aggaagugagccugguguauuu

SEQ ID NO: 419268 - RNA, 23 nt, Artificial Sequence
  Synthetic
gaggaagugagccugguguauuu

SEQ ID NO: 419269 - RNA, 24 nt, Artificial Sequence
  Synthetic
ugaggaagugagccugguguauuu

SEQ ID NO: 419270 - RNA, 18 nt, Artificial Sequence
  Synthetic
cgggggccauguguauuu

SEQ ID NO: 419271 - RNA, 19 nt, Artificial Sequence
  Synthetic
acgggggccauguguauuu

SEQ ID NO: 419272 - RNA, 20 nt, Artificial Sequence
  Synthetic
gacgggggccauguguauuu

SEQ ID NO: 419273 - RNA, 21 nt, Artificial Sequence
  Synthetic
agacgggggccauguguauuu

SEQ ID NO: 419274 - RNA, 22 nt, Artificial Sequence
  Synthetic
aagacgggggccauguguauuu

SEQ ID NO: 419275 - RNA, 23 nt, Artificial Sequence
  Synthetic
uaagacgggggccauguguauuu

SEQ ID NO: 419276 - RNA, 24 nt, Artificial Sequence
  Synthetic
auaagacgggggccauguguauuu

SEQ ID NO: 419277 - RNA, 18 nt, Artificial Sequence
  Synthetic
aacaaaguauguguauuu

SEQ ID NO: 419278 - RNA, 19 nt, Artificial Sequence
  Synthetic
caacaaaguauguguauuu

SEQ ID NO: 419279 - RNA, 20 nt, Artificial Sequence
  Synthetic
ucaacaaaguauguguauuu

SEQ ID NO: 419280 - RNA, 21 nt, Artificial Sequence
  Synthetic
aucaacaaaguauguguauuu

SEQ ID NO: 419281 - RNA, 22 nt, Artificial Sequence
  Synthetic
aaucaacaaaguauguguauuu

SEQ ID NO: 419282 - RNA, 23 nt, Artificial Sequence
  Synthetic
gaaucaacaaaguauguguauuu

SEQ ID NO: 419283 - RNA, 24 nt, Artificial Sequence
  Synthetic
ugaaucaacaaaguauguguauuu

SEQ ID NO: 419284 - RNA, 18 nt, Artificial Sequence
  Synthetic
uuuacuaugaaauuauuu

SEQ ID NO: 419285 - RNA, 19 nt, Artificial Sequence
  Synthetic
auuuacuaugaaauuauuu

SEQ ID NO: 419286 - RNA, 20 nt, Artificial Sequence
  Synthetic
uauuuacuaugaaauuauuu

SEQ ID NO: 419287 - RNA, 21 nt, Artificial Sequence
  Synthetic
auauuuacuaugaaauuauuu

SEQ ID NO: 419288 - RNA, 22 nt, Artificial Sequence
  Synthetic
aauauuuacuaugaaauuauuu

SEQ ID NO: 419289 - RNA, 23 nt, Artificial Sequence
  Synthetic
caauauuuacuaugaaauuauuu

SEQ ID NO: 419290 - RNA, 24 nt, Artificial Sequence
  Synthetic
ucaauauuuacuaugaaauuauuu

SEQ ID NO: 419291 - RNA, 18 nt, Artificial Sequence
  Synthetic
ucaacuccagaauuauuu

SEQ ID NO: 419292 - RNA, 19 nt, Artificial Sequence
  Synthetic
uucaacuccagaauuauuu

SEQ ID NO: 419293 - RNA, 20 nt, Artificial Sequence
  Synthetic
guucaacuccagaauuauuu

SEQ ID NO: 419294 - RNA, 21 nt, Artificial Sequence
  Synthetic
uguucaacuccagaauuauuu

SEQ ID NO: 419295 - RNA, 22 nt, Artificial Sequence
  Synthetic
auguucaacuccagaauuauuu

SEQ ID NO: 419296 - RNA, 23 nt, Artificial Sequence
  Synthetic
uauguucaacuccagaauuauuu

SEQ ID NO: 419297 - RNA, 24 nt, Artificial Sequence
  Synthetic
cuauguucaacuccagaauuauuu

SEQ ID NO: 419298 - RNA, 18 nt, Artificial Sequence
  Synthetic
aaaacaguugaauuauuu

SEQ ID NO: 419299 - RNA, 19 nt, Artificial Sequence
  Synthetic
uaaaacaguugaauuauuu

SEQ ID NO: 419300 - RNA, 20 nt, Artificial Sequence
  Synthetic
uuaaaacaguugaauuauuu

SEQ ID NO: 419301 - RNA, 21 nt, Artificial Sequence
  Synthetic
uuuaaaacaguugaauuauuu

SEQ ID NO: 419302 - RNA, 22 nt, Artificial Sequence
  Synthetic
auuuaaaacaguugaauuauuu

SEQ ID NO: 419303 - RNA, 23 nt, Artificial Sequence
  Synthetic
gauuuaaaacaguugaauuauuu

SEQ ID NO: 419304 - RNA, 24 nt, Artificial Sequence
  Synthetic
ggauuuaaaacaguugaauuauuu

SEQ ID NO: 419305 - RNA, 18 nt, Artificial Sequence
  Synthetic
cccccaaaaacauuauuu

SEQ ID NO: 419306 - RNA, 19 nt, Artificial Sequence
  Synthetic
ucccccaaaaacauuauuu

SEQ ID NO: 419307 - RNA, 20 nt, Artificial Sequence
  Synthetic
gucccccaaaaacauuauuu

SEQ ID NO: 419308 - RNA, 21 nt, Artificial Sequence
  Synthetic
ugucccccaaaaacauuauuu

SEQ ID NO: 419309 - RNA, 22 nt, Artificial Sequence
  Synthetic
uugucccccaaaaacauuauuu

SEQ ID NO: 419310 - RNA, 23 nt, Artificial Sequence
  Synthetic
uuugucccccaaaaacauuauuu

SEQ ID NO: 419311 - RNA, 24 nt, Artificial Sequence
  Synthetic
uuuugucccccaaaaacauuauuu

SEQ ID NO: 419312 - RNA, 18 nt, Artificial Sequence
  Synthetic
caauuauuaacauuauuu

SEQ ID NO: 419313 - RNA, 19 nt, Artificial Sequence
  Synthetic
ucaauuauuaacauuauuu

SEQ ID NO: 419314 - RNA, 20 nt, Artificial Sequence
  Synthetic
uucaauuauuaacauuauuu

SEQ ID NO: 419315 - RNA, 21 nt, Artificial Sequence
  Synthetic
cuucaauuauuaacauuauuu

SEQ ID NO: 419316 - RNA, 22 nt, Artificial Sequence
  Synthetic
ccuucaauuauuaacauuauuu

SEQ ID NO: 419317 - RNA, 23 nt, Artificial Sequence
  Synthetic
gccuucaauuauuaacauuauuu

SEQ ID NO: 419318 - RNA, 24 nt, Artificial Sequence
  Synthetic
agccuucaauuauuaacauuauuu

SEQ ID NO: 419319 - RNA, 18 nt, Artificial Sequence
  Synthetic
uuuaaauuuccauuauuu

SEQ ID NO: 419320 - RNA, 19 nt, Artificial Sequence
  Synthetic
auuuaaauuuccauuauuu

SEQ ID NO: 419321 - RNA, 20 nt, Artificial Sequence
  Synthetic
aauuuaaauuuccauuauuu

SEQ ID NO: 419322 - RNA, 21 nt, Artificial Sequence
  Synthetic
caauuuaaauuuccauuauuu

SEQ ID NO: 419323 - RNA, 22 nt, Artificial Sequence
  Synthetic
ccaauuuaaauuuccauuauuu

SEQ ID NO: 419324 - RNA, 23 nt, Artificial Sequence
  Synthetic
cccaauuuaaauuuccauuauuu

SEQ ID NO: 419325 - RNA, 24 nt, Artificial Sequence
  Synthetic
ucccaauuuaaauuuccauuauuu

SEQ ID NO: 419326 - RNA, 18 nt, Artificial Sequence
  Synthetic
agauaugcggcauuauuu

SEQ ID NO: 419327 - RNA, 19 nt, Artificial Sequence
  Synthetic
uagauaugcggcauuauuu

SEQ ID NO: 419328 - RNA, 20 nt, Artificial Sequence
  Synthetic
guagauaugcggcauuauuu

SEQ ID NO: 419329 - RNA, 18 nt, Artificial Sequence
  Synthetic
uauuuggacagauuauuu

SEQ ID NO: 419330 - RNA, 19 nt, Artificial Sequence
  Synthetic
auauuuggacagauuauuu

SEQ ID NO: 419331 - RNA, 20 nt, Artificial Sequence
  Synthetic
uauauuuggacagauuauuu

SEQ ID NO: 419332 - RNA, 21 nt, Artificial Sequence
  Synthetic
guauauuuggacagauuauuu

SEQ ID NO: 419333 - RNA, 22 nt, Artificial Sequence
  Synthetic
uguauauuuggacagauuauuu

SEQ ID NO: 419334 - RNA, 23 nt, Artificial Sequence
  Synthetic
uuguauauuuggacagauuauuu

SEQ ID NO: 419335 - RNA, 24 nt, Artificial Sequence
  Synthetic
uuuguauauuuggacagauuauuu

SEQ ID NO: 419336 - RNA, 18 nt, Artificial Sequence
  Synthetic
auuuuacucugauuauuu

SEQ ID NO: 419337 - RNA, 19 nt, Artificial Sequence
  Synthetic
gauuuuacucugauuauuu

SEQ ID NO: 419338 - RNA, 20 nt, Artificial Sequence
  Synthetic
agauuuuacucugauuauuu

SEQ ID NO: 419339 - RNA, 21 nt, Artificial Sequence
  Synthetic
cagauuuuacucugauuauuu

SEQ ID NO: 419340 - RNA, 22 nt, Artificial Sequence
  Synthetic
acagauuuuacucugauuauuu

SEQ ID NO: 419341 - RNA, 23 nt, Artificial Sequence
  Synthetic
cacagauuuuacucugauuauuu

SEQ ID NO: 419342 - RNA, 24 nt, Artificial Sequence
  Synthetic
acacagauuuuacucugauuauuu

SEQ ID NO: 419343 - RNA, 18 nt, Artificial Sequence
  Synthetic
gagugucugugauuauuu

SEQ ID NO: 419344 - RNA, 19 nt, Artificial Sequence
  Synthetic
ugagugucugugauuauuu

SEQ ID NO: 419345 - RNA, 20 nt, Artificial Sequence
  Synthetic
augagugucugugauuauuu

SEQ ID NO: 419346 - RNA, 21 nt, Artificial Sequence
  Synthetic
gaugagugucugugauuauuu

SEQ ID NO: 419347 - RNA, 22 nt, Artificial Sequence
  Synthetic
ugaugagugucugugauuauuu

SEQ ID NO: 419348 - RNA, 23 nt, Artificial Sequence
  Synthetic
cugaugagugucugugauuauuu

SEQ ID NO: 419349 - RNA, 24 nt, Artificial Sequence
  Synthetic
ucugaugagugucugugauuauuu

SEQ ID NO: 419350 - RNA, 18 nt, Artificial Sequence
  Synthetic
aaauagaagauauuauuu

SEQ ID NO: 419351 - RNA, 19 nt, Artificial Sequence
  Synthetic
caaauagaagauauuauuu

SEQ ID NO: 419352 - RNA, 20 nt, Artificial Sequence
  Synthetic
ccaaauagaagauauuauuu

SEQ ID NO: 419353 - RNA, 21 nt, Artificial Sequence
  Synthetic
cccaaauagaagauauuauuu

SEQ ID NO: 419354 - RNA, 22 nt, Artificial Sequence
  Synthetic
ucccaaauagaagauauuauuu

SEQ ID NO: 419355 - RNA, 23 nt, Artificial Sequence
  Synthetic
uucccaaauagaagauauuauuu

SEQ ID NO: 419356 - RNA, 24 nt, Artificial Sequence
  Synthetic
uuucccaaauagaagauauuauuu

SEQ ID NO: 419357 - RNA, 18 nt, Artificial Sequence
  Synthetic
uggcaaaauauauuauuu

SEQ ID NO: 419358 - RNA, 19 nt, Artificial Sequence
  Synthetic
cuggcaaaauauauuauuu

SEQ ID NO: 419359 - RNA, 20 nt, Artificial Sequence
  Synthetic
ccuggcaaaauauauuauuu

SEQ ID NO: 419360 - RNA, 21 nt, Artificial Sequence
  Synthetic
accuggcaaaauauauuauuu

SEQ ID NO: 419361 - RNA, 22 nt, Artificial Sequence
  Synthetic
aaccuggcaaaauauauuauuu

SEQ ID NO: 419362 - RNA, 23 nt, Artificial Sequence
  Synthetic
uaaccuggcaaaauauauuauuu

SEQ ID NO: 419363 - RNA, 24 nt, Artificial Sequence
  Synthetic
auaaccuggcaaaauauauuauuu

SEQ ID NO: 419364 - RNA, 18 nt, Artificial Sequence
  Synthetic
gaucuaggucuauuauuu

SEQ ID NO: 419365 - RNA, 19 nt, Artificial Sequence
  Synthetic
ugaucuaggucuauuauuu

SEQ ID NO: 419366 - RNA, 20 nt, Artificial Sequence
  Synthetic
augaucuaggucuauuauuu

SEQ ID NO: 419367 - RNA, 21 nt, Artificial Sequence
  Synthetic
aaugaucuaggucuauuauuu

SEQ ID NO: 419368 - RNA, 22 nt, Artificial Sequence
  Synthetic
caaugaucuaggucuauuauuu

SEQ ID NO: 419369 - RNA, 23 nt, Artificial Sequence
  Synthetic
ccaaugaucuaggucuauuauuu

SEQ ID NO: 419370 - RNA, 24 nt, Artificial Sequence
  Synthetic
accaaugaucuaggucuauuauuu

SEQ ID NO: 419371 - RNA, 18 nt, Artificial Sequence
  Synthetic
caugagugucuauuauuu

SEQ ID NO: 419372 - RNA, 19 nt, Artificial Sequence
  Synthetic
acaugagugucuauuauuu

SEQ ID NO: 419373 - RNA, 20 nt, Artificial Sequence
  Synthetic
uacaugagugucuauuauuu

SEQ ID NO: 419374 - RNA, 21 nt, Artificial Sequence
  Synthetic
cuacaugagugucuauuauuu

SEQ ID NO: 419375 - RNA, 22 nt, Artificial Sequence
  Synthetic
ucuacaugagugucuauuauuu

SEQ ID NO: 419376 - RNA, 23 nt, Artificial Sequence
  Synthetic
uucuacaugagugucuauuauuu

SEQ ID NO: 419377 - RNA, 24 nt, Artificial Sequence
  Synthetic
uuucuacaugagugucuauuauuu

SEQ ID NO: 419378 - RNA, 18 nt, Artificial Sequence
  Synthetic
uugauuaaaguauuauuu

SEQ ID NO: 419379 - RNA, 19 nt, Artificial Sequence
  Synthetic
cuugauuaaaguauuauuu

SEQ ID NO: 419380 - RNA, 20 nt, Artificial Sequence
  Synthetic
gcuugauuaaaguauuauuu

SEQ ID NO: 419381 - RNA, 21 nt, Artificial Sequence
  Synthetic
ugcuugauuaaaguauuauuu

SEQ ID NO: 419382 - RNA, 22 nt, Artificial Sequence
  Synthetic
uugcuugauuaaaguauuauuu

SEQ ID NO: 419383 - RNA, 23 nt, Artificial Sequence
  Synthetic
auugcuugauuaaaguauuauuu

SEQ ID NO: 419384 - RNA, 24 nt, Artificial Sequence
  Synthetic
uauugcuugauuaaaguauuauuu

SEQ ID NO: 419385 - RNA, 18 nt, Artificial Sequence
  Synthetic
aggacucugguauuauuu

SEQ ID NO: 419386 - RNA, 19 nt, Artificial Sequence
  Synthetic
gaggacucugguauuauuu

SEQ ID NO: 419387 - RNA, 20 nt, Artificial Sequence
  Synthetic
ugaggacucugguauuauuu

SEQ ID NO: 419388 - RNA, 21 nt, Artificial Sequence
  Synthetic
uugaggacucugguauuauuu

SEQ ID NO: 419389 - RNA, 22 nt, Artificial Sequence
  Synthetic
auugaggacucugguauuauuu

SEQ ID NO: 419390 - RNA, 23 nt, Artificial Sequence
  Synthetic
gauugaggacucugguauuauuu

SEQ ID NO: 419391 - RNA, 24 nt, Artificial Sequence
  Synthetic
ggauugaggacucugguauuauuu

SEQ ID NO: 419392 - RNA, 18 nt, Artificial Sequence
  Synthetic
agaugugugguauuauuu

SEQ ID NO: 419393 - RNA, 19 nt, Artificial Sequence
  Synthetic
uagaugugugguauuauuu

SEQ ID NO: 419394 - RNA, 20 nt, Artificial Sequence
  Synthetic
guagaugugugguauuauuu

SEQ ID NO: 419395 - RNA, 21 nt, Artificial Sequence
  Synthetic
uguagaugugugguauuauuu

SEQ ID NO: 419396 - RNA, 22 nt, Artificial Sequence
  Synthetic
uuguagaugugugguauuauuu

SEQ ID NO: 419397 - RNA, 23 nt, Artificial Sequence
  Synthetic
guuguagaugugugguauuauuu

SEQ ID NO: 419398 - RNA, 24 nt, Artificial Sequence
  Synthetic
aguuguagaugugugguauuauuu

SEQ ID NO: 419399 - RNA, 24 nt, Artificial Sequence
  Synthetic
gguuguagaugugugguauuauuu

SEQ ID NO: 419400 - RNA, 18 nt, Artificial Sequence
  Synthetic
uuuaguuaauuauuauuu

SEQ ID NO: 419401 - RNA, 19 nt, Artificial Sequence
  Synthetic
uuuuaguuaauuauuauuu

SEQ ID NO: 419402 - RNA, 20 nt, Artificial Sequence
  Synthetic
auuuuaguuaauuauuauuu

SEQ ID NO: 419403 - RNA, 21 nt, Artificial Sequence
  Synthetic
cauuuuaguuaauuauuauuu

SEQ ID NO: 419404 - RNA, 22 nt, Artificial Sequence
  Synthetic
ucauuuuaguuaauuauuauuu

SEQ ID NO: 419405 - RNA, 23 nt, Artificial Sequence
  Synthetic
aucauuuuaguuaauuauuauuu

SEQ ID NO: 419406 - RNA, 24 nt, Artificial Sequence
  Synthetic
caucauuuuaguuaauuauuauuu

SEQ ID NO: 419407 - RNA, 18 nt, Artificial Sequence
  Synthetic
aauuuuagauuauuauuu

SEQ ID NO: 419408 - RNA, 19 nt, Artificial Sequence
  Synthetic
aaauuuuagauuauuauuu

SEQ ID NO: 419409 - RNA, 20 nt, Artificial Sequence
  Synthetic
aaaauuuuagauuauuauuu

SEQ ID NO: 419410 - RNA, 21 nt, Artificial Sequence
  Synthetic
uaaaauuuuagauuauuauuu

SEQ ID NO: 419411 - RNA, 22 nt, Artificial Sequence
  Synthetic
auaaaauuuuagauuauuauuu

SEQ ID NO: 419412 - RNA, 23 nt, Artificial Sequence
  Synthetic
aauaaaauuuuagauuauuauuu

SEQ ID NO: 419413 - RNA, 24 nt, Artificial Sequence
  Synthetic
aaauaaaauuuuagauuauuauuu

SEQ ID NO: 419414 - RNA, 18 nt, Artificial Sequence
  Synthetic
gaugaaacagacuuauuu

SEQ ID NO: 419415 - RNA, 19 nt, Artificial Sequence
  Synthetic
agaugaaacagacuuauuu

SEQ ID NO: 419416 - RNA, 20 nt, Artificial Sequence
  Synthetic
aagaugaaacagacuuauuu

SEQ ID NO: 419417 - RNA, 21 nt, Artificial Sequence
  Synthetic
uaagaugaaacagacuuauuu

SEQ ID NO: 419418 - RNA, 22 nt, Artificial Sequence
  Synthetic
auaagaugaaacagacuuauuu

SEQ ID NO: 419419 - RNA, 23 nt, Artificial Sequence
  Synthetic
uauaagaugaaacagacuuauuu

SEQ ID NO: 419420 - RNA, 24 nt, Artificial Sequence
  Synthetic
auauaagaugaaacagacuuauuu

SEQ ID NO: 419421 - RNA, 18 nt, Artificial Sequence
  Synthetic
gcaugauuugacuuauuu

SEQ ID NO: 419422 - RNA, 19 nt, Artificial Sequence
  Synthetic
ugcaugauuugacuuauuu

SEQ ID NO: 419423 - RNA, 20 nt, Artificial Sequence
  Synthetic
uugcaugauuugacuuauuu

SEQ ID NO: 419424 - RNA, 21 nt, Artificial Sequence
  Synthetic
auugcaugauuugacuuauuu

SEQ ID NO: 419425 - RNA, 22 nt, Artificial Sequence
  Synthetic
aauugcaugauuugacuuauuu

SEQ ID NO: 419426 - RNA, 23 nt, Artificial Sequence
  Synthetic
aaauugcaugauuugacuuauuu

SEQ ID NO: 419427 - RNA, 24 nt, Artificial Sequence
  Synthetic
caaauugcaugauuugacuuauuu

SEQ ID NO: 419428 - RNA, 18 nt, Artificial Sequence
  Synthetic
uaauguauucccuuauuu

SEQ ID NO: 419429 - RNA, 19 nt, Artificial Sequence
  Synthetic
uuaauguauucccuuauuu

SEQ ID NO: 419430 - RNA, 20 nt, Artificial Sequence
  Synthetic
cuuaauguauucccuuauuu

SEQ ID NO: 419431 - RNA, 21 nt, Artificial Sequence
  Synthetic
ccuuaauguauucccuuauuu

SEQ ID NO: 419432 - RNA, 22 nt, Artificial Sequence
  Synthetic
uccuuaauguauucccuuauuu

SEQ ID NO: 419433 - RNA, 23 nt, Artificial Sequence
  Synthetic
cuccuuaauguauucccuuauuu

SEQ ID NO: 419434 - RNA, 24 nt, Artificial Sequence
  Synthetic
ucuccuuaauguauucccuuauuu

SEQ ID NO: 419435 - RNA, 18 nt, Artificial Sequence
  Synthetic
agaucaacaggcuuauuu

SEQ ID NO: 419436 - RNA, 19 nt, Artificial Sequence
  Synthetic
aagaucaacaggcuuauuu

SEQ ID NO: 419437 - RNA, 20 nt, Artificial Sequence
  Synthetic
gaagaucaacaggcuuauuu

SEQ ID NO: 419438 - RNA, 21 nt, Artificial Sequence
  Synthetic
agaagaucaacaggcuuauuu

SEQ ID NO: 419439 - RNA, 22 nt, Artificial Sequence
  Synthetic
gagaagaucaacaggcuuauuu

SEQ ID NO: 419440 - RNA, 23 nt, Artificial Sequence
  Synthetic
ggagaagaucaacaggcuuauuu

SEQ ID NO: 419441 - RNA, 24 nt, Artificial Sequence
  Synthetic
gggagaagaucaacaggcuuauuu

SEQ ID NO: 419442 - RNA, 18 nt, Artificial Sequence
  Synthetic
cucaauuuaugcuuauuu

SEQ ID NO: 419443 - RNA, 19 nt, Artificial Sequence
  Synthetic
ucucaauuuaugcuuauuu

SEQ ID NO: 419444 - RNA, 20 nt, Artificial Sequence
  Synthetic
uucucaauuuaugcuuauuu

SEQ ID NO: 419445 - RNA, 21 nt, Artificial Sequence
  Synthetic
auucucaauuuaugcuuauuu

SEQ ID NO: 419446 - RNA, 22 nt, Artificial Sequence
  Synthetic
uauucucaauuuaugcuuauuu

SEQ ID NO: 419447 - RNA, 23 nt, Artificial Sequence
  Synthetic
uuauucucaauuuaugcuuauuu

SEQ ID NO: 419448 - RNA, 24 nt, Artificial Sequence
  Synthetic
cuuauucucaauuuaugcuuauuu

SEQ ID NO: 419449 - RNA, 18 nt, Artificial Sequence
  Synthetic
uuagaugguugcuuauuu

SEQ ID NO: 419450 - RNA, 19 nt, Artificial Sequence
  Synthetic
auuagaugguugcuuauuu

SEQ ID NO: 419451 - RNA, 20 nt, Artificial Sequence
  Synthetic
uauuagaugguugcuuauuu

SEQ ID NO: 419452 - RNA, 21 nt, Artificial Sequence
  Synthetic
cuauuagaugguugcuuauuu

SEQ ID NO: 419453 - RNA, 22 nt, Artificial Sequence
  Synthetic
ucuauuagaugguugcuuauuu

SEQ ID NO: 419454 - RNA, 23 nt, Artificial Sequence
  Synthetic
gucuauuagaugguugcuuauuu

SEQ ID NO: 419455 - RNA, 24 nt, Artificial Sequence
  Synthetic
ugucuauuagaugguugcuuauuu

SEQ ID NO: 419456 - RNA, 18 nt, Artificial Sequence
  Synthetic
caauucuaucucuuauuu

SEQ ID NO: 419457 - RNA, 19 nt, Artificial Sequence
  Synthetic
ucaauucuaucucuuauuu

SEQ ID NO: 419458 - RNA, 20 nt, Artificial Sequence
  Synthetic
uucaauucuaucucuuauuu

SEQ ID NO: 419459 - RNA, 21 nt, Artificial Sequence
  Synthetic
guucaauucuaucucuuauuu

SEQ ID NO: 419460 - RNA, 22 nt, Artificial Sequence
  Synthetic
uguucaauucuaucucuuauuu

SEQ ID NO: 419461 - RNA, 23 nt, Artificial Sequence
  Synthetic
cuguucaauucuaucucuuauuu

SEQ ID NO: 419462 - RNA, 24 nt, Artificial Sequence
  Synthetic
gcuguucaauucuaucucuuauuu

SEQ ID NO: 419463 - RNA, 18 nt, Artificial Sequence
  Synthetic
gguagcuuucucuuauuu

SEQ ID NO: 419464 - RNA, 19 nt, Artificial Sequence
  Synthetic
ggguagcuuucucuuauuu

SEQ ID NO: 419465 - RNA, 20 nt, Artificial Sequence
  Synthetic
uggguagcuuucucuuauuu

SEQ ID NO: 419466 - RNA, 21 nt, Artificial Sequence
  Synthetic
auggguagcuuucucuuauuu

SEQ ID NO: 419467 - RNA, 22 nt, Artificial Sequence
  Synthetic
aauggguagcuuucucuuauuu

SEQ ID NO: 419468 - RNA, 23 nt, Artificial Sequence
  Synthetic
aaauggguagcuuucucuuauuu

SEQ ID NO: 419469 - RNA, 24 nt, Artificial Sequence
  Synthetic
aaaauggguagcuuucucuuauuu

SEQ ID NO: 419470 - RNA, 18 nt, Artificial Sequence
  Synthetic
uugcacauugucuuauuu

SEQ ID NO: 419471 - RNA, 19 nt, Artificial Sequence
  Synthetic
cuugcacauugucuuauuu

SEQ ID NO: 419472 - RNA, 20 nt, Artificial Sequence
  Synthetic
acuugcacauugucuuauuu

SEQ ID NO: 419473 - RNA, 21 nt, Artificial Sequence
  Synthetic
gacuugcacauugucuuauuu

SEQ ID NO: 419474 - RNA, 22 nt, Artificial Sequence
  Synthetic
ugacuugcacauugucuuauuu

SEQ ID NO: 419475 - RNA, 23 nt, Artificial Sequence
  Synthetic
uugacuugcacauugucuuauuu

SEQ ID NO: 419476 - RNA, 24 nt, Artificial Sequence
  Synthetic
guugacuugcacauugucuuauuu

SEQ ID NO: 419477 - RNA, 18 nt, Artificial Sequence
  Synthetic
uugucgcuuuucuuauuu

SEQ ID NO: 419478 - RNA, 19 nt, Artificial Sequence
  Synthetic
guugucgcuuuucuuauuu

SEQ ID NO: 419479 - RNA, 20 nt, Artificial Sequence
  Synthetic
uguugucgcuuuucuuauuu

SEQ ID NO: 419480 - RNA, 21 nt, Artificial Sequence
  Synthetic
uuguugucgcuuuucuuauuu

SEQ ID NO: 419481 - RNA, 22 nt, Artificial Sequence
  Synthetic
uuuguugucgcuuuucuuauuu

SEQ ID NO: 419482 - RNA, 23 nt, Artificial Sequence
  Synthetic
uuuuguugucgcuuuucuuauuu

SEQ ID NO: 419483 - RNA, 24 nt, Artificial Sequence
  Synthetic
guuuuguugucgcuuuucuuauuu

SEQ ID NO: 419484 - RNA, 18 nt, Artificial Sequence
  Synthetic
uucaaaguaaaguuauuu

SEQ ID NO: 419485 - RNA, 19 nt, Artificial Sequence
  Synthetic
uuucaaaguaaaguuauuu

SEQ ID NO: 419486 - RNA, 20 nt, Artificial Sequence
  Synthetic
auuucaaaguaaaguuauuu

SEQ ID NO: 419487 - RNA, 21 nt, Artificial Sequence
  Synthetic
cauuucaaaguaaaguuauuu

SEQ ID NO: 419488 - RNA, 22 nt, Artificial Sequence
  Synthetic
ccauuucaaaguaaaguuauuu

SEQ ID NO: 419489 - RNA, 23 nt, Artificial Sequence
  Synthetic
accauuucaaaguaaaguuauuu

SEQ ID NO: 419490 - RNA, 24 nt, Artificial Sequence
  Synthetic
aaccauuucaaaguaaaguuauuu

SEQ ID NO: 419491 - RNA, 18 nt, Artificial Sequence
  Synthetic
acugagcugagguuauuu

SEQ ID NO: 419492 - RNA, 19 nt, Artificial Sequence
  Synthetic
aacugagcugagguuauuu

SEQ ID NO: 419493 - RNA, 20 nt, Artificial Sequence
  Synthetic
aaacugagcugagguuauuu

SEQ ID NO: 419494 - RNA, 21 nt, Artificial Sequence
  Synthetic
gaaacugagcugagguuauuu

SEQ ID NO: 419495 - RNA, 22 nt, Artificial Sequence
  Synthetic
ugaaacugagcugagguuauuu

SEQ ID NO: 419496 - RNA, 23 nt, Artificial Sequence
  Synthetic
uugaaacugagcugagguuauuu

SEQ ID NO: 419497 - RNA, 24 nt, Artificial Sequence
  Synthetic
uuugaaacugagcugagguuauuu

SEQ ID NO: 419498 - RNA, 18 nt, Artificial Sequence
  Synthetic
auuaacuaaaauuuauuu

SEQ ID NO: 419499 - RNA, 19 nt, Artificial Sequence
  Synthetic
uauuaacuaaaauuuauuu

SEQ ID NO: 419500 - RNA, 20 nt, Artificial Sequence
  Synthetic
uuauuaacuaaaauuuauuu

SEQ ID NO: 419501 - RNA, 21 nt, Artificial Sequence
  Synthetic
uuuauuaacuaaaauuuauuu

SEQ ID NO: 419502 - RNA, 22 nt, Artificial Sequence
  Synthetic
uuuuauuaacuaaaauuuauuu

SEQ ID NO: 419503 - RNA, 23 nt, Artificial Sequence
  Synthetic
guuuuauuaacuaaaauuuauuu

SEQ ID NO: 419504 - RNA, 24 nt, Artificial Sequence
  Synthetic
aguuuuauuaacuaaaauuuauuu

SEQ ID NO: 419505 - RNA, 18 nt, Artificial Sequence
  Synthetic
gaacugcuuaauuuauuu

SEQ ID NO: 419506 - RNA, 19 nt, Artificial Sequence
  Synthetic
agaacugcuuaauuuauuu

SEQ ID NO: 419507 - RNA, 20 nt, Artificial Sequence
  Synthetic
gagaacugcuuaauuuauuu

SEQ ID NO: 419508 - RNA, 21 nt, Artificial Sequence
  Synthetic
ugagaacugcuuaauuuauuu

SEQ ID NO: 419509 - RNA, 22 nt, Artificial Sequence
  Synthetic
gugagaacugcuuaauuuauuu

SEQ ID NO: 419510 - RNA, 23 nt, Artificial Sequence
  Synthetic
ugugagaacugcuuaauuuauuu

SEQ ID NO: 419511 - RNA, 24 nt, Artificial Sequence
  Synthetic
augugagaacugcuuaauuuauuu

SEQ ID NO: 419512 - RNA, 18 nt, Artificial Sequence
  Synthetic
aucagaaaugauuuauuu

SEQ ID NO: 419513 - RNA, 19 nt, Artificial Sequence
  Synthetic
aaucagaaaugauuuauuu

SEQ ID NO: 419514 - RNA, 20 nt, Artificial Sequence
  Synthetic
caaucagaaaugauuuauuu

SEQ ID NO: 419515 - RNA, 21 nt, Artificial Sequence
  Synthetic
ucaaucagaaaugauuuauuu

SEQ ID NO: 419516 - RNA, 22 nt, Artificial Sequence
  Synthetic
cucaaucagaaaugauuuauuu

SEQ ID NO: 419517 - RNA, 23 nt, Artificial Sequence
  Synthetic
gcucaaucagaaaugauuuauuu

SEQ ID NO: 419518 - RNA, 24 nt, Artificial Sequence
  Synthetic
ugcucaaucagaaaugauuuauuu

SEQ ID NO: 419519 - RNA, 18 nt, Artificial Sequence
  Synthetic
agagcaagugauuuauuu

SEQ ID NO: 419520 - RNA, 19 nt, Artificial Sequence
  Synthetic
aagagcaagugauuuauuu

SEQ ID NO: 419521 - RNA, 20 nt, Artificial Sequence
  Synthetic
uaagagcaagugauuuauuu

SEQ ID NO: 419522 - RNA, 21 nt, Artificial Sequence
  Synthetic
uuaagagcaagugauuuauuu

SEQ ID NO: 419523 - RNA, 22 nt, Artificial Sequence
  Synthetic
uuuaagagcaagugauuuauuu

SEQ ID NO: 419524 - RNA, 23 nt, Artificial Sequence
  Synthetic
uuuuaagagcaagugauuuauuu

SEQ ID NO: 419525 - RNA, 24 nt, Artificial Sequence
  Synthetic
guuuuaagagcaagugauuuauuu

SEQ ID NO: 419526 - RNA, 18 nt, Artificial Sequence
  Synthetic
caaucgcuauauuuauuu

SEQ ID NO: 419527 - RNA, 19 nt, Artificial Sequence
  Synthetic
ucaaucgcuauauuuauuu

SEQ ID NO: 419528 - RNA, 20 nt, Artificial Sequence
  Synthetic
uucaaucgcuauauuuauuu

SEQ ID NO: 419529 - RNA, 21 nt, Artificial Sequence
  Synthetic
uuucaaucgcuauauuuauuu

SEQ ID NO: 419530 - RNA, 22 nt, Artificial Sequence
  Synthetic
uuuucaaucgcuauauuuauuu

SEQ ID NO: 419531 - RNA, 23 nt, Artificial Sequence
  Synthetic
auuuucaaucgcuauauuuauuu

SEQ ID NO: 419532 - RNA, 24 nt, Artificial Sequence
  Synthetic
cauuuucaaucgcuauauuuauuu

SEQ ID NO: 419533 - RNA, 18 nt, Artificial Sequence
  Synthetic
caaaucuuauauuuauuu

SEQ ID NO: 419534 - RNA, 19 nt, Artificial Sequence
  Synthetic
ccaaaucuuauauuuauuu

SEQ ID NO: 419535 - RNA, 20 nt, Artificial Sequence
  Synthetic
accaaaucuuauauuuauuu

SEQ ID NO: 419536 - RNA, 21 nt, Artificial Sequence
  Synthetic
caccaaaucuuauauuuauuu

SEQ ID NO: 419537 - RNA, 22 nt, Artificial Sequence
  Synthetic
acaccaaaucuuauauuuauuu

SEQ ID NO: 419538 - RNA, 23 nt, Artificial Sequence
  Synthetic
cacaccaaaucuuauauuuauuu

SEQ ID NO: 419539 - RNA, 24 nt, Artificial Sequence
  Synthetic
acacaccaaaucuuauauuuauuu

SEQ ID NO: 419540 - RNA, 18 nt, Artificial Sequence
  Synthetic
uucucauaguauuuauuu

SEQ ID NO: 419541 - RNA, 19 nt, Artificial Sequence
  Synthetic
uuucucauaguauuuauuu

SEQ ID NO: 419542 - RNA, 20 nt, Artificial Sequence
  Synthetic
cuuucucauaguauuuauuu

SEQ ID NO: 419543 - RNA, 21 nt, Artificial Sequence
  Synthetic
ucuuucucauaguauuuauuu

SEQ ID NO: 419544 - RNA, 22 nt, Artificial Sequence
  Synthetic
cucuuucucauaguauuuauuu

SEQ ID NO: 419545 - RNA, 23 nt, Artificial Sequence
  Synthetic
ccucuuucucauaguauuuauuu

SEQ ID NO: 419546 - RNA, 24 nt, Artificial Sequence
  Synthetic
gccucuuucucauaguauuuauuu

SEQ ID NO: 419547 - RNA, 18 nt, Artificial Sequence
  Synthetic
cuuucuauguauuuauuu

SEQ ID NO: 419548 - RNA, 19 nt, Artificial Sequence
  Synthetic
ucuuucuauguauuuauuu

SEQ ID NO: 419549 - RNA, 20 nt, Artificial Sequence
  Synthetic
uucuuucuauguauuuauuu

SEQ ID NO: 419550 - RNA, 21 nt, Artificial Sequence
  Synthetic
uuucuuucuauguauuuauuu

SEQ ID NO: 419551 - RNA, 22 nt, Artificial Sequence
  Synthetic
auuucuuucuauguauuuauuu

SEQ ID NO: 419552 - RNA, 23 nt, Artificial Sequence
  Synthetic
uauuucuuucuauguauuuauuu

SEQ ID NO: 419553 - RNA, 24 nt, Artificial Sequence
  Synthetic
guauuucuuucuauguauuuauuu

SEQ ID NO: 419554 - RNA, 18 nt, Artificial Sequence
  Synthetic
acaauuauguauuuauuu

SEQ ID NO: 419555 - RNA, 19 nt, Artificial Sequence
  Synthetic
gacaauuauguauuuauuu

SEQ ID NO: 419556 - RNA, 20 nt, Artificial Sequence
  Synthetic
ugacaauuauguauuuauuu

SEQ ID NO: 419557 - RNA, 21 nt, Artificial Sequence
  Synthetic
cugacaauuauguauuuauuu

SEQ ID NO: 419558 - RNA, 22 nt, Artificial Sequence
  Synthetic
ucugacaauuauguauuuauuu

SEQ ID NO: 419559 - RNA, 23 nt, Artificial Sequence
  Synthetic
cucugacaauuauguauuuauuu

SEQ ID NO: 419560 - RNA, 24 nt, Artificial Sequence
  Synthetic
acucugacaauuauguauuuauuu

SEQ ID NO: 419561 - RNA, 18 nt, Artificial Sequence
  Synthetic
auuuuauuuuauuuauuu

SEQ ID NO: 419562 - RNA, 19 nt, Artificial Sequence
  Synthetic
uauuuuauuuuauuuauuu

SEQ ID NO: 419563 - RNA, 20 nt, Artificial Sequence
  Synthetic
uuauuuuauuuuauuuauuu

SEQ ID NO: 419564 - RNA, 21 nt, Artificial Sequence
  Synthetic
uuuauuuuauuuuauuuauuu

SEQ ID NO: 419565 - RNA, 22 nt, Artificial Sequence
  Synthetic
uuuuauuuuauuuuauuuauuu

SEQ ID NO: 419566 - RNA, 23 nt, Artificial Sequence
  Synthetic
auuuuauuuuauuuuauuuauuu

SEQ ID NO: 419567 - RNA, 24 nt, Artificial Sequence
  Synthetic
uauuuuauuuuauuuuauuuauuu

SEQ ID NO: 419568 - RNA, 18 nt, Artificial Sequence
  Synthetic
cuuuaucauucuuuauuu

SEQ ID NO: 419569 - RNA, 19 nt, Artificial Sequence
  Synthetic
gcuuuaucauucuuuauuu

SEQ ID NO: 419570 - RNA, 20 nt, Artificial Sequence
  Synthetic
ugcuuuaucauucuuuauuu

SEQ ID NO: 419571 - RNA, 21 nt, Artificial Sequence
  Synthetic
augcuuuaucauucuuuauuu

SEQ ID NO: 419572 - RNA, 22 nt, Artificial Sequence
  Synthetic
uaugcuuuaucauucuuuauuu

SEQ ID NO: 419573 - RNA, 23 nt, Artificial Sequence
  Synthetic
auaugcuuuaucauucuuuauuu

SEQ ID NO: 419574 - RNA, 24 nt, Artificial Sequence
  Synthetic
aauaugcuuuaucauucuuuauuu

SEQ ID NO: 419575 - RNA, 18 nt, Artificial Sequence
  Synthetic
gugaaggucaguuuauuu

SEQ ID NO: 419576 - RNA, 19 nt, Artificial Sequence
  Synthetic
ggugaaggucaguuuauuu

SEQ ID NO: 419577 - RNA, 20 nt, Artificial Sequence
  Synthetic
aggugaaggucaguuuauuu

SEQ ID NO: 419578 - RNA, 21 nt, Artificial Sequence
  Synthetic
gaggugaaggucaguuuauuu

SEQ ID NO: 419579 - RNA, 22 nt, Artificial Sequence
  Synthetic
agaggugaaggucaguuuauuu

SEQ ID NO: 419580 - RNA, 23 nt, Artificial Sequence
  Synthetic
uagaggugaaggucaguuuauuu

SEQ ID NO: 419581 - RNA, 24 nt, Artificial Sequence
  Synthetic
auagaggugaaggucaguuuauuu

SEQ ID NO: 419582 - RNA, 18 nt, Artificial Sequence
  Synthetic
gugaugcuagguuuauuu

SEQ ID NO: 419583 - RNA, 19 nt, Artificial Sequence
  Synthetic
ggugaugcuagguuuauuu

SEQ ID NO: 419584 - RNA, 20 nt, Artificial Sequence
  Synthetic
aggugaugcuagguuuauuu

SEQ ID NO: 419585 - RNA, 21 nt, Artificial Sequence
  Synthetic
aaggugaugcuagguuuauuu

SEQ ID NO: 419586 - RNA, 22 nt, Artificial Sequence
  Synthetic
gaaggugaugcuagguuuauuu

SEQ ID NO: 419587 - RNA, 23 nt, Artificial Sequence
  Synthetic
ugaaggugaugcuagguuuauuu

SEQ ID NO: 419588 - RNA, 24 nt, Artificial Sequence
  Synthetic
uugaaggugaugcuagguuuauuu

SEQ ID NO: 419589 - RNA, 18 nt, Artificial Sequence
  Synthetic
gaaaagauauguuuauuu

SEQ ID NO: 419590 - RNA, 19 nt, Artificial Sequence
  Synthetic
ugaaaagauauguuuauuu

SEQ ID NO: 419591 - RNA, 20 nt, Artificial Sequence
  Synthetic
augaaaagauauguuuauuu

SEQ ID NO: 419592 - RNA, 21 nt, Artificial Sequence
  Synthetic
aaugaaaagauauguuuauuu

SEQ ID NO: 419593 - RNA, 22 nt, Artificial Sequence
  Synthetic
uaaugaaaagauauguuuauuu

SEQ ID NO: 419594 - RNA, 23 nt, Artificial Sequence
  Synthetic
guaaugaaaagauauguuuauuu

SEQ ID NO: 419595 - RNA, 24 nt, Artificial Sequence
  Synthetic
uguaaugaaaagauauguuuauuu

SEQ ID NO: 419596 - RNA, 18 nt, Artificial Sequence
  Synthetic
ucauuuguuuguuuauuu

SEQ ID NO: 419597 - RNA, 19 nt, Artificial Sequence
  Synthetic
uucauuuguuuguuuauuu

SEQ ID NO: 419598 - RNA, 20 nt, Artificial Sequence
  Synthetic
guucauuuguuuguuuauuu

SEQ ID NO: 419599 - RNA, 21 nt, Artificial Sequence
  Synthetic
uguucauuuguuuguuuauuu

SEQ ID NO: 419600 - RNA, 22 nt, Artificial Sequence
  Synthetic
uuguucauuuguuuguuuauuu

SEQ ID NO: 419601 - RNA, 23 nt, Artificial Sequence
  Synthetic
cuuguucauuuguuuguuuauuu

SEQ ID NO: 419602 - RNA, 24 nt, Artificial Sequence
  Synthetic
gcuuguucauuuguuuguuuauuu

SEQ ID NO: 419603 - RNA, 18 nt, Artificial Sequence
  Synthetic
agcccgugaauuuuauuu

SEQ ID NO: 419604 - RNA, 19 nt, Artificial Sequence
  Synthetic
cagcccgugaauuuuauuu

SEQ ID NO: 419605 - RNA, 20 nt, Artificial Sequence
  Synthetic
ccagcccgugaauuuuauuu

SEQ ID NO: 419606 - RNA, 21 nt, Artificial Sequence
  Synthetic
cccagcccgugaauuuuauuu

SEQ ID NO: 419607 - RNA, 22 nt, Artificial Sequence
  Synthetic
gcccagcccgugaauuuuauuu

SEQ ID NO: 419608 - RNA, 23 nt, Artificial Sequence
  Synthetic
cgcccagcccgugaauuuuauuu

SEQ ID NO: 419609 - RNA, 24 nt, Artificial Sequence
  Synthetic
gcgcccagcccgugaauuuuauuu

SEQ ID NO: 419610 - RNA, 18 nt, Artificial Sequence
  Synthetic
uagcuuugacuuuuauuu

SEQ ID NO: 419611 - RNA, 19 nt, Artificial Sequence
  Synthetic
uuagcuuugacuuuuauuu

SEQ ID NO: 419612 - RNA, 20 nt, Artificial Sequence
  Synthetic
guuagcuuugacuuuuauuu

SEQ ID NO: 419613 - RNA, 21 nt, Artificial Sequence
  Synthetic
uguuagcuuugacuuuuauuu

SEQ ID NO: 419614 - RNA, 22 nt, Artificial Sequence
  Synthetic
uuguuagcuuugacuuuuauuu

SEQ ID NO: 419615 - RNA, 23 nt, Artificial Sequence
  Synthetic
uuuguuagcuuugacuuuuauuu

SEQ ID NO: 419616 - RNA, 24 nt, Artificial Sequence
  Synthetic
uuuuguuagcuuugacuuuuauuu

SEQ ID NO: 419617 - RNA, 18 nt, Artificial Sequence
  Synthetic
ucuaaauugcuuuuauuu

SEQ ID NO: 419618 - RNA, 19 nt, Artificial Sequence
  Synthetic
uucuaaauugcuuuuauuu

SEQ ID NO: 419619 - RNA, 20 nt, Artificial Sequence
  Synthetic
uuucuaaauugcuuuuauuu

SEQ ID NO: 419620 - RNA, 21 nt, Artificial Sequence
  Synthetic
auuucuaaauugcuuuuauuu

SEQ ID NO: 419621 - RNA, 22 nt, Artificial Sequence
  Synthetic
gauuucuaaauugcuuuuauuu

SEQ ID NO: 419622 - RNA, 23 nt, Artificial Sequence
  Synthetic
agauuucuaaauugcuuuuauuu

SEQ ID NO: 419623 - RNA, 24 nt, Artificial Sequence
  Synthetic
cagauuucuaaauugcuuuuauuu

SEQ ID NO: 419624 - RNA, 18 nt, Artificial Sequence
  Synthetic
aagaauuaaguuuuauuu

SEQ ID NO: 419625 - RNA, 19 nt, Artificial Sequence
  Synthetic
uaagaauuaaguuuuauuu

SEQ ID NO: 419626 - RNA, 20 nt, Artificial Sequence
  Synthetic
uuaagaauuaaguuuuauuu

SEQ ID NO: 419627 - RNA, 21 nt, Artificial Sequence
  Synthetic
uuuaagaauuaaguuuuauuu

SEQ ID NO: 419628 - RNA, 22 nt, Artificial Sequence
  Synthetic
uuuuaagaauuaaguuuuauuu

SEQ ID NO: 419629 - RNA, 23 nt, Artificial Sequence
  Synthetic
uuuuuaagaauuaaguuuuauuu

SEQ ID NO: 419630 - RNA, 24 nt, Artificial Sequence
  Synthetic
auuuuuaagaauuaaguuuuauuu

SEQ ID NO: 419631 - RNA, 18 nt, Artificial Sequence
  Synthetic
acagcaaauguuuuauuu

SEQ ID NO: 419632 - RNA, 19 nt, Artificial Sequence
  Synthetic
aacagcaaauguuuuauuu

SEQ ID NO: 419633 - RNA, 20 nt, Artificial Sequence
  Synthetic
aaacagcaaauguuuuauuu

SEQ ID NO: 419634 - RNA, 21 nt, Artificial Sequence
  Synthetic
uaaacagcaaauguuuuauuu

SEQ ID NO: 419635 - RNA, 22 nt, Artificial Sequence
  Synthetic
cuaaacagcaaauguuuuauuu

SEQ ID NO: 419636 - RNA, 23 nt, Artificial Sequence
  Synthetic
ucuaaacagcaaauguuuuauuu

SEQ ID NO: 419637 - RNA, 24 nt, Artificial Sequence
  Synthetic
aucuaaacagcaaauguuuuauuu

SEQ ID NO: 419638 - RNA, 18 nt, Artificial Sequence
  Synthetic
uuuuguuuuguuuuauuu

SEQ ID NO: 419639 - RNA, 19 nt, Artificial Sequence
  Synthetic
guuuuguuuuguuuuauuu

SEQ ID NO: 419640 - RNA, 20 nt, Artificial Sequence
  Synthetic
uguuuuguuuuguuuuauuu

SEQ ID NO: 419641 - RNA, 21 nt, Artificial Sequence
  Synthetic
uuguuuuguuuuguuuuauuu

SEQ ID NO: 419642 - RNA, 22 nt, Artificial Sequence
  Synthetic
uuuguuuuguuuuguuuuauuu

SEQ ID NO: 419643 - RNA, 23 nt, Artificial Sequence
  Synthetic
uuuuguuuuguuuuguuuuauuu

SEQ ID NO: 419644 - RNA, 24 nt, Artificial Sequence
  Synthetic
guuuuguuuuguuuuguuuuauuu

SEQ ID NO: 419645 - RNA, 18 nt, Artificial Sequence
  Synthetic
cacauaacauuuuuauuu

SEQ ID NO: 419646 - RNA, 19 nt, Artificial Sequence
  Synthetic
acacauaacauuuuuauuu

SEQ ID NO: 419647 - RNA, 20 nt, Artificial Sequence
  Synthetic
uacacauaacauuuuuauuu

SEQ ID NO: 419648 - RNA, 21 nt, Artificial Sequence
  Synthetic
uuacacauaacauuuuuauuu

SEQ ID NO: 419649 - RNA, 22 nt, Artificial Sequence
  Synthetic
auuacacauaacauuuuuauuu

SEQ ID NO: 419650 - RNA, 23 nt, Artificial Sequence
  Synthetic
cauuacacauaacauuuuuauuu

SEQ ID NO: 419651 - RNA, 24 nt, Artificial Sequence
  Synthetic
ucauuacacauaacauuuuuauuu

SEQ ID NO: 419652 - RNA, 18 nt, Artificial Sequence
  Synthetic
uuuauuuuguuuuuauuu

SEQ ID NO: 419653 - RNA, 19 nt, Artificial Sequence
  Synthetic
uuuuauuuuguuuuuauuu

SEQ ID NO: 419654 - RNA, 20 nt, Artificial Sequence
  Synthetic
auuuuauuuuguuuuuauuu

SEQ ID NO: 419655 - RNA, 21 nt, Artificial Sequence
  Synthetic
uauuuuauuuuguuuuuauuu

SEQ ID NO: 419656 - RNA, 22 nt, Artificial Sequence
  Synthetic
uuauuuuauuuuguuuuuauuu

SEQ ID NO: 419657 - RNA, 23 nt, Artificial Sequence
  Synthetic
uuuauuuuauuuuguuuuuauuu

SEQ ID NO: 419658 - RNA, 24 nt, Artificial Sequence
  Synthetic
uuuuauuuuauuuuguuuuuauuu

SEQ ID NO: 419659 - RNA, 18 nt, Artificial Sequence
  Synthetic
auuuacaccaaaaacuuu

SEQ ID NO: 419660 - RNA, 19 nt, Artificial Sequence
  Synthetic
aauuuacaccaaaaacuuu

SEQ ID NO: 419661 - RNA, 20 nt, Artificial Sequence
  Synthetic
uaauuuacaccaaaaacuuu

SEQ ID NO: 419662 - RNA, 21 nt, Artificial Sequence
  Synthetic
uuaauuuacaccaaaaacuuu

SEQ ID NO: 419663 - RNA, 22 nt, Artificial Sequence
  Synthetic
uuuaauuuacaccaaaaacuuu

SEQ ID NO: 419664 - RNA, 23 nt, Artificial Sequence
  Synthetic
cuuuaauuuacaccaaaaacuuu

SEQ ID NO: 419665 - RNA, 24 nt, Artificial Sequence
  Synthetic
ucuuuaauuuacaccaaaaacuuu

SEQ ID NO: 419666 - RNA, 18 nt, Artificial Sequence
  Synthetic
cgacaagacacaaacuuu

SEQ ID NO: 419667 - RNA, 19 nt, Artificial Sequence
  Synthetic
ccgacaagacacaaacuuu

SEQ ID NO: 419668 - RNA, 20 nt, Artificial Sequence
  Synthetic
uccgacaagacacaaacuuu

SEQ ID NO: 419669 - RNA, 21 nt, Artificial Sequence
  Synthetic
uuccgacaagacacaaacuuu

SEQ ID NO: 419670 - RNA, 22 nt, Artificial Sequence
  Synthetic
auuccgacaagacacaaacuuu

SEQ ID NO: 419671 - RNA, 23 nt, Artificial Sequence
  Synthetic
cauuccgacaagacacaaacuuu

SEQ ID NO: 419672 - RNA, 24 nt, Artificial Sequence
  Synthetic
ucauuccgacaagacacaaacuuu

SEQ ID NO: 419673 - RNA, 18 nt, Artificial Sequence
  Synthetic
uucugauggccaaacuuu

SEQ ID NO: 419674 - RNA, 19 nt, Artificial Sequence
  Synthetic
cuucugauggccaaacuuu

SEQ ID NO: 419675 - RNA, 20 nt, Artificial Sequence
  Synthetic
ucuucugauggccaaacuuu

SEQ ID NO: 419676 - RNA, 21 nt, Artificial Sequence
  Synthetic
cucuucugauggccaaacuuu

SEQ ID NO: 419677 - RNA, 22 nt, Artificial Sequence
  Synthetic
ccucuucugauggccaaacuuu

SEQ ID NO: 419678 - RNA, 23 nt, Artificial Sequence
  Synthetic
cccucuucugauggccaaacuuu

SEQ ID NO: 419679 - RNA, 24 nt, Artificial Sequence
  Synthetic
ucccucuucugauggccaaacuuu

SEQ ID NO: 419680 - RNA, 18 nt, Artificial Sequence
  Synthetic
uaugagauggcaaacuuu

SEQ ID NO: 419681 - RNA, 19 nt, Artificial Sequence
  Synthetic
auaugagauggcaaacuuu

SEQ ID NO: 419682 - RNA, 20 nt, Artificial Sequence
  Synthetic
cauaugagauggcaaacuuu

SEQ ID NO: 419683 - RNA, 21 nt, Artificial Sequence
  Synthetic
ucauaugagauggcaaacuuu

SEQ ID NO: 419684 - RNA, 22 nt, Artificial Sequence
  Synthetic
cucauaugagauggcaaacuuu

SEQ ID NO: 419685 - RNA, 23 nt, Artificial Sequence
  Synthetic
acucauaugagauggcaaacuuu

SEQ ID NO: 419686 - RNA, 24 nt, Artificial Sequence
  Synthetic
cacucauaugagauggcaaacuuu

SEQ ID NO: 419687 - RNA, 18 nt, Artificial Sequence
  Synthetic
guguaacacucaaacuuu

SEQ ID NO: 419688 - RNA, 19 nt, Artificial Sequence
  Synthetic
uguguaacacucaaacuuu

SEQ ID NO: 419689 - RNA, 20 nt, Artificial Sequence
  Synthetic
guguguaacacucaaacuuu

SEQ ID NO: 419690 - RNA, 21 nt, Artificial Sequence
  Synthetic
uguguguaacacucaaacuuu

SEQ ID NO: 419691 - RNA, 22 nt, Artificial Sequence
  Synthetic
uuguguguaacacucaaacuuu

SEQ ID NO: 419692 - RNA, 23 nt, Artificial Sequence
  Synthetic
auuguguguaacacucaaacuuu

SEQ ID NO: 419693 - RNA, 24 nt, Artificial Sequence
  Synthetic
aauuguguguaacacucaaacuuu

SEQ ID NO: 419694 - RNA, 18 nt, Artificial Sequence
  Synthetic
auauuagaaagaaacuuu

SEQ ID NO: 419695 - RNA, 19 nt, Artificial Sequence
  Synthetic
uauauuagaaagaaacuuu

SEQ ID NO: 419696 - RNA, 20 nt, Artificial Sequence
  Synthetic
cuauauuagaaagaaacuuu

SEQ ID NO: 419697 - RNA, 21 nt, Artificial Sequence
  Synthetic
acuauauuagaaagaaacuuu

SEQ ID NO: 419698 - RNA, 22 nt, Artificial Sequence
  Synthetic
uacuauauuagaaagaaacuuu

SEQ ID NO: 419699 - RNA, 23 nt, Artificial Sequence
  Synthetic
auacuauauuagaaagaaacuuu

SEQ ID NO: 419700 - RNA, 24 nt, Artificial Sequence
  Synthetic
aauacuauauuagaaagaaacuuu

SEQ ID NO: 419701 - RNA, 18 nt, Artificial Sequence
  Synthetic
uuuggaucuagaaacuuu

SEQ ID NO: 419702 - RNA, 19 nt, Artificial Sequence
  Synthetic
cuuuggaucuagaaacuuu

SEQ ID NO: 419703 - RNA, 20 nt, Artificial Sequence
  Synthetic
ucuuuggaucuagaaacuuu

SEQ ID NO: 419704 - RNA, 21 nt, Artificial Sequence
  Synthetic
uucuuuggaucuagaaacuuu

SEQ ID NO: 419705 - RNA, 22 nt, Artificial Sequence
  Synthetic
cuucuuuggaucuagaaacuuu

SEQ ID NO: 419706 - RNA, 23 nt, Artificial Sequence
  Synthetic
ccuucuuuggaucuagaaacuuu

SEQ ID NO: 419707 - RNA, 24 nt, Artificial Sequence
  Synthetic
cccuucuuuggaucuagaaacuuu

SEQ ID NO: 419708 - RNA, 18 nt, Artificial Sequence
  Synthetic
aaggugagaggaaacuuu

SEQ ID NO: 419709 - RNA, 19 nt, Artificial Sequence
  Synthetic
uaaggugagaggaaacuuu

SEQ ID NO: 419710 - RNA, 20 nt, Artificial Sequence
  Synthetic
auaaggugagaggaaacuuu

SEQ ID NO: 419711 - RNA, 21 nt, Artificial Sequence
  Synthetic
cauaaggugagaggaaacuuu

SEQ ID NO: 419712 - RNA, 22 nt, Artificial Sequence
  Synthetic
acauaaggugagaggaaacuuu

SEQ ID NO: 419713 - RNA, 23 nt, Artificial Sequence
  Synthetic
uacauaaggugagaggaaacuuu

SEQ ID NO: 419714 - RNA, 24 nt, Artificial Sequence
  Synthetic
guacauaaggugagaggaaacuuu

SEQ ID NO: 419715 - RNA, 18 nt, Artificial Sequence
  Synthetic
ucuaaaaugugaaacuuu

SEQ ID NO: 419716 - RNA, 19 nt, Artificial Sequence
  Synthetic
cucuaaaaugugaaacuuu

SEQ ID NO: 419717 - RNA, 20 nt, Artificial Sequence
  Synthetic
gcucuaaaaugugaaacuuu

SEQ ID NO: 419718 - RNA, 21 nt, Artificial Sequence
  Synthetic
ugcucuaaaaugugaaacuuu

SEQ ID NO: 419719 - RNA, 22 nt, Artificial Sequence
  Synthetic
augcucuaaaaugugaaacuuu

SEQ ID NO: 419720 - RNA, 23 nt, Artificial Sequence
  Synthetic
aaugcucuaaaaugugaaacuuu

SEQ ID NO: 419721 - RNA, 24 nt, Artificial Sequence
  Synthetic
aaaugcucuaaaaugugaaacuuu

SEQ ID NO: 419722 - RNA, 18 nt, Artificial Sequence
  Synthetic
cucaccugcauaaacuuu

SEQ ID NO: 419723 - RNA, 19 nt, Artificial Sequence
  Synthetic
gcucaccugcauaaacuuu

SEQ ID NO: 419724 - RNA, 20 nt, Artificial Sequence
  Synthetic
ugcucaccugcauaaacuuu

SEQ ID NO: 419725 - RNA, 21 nt, Artificial Sequence
  Synthetic
gugcucaccugcauaaacuuu

SEQ ID NO: 419726 - RNA, 22 nt, Artificial Sequence
  Synthetic
ggugcucaccugcauaaacuuu

SEQ ID NO: 419727 - RNA, 23 nt, Artificial Sequence
  Synthetic
cggugcucaccugcauaaacuuu

SEQ ID NO: 419728 - RNA, 24 nt, Artificial Sequence
  Synthetic
acggugcucaccugcauaaacuuu

SEQ ID NO: 419729 - RNA, 18 nt, Artificial Sequence
  Synthetic
accugugacuccaacuuu

SEQ ID NO: 419730 - RNA, 19 nt, Artificial Sequence
  Synthetic
caccugugacuccaacuuu

SEQ ID NO: 419731 - RNA, 20 nt, Artificial Sequence
  Synthetic
ucaccugugacuccaacuuu

SEQ ID NO: 419732 - RNA, 21 nt, Artificial Sequence
  Synthetic
gucaccugugacuccaacuuu

SEQ ID NO: 419733 - RNA, 22 nt, Artificial Sequence
  Synthetic
ugucaccugugacuccaacuuu

SEQ ID NO: 419734 - RNA, 23 nt, Artificial Sequence
  Synthetic
gugucaccugugacuccaacuuu

SEQ ID NO: 419735 - RNA, 24 nt, Artificial Sequence
  Synthetic
ugugucaccugugacuccaacuuu

SEQ ID NO: 419736 - RNA, 18 nt, Artificial Sequence
  Synthetic
acacagcacgagaacuuu

SEQ ID NO: 419737 - RNA, 19 nt, Artificial Sequence
  Synthetic
aacacagcacgagaacuuu

SEQ ID NO: 419738 - RNA, 20 nt, Artificial Sequence
  Synthetic
aaacacagcacgagaacuuu

SEQ ID NO: 419739 - RNA, 21 nt, Artificial Sequence
  Synthetic
gaaacacagcacgagaacuuu

SEQ ID NO: 419740 - RNA, 22 nt, Artificial Sequence
  Synthetic
agaaacacagcacgagaacuuu

SEQ ID NO: 419741 - RNA, 23 nt, Artificial Sequence
  Synthetic
gagaaacacagcacgagaacuuu

SEQ ID NO: 419742 - RNA, 24 nt, Artificial Sequence
  Synthetic
ugagaaacacagcacgagaacuuu

SEQ ID NO: 419743 - RNA, 18 nt, Artificial Sequence
  Synthetic
acuguccuauagaacuuu

SEQ ID NO: 419744 - RNA, 19 nt, Artificial Sequence
  Synthetic
cacuguccuauagaacuuu

SEQ ID NO: 419745 - RNA, 20 nt, Artificial Sequence
  Synthetic
gcacuguccuauagaacuuu

SEQ ID NO: 419746 - RNA, 21 nt, Artificial Sequence
  Synthetic
agcacuguccuauagaacuuu

SEQ ID NO: 419747 - RNA, 22 nt, Artificial Sequence
  Synthetic
uagcacuguccuauagaacuuu

SEQ ID NO: 419748 - RNA, 23 nt, Artificial Sequence
  Synthetic
uuagcacuguccuauagaacuuu

SEQ ID NO: 419749 - RNA, 24 nt, Artificial Sequence
  Synthetic
auuagcacuguccuauagaacuuu

SEQ ID NO: 419750 - RNA, 18 nt, Artificial Sequence
  Synthetic
guacuuccuaauaacuuu

SEQ ID NO: 419751 - RNA, 19 nt, Artificial Sequence
  Synthetic
uguacuuccuaauaacuuu

SEQ ID NO: 419752 - RNA, 20 nt, Artificial Sequence
  Synthetic
auguacuuccuaauaacuuu

SEQ ID NO: 419753 - RNA, 21 nt, Artificial Sequence
  Synthetic
cauguacuuccuaauaacuuu

SEQ ID NO: 419754 - RNA, 22 nt, Artificial Sequence
  Synthetic
ccauguacuuccuaauaacuuu

SEQ ID NO: 419755 - RNA, 23 nt, Artificial Sequence
  Synthetic
cccauguacuuccuaauaacuuu

SEQ ID NO: 419756 - RNA, 24 nt, Artificial Sequence
  Synthetic
ucccauguacuuccuaauaacuuu

SEQ ID NO: 419757 - RNA, 18 nt, Artificial Sequence
  Synthetic
auaacuucacauaacuuu

SEQ ID NO: 419758 - RNA, 19 nt, Artificial Sequence
  Synthetic
uauaacuucacauaacuuu

SEQ ID NO: 419759 - RNA, 20 nt, Artificial Sequence
  Synthetic
uuauaacuucacauaacuuu

SEQ ID NO: 419760 - RNA, 21 nt, Artificial Sequence
  Synthetic
cuuauaacuucacauaacuuu

SEQ ID NO: 419761 - RNA, 22 nt, Artificial Sequence
  Synthetic
acuuauaacuucacauaacuuu

SEQ ID NO: 419762 - RNA, 23 nt, Artificial Sequence
  Synthetic
aacuuauaacuucacauaacuuu

SEQ ID NO: 419763 - RNA, 24 nt, Artificial Sequence
  Synthetic
uaacuuauaacuucacauaacuuu

SEQ ID NO: 419764 - RNA, 18 nt, Artificial Sequence
  Synthetic
ucacauuuauauaacuuu

SEQ ID NO: 419765 - RNA, 19 nt, Artificial Sequence
  Synthetic
aucacauuuauauaacuuu

SEQ ID NO: 419766 - RNA, 20 nt, Artificial Sequence
  Synthetic
uaucacauuuauauaacuuu

SEQ ID NO: 419767 - RNA, 21 nt, Artificial Sequence
  Synthetic
uuaucacauuuauauaacuuu

SEQ ID NO: 419768 - RNA, 22 nt, Artificial Sequence
  Synthetic
uuuaucacauuuauauaacuuu

SEQ ID NO: 419769 - RNA, 23 nt, Artificial Sequence
  Synthetic
uuuuaucacauuuauauaacuuu

SEQ ID NO: 419770 - RNA, 24 nt, Artificial Sequence
  Synthetic
auuuuaucacauuuauauaacuuu

SEQ ID NO: 419771 - RNA, 18 nt, Artificial Sequence
  Synthetic
gaaucaaauucuaacuuu

SEQ ID NO: 419772 - RNA, 19 nt, Artificial Sequence
  Synthetic
cgaaucaaauucuaacuuu

SEQ ID NO: 419773 - RNA, 20 nt, Artificial Sequence
  Synthetic
gcgaaucaaauucuaacuuu

SEQ ID NO: 419774 - RNA, 21 nt, Artificial Sequence
  Synthetic
ugcgaaucaaauucuaacuuu

SEQ ID NO: 419775 - RNA, 22 nt, Artificial Sequence
  Synthetic
gugcgaaucaaauucuaacuuu

SEQ ID NO: 419776 - RNA, 23 nt, Artificial Sequence
  Synthetic
ugugcgaaucaaauucuaacuuu

SEQ ID NO: 419777 - RNA, 24 nt, Artificial Sequence
  Synthetic
augugcgaaucaaauucuaacuuu

SEQ ID NO: 419778 - RNA, 18 nt, Artificial Sequence
  Synthetic
guuagguucuguaacuuu

SEQ ID NO: 419779 - RNA, 19 nt, Artificial Sequence
  Synthetic
uguuagguucuguaacuuu

SEQ ID NO: 419780 - RNA, 20 nt, Artificial Sequence
  Synthetic
auguuagguucuguaacuuu

SEQ ID NO: 419781 - RNA, 21 nt, Artificial Sequence
  Synthetic
gauguuagguucuguaacuuu

SEQ ID NO: 419782 - RNA, 22 nt, Artificial Sequence
  Synthetic
ugauguuagguucuguaacuuu

SEQ ID NO: 419783 - RNA, 23 nt, Artificial Sequence
  Synthetic
augauguuagguucuguaacuuu

SEQ ID NO: 419784 - RNA, 24 nt, Artificial Sequence
  Synthetic
uaugauguuagguucuguaacuuu

SEQ ID NO: 419785 - RNA, 18 nt, Artificial Sequence
  Synthetic
agauuacuaguuaacuuu

SEQ ID NO: 419786 - RNA, 19 nt, Artificial Sequence
  Synthetic
aagauuacuaguuaacuuu

SEQ ID NO: 419787 - RNA, 20 nt, Artificial Sequence
  Synthetic
uaagauuacuaguuaacuuu

SEQ ID NO: 419788 - RNA, 21 nt, Artificial Sequence
  Synthetic
guaagauuacuaguuaacuuu

SEQ ID NO: 419789 - RNA, 22 nt, Artificial Sequence
  Synthetic
uguaagauuacuaguuaacuuu

SEQ ID NO: 419790 - RNA, 23 nt, Artificial Sequence
  Synthetic
auguaagauuacuaguuaacuuu

SEQ ID NO: 419791 - RNA, 24 nt, Artificial Sequence
  Synthetic
uauguaagauuacuaguuaacuuu

SEQ ID NO: 419792 - RNA, 18 nt, Artificial Sequence
  Synthetic
cuguaaucccaacacuuu

SEQ ID NO: 419793 - RNA, 19 nt, Artificial Sequence
  Synthetic
ccuguaaucccaacacuuu

SEQ ID NO: 419794 - RNA, 20 nt, Artificial Sequence
  Synthetic
gccuguaaucccaacacuuu

SEQ ID NO: 419795 - RNA, 21 nt, Artificial Sequence
  Synthetic
cgccuguaaucccaacacuuu

SEQ ID NO: 419796 - RNA, 22 nt, Artificial Sequence
  Synthetic
acgccuguaaucccaacacuuu

SEQ ID NO: 419797 - RNA, 23 nt, Artificial Sequence
  Synthetic
cacgccuguaaucccaacacuuu

SEQ ID NO: 419798 - RNA, 24 nt, Artificial Sequence
  Synthetic
ucacgccuguaaucccaacacuuu

SEQ ID NO: 419799 - RNA, 18 nt, Artificial Sequence
  Synthetic
uuguaaucccaacacuuu

SEQ ID NO: 419800 - RNA, 19 nt, Artificial Sequence
  Synthetic
cuuguaaucccaacacuuu

SEQ ID NO: 419801 - RNA, 20 nt, Artificial Sequence
  Synthetic
gcuuguaaucccaacacuuu

SEQ ID NO: 419802 - RNA, 21 nt, Artificial Sequence
  Synthetic
ugcuuguaaucccaacacuuu

SEQ ID NO: 419803 - RNA, 22 nt, Artificial Sequence
  Synthetic
augcuuguaaucccaacacuuu

SEQ ID NO: 419804 - RNA, 23 nt, Artificial Sequence
  Synthetic
caugcuuguaaucccaacacuuu

SEQ ID NO: 419805 - RNA, 24 nt, Artificial Sequence
  Synthetic
ucaugcuuguaaucccaacacuuu

SEQ ID NO: 419806 - RNA, 18 nt, Artificial Sequence
  Synthetic
cucuacucccaacacuuu

SEQ ID NO: 419807 - RNA, 19 nt, Artificial Sequence
  Synthetic
ccucuacucccaacacuuu

SEQ ID NO: 419808 - RNA, 20 nt, Artificial Sequence
  Synthetic
gccucuacucccaacacuuu

SEQ ID NO: 419809 - RNA, 21 nt, Artificial Sequence
  Synthetic
cgccucuacucccaacacuuu

SEQ ID NO: 419810 - RNA, 22 nt, Artificial Sequence
  Synthetic
acgccucuacucccaacacuuu

SEQ ID NO: 419811 - RNA, 23 nt, Artificial Sequence
  Synthetic
uacgccucuacucccaacacuuu

SEQ ID NO: 419812 - RNA, 24 nt, Artificial Sequence
  Synthetic
uuacgccucuacucccaacacuuu

SEQ ID NO: 419813 - RNA, 18 nt, Artificial Sequence
  Synthetic
cuguaaucucaacacuuu

SEQ ID NO: 419814 - RNA, 19 nt, Artificial Sequence
  Synthetic
ccuguaaucucaacacuuu

SEQ ID NO: 419815 - RNA, 20 nt, Artificial Sequence
  Synthetic
accuguaaucucaacacuuu

SEQ ID NO: 419816 - RNA, 21 nt, Artificial Sequence
  Synthetic
caccuguaaucucaacacuuu

SEQ ID NO: 419817 - RNA, 22 nt, Artificial Sequence
  Synthetic
acaccuguaaucucaacacuuu

SEQ ID NO: 419818 - RNA, 23 nt, Artificial Sequence
  Synthetic
cacaccuguaaucucaacacuuu

SEQ ID NO: 419819 - RNA, 24 nt, Artificial Sequence
  Synthetic
ucacaccuguaaucucaacacuuu

SEQ ID NO: 419820 - RNA, 18 nt, Artificial Sequence
  Synthetic
cuguaauccuaacacuuu

SEQ ID NO: 419821 - RNA, 19 nt, Artificial Sequence
  Synthetic
ccuguaauccuaacacuuu

SEQ ID NO: 419822 - RNA, 20 nt, Artificial Sequence
  Synthetic
accuguaauccuaacacuuu

SEQ ID NO: 419823 - RNA, 21 nt, Artificial Sequence
  Synthetic
caccuguaauccuaacacuuu

SEQ ID NO: 419824 - RNA, 22 nt, Artificial Sequence
  Synthetic
acaccuguaauccuaacacuuu

SEQ ID NO: 419825 - RNA, 23 nt, Artificial Sequence
  Synthetic
cacaccuguaauccuaacacuuu

SEQ ID NO: 419826 - RNA, 24 nt, Artificial Sequence
  Synthetic
ucacaccuguaauccuaacacuuu

SEQ ID NO: 419827 - RNA, 18 nt, Artificial Sequence
  Synthetic
aaaugcuuuuaacacuuu

SEQ ID NO: 419828 - RNA, 19 nt, Artificial Sequence
  Synthetic
gaaaugcuuuuaacacuuu

SEQ ID NO: 419829 - RNA, 20 nt, Artificial Sequence
  Synthetic
ugaaaugcuuuuaacacuuu

SEQ ID NO: 419830 - RNA, 21 nt, Artificial Sequence
  Synthetic
augaaaugcuuuuaacacuuu

SEQ ID NO: 419831 - RNA, 22 nt, Artificial Sequence
  Synthetic
uaugaaaugcuuuuaacacuuu

SEQ ID NO: 419832 - RNA, 23 nt, Artificial Sequence
  Synthetic
uuaugaaaugcuuuuaacacuuu

SEQ ID NO: 419833 - RNA, 24 nt, Artificial Sequence
  Synthetic
auuaugaaaugcuuuuaacacuuu

SEQ ID NO: 419834 - RNA, 18 nt, Artificial Sequence
  Synthetic
guucugcaaucacacuuu

SEQ ID NO: 419835 - RNA, 19 nt, Artificial Sequence
  Synthetic
aguucugcaaucacacuuu

SEQ ID NO: 419836 - RNA, 20 nt, Artificial Sequence
  Synthetic
uaguucugcaaucacacuuu

SEQ ID NO: 419837 - RNA, 21 nt, Artificial Sequence
  Synthetic
uuaguucugcaaucacacuuu

SEQ ID NO: 419838 - RNA, 22 nt, Artificial Sequence
  Synthetic
uuuaguucugcaaucacacuuu

SEQ ID NO: 419839 - RNA, 23 nt, Artificial Sequence
  Synthetic
uuuuaguucugcaaucacacuuu

SEQ ID NO: 419840 - RNA, 24 nt, Artificial Sequence
  Synthetic
cuuuuaguucugcaaucacacuuu

SEQ ID NO: 419841 - RNA, 18 nt, Artificial Sequence
  Synthetic
ucauauugcagacacuuu

SEQ ID NO: 419842 - RNA, 19 nt, Artificial Sequence
  Synthetic
aucauauugcagacacuuu

SEQ ID NO: 419843 - RNA, 20 nt, Artificial Sequence
  Synthetic
aaucauauugcagacacuuu

SEQ ID NO: 419844 - RNA, 21 nt, Artificial Sequence
  Synthetic
aaaucauauugcagacacuuu

SEQ ID NO: 419845 - RNA, 22 nt, Artificial Sequence
  Synthetic
aaaaucauauugcagacacuuu

SEQ ID NO: 419846 - RNA, 23 nt, Artificial Sequence
  Synthetic
aaaaaucauauugcagacacuuu

SEQ ID NO: 419847 - RNA, 24 nt, Artificial Sequence
  Synthetic
uaaaaaucauauugcagacacuuu

SEQ ID NO: 419848 - RNA, 18 nt, Artificial Sequence
  Synthetic
ccccagcaccaccacuuu

SEQ ID NO: 419849 - RNA, 19 nt, Artificial Sequence
  Synthetic
uccccagcaccaccacuuu

SEQ ID NO: 419850 - RNA, 20 nt, Artificial Sequence
  Synthetic
uuccccagcaccaccacuuu

SEQ ID NO: 419851 - RNA, 21 nt, Artificial Sequence
  Synthetic
cuuccccagcaccaccacuuu

SEQ ID NO: 419852 - RNA, 22 nt, Artificial Sequence
  Synthetic
acuuccccagcaccaccacuuu

SEQ ID NO: 419853 - RNA, 23 nt, Artificial Sequence
  Synthetic
cacuuccccagcaccaccacuuu

SEQ ID NO: 419854 - RNA, 24 nt, Artificial Sequence
  Synthetic
ucacuuccccagcaccaccacuuu

SEQ ID NO: 419855 - RNA, 18 nt, Artificial Sequence
  Synthetic
gugaguguuucccacuuu

SEQ ID NO: 419856 - RNA, 19 nt, Artificial Sequence
  Synthetic
agugaguguuucccacuuu

SEQ ID NO: 419857 - RNA, 20 nt, Artificial Sequence
  Synthetic
uagugaguguuucccacuuu

SEQ ID NO: 419858 - RNA, 21 nt, Artificial Sequence
  Synthetic
uuagugaguguuucccacuuu

SEQ ID NO: 419859 - RNA, 22 nt, Artificial Sequence
  Synthetic
auuagugaguguuucccacuuu

SEQ ID NO: 419860 - RNA, 23 nt, Artificial Sequence
  Synthetic
cauuagugaguguuucccacuuu

SEQ ID NO: 419861 - RNA, 24 nt, Artificial Sequence
  Synthetic
ccauuagugaguguuucccacuuu

SEQ ID NO: 419862 - RNA, 18 nt, Artificial Sequence
  Synthetic
gaacuuggcuuccacuuu

SEQ ID NO: 419863 - RNA, 19 nt, Artificial Sequence
  Synthetic
ugaacuuggcuuccacuuu

SEQ ID NO: 419864 - RNA, 20 nt, Artificial Sequence
  Synthetic
augaacuuggcuuccacuuu

SEQ ID NO: 419865 - RNA, 21 nt, Artificial Sequence
  Synthetic
caugaacuuggcuuccacuuu

SEQ ID NO: 419866 - RNA, 22 nt, Artificial Sequence
  Synthetic
ucaugaacuuggcuuccacuuu

SEQ ID NO: 419867 - RNA, 23 nt, Artificial Sequence
  Synthetic
uucaugaacuuggcuuccacuuu

SEQ ID NO: 419868 - RNA, 24 nt, Artificial Sequence
  Synthetic
auucaugaacuuggcuuccacuuu

SEQ ID NO: 419869 - RNA, 18 nt, Artificial Sequence
  Synthetic
cuguaauccaagcacuuu

SEQ ID NO: 419870 - RNA, 19 nt, Artificial Sequence
  Synthetic
ccuguaauccaagcacuuu

SEQ ID NO: 419871 - RNA, 20 nt, Artificial Sequence
  Synthetic
gccuguaauccaagcacuuu

SEQ ID NO: 419872 - RNA, 21 nt, Artificial Sequence
  Synthetic
cgccuguaauccaagcacuuu

SEQ ID NO: 419873 - RNA, 22 nt, Artificial Sequence
  Synthetic
acgccuguaauccaagcacuuu

SEQ ID NO: 419874 - RNA, 23 nt, Artificial Sequence
  Synthetic
cacgccuguaauccaagcacuuu

SEQ ID NO: 419875 - RNA, 24 nt, Artificial Sequence
  Synthetic
ucacgccuguaauccaagcacuuu

SEQ ID NO: 419876 - RNA, 18 nt, Artificial Sequence
  Synthetic
cuguaauaccagcacuuu

SEQ ID NO: 419877 - RNA, 19 nt, Artificial Sequence
  Synthetic
ccuguaauaccagcacuuu

SEQ ID NO: 419878 - RNA, 20 nt, Artificial Sequence
  Synthetic
gccuguaauaccagcacuuu

SEQ ID NO: 419879 - RNA, 21 nt, Artificial Sequence
  Synthetic
cgccuguaauaccagcacuuu

SEQ ID NO: 419880 - RNA, 22 nt, Artificial Sequence
  Synthetic
gcgccuguaauaccagcacuuu

SEQ ID NO: 419881 - RNA, 23 nt, Artificial Sequence
  Synthetic
cgcgccuguaauaccagcacuuu

SEQ ID NO: 419882 - RNA, 24 nt, Artificial Sequence
  Synthetic
ucgcgccuguaauaccagcacuuu

SEQ ID NO: 419883 - RNA, 18 nt, Artificial Sequence
  Synthetic
cuguaaccccagcacuuu

SEQ ID NO: 419884 - RNA, 19 nt, Artificial Sequence
  Synthetic
ccuguaaccccagcacuuu

SEQ ID NO: 419885 - RNA, 20 nt, Artificial Sequence
  Synthetic
gccuguaaccccagcacuuu

SEQ ID NO: 419886 - RNA, 21 nt, Artificial Sequence
  Synthetic
ugccuguaaccccagcacuuu

SEQ ID NO: 419887 - RNA, 22 nt, Artificial Sequence
  Synthetic
augccuguaaccccagcacuuu

SEQ ID NO: 419888 - RNA, 23 nt, Artificial Sequence
  Synthetic
caugccuguaaccccagcacuuu

SEQ ID NO: 419889 - RNA, 24 nt, Artificial Sequence
  Synthetic
ucaugccuguaaccccagcacuuu

SEQ ID NO: 419890 - RNA, 18 nt, Artificial Sequence
  Synthetic
ccauaaucccagcacuuu

SEQ ID NO: 419891 - RNA, 19 nt, Artificial Sequence
  Synthetic
cccauaaucccagcacuuu

SEQ ID NO: 419892 - RNA, 20 nt, Artificial Sequence
  Synthetic
ccccauaaucccagcacuuu

SEQ ID NO: 419893 - RNA, 21 nt, Artificial Sequence
  Synthetic
uccccauaaucccagcacuuu

SEQ ID NO: 419894 - RNA, 22 nt, Artificial Sequence
  Synthetic
guccccauaaucccagcacuuu

SEQ ID NO: 419895 - RNA, 23 nt, Artificial Sequence
  Synthetic
uguccccauaaucccagcacuuu

SEQ ID NO: 419896 - RNA, 24 nt, Artificial Sequence
  Synthetic
auguccccauaaucccagcacuuu

SEQ ID NO: 419897 - RNA, 18 nt, Artificial Sequence
  Synthetic
auauaaucccagcacuuu

SEQ ID NO: 419898 - RNA, 19 nt, Artificial Sequence
  Synthetic
cauauaaucccagcacuuu

SEQ ID NO: 419899 - RNA, 20 nt, Artificial Sequence
  Synthetic
gcauauaaucccagcacuuu

SEQ ID NO: 419900 - RNA, 21 nt, Artificial Sequence
  Synthetic
ugcauauaaucccagcacuuu

SEQ ID NO: 419901 - RNA, 22 nt, Artificial Sequence
  Synthetic
augcauauaaucccagcacuuu

SEQ ID NO: 419902 - RNA, 23 nt, Artificial Sequence
  Synthetic
caugcauauaaucccagcacuuu

SEQ ID NO: 419903 - RNA, 24 nt, Artificial Sequence
  Synthetic
ucaugcauauaaucccagcacuuu

SEQ ID NO: 419904 - RNA, 18 nt, Artificial Sequence
  Synthetic
cuauaaucccagcacuuu

SEQ ID NO: 419905 - RNA, 19 nt, Artificial Sequence
  Synthetic
ccuauaaucccagcacuuu

SEQ ID NO: 419906 - RNA, 20 nt, Artificial Sequence
  Synthetic
accuauaaucccagcacuuu

SEQ ID NO: 419907 - RNA, 21 nt, Artificial Sequence
  Synthetic
caccuauaaucccagcacuuu

SEQ ID NO: 419908 - RNA, 22 nt, Artificial Sequence
  Synthetic
acaccuauaaucccagcacuuu

SEQ ID NO: 419909 - RNA, 23 nt, Artificial Sequence
  Synthetic
cacaccuauaaucccagcacuuu

SEQ ID NO: 419910 - RNA, 24 nt, Artificial Sequence
  Synthetic
ucacaccuauaaucccagcacuuu

SEQ ID NO: 419911 - RNA, 21 nt, Artificial Sequence
  Synthetic
cgccuauaaucccagcacuuu

SEQ ID NO: 419912 - RNA, 22 nt, Artificial Sequence
  Synthetic
acgccuauaaucccagcacuuu

SEQ ID NO: 419913 - RNA, 23 nt, Artificial Sequence
  Synthetic
cacgccuauaaucccagcacuuu

SEQ ID NO: 419914 - RNA, 24 nt, Artificial Sequence
  Synthetic
ucacgccuauaaucccagcacuuu

SEQ ID NO: 419915 - RNA, 21 nt, Artificial Sequence
  Synthetic
ugccuauaaucccagcacuuu

SEQ ID NO: 419916 - RNA, 22 nt, Artificial Sequence
  Synthetic
augccuauaaucccagcacuuu

SEQ ID NO: 419917 - RNA, 23 nt, Artificial Sequence
  Synthetic
caugccuauaaucccagcacuuu

SEQ ID NO: 419918 - RNA, 24 nt, Artificial Sequence
  Synthetic
ucaugccuauaaucccagcacuuu

SEQ ID NO: 419919 - RNA, 20 nt, Artificial Sequence
  Synthetic
uccuauaaucccagcacuuu

SEQ ID NO: 419920 - RNA, 21 nt, Artificial Sequence
  Synthetic
cuccuauaaucccagcacuuu

SEQ ID NO: 419921 - RNA, 22 nt, Artificial Sequence
  Synthetic
acuccuauaaucccagcacuuu

SEQ ID NO: 419922 - RNA, 23 nt, Artificial Sequence
  Synthetic
cacuccuauaaucccagcacuuu

SEQ ID NO: 419923 - RNA, 24 nt, Artificial Sequence
  Synthetic
ucacuccuauaaucccagcacuuu

SEQ ID NO: 419924 - RNA, 21 nt, Artificial Sequence
  Synthetic
uaccuguaaucccagcacuuu

SEQ ID NO: 419925 - RNA, 22 nt, Artificial Sequence
  Synthetic
auaccuguaaucccagcacuuu

SEQ ID NO: 419926 - RNA, 23 nt, Artificial Sequence
  Synthetic
cauaccuguaaucccagcacuuu

SEQ ID NO: 419927 - RNA, 24 nt, Artificial Sequence
  Synthetic
ucauaccuguaaucccagcacuuu

SEQ ID NO: 419928 - RNA, 21 nt, Artificial Sequence
  Synthetic
agccuguaaucccagcacuuu

SEQ ID NO: 419929 - RNA, 22 nt, Artificial Sequence
  Synthetic
aagccuguaaucccagcacuuu

SEQ ID NO: 419930 - RNA, 23 nt, Artificial Sequence
  Synthetic
caagccuguaaucccagcacuuu

SEQ ID NO: 419931 - RNA, 24 nt, Artificial Sequence
  Synthetic
ucaagccuguaaucccagcacuuu

SEQ ID NO: 419932 - RNA, 21 nt, Artificial Sequence
  Synthetic
cgccuguaaucccagcacuuu

SEQ ID NO: 419933 - RNA, 22 nt, Artificial Sequence
  Synthetic
acgccuguaaucccagcacuuu

SEQ ID NO: 419934 - RNA, 23 nt, Artificial Sequence
  Synthetic
aacgccuguaaucccagcacuuu

SEQ ID NO: 419935 - RNA, 24 nt, Artificial Sequence
  Synthetic
caacgccuguaaucccagcacuuu

SEQ ID NO: 419936 - RNA, 23 nt, Artificial Sequence
  Synthetic
cacgccuguaaucccagcacuuu

SEQ ID NO: 419937 - RNA, 24 nt, Artificial Sequence
  Synthetic
ucacgccuguaaucccagcacuuu

SEQ ID NO: 419938 - RNA, 21 nt, Artificial Sequence
  Synthetic
ggccuguaaucccagcacuuu

SEQ ID NO: 419939 - RNA, 22 nt, Artificial Sequence
  Synthetic
aggccuguaaucccagcacuuu

SEQ ID NO: 419940 - RNA, 23 nt, Artificial Sequence
  Synthetic
caggccuguaaucccagcacuuu

SEQ ID NO: 419941 - RNA, 24 nt, Artificial Sequence
  Synthetic
ucaggccuguaaucccagcacuuu

SEQ ID NO: 419942 - RNA, 18 nt, Artificial Sequence
  Synthetic
uuguaaucccagcacuuu

SEQ ID NO: 419943 - RNA, 19 nt, Artificial Sequence
  Synthetic
cuuguaaucccagcacuuu

SEQ ID NO: 419944 - RNA, 20 nt, Artificial Sequence
  Synthetic
acuuguaaucccagcacuuu

SEQ ID NO: 419945 - RNA, 21 nt, Artificial Sequence
  Synthetic
cacuuguaaucccagcacuuu

SEQ ID NO: 419946 - RNA, 22 nt, Artificial Sequence
  Synthetic
acacuuguaaucccagcacuuu

SEQ ID NO: 419947 - RNA, 23 nt, Artificial Sequence
  Synthetic
cacacuuguaaucccagcacuuu

SEQ ID NO: 419948 - RNA, 24 nt, Artificial Sequence
  Synthetic
ucacacuuguaaucccagcacuuu

SEQ ID NO: 419949 - RNA, 18 nt, Artificial Sequence
  Synthetic
cuguacucccagcacuuu

SEQ ID NO: 419950 - RNA, 19 nt, Artificial Sequence
  Synthetic
ccuguacucccagcacuuu

SEQ ID NO: 419951 - RNA, 20 nt, Artificial Sequence
  Synthetic
accuguacucccagcacuuu

SEQ ID NO: 419952 - RNA, 21 nt, Artificial Sequence
  Synthetic
caccuguacucccagcacuuu

SEQ ID NO: 419953 - RNA, 22 nt, Artificial Sequence
  Synthetic
acaccuguacucccagcacuuu

SEQ ID NO: 419954 - RNA, 23 nt, Artificial Sequence
  Synthetic
cacaccuguacucccagcacuuu

SEQ ID NO: 419955 - RNA, 24 nt, Artificial Sequence
  Synthetic
ucacaccuguacucccagcacuuu

SEQ ID NO: 419956 - RNA, 18 nt, Artificial Sequence
  Synthetic
cuguaauuccagcacuuu

SEQ ID NO: 419957 - RNA, 19 nt, Artificial Sequence
  Synthetic
ccuguaauuccagcacuuu

SEQ ID NO: 419958 - RNA, 20 nt, Artificial Sequence
  Synthetic
uccuguaauuccagcacuuu

SEQ ID NO: 419959 - RNA, 21 nt, Artificial Sequence
  Synthetic
cuccuguaauuccagcacuuu

SEQ ID NO: 419960 - RNA, 22 nt, Artificial Sequence
  Synthetic
acuccuguaauuccagcacuuu

SEQ ID NO: 419961 - RNA, 23 nt, Artificial Sequence
  Synthetic
cacuccuguaauuccagcacuuu

SEQ ID NO: 419962 - RNA, 24 nt, Artificial Sequence
  Synthetic
ucacuccuguaauuccagcacuuu

SEQ ID NO: 419963 - RNA, 18 nt, Artificial Sequence
  Synthetic
cuguaaucgcagcacuuu

SEQ ID NO: 419964 - RNA, 19 nt, Artificial Sequence
  Synthetic
ccuguaaucgcagcacuuu

SEQ ID NO: 419965 - RNA, 20 nt, Artificial Sequence
  Synthetic
gccuguaaucgcagcacuuu

SEQ ID NO: 419966 - RNA, 21 nt, Artificial Sequence
  Synthetic
cgccuguaaucgcagcacuuu

SEQ ID NO: 419967 - RNA, 22 nt, Artificial Sequence
  Synthetic
acgccuguaaucgcagcacuuu

SEQ ID NO: 419968 - RNA, 23 nt, Artificial Sequence
  Synthetic
cacgccuguaaucgcagcacuuu

SEQ ID NO: 419969 - RNA, 24 nt, Artificial Sequence
  Synthetic
ucacgccuguaaucgcagcacuuu

SEQ ID NO: 419970 - RNA, 18 nt, Artificial Sequence
  Synthetic
aucaucugauagcacuuu

SEQ ID NO: 419971 - RNA, 19 nt, Artificial Sequence
  Synthetic
aaucaucugauagcacuuu

SEQ ID NO: 419972 - RNA, 20 nt, Artificial Sequence
  Synthetic
caaucaucugauagcacuuu

SEQ ID NO: 419973 - RNA, 21 nt, Artificial Sequence
  Synthetic
acaaucaucugauagcacuuu

SEQ ID NO: 419974 - RNA, 22 nt, Artificial Sequence
  Synthetic
aacaaucaucugauagcacuuu

SEQ ID NO: 419975 - RNA, 23 nt, Artificial Sequence
  Synthetic
gaacaaucaucugauagcacuuu

SEQ ID NO: 419976 - RNA, 24 nt, Artificial Sequence
  Synthetic
ggaacaaucaucugauagcacuuu

SEQ ID NO: 419977 - RNA, 18 nt, Artificial Sequence
  Synthetic
aaaguucugcuucacuuu

SEQ ID NO: 419978 - RNA, 19 nt, Artificial Sequence
  Synthetic
uaaaguucugcuucacuuu

SEQ ID NO: 419979 - RNA, 20 nt, Artificial Sequence
  Synthetic
auaaaguucugcuucacuuu

SEQ ID NO: 419980 - RNA, 21 nt, Artificial Sequence
  Synthetic
gauaaaguucugcuucacuuu

SEQ ID NO: 419981 - RNA, 22 nt, Artificial Sequence
  Synthetic
agauaaaguucugcuucacuuu

SEQ ID NO: 419982 - RNA, 23 nt, Artificial Sequence
  Synthetic
aagauaaaguucugcuucacuuu

SEQ ID NO: 419983 - RNA, 24 nt, Artificial Sequence
  Synthetic
aaagauaaaguucugcuucacuuu

SEQ ID NO: 419984 - RNA, 18 nt, Artificial Sequence
  Synthetic
uucuuucgcguucacuuu

SEQ ID NO: 419985 - RNA, 19 nt, Artificial Sequence
  Synthetic
uuucuuucgcguucacuuu

SEQ ID NO: 419986 - RNA, 20 nt, Artificial Sequence
  Synthetic
guuucuuucgcguucacuuu

SEQ ID NO: 419987 - RNA, 21 nt, Artificial Sequence
  Synthetic
aguuucuuucgcguucacuuu

SEQ ID NO: 419988 - RNA, 22 nt, Artificial Sequence
  Synthetic
caguuucuuucgcguucacuuu

SEQ ID NO: 419989 - RNA, 23 nt, Artificial Sequence
  Synthetic
ucaguuucuuucgcguucacuuu

SEQ ID NO: 419990 - RNA, 24 nt, Artificial Sequence
  Synthetic
uucaguuucuuucgcguucacuuu

SEQ ID NO: 419991 - RNA, 18 nt, Artificial Sequence
  Synthetic
gaaaaggacugagacuuu

SEQ ID NO: 419992 - RNA, 19 nt, Artificial Sequence
  Synthetic
agaaaaggacugagacuuu

SEQ ID NO: 419993 - RNA, 20 nt, Artificial Sequence
  Synthetic
cagaaaaggacugagacuuu

SEQ ID NO: 419994 - RNA, 21 nt, Artificial Sequence
  Synthetic
ucagaaaaggacugagacuuu

SEQ ID NO: 419995 - RNA, 22 nt, Artificial Sequence
  Synthetic
cucagaaaaggacugagacuuu

SEQ ID NO: 419996 - RNA, 23 nt, Artificial Sequence
  Synthetic
gcucagaaaaggacugagacuuu

SEQ ID NO: 419997 - RNA, 24 nt, Artificial Sequence
  Synthetic
agcucagaaaaggacugagacuuu

SEQ ID NO: 419998 - RNA, 18 nt, Artificial Sequence
  Synthetic
uuuguggaucuagacuuu

SEQ ID NO: 419999 - RNA, 19 nt, Artificial Sequence
  Synthetic
uuuuguggaucuagacuuu

SEQ ID NO: 420000 - RNA, 20 nt, Artificial Sequence
  Synthetic
auuuuguggaucuagacuuu

SEQ ID NO: 420001 - RNA, 21 nt, Artificial Sequence
  Synthetic
cauuuuguggaucuagacuuu

SEQ ID NO: 420002 - RNA, 22 nt, Artificial Sequence
  Synthetic
gcauuuuguggaucuagacuuu

SEQ ID NO: 420003 - RNA, 23 nt, Artificial Sequence
  Synthetic
ugcauuuuguggaucuagacuuu

SEQ ID NO: 420004 - RNA, 24 nt, Artificial Sequence
  Synthetic
uugcauuuuguggaucuagacuuu

SEQ ID NO: 420005 - RNA, 18 nt, Artificial Sequence
  Synthetic
cuguaacccuaggacuuu

SEQ ID NO: 420006 - RNA, 19 nt, Artificial Sequence
  Synthetic
ucuguaacccuaggacuuu

SEQ ID NO: 420007 - RNA, 20 nt, Artificial Sequence
  Synthetic
gucuguaacccuaggacuuu

SEQ ID NO: 420008 - RNA, 21 nt, Artificial Sequence
  Synthetic
cgucuguaacccuaggacuuu

SEQ ID NO: 420009 - RNA, 22 nt, Artificial Sequence
  Synthetic
acgucuguaacccuaggacuuu

SEQ ID NO: 420010 - RNA, 23 nt, Artificial Sequence
  Synthetic
cacgucuguaacccuaggacuuu

SEQ ID NO: 420011 - RNA, 24 nt, Artificial Sequence
  Synthetic
ucacgucuguaacccuaggacuuu

SEQ ID NO: 420012 - RNA, 18 nt, Artificial Sequence
  Synthetic
gaagcggaaacggacuuu

SEQ ID NO: 420013 - RNA, 19 nt, Artificial Sequence
  Synthetic
agaagcggaaacggacuuu

SEQ ID NO: 420014 - RNA, 20 nt, Artificial Sequence
  Synthetic
uagaagcggaaacggacuuu

SEQ ID NO: 420015 - RNA, 21 nt, Artificial Sequence
  Synthetic
auagaagcggaaacggacuuu

SEQ ID NO: 420016 - RNA, 22 nt, Artificial Sequence
  Synthetic
gauagaagcggaaacggacuuu

SEQ ID NO: 420017 - RNA, 23 nt, Artificial Sequence
  Synthetic
ugauagaagcggaaacggacuuu

SEQ ID NO: 420018 - RNA, 24 nt, Artificial Sequence
  Synthetic
uugauagaagcggaaacggacuuu

SEQ ID NO: 420019 - RNA, 18 nt, Artificial Sequence
  Synthetic
acuaaucagcaauacuuu

SEQ ID NO: 420020 - RNA, 19 nt, Artificial Sequence
  Synthetic
aacuaaucagcaauacuuu

SEQ ID NO: 420021 - RNA, 20 nt, Artificial Sequence
  Synthetic
gaacuaaucagcaauacuuu

SEQ ID NO: 420022 - RNA, 21 nt, Artificial Sequence
  Synthetic
agaacuaaucagcaauacuuu

SEQ ID NO: 420023 - RNA, 22 nt, Artificial Sequence
  Synthetic
gagaacuaaucagcaauacuuu

SEQ ID NO: 420024 - RNA, 23 nt, Artificial Sequence
  Synthetic
ugagaacuaaucagcaauacuuu

SEQ ID NO: 420025 - RNA, 24 nt, Artificial Sequence
  Synthetic
cugagaacuaaucagcaauacuuu

SEQ ID NO: 420026 - RNA, 18 nt, Artificial Sequence
  Synthetic
ucagaaaacuaauacuuu

SEQ ID NO: 420027 - RNA, 19 nt, Artificial Sequence
  Synthetic
uucagaaaacuaauacuuu

SEQ ID NO: 420028 - RNA, 20 nt, Artificial Sequence
  Synthetic
guucagaaaacuaauacuuu

SEQ ID NO: 420029 - RNA, 21 nt, Artificial Sequence
  Synthetic
aguucagaaaacuaauacuuu

SEQ ID NO: 420030 - RNA, 22 nt, Artificial Sequence
  Synthetic
caguucagaaaacuaauacuuu

SEQ ID NO: 420031 - RNA, 23 nt, Artificial Sequence
  Synthetic
ccaguucagaaaacuaauacuuu

SEQ ID NO: 420032 - RNA, 24 nt, Artificial Sequence
  Synthetic
gccaguucagaaaacuaauacuuu

SEQ ID NO: 420033 - RNA, 18 nt, Artificial Sequence
  Synthetic
uaaaaacagacauacuuu

SEQ ID NO: 420034 - RNA, 19 nt, Artificial Sequence
  Synthetic
auaaaaacagacauacuuu

SEQ ID NO: 420035 - RNA, 20 nt, Artificial Sequence
  Synthetic
gauaaaaacagacauacuuu

SEQ ID NO: 420036 - RNA, 21 nt, Artificial Sequence
  Synthetic
ggauaaaaacagacauacuuu

SEQ ID NO: 420037 - RNA, 22 nt, Artificial Sequence
  Synthetic
uggauaaaaacagacauacuuu

SEQ ID NO: 420038 - RNA, 23 nt, Artificial Sequence
  Synthetic
guggauaaaaacagacauacuuu

SEQ ID NO: 420039 - RNA, 24 nt, Artificial Sequence
  Synthetic
uguggauaaaaacagacauacuuu

SEQ ID NO: 420040 - RNA, 18 nt, Artificial Sequence
  Synthetic
guauucucaccauacuuu

SEQ ID NO: 420041 - RNA, 19 nt, Artificial Sequence
  Synthetic
cguauucucaccauacuuu

SEQ ID NO: 420042 - RNA, 20 nt, Artificial Sequence
  Synthetic
ucguauucucaccauacuuu

SEQ ID NO: 420043 - RNA, 21 nt, Artificial Sequence
  Synthetic
uucguauucucaccauacuuu

SEQ ID NO: 420044 - RNA, 22 nt, Artificial Sequence
  Synthetic
auucguauucucaccauacuuu

SEQ ID NO: 420045 - RNA, 23 nt, Artificial Sequence
  Synthetic
aauucguauucucaccauacuuu

SEQ ID NO: 420046 - RNA, 24 nt, Artificial Sequence
  Synthetic
gaauucguauucucaccauacuuu

SEQ ID NO: 420047 - RNA, 18 nt, Artificial Sequence
  Synthetic
aauguuucagcauacuuu

SEQ ID NO: 420048 - RNA, 19 nt, Artificial Sequence
  Synthetic
gaauguuucagcauacuuu

SEQ ID NO: 420049 - RNA, 20 nt, Artificial Sequence
  Synthetic
agaauguuucagcauacuuu

SEQ ID NO: 420050 - RNA, 21 nt, Artificial Sequence
  Synthetic
aagaauguuucagcauacuuu

SEQ ID NO: 420051 - RNA, 22 nt, Artificial Sequence
  Synthetic
aaagaauguuucagcauacuuu

SEQ ID NO: 420052 - RNA, 23 nt, Artificial Sequence
  Synthetic
gaaagaauguuucagcauacuuu

SEQ ID NO: 420053 - RNA, 24 nt, Artificial Sequence
  Synthetic
ggaaagaauguuucagcauacuuu

SEQ ID NO: 420054 - RNA, 18 nt, Artificial Sequence
  Synthetic
uauaagcaacgauacuuu

SEQ ID NO: 420055 - RNA, 19 nt, Artificial Sequence
  Synthetic
auauaagcaacgauacuuu

SEQ ID NO: 420056 - RNA, 20 nt, Artificial Sequence
  Synthetic
aauauaagcaacgauacuuu

SEQ ID NO: 420057 - RNA, 21 nt, Artificial Sequence
  Synthetic
caauauaagcaacgauacuuu

SEQ ID NO: 420058 - RNA, 22 nt, Artificial Sequence
  Synthetic
acaauauaagcaacgauacuuu

SEQ ID NO: 420059 - RNA, 23 nt, Artificial Sequence
  Synthetic
gacaauauaagcaacgauacuuu

SEQ ID NO: 420060 - RNA, 24 nt, Artificial Sequence
  Synthetic
ggacaauauaagcaacgauacuuu

SEQ ID NO: 420061 - RNA, 18 nt, Artificial Sequence
  Synthetic
ggaaagaaacuauacuuu

SEQ ID NO: 420062 - RNA, 19 nt, Artificial Sequence
  Synthetic
aggaaagaaacuauacuuu

SEQ ID NO: 420063 - RNA, 20 nt, Artificial Sequence
  Synthetic
caggaaagaaacuauacuuu

SEQ ID NO: 420064 - RNA, 21 nt, Artificial Sequence
  Synthetic
acaggaaagaaacuauacuuu

SEQ ID NO: 420065 - RNA, 22 nt, Artificial Sequence
  Synthetic
aacaggaaagaaacuauacuuu

SEQ ID NO: 420066 - RNA, 23 nt, Artificial Sequence
  Synthetic
aaacaggaaagaaacuauacuuu

SEQ ID NO: 420067 - RNA, 24 nt, Artificial Sequence
  Synthetic
gaaacaggaaagaaacuauacuuu

SEQ ID NO: 420068 - RNA, 18 nt, Artificial Sequence
  Synthetic
aaguaaaguuucuacuuu

SEQ ID NO: 420069 - RNA, 19 nt, Artificial Sequence
  Synthetic
aaaguaaaguuucuacuuu

SEQ ID NO: 420070 - RNA, 20 nt, Artificial Sequence
  Synthetic
aaaaguaaaguuucuacuuu

SEQ ID NO: 420071 - RNA, 21 nt, Artificial Sequence
  Synthetic
aaaaaguaaaguuucuacuuu

SEQ ID NO: 420072 - RNA, 22 nt, Artificial Sequence
  Synthetic
gaaaaaguaaaguuucuacuuu

SEQ ID NO: 420073 - RNA, 23 nt, Artificial Sequence
  Synthetic
ggaaaaaguaaaguuucuacuuu

SEQ ID NO: 420074 - RNA, 24 nt, Artificial Sequence
  Synthetic
aggaaaaaguaaaguuucuacuuu

SEQ ID NO: 420075 - RNA, 18 nt, Artificial Sequence
  Synthetic
uugucaacaaaguacuuu

SEQ ID NO: 420076 - RNA, 19 nt, Artificial Sequence
  Synthetic
uuugucaacaaaguacuuu

SEQ ID NO: 420077 - RNA, 20 nt, Artificial Sequence
  Synthetic
cuuugucaacaaaguacuuu

SEQ ID NO: 420078 - RNA, 21 nt, Artificial Sequence
  Synthetic
ucuuugucaacaaaguacuuu

SEQ ID NO: 420079 - RNA, 22 nt, Artificial Sequence
  Synthetic
uucuuugucaacaaaguacuuu

SEQ ID NO: 420080 - RNA, 23 nt, Artificial Sequence
  Synthetic
auucuuugucaacaaaguacuuu

SEQ ID NO: 420081 - RNA, 24 nt, Artificial Sequence
  Synthetic
aauucuuugucaacaaaguacuuu

SEQ ID NO: 420082 - RNA, 18 nt, Artificial Sequence
  Synthetic
cuguaaucccaguacuuu

SEQ ID NO: 420083 - RNA, 19 nt, Artificial Sequence
  Synthetic
ccuguaaucccaguacuuu

SEQ ID NO: 420084 - RNA, 20 nt, Artificial Sequence
  Synthetic
gccuguaaucccaguacuuu

SEQ ID NO: 420085 - RNA, 21 nt, Artificial Sequence
  Synthetic
agccuguaaucccaguacuuu

SEQ ID NO: 420086 - RNA, 22 nt, Artificial Sequence
  Synthetic
cagccuguaaucccaguacuuu

SEQ ID NO: 420087 - RNA, 23 nt, Artificial Sequence
  Synthetic
gcagccuguaaucccaguacuuu

SEQ ID NO: 420088 - RNA, 24 nt, Artificial Sequence
  Synthetic
cgcagccuguaaucccaguacuuu

SEQ ID NO: 420089 - RNA, 18 nt, Artificial Sequence
  Synthetic
cuguaauccuaguacuuu

SEQ ID NO: 420090 - RNA, 19 nt, Artificial Sequence
  Synthetic
ccuguaauccuaguacuuu

SEQ ID NO: 420091 - RNA, 20 nt, Artificial Sequence
  Synthetic
accuguaauccuaguacuuu

SEQ ID NO: 420092 - RNA, 21 nt, Artificial Sequence
  Synthetic
caccuguaauccuaguacuuu

SEQ ID NO: 420093 - RNA, 22 nt, Artificial Sequence
  Synthetic
acaccuguaauccuaguacuuu

SEQ ID NO: 420094 - RNA, 23 nt, Artificial Sequence
  Synthetic
cacaccuguaauccuaguacuuu

SEQ ID NO: 420095 - RNA, 24 nt, Artificial Sequence
  Synthetic
ucacaccuguaauccuaguacuuu

SEQ ID NO: 420096 - RNA, 18 nt, Artificial Sequence
  Synthetic
ccaugccaaacguacuuu

SEQ ID NO: 420097 - RNA, 19 nt, Artificial Sequence
  Synthetic
accaugccaaacguacuuu

SEQ ID NO: 420098 - RNA, 20 nt, Artificial Sequence
  Synthetic
uaccaugccaaacguacuuu

SEQ ID NO: 420099 - RNA, 21 nt, Artificial Sequence
  Synthetic
guaccaugccaaacguacuuu

SEQ ID NO: 420100 - RNA, 22 nt, Artificial Sequence
  Synthetic
gguaccaugccaaacguacuuu

SEQ ID NO: 420101 - RNA, 23 nt, Artificial Sequence
  Synthetic
ggguaccaugccaaacguacuuu

SEQ ID NO: 420102 - RNA, 24 nt, Artificial Sequence
  Synthetic
uggguaccaugccaaacguacuuu

SEQ ID NO: 420103 - RNA, 18 nt, Artificial Sequence
  Synthetic
guuagaaccugguacuuu

SEQ ID NO: 420104 - RNA, 19 nt, Artificial Sequence
  Synthetic
uguuagaaccugguacuuu

SEQ ID NO: 420105 - RNA, 20 nt, Artificial Sequence
  Synthetic
auguuagaaccugguacuuu

SEQ ID NO: 420106 - RNA, 21 nt, Artificial Sequence
  Synthetic
gauguuagaaccugguacuuu

SEQ ID NO: 420107 - RNA, 22 nt, Artificial Sequence
  Synthetic
ugauguuagaaccugguacuuu

SEQ ID NO: 420108 - RNA, 23 nt, Artificial Sequence
  Synthetic
cugauguuagaaccugguacuuu

SEQ ID NO: 420109 - RNA, 24 nt, Artificial Sequence
  Synthetic
ccugauguuagaaccugguacuuu

SEQ ID NO: 420110 - RNA, 18 nt, Artificial Sequence
  Synthetic
ucugcuaaaauguacuuu

SEQ ID NO: 420111 - RNA, 19 nt, Artificial Sequence
  Synthetic
cucugcuaaaauguacuuu

SEQ ID NO: 420112 - RNA, 20 nt, Artificial Sequence
  Synthetic
acucugcuaaaauguacuuu

SEQ ID NO: 420113 - RNA, 21 nt, Artificial Sequence
  Synthetic
aacucugcuaaaauguacuuu

SEQ ID NO: 420114 - RNA, 22 nt, Artificial Sequence
  Synthetic
caacucugcuaaaauguacuuu

SEQ ID NO: 420115 - RNA, 23 nt, Artificial Sequence
  Synthetic
ccaacucugcuaaaauguacuuu

SEQ ID NO: 420116 - RNA, 24 nt, Artificial Sequence
  Synthetic
cccaacucugcuaaaauguacuuu

SEQ ID NO: 420117 - RNA, 18 nt, Artificial Sequence
  Synthetic
cugaaaacaauguacuuu

SEQ ID NO: 420118 - RNA, 19 nt, Artificial Sequence
  Synthetic
gcugaaaacaauguacuuu

SEQ ID NO: 420119 - RNA, 20 nt, Artificial Sequence
  Synthetic
ugcugaaaacaauguacuuu

SEQ ID NO: 420120 - RNA, 21 nt, Artificial Sequence
  Synthetic
uugcugaaaacaauguacuuu

SEQ ID NO: 420121 - RNA, 22 nt, Artificial Sequence
  Synthetic
uuugcugaaaacaauguacuuu

SEQ ID NO: 420122 - RNA, 23 nt, Artificial Sequence
  Synthetic
uuuugcugaaaacaauguacuuu

SEQ ID NO: 420123 - RNA, 24 nt, Artificial Sequence
  Synthetic
uuuuugcugaaaacaauguacuuu

SEQ ID NO: 420124 - RNA, 18 nt, Artificial Sequence
  Synthetic
guauuauauauguacuuu

SEQ ID NO: 420125 - RNA, 19 nt, Artificial Sequence
  Synthetic
gguauuauauauguacuuu

SEQ ID NO: 420126 - RNA, 20 nt, Artificial Sequence
  Synthetic
ugguauuauauauguacuuu

SEQ ID NO: 420127 - RNA, 21 nt, Artificial Sequence
  Synthetic
augguauuauauauguacuuu

SEQ ID NO: 420128 - RNA, 22 nt, Artificial Sequence
  Synthetic
aaugguauuauauauguacuuu

SEQ ID NO: 420129 - RNA, 23 nt, Artificial Sequence
  Synthetic
uaaugguauuauauauguacuuu

SEQ ID NO: 420130 - RNA, 24 nt, Artificial Sequence
  Synthetic
uuaaugguauuauauauguacuuu

SEQ ID NO: 420131 - RNA, 18 nt, Artificial Sequence
  Synthetic
acucugcagcuguacuuu

SEQ ID NO: 420132 - RNA, 19 nt, Artificial Sequence
  Synthetic
uacucugcagcuguacuuu

SEQ ID NO: 420133 - RNA, 20 nt, Artificial Sequence
  Synthetic
auacucugcagcuguacuuu

SEQ ID NO: 420134 - RNA, 21 nt, Artificial Sequence
  Synthetic
uauacucugcagcuguacuuu

SEQ ID NO: 420135 - RNA, 22 nt, Artificial Sequence
  Synthetic
uuauacucugcagcuguacuuu

SEQ ID NO: 420136 - RNA, 23 nt, Artificial Sequence
  Synthetic
uuuauacucugcagcuguacuuu

SEQ ID NO: 420137 - RNA, 24 nt, Artificial Sequence
  Synthetic
uuuuauacucugcagcuguacuuu

SEQ ID NO: 420138 - RNA, 18 nt, Artificial Sequence
  Synthetic
acacacauauauuacuuu

SEQ ID NO: 420139 - RNA, 19 nt, Artificial Sequence
  Synthetic
aacacacauauauuacuuu

SEQ ID NO: 420140 - RNA, 20 nt, Artificial Sequence
  Synthetic
aaacacacauauauuacuuu

SEQ ID NO: 420141 - RNA, 21 nt, Artificial Sequence
  Synthetic
caaacacacauauauuacuuu

SEQ ID NO: 420142 - RNA, 22 nt, Artificial Sequence
  Synthetic
ccaaacacacauauauuacuuu

SEQ ID NO: 420143 - RNA, 23 nt, Artificial Sequence
  Synthetic
cccaaacacacauauauuacuuu

SEQ ID NO: 420144 - RNA, 24 nt, Artificial Sequence
  Synthetic
acccaaacacacauauauuacuuu

SEQ ID NO: 420145 - RNA, 18 nt, Artificial Sequence
  Synthetic
guucuucucuauuacuuu

SEQ ID NO: 420146 - RNA, 19 nt, Artificial Sequence
  Synthetic
gguucuucucuauuacuuu

SEQ ID NO: 420147 - RNA, 20 nt, Artificial Sequence
  Synthetic
ugguucuucucuauuacuuu

SEQ ID NO: 420148 - RNA, 21 nt, Artificial Sequence
  Synthetic
uugguucuucucuauuacuuu

SEQ ID NO: 420149 - RNA, 22 nt, Artificial Sequence
  Synthetic
cuugguucuucucuauuacuuu

SEQ ID NO: 420150 - RNA, 23 nt, Artificial Sequence
  Synthetic
acuugguucuucucuauuacuuu

SEQ ID NO: 420151 - RNA, 24 nt, Artificial Sequence
  Synthetic
aacuugguucuucucuauuacuuu

SEQ ID NO: 420152 - RNA, 18 nt, Artificial Sequence
  Synthetic
accauuuauccuuacuuu

SEQ ID NO: 420153 - RNA, 19 nt, Artificial Sequence
  Synthetic
gaccauuuauccuuacuuu

SEQ ID NO: 420154 - RNA, 20 nt, Artificial Sequence
  Synthetic
ggaccauuuauccuuacuuu

SEQ ID NO: 420155 - RNA, 21 nt, Artificial Sequence
  Synthetic
aggaccauuuauccuuacuuu

SEQ ID NO: 420156 - RNA, 22 nt, Artificial Sequence
  Synthetic
aaggaccauuuauccuuacuuu

SEQ ID NO: 420157 - RNA, 23 nt, Artificial Sequence
  Synthetic
caaggaccauuuauccuuacuuu

SEQ ID NO: 420158 - RNA, 24 nt, Artificial Sequence
  Synthetic
ucaaggaccauuuauccuuacuuu

SEQ ID NO: 420159 - RNA, 18 nt, Artificial Sequence
  Synthetic
auauuuuagaguuacuuu

SEQ ID NO: 420160 - RNA, 19 nt, Artificial Sequence
  Synthetic
uauauuuuagaguuacuuu

SEQ ID NO: 420161 - RNA, 20 nt, Artificial Sequence
  Synthetic
uuauauuuuagaguuacuuu

SEQ ID NO: 420162 - RNA, 21 nt, Artificial Sequence
  Synthetic
auuauauuuuagaguuacuuu

SEQ ID NO: 420163 - RNA, 22 nt, Artificial Sequence
  Synthetic
aauuauauuuuagaguuacuuu

SEQ ID NO: 420164 - RNA, 23 nt, Artificial Sequence
  Synthetic
aaauuauauuuuagaguuacuuu

SEQ ID NO: 420165 - RNA, 24 nt, Artificial Sequence
  Synthetic
aaaauuauauuuuagaguuacuuu

SEQ ID NO: 420166 - RNA, 18 nt, Artificial Sequence
  Synthetic
aggaacucugguuacuuu

SEQ ID NO: 420167 - RNA, 19 nt, Artificial Sequence
  Synthetic
aaggaacucugguuacuuu

SEQ ID NO: 420168 - RNA, 20 nt, Artificial Sequence
  Synthetic
caaggaacucugguuacuuu

SEQ ID NO: 420169 - RNA, 21 nt, Artificial Sequence
  Synthetic
ucaaggaacucugguuacuuu

SEQ ID NO: 420170 - RNA, 22 nt, Artificial Sequence
  Synthetic
uucaaggaacucugguuacuuu

SEQ ID NO: 420171 - RNA, 23 nt, Artificial Sequence
  Synthetic
uuucaaggaacucugguuacuuu

SEQ ID NO: 420172 - RNA, 24 nt, Artificial Sequence
  Synthetic
uuuucaaggaacucugguuacuuu

SEQ ID NO: 420173 - RNA, 18 nt, Artificial Sequence
  Synthetic
uguuccucaguuuacuuu

SEQ ID NO: 420174 - RNA, 19 nt, Artificial Sequence
  Synthetic
auguuccucaguuuacuuu

SEQ ID NO: 420175 - RNA, 20 nt, Artificial Sequence
  Synthetic
aauguuccucaguuuacuuu

SEQ ID NO: 420176 - RNA, 21 nt, Artificial Sequence
  Synthetic
aaauguuccucaguuuacuuu

SEQ ID NO: 420177 - RNA, 22 nt, Artificial Sequence
  Synthetic
gaaauguuccucaguuuacuuu

SEQ ID NO: 420178 - RNA, 23 nt, Artificial Sequence
  Synthetic
ugaaauguuccucaguuuacuuu

SEQ ID NO: 420179 - RNA, 24 nt, Artificial Sequence
  Synthetic
uugaaauguuccucaguuuacuuu

SEQ ID NO: 420180 - RNA, 18 nt, Artificial Sequence
  Synthetic
ucagaaaacuuuuacuuu

SEQ ID NO: 420181 - RNA, 19 nt, Artificial Sequence
  Synthetic
uucagaaaacuuuuacuuu

SEQ ID NO: 420182 - RNA, 20 nt, Artificial Sequence
  Synthetic
auucagaaaacuuuuacuuu

SEQ ID NO: 420183 - RNA, 21 nt, Artificial Sequence
  Synthetic
uauucagaaaacuuuuacuuu

SEQ ID NO: 420184 - RNA, 22 nt, Artificial Sequence
  Synthetic
uuauucagaaaacuuuuacuuu

SEQ ID NO: 420185 - RNA, 23 nt, Artificial Sequence
  Synthetic
uuuauucagaaaacuuuuacuuu

SEQ ID NO: 420186 - RNA, 24 nt, Artificial Sequence
  Synthetic
auuuauucagaaaacuuuuacuuu

SEQ ID NO: 420187 - RNA, 18 nt, Artificial Sequence
  Synthetic
cauugagcucuaaccuuu

SEQ ID NO: 420188 - RNA, 19 nt, Artificial Sequence
  Synthetic
ucauugagcucuaaccuuu

SEQ ID NO: 420189 - RNA, 20 nt, Artificial Sequence
  Synthetic
cucauugagcucuaaccuuu

SEQ ID NO: 420190 - RNA, 21 nt, Artificial Sequence
  Synthetic
ucucauugagcucuaaccuuu

SEQ ID NO: 420191 - RNA, 22 nt, Artificial Sequence
  Synthetic
uucucauugagcucuaaccuuu

SEQ ID NO: 420192 - RNA, 23 nt, Artificial Sequence
  Synthetic
guucucauugagcucuaaccuuu

SEQ ID NO: 420193 - RNA, 24 nt, Artificial Sequence
  Synthetic
gguucucauugagcucuaaccuuu

SEQ ID NO: 420194 - RNA, 18 nt, Artificial Sequence
  Synthetic
caccugaagguaaccuuu

SEQ ID NO: 420195 - RNA, 19 nt, Artificial Sequence
  Synthetic
gcaccugaagguaaccuuu

SEQ ID NO: 420196 - RNA, 20 nt, Artificial Sequence
  Synthetic
agcaccugaagguaaccuuu

SEQ ID NO: 420197 - RNA, 21 nt, Artificial Sequence
  Synthetic
aagcaccugaagguaaccuuu

SEQ ID NO: 420198 - RNA, 22 nt, Artificial Sequence
  Synthetic
aaagcaccugaagguaaccuuu

SEQ ID NO: 420199 - RNA, 23 nt, Artificial Sequence
  Synthetic
aaaagcaccugaagguaaccuuu

SEQ ID NO: 420200 - RNA, 24 nt, Artificial Sequence
  Synthetic
caaaagcaccugaagguaaccuuu

SEQ ID NO: 420201 - RNA, 18 nt, Artificial Sequence
  Synthetic
acaagucacuuaaccuuu

SEQ ID NO: 420202 - RNA, 19 nt, Artificial Sequence
  Synthetic
aacaagucacuuaaccuuu

SEQ ID NO: 420203 - RNA, 20 nt, Artificial Sequence
  Synthetic
gaacaagucacuuaaccuuu

SEQ ID NO: 420204 - RNA, 21 nt, Artificial Sequence
  Synthetic
ugaacaagucacuuaaccuuu

SEQ ID NO: 420205 - RNA, 22 nt, Artificial Sequence
  Synthetic
uugaacaagucacuuaaccuuu

SEQ ID NO: 420206 - RNA, 23 nt, Artificial Sequence
  Synthetic
cuugaacaagucacuuaaccuuu

SEQ ID NO: 420207 - RNA, 24 nt, Artificial Sequence
  Synthetic
ccuugaacaagucacuuaaccuuu

SEQ ID NO: 420208 - RNA, 18 nt, Artificial Sequence
  Synthetic
uugaaagaguuaaccuuu

SEQ ID NO: 420209 - RNA, 19 nt, Artificial Sequence
  Synthetic
uuugaaagaguuaaccuuu

SEQ ID NO: 420210 - RNA, 20 nt, Artificial Sequence
  Synthetic
uuuugaaagaguuaaccuuu

SEQ ID NO: 420211 - RNA, 21 nt, Artificial Sequence
  Synthetic
cuuuugaaagaguuaaccuuu

SEQ ID NO: 420212 - RNA, 22 nt, Artificial Sequence
  Synthetic
ucuuuugaaagaguuaaccuuu

SEQ ID NO: 420213 - RNA, 23 nt, Artificial Sequence
  Synthetic
uucuuuugaaagaguuaaccuuu

SEQ ID NO: 420214 - RNA, 24 nt, Artificial Sequence
  Synthetic
uuucuuuugaaagaguuaaccuuu

SEQ ID NO: 420215 - RNA, 18 nt, Artificial Sequence
  Synthetic
gaaguuuucaagaccuuu

SEQ ID NO: 420216 - RNA, 19 nt, Artificial Sequence
  Synthetic
agaaguuuucaagaccuuu

SEQ ID NO: 420217 - RNA, 20 nt, Artificial Sequence
  Synthetic
aagaaguuuucaagaccuuu

SEQ ID NO: 420218 - RNA, 21 nt, Artificial Sequence
  Synthetic
gaagaaguuuucaagaccuuu

SEQ ID NO: 420219 - RNA, 22 nt, Artificial Sequence
  Synthetic
ggaagaaguuuucaagaccuuu

SEQ ID NO: 420220 - RNA, 23 nt, Artificial Sequence
  Synthetic
aggaagaaguuuucaagaccuuu

SEQ ID NO: 420221 - RNA, 24 nt, Artificial Sequence
  Synthetic
uaggaagaaguuuucaagaccuuu

SEQ ID NO: 420222 - RNA, 18 nt, Artificial Sequence
  Synthetic
uuuccaugacggaccuuu

SEQ ID NO: 420223 - RNA, 19 nt, Artificial Sequence
  Synthetic
cuuuccaugacggaccuuu

SEQ ID NO: 420224 - RNA, 20 nt, Artificial Sequence
  Synthetic
gcuuuccaugacggaccuuu

SEQ ID NO: 420225 - RNA, 21 nt, Artificial Sequence
  Synthetic
agcuuuccaugacggaccuuu

SEQ ID NO: 420226 - RNA, 22 nt, Artificial Sequence
  Synthetic
aagcuuuccaugacggaccuuu

SEQ ID NO: 420227 - RNA, 23 nt, Artificial Sequence
  Synthetic
gaagcuuuccaugacggaccuuu

SEQ ID NO: 420228 - RNA, 24 nt, Artificial Sequence
  Synthetic
agaagcuuuccaugacggaccuuu

SEQ ID NO: 420229 - RNA, 18 nt, Artificial Sequence
  Synthetic
ggagagucacugaccuuu

SEQ ID NO: 420230 - RNA, 19 nt, Artificial Sequence
  Synthetic
uggagagucacugaccuuu

SEQ ID NO: 420231 - RNA, 20 nt, Artificial Sequence
  Synthetic
guggagagucacugaccuuu

SEQ ID NO: 420232 - RNA, 21 nt, Artificial Sequence
  Synthetic
aguggagagucacugaccuuu

SEQ ID NO: 420233 - RNA, 22 nt, Artificial Sequence
  Synthetic
caguggagagucacugaccuuu

SEQ ID NO: 420234 - RNA, 23 nt, Artificial Sequence
  Synthetic
gcaguggagagucacugaccuuu

SEQ ID NO: 420235 - RNA, 24 nt, Artificial Sequence
  Synthetic
ggcaguggagagucacugaccuuu

SEQ ID NO: 420236 - RNA, 18 nt, Artificial Sequence
  Synthetic
aaaaaaaaggcuaccuuu

SEQ ID NO: 420237 - RNA, 19 nt, Artificial Sequence
  Synthetic
aaaaaaaaaggcuaccuuu

SEQ ID NO: 420238 - RNA, 20 nt, Artificial Sequence
  Synthetic
aaaaaaaaaaggcuaccuuu

SEQ ID NO: 420239 - RNA, 21 nt, Artificial Sequence
  Synthetic
aaaaaaaaaaaggcuaccuuu

SEQ ID NO: 420240 - RNA, 22 nt, Artificial Sequence
  Synthetic
aaaaaaaaaaaaggcuaccuuu

SEQ ID NO: 420241 - RNA, 23 nt, Artificial Sequence
  Synthetic
gaaaaaaaaaaaaggcuaccuuu

SEQ ID NO: 420242 - RNA, 24 nt, Artificial Sequence
  Synthetic
agaaaaaaaaaaaaggcuaccuuu

SEQ ID NO: 420243 - RNA, 18 nt, Artificial Sequence
  Synthetic
gagguggggucuaccuuu

SEQ ID NO: 420244 - RNA, 19 nt, Artificial Sequence
  Synthetic
agagguggggucuaccuuu

SEQ ID NO: 420245 - RNA, 20 nt, Artificial Sequence
  Synthetic
aagagguggggucuaccuuu

SEQ ID NO: 420246 - RNA, 21 nt, Artificial Sequence
  Synthetic
aaagagguggggucuaccuuu

SEQ ID NO: 420247 - RNA, 22 nt, Artificial Sequence
  Synthetic
aaaagagguggggucuaccuuu

SEQ ID NO: 420248 - RNA, 23 nt, Artificial Sequence
  Synthetic
aaaaagagguggggucuaccuuu

SEQ ID NO: 420249 - RNA, 24 nt, Artificial Sequence
  Synthetic
caaaaagagguggggucuaccuuu

SEQ ID NO: 420250 - RNA, 18 nt, Artificial Sequence
  Synthetic
ccugucuaaauuaccuuu

SEQ ID NO: 420251 - RNA, 19 nt, Artificial Sequence
  Synthetic
gccugucuaaauuaccuuu

SEQ ID NO: 420252 - RNA, 20 nt, Artificial Sequence
  Synthetic
agccugucuaaauuaccuuu

SEQ ID NO: 420253 - RNA, 21 nt, Artificial Sequence
  Synthetic
uagccugucuaaauuaccuuu

SEQ ID NO: 420254 - RNA, 22 nt, Artificial Sequence
  Synthetic
guagccugucuaaauuaccuuu

SEQ ID NO: 420255 - RNA, 23 nt, Artificial Sequence
  Synthetic
aguagccugucuaaauuaccuuu

SEQ ID NO: 420256 - RNA, 24 nt, Artificial Sequence
  Synthetic
uaguagccugucuaaauuaccuuu

SEQ ID NO: 420257 - RNA, 18 nt, Artificial Sequence
  Synthetic
guguuaauaauacccuuu

SEQ ID NO: 420258 - RNA, 19 nt, Artificial Sequence
  Synthetic
uguguuaauaauacccuuu

SEQ ID NO: 420259 - RNA, 20 nt, Artificial Sequence
  Synthetic
uuguguuaauaauacccuuu

SEQ ID NO: 420260 - RNA, 21 nt, Artificial Sequence
  Synthetic
uuuguguuaauaauacccuuu

SEQ ID NO: 420261 - RNA, 22 nt, Artificial Sequence
  Synthetic
auuuguguuaauaauacccuuu

SEQ ID NO: 420262 - RNA, 23 nt, Artificial Sequence
  Synthetic
cauuuguguuaauaauacccuuu

SEQ ID NO: 420263 - RNA, 24 nt, Artificial Sequence
  Synthetic
acauuuguguuaauaauacccuuu

SEQ ID NO: 420264 - RNA, 18 nt, Artificial Sequence
  Synthetic
ccuuaccuuggccccuuu

SEQ ID NO: 420265 - RNA, 19 nt, Artificial Sequence
  Synthetic
cccuuaccuuggccccuuu

SEQ ID NO: 420266 - RNA, 20 nt, Artificial Sequence
  Synthetic
ucccuuaccuuggccccuuu

SEQ ID NO: 420267 - RNA, 21 nt, Artificial Sequence
  Synthetic
cucccuuaccuuggccccuuu

SEQ ID NO: 420268 - RNA, 22 nt, Artificial Sequence
  Synthetic
ucucccuuaccuuggccccuuu

SEQ ID NO: 420269 - RNA, 23 nt, Artificial Sequence
  Synthetic
aucucccuuaccuuggccccuuu

SEQ ID NO: 420270 - RNA, 24 nt, Artificial Sequence
  Synthetic
uaucucccuuaccuuggccccuuu

SEQ ID NO: 420271 - RNA, 18 nt, Artificial Sequence
  Synthetic
uccuuugcuugccccuuu

SEQ ID NO: 420272 - RNA, 19 nt, Artificial Sequence
  Synthetic
uuccuuugcuugccccuuu

SEQ ID NO: 420273 - RNA, 20 nt, Artificial Sequence
  Synthetic
uuuccuuugcuugccccuuu

SEQ ID NO: 420274 - RNA, 21 nt, Artificial Sequence
  Synthetic
auuuccuuugcuugccccuuu

SEQ ID NO: 420275 - RNA, 22 nt, Artificial Sequence
  Synthetic
cauuuccuuugcuugccccuuu

SEQ ID NO: 420276 - RNA, 23 nt, Artificial Sequence
  Synthetic
ccauuuccuuugcuugccccuuu

SEQ ID NO: 420277 - RNA, 24 nt, Artificial Sequence
  Synthetic
uccauuuccuuugcuugccccuuu

SEQ ID NO: 420278 - RNA, 18 nt, Artificial Sequence
  Synthetic
ggaaauuguaagcccuuu

SEQ ID NO: 420279 - RNA, 19 nt, Artificial Sequence
  Synthetic
gggaaauuguaagcccuuu

SEQ ID NO: 420280 - RNA, 20 nt, Artificial Sequence
  Synthetic
agggaaauuguaagcccuuu

SEQ ID NO: 420281 - RNA, 21 nt, Artificial Sequence
  Synthetic
cagggaaauuguaagcccuuu

SEQ ID NO: 420282 - RNA, 22 nt, Artificial Sequence
  Synthetic
acagggaaauuguaagcccuuu

SEQ ID NO: 420283 - RNA, 23 nt, Artificial Sequence
  Synthetic
uacagggaaauuguaagcccuuu

SEQ ID NO: 420284 - RNA, 24 nt, Artificial Sequence
  Synthetic
uuacagggaaauuguaagcccuuu

SEQ ID NO: 420285 - RNA, 18 nt, Artificial Sequence
  Synthetic
uauucaguuaagcccuuu

SEQ ID NO: 420286 - RNA, 19 nt, Artificial Sequence
  Synthetic
auauucaguuaagcccuuu

SEQ ID NO: 420287 - RNA, 20 nt, Artificial Sequence
  Synthetic
gauauucaguuaagcccuuu

SEQ ID NO: 420288 - RNA, 21 nt, Artificial Sequence
  Synthetic
agauauucaguuaagcccuuu

SEQ ID NO: 420289 - RNA, 22 nt, Artificial Sequence
  Synthetic
uagauauucaguuaagcccuuu

SEQ ID NO: 420290 - RNA, 23 nt, Artificial Sequence
  Synthetic
auagauauucaguuaagcccuuu

SEQ ID NO: 420291 - RNA, 24 nt, Artificial Sequence
  Synthetic
gauagauauucaguuaagcccuuu

SEQ ID NO: 420292 - RNA, 18 nt, Artificial Sequence
  Synthetic
uuugcuucagggcccuuu

SEQ ID NO: 420293 - RNA, 19 nt, Artificial Sequence
  Synthetic
cuuugcuucagggcccuuu

SEQ ID NO: 420294 - RNA, 20 nt, Artificial Sequence
  Synthetic
ucuuugcuucagggcccuuu

SEQ ID NO: 420295 - RNA, 21 nt, Artificial Sequence
  Synthetic
uucuuugcuucagggcccuuu

SEQ ID NO: 420296 - RNA, 22 nt, Artificial Sequence
  Synthetic
cuucuuugcuucagggcccuuu

SEQ ID NO: 420297 - RNA, 23 nt, Artificial Sequence
  Synthetic
acuucuuugcuucagggcccuuu

SEQ ID NO: 420298 - RNA, 24 nt, Artificial Sequence
  Synthetic
uacuucuuugcuucagggcccuuu

SEQ ID NO: 420299 - RNA, 18 nt, Artificial Sequence
  Synthetic
cuuugguuuuugcccuuu

SEQ ID NO: 420300 - RNA, 19 nt, Artificial Sequence
  Synthetic
gcuuugguuuuugcccuuu

SEQ ID NO: 420301 - RNA, 20 nt, Artificial Sequence
  Synthetic
ugcuuugguuuuugcccuuu

SEQ ID NO: 420302 - RNA, 21 nt, Artificial Sequence
  Synthetic
uugcuuugguuuuugcccuuu

SEQ ID NO: 420303 - RNA, 22 nt, Artificial Sequence
  Synthetic
uuugcuuugguuuuugcccuuu

SEQ ID NO: 420304 - RNA, 23 nt, Artificial Sequence
  Synthetic
uuuugcuuugguuuuugcccuuu

SEQ ID NO: 420305 - RNA, 24 nt, Artificial Sequence
  Synthetic
uuuuugcuuugguuuuugcccuuu

SEQ ID NO: 420306 - RNA, 18 nt, Artificial Sequence
  Synthetic
ggcauuauccaucccuuu

SEQ ID NO: 420307 - RNA, 19 nt, Artificial Sequence
  Synthetic
aggcauuauccaucccuuu

SEQ ID NO: 420308 - RNA, 20 nt, Artificial Sequence
  Synthetic
aaggcauuauccaucccuuu

SEQ ID NO: 420309 - RNA, 21 nt, Artificial Sequence
  Synthetic
aaaggcauuauccaucccuuu

SEQ ID NO: 420310 - RNA, 22 nt, Artificial Sequence
  Synthetic
caaaggcauuauccaucccuuu

SEQ ID NO: 420311 - RNA, 23 nt, Artificial Sequence
  Synthetic
acaaaggcauuauccaucccuuu

SEQ ID NO: 420312 - RNA, 24 nt, Artificial Sequence
  Synthetic
gacaaaggcauuauccaucccuuu

SEQ ID NO: 420313 - RNA, 18 nt, Artificial Sequence
  Synthetic
acugcagccccucccuuu

SEQ ID NO: 420314 - RNA, 19 nt, Artificial Sequence
  Synthetic
cacugcagccccucccuuu

SEQ ID NO: 420315 - RNA, 20 nt, Artificial Sequence
  Synthetic
ccacugcagccccucccuuu

SEQ ID NO: 420316 - RNA, 21 nt, Artificial Sequence
  Synthetic
uccacugcagccccucccuuu

SEQ ID NO: 420317 - RNA, 22 nt, Artificial Sequence
  Synthetic
guccacugcagccccucccuuu

SEQ ID NO: 420318 - RNA, 23 nt, Artificial Sequence
  Synthetic
uguccacugcagccccucccuuu

SEQ ID NO: 420319 - RNA, 24 nt, Artificial Sequence
  Synthetic
guguccacugcagccccucccuuu

SEQ ID NO: 420320 - RNA, 18 nt, Artificial Sequence
  Synthetic
auuuaagaaugucccuuu

SEQ ID NO: 420321 - RNA, 19 nt, Artificial Sequence
  Synthetic
uauuuaagaaugucccuuu

SEQ ID NO: 420322 - RNA, 20 nt, Artificial Sequence
  Synthetic
auauuuaagaaugucccuuu

SEQ ID NO: 420323 - RNA, 21 nt, Artificial Sequence
  Synthetic
aauauuuaagaaugucccuuu

SEQ ID NO: 420324 - RNA, 22 nt, Artificial Sequence
  Synthetic
uaauauuuaagaaugucccuuu

SEQ ID NO: 420325 - RNA, 23 nt, Artificial Sequence
  Synthetic
auaauauuuaagaaugucccuuu

SEQ ID NO: 420326 - RNA, 24 nt, Artificial Sequence
  Synthetic
cauaauauuuaagaaugucccuuu

SEQ ID NO: 420327 - RNA, 18 nt, Artificial Sequence
  Synthetic
ucuuucaaacaggccuuu

SEQ ID NO: 420328 - RNA, 19 nt, Artificial Sequence
  Synthetic
cucuuucaaacaggccuuu

SEQ ID NO: 420329 - RNA, 20 nt, Artificial Sequence
  Synthetic
ccucuuucaaacaggccuuu

SEQ ID NO: 420330 - RNA, 21 nt, Artificial Sequence
  Synthetic
accucuuucaaacaggccuuu

SEQ ID NO: 420331 - RNA, 22 nt, Artificial Sequence
  Synthetic
aaccucuuucaaacaggccuuu

SEQ ID NO: 420332 - RNA, 23 nt, Artificial Sequence
  Synthetic
aaaccucuuucaaacaggccuuu

SEQ ID NO: 420333 - RNA, 24 nt, Artificial Sequence
  Synthetic
caaaccucuuucaaacaggccuuu

SEQ ID NO: 420334 - RNA, 18 nt, Artificial Sequence
  Synthetic
acuaagucccuggccuuu

SEQ ID NO: 420335 - RNA, 19 nt, Artificial Sequence
  Synthetic
gacuaagucccuggccuuu

SEQ ID NO: 420336 - RNA, 20 nt, Artificial Sequence
  Synthetic
ugacuaagucccuggccuuu

SEQ ID NO: 420337 - RNA, 21 nt, Artificial Sequence
  Synthetic
augacuaagucccuggccuuu

SEQ ID NO: 420338 - RNA, 22 nt, Artificial Sequence
  Synthetic
aaugacuaagucccuggccuuu

SEQ ID NO: 420339 - RNA, 23 nt, Artificial Sequence
  Synthetic
caaugacuaagucccuggccuuu

SEQ ID NO: 420340 - RNA, 24 nt, Artificial Sequence
  Synthetic
acaaugacuaagucccuggccuuu

SEQ ID NO: 420341 - RNA, 18 nt, Artificial Sequence
  Synthetic
gaaucugagcaugccuuu

SEQ ID NO: 420342 - RNA, 19 nt, Artificial Sequence
  Synthetic
agaaucugagcaugccuuu

SEQ ID NO: 420343 - RNA, 20 nt, Artificial Sequence
  Synthetic
aagaaucugagcaugccuuu

SEQ ID NO: 420344 - RNA, 21 nt, Artificial Sequence
  Synthetic
aaagaaucugagcaugccuuu

SEQ ID NO: 420345 - RNA, 22 nt, Artificial Sequence
  Synthetic
aaaagaaucugagcaugccuuu

SEQ ID NO: 420346 - RNA, 23 nt, Artificial Sequence
  Synthetic
aaaaagaaucugagcaugccuuu

SEQ ID NO: 420347 - RNA, 24 nt, Artificial Sequence
  Synthetic
gaaaaagaaucugagcaugccuuu

SEQ ID NO: 420348 - RNA, 18 nt, Artificial Sequence
  Synthetic
ucguguacagaugccuuu

SEQ ID NO: 420349 - RNA, 19 nt, Artificial Sequence
  Synthetic
uucguguacagaugccuuu

SEQ ID NO: 420350 - RNA, 20 nt, Artificial Sequence
  Synthetic
auucguguacagaugccuuu

SEQ ID NO: 420351 - RNA, 21 nt, Artificial Sequence
  Synthetic
aauucguguacagaugccuuu

SEQ ID NO: 420352 - RNA, 22 nt, Artificial Sequence
  Synthetic
aaauucguguacagaugccuuu

SEQ ID NO: 420353 - RNA, 23 nt, Artificial Sequence
  Synthetic
uaaauucguguacagaugccuuu

SEQ ID NO: 420354 - RNA, 24 nt, Artificial Sequence
  Synthetic
auaaauucguguacagaugccuuu

SEQ ID NO: 420355 - RNA, 18 nt, Artificial Sequence
  Synthetic
aacauuauuucugccuuu

SEQ ID NO: 420356 - RNA, 19 nt, Artificial Sequence
  Synthetic
uaacauuauuucugccuuu

SEQ ID NO: 420357 - RNA, 20 nt, Artificial Sequence
  Synthetic
uuaacauuauuucugccuuu

SEQ ID NO: 420358 - RNA, 21 nt, Artificial Sequence
  Synthetic
uuuaacauuauuucugccuuu

SEQ ID NO: 420359 - RNA, 22 nt, Artificial Sequence
  Synthetic
uuuuaacauuauuucugccuuu

SEQ ID NO: 420360 - RNA, 23 nt, Artificial Sequence
  Synthetic
auuuuaacauuauuucugccuuu

SEQ ID NO: 420361 - RNA, 24 nt, Artificial Sequence
  Synthetic
uauuuuaacauuauuucugccuuu

SEQ ID NO: 420362 - RNA, 18 nt, Artificial Sequence
  Synthetic
cacauuguuucugccuuu

SEQ ID NO: 420363 - RNA, 19 nt, Artificial Sequence
  Synthetic
acacauuguuucugccuuu

SEQ ID NO: 420364 - RNA, 20 nt, Artificial Sequence
  Synthetic
aacacauuguuucugccuuu

SEQ ID NO: 420365 - RNA, 21 nt, Artificial Sequence
  Synthetic
gaacacauuguuucugccuuu

SEQ ID NO: 420366 - RNA, 22 nt, Artificial Sequence
  Synthetic
agaacacauuguuucugccuuu

SEQ ID NO: 420367 - RNA, 23 nt, Artificial Sequence
  Synthetic
aagaacacauuguuucugccuuu

SEQ ID NO: 420368 - RNA, 24 nt, Artificial Sequence
  Synthetic
aaagaacacauuguuucugccuuu

SEQ ID NO: 420369 - RNA, 18 nt, Artificial Sequence
  Synthetic
aucuuuuugugugccuuu

SEQ ID NO: 420370 - RNA, 19 nt, Artificial Sequence
  Synthetic
uaucuuuuugugugccuuu

SEQ ID NO: 420371 - RNA, 20 nt, Artificial Sequence
  Synthetic
cuaucuuuuugugugccuuu

SEQ ID NO: 420372 - RNA, 21 nt, Artificial Sequence
  Synthetic
ucuaucuuuuugugugccuuu

SEQ ID NO: 420373 - RNA, 22 nt, Artificial Sequence
  Synthetic
uucuaucuuuuugugugccuuu

SEQ ID NO: 420374 - RNA, 23 nt, Artificial Sequence
  Synthetic
auucuaucuuuuugugugccuuu

SEQ ID NO: 420375 - RNA, 24 nt, Artificial Sequence
  Synthetic
cauucuaucuuuuugugugccuuu

SEQ ID NO: 420376 - RNA, 18 nt, Artificial Sequence
  Synthetic
ccacucagauuugccuuu

SEQ ID NO: 420377 - RNA, 19 nt, Artificial Sequence
  Synthetic
accacucagauuugccuuu

SEQ ID NO: 420378 - RNA, 20 nt, Artificial Sequence
  Synthetic
caccacucagauuugccuuu

SEQ ID NO: 420379 - RNA, 21 nt, Artificial Sequence
  Synthetic
ucaccacucagauuugccuuu

SEQ ID NO: 420380 - RNA, 22 nt, Artificial Sequence
  Synthetic
cucaccacucagauuugccuuu

SEQ ID NO: 420381 - RNA, 23 nt, Artificial Sequence
  Synthetic
acucaccacucagauuugccuuu

SEQ ID NO: 420382 - RNA, 24 nt, Artificial Sequence
  Synthetic
aacucaccacucagauuugccuuu

SEQ ID NO: 420383 - RNA, 18 nt, Artificial Sequence
  Synthetic
ugaugcauauuugccuuu

SEQ ID NO: 420384 - RNA, 19 nt, Artificial Sequence
  Synthetic
uugaugcauauuugccuuu

SEQ ID NO: 420385 - RNA, 20 nt, Artificial Sequence
  Synthetic
uuugaugcauauuugccuuu

SEQ ID NO: 420386 - RNA, 21 nt, Artificial Sequence
  Synthetic
auuugaugcauauuugccuuu

SEQ ID NO: 420387 - RNA, 22 nt, Artificial Sequence
  Synthetic
aauuugaugcauauuugccuuu

SEQ ID NO: 420388 - RNA, 23 nt, Artificial Sequence
  Synthetic
aaauuugaugcauauuugccuuu

SEQ ID NO: 420389 - RNA, 24 nt, Artificial Sequence
  Synthetic
aaaauuugaugcauauuugccuuu

SEQ ID NO: 420390 - RNA, 18 nt, Artificial Sequence
  Synthetic
auuuuaaacaaauccuuu

SEQ ID NO: 420391 - RNA, 19 nt, Artificial Sequence
  Synthetic
uauuuuaaacaaauccuuu

SEQ ID NO: 420392 - RNA, 20 nt, Artificial Sequence
  Synthetic
cuauuuuaaacaaauccuuu

SEQ ID NO: 420393 - RNA, 21 nt, Artificial Sequence
  Synthetic
acuauuuuaaacaaauccuuu

SEQ ID NO: 420394 - RNA, 22 nt, Artificial Sequence
  Synthetic
uacuauuuuaaacaaauccuuu

SEQ ID NO: 420395 - RNA, 23 nt, Artificial Sequence
  Synthetic
auacuauuuuaaacaaauccuuu

SEQ ID NO: 420396 - RNA, 24 nt, Artificial Sequence
  Synthetic
uauacuauuuuaaacaaauccuuu

SEQ ID NO: 420397 - RNA, 18 nt, Artificial Sequence
  Synthetic
aacccaaucaaauccuuu

SEQ ID NO: 420398 - RNA, 19 nt, Artificial Sequence
  Synthetic
aaacccaaucaaauccuuu

SEQ ID NO: 420399 - RNA, 20 nt, Artificial Sequence
  Synthetic
caaacccaaucaaauccuuu

SEQ ID NO: 420400 - RNA, 21 nt, Artificial Sequence
  Synthetic
gcaaacccaaucaaauccuuu

SEQ ID NO: 420401 - RNA, 22 nt, Artificial Sequence
  Synthetic
ugcaaacccaaucaaauccuuu

SEQ ID NO: 420402 - RNA, 23 nt, Artificial Sequence
  Synthetic
uugcaaacccaaucaaauccuuu

SEQ ID NO: 420403 - RNA, 24 nt, Artificial Sequence
  Synthetic
uuugcaaacccaaucaaauccuuu

SEQ ID NO: 420404 - RNA, 18 nt, Artificial Sequence
  Synthetic
aaaggacuuaaauccuuu

SEQ ID NO: 420405 - RNA, 19 nt, Artificial Sequence
  Synthetic
aaaaggacuuaaauccuuu

SEQ ID NO: 420406 - RNA, 20 nt, Artificial Sequence
  Synthetic
caaaaggacuuaaauccuuu

SEQ ID NO: 420407 - RNA, 21 nt, Artificial Sequence
  Synthetic
acaaaaggacuuaaauccuuu

SEQ ID NO: 420408 - RNA, 22 nt, Artificial Sequence
  Synthetic
uacaaaaggacuuaaauccuuu

SEQ ID NO: 420409 - RNA, 23 nt, Artificial Sequence
  Synthetic
guacaaaaggacuuaaauccuuu

SEQ ID NO: 420410 - RNA, 24 nt, Artificial Sequence
  Synthetic
uguacaaaaggacuuaaauccuuu

SEQ ID NO: 420411 - RNA, 18 nt, Artificial Sequence
  Synthetic
cuuaguaaucccuccuuu

SEQ ID NO: 420412 - RNA, 19 nt, Artificial Sequence
  Synthetic
ucuuaguaaucccuccuuu

SEQ ID NO: 420413 - RNA, 20 nt, Artificial Sequence
  Synthetic
gucuuaguaaucccuccuuu

SEQ ID NO: 420414 - RNA, 21 nt, Artificial Sequence
  Synthetic
agucuuaguaaucccuccuuu

SEQ ID NO: 420415 - RNA, 22 nt, Artificial Sequence
  Synthetic
aagucuuaguaaucccuccuuu

SEQ ID NO: 420416 - RNA, 23 nt, Artificial Sequence
  Synthetic
uaagucuuaguaaucccuccuuu

SEQ ID NO: 420417 - RNA, 24 nt, Artificial Sequence
  Synthetic
cuaagucuuaguaaucccuccuuu

SEQ ID NO: 420418 - RNA, 18 nt, Artificial Sequence
  Synthetic
cuaccgucucccuccuuu

SEQ ID NO: 420419 - RNA, 19 nt, Artificial Sequence
  Synthetic
ccuaccgucucccuccuuu

SEQ ID NO: 420420 - RNA, 20 nt, Artificial Sequence
  Synthetic
accuaccgucucccuccuuu

SEQ ID NO: 420421 - RNA, 21 nt, Artificial Sequence
  Synthetic
uaccuaccgucucccuccuuu

SEQ ID NO: 420422 - RNA, 22 nt, Artificial Sequence
  Synthetic
auaccuaccgucucccuccuuu

SEQ ID NO: 420423 - RNA, 23 nt, Artificial Sequence
  Synthetic
aauaccuaccgucucccuccuuu

SEQ ID NO: 420424 - RNA, 24 nt, Artificial Sequence
  Synthetic
uaauaccuaccgucucccuccuuu

SEQ ID NO: 420425 - RNA, 18 nt, Artificial Sequence
  Synthetic
gacaugaaaaucuccuuu

SEQ ID NO: 420426 - RNA, 19 nt, Artificial Sequence
  Synthetic
ggacaugaaaaucuccuuu

SEQ ID NO: 420427 - RNA, 20 nt, Artificial Sequence
  Synthetic
uggacaugaaaaucuccuuu

SEQ ID NO: 420428 - RNA, 21 nt, Artificial Sequence
  Synthetic
uuggacaugaaaaucuccuuu

SEQ ID NO: 420429 - RNA, 22 nt, Artificial Sequence
  Synthetic
uuuggacaugaaaaucuccuuu

SEQ ID NO: 420430 - RNA, 23 nt, Artificial Sequence
  Synthetic
guuuggacaugaaaaucuccuuu

SEQ ID NO: 420431 - RNA, 24 nt, Artificial Sequence
  Synthetic
uguuuggacaugaaaaucuccuuu

SEQ ID NO: 420432 - RNA, 18 nt, Artificial Sequence
  Synthetic
uuguguuuuaaguccuuu

SEQ ID NO: 420433 - RNA, 19 nt, Artificial Sequence
  Synthetic
guuguguuuuaaguccuuu

SEQ ID NO: 420434 - RNA, 20 nt, Artificial Sequence
  Synthetic
aguuguguuuuaaguccuuu

SEQ ID NO: 420435 - RNA, 21 nt, Artificial Sequence
  Synthetic
uaguuguguuuuaaguccuuu

SEQ ID NO: 420436 - RNA, 22 nt, Artificial Sequence
  Synthetic
auaguuguguuuuaaguccuuu

SEQ ID NO: 420437 - RNA, 23 nt, Artificial Sequence
  Synthetic
gauaguuguguuuuaaguccuuu

SEQ ID NO: 420438 - RNA, 24 nt, Artificial Sequence
  Synthetic
cgauaguuguguuuuaaguccuuu

SEQ ID NO: 420439 - RNA, 18 nt, Artificial Sequence
  Synthetic
uggccaagcuaguccuuu

SEQ ID NO: 420440 - RNA, 19 nt, Artificial Sequence
  Synthetic
uuggccaagcuaguccuuu

SEQ ID NO: 420441 - RNA, 20 nt, Artificial Sequence
  Synthetic
auuggccaagcuaguccuuu

SEQ ID NO: 420442 - RNA, 21 nt, Artificial Sequence
  Synthetic
uauuggccaagcuaguccuuu

SEQ ID NO: 420443 - RNA, 22 nt, Artificial Sequence
  Synthetic
guauuggccaagcuaguccuuu

SEQ ID NO: 420444 - RNA, 23 nt, Artificial Sequence
  Synthetic
uguauuggccaagcuaguccuuu

SEQ ID NO: 420445 - RNA, 24 nt, Artificial Sequence
  Synthetic
guguauuggccaagcuaguccuuu

SEQ ID NO: 420446 - RNA, 18 nt, Artificial Sequence
  Synthetic
aaaaacuagaauuccuuu

SEQ ID NO: 420447 - RNA, 19 nt, Artificial Sequence
  Synthetic
uaaaaacuagaauuccuuu

SEQ ID NO: 420448 - RNA, 20 nt, Artificial Sequence
  Synthetic
auaaaaacuagaauuccuuu

SEQ ID NO: 420449 - RNA, 21 nt, Artificial Sequence
  Synthetic
uauaaaaacuagaauuccuuu

SEQ ID NO: 420450 - RNA, 22 nt, Artificial Sequence
  Synthetic
cuauaaaaacuagaauuccuuu

SEQ ID NO: 420451 - RNA, 23 nt, Artificial Sequence
  Synthetic
ccuauaaaaacuagaauuccuuu

SEQ ID NO: 420452 - RNA, 24 nt, Artificial Sequence
  Synthetic
accuauaaaaacuagaauuccuuu

SEQ ID NO: 420453 - RNA, 18 nt, Artificial Sequence
  Synthetic
guguauuagcauuccuuu

SEQ ID NO: 420454 - RNA, 19 nt, Artificial Sequence
  Synthetic
uguguauuagcauuccuuu

SEQ ID NO: 420455 - RNA, 20 nt, Artificial Sequence
  Synthetic
guguguauuagcauuccuuu

SEQ ID NO: 420456 - RNA, 21 nt, Artificial Sequence
  Synthetic
uguguguauuagcauuccuuu

SEQ ID NO: 420457 - RNA, 22 nt, Artificial Sequence
  Synthetic
uuguguguauuagcauuccuuu

SEQ ID NO: 420458 - RNA, 23 nt, Artificial Sequence
  Synthetic
cuuguguguauuagcauuccuuu

SEQ ID NO: 420459 - RNA, 24 nt, Artificial Sequence
  Synthetic
acuuguguguauuagcauuccuuu

SEQ ID NO: 420460 - RNA, 18 nt, Artificial Sequence
  Synthetic
caauacuuaccuuccuuu

SEQ ID NO: 420461 - RNA, 19 nt, Artificial Sequence
  Synthetic
ccaauacuuaccuuccuuu

SEQ ID NO: 420462 - RNA, 20 nt, Artificial Sequence
  Synthetic
cccaauacuuaccuuccuuu

SEQ ID NO: 420463 - RNA, 21 nt, Artificial Sequence
  Synthetic
ucccaauacuuaccuuccuuu

SEQ ID NO: 420464 - RNA, 22 nt, Artificial Sequence
  Synthetic
uucccaauacuuaccuuccuuu

SEQ ID NO: 420465 - RNA, 23 nt, Artificial Sequence
  Synthetic
uuucccaauacuuaccuuccuuu

SEQ ID NO: 420466 - RNA, 24 nt, Artificial Sequence
  Synthetic
cuuucccaauacuuaccuuccuuu

SEQ ID NO: 420467 - RNA, 18 nt, Artificial Sequence
  Synthetic
ggaguggagucuuccuuu

SEQ ID NO: 420468 - RNA, 19 nt, Artificial Sequence
  Synthetic
aggaguggagucuuccuuu

SEQ ID NO: 420469 - RNA, 20 nt, Artificial Sequence
  Synthetic
aaggaguggagucuuccuuu

SEQ ID NO: 420470 - RNA, 21 nt, Artificial Sequence
  Synthetic
caaggaguggagucuuccuuu

SEQ ID NO: 420471 - RNA, 22 nt, Artificial Sequence
  Synthetic
ucaaggaguggagucuuccuuu

SEQ ID NO: 420472 - RNA, 23 nt, Artificial Sequence
  Synthetic
gucaaggaguggagucuuccuuu

SEQ ID NO: 420473 - RNA, 24 nt, Artificial Sequence
  Synthetic
ggucaaggaguggagucuuccuuu

SEQ ID NO: 420474 - RNA, 18 nt, Artificial Sequence
  Synthetic
gggguggcgucuuccuuu

SEQ ID NO: 420475 - RNA, 19 nt, Artificial Sequence
  Synthetic
agggguggcgucuuccuuu

SEQ ID NO: 420476 - RNA, 20 nt, Artificial Sequence
  Synthetic
aagggguggcgucuuccuuu

SEQ ID NO: 420477 - RNA, 21 nt, Artificial Sequence
  Synthetic
caagggguggcgucuuccuuu

SEQ ID NO: 420478 - RNA, 22 nt, Artificial Sequence
  Synthetic
ucaagggguggcgucuuccuuu

SEQ ID NO: 420479 - RNA, 23 nt, Artificial Sequence
  Synthetic
gucaagggguggcgucuuccuuu

SEQ ID NO: 420480 - RNA, 24 nt, Artificial Sequence
  Synthetic
ggucaagggguggcgucuuccuuu

SEQ ID NO: 420481 - RNA, 18 nt, Artificial Sequence
  Synthetic
auauggaucauuuccuuu

SEQ ID NO: 420482 - RNA, 19 nt, Artificial Sequence
  Synthetic
aauauggaucauuuccuuu

SEQ ID NO: 420483 - RNA, 20 nt, Artificial Sequence
  Synthetic
uaauauggaucauuuccuuu

SEQ ID NO: 420484 - RNA, 21 nt, Artificial Sequence
  Synthetic
uuaauauggaucauuuccuuu

SEQ ID NO: 420485 - RNA, 22 nt, Artificial Sequence
  Synthetic
auuaauauggaucauuuccuuu

SEQ ID NO: 420486 - RNA, 23 nt, Artificial Sequence
  Synthetic
aauuaauauggaucauuuccuuu

SEQ ID NO: 420487 - RNA, 24 nt, Artificial Sequence
  Synthetic
aaauuaauauggaucauuuccuuu

SEQ ID NO: 420488 - RNA, 18 nt, Artificial Sequence
  Synthetic
cauugauguguuuccuuu

SEQ ID NO: 420489 - RNA, 19 nt, Artificial Sequence
  Synthetic
gcauugauguguuuccuuu

SEQ ID NO: 420490 - RNA, 20 nt, Artificial Sequence
  Synthetic
ugcauugauguguuuccuuu

SEQ ID NO: 420491 - RNA, 21 nt, Artificial Sequence
  Synthetic
uugcauugauguguuuccuuu

SEQ ID NO: 420492 - RNA, 22 nt, Artificial Sequence
  Synthetic
cuugcauugauguguuuccuuu

SEQ ID NO: 420493 - RNA, 23 nt, Artificial Sequence
  Synthetic
gcuugcauugauguguuuccuuu

SEQ ID NO: 420494 - RNA, 24 nt, Artificial Sequence
  Synthetic
ugcuugcauugauguguuuccuuu

SEQ ID NO: 420495 - RNA, 18 nt, Artificial Sequence
  Synthetic
cagauaaaaaaaagcuuu

SEQ ID NO: 420496 - RNA, 19 nt, Artificial Sequence
  Synthetic
ccagauaaaaaaaagcuuu

SEQ ID NO: 420497 - RNA, 20 nt, Artificial Sequence
  Synthetic
cccagauaaaaaaaagcuuu

SEQ ID NO: 420498 - RNA, 21 nt, Artificial Sequence
  Synthetic
acccagauaaaaaaaagcuuu

SEQ ID NO: 420499 - RNA, 22 nt, Artificial Sequence
  Synthetic
aacccagauaaaaaaaagcuuu

SEQ ID NO: 420500 - RNA, 23 nt, Artificial Sequence
  Synthetic
aaacccagauaaaaaaaagcuuu

SEQ ID NO: 420501 - RNA, 24 nt, Artificial Sequence
  Synthetic
gaaacccagauaaaaaaaagcuuu

SEQ ID NO: 420502 - RNA, 18 nt, Artificial Sequence
  Synthetic
auuugaaaagaaagcuuu

SEQ ID NO: 420503 - RNA, 19 nt, Artificial Sequence
  Synthetic
uauuugaaaagaaagcuuu

SEQ ID NO: 420504 - RNA, 20 nt, Artificial Sequence
  Synthetic
uuauuugaaaagaaagcuuu

SEQ ID NO: 420505 - RNA, 21 nt, Artificial Sequence
  Synthetic
cuuauuugaaaagaaagcuuu

SEQ ID NO: 420506 - RNA, 22 nt, Artificial Sequence
  Synthetic
ccuuauuugaaaagaaagcuuu

SEQ ID NO: 420507 - RNA, 23 nt, Artificial Sequence
  Synthetic
accuuauuugaaaagaaagcuuu

SEQ ID NO: 420508 - RNA, 24 nt, Artificial Sequence
  Synthetic
aaccuuauuugaaaagaaagcuuu

SEQ ID NO: 420509 - RNA, 18 nt, Artificial Sequence
  Synthetic
augauucaauaaagcuuu

SEQ ID NO: 420510 - RNA, 19 nt, Artificial Sequence
  Synthetic
aaugauucaauaaagcuuu

SEQ ID NO: 420511 - RNA, 20 nt, Artificial Sequence
  Synthetic
aaaugauucaauaaagcuuu

SEQ ID NO: 420512 - RNA, 21 nt, Artificial Sequence
  Synthetic
uaaaugauucaauaaagcuuu

SEQ ID NO: 420513 - RNA, 22 nt, Artificial Sequence
  Synthetic
cuaaaugauucaauaaagcuuu

SEQ ID NO: 420514 - RNA, 23 nt, Artificial Sequence
  Synthetic
gcuaaaugauucaauaaagcuuu

SEQ ID NO: 420515 - RNA, 24 nt, Artificial Sequence
  Synthetic
agcuaaaugauucaauaaagcuuu

SEQ ID NO: 420516 - RNA, 18 nt, Artificial Sequence
  Synthetic
auuuuaaauccaagcuuu

SEQ ID NO: 420517 - RNA, 19 nt, Artificial Sequence
  Synthetic
uauuuuaaauccaagcuuu

SEQ ID NO: 420518 - RNA, 20 nt, Artificial Sequence
  Synthetic
auauuuuaaauccaagcuuu

SEQ ID NO: 420519 - RNA, 21 nt, Artificial Sequence
  Synthetic
uauauuuuaaauccaagcuuu

SEQ ID NO: 420520 - RNA, 22 nt, Artificial Sequence
  Synthetic
uuauauuuuaaauccaagcuuu

SEQ ID NO: 420521 - RNA, 23 nt, Artificial Sequence
  Synthetic
guuauauuuuaaauccaagcuuu

SEQ ID NO: 420522 - RNA, 24 nt, Artificial Sequence
  Synthetic
uguuauauuuuaaauccaagcuuu

SEQ ID NO: 420523 - RNA, 18 nt, Artificial Sequence
  Synthetic
auuuccaaaucaagcuuu

SEQ ID NO: 420524 - RNA, 19 nt, Artificial Sequence
  Synthetic
uauuuccaaaucaagcuuu

SEQ ID NO: 420525 - RNA, 20 nt, Artificial Sequence
  Synthetic
uuauuuccaaaucaagcuuu

SEQ ID NO: 420526 - RNA, 21 nt, Artificial Sequence
  Synthetic
auuauuuccaaaucaagcuuu

SEQ ID NO: 420527 - RNA, 22 nt, Artificial Sequence
  Synthetic
gauuauuuccaaaucaagcuuu

SEQ ID NO: 420528 - RNA, 23 nt, Artificial Sequence
  Synthetic
ggauuauuuccaaaucaagcuuu

SEQ ID NO: 420529 - RNA, 24 nt, Artificial Sequence
  Synthetic
gggauuauuuccaaaucaagcuuu

SEQ ID NO: 420530 - RNA, 18 nt, Artificial Sequence
  Synthetic
uguuagcaaggaagcuuu

SEQ ID NO: 420531 - RNA, 19 nt, Artificial Sequence
  Synthetic
guguuagcaaggaagcuuu

SEQ ID NO: 420532 - RNA, 20 nt, Artificial Sequence
  Synthetic
aguguuagcaaggaagcuuu

SEQ ID NO: 420533 - RNA, 21 nt, Artificial Sequence
  Synthetic
aaguguuagcaaggaagcuuu

SEQ ID NO: 420534 - RNA, 22 nt, Artificial Sequence
  Synthetic
uaaguguuagcaaggaagcuuu

SEQ ID NO: 420535 - RNA, 23 nt, Artificial Sequence
  Synthetic
uuaaguguuagcaaggaagcuuu

SEQ ID NO: 420536 - RNA, 24 nt, Artificial Sequence
  Synthetic
uuuaaguguuagcaaggaagcuuu

SEQ ID NO: 420537 - RNA, 18 nt, Artificial Sequence
  Synthetic
gaagggguaguaagcuuu

SEQ ID NO: 420538 - RNA, 19 nt, Artificial Sequence
  Synthetic
ggaagggguaguaagcuuu

SEQ ID NO: 420539 - RNA, 20 nt, Artificial Sequence
  Synthetic
aggaagggguaguaagcuuu

SEQ ID NO: 420540 - RNA, 21 nt, Artificial Sequence
  Synthetic
uaggaagggguaguaagcuuu

SEQ ID NO: 420541 - RNA, 22 nt, Artificial Sequence
  Synthetic
guaggaagggguaguaagcuuu

SEQ ID NO: 420542 - RNA, 23 nt, Artificial Sequence
  Synthetic
gguaggaagggguaguaagcuuu

SEQ ID NO: 420543 - RNA, 24 nt, Artificial Sequence
  Synthetic
agguaggaagggguaguaagcuuu

SEQ ID NO: 420544 - RNA, 18 nt, Artificial Sequence
  Synthetic
guuuagaucuuaagcuuu

SEQ ID NO: 420545 - RNA, 19 nt, Artificial Sequence
  Synthetic
uguuuagaucuuaagcuuu

SEQ ID NO: 420546 - RNA, 20 nt, Artificial Sequence
  Synthetic
cuguuuagaucuuaagcuuu

SEQ ID NO: 420547 - RNA, 21 nt, Artificial Sequence
  Synthetic
ccuguuuagaucuuaagcuuu

SEQ ID NO: 420548 - RNA, 22 nt, Artificial Sequence
  Synthetic
uccuguuuagaucuuaagcuuu

SEQ ID NO: 420549 - RNA, 23 nt, Artificial Sequence
  Synthetic
uuccuguuuagaucuuaagcuuu

SEQ ID NO: 420550 - RNA, 24 nt, Artificial Sequence
  Synthetic
auuccuguuuagaucuuaagcuuu

SEQ ID NO: 420551 - RNA, 18 nt, Artificial Sequence
  Synthetic
gccuaaucaaacagcuuu

SEQ ID NO: 420552 - RNA, 19 nt, Artificial Sequence
  Synthetic
ggccuaaucaaacagcuuu

SEQ ID NO: 420553 - RNA, 20 nt, Artificial Sequence
  Synthetic
aggccuaaucaaacagcuuu

SEQ ID NO: 420554 - RNA, 21 nt, Artificial Sequence
  Synthetic
gaggccuaaucaaacagcuuu

SEQ ID NO: 420555 - RNA, 22 nt, Artificial Sequence
  Synthetic
ugaggccuaaucaaacagcuuu

SEQ ID NO: 420556 - RNA, 23 nt, Artificial Sequence
  Synthetic
gugaggccuaaucaaacagcuuu

SEQ ID NO: 420557 - RNA, 24 nt, Artificial Sequence
  Synthetic
ugugaggccuaaucaaacagcuuu

SEQ ID NO: 420558 - RNA, 18 nt, Artificial Sequence
  Synthetic
cuuagauuacccagcuuu

SEQ ID NO: 420559 - RNA, 19 nt, Artificial Sequence
  Synthetic
ucuuagauuacccagcuuu

SEQ ID NO: 420560 - RNA, 20 nt, Artificial Sequence
  Synthetic
gucuuagauuacccagcuuu

SEQ ID NO: 420561 - RNA, 21 nt, Artificial Sequence
  Synthetic
ggucuuagauuacccagcuuu

SEQ ID NO: 420562 - RNA, 22 nt, Artificial Sequence
  Synthetic
gggucuuagauuacccagcuuu

SEQ ID NO: 420563 - RNA, 23 nt, Artificial Sequence
  Synthetic
agggucuuagauuacccagcuuu

SEQ ID NO: 420564 - RNA, 24 nt, Artificial Sequence
  Synthetic
aagggucuuagauuacccagcuuu

SEQ ID NO: 420565 - RNA, 18 nt, Artificial Sequence
  Synthetic
ugaagcccauucagcuuu

SEQ ID NO: 420566 - RNA, 19 nt, Artificial Sequence
  Synthetic
gugaagcccauucagcuuu

SEQ ID NO: 420567 - RNA, 20 nt, Artificial Sequence
  Synthetic
ugugaagcccauucagcuuu

SEQ ID NO: 420568 - RNA, 21 nt, Artificial Sequence
  Synthetic
uugugaagcccauucagcuuu

SEQ ID NO: 420569 - RNA, 22 nt, Artificial Sequence
  Synthetic
auugugaagcccauucagcuuu

SEQ ID NO: 420570 - RNA, 23 nt, Artificial Sequence
  Synthetic
cauugugaagcccauucagcuuu

SEQ ID NO: 420571 - RNA, 24 nt, Artificial Sequence
  Synthetic
ucauugugaagcccauucagcuuu

SEQ ID NO: 420572 - RNA, 18 nt, Artificial Sequence
  Synthetic
cacaccuucuucagcuuu

SEQ ID NO: 420573 - RNA, 19 nt, Artificial Sequence
  Synthetic
ucacaccuucuucagcuuu

SEQ ID NO: 420574 - RNA, 20 nt, Artificial Sequence
  Synthetic
uucacaccuucuucagcuuu

SEQ ID NO: 420575 - RNA, 21 nt, Artificial Sequence
  Synthetic
auucacaccuucuucagcuuu

SEQ ID NO: 420576 - RNA, 22 nt, Artificial Sequence
  Synthetic
cauucacaccuucuucagcuuu

SEQ ID NO: 420577 - RNA, 23 nt, Artificial Sequence
  Synthetic
ucauucacaccuucuucagcuuu

SEQ ID NO: 420578 - RNA, 24 nt, Artificial Sequence
  Synthetic
gucauucacaccuucuucagcuuu

SEQ ID NO: 420579 - RNA, 18 nt, Artificial Sequence
  Synthetic
ucuagcuguuucagcuuu

SEQ ID NO: 420580 - RNA, 19 nt, Artificial Sequence
  Synthetic
gucuagcuguuucagcuuu

SEQ ID NO: 420581 - RNA, 20 nt, Artificial Sequence
  Synthetic
agucuagcuguuucagcuuu

SEQ ID NO: 420582 - RNA, 21 nt, Artificial Sequence
  Synthetic
gagucuagcuguuucagcuuu

SEQ ID NO: 420583 - RNA, 22 nt, Artificial Sequence
  Synthetic
ugagucuagcuguuucagcuuu

SEQ ID NO: 420584 - RNA, 23 nt, Artificial Sequence
  Synthetic
uugagucuagcuguuucagcuuu

SEQ ID NO: 420585 - RNA, 24 nt, Artificial Sequence
  Synthetic
uuugagucuagcuguuucagcuuu

SEQ ID NO: 420586 - RNA, 18 nt, Artificial Sequence
  Synthetic
auuaagugaaagagcuuu

SEQ ID NO: 420587 - RNA, 19 nt, Artificial Sequence
  Synthetic
uauuaagugaaagagcuuu

SEQ ID NO: 420588 - RNA, 20 nt, Artificial Sequence
  Synthetic
uuauuaagugaaagagcuuu

SEQ ID NO: 420589 - RNA, 21 nt, Artificial Sequence
  Synthetic
uuuauuaagugaaagagcuuu

SEQ ID NO: 420590 - RNA, 22 nt, Artificial Sequence
  Synthetic
auuuauuaagugaaagagcuuu

SEQ ID NO: 420591 - RNA, 23 nt, Artificial Sequence
  Synthetic
uauuuauuaagugaaagagcuuu

SEQ ID NO: 420592 - RNA, 24 nt, Artificial Sequence
  Synthetic
guauuuauuaagugaaagagcuuu

SEQ ID NO: 420593 - RNA, 18 nt, Artificial Sequence
  Synthetic
uccagaaauaagagcuuu

SEQ ID NO: 420594 - RNA, 19 nt, Artificial Sequence
  Synthetic
uuccagaaauaagagcuuu

SEQ ID NO: 420595 - RNA, 20 nt, Artificial Sequence
  Synthetic
auuccagaaauaagagcuuu

SEQ ID NO: 420596 - RNA, 21 nt, Artificial Sequence
  Synthetic
gauuccagaaauaagagcuuu

SEQ ID NO: 420597 - RNA, 22 nt, Artificial Sequence
  Synthetic
agauuccagaaauaagagcuuu

SEQ ID NO: 420598 - RNA, 23 nt, Artificial Sequence
  Synthetic
gagauuccagaaauaagagcuuu

SEQ ID NO: 420599 - RNA, 24 nt, Artificial Sequence
  Synthetic
agagauuccagaaauaagagcuuu

SEQ ID NO: 420600 - RNA, 18 nt, Artificial Sequence
  Synthetic
acacaugagcagagcuuu

SEQ ID NO: 420601 - RNA, 19 nt, Artificial Sequence
  Synthetic
aacacaugagcagagcuuu

SEQ ID NO: 420602 - RNA, 20 nt, Artificial Sequence
  Synthetic
aaacacaugagcagagcuuu

SEQ ID NO: 420603 - RNA, 21 nt, Artificial Sequence
  Synthetic
uaaacacaugagcagagcuuu

SEQ ID NO: 420604 - RNA, 22 nt, Artificial Sequence
  Synthetic
uuaaacacaugagcagagcuuu

SEQ ID NO: 420605 - RNA, 23 nt, Artificial Sequence
  Synthetic
auuaaacacaugagcagagcuuu

SEQ ID NO: 420606 - RNA, 24 nt, Artificial Sequence
  Synthetic
aauuaaacacaugagcagagcuuu

SEQ ID NO: 420607 - RNA, 18 nt, Artificial Sequence
  Synthetic
agucaaagagagagcuuu

SEQ ID NO: 420608 - RNA, 19 nt, Artificial Sequence
  Synthetic
cagucaaagagagagcuuu

SEQ ID NO: 420609 - RNA, 20 nt, Artificial Sequence
  Synthetic
gcagucaaagagagagcuuu

SEQ ID NO: 420610 - RNA, 21 nt, Artificial Sequence
  Synthetic
agcagucaaagagagagcuuu

SEQ ID NO: 420611 - RNA, 22 nt, Artificial Sequence
  Synthetic
cagcagucaaagagagagcuuu

SEQ ID NO: 420612 - RNA, 23 nt, Artificial Sequence
  Synthetic
gcagcagucaaagagagagcuuu

SEQ ID NO: 420613 - RNA, 24 nt, Artificial Sequence
  Synthetic
ggcagcagucaaagagagagcuuu

SEQ ID NO: 420614 - RNA, 18 nt, Artificial Sequence
  Synthetic
cuuucacucuugagcuuu

SEQ ID NO: 420615 - RNA, 19 nt, Artificial Sequence
  Synthetic
ccuuucacucuugagcuuu

SEQ ID NO: 420616 - RNA, 20 nt, Artificial Sequence
  Synthetic
uccuuucacucuugagcuuu

SEQ ID NO: 420617 - RNA, 21 nt, Artificial Sequence
  Synthetic
uuccuuucacucuugagcuuu

SEQ ID NO: 420618 - RNA, 22 nt, Artificial Sequence
  Synthetic
uuuccuuucacucuugagcuuu

SEQ ID NO: 420619 - RNA, 23 nt, Artificial Sequence
  Synthetic
uuuuccuuucacucuugagcuuu

SEQ ID NO: 420620 - RNA, 24 nt, Artificial Sequence
  Synthetic
uuuuuccuuucacucuugagcuuu

SEQ ID NO: 420621 - RNA, 18 nt, Artificial Sequence
  Synthetic
gaguagucagauagcuuu

SEQ ID NO: 420622 - RNA, 19 nt, Artificial Sequence
  Synthetic
agaguagucagauagcuuu

SEQ ID NO: 420623 - RNA, 20 nt, Artificial Sequence
  Synthetic
cagaguagucagauagcuuu

SEQ ID NO: 420624 - RNA, 21 nt, Artificial Sequence
  Synthetic
ucagaguagucagauagcuuu

SEQ ID NO: 420625 - RNA, 22 nt, Artificial Sequence
  Synthetic
cucagaguagucagauagcuuu

SEQ ID NO: 420626 - RNA, 23 nt, Artificial Sequence
  Synthetic
ccucagaguagucagauagcuuu

SEQ ID NO: 420627 - RNA, 24 nt, Artificial Sequence
  Synthetic
gccucagaguagucagauagcuuu

SEQ ID NO: 420628 - RNA, 18 nt, Artificial Sequence
  Synthetic
uuucugcauucuagcuuu

SEQ ID NO: 420629 - RNA, 19 nt, Artificial Sequence
  Synthetic
guuucugcauucuagcuuu

SEQ ID NO: 420630 - RNA, 20 nt, Artificial Sequence
  Synthetic
uguuucugcauucuagcuuu

SEQ ID NO: 420631 - RNA, 21 nt, Artificial Sequence
  Synthetic
cuguuucugcauucuagcuuu

SEQ ID NO: 420632 - RNA, 22 nt, Artificial Sequence
  Synthetic
gcuguuucugcauucuagcuuu

SEQ ID NO: 420633 - RNA, 23 nt, Artificial Sequence
  Synthetic
ggcuguuucugcauucuagcuuu

SEQ ID NO: 420634 - RNA, 24 nt, Artificial Sequence
  Synthetic
uggcuguuucugcauucuagcuuu

SEQ ID NO: 420635 - RNA, 18 nt, Artificial Sequence
  Synthetic
ugugaguauucuagcuuu

SEQ ID NO: 420636 - RNA, 19 nt, Artificial Sequence
  Synthetic
gugugaguauucuagcuuu

SEQ ID NO: 420637 - RNA, 20 nt, Artificial Sequence
  Synthetic
ugugugaguauucuagcuuu

SEQ ID NO: 420638 - RNA, 21 nt, Artificial Sequence
  Synthetic
augugugaguauucuagcuuu

SEQ ID NO: 420639 - RNA, 22 nt, Artificial Sequence
  Synthetic
uaugugugaguauucuagcuuu

SEQ ID NO: 420640 - RNA, 23 nt, Artificial Sequence
  Synthetic
guaugugugaguauucuagcuuu

SEQ ID NO: 420641 - RNA, 24 nt, Artificial Sequence
  Synthetic
uguaugugugaguauucuagcuuu

SEQ ID NO: 420642 - RNA, 18 nt, Artificial Sequence
  Synthetic
uaaagaagguguagcuuu

SEQ ID NO: 420643 - RNA, 19 nt, Artificial Sequence
  Synthetic
auaaagaagguguagcuuu

SEQ ID NO: 420644 - RNA, 20 nt, Artificial Sequence
  Synthetic
aauaaagaagguguagcuuu

SEQ ID NO: 420645 - RNA, 21 nt, Artificial Sequence
  Synthetic
uaauaaagaagguguagcuuu

SEQ ID NO: 420646 - RNA, 22 nt, Artificial Sequence
  Synthetic
uuaauaaagaagguguagcuuu

SEQ ID NO: 420647 - RNA, 23 nt, Artificial Sequence
  Synthetic
uuuaauaaagaagguguagcuuu

SEQ ID NO: 420648 - RNA, 24 nt, Artificial Sequence
  Synthetic
uuuuaauaaagaagguguagcuuu

SEQ ID NO: 420649 - RNA, 18 nt, Artificial Sequence
  Synthetic
ccaggucuguguagcuuu

SEQ ID NO: 420650 - RNA, 19 nt, Artificial Sequence
  Synthetic
cccaggucuguguagcuuu

SEQ ID NO: 420651 - RNA, 20 nt, Artificial Sequence
  Synthetic
ucccaggucuguguagcuuu

SEQ ID NO: 420652 - RNA, 21 nt, Artificial Sequence
  Synthetic
uucccaggucuguguagcuuu

SEQ ID NO: 420653 - RNA, 22 nt, Artificial Sequence
  Synthetic
cuucccaggucuguguagcuuu

SEQ ID NO: 420654 - RNA, 23 nt, Artificial Sequence
  Synthetic
ccuucccaggucuguguagcuuu

SEQ ID NO: 420655 - RNA, 24 nt, Artificial Sequence
  Synthetic
uccuucccaggucuguguagcuuu

SEQ ID NO: 420656 - RNA, 18 nt, Artificial Sequence
  Synthetic
acaaauuuaguuagcuuu

SEQ ID NO: 420657 - RNA, 19 nt, Artificial Sequence
  Synthetic
aacaaauuuaguuagcuuu

SEQ ID NO: 420658 - RNA, 20 nt, Artificial Sequence
  Synthetic
uaacaaauuuaguuagcuuu

SEQ ID NO: 420659 - RNA, 21 nt, Artificial Sequence
  Synthetic
guaacaaauuuaguuagcuuu

SEQ ID NO: 420660 - RNA, 22 nt, Artificial Sequence
  Synthetic
aguaacaaauuuaguuagcuuu

SEQ ID NO: 420661 - RNA, 23 nt, Artificial Sequence
  Synthetic
caguaacaaauuuaguuagcuuu

SEQ ID NO: 420662 - RNA, 24 nt, Artificial Sequence
  Synthetic
ccaguaacaaauuuaguuagcuuu

SEQ ID NO: 420663 - RNA, 18 nt, Artificial Sequence
  Synthetic
uuuacaauauuuagcuuu

SEQ ID NO: 420664 - RNA, 19 nt, Artificial Sequence
  Synthetic
uuuuacaauauuuagcuuu

SEQ ID NO: 420665 - RNA, 20 nt, Artificial Sequence
  Synthetic
auuuuacaauauuuagcuuu

SEQ ID NO: 420666 - RNA, 21 nt, Artificial Sequence
  Synthetic
uauuuuacaauauuuagcuuu

SEQ ID NO: 420667 - RNA, 22 nt, Artificial Sequence
  Synthetic
guauuuuacaauauuuagcuuu

SEQ ID NO: 420668 - RNA, 23 nt, Artificial Sequence
  Synthetic
uguauuuuacaauauuuagcuuu

SEQ ID NO: 420669 - RNA, 24 nt, Artificial Sequence
  Synthetic
auguauuuuacaauauuuagcuuu

SEQ ID NO: 420670 - RNA, 18 nt, Artificial Sequence
  Synthetic
uucaaucaaauacgcuuu

SEQ ID NO: 420671 - RNA, 19 nt, Artificial Sequence
  Synthetic
uuucaaucaaauacgcuuu

SEQ ID NO: 420672 - RNA, 20 nt, Artificial Sequence
  Synthetic
uuuucaaucaaauacgcuuu

SEQ ID NO: 420673 - RNA, 21 nt, Artificial Sequence
  Synthetic
auuuucaaucaaauacgcuuu

SEQ ID NO: 420674 - RNA, 22 nt, Artificial Sequence
  Synthetic
gauuuucaaucaaauacgcuuu

SEQ ID NO: 420675 - RNA, 23 nt, Artificial Sequence
  Synthetic
ugauuuucaaucaaauacgcuuu

SEQ ID NO: 420676 - RNA, 24 nt, Artificial Sequence
  Synthetic
augauuuucaaucaaauacgcuuu

SEQ ID NO: 420677 - RNA, 18 nt, Artificial Sequence
  Synthetic
cugcacucccagcgcuuu

SEQ ID NO: 420678 - RNA, 19 nt, Artificial Sequence
  Synthetic
ccugcacucccagcgcuuu

SEQ ID NO: 420679 - RNA, 20 nt, Artificial Sequence
  Synthetic
gccugcacucccagcgcuuu

SEQ ID NO: 420680 - RNA, 21 nt, Artificial Sequence
  Synthetic
cgccugcacucccagcgcuuu

SEQ ID NO: 420681 - RNA, 22 nt, Artificial Sequence
  Synthetic
acgccugcacucccagcgcuuu

SEQ ID NO: 420682 - RNA, 23 nt, Artificial Sequence
  Synthetic
cacgccugcacucccagcgcuuu

SEQ ID NO: 420683 - RNA, 24 nt, Artificial Sequence
  Synthetic
ucacgccugcacucccagcgcuuu

SEQ ID NO: 420684 - RNA, 18 nt, Artificial Sequence
  Synthetic
cuguaauuccagcgcuuu

SEQ ID NO: 420685 - RNA, 19 nt, Artificial Sequence
  Synthetic
ccuguaauuccagcgcuuu

SEQ ID NO: 420686 - RNA, 20 nt, Artificial Sequence
  Synthetic
accuguaauuccagcgcuuu

SEQ ID NO: 420687 - RNA, 21 nt, Artificial Sequence
  Synthetic
caccuguaauuccagcgcuuu

SEQ ID NO: 420688 - RNA, 22 nt, Artificial Sequence
  Synthetic
acaccuguaauuccagcgcuuu

SEQ ID NO: 420689 - RNA, 23 nt, Artificial Sequence
  Synthetic
cacaccuguaauuccagcgcuuu

SEQ ID NO: 420690 - RNA, 24 nt, Artificial Sequence
  Synthetic
ucacaccuguaauuccagcgcuuu

SEQ ID NO: 420691 - RNA, 18 nt, Artificial Sequence
  Synthetic
uguuugagcaaaggcuuu

SEQ ID NO: 420692 - RNA, 19 nt, Artificial Sequence
  Synthetic
guguuugagcaaaggcuuu

SEQ ID NO: 420693 - RNA, 20 nt, Artificial Sequence
  Synthetic
uguguuugagcaaaggcuuu

SEQ ID NO: 420694 - RNA, 21 nt, Artificial Sequence
  Synthetic
auguguuugagcaaaggcuuu

SEQ ID NO: 420695 - RNA, 22 nt, Artificial Sequence
  Synthetic
aauguguuugagcaaaggcuuu

SEQ ID NO: 420696 - RNA, 23 nt, Artificial Sequence
  Synthetic
gaauguguuugagcaaaggcuuu

SEQ ID NO: 420697 - RNA, 24 nt, Artificial Sequence
  Synthetic
agaauguguuugagcaaaggcuuu

SEQ ID NO: 420698 - RNA, 18 nt, Artificial Sequence
  Synthetic
guuaauuucuaaggcuuu

SEQ ID NO: 420699 - RNA, 19 nt, Artificial Sequence
  Synthetic
uguuaauuucuaaggcuuu

SEQ ID NO: 420700 - RNA, 20 nt, Artificial Sequence
  Synthetic
uuguuaauuucuaaggcuuu

SEQ ID NO: 420701 - RNA, 21 nt, Artificial Sequence
  Synthetic
auuguuaauuucuaaggcuuu

SEQ ID NO: 420702 - RNA, 22 nt, Artificial Sequence
  Synthetic
aauuguuaauuucuaaggcuuu

SEQ ID NO: 420703 - RNA, 23 nt, Artificial Sequence
  Synthetic
aaauuguuaauuucuaaggcuuu

SEQ ID NO: 420704 - RNA, 24 nt, Artificial Sequence
  Synthetic
uaaauuguuaauuucuaaggcuuu

SEQ ID NO: 420705 - RNA, 18 nt, Artificial Sequence
  Synthetic
ucuuuuauaacaggcuuu

SEQ ID NO: 420706 - RNA, 19 nt, Artificial Sequence
  Synthetic
cucuuuuauaacaggcuuu

SEQ ID NO: 420707 - RNA, 20 nt, Artificial Sequence
  Synthetic
gcucuuuuauaacaggcuuu

SEQ ID NO: 420708 - RNA, 21 nt, Artificial Sequence
  Synthetic
ugcucuuuuauaacaggcuuu

SEQ ID NO: 420709 - RNA, 22 nt, Artificial Sequence
  Synthetic
cugcucuuuuauaacaggcuuu

SEQ ID NO: 420710 - RNA, 23 nt, Artificial Sequence
  Synthetic
acugcucuuuuauaacaggcuuu

SEQ ID NO: 420711 - RNA, 24 nt, Artificial Sequence
  Synthetic
uacugcucuuuuauaacaggcuuu

SEQ ID NO: 420712 - RNA, 18 nt, Artificial Sequence
  Synthetic
ggugagggaccaggcuuu

SEQ ID NO: 420713 - RNA, 19 nt, Artificial Sequence
  Synthetic
uggugagggaccaggcuuu

SEQ ID NO: 420714 - RNA, 20 nt, Artificial Sequence
  Synthetic
cuggugagggaccaggcuuu

SEQ ID NO: 420715 - RNA, 21 nt, Artificial Sequence
  Synthetic
gcuggugagggaccaggcuuu

SEQ ID NO: 420716 - RNA, 22 nt, Artificial Sequence
  Synthetic
cgcuggugagggaccaggcuuu

SEQ ID NO: 420717 - RNA, 23 nt, Artificial Sequence
  Synthetic
ccgcuggugagggaccaggcuuu

SEQ ID NO: 420718 - RNA, 24 nt, Artificial Sequence
  Synthetic
gccgcuggugagggaccaggcuuu

SEQ ID NO: 420719 - RNA, 18 nt, Artificial Sequence
  Synthetic
gaacaaacaucaggcuuu

SEQ ID NO: 420720 - RNA, 19 nt, Artificial Sequence
  Synthetic
agaacaaacaucaggcuuu

SEQ ID NO: 420721 - RNA, 20 nt, Artificial Sequence
  Synthetic
gagaacaaacaucaggcuuu

SEQ ID NO: 420722 - RNA, 21 nt, Artificial Sequence
  Synthetic
ugagaacaaacaucaggcuuu

SEQ ID NO: 420723 - RNA, 22 nt, Artificial Sequence
  Synthetic
augagaacaaacaucaggcuuu

SEQ ID NO: 420724 - RNA, 23 nt, Artificial Sequence
  Synthetic
uaugagaacaaacaucaggcuuu

SEQ ID NO: 420725 - RNA, 24 nt, Artificial Sequence
  Synthetic
uuaugagaacaaacaucaggcuuu

SEQ ID NO: 420726 - RNA, 18 nt, Artificial Sequence
  Synthetic
guaaauauuauaggcuuu

SEQ ID NO: 420727 - RNA, 19 nt, Artificial Sequence
  Synthetic
aguaaauauuauaggcuuu

SEQ ID NO: 420728 - RNA, 20 nt, Artificial Sequence
  Synthetic
uaguaaauauuauaggcuuu

SEQ ID NO: 420729 - RNA, 21 nt, Artificial Sequence
  Synthetic
auaguaaauauuauaggcuuu

SEQ ID NO: 420730 - RNA, 22 nt, Artificial Sequence
  Synthetic
gauaguaaauauuauaggcuuu

SEQ ID NO: 420731 - RNA, 23 nt, Artificial Sequence
  Synthetic
agauaguaaauauuauaggcuuu

SEQ ID NO: 420732 - RNA, 24 nt, Artificial Sequence
  Synthetic
aagauaguaaauauuauaggcuuu

SEQ ID NO: 420733 - RNA, 18 nt, Artificial Sequence
  Synthetic
aggcagcgugagggcuuu

SEQ ID NO: 420734 - RNA, 19 nt, Artificial Sequence
  Synthetic
gaggcagcgugagggcuuu

SEQ ID NO: 420735 - RNA, 20 nt, Artificial Sequence
  Synthetic
ggaggcagcgugagggcuuu

SEQ ID NO: 420736 - RNA, 21 nt, Artificial Sequence
  Synthetic
uggaggcagcgugagggcuuu

SEQ ID NO: 420737 - RNA, 22 nt, Artificial Sequence
  Synthetic
auggaggcagcgugagggcuuu

SEQ ID NO: 420738 - RNA, 23 nt, Artificial Sequence
  Synthetic
cauggaggcagcgugagggcuuu

SEQ ID NO: 420739 - RNA, 24 nt, Artificial Sequence
  Synthetic
ccauggaggcagcgugagggcuuu

SEQ ID NO: 420740 - RNA, 18 nt, Artificial Sequence
  Synthetic
gggaaagggaggggcuuu

SEQ ID NO: 420741 - RNA, 19 nt, Artificial Sequence
  Synthetic
agggaaagggaggggcuuu

SEQ ID NO: 420742 - RNA, 20 nt, Artificial Sequence
  Synthetic
gagggaaagggaggggcuuu

SEQ ID NO: 420743 - RNA, 21 nt, Artificial Sequence
  Synthetic
ggagggaaagggaggggcuuu

SEQ ID NO: 420744 - RNA, 22 nt, Artificial Sequence
  Synthetic
aggagggaaagggaggggcuuu

SEQ ID NO: 420745 - RNA, 23 nt, Artificial Sequence
  Synthetic
caggagggaaagggaggggcuuu

SEQ ID NO: 420746 - RNA, 24 nt, Artificial Sequence
  Synthetic
gcaggagggaaagggaggggcuuu

SEQ ID NO: 420747 - RNA, 18 nt, Artificial Sequence
  Synthetic
cuugaguucaauggcuuu

SEQ ID NO: 420748 - RNA, 19 nt, Artificial Sequence
  Synthetic
gcuugaguucaauggcuuu

SEQ ID NO: 420749 - RNA, 20 nt, Artificial Sequence
  Synthetic
cgcuugaguucaauggcuuu

SEQ ID NO: 420750 - RNA, 21 nt, Artificial Sequence
  Synthetic
acgcuugaguucaauggcuuu

SEQ ID NO: 420751 - RNA, 22 nt, Artificial Sequence
  Synthetic
uacgcuugaguucaauggcuuu

SEQ ID NO: 420752 - RNA, 23 nt, Artificial Sequence
  Synthetic
auacgcuugaguucaauggcuuu

SEQ ID NO: 420753 - RNA, 24 nt, Artificial Sequence
  Synthetic
gauacgcuugaguucaauggcuuu

SEQ ID NO: 420754 - RNA, 18 nt, Artificial Sequence
  Synthetic
cucuucuaccauggcuuu

SEQ ID NO: 420755 - RNA, 19 nt, Artificial Sequence
  Synthetic
ucucuucuaccauggcuuu

SEQ ID NO: 420756 - RNA, 20 nt, Artificial Sequence
  Synthetic
uucucuucuaccauggcuuu

SEQ ID NO: 420757 - RNA, 21 nt, Artificial Sequence
  Synthetic
cuucucuucuaccauggcuuu

SEQ ID NO: 420758 - RNA, 22 nt, Artificial Sequence
  Synthetic
ucuucucuucuaccauggcuuu

SEQ ID NO: 420759 - RNA, 23 nt, Artificial Sequence
  Synthetic
aucuucucuucuaccauggcuuu

SEQ ID NO: 420760 - RNA, 24 nt, Artificial Sequence
  Synthetic
uaucuucucuucuaccauggcuuu

SEQ ID NO: 420761 - RNA, 18 nt, Artificial Sequence
  Synthetic
cagacgaacuauggcuuu

SEQ ID NO: 420762 - RNA, 19 nt, Artificial Sequence
  Synthetic
acagacgaacuauggcuuu

SEQ ID NO: 420763 - RNA, 20 nt, Artificial Sequence
  Synthetic
gacagacgaacuauggcuuu

SEQ ID NO: 420764 - RNA, 21 nt, Artificial Sequence
  Synthetic
ggacagacgaacuauggcuuu

SEQ ID NO: 420765 - RNA, 22 nt, Artificial Sequence
  Synthetic
uggacagacgaacuauggcuuu

SEQ ID NO: 420766 - RNA, 23 nt, Artificial Sequence
  Synthetic
guggacagacgaacuauggcuuu

SEQ ID NO: 420767 - RNA, 24 nt, Artificial Sequence
  Synthetic
uguggacagacgaacuauggcuuu

SEQ ID NO: 420768 - RNA, 18 nt, Artificial Sequence
  Synthetic
cccguauauuguggcuuu

SEQ ID NO: 420769 - RNA, 19 nt, Artificial Sequence
  Synthetic
gcccguauauuguggcuuu

SEQ ID NO: 420770 - RNA, 20 nt, Artificial Sequence
  Synthetic
ugcccguauauuguggcuuu

SEQ ID NO: 420771 - RNA, 21 nt, Artificial Sequence
  Synthetic
cugcccguauauuguggcuuu

SEQ ID NO: 420772 - RNA, 22 nt, Artificial Sequence
  Synthetic
ucugcccguauauuguggcuuu

SEQ ID NO: 420773 - RNA, 23 nt, Artificial Sequence
  Synthetic
aucugcccguauauuguggcuuu

SEQ ID NO: 420774 - RNA, 24 nt, Artificial Sequence
  Synthetic
gaucugcccguauauuguggcuuu

SEQ ID NO: 420775 - RNA, 18 nt, Artificial Sequence
  Synthetic
cuaaaugccuuuggcuuu

SEQ ID NO: 420776 - RNA, 19 nt, Artificial Sequence
  Synthetic
acuaaaugccuuuggcuuu

SEQ ID NO: 420777 - RNA, 20 nt, Artificial Sequence
  Synthetic
uacuaaaugccuuuggcuuu

SEQ ID NO: 420778 - RNA, 21 nt, Artificial Sequence
  Synthetic
auacuaaaugccuuuggcuuu

SEQ ID NO: 420779 - RNA, 22 nt, Artificial Sequence
  Synthetic
gauacuaaaugccuuuggcuuu

SEQ ID NO: 420780 - RNA, 23 nt, Artificial Sequence
  Synthetic
agauacuaaaugccuuuggcuuu

SEQ ID NO: 420781 - RNA, 24 nt, Artificial Sequence
  Synthetic
cagauacuaaaugccuuuggcuuu

SEQ ID NO: 420782 - RNA, 18 nt, Artificial Sequence
  Synthetic
aacugaacugaaugcuuu

SEQ ID NO: 420783 - RNA, 19 nt, Artificial Sequence
  Synthetic
gaacugaacugaaugcuuu

SEQ ID NO: 420784 - RNA, 20 nt, Artificial Sequence
  Synthetic
ugaacugaacugaaugcuuu

SEQ ID NO: 420785 - RNA, 21 nt, Artificial Sequence
  Synthetic
cugaacugaacugaaugcuuu

SEQ ID NO: 420786 - RNA, 22 nt, Artificial Sequence
  Synthetic
ucugaacugaacugaaugcuuu

SEQ ID NO: 420787 - RNA, 23 nt, Artificial Sequence
  Synthetic
uucugaacugaacugaaugcuuu

SEQ ID NO: 420788 - RNA, 24 nt, Artificial Sequence
  Synthetic
cuucugaacugaacugaaugcuuu

SEQ ID NO: 420789 - RNA, 18 nt, Artificial Sequence
  Synthetic
gaugcuggccuaugcuuu

SEQ ID NO: 420790 - RNA, 19 nt, Artificial Sequence
  Synthetic
ugaugcuggccuaugcuuu

SEQ ID NO: 420791 - RNA, 20 nt, Artificial Sequence
  Synthetic
cugaugcuggccuaugcuuu

SEQ ID NO: 420792 - RNA, 21 nt, Artificial Sequence
  Synthetic
gcugaugcuggccuaugcuuu

SEQ ID NO: 420793 - RNA, 22 nt, Artificial Sequence
  Synthetic
ugcugaugcuggccuaugcuuu

SEQ ID NO: 420794 - RNA, 23 nt, Artificial Sequence
  Synthetic
augcugaugcuggccuaugcuuu

SEQ ID NO: 420795 - RNA, 24 nt, Artificial Sequence
  Synthetic
uaugcugaugcuggccuaugcuuu

SEQ ID NO: 420796 - RNA, 18 nt, Artificial Sequence
  Synthetic
agcaauuggcuaugcuuu

SEQ ID NO: 420797 - RNA, 19 nt, Artificial Sequence
  Synthetic
gagcaauuggcuaugcuuu

SEQ ID NO: 420798 - RNA, 20 nt, Artificial Sequence
  Synthetic
agagcaauuggcuaugcuuu

SEQ ID NO: 420799 - RNA, 21 nt, Artificial Sequence
  Synthetic
uagagcaauuggcuaugcuuu

SEQ ID NO: 420800 - RNA, 22 nt, Artificial Sequence
  Synthetic
auagagcaauuggcuaugcuuu

SEQ ID NO: 420801 - RNA, 23 nt, Artificial Sequence
  Synthetic
gauagagcaauuggcuaugcuuu

SEQ ID NO: 420802 - RNA, 24 nt, Artificial Sequence
  Synthetic
ugauagagcaauuggcuaugcuuu

SEQ ID NO: 420803 - RNA, 18 nt, Artificial Sequence
  Synthetic
ucauauacuaacugcuuu

SEQ ID NO: 420804 - RNA, 19 nt, Artificial Sequence
  Synthetic
uucauauacuaacugcuuu

SEQ ID NO: 420805 - RNA, 20 nt, Artificial Sequence
  Synthetic
auucauauacuaacugcuuu

SEQ ID NO: 420806 - RNA, 21 nt, Artificial Sequence
  Synthetic
uauucauauacuaacugcuuu

SEQ ID NO: 420807 - RNA, 22 nt, Artificial Sequence
  Synthetic
uuauucauauacuaacugcuuu

SEQ ID NO: 420808 - RNA, 23 nt, Artificial Sequence
  Synthetic
auuauucauauacuaacugcuuu

SEQ ID NO: 420809 - RNA, 24 nt, Artificial Sequence
  Synthetic
aauuauucauauacuaacugcuuu

SEQ ID NO: 420810 - RNA, 18 nt, Artificial Sequence
  Synthetic
acagggccgugcugcuuu

SEQ ID NO: 420811 - RNA, 19 nt, Artificial Sequence
  Synthetic
cacagggccgugcugcuuu

SEQ ID NO: 420812 - RNA, 20 nt, Artificial Sequence
  Synthetic
gcacagggccgugcugcuuu

SEQ ID NO: 420813 - RNA, 21 nt, Artificial Sequence
  Synthetic
ggcacagggccgugcugcuuu

SEQ ID NO: 420814 - RNA, 22 nt, Artificial Sequence
  Synthetic
aggcacagggccgugcugcuuu

SEQ ID NO: 420815 - RNA, 23 nt, Artificial Sequence
  Synthetic
caggcacagggccgugcugcuuu

SEQ ID NO: 420816 - RNA, 24 nt, Artificial Sequence
  Synthetic
ccaggcacagggccgugcugcuuu

SEQ ID NO: 420817 - RNA, 18 nt, Artificial Sequence
  Synthetic
aauaacgcuuucugcuuu

SEQ ID NO: 420818 - RNA, 19 nt, Artificial Sequence
  Synthetic
aaauaacgcuuucugcuuu

SEQ ID NO: 420819 - RNA, 20 nt, Artificial Sequence
  Synthetic
gaaauaacgcuuucugcuuu

SEQ ID NO: 420820 - RNA, 21 nt, Artificial Sequence
  Synthetic
agaaauaacgcuuucugcuuu

SEQ ID NO: 420821 - RNA, 22 nt, Artificial Sequence
  Synthetic
uagaaauaacgcuuucugcuuu

SEQ ID NO: 420822 - RNA, 23 nt, Artificial Sequence
  Synthetic
guagaaauaacgcuuucugcuuu

SEQ ID NO: 420823 - RNA, 24 nt, Artificial Sequence
  Synthetic
aguagaaauaacgcuuucugcuuu

SEQ ID NO: 420824 - RNA, 18 nt, Artificial Sequence
  Synthetic
uuguaaucccagugcuuu

SEQ ID NO: 420825 - RNA, 19 nt, Artificial Sequence
  Synthetic
cuuguaaucccagugcuuu

SEQ ID NO: 420826 - RNA, 20 nt, Artificial Sequence
  Synthetic
acuuguaaucccagugcuuu

SEQ ID NO: 420827 - RNA, 21 nt, Artificial Sequence
  Synthetic
cacuuguaaucccagugcuuu

SEQ ID NO: 420828 - RNA, 22 nt, Artificial Sequence
  Synthetic
acacuuguaaucccagugcuuu

SEQ ID NO: 420829 - RNA, 23 nt, Artificial Sequence
  Synthetic
cacacuuguaaucccagugcuuu

SEQ ID NO: 420830 - RNA, 24 nt, Artificial Sequence
  Synthetic
ucacacuuguaaucccagugcuuu

SEQ ID NO: 420831 - RNA, 18 nt, Artificial Sequence
  Synthetic
cugucaucucagugcuuu

SEQ ID NO: 420832 - RNA, 19 nt, Artificial Sequence
  Synthetic
ccugucaucucagugcuuu

SEQ ID NO: 420833 - RNA, 20 nt, Artificial Sequence
  Synthetic
gccugucaucucagugcuuu

SEQ ID NO: 420834 - RNA, 21 nt, Artificial Sequence
  Synthetic
ugccugucaucucagugcuuu

SEQ ID NO: 420835 - RNA, 22 nt, Artificial Sequence
  Synthetic
augccugucaucucagugcuuu

SEQ ID NO: 420836 - RNA, 23 nt, Artificial Sequence
  Synthetic
caugccugucaucucagugcuuu

SEQ ID NO: 420837 - RNA, 24 nt, Artificial Sequence
  Synthetic
ucaugccugucaucucagugcuuu

SEQ ID NO: 420838 - RNA, 18 nt, Artificial Sequence
  Synthetic
uacaugaauuagugcuuu

SEQ ID NO: 420839 - RNA, 19 nt, Artificial Sequence
  Synthetic
guacaugaauuagugcuuu

SEQ ID NO: 420840 - RNA, 20 nt, Artificial Sequence
  Synthetic
aguacaugaauuagugcuuu

SEQ ID NO: 420841 - RNA, 21 nt, Artificial Sequence
  Synthetic
aaguacaugaauuagugcuuu

SEQ ID NO: 420842 - RNA, 22 nt, Artificial Sequence
  Synthetic
uaaguacaugaauuagugcuuu

SEQ ID NO: 420843 - RNA, 23 nt, Artificial Sequence
  Synthetic
uuaaguacaugaauuagugcuuu

SEQ ID NO: 420844 - RNA, 24 nt, Artificial Sequence
  Synthetic
auuaaguacaugaauuagugcuuu

SEQ ID NO: 420845 - RNA, 18 nt, Artificial Sequence
  Synthetic
uaaugacuacugugcuuu

SEQ ID NO: 420846 - RNA, 19 nt, Artificial Sequence
  Synthetic
uuaaugacuacugugcuuu

SEQ ID NO: 420847 - RNA, 20 nt, Artificial Sequence
  Synthetic
auuaaugacuacugugcuuu

SEQ ID NO: 420848 - RNA, 21 nt, Artificial Sequence
  Synthetic
aauuaaugacuacugugcuuu

SEQ ID NO: 420849 - RNA, 22 nt, Artificial Sequence
  Synthetic
caauuaaugacuacugugcuuu

SEQ ID NO: 420850 - RNA, 23 nt, Artificial Sequence
  Synthetic
gcaauuaaugacuacugugcuuu

SEQ ID NO: 420851 - RNA, 24 nt, Artificial Sequence
  Synthetic
agcaauuaaugacuacugugcuuu

SEQ ID NO: 420852 - RNA, 18 nt, Artificial Sequence
  Synthetic
cuguaaucccugugcuuu

SEQ ID NO: 420853 - RNA, 19 nt, Artificial Sequence
  Synthetic
ccuguaaucccugugcuuu

SEQ ID NO: 420854 - RNA, 20 nt, Artificial Sequence
  Synthetic
gccuguaaucccugugcuuu

SEQ ID NO: 420855 - RNA, 21 nt, Artificial Sequence
  Synthetic
ugccuguaaucccugugcuuu

SEQ ID NO: 420856 - RNA, 22 nt, Artificial Sequence
  Synthetic
augccuguaaucccugugcuuu

SEQ ID NO: 420857 - RNA, 23 nt, Artificial Sequence
  Synthetic
caugccuguaaucccugugcuuu

SEQ ID NO: 420858 - RNA, 24 nt, Artificial Sequence
  Synthetic
ucaugccuguaaucccugugcuuu

SEQ ID NO: 420859 - RNA, 18 nt, Artificial Sequence
  Synthetic
ccuaugugcuugugcuuu

SEQ ID NO: 420860 - RNA, 19 nt, Artificial Sequence
  Synthetic
uccuaugugcuugugcuuu

SEQ ID NO: 420861 - RNA, 20 nt, Artificial Sequence
  Synthetic
guccuaugugcuugugcuuu

SEQ ID NO: 420862 - RNA, 21 nt, Artificial Sequence
  Synthetic
uguccuaugugcuugugcuuu

SEQ ID NO: 420863 - RNA, 22 nt, Artificial Sequence
  Synthetic
cuguccuaugugcuugugcuuu

SEQ ID NO: 420864 - RNA, 23 nt, Artificial Sequence
  Synthetic
ucuguccuaugugcuugugcuuu

SEQ ID NO: 420865 - RNA, 24 nt, Artificial Sequence
  Synthetic
cucuguccuaugugcuugugcuuu

SEQ ID NO: 420866 - RNA, 18 nt, Artificial Sequence
  Synthetic
cuuuuccaaauuugcuuu

SEQ ID NO: 420867 - RNA, 19 nt, Artificial Sequence
  Synthetic
ccuuuuccaaauuugcuuu

SEQ ID NO: 420868 - RNA, 20 nt, Artificial Sequence
  Synthetic
gccuuuuccaaauuugcuuu

SEQ ID NO: 420869 - RNA, 21 nt, Artificial Sequence
  Synthetic
agccuuuuccaaauuugcuuu

SEQ ID NO: 420870 - RNA, 22 nt, Artificial Sequence
  Synthetic
uagccuuuuccaaauuugcuuu

SEQ ID NO: 420871 - RNA, 23 nt, Artificial Sequence
  Synthetic
cuagccuuuuccaaauuugcuuu

SEQ ID NO: 420872 - RNA, 24 nt, Artificial Sequence
  Synthetic
ucuagccuuuuccaaauuugcuuu

SEQ ID NO: 420873 - RNA, 18 nt, Artificial Sequence
  Synthetic
aagugguuaauuugcuuu

SEQ ID NO: 420874 - RNA, 19 nt, Artificial Sequence
  Synthetic
gaagugguuaauuugcuuu

SEQ ID NO: 420875 - RNA, 20 nt, Artificial Sequence
  Synthetic
ugaagugguuaauuugcuuu

SEQ ID NO: 420876 - RNA, 21 nt, Artificial Sequence
  Synthetic
uugaagugguuaauuugcuuu

SEQ ID NO: 420877 - RNA, 22 nt, Artificial Sequence
  Synthetic
guugaagugguuaauuugcuuu

SEQ ID NO: 420878 - RNA, 23 nt, Artificial Sequence
  Synthetic
aguugaagugguuaauuugcuuu

SEQ ID NO: 420879 - RNA, 24 nt, Artificial Sequence
  Synthetic
caguugaagugguuaauuugcuuu

SEQ ID NO: 420880 - RNA, 18 nt, Artificial Sequence
  Synthetic
ugaucaggacaaaucuuu

SEQ ID NO: 420881 - RNA, 19 nt, Artificial Sequence
  Synthetic
uugaucaggacaaaucuuu

SEQ ID NO: 420882 - RNA, 20 nt, Artificial Sequence
  Synthetic
auugaucaggacaaaucuuu

SEQ ID NO: 420883 - RNA, 21 nt, Artificial Sequence
  Synthetic
gauugaucaggacaaaucuuu

SEQ ID NO: 420884 - RNA, 22 nt, Artificial Sequence
  Synthetic
agauugaucaggacaaaucuuu

SEQ ID NO: 420885 - RNA, 23 nt, Artificial Sequence
  Synthetic
aagauugaucaggacaaaucuuu

SEQ ID NO: 420886 - RNA, 24 nt, Artificial Sequence
  Synthetic
gaagauugaucaggacaaaucuuu

SEQ ID NO: 420887 - RNA, 18 nt, Artificial Sequence
  Synthetic
gaauuccuacaaaucuuu

SEQ ID NO: 420888 - RNA, 19 nt, Artificial Sequence
  Synthetic
agaauuccuacaaaucuuu

SEQ ID NO: 420889 - RNA, 20 nt, Artificial Sequence
  Synthetic
aagaauuccuacaaaucuuu

SEQ ID NO: 420890 - RNA, 21 nt, Artificial Sequence
  Synthetic
aaagaauuccuacaaaucuuu

SEQ ID NO: 420891 - RNA, 22 nt, Artificial Sequence
  Synthetic
uaaagaauuccuacaaaucuuu

SEQ ID NO: 420892 - RNA, 23 nt, Artificial Sequence
  Synthetic
auaaagaauuccuacaaaucuuu

SEQ ID NO: 420893 - RNA, 24 nt, Artificial Sequence
  Synthetic
uauaaagaauuccuacaaaucuuu

SEQ ID NO: 420894 - RNA, 18 nt, Artificial Sequence
  Synthetic
guuggggaaacaaucuuu

SEQ ID NO: 420895 - RNA, 19 nt, Artificial Sequence
  Synthetic
gguuggggaaacaaucuuu

SEQ ID NO: 420896 - RNA, 20 nt, Artificial Sequence
  Synthetic
ugguuggggaaacaaucuuu

SEQ ID NO: 420897 - RNA, 21 nt, Artificial Sequence
  Synthetic
cugguuggggaaacaaucuuu

SEQ ID NO: 420898 - RNA, 22 nt, Artificial Sequence
  Synthetic
ccugguuggggaaacaaucuuu

SEQ ID NO: 420899 - RNA, 23 nt, Artificial Sequence
  Synthetic
uccugguuggggaaacaaucuuu

SEQ ID NO: 420900 - RNA, 24 nt, Artificial Sequence
  Synthetic
uuccugguuggggaaacaaucuuu

SEQ ID NO: 420901 - RNA, 18 nt, Artificial Sequence
  Synthetic
uuuaccaaauuaaucuuu

SEQ ID NO: 420902 - RNA, 19 nt, Artificial Sequence
  Synthetic
uuuuaccaaauuaaucuuu

SEQ ID NO: 420903 - RNA, 20 nt, Artificial Sequence
  Synthetic
cuuuuaccaaauuaaucuuu

SEQ ID NO: 420904 - RNA, 21 nt, Artificial Sequence
  Synthetic
gcuuuuaccaaauuaaucuuu

SEQ ID NO: 420905 - RNA, 22 nt, Artificial Sequence
  Synthetic
ugcuuuuaccaaauuaaucuuu

SEQ ID NO: 420906 - RNA, 23 nt, Artificial Sequence
  Synthetic
augcuuuuaccaaauuaaucuuu

SEQ ID NO: 420907 - RNA, 24 nt, Artificial Sequence
  Synthetic
uaugcuuuuaccaaauuaaucuuu

SEQ ID NO: 420908 - RNA, 18 nt, Artificial Sequence
  Synthetic
uaauucugaaucaucuuu

SEQ ID NO: 420909 - RNA, 19 nt, Artificial Sequence
  Synthetic
uuaauucugaaucaucuuu

SEQ ID NO: 420910 - RNA, 20 nt, Artificial Sequence
  Synthetic
auuaauucugaaucaucuuu

SEQ ID NO: 420911 - RNA, 21 nt, Artificial Sequence
  Synthetic
gauuaauucugaaucaucuuu

SEQ ID NO: 420912 - RNA, 22 nt, Artificial Sequence
  Synthetic
ugauuaauucugaaucaucuuu

SEQ ID NO: 420913 - RNA, 23 nt, Artificial Sequence
  Synthetic
cugauuaauucugaaucaucuuu

SEQ ID NO: 420914 - RNA, 24 nt, Artificial Sequence
  Synthetic
acugauuaauucugaaucaucuuu

SEQ ID NO: 420915 - RNA, 18 nt, Artificial Sequence
  Synthetic
gagacucacgucaucuuu

SEQ ID NO: 420916 - RNA, 19 nt, Artificial Sequence
  Synthetic
agagacucacgucaucuuu

SEQ ID NO: 420917 - RNA, 20 nt, Artificial Sequence
  Synthetic
aagagacucacgucaucuuu

SEQ ID NO: 420918 - RNA, 21 nt, Artificial Sequence
  Synthetic
uaagagacucacgucaucuuu

SEQ ID NO: 420919 - RNA, 22 nt, Artificial Sequence
  Synthetic
auaagagacucacgucaucuuu

SEQ ID NO: 420920 - RNA, 23 nt, Artificial Sequence
  Synthetic
cauaagagacucacgucaucuuu

SEQ ID NO: 420921 - RNA, 24 nt, Artificial Sequence
  Synthetic
ccauaagagacucacgucaucuuu

SEQ ID NO: 420922 - RNA, 18 nt, Artificial Sequence
  Synthetic
uucugguucuagaucuuu

SEQ ID NO: 420923 - RNA, 19 nt, Artificial Sequence
  Synthetic
uuucugguucuagaucuuu

SEQ ID NO: 420924 - RNA, 20 nt, Artificial Sequence
  Synthetic
auuucugguucuagaucuuu

SEQ ID NO: 420925 - RNA, 21 nt, Artificial Sequence
  Synthetic
uauuucugguucuagaucuuu

SEQ ID NO: 420926 - RNA, 22 nt, Artificial Sequence
  Synthetic
guauuucugguucuagaucuuu

SEQ ID NO: 420927 - RNA, 23 nt, Artificial Sequence
  Synthetic
gguauuucugguucuagaucuuu

SEQ ID NO: 420928 - RNA, 24 nt, Artificial Sequence
  Synthetic
ugguauuucugguucuagaucuuu

SEQ ID NO: 420929 - RNA, 18 nt, Artificial Sequence
  Synthetic
gugauaugggugaucuuu

SEQ ID NO: 420930 - RNA, 19 nt, Artificial Sequence
  Synthetic
agugauaugggugaucuuu

SEQ ID NO: 420931 - RNA, 20 nt, Artificial Sequence
  Synthetic
aagugauaugggugaucuuu

SEQ ID NO: 420932 - RNA, 21 nt, Artificial Sequence
  Synthetic
aaagugauaugggugaucuuu

SEQ ID NO: 420933 - RNA, 22 nt, Artificial Sequence
  Synthetic
caaagugauaugggugaucuuu

SEQ ID NO: 420934 - RNA, 23 nt, Artificial Sequence
  Synthetic
ccaaagugauaugggugaucuuu

SEQ ID NO: 420935 - RNA, 24 nt, Artificial Sequence
  Synthetic
accaaagugauaugggugaucuuu

SEQ ID NO: 420936 - RNA, 18 nt, Artificial Sequence
  Synthetic
agucuaggcaauaucuuu

SEQ ID NO: 420937 - RNA, 19 nt, Artificial Sequence
  Synthetic
cagucuaggcaauaucuuu

SEQ ID NO: 420938 - RNA, 20 nt, Artificial Sequence
  Synthetic
acagucuaggcaauaucuuu

SEQ ID NO: 420939 - RNA, 21 nt, Artificial Sequence
  Synthetic
gacagucuaggcaauaucuuu

SEQ ID NO: 420940 - RNA, 22 nt, Artificial Sequence
  Synthetic
agacagucuaggcaauaucuuu

SEQ ID NO: 420941 - RNA, 23 nt, Artificial Sequence
  Synthetic
uagacagucuaggcaauaucuuu

SEQ ID NO: 420942 - RNA, 24 nt, Artificial Sequence
  Synthetic
uuagacagucuaggcaauaucuuu

SEQ ID NO: 420943 - RNA, 18 nt, Artificial Sequence
  Synthetic
ucccugaucaguaucuuu

SEQ ID NO: 420944 - RNA, 19 nt, Artificial Sequence
  Synthetic
uucccugaucaguaucuuu

SEQ ID NO: 420945 - RNA, 20 nt, Artificial Sequence
  Synthetic
guucccugaucaguaucuuu

SEQ ID NO: 420946 - RNA, 21 nt, Artificial Sequence
  Synthetic
aguucccugaucaguaucuuu

SEQ ID NO: 420947 - RNA, 22 nt, Artificial Sequence
  Synthetic
gaguucccugaucaguaucuuu

SEQ ID NO: 420948 - RNA, 23 nt, Artificial Sequence
  Synthetic
ggaguucccugaucaguaucuuu

SEQ ID NO: 420949 - RNA, 24 nt, Artificial Sequence
  Synthetic
uggaguucccugaucaguaucuuu

SEQ ID NO: 420950 - RNA, 18 nt, Artificial Sequence
  Synthetic
gcuucucuugguaucuuu

SEQ ID NO: 420951 - RNA, 19 nt, Artificial Sequence
  Synthetic
agcuucucuugguaucuuu

SEQ ID NO: 420952 - RNA, 20 nt, Artificial Sequence
  Synthetic
aagcuucucuugguaucuuu

SEQ ID NO: 420953 - RNA, 21 nt, Artificial Sequence
  Synthetic
caagcuucucuugguaucuuu

SEQ ID NO: 420954 - RNA, 22 nt, Artificial Sequence
  Synthetic
ucaagcuucucuugguaucuuu

SEQ ID NO: 420955 - RNA, 23 nt, Artificial Sequence
  Synthetic
uucaagcuucucuugguaucuuu

SEQ ID NO: 420956 - RNA, 24 nt, Artificial Sequence
  Synthetic
uuucaagcuucucuugguaucuuu

SEQ ID NO: 420957 - RNA, 18 nt, Artificial Sequence
  Synthetic
cccaucaaguguaucuuu

SEQ ID NO: 420958 - RNA, 19 nt, Artificial Sequence
  Synthetic
gcccaucaaguguaucuuu

SEQ ID NO: 420959 - RNA, 20 nt, Artificial Sequence
  Synthetic
ugcccaucaaguguaucuuu

SEQ ID NO: 420960 - RNA, 21 nt, Artificial Sequence
  Synthetic
uugcccaucaaguguaucuuu

SEQ ID NO: 420961 - RNA, 22 nt, Artificial Sequence
  Synthetic
cuugcccaucaaguguaucuuu

SEQ ID NO: 420962 - RNA, 23 nt, Artificial Sequence
  Synthetic
ccuugcccaucaaguguaucuuu

SEQ ID NO: 420963 - RNA, 24 nt, Artificial Sequence
  Synthetic
uccuugcccaucaaguguaucuuu

SEQ ID NO: 420964 - RNA, 18 nt, Artificial Sequence
  Synthetic
aaauauaccauuaucuuu

SEQ ID NO: 420965 - RNA, 19 nt, Artificial Sequence
  Synthetic
aaaauauaccauuaucuuu

SEQ ID NO: 420966 - RNA, 20 nt, Artificial Sequence
  Synthetic
gaaaauauaccauuaucuuu

SEQ ID NO: 420967 - RNA, 21 nt, Artificial Sequence
  Synthetic
agaaaauauaccauuaucuuu

SEQ ID NO: 420968 - RNA, 22 nt, Artificial Sequence
  Synthetic
uagaaaauauaccauuaucuuu

SEQ ID NO: 420969 - RNA, 23 nt, Artificial Sequence
  Synthetic
guagaaaauauaccauuaucuuu

SEQ ID NO: 420970 - RNA, 24 nt, Artificial Sequence
  Synthetic
aguagaaaauauaccauuaucuuu

SEQ ID NO: 420971 - RNA, 18 nt, Artificial Sequence
  Synthetic
aauuuauaauuuaucuuu

SEQ ID NO: 420972 - RNA, 19 nt, Artificial Sequence
  Synthetic
gaauuuauaauuuaucuuu

SEQ ID NO: 420973 - RNA, 20 nt, Artificial Sequence
  Synthetic
agaauuuauaauuuaucuuu

SEQ ID NO: 420974 - RNA, 21 nt, Artificial Sequence
  Synthetic
uagaauuuauaauuuaucuuu

SEQ ID NO: 420975 - RNA, 22 nt, Artificial Sequence
  Synthetic
cuagaauuuauaauuuaucuuu

SEQ ID NO: 420976 - RNA, 23 nt, Artificial Sequence
  Synthetic
gcuagaauuuauaauuuaucuuu

SEQ ID NO: 420977 - RNA, 24 nt, Artificial Sequence
  Synthetic
ggcuagaauuuauaauuuaucuuu

SEQ ID NO: 420978 - RNA, 18 nt, Artificial Sequence
  Synthetic
uugagguaguuuaucuuu

SEQ ID NO: 420979 - RNA, 19 nt, Artificial Sequence
  Synthetic
uuugagguaguuuaucuuu

SEQ ID NO: 420980 - RNA, 20 nt, Artificial Sequence
  Synthetic
uuuugagguaguuuaucuuu

SEQ ID NO: 420981 - RNA, 21 nt, Artificial Sequence
  Synthetic
auuuugagguaguuuaucuuu

SEQ ID NO: 420982 - RNA, 22 nt, Artificial Sequence
  Synthetic
aauuuugagguaguuuaucuuu

SEQ ID NO: 420983 - RNA, 23 nt, Artificial Sequence
  Synthetic
gaauuuugagguaguuuaucuuu

SEQ ID NO: 420984 - RNA, 24 nt, Artificial Sequence
  Synthetic
ugaauuuugagguaguuuaucuuu

SEQ ID NO: 420985 - RNA, 18 nt, Artificial Sequence
  Synthetic
cacaaaauugaacucuuu

SEQ ID NO: 420986 - RNA, 19 nt, Artificial Sequence
  Synthetic
acacaaaauugaacucuuu

SEQ ID NO: 420987 - RNA, 20 nt, Artificial Sequence
  Synthetic
cacacaaaauugaacucuuu

SEQ ID NO: 420988 - RNA, 21 nt, Artificial Sequence
  Synthetic
acacacaaaauugaacucuuu

SEQ ID NO: 420989 - RNA, 22 nt, Artificial Sequence
  Synthetic
cacacacaaaauugaacucuuu

SEQ ID NO: 420990 - RNA, 23 nt, Artificial Sequence
  Synthetic
acacacacaaaauugaacucuuu

SEQ ID NO: 420991 - RNA, 24 nt, Artificial Sequence
  Synthetic
cacacacacaaaauugaacucuuu

SEQ ID NO: 420992 - RNA, 19 nt, Artificial Sequence
  Synthetic
acuguaaucccagcucuuu

SEQ ID NO: 420993 - RNA, 20 nt, Artificial Sequence
  Synthetic
aacuguaaucccagcucuuu

SEQ ID NO: 420994 - RNA, 21 nt, Artificial Sequence
  Synthetic
caacuguaaucccagcucuuu

SEQ ID NO: 420995 - RNA, 22 nt, Artificial Sequence
  Synthetic
acaacuguaaucccagcucuuu

SEQ ID NO: 420996 - RNA, 23 nt, Artificial Sequence
  Synthetic
cacaacuguaaucccagcucuuu

SEQ ID NO: 420997 - RNA, 24 nt, Artificial Sequence
  Synthetic
ucacaacuguaaucccagcucuuu

SEQ ID NO: 420998 - RNA, 18 nt, Artificial Sequence
  Synthetic
uuccuucaggagcucuuu

SEQ ID NO: 420999 - RNA, 19 nt, Artificial Sequence
  Synthetic
cuuccuucaggagcucuuu

SEQ ID NO: 421000 - RNA, 20 nt, Artificial Sequence
  Synthetic
gcuuccuucaggagcucuuu

SEQ ID NO: 421001 - RNA, 21 nt, Artificial Sequence
  Synthetic
cgcuuccuucaggagcucuuu

SEQ ID NO: 421002 - RNA, 22 nt, Artificial Sequence
  Synthetic
gcgcuuccuucaggagcucuuu

SEQ ID NO: 421003 - RNA, 23 nt, Artificial Sequence
  Synthetic
agcgcuuccuucaggagcucuuu

SEQ ID NO: 421004 - RNA, 24 nt, Artificial Sequence
  Synthetic
uagcgcuuccuucaggagcucuuu

SEQ ID NO: 421005 - RNA, 18 nt, Artificial Sequence
  Synthetic
ucccaaaccuugcucuuu

SEQ ID NO: 421006 - RNA, 19 nt, Artificial Sequence
  Synthetic
uucccaaaccuugcucuuu

SEQ ID NO: 421007 - RNA, 20 nt, Artificial Sequence
  Synthetic
cuucccaaaccuugcucuuu

SEQ ID NO: 421008 - RNA, 21 nt, Artificial Sequence
  Synthetic
ccuucccaaaccuugcucuuu

SEQ ID NO: 421009 - RNA, 22 nt, Artificial Sequence
  Synthetic
gccuucccaaaccuugcucuuu

SEQ ID NO: 421010 - RNA, 23 nt, Artificial Sequence
  Synthetic
agccuucccaaaccuugcucuuu

SEQ ID NO: 421011 - RNA, 24 nt, Artificial Sequence
  Synthetic
aagccuucccaaaccuugcucuuu

SEQ ID NO: 421012 - RNA, 18 nt, Artificial Sequence
  Synthetic
uacagucuaaaucucuuu

SEQ ID NO: 421013 - RNA, 19 nt, Artificial Sequence
  Synthetic
auacagucuaaaucucuuu

SEQ ID NO: 421014 - RNA, 20 nt, Artificial Sequence
  Synthetic
gauacagucuaaaucucuuu

SEQ ID NO: 421015 - RNA, 21 nt, Artificial Sequence
  Synthetic
ugauacagucuaaaucucuuu

SEQ ID NO: 421016 - RNA, 22 nt, Artificial Sequence
  Synthetic
uugauacagucuaaaucucuuu

SEQ ID NO: 421017 - RNA, 23 nt, Artificial Sequence
  Synthetic
auugauacagucuaaaucucuuu

SEQ ID NO: 421018 - RNA, 24 nt, Artificial Sequence
  Synthetic
uauugauacagucuaaaucucuuu

SEQ ID NO: 421019 - RNA, 18 nt, Artificial Sequence
  Synthetic
gaugaaaaucaucucuuu

SEQ ID NO: 421020 - RNA, 19 nt, Artificial Sequence
  Synthetic
ugaugaaaaucaucucuuu

SEQ ID NO: 421021 - RNA, 20 nt, Artificial Sequence
  Synthetic
uugaugaaaaucaucucuuu

SEQ ID NO: 421022 - RNA, 21 nt, Artificial Sequence
  Synthetic
uuugaugaaaaucaucucuuu

SEQ ID NO: 421023 - RNA, 22 nt, Artificial Sequence
  Synthetic
uuuugaugaaaaucaucucuuu

SEQ ID NO: 421024 - RNA, 23 nt, Artificial Sequence
  Synthetic
cuuuugaugaaaaucaucucuuu

SEQ ID NO: 421025 - RNA, 24 nt, Artificial Sequence
  Synthetic
acuuuugaugaaaaucaucucuuu

SEQ ID NO: 421026 - RNA, 18 nt, Artificial Sequence
  Synthetic
cugauagaaacucucuuu

SEQ ID NO: 421027 - RNA, 19 nt, Artificial Sequence
  Synthetic
acugauagaaacucucuuu

SEQ ID NO: 421028 - RNA, 20 nt, Artificial Sequence
  Synthetic
uacugauagaaacucucuuu

SEQ ID NO: 421029 - RNA, 21 nt, Artificial Sequence
  Synthetic
guacugauagaaacucucuuu

SEQ ID NO: 421030 - RNA, 22 nt, Artificial Sequence
  Synthetic
uguacugauagaaacucucuuu

SEQ ID NO: 421031 - RNA, 23 nt, Artificial Sequence
  Synthetic
guguacugauagaaacucucuuu

SEQ ID NO: 421032 - RNA, 24 nt, Artificial Sequence
  Synthetic
uguguacugauagaaacucucuuu

SEQ ID NO: 421033 - RNA, 18 nt, Artificial Sequence
  Synthetic
aauacuacuacucucuuu

SEQ ID NO: 421034 - RNA, 19 nt, Artificial Sequence
  Synthetic
aaauacuacuacucucuuu

SEQ ID NO: 421035 - RNA, 20 nt, Artificial Sequence
  Synthetic
aaaauacuacuacucucuuu

SEQ ID NO: 421036 - RNA, 21 nt, Artificial Sequence
  Synthetic
caaaauacuacuacucucuuu

SEQ ID NO: 421037 - RNA, 22 nt, Artificial Sequence
  Synthetic
acaaaauacuacuacucucuuu

SEQ ID NO: 421038 - RNA, 23 nt, Artificial Sequence
  Synthetic
cacaaaauacuacuacucucuuu

SEQ ID NO: 421039 - RNA, 24 nt, Artificial Sequence
  Synthetic
ccacaaaauacuacuacucucuuu

SEQ ID NO: 421040 - RNA, 18 nt, Artificial Sequence
  Synthetic
uguuuaugaauucucuuu

SEQ ID NO: 421041 - RNA, 19 nt, Artificial Sequence
  Synthetic
auguuuaugaauucucuuu

SEQ ID NO: 421042 - RNA, 20 nt, Artificial Sequence
  Synthetic
uauguuuaugaauucucuuu

SEQ ID NO: 421043 - RNA, 21 nt, Artificial Sequence
  Synthetic
cuauguuuaugaauucucuuu

SEQ ID NO: 421044 - RNA, 22 nt, Artificial Sequence
  Synthetic
ucuauguuuaugaauucucuuu

SEQ ID NO: 421045 - RNA, 23 nt, Artificial Sequence
  Synthetic
uucuauguuuaugaauucucuuu

SEQ ID NO: 421046 - RNA, 24 nt, Artificial Sequence
  Synthetic
uuucuauguuuaugaauucucuuu

SEQ ID NO: 421047 - RNA, 18 nt, Artificial Sequence
  Synthetic
aggcaucugcuucucuuu

SEQ ID NO: 421048 - RNA, 19 nt, Artificial Sequence
  Synthetic
uaggcaucugcuucucuuu

SEQ ID NO: 421049 - RNA, 20 nt, Artificial Sequence
  Synthetic
uuaggcaucugcuucucuuu

SEQ ID NO: 421050 - RNA, 21 nt, Artificial Sequence
  Synthetic
auuaggcaucugcuucucuuu

SEQ ID NO: 421051 - RNA, 22 nt, Artificial Sequence
  Synthetic
aauuaggcaucugcuucucuuu

SEQ ID NO: 421052 - RNA, 23 nt, Artificial Sequence
  Synthetic
gaauuaggcaucugcuucucuuu

SEQ ID NO: 421053 - RNA, 24 nt, Artificial Sequence
  Synthetic
ggaauuaggcaucugcuucucuuu

SEQ ID NO: 421054 - RNA, 18 nt, Artificial Sequence
  Synthetic
acaggccuauuucucuuu

SEQ ID NO: 421055 - RNA, 19 nt, Artificial Sequence
  Synthetic
aacaggccuauuucucuuu

SEQ ID NO: 421056 - RNA, 20 nt, Artificial Sequence
  Synthetic
aaacaggccuauuucucuuu

SEQ ID NO: 421057 - RNA, 21 nt, Artificial Sequence
  Synthetic
gaaacaggccuauuucucuuu

SEQ ID NO: 421058 - RNA, 22 nt, Artificial Sequence
  Synthetic
agaaacaggccuauuucucuuu

SEQ ID NO: 421059 - RNA, 23 nt, Artificial Sequence
  Synthetic
aagaaacaggccuauuucucuuu

SEQ ID NO: 421060 - RNA, 24 nt, Artificial Sequence
  Synthetic
aaagaaacaggccuauuucucuuu

SEQ ID NO: 421061 - RNA, 18 nt, Artificial Sequence
  Synthetic
agagcuccuuuucucuuu

SEQ ID NO: 421062 - RNA, 19 nt, Artificial Sequence
  Synthetic
aagagcuccuuuucucuuu

SEQ ID NO: 421063 - RNA, 20 nt, Artificial Sequence
  Synthetic
uaagagcuccuuuucucuuu

SEQ ID NO: 421064 - RNA, 21 nt, Artificial Sequence
  Synthetic
cuaagagcuccuuuucucuuu

SEQ ID NO: 421065 - RNA, 22 nt, Artificial Sequence
  Synthetic
acuaagagcuccuuuucucuuu

SEQ ID NO: 421066 - RNA, 23 nt, Artificial Sequence
  Synthetic
gacuaagagcuccuuuucucuuu

SEQ ID NO: 421067 - RNA, 24 nt, Artificial Sequence
  Synthetic
ugacuaagagcuccuuuucucuuu

SEQ ID NO: 421068 - RNA, 18 nt, Artificial Sequence
  Synthetic
cucguuuguuuucucuuu

SEQ ID NO: 421069 - RNA, 19 nt, Artificial Sequence
  Synthetic
acucguuuguuuucucuuu

SEQ ID NO: 421070 - RNA, 20 nt, Artificial Sequence
  Synthetic
uacucguuuguuuucucuuu

SEQ ID NO: 421071 - RNA, 21 nt, Artificial Sequence
  Synthetic
cuacucguuuguuuucucuuu

SEQ ID NO: 421072 - RNA, 22 nt, Artificial Sequence
  Synthetic
acuacucguuuguuuucucuuu

SEQ ID NO: 421073 - RNA, 23 nt, Artificial Sequence
  Synthetic
cacuacucguuuguuuucucuuu

SEQ ID NO: 421074 - RNA, 24 nt, Artificial Sequence
  Synthetic
ucacuacucguuuguuuucucuuu

SEQ ID NO: 421075 - RNA, 18 nt, Artificial Sequence
  Synthetic
ggucacugaaaagucuuu

SEQ ID NO: 421076 - RNA, 19 nt, Artificial Sequence
  Synthetic
aggucacugaaaagucuuu

SEQ ID NO: 421077 - RNA, 20 nt, Artificial Sequence
  Synthetic
aaggucacugaaaagucuuu

SEQ ID NO: 421078 - RNA, 21 nt, Artificial Sequence
  Synthetic
uaaggucacugaaaagucuuu

SEQ ID NO: 421079 - RNA, 22 nt, Artificial Sequence
  Synthetic
guaaggucacugaaaagucuuu

SEQ ID NO: 421080 - RNA, 23 nt, Artificial Sequence
  Synthetic
aguaaggucacugaaaagucuuu

SEQ ID NO: 421081 - RNA, 24 nt, Artificial Sequence
  Synthetic
uaguaaggucacugaaaagucuuu

SEQ ID NO: 421082 - RNA, 18 nt, Artificial Sequence
  Synthetic
ucucaaagagaagucuuu

SEQ ID NO: 421083 - RNA, 19 nt, Artificial Sequence
  Synthetic
uucucaaagagaagucuuu

SEQ ID NO: 421084 - RNA, 20 nt, Artificial Sequence
  Synthetic
cuucucaaagagaagucuuu

SEQ ID NO: 421085 - RNA, 21 nt, Artificial Sequence
  Synthetic
gcuucucaaagagaagucuuu

SEQ ID NO: 421086 - RNA, 22 nt, Artificial Sequence
  Synthetic
ugcuucucaaagagaagucuuu

SEQ ID NO: 421087 - RNA, 23 nt, Artificial Sequence
  Synthetic
cugcuucucaaagagaagucuuu

SEQ ID NO: 421088 - RNA, 24 nt, Artificial Sequence
  Synthetic
ucugcuucucaaagagaagucuuu

SEQ ID NO: 421089 - RNA, 18 nt, Artificial Sequence
  Synthetic
uucuuuuucuaagucuuu

SEQ ID NO: 421090 - RNA, 19 nt, Artificial Sequence
  Synthetic
cuucuuuuucuaagucuuu

SEQ ID NO: 421091 - RNA, 20 nt, Artificial Sequence
  Synthetic
ccuucuuuuucuaagucuuu

SEQ ID NO: 421092 - RNA, 21 nt, Artificial Sequence
  Synthetic
uccuucuuuuucuaagucuuu

SEQ ID NO: 421093 - RNA, 22 nt, Artificial Sequence
  Synthetic
guccuucuuuuucuaagucuuu

SEQ ID NO: 421094 - RNA, 23 nt, Artificial Sequence
  Synthetic
uguccuucuuuuucuaagucuuu

SEQ ID NO: 421095 - RNA, 24 nt, Artificial Sequence
  Synthetic
uuguccuucuuuuucuaagucuuu

SEQ ID NO: 421096 - RNA, 18 nt, Artificial Sequence
  Synthetic
gucuagggggaggucuuu

SEQ ID NO: 421097 - RNA, 19 nt, Artificial Sequence
  Synthetic
ggucuagggggaggucuuu

SEQ ID NO: 421098 - RNA, 20 nt, Artificial Sequence
  Synthetic
uggucuagggggaggucuuu

SEQ ID NO: 421099 - RNA, 21 nt, Artificial Sequence
  Synthetic
cuggucuagggggaggucuuu

SEQ ID NO: 421100 - RNA, 22 nt, Artificial Sequence
  Synthetic
acuggucuagggggaggucuuu

SEQ ID NO: 421101 - RNA, 23 nt, Artificial Sequence
  Synthetic
cacuggucuagggggaggucuuu

SEQ ID NO: 421102 - RNA, 24 nt, Artificial Sequence
  Synthetic
ucacuggucuagggggaggucuuu

SEQ ID NO: 421103 - RNA, 18 nt, Artificial Sequence
  Synthetic
agguguaaguaggucuuu

SEQ ID NO: 421104 - RNA, 19 nt, Artificial Sequence
  Synthetic
cagguguaaguaggucuuu

SEQ ID NO: 421105 - RNA, 20 nt, Artificial Sequence
  Synthetic
gcagguguaaguaggucuuu

SEQ ID NO: 421106 - RNA, 21 nt, Artificial Sequence
  Synthetic
ugcagguguaaguaggucuuu

SEQ ID NO: 421107 - RNA, 22 nt, Artificial Sequence
  Synthetic
cugcagguguaaguaggucuuu

SEQ ID NO: 421108 - RNA, 23 nt, Artificial Sequence
  Synthetic
gcugcagguguaaguaggucuuu

SEQ ID NO: 421109 - RNA, 24 nt, Artificial Sequence
  Synthetic
ggcugcagguguaaguaggucuuu

SEQ ID NO: 421110 - RNA, 18 nt, Artificial Sequence
  Synthetic
caaauugcuguggucuuu

SEQ ID NO: 421111 - RNA, 19 nt, Artificial Sequence
  Synthetic
gcaaauugcuguggucuuu

SEQ ID NO: 421112 - RNA, 20 nt, Artificial Sequence
  Synthetic
cgcaaauugcuguggucuuu

SEQ ID NO: 421113 - RNA, 21 nt, Artificial Sequence
  Synthetic
acgcaaauugcuguggucuuu

SEQ ID NO: 421114 - RNA, 22 nt, Artificial Sequence
  Synthetic
aacgcaaauugcuguggucuuu

SEQ ID NO: 421115 - RNA, 23 nt, Artificial Sequence
  Synthetic
aaacgcaaauugcuguggucuuu

SEQ ID NO: 421116 - RNA, 24 nt, Artificial Sequence
  Synthetic
gaaacgcaaauugcuguggucuuu

SEQ ID NO: 421117 - RNA, 18 nt, Artificial Sequence
  Synthetic
uuaggguuauuggucuuu

SEQ ID NO: 421118 - RNA, 19 nt, Artificial Sequence
  Synthetic
uuuaggguuauuggucuuu

SEQ ID NO: 421119 - RNA, 20 nt, Artificial Sequence
  Synthetic
uuuuaggguuauuggucuuu

SEQ ID NO: 421120 - RNA, 21 nt, Artificial Sequence
  Synthetic
uuuuuaggguuauuggucuuu

SEQ ID NO: 421121 - RNA, 22 nt, Artificial Sequence
  Synthetic
uuuuuuaggguuauuggucuuu

SEQ ID NO: 421122 - RNA, 23 nt, Artificial Sequence
  Synthetic
auuuuuuaggguuauuggucuuu

SEQ ID NO: 421123 - RNA, 24 nt, Artificial Sequence
  Synthetic
aauuuuuuaggguuauuggucuuu

SEQ ID NO: 421124 - RNA, 18 nt, Artificial Sequence
  Synthetic
uguguggggaaugucuuu

SEQ ID NO: 421125 - RNA, 19 nt, Artificial Sequence
  Synthetic
cuguguggggaaugucuuu

SEQ ID NO: 421126 - RNA, 20 nt, Artificial Sequence
  Synthetic
ucuguguggggaaugucuuu

SEQ ID NO: 421127 - RNA, 21 nt, Artificial Sequence
  Synthetic
uucuguguggggaaugucuuu

SEQ ID NO: 421128 - RNA, 22 nt, Artificial Sequence
  Synthetic
auucuguguggggaaugucuuu

SEQ ID NO: 421129 - RNA, 23 nt, Artificial Sequence
  Synthetic
cauucuguguggggaaugucuuu

SEQ ID NO: 421130 - RNA, 24 nt, Artificial Sequence
  Synthetic
acauucuguguggggaaugucuuu

SEQ ID NO: 421131 - RNA, 18 nt, Artificial Sequence
  Synthetic
aguaauuaagaugucuuu

SEQ ID NO: 421132 - RNA, 19 nt, Artificial Sequence
  Synthetic
aaguaauuaagaugucuuu

SEQ ID NO: 421133 - RNA, 20 nt, Artificial Sequence
  Synthetic
aaaguaauuaagaugucuuu

SEQ ID NO: 421134 - RNA, 21 nt, Artificial Sequence
  Synthetic
uaaaguaauuaagaugucuuu

SEQ ID NO: 421135 - RNA, 22 nt, Artificial Sequence
  Synthetic
auaaaguaauuaagaugucuuu

SEQ ID NO: 421136 - RNA, 23 nt, Artificial Sequence
  Synthetic
uauaaaguaauuaagaugucuuu

SEQ ID NO: 421137 - RNA, 24 nt, Artificial Sequence
  Synthetic
auauaaaguaauuaagaugucuuu

SEQ ID NO: 421138 - RNA, 18 nt, Artificial Sequence
  Synthetic
aaggaaugagaugucuuu

SEQ ID NO: 421139 - RNA, 19 nt, Artificial Sequence
  Synthetic
caaggaaugagaugucuuu

SEQ ID NO: 421140 - RNA, 20 nt, Artificial Sequence
  Synthetic
gcaaggaaugagaugucuuu

SEQ ID NO: 421141 - RNA, 21 nt, Artificial Sequence
  Synthetic
agcaaggaaugagaugucuuu

SEQ ID NO: 421142 - RNA, 22 nt, Artificial Sequence
  Synthetic
gagcaaggaaugagaugucuuu

SEQ ID NO: 421143 - RNA, 23 nt, Artificial Sequence
  Synthetic
ggagcaaggaaugagaugucuuu

SEQ ID NO: 421144 - RNA, 24 nt, Artificial Sequence
  Synthetic
uggagcaaggaaugagaugucuuu

SEQ ID NO: 421145 - RNA, 18 nt, Artificial Sequence
  Synthetic
guauggauggaugucuuu

SEQ ID NO: 421146 - RNA, 19 nt, Artificial Sequence
  Synthetic
uguauggauggaugucuuu

SEQ ID NO: 421147 - RNA, 20 nt, Artificial Sequence
  Synthetic
guguauggauggaugucuuu

SEQ ID NO: 421148 - RNA, 21 nt, Artificial Sequence
  Synthetic
aguguauggauggaugucuuu

SEQ ID NO: 421149 - RNA, 22 nt, Artificial Sequence
  Synthetic
caguguauggauggaugucuuu

SEQ ID NO: 421150 - RNA, 23 nt, Artificial Sequence
  Synthetic
ccaguguauggauggaugucuuu

SEQ ID NO: 421151 - RNA, 24 nt, Artificial Sequence
  Synthetic
uccaguguauggauggaugucuuu

SEQ ID NO: 421152 - RNA, 18 nt, Artificial Sequence
  Synthetic
aacauucauacugucuuu

SEQ ID NO: 421153 - RNA, 19 nt, Artificial Sequence
  Synthetic
aaacauucauacugucuuu

SEQ ID NO: 421154 - RNA, 20 nt, Artificial Sequence
  Synthetic
gaaacauucauacugucuuu

SEQ ID NO: 421155 - RNA, 21 nt, Artificial Sequence
  Synthetic
agaaacauucauacugucuuu

SEQ ID NO: 421156 - RNA, 22 nt, Artificial Sequence
  Synthetic
gagaaacauucauacugucuuu

SEQ ID NO: 421157 - RNA, 23 nt, Artificial Sequence
  Synthetic
ugagaaacauucauacugucuuu

SEQ ID NO: 421158 - RNA, 24 nt, Artificial Sequence
  Synthetic
uugagaaacauucauacugucuuu

SEQ ID NO: 421159 - RNA, 18 nt, Artificial Sequence
  Synthetic
aacuggcuggcugucuuu

SEQ ID NO: 421160 - RNA, 19 nt, Artificial Sequence
  Synthetic
uaacuggcuggcugucuuu

SEQ ID NO: 421161 - RNA, 20 nt, Artificial Sequence
  Synthetic
cuaacuggcuggcugucuuu

SEQ ID NO: 421162 - RNA, 21 nt, Artificial Sequence
  Synthetic
ccuaacuggcuggcugucuuu

SEQ ID NO: 421163 - RNA, 22 nt, Artificial Sequence
  Synthetic
uccuaacuggcuggcugucuuu

SEQ ID NO: 421164 - RNA, 23 nt, Artificial Sequence
  Synthetic
auccuaacuggcuggcugucuuu

SEQ ID NO: 421165 - RNA, 24 nt, Artificial Sequence
  Synthetic
gauccuaacuggcuggcugucuuu

SEQ ID NO: 421166 - RNA, 18 nt, Artificial Sequence
  Synthetic
ugcauaccaauugucuuu

SEQ ID NO: 421167 - RNA, 19 nt, Artificial Sequence
  Synthetic
gugcauaccaauugucuuu

SEQ ID NO: 421168 - RNA, 20 nt, Artificial Sequence
  Synthetic
ggugcauaccaauugucuuu

SEQ ID NO: 421169 - RNA, 21 nt, Artificial Sequence
  Synthetic
gggugcauaccaauugucuuu

SEQ ID NO: 421170 - RNA, 22 nt, Artificial Sequence
  Synthetic
agggugcauaccaauugucuuu

SEQ ID NO: 421171 - RNA, 23 nt, Artificial Sequence
  Synthetic
aagggugcauaccaauugucuuu

SEQ ID NO: 421172 - RNA, 24 nt, Artificial Sequence
  Synthetic
aaagggugcauaccaauugucuuu

SEQ ID NO: 421173 - RNA, 18 nt, Artificial Sequence
  Synthetic
uuuuugguacuugucuuu

SEQ ID NO: 421174 - RNA, 19 nt, Artificial Sequence
  Synthetic
auuuuugguacuugucuuu

SEQ ID NO: 421175 - RNA, 20 nt, Artificial Sequence
  Synthetic
cauuuuugguacuugucuuu

SEQ ID NO: 421176 - RNA, 21 nt, Artificial Sequence
  Synthetic
acauuuuugguacuugucuuu

SEQ ID NO: 421177 - RNA, 22 nt, Artificial Sequence
  Synthetic
aacauuuuugguacuugucuuu

SEQ ID NO: 421178 - RNA, 23 nt, Artificial Sequence
  Synthetic
uaacauuuuugguacuugucuuu

SEQ ID NO: 421179 - RNA, 24 nt, Artificial Sequence
  Synthetic
uuaacauuuuugguacuugucuuu

SEQ ID NO: 421180 - RNA, 18 nt, Artificial Sequence
  Synthetic
uucuaagcuuuugucuuu

SEQ ID NO: 421181 - RNA, 19 nt, Artificial Sequence
  Synthetic
uuucuaagcuuuugucuuu

SEQ ID NO: 421182 - RNA, 20 nt, Artificial Sequence
  Synthetic
uuuucuaagcuuuugucuuu

SEQ ID NO: 421183 - RNA, 21 nt, Artificial Sequence
  Synthetic
cuuuucuaagcuuuugucuuu

SEQ ID NO: 421184 - RNA, 22 nt, Artificial Sequence
  Synthetic
ucuuuucuaagcuuuugucuuu

SEQ ID NO: 421185 - RNA, 23 nt, Artificial Sequence
  Synthetic
uucuuuucuaagcuuuugucuuu

SEQ ID NO: 421186 - RNA, 24 nt, Artificial Sequence
  Synthetic
cuucuuuucuaagcuuuugucuuu

SEQ ID NO: 421187 - RNA, 18 nt, Artificial Sequence
  Synthetic
uccaaggaaaaauucuuu

SEQ ID NO: 421188 - RNA, 19 nt, Artificial Sequence
  Synthetic
guccaaggaaaaauucuuu

SEQ ID NO: 421189 - RNA, 20 nt, Artificial Sequence
  Synthetic
uguccaaggaaaaauucuuu

SEQ ID NO: 421190 - RNA, 21 nt, Artificial Sequence
  Synthetic
auguccaaggaaaaauucuuu

SEQ ID NO: 421191 - RNA, 22 nt, Artificial Sequence
  Synthetic
gauguccaaggaaaaauucuuu

SEQ ID NO: 421192 - RNA, 23 nt, Artificial Sequence
  Synthetic
agauguccaaggaaaaauucuuu

SEQ ID NO: 421193 - RNA, 24 nt, Artificial Sequence
  Synthetic
uagauguccaaggaaaaauucuuu

SEQ ID NO: 421194 - RNA, 18 nt, Artificial Sequence
  Synthetic
uuaaguaaacaauucuuu

SEQ ID NO: 421195 - RNA, 19 nt, Artificial Sequence
  Synthetic
auuaaguaaacaauucuuu

SEQ ID NO: 421196 - RNA, 20 nt, Artificial Sequence
  Synthetic
aauuaaguaaacaauucuuu

SEQ ID NO: 421197 - RNA, 21 nt, Artificial Sequence
  Synthetic
gaauuaaguaaacaauucuuu

SEQ ID NO: 421198 - RNA, 22 nt, Artificial Sequence
  Synthetic
ugaauuaaguaaacaauucuuu

SEQ ID NO: 421199 - RNA, 23 nt, Artificial Sequence
  Synthetic
gugaauuaaguaaacaauucuuu

SEQ ID NO: 421200 - RNA, 24 nt, Artificial Sequence
  Synthetic
ugugaauuaaguaaacaauucuuu

SEQ ID NO: 421201 - RNA, 18 nt, Artificial Sequence
  Synthetic
uaagggagaacauucuuu

SEQ ID NO: 421202 - RNA, 19 nt, Artificial Sequence
  Synthetic
auaagggagaacauucuuu

SEQ ID NO: 421203 - RNA, 20 nt, Artificial Sequence
  Synthetic
uauaagggagaacauucuuu

SEQ ID NO: 421204 - RNA, 21 nt, Artificial Sequence
  Synthetic
auauaagggagaacauucuuu

SEQ ID NO: 421205 - RNA, 22 nt, Artificial Sequence
  Synthetic
uauauaagggagaacauucuuu

SEQ ID NO: 421206 - RNA, 23 nt, Artificial Sequence
  Synthetic
guauauaagggagaacauucuuu

SEQ ID NO: 421207 - RNA, 24 nt, Artificial Sequence
  Synthetic
aguauauaagggagaacauucuuu

SEQ ID NO: 421208 - RNA, 18 nt, Artificial Sequence
  Synthetic
agaucuuauacauucuuu

SEQ ID NO: 421209 - RNA, 19 nt, Artificial Sequence
  Synthetic
uagaucuuauacauucuuu

SEQ ID NO: 421210 - RNA, 20 nt, Artificial Sequence
  Synthetic
auagaucuuauacauucuuu

SEQ ID NO: 421211 - RNA, 21 nt, Artificial Sequence
  Synthetic
uauagaucuuauacauucuuu

SEQ ID NO: 421212 - RNA, 22 nt, Artificial Sequence
  Synthetic
auauagaucuuauacauucuuu

SEQ ID NO: 421213 - RNA, 23 nt, Artificial Sequence
  Synthetic
uauauagaucuuauacauucuuu

SEQ ID NO: 421214 - RNA, 24 nt, Artificial Sequence
  Synthetic
guauauagaucuuauacauucuuu

SEQ ID NO: 421215 - RNA, 18 nt, Artificial Sequence
  Synthetic
uuuuugaaggcauucuuu

SEQ ID NO: 421216 - RNA, 19 nt, Artificial Sequence
  Synthetic
guuuuugaaggcauucuuu

SEQ ID NO: 421217 - RNA, 20 nt, Artificial Sequence
  Synthetic
uguuuuugaaggcauucuuu

SEQ ID NO: 421218 - RNA, 21 nt, Artificial Sequence
  Synthetic
guguuuuugaaggcauucuuu

SEQ ID NO: 421219 - RNA, 22 nt, Artificial Sequence
  Synthetic
uguguuuuugaaggcauucuuu

SEQ ID NO: 421220 - RNA, 23 nt, Artificial Sequence
  Synthetic
cuguguuuuugaaggcauucuuu

SEQ ID NO: 421221 - RNA, 24 nt, Artificial Sequence
  Synthetic
ucuguguuuuugaaggcauucuuu

SEQ ID NO: 421222 - RNA, 18 nt, Artificial Sequence
  Synthetic
auaugugacagauucuuu

SEQ ID NO: 421223 - RNA, 19 nt, Artificial Sequence
  Synthetic
aauaugugacagauucuuu

SEQ ID NO: 421224 - RNA, 20 nt, Artificial Sequence
  Synthetic
aaauaugugacagauucuuu

SEQ ID NO: 421225 - RNA, 21 nt, Artificial Sequence
  Synthetic
gaaauaugugacagauucuuu

SEQ ID NO: 421226 - RNA, 22 nt, Artificial Sequence
  Synthetic
agaaauaugugacagauucuuu

SEQ ID NO: 421227 - RNA, 23 nt, Artificial Sequence
  Synthetic
uagaaauaugugacagauucuuu

SEQ ID NO: 421228 - RNA, 24 nt, Artificial Sequence
  Synthetic
auagaaauaugugacagauucuuu

SEQ ID NO: 421229 - RNA, 18 nt, Artificial Sequence
  Synthetic
aaaagauguggauucuuu

SEQ ID NO: 421230 - RNA, 19 nt, Artificial Sequence
  Synthetic
aaaaagauguggauucuuu

SEQ ID NO: 421231 - RNA, 20 nt, Artificial Sequence
  Synthetic
uaaaaagauguggauucuuu

SEQ ID NO: 421232 - RNA, 21 nt, Artificial Sequence
  Synthetic
auaaaaagauguggauucuuu

SEQ ID NO: 421233 - RNA, 22 nt, Artificial Sequence
  Synthetic
uauaaaaagauguggauucuuu

SEQ ID NO: 421234 - RNA, 23 nt, Artificial Sequence
  Synthetic
uuauaaaaagauguggauucuuu

SEQ ID NO: 421235 - RNA, 24 nt, Artificial Sequence
  Synthetic
uuuauaaaaagauguggauucuuu

SEQ ID NO: 421236 - RNA, 18 nt, Artificial Sequence
  Synthetic
auuuguucuauauucuuu

SEQ ID NO: 421237 - RNA, 19 nt, Artificial Sequence
  Synthetic
aauuuguucuauauucuuu

SEQ ID NO: 421238 - RNA, 20 nt, Artificial Sequence
  Synthetic
gaauuuguucuauauucuuu

SEQ ID NO: 421239 - RNA, 21 nt, Artificial Sequence
  Synthetic
ugaauuuguucuauauucuuu

SEQ ID NO: 421240 - RNA, 22 nt, Artificial Sequence
  Synthetic
uugaauuuguucuauauucuuu

SEQ ID NO: 421241 - RNA, 23 nt, Artificial Sequence
  Synthetic
guugaauuuguucuauauucuuu

SEQ ID NO: 421242 - RNA, 24 nt, Artificial Sequence
  Synthetic
aguugaauuuguucuauauucuuu

SEQ ID NO: 421243 - RNA, 18 nt, Artificial Sequence
  Synthetic
uaagccaguuuauucuuu

SEQ ID NO: 421244 - RNA, 19 nt, Artificial Sequence
  Synthetic
auaagccaguuuauucuuu

SEQ ID NO: 421245 - RNA, 20 nt, Artificial Sequence
  Synthetic
gauaagccaguuuauucuuu

SEQ ID NO: 421246 - RNA, 21 nt, Artificial Sequence
  Synthetic
ggauaagccaguuuauucuuu

SEQ ID NO: 421247 - RNA, 22 nt, Artificial Sequence
  Synthetic
aggauaagccaguuuauucuuu

SEQ ID NO: 421248 - RNA, 23 nt, Artificial Sequence
  Synthetic
gaggauaagccaguuuauucuuu

SEQ ID NO: 421249 - RNA, 24 nt, Artificial Sequence
  Synthetic
agaggauaagccaguuuauucuuu

SEQ ID NO: 421250 - RNA, 18 nt, Artificial Sequence
  Synthetic
uuauggcuuuuauucuuu

SEQ ID NO: 421251 - RNA, 19 nt, Artificial Sequence
  Synthetic
uuuauggcuuuuauucuuu

SEQ ID NO: 421252 - RNA, 20 nt, Artificial Sequence
  Synthetic
auuuauggcuuuuauucuuu

SEQ ID NO: 421253 - RNA, 21 nt, Artificial Sequence
  Synthetic
aauuuauggcuuuuauucuuu

SEQ ID NO: 421254 - RNA, 22 nt, Artificial Sequence
  Synthetic
uaauuuauggcuuuuauucuuu

SEQ ID NO: 421255 - RNA, 23 nt, Artificial Sequence
  Synthetic
guaauuuauggcuuuuauucuuu

SEQ ID NO: 421256 - RNA, 24 nt, Artificial Sequence
  Synthetic
uguaauuuauggcuuuuauucuuu

SEQ ID NO: 421257 - RNA, 18 nt, Artificial Sequence
  Synthetic
caaaauuuucacuucuuu

SEQ ID NO: 421258 - RNA, 19 nt, Artificial Sequence
  Synthetic
ucaaaauuuucacuucuuu

SEQ ID NO: 421259 - RNA, 20 nt, Artificial Sequence
  Synthetic
gucaaaauuuucacuucuuu

SEQ ID NO: 421260 - RNA, 21 nt, Artificial Sequence
  Synthetic
ugucaaaauuuucacuucuuu

SEQ ID NO: 421261 - RNA, 22 nt, Artificial Sequence
  Synthetic
cugucaaaauuuucacuucuuu

SEQ ID NO: 421262 - RNA, 23 nt, Artificial Sequence
  Synthetic
acugucaaaauuuucacuucuuu

SEQ ID NO: 421263 - RNA, 24 nt, Artificial Sequence
  Synthetic
aacugucaaaauuuucacuucuuu

SEQ ID NO: 421264 - RNA, 18 nt, Artificial Sequence
  Synthetic
uauuccucuuacuucuuu

SEQ ID NO: 421265 - RNA, 19 nt, Artificial Sequence
  Synthetic
auauuccucuuacuucuuu

SEQ ID NO: 421266 - RNA, 20 nt, Artificial Sequence
  Synthetic
gauauuccucuuacuucuuu

SEQ ID NO: 421267 - RNA, 21 nt, Artificial Sequence
  Synthetic
ugauauuccucuuacuucuuu

SEQ ID NO: 421268 - RNA, 22 nt, Artificial Sequence
  Synthetic
augauauuccucuuacuucuuu

SEQ ID NO: 421269 - RNA, 23 nt, Artificial Sequence
  Synthetic
aaugauauuccucuuacuucuuu

SEQ ID NO: 421270 - RNA, 24 nt, Artificial Sequence
  Synthetic
aaaugauauuccucuuacuucuuu

SEQ ID NO: 421271 - RNA, 18 nt, Artificial Sequence
  Synthetic
acuuaggcuagcuucuuu

SEQ ID NO: 421272 - RNA, 19 nt, Artificial Sequence
  Synthetic
aacuuaggcuagcuucuuu

SEQ ID NO: 421273 - RNA, 20 nt, Artificial Sequence
  Synthetic
uaacuuaggcuagcuucuuu

SEQ ID NO: 421274 - RNA, 21 nt, Artificial Sequence
  Synthetic
cuaacuuaggcuagcuucuuu

SEQ ID NO: 421275 - RNA, 22 nt, Artificial Sequence
  Synthetic
acuaacuuaggcuagcuucuuu

SEQ ID NO: 421276 - RNA, 23 nt, Artificial Sequence
  Synthetic
uacuaacuuaggcuagcuucuuu

SEQ ID NO: 421277 - RNA, 24 nt, Artificial Sequence
  Synthetic
auacuaacuuaggcuagcuucuuu

SEQ ID NO: 421278 - RNA, 18 nt, Artificial Sequence
  Synthetic
guuuccuacaucuucuuu

SEQ ID NO: 421279 - RNA, 19 nt, Artificial Sequence
  Synthetic
aguuuccuacaucuucuuu

SEQ ID NO: 421280 - RNA, 20 nt, Artificial Sequence
  Synthetic
uaguuuccuacaucuucuuu

SEQ ID NO: 421281 - RNA, 21 nt, Artificial Sequence
  Synthetic
uuaguuuccuacaucuucuuu

SEQ ID NO: 421282 - RNA, 22 nt, Artificial Sequence
  Synthetic
cuuaguuuccuacaucuucuuu

SEQ ID NO: 421283 - RNA, 23 nt, Artificial Sequence
  Synthetic
ccuuaguuuccuacaucuucuuu

SEQ ID NO: 421284 - RNA, 24 nt, Artificial Sequence
  Synthetic
gccuuaguuuccuacaucuucuuu

SEQ ID NO: 421285 - RNA, 18 nt, Artificial Sequence
  Synthetic
cuagcuuacuauuucuuu

SEQ ID NO: 421286 - RNA, 19 nt, Artificial Sequence
  Synthetic
ucuagcuuacuauuucuuu

SEQ ID NO: 421287 - RNA, 20 nt, Artificial Sequence
  Synthetic
cucuagcuuacuauuucuuu

SEQ ID NO: 421288 - RNA, 21 nt, Artificial Sequence
  Synthetic
acucuagcuuacuauuucuuu

SEQ ID NO: 421289 - RNA, 22 nt, Artificial Sequence
  Synthetic
aacucuagcuuacuauuucuuu

SEQ ID NO: 421290 - RNA, 23 nt, Artificial Sequence
  Synthetic
uaacucuagcuuacuauuucuuu

SEQ ID NO: 421291 - RNA, 24 nt, Artificial Sequence
  Synthetic
uuaacucuagcuuacuauuucuuu

SEQ ID NO: 421292 - RNA, 18 nt, Artificial Sequence
  Synthetic
uaauauagcuauuucuuu

SEQ ID NO: 421293 - RNA, 19 nt, Artificial Sequence
  Synthetic
auaauauagcuauuucuuu

SEQ ID NO: 421294 - RNA, 20 nt, Artificial Sequence
  Synthetic
gauaauauagcuauuucuuu

SEQ ID NO: 421295 - RNA, 21 nt, Artificial Sequence
  Synthetic
agauaauauagcuauuucuuu

SEQ ID NO: 421296 - RNA, 22 nt, Artificial Sequence
  Synthetic
aagauaauauagcuauuucuuu

SEQ ID NO: 421297 - RNA, 23 nt, Artificial Sequence
  Synthetic
gaagauaauauagcuauuucuuu

SEQ ID NO: 421298 - RNA, 24 nt, Artificial Sequence
  Synthetic
ugaagauaauauagcuauuucuuu

SEQ ID NO: 421299 - RNA, 18 nt, Artificial Sequence
  Synthetic
acauuguuuucuuucuuu

SEQ ID NO: 421300 - RNA, 19 nt, Artificial Sequence
  Synthetic
cacauuguuuucuuucuuu

SEQ ID NO: 421301 - RNA, 20 nt, Artificial Sequence
  Synthetic
ccacauuguuuucuuucuuu

SEQ ID NO: 421302 - RNA, 21 nt, Artificial Sequence
  Synthetic
uccacauuguuuucuuucuuu

SEQ ID NO: 421303 - RNA, 22 nt, Artificial Sequence
  Synthetic
guccacauuguuuucuuucuuu

SEQ ID NO: 421304 - RNA, 23 nt, Artificial Sequence
  Synthetic
uguccacauuguuuucuuucuuu

SEQ ID NO: 421305 - RNA, 24 nt, Artificial Sequence
  Synthetic
guguccacauuguuuucuuucuuu

SEQ ID NO: 421306 - RNA, 18 nt, Artificial Sequence
  Synthetic
gcaaucaguaguuucuuu

SEQ ID NO: 421307 - RNA, 19 nt, Artificial Sequence
  Synthetic
ggcaaucaguaguuucuuu

SEQ ID NO: 421308 - RNA, 20 nt, Artificial Sequence
  Synthetic
uggcaaucaguaguuucuuu

SEQ ID NO: 421309 - RNA, 21 nt, Artificial Sequence
  Synthetic
guggcaaucaguaguuucuuu

SEQ ID NO: 421310 - RNA, 22 nt, Artificial Sequence
  Synthetic
uguggcaaucaguaguuucuuu

SEQ ID NO: 421311 - RNA, 23 nt, Artificial Sequence
  Synthetic
auguggcaaucaguaguuucuuu

SEQ ID NO: 421312 - RNA, 24 nt, Artificial Sequence
  Synthetic
cauguggcaaucaguaguuucuuu

SEQ ID NO: 421313 - RNA, 18 nt, Artificial Sequence
  Synthetic
uugggcuuuaguuucuuu

SEQ ID NO: 421314 - RNA, 19 nt, Artificial Sequence
  Synthetic
uuugggcuuuaguuucuuu

SEQ ID NO: 421315 - RNA, 20 nt, Artificial Sequence
  Synthetic
uuuugggcuuuaguuucuuu

SEQ ID NO: 421316 - RNA, 21 nt, Artificial Sequence
  Synthetic
auuuugggcuuuaguuucuuu

SEQ ID NO: 421317 - RNA, 22 nt, Artificial Sequence
  Synthetic
uauuuugggcuuuaguuucuuu

SEQ ID NO: 421318 - RNA, 23 nt, Artificial Sequence
  Synthetic
uuauuuugggcuuuaguuucuuu

SEQ ID NO: 421319 - RNA, 24 nt, Artificial Sequence
  Synthetic
uuuauuuugggcuuuaguuucuuu

SEQ ID NO: 421320 - RNA, 18 nt, Artificial Sequence
  Synthetic
ugagaauuuuguuucuuu

SEQ ID NO: 421321 - RNA, 19 nt, Artificial Sequence
  Synthetic
augagaauuuuguuucuuu

SEQ ID NO: 421322 - RNA, 20 nt, Artificial Sequence
  Synthetic
aaugagaauuuuguuucuuu

SEQ ID NO: 421323 - RNA, 21 nt, Artificial Sequence
  Synthetic
uaaugagaauuuuguuucuuu

SEQ ID NO: 421324 - RNA, 22 nt, Artificial Sequence
  Synthetic
auaaugagaauuuuguuucuuu

SEQ ID NO: 421325 - RNA, 23 nt, Artificial Sequence
  Synthetic
aauaaugagaauuuuguuucuuu

SEQ ID NO: 421326 - RNA, 24 nt, Artificial Sequence
  Synthetic
aaauaaugagaauuuuguuucuuu

SEQ ID NO: 421327 - RNA, 18 nt, Artificial Sequence
  Synthetic
uuacuuaaaauuuucuuu

SEQ ID NO: 421328 - RNA, 19 nt, Artificial Sequence
  Synthetic
auuacuuaaaauuuucuuu

SEQ ID NO: 421329 - RNA, 20 nt, Artificial Sequence
  Synthetic
uauuacuuaaaauuuucuuu

SEQ ID NO: 421330 - RNA, 21 nt, Artificial Sequence
  Synthetic
uuauuacuuaaaauuuucuuu

SEQ ID NO: 421331 - RNA, 22 nt, Artificial Sequence
  Synthetic
cuuauuacuuaaaauuuucuuu

SEQ ID NO: 421332 - RNA, 23 nt, Artificial Sequence
  Synthetic
gcuuauuacuuaaaauuuucuuu

SEQ ID NO: 421333 - RNA, 24 nt, Artificial Sequence
  Synthetic
ggcuuauuacuuaaaauuuucuuu

SEQ ID NO: 421334 - RNA, 18 nt, Artificial Sequence
  Synthetic
ccucaagacauuuucuuu

SEQ ID NO: 421335 - RNA, 19 nt, Artificial Sequence
  Synthetic
accucaagacauuuucuuu

SEQ ID NO: 421336 - RNA, 20 nt, Artificial Sequence
  Synthetic
aaccucaagacauuuucuuu

SEQ ID NO: 421337 - RNA, 21 nt, Artificial Sequence
  Synthetic
uaaccucaagacauuuucuuu

SEQ ID NO: 421338 - RNA, 22 nt, Artificial Sequence
  Synthetic
cuaaccucaagacauuuucuuu

SEQ ID NO: 421339 - RNA, 23 nt, Artificial Sequence
  Synthetic
ucuaaccucaagacauuuucuuu

SEQ ID NO: 421340 - RNA, 24 nt, Artificial Sequence
  Synthetic
uucuaaccucaagacauuuucuuu

SEQ ID NO: 421341 - RNA, 18 nt, Artificial Sequence
  Synthetic
gaauuuaagauuuucuuu

SEQ ID NO: 421342 - RNA, 19 nt, Artificial Sequence
  Synthetic
ggaauuuaagauuuucuuu

SEQ ID NO: 421343 - RNA, 20 nt, Artificial Sequence
  Synthetic
aggaauuuaagauuuucuuu

SEQ ID NO: 421344 - RNA, 21 nt, Artificial Sequence
  Synthetic
gaggaauuuaagauuuucuuu

SEQ ID NO: 421345 - RNA, 22 nt, Artificial Sequence
  Synthetic
cgaggaauuuaagauuuucuuu

SEQ ID NO: 421346 - RNA, 23 nt, Artificial Sequence
  Synthetic
ucgaggaauuuaagauuuucuuu

SEQ ID NO: 421347 - RNA, 24 nt, Artificial Sequence
  Synthetic
cucgaggaauuuaagauuuucuuu

SEQ ID NO: 421348 - RNA, 18 nt, Artificial Sequence
  Synthetic
aacuucuuuauuuucuuu

SEQ ID NO: 421349 - RNA, 19 nt, Artificial Sequence
  Synthetic
caacuucuuuauuuucuuu

SEQ ID NO: 421350 - RNA, 20 nt, Artificial Sequence
  Synthetic
ccaacuucuuuauuuucuuu

SEQ ID NO: 421351 - RNA, 21 nt, Artificial Sequence
  Synthetic
accaacuucuuuauuuucuuu

SEQ ID NO: 421352 - RNA, 22 nt, Artificial Sequence
  Synthetic
aaccaacuucuuuauuuucuuu

SEQ ID NO: 421353 - RNA, 23 nt, Artificial Sequence
  Synthetic
uaaccaacuucuuuauuuucuuu

SEQ ID NO: 421354 - RNA, 24 nt, Artificial Sequence
  Synthetic
cuaaccaacuucuuuauuuucuuu

SEQ ID NO: 421355 - RNA, 18 nt, Artificial Sequence
  Synthetic
gguaaggauguuuucuuu

SEQ ID NO: 421356 - RNA, 19 nt, Artificial Sequence
  Synthetic
ugguaaggauguuuucuuu

SEQ ID NO: 421357 - RNA, 20 nt, Artificial Sequence
  Synthetic
gugguaaggauguuuucuuu

SEQ ID NO: 421358 - RNA, 21 nt, Artificial Sequence
  Synthetic
agugguaaggauguuuucuuu

SEQ ID NO: 421359 - RNA, 22 nt, Artificial Sequence
  Synthetic
aagugguaaggauguuuucuuu

SEQ ID NO: 421360 - RNA, 23 nt, Artificial Sequence
  Synthetic
aaagugguaaggauguuuucuuu

SEQ ID NO: 421361 - RNA, 24 nt, Artificial Sequence
  Synthetic
uaaagugguaaggauguuuucuuu

SEQ ID NO: 421362 - RNA, 18 nt, Artificial Sequence
  Synthetic
uuuauuuucuuuuucuuu

SEQ ID NO: 421363 - RNA, 19 nt, Artificial Sequence
  Synthetic
auuuauuuucuuuuucuuu

SEQ ID NO: 421364 - RNA, 20 nt, Artificial Sequence
  Synthetic
uauuuauuuucuuuuucuuu

SEQ ID NO: 421365 - RNA, 21 nt, Artificial Sequence
  Synthetic
auauuuauuuucuuuuucuuu

SEQ ID NO: 421366 - RNA, 22 nt, Artificial Sequence
  Synthetic
aauauuuauuuucuuuuucuuu

SEQ ID NO: 421367 - RNA, 23 nt, Artificial Sequence
  Synthetic
caauauuuauuuucuuuuucuuu

SEQ ID NO: 421368 - RNA, 24 nt, Artificial Sequence
  Synthetic
acaauauuuauuuucuuuuucuuu

SEQ ID NO: 421369 - RNA, 18 nt, Artificial Sequence
  Synthetic
aagaggaaguaaaaguuu

SEQ ID NO: 421370 - RNA, 19 nt, Artificial Sequence
  Synthetic
gaagaggaaguaaaaguuu

SEQ ID NO: 421371 - RNA, 20 nt, Artificial Sequence
  Synthetic
ugaagaggaaguaaaaguuu

SEQ ID NO: 421372 - RNA, 21 nt, Artificial Sequence
  Synthetic
gugaagaggaaguaaaaguuu

SEQ ID NO: 421373 - RNA, 22 nt, Artificial Sequence
  Synthetic
agugaagaggaaguaaaaguuu

SEQ ID NO: 421374 - RNA, 23 nt, Artificial Sequence
  Synthetic
uagugaagaggaaguaaaaguuu

SEQ ID NO: 421375 - RNA, 24 nt, Artificial Sequence
  Synthetic
cuagugaagaggaaguaaaaguuu

SEQ ID NO: 421376 - RNA, 18 nt, Artificial Sequence
  Synthetic
uaaaagucuccaaaguuu

SEQ ID NO: 421377 - RNA, 19 nt, Artificial Sequence
  Synthetic
uuaaaagucuccaaaguuu

SEQ ID NO: 421378 - RNA, 20 nt, Artificial Sequence
  Synthetic
uuuaaaagucuccaaaguuu

SEQ ID NO: 421379 - RNA, 21 nt, Artificial Sequence
  Synthetic
uuuuaaaagucuccaaaguuu

SEQ ID NO: 421380 - RNA, 22 nt, Artificial Sequence
  Synthetic
uuuuuaaaagucuccaaaguuu

SEQ ID NO: 421381 - RNA, 23 nt, Artificial Sequence
  Synthetic
uuuuuuaaaagucuccaaaguuu

SEQ ID NO: 421382 - RNA, 24 nt, Artificial Sequence
  Synthetic
auuuuuuaaaagucuccaaaguuu

SEQ ID NO: 421383 - RNA, 18 nt, Artificial Sequence
  Synthetic
aggaaaauggcaaaguuu

SEQ ID NO: 421384 - RNA, 19 nt, Artificial Sequence
  Synthetic
caggaaaauggcaaaguuu

SEQ ID NO: 421385 - RNA, 20 nt, Artificial Sequence
  Synthetic
ccaggaaaauggcaaaguuu

SEQ ID NO: 421386 - RNA, 21 nt, Artificial Sequence
  Synthetic
cccaggaaaauggcaaaguuu

SEQ ID NO: 421387 - RNA, 22 nt, Artificial Sequence
  Synthetic
acccaggaaaauggcaaaguuu

SEQ ID NO: 421388 - RNA, 23 nt, Artificial Sequence
  Synthetic
aacccaggaaaauggcaaaguuu

SEQ ID NO: 421389 - RNA, 24 nt, Artificial Sequence
  Synthetic
gaacccaggaaaauggcaaaguuu

SEQ ID NO: 421390 - RNA, 18 nt, Artificial Sequence
  Synthetic
agacacauaucaaaguuu

SEQ ID NO: 421391 - RNA, 19 nt, Artificial Sequence
  Synthetic
uagacacauaucaaaguuu

SEQ ID NO: 421392 - RNA, 20 nt, Artificial Sequence
  Synthetic
uuagacacauaucaaaguuu

SEQ ID NO: 421393 - RNA, 21 nt, Artificial Sequence
  Synthetic
guuagacacauaucaaaguuu

SEQ ID NO: 421394 - RNA, 22 nt, Artificial Sequence
  Synthetic
cguuagacacauaucaaaguuu

SEQ ID NO: 421395 - RNA, 23 nt, Artificial Sequence
  Synthetic
acguuagacacauaucaaaguuu

SEQ ID NO: 421396 - RNA, 24 nt, Artificial Sequence
  Synthetic
uacguuagacacauaucaaaguuu

SEQ ID NO: 421397 - RNA, 18 nt, Artificial Sequence
  Synthetic
guauaaagaagaaaguuu

SEQ ID NO: 421398 - RNA, 19 nt, Artificial Sequence
  Synthetic
uguauaaagaagaaaguuu

SEQ ID NO: 421399 - RNA, 20 nt, Artificial Sequence
  Synthetic
auguauaaagaagaaaguuu

SEQ ID NO: 421400 - RNA, 21 nt, Artificial Sequence
  Synthetic
aauguauaaagaagaaaguuu

SEQ ID NO: 421401 - RNA, 22 nt, Artificial Sequence
  Synthetic
aaauguauaaagaagaaaguuu

SEQ ID NO: 421402 - RNA, 23 nt, Artificial Sequence
  Synthetic
gaaauguauaaagaagaaaguuu

SEQ ID NO: 421403 - RNA, 24 nt, Artificial Sequence
  Synthetic
ugaaauguauaaagaagaaaguuu

SEQ ID NO: 421404 - RNA, 18 nt, Artificial Sequence
  Synthetic
ccagauaauggaaaguuu

SEQ ID NO: 421405 - RNA, 19 nt, Artificial Sequence
  Synthetic
accagauaauggaaaguuu

SEQ ID NO: 421406 - RNA, 20 nt, Artificial Sequence
  Synthetic
aaccagauaauggaaaguuu

SEQ ID NO: 421407 - RNA, 21 nt, Artificial Sequence
  Synthetic
uaaccagauaauggaaaguuu

SEQ ID NO: 421408 - RNA, 22 nt, Artificial Sequence
  Synthetic
uuaaccagauaauggaaaguuu

SEQ ID NO: 421409 - RNA, 23 nt, Artificial Sequence
  Synthetic
auuaaccagauaauggaaaguuu

SEQ ID NO: 421410 - RNA, 24 nt, Artificial Sequence
  Synthetic
aauuaaccagauaauggaaaguuu

SEQ ID NO: 421411 - RNA, 19 nt, Artificial Sequence
  Synthetic
uccagauaauggaaaguuu

SEQ ID NO: 421412 - RNA, 20 nt, Artificial Sequence
  Synthetic
auccagauaauggaaaguuu

SEQ ID NO: 421413 - RNA, 21 nt, Artificial Sequence
  Synthetic
uauccagauaauggaaaguuu

SEQ ID NO: 421414 - RNA, 22 nt, Artificial Sequence
  Synthetic
uuauccagauaauggaaaguuu

SEQ ID NO: 421415 - RNA, 23 nt, Artificial Sequence
  Synthetic
auuauccagauaauggaaaguuu

SEQ ID NO: 421416 - RNA, 24 nt, Artificial Sequence
  Synthetic
aauuauccagauaauggaaaguuu

SEQ ID NO: 421417 - RNA, 18 nt, Artificial Sequence
  Synthetic
ugaugcacacuaaaguuu

SEQ ID NO: 421418 - RNA, 19 nt, Artificial Sequence
  Synthetic
uugaugcacacuaaaguuu

SEQ ID NO: 421419 - RNA, 20 nt, Artificial Sequence
  Synthetic
uuugaugcacacuaaaguuu

SEQ ID NO: 421420 - RNA, 21 nt, Artificial Sequence
  Synthetic
auuugaugcacacuaaaguuu

SEQ ID NO: 421421 - RNA, 22 nt, Artificial Sequence
  Synthetic
aauuugaugcacacuaaaguuu

SEQ ID NO: 421422 - RNA, 23 nt, Artificial Sequence
  Synthetic
uaauuugaugcacacuaaaguuu

SEQ ID NO: 421423 - RNA, 24 nt, Artificial Sequence
  Synthetic
guaauuugaugcacacuaaaguuu

SEQ ID NO: 421424 - RNA, 18 nt, Artificial Sequence
  Synthetic
augggcacauuaaaguuu

SEQ ID NO: 421425 - RNA, 19 nt, Artificial Sequence
  Synthetic
caugggcacauuaaaguuu

SEQ ID NO: 421426 - RNA, 20 nt, Artificial Sequence
  Synthetic
ucaugggcacauuaaaguuu

SEQ ID NO: 421427 - RNA, 21 nt, Artificial Sequence
  Synthetic
uucaugggcacauuaaaguuu

SEQ ID NO: 421428 - RNA, 22 nt, Artificial Sequence
  Synthetic
auucaugggcacauuaaaguuu

SEQ ID NO: 421429 - RNA, 23 nt, Artificial Sequence
  Synthetic
gauucaugggcacauuaaaguuu

SEQ ID NO: 421430 - RNA, 24 nt, Artificial Sequence
  Synthetic
ugauucaugggcacauuaaaguuu

SEQ ID NO: 421431 - RNA, 18 nt, Artificial Sequence
  Synthetic
cacugugcagacaaguuu

SEQ ID NO: 421432 - RNA, 19 nt, Artificial Sequence
  Synthetic
ucacugugcagacaaguuu

SEQ ID NO: 421433 - RNA, 20 nt, Artificial Sequence
  Synthetic
aucacugugcagacaaguuu

SEQ ID NO: 421434 - RNA, 21 nt, Artificial Sequence
  Synthetic
gaucacugugcagacaaguuu

SEQ ID NO: 421435 - RNA, 22 nt, Artificial Sequence
  Synthetic
agaucacugugcagacaaguuu

SEQ ID NO: 421436 - RNA, 23 nt, Artificial Sequence
  Synthetic
uagaucacugugcagacaaguuu

SEQ ID NO: 421437 - RNA, 24 nt, Artificial Sequence
  Synthetic
uuagaucacugugcagacaaguuu

SEQ ID NO: 421438 - RNA, 18 nt, Artificial Sequence
  Synthetic
ucaagcccacucaaguuu

SEQ ID NO: 421439 - RNA, 19 nt, Artificial Sequence
  Synthetic
cucaagcccacucaaguuu

SEQ ID NO: 421440 - RNA, 20 nt, Artificial Sequence
  Synthetic
ucucaagcccacucaaguuu

SEQ ID NO: 421441 - RNA, 21 nt, Artificial Sequence
  Synthetic
uucucaagcccacucaaguuu

SEQ ID NO: 421442 - RNA, 22 nt, Artificial Sequence
  Synthetic
auucucaagcccacucaaguuu

SEQ ID NO: 421443 - RNA, 23 nt, Artificial Sequence
  Synthetic
gauucucaagcccacucaaguuu

SEQ ID NO: 421444 - RNA, 24 nt, Artificial Sequence
  Synthetic
ugauucucaagcccacucaaguuu

SEQ ID NO: 421445 - RNA, 18 nt, Artificial Sequence
  Synthetic
cuccaaauguucaaguuu

SEQ ID NO: 421446 - RNA, 19 nt, Artificial Sequence
  Synthetic
acuccaaauguucaaguuu

SEQ ID NO: 421447 - RNA, 20 nt, Artificial Sequence
  Synthetic
cacuccaaauguucaaguuu

SEQ ID NO: 421448 - RNA, 21 nt, Artificial Sequence
  Synthetic
acacuccaaauguucaaguuu

SEQ ID NO: 421449 - RNA, 22 nt, Artificial Sequence
  Synthetic
gacacuccaaauguucaaguuu

SEQ ID NO: 421450 - RNA, 23 nt, Artificial Sequence
  Synthetic
ugacacuccaaauguucaaguuu

SEQ ID NO: 421451 - RNA, 24 nt, Artificial Sequence
  Synthetic
cugacacuccaaauguucaaguuu

SEQ ID NO: 421452 - RNA, 18 nt, Artificial Sequence
  Synthetic
aaauugagauagaaguuu

SEQ ID NO: 421453 - RNA, 19 nt, Artificial Sequence
  Synthetic
caaauugagauagaaguuu

SEQ ID NO: 421454 - RNA, 20 nt, Artificial Sequence
  Synthetic
gcaaauugagauagaaguuu

SEQ ID NO: 421455 - RNA, 21 nt, Artificial Sequence
  Synthetic
ggcaaauugagauagaaguuu

SEQ ID NO: 421456 - RNA, 22 nt, Artificial Sequence
  Synthetic
uggcaaauugagauagaaguuu

SEQ ID NO: 421457 - RNA, 23 nt, Artificial Sequence
  Synthetic
uuggcaaauugagauagaaguuu

SEQ ID NO: 421458 - RNA, 24 nt, Artificial Sequence
  Synthetic
uuuggcaaauugagauagaaguuu

SEQ ID NO: 421459 - RNA, 18 nt, Artificial Sequence
  Synthetic
auauucugguagaaguuu

SEQ ID NO: 421460 - RNA, 19 nt, Artificial Sequence
  Synthetic
cauauucugguagaaguuu

SEQ ID NO: 421461 - RNA, 20 nt, Artificial Sequence
  Synthetic
ucauauucugguagaaguuu

SEQ ID NO: 421462 - RNA, 21 nt, Artificial Sequence
  Synthetic
cucauauucugguagaaguuu

SEQ ID NO: 421463 - RNA, 22 nt, Artificial Sequence
  Synthetic
ccucauauucugguagaaguuu

SEQ ID NO: 421464 - RNA, 23 nt, Artificial Sequence
  Synthetic
accucauauucugguagaaguuu

SEQ ID NO: 421465 - RNA, 24 nt, Artificial Sequence
  Synthetic
uaccucauauucugguagaaguuu

SEQ ID NO: 421466 - RNA, 18 nt, Artificial Sequence
  Synthetic
gcauacguaaggaaguuu

SEQ ID NO: 421467 - RNA, 19 nt, Artificial Sequence
  Synthetic
agcauacguaaggaaguuu

SEQ ID NO: 421468 - RNA, 20 nt, Artificial Sequence
  Synthetic
cagcauacguaaggaaguuu

SEQ ID NO: 421469 - RNA, 21 nt, Artificial Sequence
  Synthetic
acagcauacguaaggaaguuu

SEQ ID NO: 421470 - RNA, 22 nt, Artificial Sequence
  Synthetic
uacagcauacguaaggaaguuu

SEQ ID NO: 421471 - RNA, 23 nt, Artificial Sequence
  Synthetic
guacagcauacguaaggaaguuu

SEQ ID NO: 421472 - RNA, 24 nt, Artificial Sequence
  Synthetic
aguacagcauacguaaggaaguuu

SEQ ID NO: 421473 - RNA, 18 nt, Artificial Sequence
  Synthetic
uuuccuuuagggaaguuu

SEQ ID NO: 421474 - RNA, 19 nt, Artificial Sequence
  Synthetic
guuuccuuuagggaaguuu

SEQ ID NO: 421475 - RNA, 20 nt, Artificial Sequence
  Synthetic
uguuuccuuuagggaaguuu

SEQ ID NO: 421476 - RNA, 21 nt, Artificial Sequence
  Synthetic
guguuuccuuuagggaaguuu

SEQ ID NO: 421477 - RNA, 22 nt, Artificial Sequence
  Synthetic
uguguuuccuuuagggaaguuu

SEQ ID NO: 421478 - RNA, 23 nt, Artificial Sequence
  Synthetic
auguguuuccuuuagggaaguuu

SEQ ID NO: 421479 - RNA, 24 nt, Artificial Sequence
  Synthetic
gauguguuuccuuuagggaaguuu

SEQ ID NO: 421480 - RNA, 18 nt, Artificial Sequence
  Synthetic
gucaggaggaauaaguuu

SEQ ID NO: 421481 - RNA, 19 nt, Artificial Sequence
  Synthetic
agucaggaggaauaaguuu

SEQ ID NO: 421482 - RNA, 20 nt, Artificial Sequence
  Synthetic
uagucaggaggaauaaguuu

SEQ ID NO: 421483 - RNA, 21 nt, Artificial Sequence
  Synthetic
uuagucaggaggaauaaguuu

SEQ ID NO: 421484 - RNA, 22 nt, Artificial Sequence
  Synthetic
uuuagucaggaggaauaaguuu

SEQ ID NO: 421485 - RNA, 23 nt, Artificial Sequence
  Synthetic
cuuuagucaggaggaauaaguuu

SEQ ID NO: 421486 - RNA, 24 nt, Artificial Sequence
  Synthetic
acuuuagucaggaggaauaaguuu

SEQ ID NO: 421487 - RNA, 18 nt, Artificial Sequence
  Synthetic
cacaagcugaauaaguuu

SEQ ID NO: 421488 - RNA, 19 nt, Artificial Sequence
  Synthetic
ucacaagcugaauaaguuu

SEQ ID NO: 421489 - RNA, 20 nt, Artificial Sequence
  Synthetic
aucacaagcugaauaaguuu

SEQ ID NO: 421490 - RNA, 21 nt, Artificial Sequence
  Synthetic
aaucacaagcugaauaaguuu

SEQ ID NO: 421491 - RNA, 22 nt, Artificial Sequence
  Synthetic
gaaucacaagcugaauaaguuu

SEQ ID NO: 421492 - RNA, 23 nt, Artificial Sequence
  Synthetic
agaaucacaagcugaauaaguuu

SEQ ID NO: 421493 - RNA, 24 nt, Artificial Sequence
  Synthetic
aagaaucacaagcugaauaaguuu

SEQ ID NO: 421494 - RNA, 18 nt, Artificial Sequence
  Synthetic
aaauuuuaccauaaguuu

SEQ ID NO: 421495 - RNA, 19 nt, Artificial Sequence
  Synthetic
uaaauuuuaccauaaguuu

SEQ ID NO: 421496 - RNA, 20 nt, Artificial Sequence
  Synthetic
uuaaauuuuaccauaaguuu

SEQ ID NO: 421497 - RNA, 21 nt, Artificial Sequence
  Synthetic
auuaaauuuuaccauaaguuu

SEQ ID NO: 421498 - RNA, 22 nt, Artificial Sequence
  Synthetic
aauuaaauuuuaccauaaguuu

SEQ ID NO: 421499 - RNA, 23 nt, Artificial Sequence
  Synthetic
caauuaaauuuuaccauaaguuu

SEQ ID NO: 421500 - RNA, 24 nt, Artificial Sequence
  Synthetic
gcaauuaaauuuuaccauaaguuu

SEQ ID NO: 421501 - RNA, 18 nt, Artificial Sequence
  Synthetic
gaauguaaauauaaguuu

SEQ ID NO: 421502 - RNA, 19 nt, Artificial Sequence
  Synthetic
agaauguaaauauaaguuu

SEQ ID NO: 421503 - RNA, 20 nt, Artificial Sequence
  Synthetic
gagaauguaaauauaaguuu

SEQ ID NO: 421504 - RNA, 21 nt, Artificial Sequence
  Synthetic
ugagaauguaaauauaaguuu

SEQ ID NO: 421505 - RNA, 22 nt, Artificial Sequence
  Synthetic
augagaauguaaauauaaguuu

SEQ ID NO: 421506 - RNA, 23 nt, Artificial Sequence
  Synthetic
caugagaauguaaauauaaguuu

SEQ ID NO: 421507 - RNA, 24 nt, Artificial Sequence
  Synthetic
gcaugagaauguaaauauaaguuu

SEQ ID NO: 421508 - RNA, 18 nt, Artificial Sequence
  Synthetic
guaaggaaguauaaguuu

SEQ ID NO: 421509 - RNA, 19 nt, Artificial Sequence
  Synthetic
uguaaggaaguauaaguuu

SEQ ID NO: 421510 - RNA, 20 nt, Artificial Sequence
  Synthetic
guguaaggaaguauaaguuu

SEQ ID NO: 421511 - RNA, 21 nt, Artificial Sequence
  Synthetic
aguguaaggaaguauaaguuu

SEQ ID NO: 421512 - RNA, 22 nt, Artificial Sequence
  Synthetic
gaguguaaggaaguauaaguuu

SEQ ID NO: 421513 - RNA, 23 nt, Artificial Sequence
  Synthetic
ugaguguaaggaaguauaaguuu

SEQ ID NO: 421514 - RNA, 24 nt, Artificial Sequence
  Synthetic
gugaguguaaggaaguauaaguuu

SEQ ID NO: 421515 - RNA, 18 nt, Artificial Sequence
  Synthetic
aucaaguaaacuaaguuu

SEQ ID NO: 421516 - RNA, 19 nt, Artificial Sequence
  Synthetic
uaucaaguaaacuaaguuu

SEQ ID NO: 421517 - RNA, 20 nt, Artificial Sequence
  Synthetic
auaucaaguaaacuaaguuu

SEQ ID NO: 421518 - RNA, 21 nt, Artificial Sequence
  Synthetic
gauaucaaguaaacuaaguuu

SEQ ID NO: 421519 - RNA, 22 nt, Artificial Sequence
  Synthetic
agauaucaaguaaacuaaguuu

SEQ ID NO: 421520 - RNA, 23 nt, Artificial Sequence
  Synthetic
aagauaucaaguaaacuaaguuu

SEQ ID NO: 421521 - RNA, 24 nt, Artificial Sequence
  Synthetic
uaagauaucaaguaaacuaaguuu

SEQ ID NO: 421522 - RNA, 18 nt, Artificial Sequence
  Synthetic
uucauugcuucuaaguuu

SEQ ID NO: 421523 - RNA, 19 nt, Artificial Sequence
  Synthetic
uuucauugcuucuaaguuu

SEQ ID NO: 421524 - RNA, 20 nt, Artificial Sequence
  Synthetic
cuuucauugcuucuaaguuu

SEQ ID NO: 421525 - RNA, 21 nt, Artificial Sequence
  Synthetic
ccuuucauugcuucuaaguuu

SEQ ID NO: 421526 - RNA, 22 nt, Artificial Sequence
  Synthetic
accuuucauugcuucuaaguuu

SEQ ID NO: 421527 - RNA, 23 nt, Artificial Sequence
  Synthetic
uaccuuucauugcuucuaaguuu

SEQ ID NO: 421528 - RNA, 24 nt, Artificial Sequence
  Synthetic
guaccuuucauugcuucuaaguuu

SEQ ID NO: 421529 - RNA, 18 nt, Artificial Sequence
  Synthetic
uaagacaaaaguaaguuu

SEQ ID NO: 421530 - RNA, 19 nt, Artificial Sequence
  Synthetic
uuaagacaaaaguaaguuu

SEQ ID NO: 421531 - RNA, 20 nt, Artificial Sequence
  Synthetic
guuaagacaaaaguaaguuu

SEQ ID NO: 421532 - RNA, 21 nt, Artificial Sequence
  Synthetic
gguuaagacaaaaguaaguuu

SEQ ID NO: 421533 - RNA, 22 nt, Artificial Sequence
  Synthetic
ugguuaagacaaaaguaaguuu

SEQ ID NO: 421534 - RNA, 23 nt, Artificial Sequence
  Synthetic
gugguuaagacaaaaguaaguuu

SEQ ID NO: 421535 - RNA, 24 nt, Artificial Sequence
  Synthetic
ugugguuaagacaaaaguaaguuu

SEQ ID NO: 421536 - RNA, 18 nt, Artificial Sequence
  Synthetic
uuuuaggccaguaaguuu

SEQ ID NO: 421537 - RNA, 19 nt, Artificial Sequence
  Synthetic
guuuuaggccaguaaguuu

SEQ ID NO: 421538 - RNA, 20 nt, Artificial Sequence
  Synthetic
uguuuuaggccaguaaguuu

SEQ ID NO: 421539 - RNA, 21 nt, Artificial Sequence
  Synthetic
uuguuuuaggccaguaaguuu

SEQ ID NO: 421540 - RNA, 22 nt, Artificial Sequence
  Synthetic
guuguuuuaggccaguaaguuu

SEQ ID NO: 421541 - RNA, 23 nt, Artificial Sequence
  Synthetic
uguuguuuuaggccaguaaguuu

SEQ ID NO: 421542 - RNA, 24 nt, Artificial Sequence
  Synthetic
guguuguuuuaggccaguaaguuu

SEQ ID NO: 421543 - RNA, 18 nt, Artificial Sequence
  Synthetic
gagagcaauuguaaguuu

SEQ ID NO: 421544 - RNA, 19 nt, Artificial Sequence
  Synthetic
ugagagcaauuguaaguuu

SEQ ID NO: 421545 - RNA, 20 nt, Artificial Sequence
  Synthetic
augagagcaauuguaaguuu

SEQ ID NO: 421546 - RNA, 21 nt, Artificial Sequence
  Synthetic
gaugagagcaauuguaaguuu

SEQ ID NO: 421547 - RNA, 22 nt, Artificial Sequence
  Synthetic
agaugagagcaauuguaaguuu

SEQ ID NO: 421548 - RNA, 23 nt, Artificial Sequence
  Synthetic
gagaugagagcaauuguaaguuu

SEQ ID NO: 421549 - RNA, 24 nt, Artificial Sequence
  Synthetic
ugagaugagagcaauuguaaguuu

SEQ ID NO: 421550 - RNA, 18 nt, Artificial Sequence
  Synthetic
cuccaugauuguaaguuu

SEQ ID NO: 421551 - RNA, 19 nt, Artificial Sequence
  Synthetic
ccuccaugauuguaaguuu

SEQ ID NO: 421552 - RNA, 20 nt, Artificial Sequence
  Synthetic
uccuccaugauuguaaguuu

SEQ ID NO: 421553 - RNA, 21 nt, Artificial Sequence
  Synthetic
uuccuccaugauuguaaguuu

SEQ ID NO: 421554 - RNA, 22 nt, Artificial Sequence
  Synthetic
cuuccuccaugauuguaaguuu

SEQ ID NO: 421555 - RNA, 23 nt, Artificial Sequence
  Synthetic
ccuuccuccaugauuguaaguuu

SEQ ID NO: 421556 - RNA, 24 nt, Artificial Sequence
  Synthetic
gccuuccuccaugauuguaaguuu

SEQ ID NO: 421557 - RNA, 18 nt, Artificial Sequence
  Synthetic
cauaguuuucuuaaguuu

SEQ ID NO: 421558 - RNA, 19 nt, Artificial Sequence
  Synthetic
acauaguuuucuuaaguuu

SEQ ID NO: 421559 - RNA, 20 nt, Artificial Sequence
  Synthetic
aacauaguuuucuuaaguuu

SEQ ID NO: 421560 - RNA, 21 nt, Artificial Sequence
  Synthetic
caacauaguuuucuuaaguuu

SEQ ID NO: 421561 - RNA, 22 nt, Artificial Sequence
  Synthetic
ucaacauaguuuucuuaaguuu

SEQ ID NO: 421562 - RNA, 23 nt, Artificial Sequence
  Synthetic
uucaacauaguuuucuuaaguuu

SEQ ID NO: 421563 - RNA, 24 nt, Artificial Sequence
  Synthetic
auucaacauaguuuucuuaaguuu

SEQ ID NO: 421564 - RNA, 18 nt, Artificial Sequence
  Synthetic
uuauuauacuuuaaguuu

SEQ ID NO: 421565 - RNA, 19 nt, Artificial Sequence
  Synthetic
auuauuauacuuuaaguuu

SEQ ID NO: 421566 - RNA, 20 nt, Artificial Sequence
  Synthetic
uauuauuauacuuuaaguuu

SEQ ID NO: 421567 - RNA, 21 nt, Artificial Sequence
  Synthetic
uuauuauuauacuuuaaguuu

SEQ ID NO: 421568 - RNA, 22 nt, Artificial Sequence
  Synthetic
uuuauuauuauacuuuaaguuu

SEQ ID NO: 421569 - RNA, 23 nt, Artificial Sequence
  Synthetic
auuuauuauuauacuuuaaguuu

SEQ ID NO: 421570 - RNA, 24 nt, Artificial Sequence
  Synthetic
aauuuauuauuauacuuuaaguuu

SEQ ID NO: 421571 - RNA, 18 nt, Artificial Sequence
  Synthetic
aguucuauuuuuaaguuu

SEQ ID NO: 421572 - RNA, 19 nt, Artificial Sequence
  Synthetic
uaguucuauuuuuaaguuu

SEQ ID NO: 421573 - RNA, 20 nt, Artificial Sequence
  Synthetic
guaguucuauuuuuaaguuu

SEQ ID NO: 421574 - RNA, 21 nt, Artificial Sequence
  Synthetic
gguaguucuauuuuuaaguuu

SEQ ID NO: 421575 - RNA, 22 nt, Artificial Sequence
  Synthetic
ugguaguucuauuuuuaaguuu

SEQ ID NO: 421576 - RNA, 23 nt, Artificial Sequence
  Synthetic
augguaguucuauuuuuaaguuu

SEQ ID NO: 421577 - RNA, 24 nt, Artificial Sequence
  Synthetic
uaugguaguucuauuuuuaaguuu

SEQ ID NO: 421578 - RNA, 18 nt, Artificial Sequence
  Synthetic
ucugagcagaaacaguuu

SEQ ID NO: 421579 - RNA, 19 nt, Artificial Sequence
  Synthetic
uucugagcagaaacaguuu

SEQ ID NO: 421580 - RNA, 20 nt, Artificial Sequence
  Synthetic
uuucugagcagaaacaguuu

SEQ ID NO: 421581 - RNA, 21 nt, Artificial Sequence
  Synthetic
cuuucugagcagaaacaguuu

SEQ ID NO: 421582 - RNA, 22 nt, Artificial Sequence
  Synthetic
ucuuucugagcagaaacaguuu

SEQ ID NO: 421583 - RNA, 23 nt, Artificial Sequence
  Synthetic
uucuuucugagcagaaacaguuu

SEQ ID NO: 421584 - RNA, 24 nt, Artificial Sequence
  Synthetic
cuucuuucugagcagaaacaguuu

SEQ ID NO: 421585 - RNA, 18 nt, Artificial Sequence
  Synthetic
uauggguuucaacaguuu

SEQ ID NO: 421586 - RNA, 19 nt, Artificial Sequence
  Synthetic
uuauggguuucaacaguuu

SEQ ID NO: 421587 - RNA, 20 nt, Artificial Sequence
  Synthetic
auuauggguuucaacaguuu

SEQ ID NO: 421588 - RNA, 21 nt, Artificial Sequence
  Synthetic
aauuauggguuucaacaguuu

SEQ ID NO: 421589 - RNA, 22 nt, Artificial Sequence
  Synthetic
aaauuauggguuucaacaguuu

SEQ ID NO: 421590 - RNA, 23 nt, Artificial Sequence
  Synthetic
aaaauuauggguuucaacaguuu

SEQ ID NO: 421591 - RNA, 24 nt, Artificial Sequence
  Synthetic
caaaauuauggguuucaacaguuu

SEQ ID NO: 421592 - RNA, 18 nt, Artificial Sequence
  Synthetic
guuuuaugaacacaguuu

SEQ ID NO: 421593 - RNA, 19 nt, Artificial Sequence
  Synthetic
aguuuuaugaacacaguuu

SEQ ID NO: 421594 - RNA, 20 nt, Artificial Sequence
  Synthetic
aaguuuuaugaacacaguuu

SEQ ID NO: 421595 - RNA, 21 nt, Artificial Sequence
  Synthetic
caaguuuuaugaacacaguuu

SEQ ID NO: 421596 - RNA, 22 nt, Artificial Sequence
  Synthetic
ucaaguuuuaugaacacaguuu

SEQ ID NO: 421597 - RNA, 23 nt, Artificial Sequence
  Synthetic
uucaaguuuuaugaacacaguuu

SEQ ID NO: 421598 - RNA, 24 nt, Artificial Sequence
  Synthetic
uuucaaguuuuaugaacacaguuu

SEQ ID NO: 421599 - RNA, 18 nt, Artificial Sequence
  Synthetic
auuauuugccuacaguuu

SEQ ID NO: 421600 - RNA, 19 nt, Artificial Sequence
  Synthetic
aauuauuugccuacaguuu

SEQ ID NO: 421601 - RNA, 20 nt, Artificial Sequence
  Synthetic
gaauuauuugccuacaguuu

SEQ ID NO: 421602 - RNA, 21 nt, Artificial Sequence
  Synthetic
agaauuauuugccuacaguuu

SEQ ID NO: 421603 - RNA, 22 nt, Artificial Sequence
  Synthetic
aagaauuauuugccuacaguuu

SEQ ID NO: 421604 - RNA, 23 nt, Artificial Sequence
  Synthetic
gaagaauuauuugccuacaguuu

SEQ ID NO: 421605 - RNA, 24 nt, Artificial Sequence
  Synthetic
agaagaauuauuugccuacaguuu

SEQ ID NO: 421606 - RNA, 18 nt, Artificial Sequence
  Synthetic
aauauaagaaaccaguuu

SEQ ID NO: 421607 - RNA, 19 nt, Artificial Sequence
  Synthetic
gaauauaagaaaccaguuu

SEQ ID NO: 421608 - RNA, 20 nt, Artificial Sequence
  Synthetic
ugaauauaagaaaccaguuu

SEQ ID NO: 421609 - RNA, 21 nt, Artificial Sequence
  Synthetic
augaauauaagaaaccaguuu

SEQ ID NO: 421610 - RNA, 22 nt, Artificial Sequence
  Synthetic
aaugaauauaagaaaccaguuu

SEQ ID NO: 421611 - RNA, 23 nt, Artificial Sequence
  Synthetic
uaaugaauauaagaaaccaguuu

SEQ ID NO: 421612 - RNA, 24 nt, Artificial Sequence
  Synthetic
guaaugaauauaagaaaccaguuu

SEQ ID NO: 421613 - RNA, 18 nt, Artificial Sequence
  Synthetic
ugguaugcauagcaguuu

SEQ ID NO: 421614 - RNA, 19 nt, Artificial Sequence
  Synthetic
augguaugcauagcaguuu

SEQ ID NO: 421615 - RNA, 20 nt, Artificial Sequence
  Synthetic
caugguaugcauagcaguuu

SEQ ID NO: 421616 - RNA, 21 nt, Artificial Sequence
  Synthetic
acaugguaugcauagcaguuu

SEQ ID NO: 421617 - RNA, 22 nt, Artificial Sequence
  Synthetic
uacaugguaugcauagcaguuu

SEQ ID NO: 421618 - RNA, 23 nt, Artificial Sequence
  Synthetic
auacaugguaugcauagcaguuu

SEQ ID NO: 421619 - RNA, 24 nt, Artificial Sequence
  Synthetic
cauacaugguaugcauagcaguuu

SEQ ID NO: 421620 - RNA, 18 nt, Artificial Sequence
  Synthetic
uguguuuucaugcaguuu

SEQ ID NO: 421621 - RNA, 19 nt, Artificial Sequence
  Synthetic
uuguguuuucaugcaguuu

SEQ ID NO: 421622 - RNA, 20 nt, Artificial Sequence
  Synthetic
auuguguuuucaugcaguuu

SEQ ID NO: 421623 - RNA, 21 nt, Artificial Sequence
  Synthetic
uauuguguuuucaugcaguuu

SEQ ID NO: 421624 - RNA, 22 nt, Artificial Sequence
  Synthetic
cuauuguguuuucaugcaguuu

SEQ ID NO: 421625 - RNA, 23 nt, Artificial Sequence
  Synthetic
ucuauuguguuuucaugcaguuu

SEQ ID NO: 421626 - RNA, 24 nt, Artificial Sequence
  Synthetic
aucuauuguguuuucaugcaguuu

SEQ ID NO: 421627 - RNA, 18 nt, Artificial Sequence
  Synthetic
agcaauguuuugcaguuu

SEQ ID NO: 421628 - RNA, 19 nt, Artificial Sequence
  Synthetic
uagcaauguuuugcaguuu

SEQ ID NO: 421629 - RNA, 20 nt, Artificial Sequence
  Synthetic
uuagcaauguuuugcaguuu

SEQ ID NO: 421630 - RNA, 21 nt, Artificial Sequence
  Synthetic
guuagcaauguuuugcaguuu

SEQ ID NO: 421631 - RNA, 22 nt, Artificial Sequence
  Synthetic
uguuagcaauguuuugcaguuu

SEQ ID NO: 421632 - RNA, 23 nt, Artificial Sequence
  Synthetic
auguuagcaauguuuugcaguuu

SEQ ID NO: 421633 - RNA, 24 nt, Artificial Sequence
  Synthetic
uauguuagcaauguuuugcaguuu

SEQ ID NO: 421634 - RNA, 18 nt, Artificial Sequence
  Synthetic
aaauuucaacaucaguuu

SEQ ID NO: 421635 - RNA, 19 nt, Artificial Sequence
  Synthetic
uaaauuucaacaucaguuu

SEQ ID NO: 421636 - RNA, 20 nt, Artificial Sequence
  Synthetic
uuaaauuucaacaucaguuu

SEQ ID NO: 421637 - RNA, 21 nt, Artificial Sequence
  Synthetic
auuaaauuucaacaucaguuu

SEQ ID NO: 421638 - RNA, 22 nt, Artificial Sequence
  Synthetic
aauuaaauuucaacaucaguuu

SEQ ID NO: 421639 - RNA, 23 nt, Artificial Sequence
  Synthetic
caauuaaauuucaacaucaguuu

SEQ ID NO: 421640 - RNA, 24 nt, Artificial Sequence
  Synthetic
gcaauuaaauuucaacaucaguuu

SEQ ID NO: 421641 - RNA, 18 nt, Artificial Sequence
  Synthetic
auuggugaucaucaguuu

SEQ ID NO: 421642 - RNA, 19 nt, Artificial Sequence
  Synthetic
cauuggugaucaucaguuu

SEQ ID NO: 421643 - RNA, 20 nt, Artificial Sequence
  Synthetic
ucauuggugaucaucaguuu

SEQ ID NO: 421644 - RNA, 21 nt, Artificial Sequence
  Synthetic
uucauuggugaucaucaguuu

SEQ ID NO: 421645 - RNA, 22 nt, Artificial Sequence
  Synthetic
auucauuggugaucaucaguuu

SEQ ID NO: 421646 - RNA, 23 nt, Artificial Sequence
  Synthetic
cauucauuggugaucaucaguuu

SEQ ID NO: 421647 - RNA, 24 nt, Artificial Sequence
  Synthetic
ccauucauuggugaucaucaguuu

SEQ ID NO: 421648 - RNA, 18 nt, Artificial Sequence
  Synthetic
gggaaaaaauaucaguuu

SEQ ID NO: 421649 - RNA, 19 nt, Artificial Sequence
  Synthetic
ggggaaaaaauaucaguuu

SEQ ID NO: 421650 - RNA, 20 nt, Artificial Sequence
  Synthetic
gggggaaaaaauaucaguuu

SEQ ID NO: 421651 - RNA, 21 nt, Artificial Sequence
  Synthetic
ugggggaaaaaauaucaguuu

SEQ ID NO: 421652 - RNA, 22 nt, Artificial Sequence
  Synthetic
cugggggaaaaaauaucaguuu

SEQ ID NO: 421653 - RNA, 23 nt, Artificial Sequence
  Synthetic
gcugggggaaaaaauaucaguuu

SEQ ID NO: 421654 - RNA, 24 nt, Artificial Sequence
  Synthetic
ugcugggggaaaaaauaucaguuu

SEQ ID NO: 421655 - RNA, 18 nt, Artificial Sequence
  Synthetic
aaauguagcccucaguuu

SEQ ID NO: 421656 - RNA, 19 nt, Artificial Sequence
  Synthetic
aaaauguagcccucaguuu

SEQ ID NO: 421657 - RNA, 20 nt, Artificial Sequence
  Synthetic
uaaaauguagcccucaguuu

SEQ ID NO: 421658 - RNA, 21 nt, Artificial Sequence
  Synthetic
uuaaaauguagcccucaguuu

SEQ ID NO: 421659 - RNA, 22 nt, Artificial Sequence
  Synthetic
uuuaaaauguagcccucaguuu

SEQ ID NO: 421660 - RNA, 23 nt, Artificial Sequence
  Synthetic
auuuaaaauguagcccucaguuu

SEQ ID NO: 421661 - RNA, 24 nt, Artificial Sequence
  Synthetic
gauuuaaaauguagcccucaguuu

SEQ ID NO: 421662 - RNA, 18 nt, Artificial Sequence
  Synthetic
gaguucaucgcucaguuu

SEQ ID NO: 421663 - RNA, 19 nt, Artificial Sequence
  Synthetic
ggaguucaucgcucaguuu

SEQ ID NO: 421664 - RNA, 20 nt, Artificial Sequence
  Synthetic
aggaguucaucgcucaguuu

SEQ ID NO: 421665 - RNA, 21 nt, Artificial Sequence
  Synthetic
aaggaguucaucgcucaguuu

SEQ ID NO: 421666 - RNA, 22 nt, Artificial Sequence
  Synthetic
aaaggaguucaucgcucaguuu

SEQ ID NO: 421667 - RNA, 23 nt, Artificial Sequence
  Synthetic
aaaaggaguucaucgcucaguuu

SEQ ID NO: 421668 - RNA, 24 nt, Artificial Sequence
  Synthetic
aaaaaggaguucaucgcucaguuu

SEQ ID NO: 421669 - RNA, 18 nt, Artificial Sequence
  Synthetic
aaaaauuucagucaguuu

SEQ ID NO: 421670 - RNA, 19 nt, Artificial Sequence
  Synthetic
gaaaaauuucagucaguuu

SEQ ID NO: 421671 - RNA, 20 nt, Artificial Sequence
  Synthetic
agaaaaauuucagucaguuu

SEQ ID NO: 421672 - RNA, 21 nt, Artificial Sequence
  Synthetic
uagaaaaauuucagucaguuu

SEQ ID NO: 421673 - RNA, 22 nt, Artificial Sequence
  Synthetic
auagaaaaauuucagucaguuu

SEQ ID NO: 421674 - RNA, 23 nt, Artificial Sequence
  Synthetic
aauagaaaaauuucagucaguuu

SEQ ID NO: 421675 - RNA, 24 nt, Artificial Sequence
  Synthetic
aaauagaaaaauuucagucaguuu

SEQ ID NO: 421676 - RNA, 18 nt, Artificial Sequence
  Synthetic
uuuuuccccugucaguuu

SEQ ID NO: 421677 - RNA, 19 nt, Artificial Sequence
  Synthetic
uuuuuuccccugucaguuu

SEQ ID NO: 421678 - RNA, 20 nt, Artificial Sequence
  Synthetic
auuuuuuccccugucaguuu

SEQ ID NO: 421679 - RNA, 21 nt, Artificial Sequence
  Synthetic
uauuuuuuccccugucaguuu

SEQ ID NO: 421680 - RNA, 22 nt, Artificial Sequence
  Synthetic
uuauuuuuuccccugucaguuu

SEQ ID NO: 421681 - RNA, 23 nt, Artificial Sequence
  Synthetic
uuuauuuuuuccccugucaguuu

SEQ ID NO: 421682 - RNA, 24 nt, Artificial Sequence
  Synthetic
auuuauuuuuuccccugucaguuu

SEQ ID NO: 421683 - RNA, 18 nt, Artificial Sequence
  Synthetic
aguuuuccaaaagaguuu

SEQ ID NO: 421684 - RNA, 19 nt, Artificial Sequence
  Synthetic
uaguuuuccaaaagaguuu

SEQ ID NO: 421685 - RNA, 20 nt, Artificial Sequence
  Synthetic
uuaguuuuccaaaagaguuu

SEQ ID NO: 421686 - RNA, 21 nt, Artificial Sequence
  Synthetic
uuuaguuuuccaaaagaguuu

SEQ ID NO: 421687 - RNA, 22 nt, Artificial Sequence
  Synthetic
cuuuaguuuuccaaaagaguuu

SEQ ID NO: 421688 - RNA, 23 nt, Artificial Sequence
  Synthetic
ucuuuaguuuuccaaaagaguuu

SEQ ID NO: 421689 - RNA, 24 nt, Artificial Sequence
  Synthetic
cucuuuaguuuuccaaaagaguuu

SEQ ID NO: 421690 - RNA, 18 nt, Artificial Sequence
  Synthetic
uaucagcuuaaagaguuu

SEQ ID NO: 421691 - RNA, 19 nt, Artificial Sequence
  Synthetic
uuaucagcuuaaagaguuu

SEQ ID NO: 421692 - RNA, 20 nt, Artificial Sequence
  Synthetic
cuuaucagcuuaaagaguuu

SEQ ID NO: 421693 - RNA, 21 nt, Artificial Sequence
  Synthetic
gcuuaucagcuuaaagaguuu

SEQ ID NO: 421694 - RNA, 22 nt, Artificial Sequence
  Synthetic
ugcuuaucagcuuaaagaguuu

SEQ ID NO: 421695 - RNA, 23 nt, Artificial Sequence
  Synthetic
uugcuuaucagcuuaaagaguuu

SEQ ID NO: 421696 - RNA, 24 nt, Artificial Sequence
  Synthetic
guugcuuaucagcuuaaagaguuu

SEQ ID NO: 421697 - RNA, 18 nt, Artificial Sequence
  Synthetic
cuuuuaugagaagaguuu

SEQ ID NO: 421698 - RNA, 19 nt, Artificial Sequence
  Synthetic
acuuuuaugagaagaguuu

SEQ ID NO: 421699 - RNA, 20 nt, Artificial Sequence
  Synthetic
aacuuuuaugagaagaguuu

SEQ ID NO: 421700 - RNA, 21 nt, Artificial Sequence
  Synthetic
aaacuuuuaugagaagaguuu

SEQ ID NO: 421701 - RNA, 22 nt, Artificial Sequence
  Synthetic
aaaacuuuuaugagaagaguuu

SEQ ID NO: 421702 - RNA, 23 nt, Artificial Sequence
  Synthetic
gaaaacuuuuaugagaagaguuu

SEQ ID NO: 421703 - RNA, 24 nt, Artificial Sequence
  Synthetic
cgaaaacuuuuaugagaagaguuu

SEQ ID NO: 421704 - RNA, 18 nt, Artificial Sequence
  Synthetic
uagaaagaugaagaguuu

SEQ ID NO: 421705 - RNA, 19 nt, Artificial Sequence
  Synthetic
uuagaaagaugaagaguuu

SEQ ID NO: 421706 - RNA, 20 nt, Artificial Sequence
  Synthetic
uuuagaaagaugaagaguuu

SEQ ID NO: 421707 - RNA, 21 nt, Artificial Sequence
  Synthetic
guuuagaaagaugaagaguuu

SEQ ID NO: 421708 - RNA, 22 nt, Artificial Sequence
  Synthetic
aguuuagaaagaugaagaguuu

SEQ ID NO: 421709 - RNA, 23 nt, Artificial Sequence
  Synthetic
caguuuagaaagaugaagaguuu

SEQ ID NO: 421710 - RNA, 24 nt, Artificial Sequence
  Synthetic
ucaguuuagaaagaugaagaguuu

SEQ ID NO: 421711 - RNA, 18 nt, Artificial Sequence
  Synthetic
ccuacuaaaucagaguuu

SEQ ID NO: 421712 - RNA, 19 nt, Artificial Sequence
  Synthetic
gccuacuaaaucagaguuu

SEQ ID NO: 421713 - RNA, 20 nt, Artificial Sequence
  Synthetic
agccuacuaaaucagaguuu

SEQ ID NO: 421714 - RNA, 21 nt, Artificial Sequence
  Synthetic
aagccuacuaaaucagaguuu

SEQ ID NO: 421715 - RNA, 22 nt, Artificial Sequence
  Synthetic
caagccuacuaaaucagaguuu

SEQ ID NO: 421716 - RNA, 23 nt, Artificial Sequence
  Synthetic
ccaagccuacuaaaucagaguuu

SEQ ID NO: 421717 - RNA, 24 nt, Artificial Sequence
  Synthetic
cccaagccuacuaaaucagaguuu

SEQ ID NO: 421718 - RNA, 18 nt, Artificial Sequence
  Synthetic
guaaauugcucagaguuu

SEQ ID NO: 421719 - RNA, 19 nt, Artificial Sequence
  Synthetic
uguaaauugcucagaguuu

SEQ ID NO: 421720 - RNA, 20 nt, Artificial Sequence
  Synthetic
uuguaaauugcucagaguuu

SEQ ID NO: 421721 - RNA, 21 nt, Artificial Sequence
  Synthetic
uuuguaaauugcucagaguuu

SEQ ID NO: 421722 - RNA, 22 nt, Artificial Sequence
  Synthetic
auuuguaaauugcucagaguuu

SEQ ID NO: 421723 - RNA, 23 nt, Artificial Sequence
  Synthetic
aauuuguaaauugcucagaguuu

SEQ ID NO: 421724 - RNA, 24 nt, Artificial Sequence
  Synthetic
gaauuuguaaauugcucagaguuu

SEQ ID NO: 421725 - RNA, 18 nt, Artificial Sequence
  Synthetic
uuuaggauuucagaguuu

SEQ ID NO: 421726 - RNA, 19 nt, Artificial Sequence
  Synthetic
guuuaggauuucagaguuu

SEQ ID NO: 421727 - RNA, 20 nt, Artificial Sequence
  Synthetic
uguuuaggauuucagaguuu

SEQ ID NO: 421728 - RNA, 21 nt, Artificial Sequence
  Synthetic
uuguuuaggauuucagaguuu

SEQ ID NO: 421729 - RNA, 22 nt, Artificial Sequence
  Synthetic
uuuguuuaggauuucagaguuu

SEQ ID NO: 421730 - RNA, 23 nt, Artificial Sequence
  Synthetic
auuuguuuaggauuucagaguuu

SEQ ID NO: 421731 - RNA, 24 nt, Artificial Sequence
  Synthetic
cauuuguuuaggauuucagaguuu

SEQ ID NO: 421732 - RNA, 18 nt, Artificial Sequence
  Synthetic
cuucuaggaggagaguuu

SEQ ID NO: 421733 - RNA, 19 nt, Artificial Sequence
  Synthetic
ucuucuaggaggagaguuu

SEQ ID NO: 421734 - RNA, 20 nt, Artificial Sequence
  Synthetic
gucuucuaggaggagaguuu

SEQ ID NO: 421735 - RNA, 21 nt, Artificial Sequence
  Synthetic
agucuucuaggaggagaguuu

SEQ ID NO: 421736 - RNA, 22 nt, Artificial Sequence
  Synthetic
aagucuucuaggaggagaguuu

SEQ ID NO: 421737 - RNA, 23 nt, Artificial Sequence
  Synthetic
gaagucuucuaggaggagaguuu

SEQ ID NO: 421738 - RNA, 24 nt, Artificial Sequence
  Synthetic
ugaagucuucuaggaggagaguuu

SEQ ID NO: 421739 - RNA, 18 nt, Artificial Sequence
  Synthetic
uaaguugcaaaggaguuu

SEQ ID NO: 421740 - RNA, 19 nt, Artificial Sequence
  Synthetic
auaaguugcaaaggaguuu

SEQ ID NO: 421741 - RNA, 20 nt, Artificial Sequence
  Synthetic
uauaaguugcaaaggaguuu

SEQ ID NO: 421742 - RNA, 21 nt, Artificial Sequence
  Synthetic
auauaaguugcaaaggaguuu

SEQ ID NO: 421743 - RNA, 22 nt, Artificial Sequence
  Synthetic
aauauaaguugcaaaggaguuu

SEQ ID NO: 421744 - RNA, 23 nt, Artificial Sequence
  Synthetic
uaauauaaguugcaaaggaguuu

SEQ ID NO: 421745 - RNA, 24 nt, Artificial Sequence
  Synthetic
guaauauaaguugcaaaggaguuu

SEQ ID NO: 421746 - RNA, 18 nt, Artificial Sequence
  Synthetic
aagaguugaugggaguuu

SEQ ID NO: 421747 - RNA, 19 nt, Artificial Sequence
  Synthetic
gaagaguugaugggaguuu

SEQ ID NO: 421748 - RNA, 20 nt, Artificial Sequence
  Synthetic
ugaagaguugaugggaguuu

SEQ ID NO: 421749 - RNA, 21 nt, Artificial Sequence
  Synthetic
uugaagaguugaugggaguuu

SEQ ID NO: 421750 - RNA, 22 nt, Artificial Sequence
  Synthetic
guugaagaguugaugggaguuu

SEQ ID NO: 421751 - RNA, 23 nt, Artificial Sequence
  Synthetic
uguugaagaguugaugggaguuu

SEQ ID NO: 421752 - RNA, 24 nt, Artificial Sequence
  Synthetic
uuguugaagaguugaugggaguuu

SEQ ID NO: 421753 - RNA, 18 nt, Artificial Sequence
  Synthetic
agauagaauguggaguuu

SEQ ID NO: 421754 - RNA, 19 nt, Artificial Sequence
  Synthetic
uagauagaauguggaguuu

SEQ ID NO: 421755 - RNA, 20 nt, Artificial Sequence
  Synthetic
auagauagaauguggaguuu

SEQ ID NO: 421756 - RNA, 21 nt, Artificial Sequence
  Synthetic
gauagauagaauguggaguuu

SEQ ID NO: 421757 - RNA, 22 nt, Artificial Sequence
  Synthetic
agauagauagaauguggaguuu

SEQ ID NO: 421758 - RNA, 23 nt, Artificial Sequence
  Synthetic
aagauagauagaauguggaguuu

SEQ ID NO: 421759 - RNA, 24 nt, Artificial Sequence
  Synthetic
uaagauagauagaauguggaguuu

SEQ ID NO: 421760 - RNA, 18 nt, Artificial Sequence
  Synthetic
uuuuuagagaaugaguuu

SEQ ID NO: 421761 - RNA, 19 nt, Artificial Sequence
  Synthetic
uuuuuuagagaaugaguuu

SEQ ID NO: 421762 - RNA, 20 nt, Artificial Sequence
  Synthetic
guuuuuuagagaaugaguuu

SEQ ID NO: 421763 - RNA, 21 nt, Artificial Sequence
  Synthetic
uguuuuuuagagaaugaguuu

SEQ ID NO: 421764 - RNA, 22 nt, Artificial Sequence
  Synthetic
uuguuuuuuagagaaugaguuu

SEQ ID NO: 421765 - RNA, 23 nt, Artificial Sequence
  Synthetic
uuuguuuuuuagagaaugaguuu

SEQ ID NO: 421766 - RNA, 24 nt, Artificial Sequence
  Synthetic
uuuuguuuuuuagagaaugaguuu

SEQ ID NO: 421767 - RNA, 18 nt, Artificial Sequence
  Synthetic
auaaaauuuacugaguuu

SEQ ID NO: 421768 - RNA, 19 nt, Artificial Sequence
  Synthetic
aauaaaauuuacugaguuu

SEQ ID NO: 421769 - RNA, 20 nt, Artificial Sequence
  Synthetic
aaauaaaauuuacugaguuu

SEQ ID NO: 421770 - RNA, 21 nt, Artificial Sequence
  Synthetic
aaaauaaaauuuacugaguuu

SEQ ID NO: 421771 - RNA, 22 nt, Artificial Sequence
  Synthetic
uaaaauaaaauuuacugaguuu

SEQ ID NO: 421772 - RNA, 23 nt, Artificial Sequence
  Synthetic
uuaaaauaaaauuuacugaguuu

SEQ ID NO: 421773 - RNA, 24 nt, Artificial Sequence
  Synthetic
auuaaaauaaaauuuacugaguuu

SEQ ID NO: 421774 - RNA, 18 nt, Artificial Sequence
  Synthetic
ugcauuaacaaauaguuu

SEQ ID NO: 421775 - RNA, 19 nt, Artificial Sequence
  Synthetic
uugcauuaacaaauaguuu

SEQ ID NO: 421776 - RNA, 20 nt, Artificial Sequence
  Synthetic
uuugcauuaacaaauaguuu

SEQ ID NO: 421777 - RNA, 21 nt, Artificial Sequence
  Synthetic
guuugcauuaacaaauaguuu

SEQ ID NO: 421778 - RNA, 22 nt, Artificial Sequence
  Synthetic
aguuugcauuaacaaauaguuu

SEQ ID NO: 421779 - RNA, 23 nt, Artificial Sequence
  Synthetic
caguuugcauuaacaaauaguuu

SEQ ID NO: 421780 - RNA, 24 nt, Artificial Sequence
  Synthetic
ccaguuugcauuaacaaauaguuu

SEQ ID NO: 421781 - RNA, 18 nt, Artificial Sequence
  Synthetic
uauugcuuggaauaguuu

SEQ ID NO: 421782 - RNA, 19 nt, Artificial Sequence
  Synthetic
guauugcuuggaauaguuu

SEQ ID NO: 421783 - RNA, 20 nt, Artificial Sequence
  Synthetic
uguauugcuuggaauaguuu

SEQ ID NO: 421784 - RNA, 21 nt, Artificial Sequence
  Synthetic
uuguauugcuuggaauaguuu

SEQ ID NO: 421785 - RNA, 22 nt, Artificial Sequence
  Synthetic
uuuguauugcuuggaauaguuu

SEQ ID NO: 421786 - RNA, 23 nt, Artificial Sequence
  Synthetic
uuuuguauugcuuggaauaguuu

SEQ ID NO: 421787 - RNA, 24 nt, Artificial Sequence
  Synthetic
cuuuuguauugcuuggaauaguuu

SEQ ID NO: 421788 - RNA, 18 nt, Artificial Sequence
  Synthetic
gguacccaauaauaguuu

SEQ ID NO: 421789 - RNA, 19 nt, Artificial Sequence
  Synthetic
agguacccaauaauaguuu

SEQ ID NO: 421790 - RNA, 20 nt, Artificial Sequence
  Synthetic
uagguacccaauaauaguuu

SEQ ID NO: 421791 - RNA, 21 nt, Artificial Sequence
  Synthetic
auagguacccaauaauaguuu

SEQ ID NO: 421792 - RNA, 22 nt, Artificial Sequence
  Synthetic
aauagguacccaauaauaguuu

SEQ ID NO: 421793 - RNA, 23 nt, Artificial Sequence
  Synthetic
uaauagguacccaauaauaguuu

SEQ ID NO: 421794 - RNA, 24 nt, Artificial Sequence
  Synthetic
auaauagguacccaauaauaguuu

SEQ ID NO: 421795 - RNA, 18 nt, Artificial Sequence
  Synthetic
uggaaacauacauaguuu

SEQ ID NO: 421796 - RNA, 19 nt, Artificial Sequence
  Synthetic
cuggaaacauacauaguuu

SEQ ID NO: 421797 - RNA, 20 nt, Artificial Sequence
  Synthetic
acuggaaacauacauaguuu

SEQ ID NO: 421798 - RNA, 21 nt, Artificial Sequence
  Synthetic
cacuggaaacauacauaguuu

SEQ ID NO: 421799 - RNA, 22 nt, Artificial Sequence
  Synthetic
ccacuggaaacauacauaguuu

SEQ ID NO: 421800 - RNA, 23 nt, Artificial Sequence
  Synthetic
uccacuggaaacauacauaguuu

SEQ ID NO: 421801 - RNA, 24 nt, Artificial Sequence
  Synthetic
uuccacuggaaacauacauaguuu

SEQ ID NO: 421802 - RNA, 18 nt, Artificial Sequence
  Synthetic
uauauggacucauaguuu

SEQ ID NO: 421803 - RNA, 19 nt, Artificial Sequence
  Synthetic
auauauggacucauaguuu

SEQ ID NO: 421804 - RNA, 20 nt, Artificial Sequence
  Synthetic
uauauauggacucauaguuu

SEQ ID NO: 421805 - RNA, 21 nt, Artificial Sequence
  Synthetic
auauauauggacucauaguuu

SEQ ID NO: 421806 - RNA, 22 nt, Artificial Sequence
  Synthetic
uauauauauggacucauaguuu

SEQ ID NO: 421807 - RNA, 23 nt, Artificial Sequence
  Synthetic
cuauauauauggacucauaguuu

SEQ ID NO: 421808 - RNA, 24 nt, Artificial Sequence
  Synthetic
ccuauauauauggacucauaguuu

SEQ ID NO: 421809 - RNA, 18 nt, Artificial Sequence
  Synthetic
caaccaaaaagauaguuu

SEQ ID NO: 421810 - RNA, 19 nt, Artificial Sequence
  Synthetic
acaaccaaaaagauaguuu

SEQ ID NO: 421811 - RNA, 20 nt, Artificial Sequence
  Synthetic
cacaaccaaaaagauaguuu

SEQ ID NO: 421812 - RNA, 21 nt, Artificial Sequence
  Synthetic
ucacaaccaaaaagauaguuu

SEQ ID NO: 421813 - RNA, 22 nt, Artificial Sequence
  Synthetic
uucacaaccaaaaagauaguuu

SEQ ID NO: 421814 - RNA, 23 nt, Artificial Sequence
  Synthetic
guucacaaccaaaaagauaguuu

SEQ ID NO: 421815 - RNA, 24 nt, Artificial Sequence
  Synthetic
aguucacaaccaaaaagauaguuu

SEQ ID NO: 421816 - RNA, 18 nt, Artificial Sequence
  Synthetic
uaagauuucauauaguuu

SEQ ID NO: 421817 - RNA, 19 nt, Artificial Sequence
  Synthetic
guaagauuucauauaguuu

SEQ ID NO: 421818 - RNA, 20 nt, Artificial Sequence
  Synthetic
gguaagauuucauauaguuu

SEQ ID NO: 421819 - RNA, 21 nt, Artificial Sequence
  Synthetic
ggguaagauuucauauaguuu

SEQ ID NO: 421820 - RNA, 22 nt, Artificial Sequence
  Synthetic
uggguaagauuucauauaguuu

SEQ ID NO: 421821 - RNA, 23 nt, Artificial Sequence
  Synthetic
auggguaagauuucauauaguuu

SEQ ID NO: 421822 - RNA, 24 nt, Artificial Sequence
  Synthetic
uauggguaagauuucauauaguuu

SEQ ID NO: 421823 - RNA, 18 nt, Artificial Sequence
  Synthetic
gaugaacuuauauaguuu

SEQ ID NO: 421824 - RNA, 19 nt, Artificial Sequence
  Synthetic
agaugaacuuauauaguuu

SEQ ID NO: 421825 - RNA, 20 nt, Artificial Sequence
  Synthetic
cagaugaacuuauauaguuu

SEQ ID NO: 421826 - RNA, 21 nt, Artificial Sequence
  Synthetic
ucagaugaacuuauauaguuu

SEQ ID NO: 421827 - RNA, 22 nt, Artificial Sequence
  Synthetic
aucagaugaacuuauauaguuu

SEQ ID NO: 421828 - RNA, 23 nt, Artificial Sequence
  Synthetic
uaucagaugaacuuauauaguuu

SEQ ID NO: 421829 - RNA, 24 nt, Artificial Sequence
  Synthetic
auaucagaugaacuuauauaguuu

SEQ ID NO: 421830 - RNA, 18 nt, Artificial Sequence
  Synthetic
ugaaaggggguauaguuu

SEQ ID NO: 421831 - RNA, 19 nt, Artificial Sequence
  Synthetic
gugaaaggggguauaguuu

SEQ ID NO: 421832 - RNA, 20 nt, Artificial Sequence
  Synthetic
ugugaaaggggguauaguuu

SEQ ID NO: 421833 - RNA, 21 nt, Artificial Sequence
  Synthetic
cugugaaaggggguauaguuu

SEQ ID NO: 421834 - RNA, 22 nt, Artificial Sequence
  Synthetic
acugugaaaggggguauaguuu

SEQ ID NO: 421835 - RNA, 23 nt, Artificial Sequence
  Synthetic
uacugugaaaggggguauaguuu

SEQ ID NO: 421836 - RNA, 24 nt, Artificial Sequence
  Synthetic
uuacugugaaaggggguauaguuu

SEQ ID NO: 421837 - RNA, 18 nt, Artificial Sequence
  Synthetic
auaaaaauaaccuaguuu

SEQ ID NO: 421838 - RNA, 19 nt, Artificial Sequence
  Synthetic
aauaaaaauaaccuaguuu

SEQ ID NO: 421839 - RNA, 20 nt, Artificial Sequence
  Synthetic
gaauaaaaauaaccuaguuu

SEQ ID NO: 421840 - RNA, 21 nt, Artificial Sequence
  Synthetic
agaauaaaaauaaccuaguuu

SEQ ID NO: 421841 - RNA, 22 nt, Artificial Sequence
  Synthetic
gagaauaaaaauaaccuaguuu

SEQ ID NO: 421842 - RNA, 23 nt, Artificial Sequence
  Synthetic
agagaauaaaaauaaccuaguuu

SEQ ID NO: 421843 - RNA, 24 nt, Artificial Sequence
  Synthetic
aagagaauaaaaauaaccuaguuu

SEQ ID NO: 421844 - RNA, 18 nt, Artificial Sequence
  Synthetic
acagucuauuucuaguuu

SEQ ID NO: 421845 - RNA, 19 nt, Artificial Sequence
  Synthetic
aacagucuauuucuaguuu

SEQ ID NO: 421846 - RNA, 20 nt, Artificial Sequence
  Synthetic
aaacagucuauuucuaguuu

SEQ ID NO: 421847 - RNA, 21 nt, Artificial Sequence
  Synthetic
uaaacagucuauuucuaguuu

SEQ ID NO: 421848 - RNA, 22 nt, Artificial Sequence
  Synthetic
auaaacagucuauuucuaguuu

SEQ ID NO: 421849 - RNA, 23 nt, Artificial Sequence
  Synthetic
aauaaacagucuauuucuaguuu

SEQ ID NO: 421850 - RNA, 24 nt, Artificial Sequence
  Synthetic
aaauaaacagucuauuucuaguuu

SEQ ID NO: 421851 - RNA, 18 nt, Artificial Sequence
  Synthetic
cauauuagaaaguaguuu

SEQ ID NO: 421852 - RNA, 19 nt, Artificial Sequence
  Synthetic
ccauauuagaaaguaguuu

SEQ ID NO: 421853 - RNA, 20 nt, Artificial Sequence
  Synthetic
accauauuagaaaguaguuu

SEQ ID NO: 421854 - RNA, 21 nt, Artificial Sequence
  Synthetic
uaccauauuagaaaguaguuu

SEQ ID NO: 421855 - RNA, 22 nt, Artificial Sequence
  Synthetic
uuaccauauuagaaaguaguuu

SEQ ID NO: 421856 - RNA, 23 nt, Artificial Sequence
  Synthetic
guuaccauauuagaaaguaguuu

SEQ ID NO: 421857 - RNA, 24 nt, Artificial Sequence
  Synthetic
gguuaccauauuagaaaguaguuu

SEQ ID NO: 421858 - RNA, 18 nt, Artificial Sequence
  Synthetic
uuauaauuucaguaguuu

SEQ ID NO: 421859 - RNA, 19 nt, Artificial Sequence
  Synthetic
uuuauaauuucaguaguuu

SEQ ID NO: 421860 - RNA, 20 nt, Artificial Sequence
  Synthetic
uuuuauaauuucaguaguuu

SEQ ID NO: 421861 - RNA, 21 nt, Artificial Sequence
  Synthetic
uuuuuauaauuucaguaguuu

SEQ ID NO: 421862 - RNA, 22 nt, Artificial Sequence
  Synthetic
uuuuuuauaauuucaguaguuu

SEQ ID NO: 421863 - RNA, 23 nt, Artificial Sequence
  Synthetic
auuuuuuauaauuucaguaguuu

SEQ ID NO: 421864 - RNA, 24 nt, Artificial Sequence
  Synthetic
uauuuuuuauaauuucaguaguuu

SEQ ID NO: 421865 - RNA, 18 nt, Artificial Sequence
  Synthetic
uuucaaacaagguaguuu

SEQ ID NO: 421866 - RNA, 19 nt, Artificial Sequence
  Synthetic
uuuucaaacaagguaguuu

SEQ ID NO: 421867 - RNA, 20 nt, Artificial Sequence
  Synthetic
auuuucaaacaagguaguuu

SEQ ID NO: 421868 - RNA, 21 nt, Artificial Sequence
  Synthetic
cauuuucaaacaagguaguuu

SEQ ID NO: 421869 - RNA, 22 nt, Artificial Sequence
  Synthetic
ucauuuucaaacaagguaguuu

SEQ ID NO: 421870 - RNA, 23 nt, Artificial Sequence
  Synthetic
cucauuuucaaacaagguaguuu

SEQ ID NO: 421871 - RNA, 24 nt, Artificial Sequence
  Synthetic
ucucauuuucaaacaagguaguuu

SEQ ID NO: 421872 - RNA, 18 nt, Artificial Sequence
  Synthetic
cacugcuguguguaguuu

SEQ ID NO: 421873 - RNA, 19 nt, Artificial Sequence
  Synthetic
ucacugcuguguguaguuu

SEQ ID NO: 421874 - RNA, 20 nt, Artificial Sequence
  Synthetic
cucacugcuguguguaguuu

SEQ ID NO: 421875 - RNA, 21 nt, Artificial Sequence
  Synthetic
acucacugcuguguguaguuu

SEQ ID NO: 421876 - RNA, 22 nt, Artificial Sequence
  Synthetic
cacucacugcuguguguaguuu

SEQ ID NO: 421877 - RNA, 23 nt, Artificial Sequence
  Synthetic
ccacucacugcuguguguaguuu

SEQ ID NO: 421878 - RNA, 24 nt, Artificial Sequence
  Synthetic
accacucacugcuguguguaguuu

SEQ ID NO: 421879 - RNA, 18 nt, Artificial Sequence
  Synthetic
cauuuguaguuguaguuu

SEQ ID NO: 421880 - RNA, 19 nt, Artificial Sequence
  Synthetic
acauuuguaguuguaguuu

SEQ ID NO: 421881 - RNA, 20 nt, Artificial Sequence
  Synthetic
aacauuuguaguuguaguuu

SEQ ID NO: 421882 - RNA, 21 nt, Artificial Sequence
  Synthetic
aaacauuuguaguuguaguuu

SEQ ID NO: 421883 - RNA, 22 nt, Artificial Sequence
  Synthetic
uaaacauuuguaguuguaguuu

SEQ ID NO: 421884 - RNA, 23 nt, Artificial Sequence
  Synthetic
uuaaacauuuguaguuguaguuu

SEQ ID NO: 421885 - RNA, 24 nt, Artificial Sequence
  Synthetic
uuuaaacauuuguaguuguaguuu

SEQ ID NO: 421886 - RNA, 18 nt, Artificial Sequence
  Synthetic
cggucagcaccuuaguuu

SEQ ID NO: 421887 - RNA, 19 nt, Artificial Sequence
  Synthetic
ucggucagcaccuuaguuu

SEQ ID NO: 421888 - RNA, 20 nt, Artificial Sequence
  Synthetic
aucggucagcaccuuaguuu

SEQ ID NO: 421889 - RNA, 21 nt, Artificial Sequence
  Synthetic
caucggucagcaccuuaguuu

SEQ ID NO: 421890 - RNA, 22 nt, Artificial Sequence
  Synthetic
gcaucggucagcaccuuaguuu

SEQ ID NO: 421891 - RNA, 23 nt, Artificial Sequence
  Synthetic
agcaucggucagcaccuuaguuu

SEQ ID NO: 421892 - RNA, 24 nt, Artificial Sequence
  Synthetic
gagcaucggucagcaccuuaguuu

SEQ ID NO: 421893 - RNA, 18 nt, Artificial Sequence
  Synthetic
uauguauacucuuaguuu

SEQ ID NO: 421894 - RNA, 19 nt, Artificial Sequence
  Synthetic
uuauguauacucuuaguuu

SEQ ID NO: 421895 - RNA, 20 nt, Artificial Sequence
  Synthetic
uuuauguauacucuuaguuu

SEQ ID NO: 421896 - RNA, 21 nt, Artificial Sequence
  Synthetic
auuuauguauacucuuaguuu

SEQ ID NO: 421897 - RNA, 22 nt, Artificial Sequence
  Synthetic
aauuuauguauacucuuaguuu

SEQ ID NO: 421898 - RNA, 23 nt, Artificial Sequence
  Synthetic
caauuuauguauacucuuaguuu

SEQ ID NO: 421899 - RNA, 24 nt, Artificial Sequence
  Synthetic
ccaauuuauguauacucuuaguuu

SEQ ID NO: 421900 - RNA, 18 nt, Artificial Sequence
  Synthetic
ucucuauuguguuaguuu

SEQ ID NO: 421901 - RNA, 19 nt, Artificial Sequence
  Synthetic
uucucuauuguguuaguuu

SEQ ID NO: 421902 - RNA, 20 nt, Artificial Sequence
  Synthetic
auucucuauuguguuaguuu

SEQ ID NO: 421903 - RNA, 21 nt, Artificial Sequence
  Synthetic
aauucucuauuguguuaguuu

SEQ ID NO: 421904 - RNA, 22 nt, Artificial Sequence
  Synthetic
aaauucucuauuguguuaguuu

SEQ ID NO: 421905 - RNA, 23 nt, Artificial Sequence
  Synthetic
uaaauucucuauuguguuaguuu

SEQ ID NO: 421906 - RNA, 24 nt, Artificial Sequence
  Synthetic
uuaaauucucuauuguguuaguuu

SEQ ID NO: 421907 - RNA, 18 nt, Artificial Sequence
  Synthetic
aagaagcuaauuuaguuu

SEQ ID NO: 421908 - RNA, 19 nt, Artificial Sequence
  Synthetic
aaagaagcuaauuuaguuu

SEQ ID NO: 421909 - RNA, 20 nt, Artificial Sequence
  Synthetic
aaaagaagcuaauuuaguuu

SEQ ID NO: 421910 - RNA, 21 nt, Artificial Sequence
  Synthetic
caaaagaagcuaauuuaguuu

SEQ ID NO: 421911 - RNA, 22 nt, Artificial Sequence
  Synthetic
acaaaagaagcuaauuuaguuu

SEQ ID NO: 421912 - RNA, 23 nt, Artificial Sequence
  Synthetic
aacaaaagaagcuaauuuaguuu

SEQ ID NO: 421913 - RNA, 24 nt, Artificial Sequence
  Synthetic
aaacaaaagaagcuaauuuaguuu

SEQ ID NO: 421914 - RNA, 18 nt, Artificial Sequence
  Synthetic
agcuuucuucuuuaguuu

SEQ ID NO: 421915 - RNA, 19 nt, Artificial Sequence
  Synthetic
cagcuuucuucuuuaguuu

SEQ ID NO: 421916 - RNA, 20 nt, Artificial Sequence
  Synthetic
ucagcuuucuucuuuaguuu

SEQ ID NO: 421917 - RNA, 21 nt, Artificial Sequence
  Synthetic
cucagcuuucuucuuuaguuu

SEQ ID NO: 421918 - RNA, 22 nt, Artificial Sequence
  Synthetic
ccucagcuuucuucuuuaguuu

SEQ ID NO: 421919 - RNA, 23 nt, Artificial Sequence
  Synthetic
cccucagcuuucuucuuuaguuu

SEQ ID NO: 421920 - RNA, 24 nt, Artificial Sequence
  Synthetic
ucccucagcuuucuucuuuaguuu

SEQ ID NO: 421921 - RNA, 18 nt, Artificial Sequence
  Synthetic
uaggauaccuuuuaguuu

SEQ ID NO: 421922 - RNA, 19 nt, Artificial Sequence
  Synthetic
cuaggauaccuuuuaguuu

SEQ ID NO: 421923 - RNA, 20 nt, Artificial Sequence
  Synthetic
ucuaggauaccuuuuaguuu

SEQ ID NO: 421924 - RNA, 21 nt, Artificial Sequence
  Synthetic
aucuaggauaccuuuuaguuu

SEQ ID NO: 421925 - RNA, 22 nt, Artificial Sequence
  Synthetic
aaucuaggauaccuuuuaguuu

SEQ ID NO: 421926 - RNA, 23 nt, Artificial Sequence
  Synthetic
uaaucuaggauaccuuuuaguuu

SEQ ID NO: 421927 - RNA, 24 nt, Artificial Sequence
  Synthetic
auaaucuaggauaccuuuuaguuu

SEQ ID NO: 421928 - RNA, 18 nt, Artificial Sequence
  Synthetic
cuuucaugguuuuaguuu

SEQ ID NO: 421929 - RNA, 19 nt, Artificial Sequence
  Synthetic
acuuucaugguuuuaguuu

SEQ ID NO: 421930 - RNA, 20 nt, Artificial Sequence
  Synthetic
aacuuucaugguuuuaguuu

SEQ ID NO: 421931 - RNA, 21 nt, Artificial Sequence
  Synthetic
uaacuuucaugguuuuaguuu

SEQ ID NO: 421932 - RNA, 22 nt, Artificial Sequence
  Synthetic
uuaacuuucaugguuuuaguuu

SEQ ID NO: 421933 - RNA, 23 nt, Artificial Sequence
  Synthetic
auuaacuuucaugguuuuaguuu

SEQ ID NO: 421934 - RNA, 24 nt, Artificial Sequence
  Synthetic
gauuaacuuucaugguuuuaguuu

SEQ ID NO: 421935 - RNA, 18 nt, Artificial Sequence
  Synthetic
uagcccuguuuuuaguuu

SEQ ID NO: 421936 - RNA, 19 nt, Artificial Sequence
  Synthetic
guagcccuguuuuuaguuu

SEQ ID NO: 421937 - RNA, 20 nt, Artificial Sequence
  Synthetic
gguagcccuguuuuuaguuu

SEQ ID NO: 421938 - RNA, 21 nt, Artificial Sequence
  Synthetic
ugguagcccuguuuuuaguuu

SEQ ID NO: 421939 - RNA, 22 nt, Artificial Sequence
  Synthetic
augguagcccuguuuuuaguuu

SEQ ID NO: 421940 - RNA, 23 nt, Artificial Sequence
  Synthetic
uaugguagcccuguuuuuaguuu

SEQ ID NO: 421941 - RNA, 24 nt, Artificial Sequence
  Synthetic
auaugguagcccuguuuuuaguuu

SEQ ID NO: 421942 - RNA, 18 nt, Artificial Sequence
  Synthetic
uacgcuucauacacguuu

SEQ ID NO: 421943 - RNA, 19 nt, Artificial Sequence
  Synthetic
auacgcuucauacacguuu

SEQ ID NO: 421944 - RNA, 20 nt, Artificial Sequence
  Synthetic
cauacgcuucauacacguuu

SEQ ID NO: 421945 - RNA, 21 nt, Artificial Sequence
  Synthetic
acauacgcuucauacacguuu

SEQ ID NO: 421946 - RNA, 22 nt, Artificial Sequence
  Synthetic
cacauacgcuucauacacguuu

SEQ ID NO: 421947 - RNA, 23 nt, Artificial Sequence
  Synthetic
acacauacgcuucauacacguuu

SEQ ID NO: 421948 - RNA, 24 nt, Artificial Sequence
  Synthetic
aacacauacgcuucauacacguuu

SEQ ID NO: 421949 - RNA, 18 nt, Artificial Sequence
  Synthetic
auaauguuuagcccguuu

SEQ ID NO: 421950 - RNA, 19 nt, Artificial Sequence
  Synthetic
aauaauguuuagcccguuu

SEQ ID NO: 421951 - RNA, 20 nt, Artificial Sequence
  Synthetic
aaauaauguuuagcccguuu

SEQ ID NO: 421952 - RNA, 21 nt, Artificial Sequence
  Synthetic
aaaauaauguuuagcccguuu

SEQ ID NO: 421953 - RNA, 22 nt, Artificial Sequence
  Synthetic
caaaauaauguuuagcccguuu

SEQ ID NO: 421954 - RNA, 23 nt, Artificial Sequence
  Synthetic
gcaaaauaauguuuagcccguuu

SEQ ID NO: 421955 - RNA, 24 nt, Artificial Sequence
  Synthetic
agcaaaauaauguuuagcccguuu

SEQ ID NO: 421956 - RNA, 18 nt, Artificial Sequence
  Synthetic
aauggccugaagccguuu

SEQ ID NO: 421957 - RNA, 19 nt, Artificial Sequence
  Synthetic
aaauggccugaagccguuu

SEQ ID NO: 421958 - RNA, 20 nt, Artificial Sequence
  Synthetic
aaaauggccugaagccguuu

SEQ ID NO: 421959 - RNA, 21 nt, Artificial Sequence
  Synthetic
aaaaauggccugaagccguuu

SEQ ID NO: 421960 - RNA, 22 nt, Artificial Sequence
  Synthetic
caaaaauggccugaagccguuu

SEQ ID NO: 421961 - RNA, 23 nt, Artificial Sequence
  Synthetic
acaaaaauggccugaagccguuu

SEQ ID NO: 421962 - RNA, 24 nt, Artificial Sequence
  Synthetic
gacaaaaauggccugaagccguuu

SEQ ID NO: 421963 - RNA, 18 nt, Artificial Sequence
  Synthetic
acuucugagguuccguuu

SEQ ID NO: 421964 - RNA, 19 nt, Artificial Sequence
  Synthetic
aacuucugagguuccguuu

SEQ ID NO: 421965 - RNA, 20 nt, Artificial Sequence
  Synthetic
gaacuucugagguuccguuu

SEQ ID NO: 421966 - RNA, 21 nt, Artificial Sequence
  Synthetic
agaacuucugagguuccguuu

SEQ ID NO: 421967 - RNA, 22 nt, Artificial Sequence
  Synthetic
cagaacuucugagguuccguuu

SEQ ID NO: 421968 - RNA, 23 nt, Artificial Sequence
  Synthetic
gcagaacuucugagguuccguuu

SEQ ID NO: 421969 - RNA, 24 nt, Artificial Sequence
  Synthetic
agcagaacuucugagguuccguuu

SEQ ID NO: 421970 - RNA, 18 nt, Artificial Sequence
  Synthetic
aagcagauaucagcguuu

SEQ ID NO: 421971 - RNA, 19 nt, Artificial Sequence
  Synthetic
aaagcagauaucagcguuu

SEQ ID NO: 421972 - RNA, 20 nt, Artificial Sequence
  Synthetic
gaaagcagauaucagcguuu

SEQ ID NO: 421973 - RNA, 21 nt, Artificial Sequence
  Synthetic
ugaaagcagauaucagcguuu

SEQ ID NO: 421974 - RNA, 22 nt, Artificial Sequence
  Synthetic
cugaaagcagauaucagcguuu

SEQ ID NO: 421975 - RNA, 23 nt, Artificial Sequence
  Synthetic
gcugaaagcagauaucagcguuu

SEQ ID NO: 421976 - RNA, 24 nt, Artificial Sequence
  Synthetic
ggcugaaagcagauaucagcguuu

SEQ ID NO: 421977 - RNA, 18 nt, Artificial Sequence
  Synthetic
agguuuaauggugcguuu

SEQ ID NO: 421978 - RNA, 19 nt, Artificial Sequence
  Synthetic
cagguuuaauggugcguuu

SEQ ID NO: 421979 - RNA, 20 nt, Artificial Sequence
  Synthetic
acagguuuaauggugcguuu

SEQ ID NO: 421980 - RNA, 21 nt, Artificial Sequence
  Synthetic
uacagguuuaauggugcguuu

SEQ ID NO: 421981 - RNA, 22 nt, Artificial Sequence
  Synthetic
guacagguuuaauggugcguuu

SEQ ID NO: 421982 - RNA, 23 nt, Artificial Sequence
  Synthetic
uguacagguuuaauggugcguuu

SEQ ID NO: 421983 - RNA, 24 nt, Artificial Sequence
  Synthetic
uuguacagguuuaauggugcguuu

SEQ ID NO: 421984 - RNA, 18 nt, Artificial Sequence
  Synthetic
cucuacuuugcaucguuu

SEQ ID NO: 421985 - RNA, 19 nt, Artificial Sequence
  Synthetic
ucucuacuuugcaucguuu

SEQ ID NO: 421986 - RNA, 20 nt, Artificial Sequence
  Synthetic
cucucuacuuugcaucguuu

SEQ ID NO: 421987 - RNA, 21 nt, Artificial Sequence
  Synthetic
ccucucuacuuugcaucguuu

SEQ ID NO: 421988 - RNA, 22 nt, Artificial Sequence
  Synthetic
cccucucuacuuugcaucguuu

SEQ ID NO: 421989 - RNA, 23 nt, Artificial Sequence
  Synthetic
gcccucucuacuuugcaucguuu

SEQ ID NO: 421990 - RNA, 24 nt, Artificial Sequence
  Synthetic
ugcccucucuacuuugcaucguuu

SEQ ID NO: 421991 - RNA, 18 nt, Artificial Sequence
  Synthetic
guucauauugacucguuu

SEQ ID NO: 421992 - RNA, 19 nt, Artificial Sequence
  Synthetic
cguucauauugacucguuu

SEQ ID NO: 421993 - RNA, 20 nt, Artificial Sequence
  Synthetic
gcguucauauugacucguuu

SEQ ID NO: 421994 - RNA, 21 nt, Artificial Sequence
  Synthetic
agcguucauauugacucguuu

SEQ ID NO: 421995 - RNA, 22 nt, Artificial Sequence
  Synthetic
aagcguucauauugacucguuu

SEQ ID NO: 421996 - RNA, 23 nt, Artificial Sequence
  Synthetic
uaagcguucauauugacucguuu

SEQ ID NO: 421997 - RNA, 24 nt, Artificial Sequence
  Synthetic
uuaagcguucauauugacucguuu

SEQ ID NO: 421998 - RNA, 18 nt, Artificial Sequence
  Synthetic
gaccuacugcaaagguuu

SEQ ID NO: 421999 - RNA, 19 nt, Artificial Sequence
  Synthetic
agaccuacugcaaagguuu

SEQ ID NO: 422000 - RNA, 20 nt, Artificial Sequence
  Synthetic
gagaccuacugcaaagguuu

SEQ ID NO: 422001 - RNA, 21 nt, Artificial Sequence
  Synthetic
ggagaccuacugcaaagguuu

SEQ ID NO: 422002 - RNA, 22 nt, Artificial Sequence
  Synthetic
aggagaccuacugcaaagguuu

SEQ ID NO: 422003 - RNA, 23 nt, Artificial Sequence
  Synthetic
aaggagaccuacugcaaagguuu

SEQ ID NO: 422004 - RNA, 24 nt, Artificial Sequence
  Synthetic
caaggagaccuacugcaaagguuu

SEQ ID NO: 422005 - RNA, 18 nt, Artificial Sequence
  Synthetic
aaaaagacuuaaagguuu

SEQ ID NO: 422006 - RNA, 19 nt, Artificial Sequence
  Synthetic
uaaaaagacuuaaagguuu

SEQ ID NO: 422007 - RNA, 20 nt, Artificial Sequence
  Synthetic
uuaaaaagacuuaaagguuu

SEQ ID NO: 422008 - RNA, 21 nt, Artificial Sequence
  Synthetic
cuuaaaaagacuuaaagguuu

SEQ ID NO: 422009 - RNA, 22 nt, Artificial Sequence
  Synthetic
gcuuaaaaagacuuaaagguuu

SEQ ID NO: 422010 - RNA, 23 nt, Artificial Sequence
  Synthetic
agcuuaaaaagacuuaaagguuu

SEQ ID NO: 422011 - RNA, 24 nt, Artificial Sequence
  Synthetic
cagcuuaaaaagacuuaaagguuu

SEQ ID NO: 422012 - RNA, 18 nt, Artificial Sequence
  Synthetic
gaauuuuauccaagguuu

SEQ ID NO: 422013 - RNA, 19 nt, Artificial Sequence
  Synthetic
ggaauuuuauccaagguuu

SEQ ID NO: 422014 - RNA, 20 nt, Artificial Sequence
  Synthetic
gggaauuuuauccaagguuu

SEQ ID NO: 422015 - RNA, 21 nt, Artificial Sequence
  Synthetic
ggggaauuuuauccaagguuu

SEQ ID NO: 422016 - RNA, 22 nt, Artificial Sequence
  Synthetic
aggggaauuuuauccaagguuu

SEQ ID NO: 422017 - RNA, 23 nt, Artificial Sequence
  Synthetic
caggggaauuuuauccaagguuu

SEQ ID NO: 422018 - RNA, 24 nt, Artificial Sequence
  Synthetic
acaggggaauuuuauccaagguuu

SEQ ID NO: 422019 - RNA, 18 nt, Artificial Sequence
  Synthetic
uggugacauucaagguuu

SEQ ID NO: 422020 - RNA, 19 nt, Artificial Sequence
  Synthetic
cuggugacauucaagguuu

SEQ ID NO: 422021 - RNA, 20 nt, Artificial Sequence
  Synthetic
ucuggugacauucaagguuu

SEQ ID NO: 422022 - RNA, 21 nt, Artificial Sequence
  Synthetic
aucuggugacauucaagguuu

SEQ ID NO: 422023 - RNA, 22 nt, Artificial Sequence
  Synthetic
aaucuggugacauucaagguuu

SEQ ID NO: 422024 - RNA, 23 nt, Artificial Sequence
  Synthetic
aaaucuggugacauucaagguuu

SEQ ID NO: 422025 - RNA, 24 nt, Artificial Sequence
  Synthetic
caaaucuggugacauucaagguuu

SEQ ID NO: 422026 - RNA, 18 nt, Artificial Sequence
  Synthetic
acauuugggggcagguuu

SEQ ID NO: 422027 - RNA, 19 nt, Artificial Sequence
  Synthetic
uacauuugggggcagguuu

SEQ ID NO: 422028 - RNA, 20 nt, Artificial Sequence
  Synthetic
auacauuugggggcagguuu

SEQ ID NO: 422029 - RNA, 21 nt, Artificial Sequence
  Synthetic
gauacauuugggggcagguuu

SEQ ID NO: 422030 - RNA, 22 nt, Artificial Sequence
  Synthetic
ugauacauuugggggcagguuu

SEQ ID NO: 422031 - RNA, 23 nt, Artificial Sequence
  Synthetic
cugauacauuugggggcagguuu

SEQ ID NO: 422032 - RNA, 24 nt, Artificial Sequence
  Synthetic
ccugauacauuugggggcagguuu

SEQ ID NO: 422033 - RNA, 18 nt, Artificial Sequence
  Synthetic
cuaaauauuggcagguuu

SEQ ID NO: 422034 - RNA, 19 nt, Artificial Sequence
  Synthetic
acuaaauauuggcagguuu

SEQ ID NO: 422035 - RNA, 20 nt, Artificial Sequence
  Synthetic
gacuaaauauuggcagguuu

SEQ ID NO: 422036 - RNA, 21 nt, Artificial Sequence
  Synthetic
ugacuaaauauuggcagguuu

SEQ ID NO: 422037 - RNA, 22 nt, Artificial Sequence
  Synthetic
gugacuaaauauuggcagguuu

SEQ ID NO: 422038 - RNA, 23 nt, Artificial Sequence
  Synthetic
agugacuaaauauuggcagguuu

SEQ ID NO: 422039 - RNA, 24 nt, Artificial Sequence
  Synthetic
uagugacuaaauauuggcagguuu

SEQ ID NO: 422040 - RNA, 18 nt, Artificial Sequence
  Synthetic
aaauauuucugcagguuu

SEQ ID NO: 422041 - RNA, 19 nt, Artificial Sequence
  Synthetic
uaaauauuucugcagguuu

SEQ ID NO: 422042 - RNA, 20 nt, Artificial Sequence
  Synthetic
auaaauauuucugcagguuu

SEQ ID NO: 422043 - RNA, 21 nt, Artificial Sequence
  Synthetic
uauaaauauuucugcagguuu

SEQ ID NO: 422044 - RNA, 22 nt, Artificial Sequence
  Synthetic
uuauaaauauuucugcagguuu

SEQ ID NO: 422045 - RNA, 23 nt, Artificial Sequence
  Synthetic
uuuauaaauauuucugcagguuu

SEQ ID NO: 422046 - RNA, 24 nt, Artificial Sequence
  Synthetic
guuuauaaauauuucugcagguuu

SEQ ID NO: 422047 - RNA, 18 nt, Artificial Sequence
  Synthetic
aguaagugagagagguuu

SEQ ID NO: 422048 - RNA, 19 nt, Artificial Sequence
  Synthetic
aaguaagugagagagguuu

SEQ ID NO: 422049 - RNA, 20 nt, Artificial Sequence
  Synthetic
gaaguaagugagagagguuu

SEQ ID NO: 422050 - RNA, 21 nt, Artificial Sequence
  Synthetic
ugaaguaagugagagagguuu

SEQ ID NO: 422051 - RNA, 22 nt, Artificial Sequence
  Synthetic
gugaaguaagugagagagguuu

SEQ ID NO: 422052 - RNA, 23 nt, Artificial Sequence
  Synthetic
agugaaguaagugagagagguuu

SEQ ID NO: 422053 - RNA, 24 nt, Artificial Sequence
  Synthetic
gagugaaguaagugagagagguuu

SEQ ID NO: 422054 - RNA, 18 nt, Artificial Sequence
  Synthetic
aauagaaaacugagguuu

SEQ ID NO: 422055 - RNA, 19 nt, Artificial Sequence
  Synthetic
aaauagaaaacugagguuu

SEQ ID NO: 422056 - RNA, 20 nt, Artificial Sequence
  Synthetic
caaauagaaaacugagguuu

SEQ ID NO: 422057 - RNA, 21 nt, Artificial Sequence
  Synthetic
ccaaauagaaaacugagguuu

SEQ ID NO: 422058 - RNA, 22 nt, Artificial Sequence
  Synthetic
uccaaauagaaaacugagguuu

SEQ ID NO: 422059 - RNA, 23 nt, Artificial Sequence
  Synthetic
auccaaauagaaaacugagguuu

SEQ ID NO: 422060 - RNA, 24 nt, Artificial Sequence
  Synthetic
aauccaaauagaaaacugagguuu

SEQ ID NO: 422061 - RNA, 18 nt, Artificial Sequence
  Synthetic
uaaaggccucugagguuu

SEQ ID NO: 422062 - RNA, 19 nt, Artificial Sequence
  Synthetic
auaaaggccucugagguuu

SEQ ID NO: 422063 - RNA, 20 nt, Artificial Sequence
  Synthetic
gauaaaggccucugagguuu

SEQ ID NO: 422064 - RNA, 21 nt, Artificial Sequence
  Synthetic
agauaaaggccucugagguuu

SEQ ID NO: 422065 - RNA, 22 nt, Artificial Sequence
  Synthetic
uagauaaaggccucugagguuu

SEQ ID NO: 422066 - RNA, 23 nt, Artificial Sequence
  Synthetic
uuagauaaaggccucugagguuu

SEQ ID NO: 422067 - RNA, 24 nt, Artificial Sequence
  Synthetic
guuagauaaaggccucugagguuu

SEQ ID NO: 422068 - RNA, 18 nt, Artificial Sequence
  Synthetic
auuuguaaagugagguuu

SEQ ID NO: 422069 - RNA, 19 nt, Artificial Sequence
  Synthetic
cauuuguaaagugagguuu

SEQ ID NO: 422070 - RNA, 20 nt, Artificial Sequence
  Synthetic
ccauuuguaaagugagguuu

SEQ ID NO: 422071 - RNA, 21 nt, Artificial Sequence
  Synthetic
uccauuuguaaagugagguuu

SEQ ID NO: 422072 - RNA, 22 nt, Artificial Sequence
  Synthetic
cuccauuuguaaagugagguuu

SEQ ID NO: 422073 - RNA, 23 nt, Artificial Sequence
  Synthetic
ucuccauuuguaaagugagguuu

SEQ ID NO: 422074 - RNA, 24 nt, Artificial Sequence
  Synthetic
uucuccauuuguaaagugagguuu

SEQ ID NO: 422075 - RNA, 18 nt, Artificial Sequence
  Synthetic
uuucccugugugagguuu

SEQ ID NO: 422076 - RNA, 19 nt, Artificial Sequence
  Synthetic
uuuucccugugugagguuu

SEQ ID NO: 422077 - RNA, 20 nt, Artificial Sequence
  Synthetic
cuuuucccugugugagguuu

SEQ ID NO: 422078 - RNA, 21 nt, Artificial Sequence
  Synthetic
acuuuucccugugugagguuu

SEQ ID NO: 422079 - RNA, 22 nt, Artificial Sequence
  Synthetic
gacuuuucccugugugagguuu

SEQ ID NO: 422080 - RNA, 23 nt, Artificial Sequence
  Synthetic
ugacuuuucccugugugagguuu

SEQ ID NO: 422081 - RNA, 24 nt, Artificial Sequence
  Synthetic
augacuuuucccugugugagguuu

SEQ ID NO: 422082 - RNA, 18 nt, Artificial Sequence
  Synthetic
acuggcaaagauagguuu

SEQ ID NO: 422083 - RNA, 19 nt, Artificial Sequence
  Synthetic
uacuggcaaagauagguuu

SEQ ID NO: 422084 - RNA, 20 nt, Artificial Sequence
  Synthetic
uuacuggcaaagauagguuu

SEQ ID NO: 422085 - RNA, 21 nt, Artificial Sequence
  Synthetic
guuacuggcaaagauagguuu

SEQ ID NO: 422086 - RNA, 22 nt, Artificial Sequence
  Synthetic
aguuacuggcaaagauagguuu

SEQ ID NO: 422087 - RNA, 23 nt, Artificial Sequence
  Synthetic
caguuacuggcaaagauagguuu

SEQ ID NO: 422088 - RNA, 24 nt, Artificial Sequence
  Synthetic
acaguuacuggcaaagauagguuu

SEQ ID NO: 422089 - RNA, 18 nt, Artificial Sequence
  Synthetic
aaaaugcacacuagguuu

SEQ ID NO: 422090 - RNA, 19 nt, Artificial Sequence
  Synthetic
aaaaaugcacacuagguuu

SEQ ID NO: 422091 - RNA, 20 nt, Artificial Sequence
  Synthetic
caaaaaugcacacuagguuu

SEQ ID NO: 422092 - RNA, 21 nt, Artificial Sequence
  Synthetic
acaaaaaugcacacuagguuu

SEQ ID NO: 422093 - RNA, 22 nt, Artificial Sequence
  Synthetic
aacaaaaaugcacacuagguuu

SEQ ID NO: 422094 - RNA, 23 nt, Artificial Sequence
  Synthetic
aaacaaaaaugcacacuagguuu

SEQ ID NO: 422095 - RNA, 24 nt, Artificial Sequence
  Synthetic
uaaacaaaaaugcacacuagguuu

SEQ ID NO: 422096 - RNA, 18 nt, Artificial Sequence
  Synthetic
uagaucaccuguagguuu

SEQ ID NO: 422097 - RNA, 19 nt, Artificial Sequence
  Synthetic
auagaucaccuguagguuu

SEQ ID NO: 422098 - RNA, 20 nt, Artificial Sequence
  Synthetic
uauagaucaccuguagguuu

SEQ ID NO: 422099 - RNA, 21 nt, Artificial Sequence
  Synthetic
uuauagaucaccuguagguuu

SEQ ID NO: 422100 - RNA, 22 nt, Artificial Sequence
  Synthetic
cuuauagaucaccuguagguuu

SEQ ID NO: 422101 - RNA, 23 nt, Artificial Sequence
  Synthetic
gcuuauagaucaccuguagguuu

SEQ ID NO: 422102 - RNA, 24 nt, Artificial Sequence
  Synthetic
ggcuuauagaucaccuguagguuu

SEQ ID NO: 422103 - RNA, 18 nt, Artificial Sequence
  Synthetic
aacuuuuauuuuagguuu

SEQ ID NO: 422104 - RNA, 19 nt, Artificial Sequence
  Synthetic
uaacuuuuauuuuagguuu

SEQ ID NO: 422105 - RNA, 20 nt, Artificial Sequence
  Synthetic
uuaacuuuuauuuuagguuu

SEQ ID NO: 422106 - RNA, 21 nt, Artificial Sequence
  Synthetic
uuuaacuuuuauuuuagguuu

SEQ ID NO: 422107 - RNA, 22 nt, Artificial Sequence
  Synthetic
uuuuaacuuuuauuuuagguuu

SEQ ID NO: 422108 - RNA, 23 nt, Artificial Sequence
  Synthetic
uuuuuaacuuuuauuuuagguuu

SEQ ID NO: 422109 - RNA, 24 nt, Artificial Sequence
  Synthetic
uuuuuuaacuuuuauuuuagguuu

SEQ ID NO: 422110 - RNA, 18 nt, Artificial Sequence
  Synthetic
ugaauguggauacgguuu

SEQ ID NO: 422111 - RNA, 19 nt, Artificial Sequence
  Synthetic
gugaauguggauacgguuu

SEQ ID NO: 422112 - RNA, 20 nt, Artificial Sequence
  Synthetic
ugugaauguggauacgguuu

SEQ ID NO: 422113 - RNA, 21 nt, Artificial Sequence
  Synthetic
cugugaauguggauacgguuu

SEQ ID NO: 422114 - RNA, 22 nt, Artificial Sequence
  Synthetic
ucugugaauguggauacgguuu

SEQ ID NO: 422115 - RNA, 23 nt, Artificial Sequence
  Synthetic
aucugugaauguggauacgguuu

SEQ ID NO: 422116 - RNA, 24 nt, Artificial Sequence
  Synthetic
aaucugugaauguggauacgguuu

SEQ ID NO: 422117 - RNA, 18 nt, Artificial Sequence
  Synthetic
uccagaaacacaggguuu

SEQ ID NO: 422118 - RNA, 19 nt, Artificial Sequence
  Synthetic
auccagaaacacaggguuu

SEQ ID NO: 422119 - RNA, 20 nt, Artificial Sequence
  Synthetic
aauccagaaacacaggguuu

SEQ ID NO: 422120 - RNA, 21 nt, Artificial Sequence
  Synthetic
aaauccagaaacacaggguuu

SEQ ID NO: 422121 - RNA, 22 nt, Artificial Sequence
  Synthetic
aaaauccagaaacacaggguuu

SEQ ID NO: 422122 - RNA, 23 nt, Artificial Sequence
  Synthetic
gaaaauccagaaacacaggguuu

SEQ ID NO: 422123 - RNA, 24 nt, Artificial Sequence
  Synthetic
ugaaaauccagaaacacaggguuu

SEQ ID NO: 422124 - RNA, 18 nt, Artificial Sequence
  Synthetic
uagagaacuacaggguuu

SEQ ID NO: 422125 - RNA, 19 nt, Artificial Sequence
  Synthetic
guagagaacuacaggguuu

SEQ ID NO: 422126 - RNA, 20 nt, Artificial Sequence
  Synthetic
aguagagaacuacaggguuu

SEQ ID NO: 422127 - RNA, 21 nt, Artificial Sequence
  Synthetic
caguagagaacuacaggguuu

SEQ ID NO: 422128 - RNA, 22 nt, Artificial Sequence
  Synthetic
ccaguagagaacuacaggguuu

SEQ ID NO: 422129 - RNA, 23 nt, Artificial Sequence
  Synthetic
accaguagagaacuacaggguuu

SEQ ID NO: 422130 - RNA, 24 nt, Artificial Sequence
  Synthetic
uaccaguagagaacuacaggguuu

SEQ ID NO: 422131 - RNA, 18 nt, Artificial Sequence
  Synthetic
aaauuagcaucaggguuu

SEQ ID NO: 422132 - RNA, 19 nt, Artificial Sequence
  Synthetic
uaaauuagcaucaggguuu

SEQ ID NO: 422133 - RNA, 20 nt, Artificial Sequence
  Synthetic
auaaauuagcaucaggguuu

SEQ ID NO: 422134 - RNA, 21 nt, Artificial Sequence
  Synthetic
gauaaauuagcaucaggguuu

SEQ ID NO: 422135 - RNA, 22 nt, Artificial Sequence
  Synthetic
ugauaaauuagcaucaggguuu

SEQ ID NO: 422136 - RNA, 23 nt, Artificial Sequence
  Synthetic
uugauaaauuagcaucaggguuu

SEQ ID NO: 422137 - RNA, 24 nt, Artificial Sequence
  Synthetic
guugauaaauuagcaucaggguuu

SEQ ID NO: 422138 - RNA, 18 nt, Artificial Sequence
  Synthetic
ugaaauaaaagaggguuu

SEQ ID NO: 422139 - RNA, 19 nt, Artificial Sequence
  Synthetic
gugaaauaaaagaggguuu

SEQ ID NO: 422140 - RNA, 20 nt, Artificial Sequence
  Synthetic
ggugaaauaaaagaggguuu

SEQ ID NO: 422141 - RNA, 21 nt, Artificial Sequence
  Synthetic
aggugaaauaaaagaggguuu

SEQ ID NO: 422142 - RNA, 22 nt, Artificial Sequence
  Synthetic
aaggugaaauaaaagaggguuu

SEQ ID NO: 422143 - RNA, 23 nt, Artificial Sequence
  Synthetic
aaaggugaaauaaaagaggguuu

SEQ ID NO: 422144 - RNA, 24 nt, Artificial Sequence
  Synthetic
uaaaggugaaauaaaagaggguuu

SEQ ID NO: 422145 - RNA, 18 nt, Artificial Sequence
  Synthetic
caaauagcuaacggguuu

SEQ ID NO: 422146 - RNA, 19 nt, Artificial Sequence
  Synthetic
acaaauagcuaacggguuu

SEQ ID NO: 422147 - RNA, 20 nt, Artificial Sequence
  Synthetic
uacaaauagcuaacggguuu

SEQ ID NO: 422148 - RNA, 21 nt, Artificial Sequence
  Synthetic
guacaaauagcuaacggguuu

SEQ ID NO: 422149 - RNA, 22 nt, Artificial Sequence
  Synthetic
uguacaaauagcuaacggguuu

SEQ ID NO: 422150 - RNA, 23 nt, Artificial Sequence
  Synthetic
auguacaaauagcuaacggguuu

SEQ ID NO: 422151 - RNA, 24 nt, Artificial Sequence
  Synthetic
gauguacaaauagcuaacggguuu

SEQ ID NO: 422152 - RNA, 18 nt, Artificial Sequence
  Synthetic
ggaagauauaagggguuu

SEQ ID NO: 422153 - RNA, 19 nt, Artificial Sequence
  Synthetic
uggaagauauaagggguuu

SEQ ID NO: 422154 - RNA, 20 nt, Artificial Sequence
  Synthetic
auggaagauauaagggguuu

SEQ ID NO: 422155 - RNA, 21 nt, Artificial Sequence
  Synthetic
aauggaagauauaagggguuu

SEQ ID NO: 422156 - RNA, 22 nt, Artificial Sequence
  Synthetic
aaauggaagauauaagggguuu

SEQ ID NO: 422157 - RNA, 23 nt, Artificial Sequence
  Synthetic
uaaauggaagauauaagggguuu

SEQ ID NO: 422158 - RNA, 24 nt, Artificial Sequence
  Synthetic
uuaaauggaagauauaagggguuu

SEQ ID NO: 422159 - RNA, 18 nt, Artificial Sequence
  Synthetic
auuagaagguggggguuu

SEQ ID NO: 422160 - RNA, 19 nt, Artificial Sequence
  Synthetic
uauuagaagguggggguuu

SEQ ID NO: 422161 - RNA, 20 nt, Artificial Sequence
  Synthetic
guauuagaagguggggguuu

SEQ ID NO: 422162 - RNA, 21 nt, Artificial Sequence
  Synthetic
gguauuagaagguggggguuu

SEQ ID NO: 422163 - RNA, 22 nt, Artificial Sequence
  Synthetic
ugguauuagaagguggggguuu

SEQ ID NO: 422164 - RNA, 23 nt, Artificial Sequence
  Synthetic
augguauuagaagguggggguuu

SEQ ID NO: 422165 - RNA, 24 nt, Artificial Sequence
  Synthetic
gaugguauuagaagguggggguuu

SEQ ID NO: 422166 - RNA, 18 nt, Artificial Sequence
  Synthetic
gugggccccucuggguuu

SEQ ID NO: 422167 - RNA, 19 nt, Artificial Sequence
  Synthetic
ugugggccccucuggguuu

SEQ ID NO: 422168 - RNA, 20 nt, Artificial Sequence
  Synthetic
cugugggccccucuggguuu

SEQ ID NO: 422169 - RNA, 21 nt, Artificial Sequence
  Synthetic
acugugggccccucuggguuu

SEQ ID NO: 422170 - RNA, 22 nt, Artificial Sequence
  Synthetic
gacugugggccccucuggguuu

SEQ ID NO: 422171 - RNA, 23 nt, Artificial Sequence
  Synthetic
ugacugugggccccucuggguuu

SEQ ID NO: 422172 - RNA, 24 nt, Artificial Sequence
  Synthetic
augacugugggccccucuggguuu

SEQ ID NO: 422173 - RNA, 18 nt, Artificial Sequence
  Synthetic
gaacugauacuuggguuu

SEQ ID NO: 422174 - RNA, 19 nt, Artificial Sequence
  Synthetic
ugaacugauacuuggguuu

SEQ ID NO: 422175 - RNA, 20 nt, Artificial Sequence
  Synthetic
cugaacugauacuuggguuu

SEQ ID NO: 422176 - RNA, 21 nt, Artificial Sequence
  Synthetic
acugaacugauacuuggguuu

SEQ ID NO: 422177 - RNA, 22 nt, Artificial Sequence
  Synthetic
aacugaacugauacuuggguuu

SEQ ID NO: 422178 - RNA, 23 nt, Artificial Sequence
  Synthetic
gaacugaacugauacuuggguuu

SEQ ID NO: 422179 - RNA, 24 nt, Artificial Sequence
  Synthetic
agaacugaacugauacuuggguuu

SEQ ID NO: 422180 - RNA, 18 nt, Artificial Sequence
  Synthetic
augagcauauuuggguuu

SEQ ID NO: 422181 - RNA, 19 nt, Artificial Sequence
  Synthetic
caugagcauauuuggguuu

SEQ ID NO: 422182 - RNA, 20 nt, Artificial Sequence
  Synthetic
acaugagcauauuuggguuu

SEQ ID NO: 422183 - RNA, 21 nt, Artificial Sequence
  Synthetic
gacaugagcauauuuggguuu

SEQ ID NO: 422184 - RNA, 22 nt, Artificial Sequence
  Synthetic
ugacaugagcauauuuggguuu

SEQ ID NO: 422185 - RNA, 23 nt, Artificial Sequence
  Synthetic
gugacaugagcauauuuggguuu

SEQ ID NO: 422186 - RNA, 24 nt, Artificial Sequence
  Synthetic
agugacaugagcauauuuggguuu

SEQ ID NO: 422187 - RNA, 18 nt, Artificial Sequence
  Synthetic
ggaaaguacuaaugguuu

SEQ ID NO: 422188 - RNA, 19 nt, Artificial Sequence
  Synthetic
aggaaaguacuaaugguuu

SEQ ID NO: 422189 - RNA, 20 nt, Artificial Sequence
  Synthetic
caggaaaguacuaaugguuu

SEQ ID NO: 422190 - RNA, 21 nt, Artificial Sequence
  Synthetic
ucaggaaaguacuaaugguuu

SEQ ID NO: 422191 - RNA, 22 nt, Artificial Sequence
  Synthetic
uucaggaaaguacuaaugguuu

SEQ ID NO: 422192 - RNA, 23 nt, Artificial Sequence
  Synthetic
uuucaggaaaguacuaaugguuu

SEQ ID NO: 422193 - RNA, 24 nt, Artificial Sequence
  Synthetic
uuuucaggaaaguacuaaugguuu

SEQ ID NO: 422194 - RNA, 18 nt, Artificial Sequence
  Synthetic
uuguugaaaccaugguuu

SEQ ID NO: 422195 - RNA, 19 nt, Artificial Sequence
  Synthetic
auuguugaaaccaugguuu

SEQ ID NO: 422196 - RNA, 20 nt, Artificial Sequence
  Synthetic
aauuguugaaaccaugguuu

SEQ ID NO: 422197 - RNA, 21 nt, Artificial Sequence
  Synthetic
gaauuguugaaaccaugguuu

SEQ ID NO: 422198 - RNA, 22 nt, Artificial Sequence
  Synthetic
ugaauuguugaaaccaugguuu

SEQ ID NO: 422199 - RNA, 23 nt, Artificial Sequence
  Synthetic
uugaauuguugaaaccaugguuu

SEQ ID NO: 422200 - RNA, 24 nt, Artificial Sequence
  Synthetic
uuugaauuguugaaaccaugguuu

SEQ ID NO: 422201 - RNA, 18 nt, Artificial Sequence
  Synthetic
uugaaaauguuaugguuu

SEQ ID NO: 422202 - RNA, 19 nt, Artificial Sequence
  Synthetic
cuugaaaauguuaugguuu

SEQ ID NO: 422203 - RNA, 20 nt, Artificial Sequence
  Synthetic
ucuugaaaauguuaugguuu

SEQ ID NO: 422204 - RNA, 21 nt, Artificial Sequence
  Synthetic
uucuugaaaauguuaugguuu

SEQ ID NO: 422205 - RNA, 22 nt, Artificial Sequence
  Synthetic
guucuugaaaauguuaugguuu

SEQ ID NO: 422206 - RNA, 23 nt, Artificial Sequence
  Synthetic
aguucuugaaaauguuaugguuu

SEQ ID NO: 422207 - RNA, 24 nt, Artificial Sequence
  Synthetic
caguucuugaaaauguuaugguuu

SEQ ID NO: 422208 - RNA, 18 nt, Artificial Sequence
  Synthetic
uaaaaugguaccugguuu

SEQ ID NO: 422209 - RNA, 19 nt, Artificial Sequence
  Synthetic
uuaaaaugguaccugguuu

SEQ ID NO: 422210 - RNA, 20 nt, Artificial Sequence
  Synthetic
cuuaaaaugguaccugguuu

SEQ ID NO: 422211 - RNA, 21 nt, Artificial Sequence
  Synthetic
acuuaaaaugguaccugguuu

SEQ ID NO: 422212 - RNA, 22 nt, Artificial Sequence
  Synthetic
cacuuaaaaugguaccugguuu

SEQ ID NO: 422213 - RNA, 23 nt, Artificial Sequence
  Synthetic
acacuuaaaaugguaccugguuu

SEQ ID NO: 422214 - RNA, 24 nt, Artificial Sequence
  Synthetic
gacacuuaaaaugguaccugguuu

SEQ ID NO: 422215 - RNA, 18 nt, Artificial Sequence
  Synthetic
ccaucuacucugugguuu

SEQ ID NO: 422216 - RNA, 19 nt, Artificial Sequence
  Synthetic
uccaucuacucugugguuu

SEQ ID NO: 422217 - RNA, 20 nt, Artificial Sequence
  Synthetic
uuccaucuacucugugguuu

SEQ ID NO: 422218 - RNA, 21 nt, Artificial Sequence
  Synthetic
cuuccaucuacucugugguuu

SEQ ID NO: 422219 - RNA, 22 nt, Artificial Sequence
  Synthetic
acuuccaucuacucugugguuu

SEQ ID NO: 422220 - RNA, 23 nt, Artificial Sequence
  Synthetic
cacuuccaucuacucugugguuu

SEQ ID NO: 422221 - RNA, 24 nt, Artificial Sequence
  Synthetic
acacuuccaucuacucugugguuu

SEQ ID NO: 422222 - RNA, 18 nt, Artificial Sequence
  Synthetic
cuaaaguuaaauugguuu

SEQ ID NO: 422223 - RNA, 19 nt, Artificial Sequence
  Synthetic
ccuaaaguuaaauugguuu

SEQ ID NO: 422224 - RNA, 20 nt, Artificial Sequence
  Synthetic
accuaaaguuaaauugguuu

SEQ ID NO: 422225 - RNA, 21 nt, Artificial Sequence
  Synthetic
aaccuaaaguuaaauugguuu

SEQ ID NO: 422226 - RNA, 22 nt, Artificial Sequence
  Synthetic
uaaccuaaaguuaaauugguuu

SEQ ID NO: 422227 - RNA, 23 nt, Artificial Sequence
  Synthetic
auaaccuaaaguuaaauugguuu

SEQ ID NO: 422228 - RNA, 24 nt, Artificial Sequence
  Synthetic
aauaaccuaaaguuaaauugguuu

SEQ ID NO: 422229 - RNA, 18 nt, Artificial Sequence
  Synthetic
aaauuacaugcuugguuu

SEQ ID NO: 422230 - RNA, 19 nt, Artificial Sequence
  Synthetic
uaaauuacaugcuugguuu

SEQ ID NO: 422231 - RNA, 20 nt, Artificial Sequence
  Synthetic
uuaaauuacaugcuugguuu

SEQ ID NO: 422232 - RNA, 21 nt, Artificial Sequence
  Synthetic
uuuaaauuacaugcuugguuu

SEQ ID NO: 422233 - RNA, 22 nt, Artificial Sequence
  Synthetic
uuuuaaauuacaugcuugguuu

SEQ ID NO: 422234 - RNA, 23 nt, Artificial Sequence
  Synthetic
uuuuuaaauuacaugcuugguuu

SEQ ID NO: 422235 - RNA, 24 nt, Artificial Sequence
  Synthetic
uuuuuuaaauuacaugcuugguuu

SEQ ID NO: 422236 - RNA, 18 nt, Artificial Sequence
  Synthetic
uuugccuaaucuugguuu

SEQ ID NO: 422237 - RNA, 19 nt, Artificial Sequence
  Synthetic
uuuugccuaaucuugguuu

SEQ ID NO: 422238 - RNA, 20 nt, Artificial Sequence
  Synthetic
uuuuugccuaaucuugguuu

SEQ ID NO: 422239 - RNA, 21 nt, Artificial Sequence
  Synthetic
guuuuugccuaaucuugguuu

SEQ ID NO: 422240 - RNA, 22 nt, Artificial Sequence
  Synthetic
uguuuuugccuaaucuugguuu

SEQ ID NO: 422241 - RNA, 23 nt, Artificial Sequence
  Synthetic
cuguuuuugccuaaucuugguuu

SEQ ID NO: 422242 - RNA, 24 nt, Artificial Sequence
  Synthetic
ucuguuuuugccuaaucuugguuu

SEQ ID NO: 422243 - RNA, 18 nt, Artificial Sequence
  Synthetic
aauacuuacuguugguuu

SEQ ID NO: 422244 - RNA, 19 nt, Artificial Sequence
  Synthetic
aaauacuuacuguugguuu

SEQ ID NO: 422245 - RNA, 20 nt, Artificial Sequence
  Synthetic
aaaauacuuacuguugguuu

SEQ ID NO: 422246 - RNA, 21 nt, Artificial Sequence
  Synthetic
caaaauacuuacuguugguuu

SEQ ID NO: 422247 - RNA, 22 nt, Artificial Sequence
  Synthetic
acaaaauacuuacuguugguuu

SEQ ID NO: 422248 - RNA, 23 nt, Artificial Sequence
  Synthetic
uacaaaauacuuacuguugguuu

SEQ ID NO: 422249 - RNA, 24 nt, Artificial Sequence
  Synthetic
auacaaaauacuuacuguugguuu

SEQ ID NO: 422250 - RNA, 18 nt, Artificial Sequence
  Synthetic
augaucugaaaaauguuu

SEQ ID NO: 422251 - RNA, 19 nt, Artificial Sequence
  Synthetic
aaugaucugaaaaauguuu

SEQ ID NO: 422252 - RNA, 20 nt, Artificial Sequence
  Synthetic
gaaugaucugaaaaauguuu

SEQ ID NO: 422253 - RNA, 21 nt, Artificial Sequence
  Synthetic
agaaugaucugaaaaauguuu

SEQ ID NO: 422254 - RNA, 22 nt, Artificial Sequence
  Synthetic
uagaaugaucugaaaaauguuu

SEQ ID NO: 422255 - RNA, 23 nt, Artificial Sequence
  Synthetic
uuagaaugaucugaaaaauguuu

SEQ ID NO: 422256 - RNA, 24 nt, Artificial Sequence
  Synthetic
auuagaaugaucugaaaaauguuu

SEQ ID NO: 422257 - RNA, 18 nt, Artificial Sequence
  Synthetic
gccagagacaaaauguuu

SEQ ID NO: 422258 - RNA, 19 nt, Artificial Sequence
  Synthetic
ugccagagacaaaauguuu

SEQ ID NO: 422259 - RNA, 20 nt, Artificial Sequence
  Synthetic
cugccagagacaaaauguuu

SEQ ID NO: 422260 - RNA, 21 nt, Artificial Sequence
  Synthetic
ccugccagagacaaaauguuu

SEQ ID NO: 422261 - RNA, 22 nt, Artificial Sequence
  Synthetic
cccugccagagacaaaauguuu

SEQ ID NO: 422262 - RNA, 23 nt, Artificial Sequence
  Synthetic
ucccugccagagacaaaauguuu

SEQ ID NO: 422263 - RNA, 24 nt, Artificial Sequence
  Synthetic
uucccugccagagacaaaauguuu

SEQ ID NO: 422264 - RNA, 18 nt, Artificial Sequence
  Synthetic
aucuuaaaacaaauguuu

SEQ ID NO: 422265 - RNA, 19 nt, Artificial Sequence
  Synthetic
gaucuuaaaacaaauguuu

SEQ ID NO: 422266 - RNA, 20 nt, Artificial Sequence
  Synthetic
ugaucuuaaaacaaauguuu

SEQ ID NO: 422267 - RNA, 21 nt, Artificial Sequence
  Synthetic
augaucuuaaaacaaauguuu

SEQ ID NO: 422268 - RNA, 22 nt, Artificial Sequence
  Synthetic
uaugaucuuaaaacaaauguuu

SEQ ID NO: 422269 - RNA, 23 nt, Artificial Sequence
  Synthetic
uuaugaucuuaaaacaaauguuu

SEQ ID NO: 422270 - RNA, 24 nt, Artificial Sequence
  Synthetic
uuuaugaucuuaaaacaaauguuu

SEQ ID NO: 422271 - RNA, 18 nt, Artificial Sequence
  Synthetic
acacauacacaaauguuu

SEQ ID NO: 422272 - RNA, 19 nt, Artificial Sequence
  Synthetic
uacacauacacaaauguuu

SEQ ID NO: 422273 - RNA, 20 nt, Artificial Sequence
  Synthetic
auacacauacacaaauguuu

SEQ ID NO: 422274 - RNA, 21 nt, Artificial Sequence
  Synthetic
cauacacauacacaaauguuu

SEQ ID NO: 422275 - RNA, 22 nt, Artificial Sequence
  Synthetic
acauacacauacacaaauguuu

SEQ ID NO: 422276 - RNA, 23 nt, Artificial Sequence
  Synthetic
uacauacacauacacaaauguuu

SEQ ID NO: 422277 - RNA, 24 nt, Artificial Sequence
  Synthetic
auacauacacauacacaaauguuu

SEQ ID NO: 422278 - RNA, 18 nt, Artificial Sequence
  Synthetic
auauuuuaagaaauguuu

SEQ ID NO: 422279 - RNA, 19 nt, Artificial Sequence
  Synthetic
aauauuuuaagaaauguuu

SEQ ID NO: 422280 - RNA, 20 nt, Artificial Sequence
  Synthetic
aaauauuuuaagaaauguuu

SEQ ID NO: 422281 - RNA, 21 nt, Artificial Sequence
  Synthetic
aaaauauuuuaagaaauguuu

SEQ ID NO: 422282 - RNA, 22 nt, Artificial Sequence
  Synthetic
aaaaauauuuuaagaaauguuu

SEQ ID NO: 422283 - RNA, 23 nt, Artificial Sequence
  Synthetic
aaaaaauauuuuaagaaauguuu

SEQ ID NO: 422284 - RNA, 24 nt, Artificial Sequence
  Synthetic
aaaaaaauauuuuaagaaauguuu

SEQ ID NO: 422285 - RNA, 18 nt, Artificial Sequence
  Synthetic
aauaugacgacaauguuu

SEQ ID NO: 422286 - RNA, 19 nt, Artificial Sequence
  Synthetic
gaauaugacgacaauguuu

SEQ ID NO: 422287 - RNA, 20 nt, Artificial Sequence
  Synthetic
agaauaugacgacaauguuu

SEQ ID NO: 422288 - RNA, 21 nt, Artificial Sequence
  Synthetic
uagaauaugacgacaauguuu

SEQ ID NO: 422289 - RNA, 22 nt, Artificial Sequence
  Synthetic
cuagaauaugacgacaauguuu

SEQ ID NO: 422290 - RNA, 23 nt, Artificial Sequence
  Synthetic
gcuagaauaugacgacaauguuu

SEQ ID NO: 422291 - RNA, 24 nt, Artificial Sequence
  Synthetic
agcuagaauaugacgacaauguuu

SEQ ID NO: 422292 - RNA, 18 nt, Artificial Sequence
  Synthetic
ucagucuucggaauguuu

SEQ ID NO: 422293 - RNA, 19 nt, Artificial Sequence
  Synthetic
aucagucuucggaauguuu

SEQ ID NO: 422294 - RNA, 20 nt, Artificial Sequence
  Synthetic
aaucagucuucggaauguuu

SEQ ID NO: 422295 - RNA, 21 nt, Artificial Sequence
  Synthetic
aaaucagucuucggaauguuu

SEQ ID NO: 422296 - RNA, 22 nt, Artificial Sequence
  Synthetic
gaaaucagucuucggaauguuu

SEQ ID NO: 422297 - RNA, 23 nt, Artificial Sequence
  Synthetic
ggaaaucagucuucggaauguuu

SEQ ID NO: 422298 - RNA, 24 nt, Artificial Sequence
  Synthetic
aggaaaucagucuucggaauguuu

SEQ ID NO: 422299 - RNA, 18 nt, Artificial Sequence
  Synthetic
ugaaguauuauaauguuu

SEQ ID NO: 422300 - RNA, 19 nt, Artificial Sequence
  Synthetic
augaaguauuauaauguuu

SEQ ID NO: 422301 - RNA, 20 nt, Artificial Sequence
  Synthetic
aaugaaguauuauaauguuu

SEQ ID NO: 422302 - RNA, 21 nt, Artificial Sequence
  Synthetic
aaaugaaguauuauaauguuu

SEQ ID NO: 422303 - RNA, 22 nt, Artificial Sequence
  Synthetic
gaaaugaaguauuauaauguuu

SEQ ID NO: 422304 - RNA, 23 nt, Artificial Sequence
  Synthetic
agaaaugaaguauuauaauguuu

SEQ ID NO: 422305 - RNA, 24 nt, Artificial Sequence
  Synthetic
aagaaaugaaguauuauaauguuu

SEQ ID NO: 422306 - RNA, 18 nt, Artificial Sequence
  Synthetic
ccuuuaccccuaauguuu

SEQ ID NO: 422307 - RNA, 19 nt, Artificial Sequence
  Synthetic
cccuuuaccccuaauguuu

SEQ ID NO: 422308 - RNA, 20 nt, Artificial Sequence
  Synthetic
ucccuuuaccccuaauguuu

SEQ ID NO: 422309 - RNA, 21 nt, Artificial Sequence
  Synthetic
uucccuuuaccccuaauguuu

SEQ ID NO: 422310 - RNA, 22 nt, Artificial Sequence
  Synthetic
uuucccuuuaccccuaauguuu

SEQ ID NO: 422311 - RNA, 23 nt, Artificial Sequence
  Synthetic
guuucccuuuaccccuaauguuu

SEQ ID NO: 422312 - RNA, 24 nt, Artificial Sequence
  Synthetic
uguuucccuuuaccccuaauguuu

SEQ ID NO: 422313 - RNA, 18 nt, Artificial Sequence
  Synthetic
uuugucuucuacauguuu

SEQ ID NO: 422314 - RNA, 19 nt, Artificial Sequence
  Synthetic
cuuugucuucuacauguuu

SEQ ID NO: 422315 - RNA, 20 nt, Artificial Sequence
  Synthetic
acuuugucuucuacauguuu

SEQ ID NO: 422316 - RNA, 21 nt, Artificial Sequence
  Synthetic
uacuuugucuucuacauguuu

SEQ ID NO: 422317 - RNA, 22 nt, Artificial Sequence
  Synthetic
uuacuuugucuucuacauguuu

SEQ ID NO: 422318 - RNA, 23 nt, Artificial Sequence
  Synthetic
cuuacuuugucuucuacauguuu

SEQ ID NO: 422319 - RNA, 24 nt, Artificial Sequence
  Synthetic
acuuacuuugucuucuacauguuu

SEQ ID NO: 422320 - RNA, 18 nt, Artificial Sequence
  Synthetic
uguuuccuguacauguuu

SEQ ID NO: 422321 - RNA, 19 nt, Artificial Sequence
  Synthetic
cuguuuccuguacauguuu

SEQ ID NO: 422322 - RNA, 20 nt, Artificial Sequence
  Synthetic
gcuguuuccuguacauguuu

SEQ ID NO: 422323 - RNA, 21 nt, Artificial Sequence
  Synthetic
ugcuguuuccuguacauguuu

SEQ ID NO: 422324 - RNA, 22 nt, Artificial Sequence
  Synthetic
uugcuguuuccuguacauguuu

SEQ ID NO: 422325 - RNA, 23 nt, Artificial Sequence
  Synthetic
uuugcuguuuccuguacauguuu

SEQ ID NO: 422326 - RNA, 24 nt, Artificial Sequence
  Synthetic
auuugcuguuuccuguacauguuu

SEQ ID NO: 422327 - RNA, 18 nt, Artificial Sequence
  Synthetic
acuaggaacagcauguuu

SEQ ID NO: 422328 - RNA, 19 nt, Artificial Sequence
  Synthetic
uacuaggaacagcauguuu

SEQ ID NO: 422329 - RNA, 20 nt, Artificial Sequence
  Synthetic
auacuaggaacagcauguuu

SEQ ID NO: 422330 - RNA, 21 nt, Artificial Sequence
  Synthetic
aauacuaggaacagcauguuu

SEQ ID NO: 422331 - RNA, 22 nt, Artificial Sequence
  Synthetic
uaauacuaggaacagcauguuu

SEQ ID NO: 422332 - RNA, 23 nt, Artificial Sequence
  Synthetic
auaauacuaggaacagcauguuu

SEQ ID NO: 422333 - RNA, 24 nt, Artificial Sequence
  Synthetic
gauaauacuaggaacagcauguuu

SEQ ID NO: 422334 - RNA, 18 nt, Artificial Sequence
  Synthetic
guccagcauggcauguuu

SEQ ID NO: 422335 - RNA, 19 nt, Artificial Sequence
  Synthetic
uguccagcauggcauguuu

SEQ ID NO: 422336 - RNA, 20 nt, Artificial Sequence
  Synthetic
uuguccagcauggcauguuu

SEQ ID NO: 422337 - RNA, 21 nt, Artificial Sequence
  Synthetic
guuguccagcauggcauguuu

SEQ ID NO: 422338 - RNA, 22 nt, Artificial Sequence
  Synthetic
cguuguccagcauggcauguuu

SEQ ID NO: 422339 - RNA, 23 nt, Artificial Sequence
  Synthetic
ccguuguccagcauggcauguuu

SEQ ID NO: 422340 - RNA, 24 nt, Artificial Sequence
  Synthetic
uccguuguccagcauggcauguuu

SEQ ID NO: 422341 - RNA, 18 nt, Artificial Sequence
  Synthetic
gggaggcaggucauguuu

SEQ ID NO: 422342 - RNA, 19 nt, Artificial Sequence
  Synthetic
ggggaggcaggucauguuu

SEQ ID NO: 422343 - RNA, 20 nt, Artificial Sequence
  Synthetic
uggggaggcaggucauguuu

SEQ ID NO: 422344 - RNA, 21 nt, Artificial Sequence
  Synthetic
cuggggaggcaggucauguuu

SEQ ID NO: 422345 - RNA, 22 nt, Artificial Sequence
  Synthetic
acuggggaggcaggucauguuu

SEQ ID NO: 422346 - RNA, 23 nt, Artificial Sequence
  Synthetic
cacuggggaggcaggucauguuu

SEQ ID NO: 422347 - RNA, 24 nt, Artificial Sequence
  Synthetic
gcacuggggaggcaggucauguuu

SEQ ID NO: 422348 - RNA, 18 nt, Artificial Sequence
  Synthetic
uauggauaugucauguuu

SEQ ID NO: 422349 - RNA, 19 nt, Artificial Sequence
  Synthetic
auauggauaugucauguuu

SEQ ID NO: 422350 - RNA, 20 nt, Artificial Sequence
  Synthetic
gauauggauaugucauguuu

SEQ ID NO: 422351 - RNA, 21 nt, Artificial Sequence
  Synthetic
ugauauggauaugucauguuu

SEQ ID NO: 422352 - RNA, 22 nt, Artificial Sequence
  Synthetic
uugauauggauaugucauguuu

SEQ ID NO: 422353 - RNA, 23 nt, Artificial Sequence
  Synthetic
cuugauauggauaugucauguuu

SEQ ID NO: 422354 - RNA, 24 nt, Artificial Sequence
  Synthetic
gcuugauauggauaugucauguuu

SEQ ID NO: 422355 - RNA, 18 nt, Artificial Sequence
  Synthetic
aauaggaauaagauguuu

SEQ ID NO: 422356 - RNA, 19 nt, Artificial Sequence
  Synthetic
aaauaggaauaagauguuu

SEQ ID NO: 422357 - RNA, 20 nt, Artificial Sequence
  Synthetic
aaaauaggaauaagauguuu

SEQ ID NO: 422358 - RNA, 21 nt, Artificial Sequence
  Synthetic
aaaaauaggaauaagauguuu

SEQ ID NO: 422359 - RNA, 22 nt, Artificial Sequence
  Synthetic
uaaaaauaggaauaagauguuu

SEQ ID NO: 422360 - RNA, 23 nt, Artificial Sequence
  Synthetic
uuaaaaauaggaauaagauguuu

SEQ ID NO: 422361 - RNA, 24 nt, Artificial Sequence
  Synthetic
uuuaaaaauaggaauaagauguuu

SEQ ID NO: 422362 - RNA, 18 nt, Artificial Sequence
  Synthetic
gaaccaccaaggauguuu

SEQ ID NO: 422363 - RNA, 19 nt, Artificial Sequence
  Synthetic
agaaccaccaaggauguuu

SEQ ID NO: 422364 - RNA, 20 nt, Artificial Sequence
  Synthetic
aagaaccaccaaggauguuu

SEQ ID NO: 422365 - RNA, 21 nt, Artificial Sequence
  Synthetic
gaagaaccaccaaggauguuu

SEQ ID NO: 422366 - RNA, 22 nt, Artificial Sequence
  Synthetic
ugaagaaccaccaaggauguuu

SEQ ID NO: 422367 - RNA, 23 nt, Artificial Sequence
  Synthetic
augaagaaccaccaaggauguuu

SEQ ID NO: 422368 - RNA, 24 nt, Artificial Sequence
  Synthetic
gaugaagaaccaccaaggauguuu

SEQ ID NO: 422369 - RNA, 18 nt, Artificial Sequence
  Synthetic
auagagauaaggauguuu

SEQ ID NO: 422370 - RNA, 19 nt, Artificial Sequence
  Synthetic
aauagagauaaggauguuu

SEQ ID NO: 422371 - RNA, 20 nt, Artificial Sequence
  Synthetic
caauagagauaaggauguuu

SEQ ID NO: 422372 - RNA, 21 nt, Artificial Sequence
  Synthetic
acaauagagauaaggauguuu

SEQ ID NO: 422373 - RNA, 22 nt, Artificial Sequence
  Synthetic
uacaauagagauaaggauguuu

SEQ ID NO: 422374 - RNA, 23 nt, Artificial Sequence
  Synthetic
guacaauagagauaaggauguuu

SEQ ID NO: 422375 - RNA, 24 nt, Artificial Sequence
  Synthetic
uguacaauagagauaaggauguuu

SEQ ID NO: 422376 - RNA, 18 nt, Artificial Sequence
  Synthetic
uguagaccugugauguuu

SEQ ID NO: 422377 - RNA, 19 nt, Artificial Sequence
  Synthetic
cuguagaccugugauguuu

SEQ ID NO: 422378 - RNA, 20 nt, Artificial Sequence
  Synthetic
ccuguagaccugugauguuu

SEQ ID NO: 422379 - RNA, 21 nt, Artificial Sequence
  Synthetic
cccuguagaccugugauguuu

SEQ ID NO: 422380 - RNA, 22 nt, Artificial Sequence
  Synthetic
ucccuguagaccugugauguuu

SEQ ID NO: 422381 - RNA, 23 nt, Artificial Sequence
  Synthetic
uucccuguagaccugugauguuu

SEQ ID NO: 422382 - RNA, 24 nt, Artificial Sequence
  Synthetic
auucccuguagaccugugauguuu

SEQ ID NO: 422383 - RNA, 18 nt, Artificial Sequence
  Synthetic
aguaaccuauugauguuu

SEQ ID NO: 422384 - RNA, 19 nt, Artificial Sequence
  Synthetic
uaguaaccuauugauguuu

SEQ ID NO: 422385 - RNA, 20 nt, Artificial Sequence
  Synthetic
uuaguaaccuauugauguuu

SEQ ID NO: 422386 - RNA, 21 nt, Artificial Sequence
  Synthetic
auuaguaaccuauugauguuu

SEQ ID NO: 422387 - RNA, 22 nt, Artificial Sequence
  Synthetic
uauuaguaaccuauugauguuu

SEQ ID NO: 422388 - RNA, 23 nt, Artificial Sequence
  Synthetic
auauuaguaaccuauugauguuu

SEQ ID NO: 422389 - RNA, 24 nt, Artificial Sequence
  Synthetic
gauauuaguaaccuauugauguuu

SEQ ID NO: 422390 - RNA, 18 nt, Artificial Sequence
  Synthetic
auuaggaaaaauauguuu

SEQ ID NO: 422391 - RNA, 19 nt, Artificial Sequence
  Synthetic
aauuaggaaaaauauguuu

SEQ ID NO: 422392 - RNA, 20 nt, Artificial Sequence
  Synthetic
gaauuaggaaaaauauguuu

SEQ ID NO: 422393 - RNA, 21 nt, Artificial Sequence
  Synthetic
agaauuaggaaaaauauguuu

SEQ ID NO: 422394 - RNA, 22 nt, Artificial Sequence
  Synthetic
aagaauuaggaaaaauauguuu

SEQ ID NO: 422395 - RNA, 23 nt, Artificial Sequence
  Synthetic
aaagaauuaggaaaaauauguuu

SEQ ID NO: 422396 - RNA, 24 nt, Artificial Sequence
  Synthetic
aaaagaauuaggaaaaauauguuu

SEQ ID NO: 422397 - RNA, 18 nt, Artificial Sequence
  Synthetic
ccccccaacaauauguuu

SEQ ID NO: 422398 - RNA, 19 nt, Artificial Sequence
  Synthetic
uccccccaacaauauguuu

SEQ ID NO: 422399 - RNA, 20 nt, Artificial Sequence
  Synthetic
uuccccccaacaauauguuu

SEQ ID NO: 422400 - RNA, 21 nt, Artificial Sequence
  Synthetic
uuuccccccaacaauauguuu

SEQ ID NO: 422401 - RNA, 22 nt, Artificial Sequence
  Synthetic
uuuuccccccaacaauauguuu

SEQ ID NO: 422402 - RNA, 23 nt, Artificial Sequence
  Synthetic
uuuuuccccccaacaauauguuu

SEQ ID NO: 422403 - RNA, 24 nt, Artificial Sequence
  Synthetic
auuuuuccccccaacaauauguuu

SEQ ID NO: 422404 - RNA, 18 nt, Artificial Sequence
  Synthetic
aacccagucaauauguuu

SEQ ID NO: 422405 - RNA, 19 nt, Artificial Sequence
  Synthetic
aaacccagucaauauguuu

SEQ ID NO: 422406 - RNA, 20 nt, Artificial Sequence
  Synthetic
caaacccagucaauauguuu

SEQ ID NO: 422407 - RNA, 21 nt, Artificial Sequence
  Synthetic
ucaaacccagucaauauguuu

SEQ ID NO: 422408 - RNA, 22 nt, Artificial Sequence
  Synthetic
aucaaacccagucaauauguuu

SEQ ID NO: 422409 - RNA, 23 nt, Artificial Sequence
  Synthetic
caucaaacccagucaauauguuu

SEQ ID NO: 422410 - RNA, 24 nt, Artificial Sequence
  Synthetic
gcaucaaacccagucaauauguuu

SEQ ID NO: 422411 - RNA, 18 nt, Artificial Sequence
  Synthetic
auuaauaauaauauguuu

SEQ ID NO: 422412 - RNA, 19 nt, Artificial Sequence
  Synthetic
aauuaauaauaauauguuu

SEQ ID NO: 422413 - RNA, 20 nt, Artificial Sequence
  Synthetic
uaauuaauaauaauauguuu

SEQ ID NO: 422414 - RNA, 21 nt, Artificial Sequence
  Synthetic
auaauuaauaauaauauguuu

SEQ ID NO: 422415 - RNA, 22 nt, Artificial Sequence
  Synthetic
uauaauuaauaauaauauguuu

SEQ ID NO: 422416 - RNA, 23 nt, Artificial Sequence
  Synthetic
cuauaauuaauaauaauauguuu

SEQ ID NO: 422417 - RNA, 24 nt, Artificial Sequence
  Synthetic
acuauaauuaauaauaauauguuu

SEQ ID NO: 422418 - RNA, 18 nt, Artificial Sequence
  Synthetic
ccauaaaacgcuauguuu

SEQ ID NO: 422419 - RNA, 19 nt, Artificial Sequence
  Synthetic
accauaaaacgcuauguuu

SEQ ID NO: 422420 - RNA, 20 nt, Artificial Sequence
  Synthetic
caccauaaaacgcuauguuu

SEQ ID NO: 422421 - RNA, 21 nt, Artificial Sequence
  Synthetic
ucaccauaaaacgcuauguuu

SEQ ID NO: 422422 - RNA, 22 nt, Artificial Sequence
  Synthetic
gucaccauaaaacgcuauguuu

SEQ ID NO: 422423 - RNA, 23 nt, Artificial Sequence
  Synthetic
agucaccauaaaacgcuauguuu

SEQ ID NO: 422424 - RNA, 24 nt, Artificial Sequence
  Synthetic
aagucaccauaaaacgcuauguuu

SEQ ID NO: 422425 - RNA, 18 nt, Artificial Sequence
  Synthetic
guauagggggcuauguuu

SEQ ID NO: 422426 - RNA, 19 nt, Artificial Sequence
  Synthetic
gguauagggggcuauguuu

SEQ ID NO: 422427 - RNA, 20 nt, Artificial Sequence
  Synthetic
agguauagggggcuauguuu

SEQ ID NO: 422428 - RNA, 21 nt, Artificial Sequence
  Synthetic
aagguauagggggcuauguuu

SEQ ID NO: 422429 - RNA, 22 nt, Artificial Sequence
  Synthetic
aaagguauagggggcuauguuu

SEQ ID NO: 422430 - RNA, 23 nt, Artificial Sequence
  Synthetic
gaaagguauagggggcuauguuu

SEQ ID NO: 422431 - RNA, 24 nt, Artificial Sequence
  Synthetic
ggaaagguauagggggcuauguuu

SEQ ID NO: 422432 - RNA, 18 nt, Artificial Sequence
  Synthetic
auacuggaaaguauguuu

SEQ ID NO: 422433 - RNA, 19 nt, Artificial Sequence
  Synthetic
gauacuggaaaguauguuu

SEQ ID NO: 422434 - RNA, 20 nt, Artificial Sequence
  Synthetic
agauacuggaaaguauguuu

SEQ ID NO: 422435 - RNA, 21 nt, Artificial Sequence
  Synthetic
aagauacuggaaaguauguuu

SEQ ID NO: 422436 - RNA, 22 nt, Artificial Sequence
  Synthetic
aaagauacuggaaaguauguuu

SEQ ID NO: 422437 - RNA, 23 nt, Artificial Sequence
  Synthetic
gaaagauacuggaaaguauguuu

SEQ ID NO: 422438 - RNA, 24 nt, Artificial Sequence
  Synthetic
ugaaagauacuggaaaguauguuu

SEQ ID NO: 422439 - RNA, 18 nt, Artificial Sequence
  Synthetic
uuaaacauucguauguuu

SEQ ID NO: 422440 - RNA, 19 nt, Artificial Sequence
  Synthetic
uuuaaacauucguauguuu

SEQ ID NO: 422441 - RNA, 20 nt, Artificial Sequence
  Synthetic
uuuuaaacauucguauguuu

SEQ ID NO: 422442 - RNA, 21 nt, Artificial Sequence
  Synthetic
auuuuaaacauucguauguuu

SEQ ID NO: 422443 - RNA, 22 nt, Artificial Sequence
  Synthetic
aauuuuaaacauucguauguuu

SEQ ID NO: 422444 - RNA, 23 nt, Artificial Sequence
  Synthetic
gaauuuuaaacauucguauguuu

SEQ ID NO: 422445 - RNA, 24 nt, Artificial Sequence
  Synthetic
ugaauuuuaaacauucguauguuu

SEQ ID NO: 422446 - RNA, 18 nt, Artificial Sequence
  Synthetic
uacauaccauguauguuu

SEQ ID NO: 422447 - RNA, 19 nt, Artificial Sequence
  Synthetic
auacauaccauguauguuu

SEQ ID NO: 422448 - RNA, 20 nt, Artificial Sequence
  Synthetic
cauacauaccauguauguuu

SEQ ID NO: 422449 - RNA, 21 nt, Artificial Sequence
  Synthetic
acauacauaccauguauguuu

SEQ ID NO: 422450 - RNA, 22 nt, Artificial Sequence
  Synthetic
uacauacauaccauguauguuu

SEQ ID NO: 422451 - RNA, 23 nt, Artificial Sequence
  Synthetic
auacauacauaccauguauguuu

SEQ ID NO: 422452 - RNA, 24 nt, Artificial Sequence
  Synthetic
uauacauacauaccauguauguuu

SEQ ID NO: 422453 - RNA, 18 nt, Artificial Sequence
  Synthetic
uagggagugcuuauguuu

SEQ ID NO: 422454 - RNA, 19 nt, Artificial Sequence
  Synthetic
uuagggagugcuuauguuu

SEQ ID NO: 422455 - RNA, 20 nt, Artificial Sequence
  Synthetic
cuuagggagugcuuauguuu

SEQ ID NO: 422456 - RNA, 21 nt, Artificial Sequence
  Synthetic
gcuuagggagugcuuauguuu

SEQ ID NO: 422457 - RNA, 22 nt, Artificial Sequence
  Synthetic
agcuuagggagugcuuauguuu

SEQ ID NO: 422458 - RNA, 23 nt, Artificial Sequence
  Synthetic
cagcuuagggagugcuuauguuu

SEQ ID NO: 422459 - RNA, 24 nt, Artificial Sequence
  Synthetic
ccagcuuagggagugcuuauguuu

SEQ ID NO: 422460 - RNA, 18 nt, Artificial Sequence
  Synthetic
auuuuuguucuuauguuu

SEQ ID NO: 422461 - RNA, 19 nt, Artificial Sequence
  Synthetic
aauuuuuguucuuauguuu

SEQ ID NO: 422462 - RNA, 20 nt, Artificial Sequence
  Synthetic
caauuuuuguucuuauguuu

SEQ ID NO: 422463 - RNA, 21 nt, Artificial Sequence
  Synthetic
acaauuuuuguucuuauguuu

SEQ ID NO: 422464 - RNA, 22 nt, Artificial Sequence
  Synthetic
aacaauuuuuguucuuauguuu

SEQ ID NO: 422465 - RNA, 23 nt, Artificial Sequence
  Synthetic
gaacaauuuuuguucuuauguuu

SEQ ID NO: 422466 - RNA, 24 nt, Artificial Sequence
  Synthetic
agaacaauuuuuguucuuauguuu

SEQ ID NO: 422467 - RNA, 18 nt, Artificial Sequence
  Synthetic
uucugugagaaacuguuu

SEQ ID NO: 422468 - RNA, 19 nt, Artificial Sequence
  Synthetic
uuucugugagaaacuguuu

SEQ ID NO: 422469 - RNA, 20 nt, Artificial Sequence
  Synthetic
guuucugugagaaacuguuu

SEQ ID NO: 422470 - RNA, 21 nt, Artificial Sequence
  Synthetic
gguuucugugagaaacuguuu

SEQ ID NO: 422471 - RNA, 22 nt, Artificial Sequence
  Synthetic
agguuucugugagaaacuguuu

SEQ ID NO: 422472 - RNA, 23 nt, Artificial Sequence
  Synthetic
cagguuucugugagaaacuguuu

SEQ ID NO: 422473 - RNA, 24 nt, Artificial Sequence
  Synthetic
ucagguuucugugagaaacuguuu

SEQ ID NO: 422474 - RNA, 18 nt, Artificial Sequence
  Synthetic
aaugcuuauacacuguuu

SEQ ID NO: 422475 - RNA, 19 nt, Artificial Sequence
  Synthetic
gaaugcuuauacacuguuu

SEQ ID NO: 422476 - RNA, 20 nt, Artificial Sequence
  Synthetic
ggaaugcuuauacacuguuu

SEQ ID NO: 422477 - RNA, 21 nt, Artificial Sequence
  Synthetic
gggaaugcuuauacacuguuu

SEQ ID NO: 422478 - RNA, 22 nt, Artificial Sequence
  Synthetic
agggaaugcuuauacacuguuu

SEQ ID NO: 422479 - RNA, 23 nt, Artificial Sequence
  Synthetic
aagggaaugcuuauacacuguuu

SEQ ID NO: 422480 - RNA, 24 nt, Artificial Sequence
  Synthetic
aaagggaaugcuuauacacuguuu

SEQ ID NO: 422481 - RNA, 18 nt, Artificial Sequence
  Synthetic
uuuaaggaaauacuguuu

SEQ ID NO: 422482 - RNA, 19 nt, Artificial Sequence
  Synthetic
auuuaaggaaauacuguuu

SEQ ID NO: 422483 - RNA, 20 nt, Artificial Sequence
  Synthetic
cauuuaaggaaauacuguuu

SEQ ID NO: 422484 - RNA, 21 nt, Artificial Sequence
  Synthetic
acauuuaaggaaauacuguuu

SEQ ID NO: 422485 - RNA, 22 nt, Artificial Sequence
  Synthetic
cacauuuaaggaaauacuguuu

SEQ ID NO: 422486 - RNA, 23 nt, Artificial Sequence
  Synthetic
ccacauuuaaggaaauacuguuu

SEQ ID NO: 422487 - RNA, 24 nt, Artificial Sequence
  Synthetic
accacauuuaaggaaauacuguuu

SEQ ID NO: 422488 - RNA, 18 nt, Artificial Sequence
  Synthetic
uguguauacauacuguuu

SEQ ID NO: 422489 - RNA, 19 nt, Artificial Sequence
  Synthetic
uuguguauacauacuguuu

SEQ ID NO: 422490 - RNA, 20 nt, Artificial Sequence
  Synthetic
auuguguauacauacuguuu

SEQ ID NO: 422491 - RNA, 21 nt, Artificial Sequence
  Synthetic
cauuguguauacauacuguuu

SEQ ID NO: 422492 - RNA, 22 nt, Artificial Sequence
  Synthetic
ucauuguguauacauacuguuu

SEQ ID NO: 422493 - RNA, 23 nt, Artificial Sequence
  Synthetic
cucauuguguauacauacuguuu

SEQ ID NO: 422494 - RNA, 24 nt, Artificial Sequence
  Synthetic
acucauuguguauacauacuguuu

SEQ ID NO: 422495 - RNA, 18 nt, Artificial Sequence
  Synthetic
cauuggaaagcccuguuu

SEQ ID NO: 422496 - RNA, 19 nt, Artificial Sequence
  Synthetic
ccauuggaaagcccuguuu

SEQ ID NO: 422497 - RNA, 20 nt, Artificial Sequence
  Synthetic
cccauuggaaagcccuguuu

SEQ ID NO: 422498 - RNA, 21 nt, Artificial Sequence
  Synthetic
acccauuggaaagcccuguuu

SEQ ID NO: 422499 - RNA, 22 nt, Artificial Sequence
  Synthetic
uacccauuggaaagcccuguuu

SEQ ID NO: 422500 - RNA, 23 nt, Artificial Sequence
  Synthetic
auacccauuggaaagcccuguuu

SEQ ID NO: 422501 - RNA, 24 nt, Artificial Sequence
  Synthetic
cauacccauuggaaagcccuguuu

SEQ ID NO: 422502 - RNA, 18 nt, Artificial Sequence
  Synthetic
uuaggacguguccuguuu

SEQ ID NO: 422503 - RNA, 19 nt, Artificial Sequence
  Synthetic
uuuaggacguguccuguuu

SEQ ID NO: 422504 - RNA, 20 nt, Artificial Sequence
  Synthetic
auuuaggacguguccuguuu

SEQ ID NO: 422505 - RNA, 21 nt, Artificial Sequence
  Synthetic
gauuuaggacguguccuguuu

SEQ ID NO: 422506 - RNA, 22 nt, Artificial Sequence
  Synthetic
ugauuuaggacguguccuguuu

SEQ ID NO: 422507 - RNA, 23 nt, Artificial Sequence
  Synthetic
cugauuuaggacguguccuguuu

SEQ ID NO: 422508 - RNA, 24 nt, Artificial Sequence
  Synthetic
acugauuuaggacguguccuguuu

SEQ ID NO: 422509 - RNA, 18 nt, Artificial Sequence
  Synthetic
aggauucagaagcuguuu

SEQ ID NO: 422510 - RNA, 19 nt, Artificial Sequence
  Synthetic
gaggauucagaagcuguuu

SEQ ID NO: 422511 - RNA, 20 nt, Artificial Sequence
  Synthetic
ugaggauucagaagcuguuu

SEQ ID NO: 422512 - RNA, 21 nt, Artificial Sequence
  Synthetic
cugaggauucagaagcuguuu

SEQ ID NO: 422513 - RNA, 22 nt, Artificial Sequence
  Synthetic
ccugaggauucagaagcuguuu

SEQ ID NO: 422514 - RNA, 23 nt, Artificial Sequence
  Synthetic
accugaggauucagaagcuguuu

SEQ ID NO: 422515 - RNA, 24 nt, Artificial Sequence
  Synthetic
gaccugaggauucagaagcuguuu

SEQ ID NO: 422516 - RNA, 18 nt, Artificial Sequence
  Synthetic
guguuuaugaggcuguuu

SEQ ID NO: 422517 - RNA, 19 nt, Artificial Sequence
  Synthetic
uguguuuaugaggcuguuu

SEQ ID NO: 422518 - RNA, 20 nt, Artificial Sequence
  Synthetic
guguguuuaugaggcuguuu

SEQ ID NO: 422519 - RNA, 21 nt, Artificial Sequence
  Synthetic
gguguguuuaugaggcuguuu

SEQ ID NO: 422520 - RNA, 22 nt, Artificial Sequence
  Synthetic
ggguguguuuaugaggcuguuu

SEQ ID NO: 422521 - RNA, 23 nt, Artificial Sequence
  Synthetic
uggguguguuuaugaggcuguuu

SEQ ID NO: 422522 - RNA, 24 nt, Artificial Sequence
  Synthetic
cuggguguguuuaugaggcuguuu

SEQ ID NO: 422523 - RNA, 18 nt, Artificial Sequence
  Synthetic
gcauagcaacaucuguuu

SEQ ID NO: 422524 - RNA, 19 nt, Artificial Sequence
  Synthetic
agcauagcaacaucuguuu

SEQ ID NO: 422525 - RNA, 20 nt, Artificial Sequence
  Synthetic
aagcauagcaacaucuguuu

SEQ ID NO: 422526 - RNA, 21 nt, Artificial Sequence
  Synthetic
gaagcauagcaacaucuguuu

SEQ ID NO: 422527 - RNA, 22 nt, Artificial Sequence
  Synthetic
ggaagcauagcaacaucuguuu

SEQ ID NO: 422528 - RNA, 23 nt, Artificial Sequence
  Synthetic
aggaagcauagcaacaucuguuu

SEQ ID NO: 422529 - RNA, 24 nt, Artificial Sequence
  Synthetic
caggaagcauagcaacaucuguuu

SEQ ID NO: 422530 - RNA, 18 nt, Artificial Sequence
  Synthetic
aaaguguagacucuguuu

SEQ ID NO: 422531 - RNA, 19 nt, Artificial Sequence
  Synthetic
gaaaguguagacucuguuu

SEQ ID NO: 422532 - RNA, 20 nt, Artificial Sequence
  Synthetic
ugaaaguguagacucuguuu

SEQ ID NO: 422533 - RNA, 21 nt, Artificial Sequence
  Synthetic
augaaaguguagacucuguuu

SEQ ID NO: 422534 - RNA, 22 nt, Artificial Sequence
  Synthetic
aaugaaaguguagacucuguuu

SEQ ID NO: 422535 - RNA, 23 nt, Artificial Sequence
  Synthetic
uaaugaaaguguagacucuguuu

SEQ ID NO: 422536 - RNA, 24 nt, Artificial Sequence
  Synthetic
guaaugaaaguguagacucuguuu

SEQ ID NO: 422537 - RNA, 18 nt, Artificial Sequence
  Synthetic
gaauaguaaccucuguuu

SEQ ID NO: 422538 - RNA, 19 nt, Artificial Sequence
  Synthetic
agaauaguaaccucuguuu

SEQ ID NO: 422539 - RNA, 20 nt, Artificial Sequence
  Synthetic
aagaauaguaaccucuguuu

SEQ ID NO: 422540 - RNA, 21 nt, Artificial Sequence
  Synthetic
aaagaauaguaaccucuguuu

SEQ ID NO: 422541 - RNA, 22 nt, Artificial Sequence
  Synthetic
uaaagaauaguaaccucuguuu

SEQ ID NO: 422542 - RNA, 23 nt, Artificial Sequence
  Synthetic
uuaaagaauaguaaccucuguuu

SEQ ID NO: 422543 - RNA, 24 nt, Artificial Sequence
  Synthetic
uuuaaagaauaguaaccucuguuu

SEQ ID NO: 422544 - RNA, 18 nt, Artificial Sequence
  Synthetic
acuaugggaauucuguuu

SEQ ID NO: 422545 - RNA, 19 nt, Artificial Sequence
  Synthetic
uacuaugggaauucuguuu

SEQ ID NO: 422546 - RNA, 20 nt, Artificial Sequence
  Synthetic
uuacuaugggaauucuguuu

SEQ ID NO: 422547 - RNA, 21 nt, Artificial Sequence
  Synthetic
uuuacuaugggaauucuguuu

SEQ ID NO: 422548 - RNA, 22 nt, Artificial Sequence
  Synthetic
uuuuacuaugggaauucuguuu

SEQ ID NO: 422549 - RNA, 23 nt, Artificial Sequence
  Synthetic
cuuuuacuaugggaauucuguuu

SEQ ID NO: 422550 - RNA, 24 nt, Artificial Sequence
  Synthetic
ccuuuuacuaugggaauucuguuu

SEQ ID NO: 422551 - RNA, 18 nt, Artificial Sequence
  Synthetic
ggauacugauaaguguuu

SEQ ID NO: 422552 - RNA, 19 nt, Artificial Sequence
  Synthetic
uggauacugauaaguguuu

SEQ ID NO: 422553 - RNA, 20 nt, Artificial Sequence
  Synthetic
guggauacugauaaguguuu

SEQ ID NO: 422554 - RNA, 21 nt, Artificial Sequence
  Synthetic
aguggauacugauaaguguuu

SEQ ID NO: 422555 - RNA, 22 nt, Artificial Sequence
  Synthetic
gaguggauacugauaaguguuu

SEQ ID NO: 422556 - RNA, 23 nt, Artificial Sequence
  Synthetic
agaguggauacugauaaguguuu

SEQ ID NO: 422557 - RNA, 24 nt, Artificial Sequence
  Synthetic
uagaguggauacugauaaguguuu

SEQ ID NO: 422558 - RNA, 18 nt, Artificial Sequence
  Synthetic
acgguuucuggaguguuu

SEQ ID NO: 422559 - RNA, 19 nt, Artificial Sequence
  Synthetic
uacgguuucuggaguguuu

SEQ ID NO: 422560 - RNA, 20 nt, Artificial Sequence
  Synthetic
auacgguuucuggaguguuu

SEQ ID NO: 422561 - RNA, 21 nt, Artificial Sequence
  Synthetic
gauacgguuucuggaguguuu

SEQ ID NO: 422562 - RNA, 22 nt, Artificial Sequence
  Synthetic
ggauacgguuucuggaguguuu

SEQ ID NO: 422563 - RNA, 23 nt, Artificial Sequence
  Synthetic
uggauacgguuucuggaguguuu

SEQ ID NO: 422564 - RNA, 24 nt, Artificial Sequence
  Synthetic
guggauacgguuucuggaguguuu

SEQ ID NO: 422565 - RNA, 18 nt, Artificial Sequence
  Synthetic
ugaagacgcuagguguuu

SEQ ID NO: 422566 - RNA, 19 nt, Artificial Sequence
  Synthetic
uugaagacgcuagguguuu

SEQ ID NO: 422567 - RNA, 20 nt, Artificial Sequence
  Synthetic
auugaagacgcuagguguuu

SEQ ID NO: 422568 - RNA, 21 nt, Artificial Sequence
  Synthetic
gauugaagacgcuagguguuu

SEQ ID NO: 422569 - RNA, 22 nt, Artificial Sequence
  Synthetic
ggauugaagacgcuagguguuu

SEQ ID NO: 422570 - RNA, 23 nt, Artificial Sequence
  Synthetic
uggauugaagacgcuagguguuu

SEQ ID NO: 422571 - RNA, 24 nt, Artificial Sequence
  Synthetic
guggauugaagacgcuagguguuu

SEQ ID NO: 422572 - RNA, 18 nt, Artificial Sequence
  Synthetic
uagguccuuuggguguuu

SEQ ID NO: 422573 - RNA, 19 nt, Artificial Sequence
  Synthetic
cuagguccuuuggguguuu

SEQ ID NO: 422574 - RNA, 20 nt, Artificial Sequence
  Synthetic
acuagguccuuuggguguuu

SEQ ID NO: 422575 - RNA, 21 nt, Artificial Sequence
  Synthetic
aacuagguccuuuggguguuu

SEQ ID NO: 422576 - RNA, 22 nt, Artificial Sequence
  Synthetic
gaacuagguccuuuggguguuu

SEQ ID NO: 422577 - RNA, 23 nt, Artificial Sequence
  Synthetic
agaacuagguccuuuggguguuu

SEQ ID NO: 422578 - RNA, 24 nt, Artificial Sequence
  Synthetic
cagaacuagguccuuuggguguuu

SEQ ID NO: 422579 - RNA, 18 nt, Artificial Sequence
  Synthetic
aaugcuuuugauguguuu

SEQ ID NO: 422580 - RNA, 19 nt, Artificial Sequence
  Synthetic
gaaugcuuuugauguguuu

SEQ ID NO: 422581 - RNA, 20 nt, Artificial Sequence
  Synthetic
agaaugcuuuugauguguuu

SEQ ID NO: 422582 - RNA, 21 nt, Artificial Sequence
  Synthetic
cagaaugcuuuugauguguuu

SEQ ID NO: 422583 - RNA, 22 nt, Artificial Sequence
  Synthetic
ucagaaugcuuuugauguguuu

SEQ ID NO: 422584 - RNA, 23 nt, Artificial Sequence
  Synthetic
aucagaaugcuuuugauguguuu

SEQ ID NO: 422585 - RNA, 24 nt, Artificial Sequence
  Synthetic
aaucagaaugcuuuugauguguuu

SEQ ID NO: 422586 - RNA, 18 nt, Artificial Sequence
  Synthetic
gaaaaaggcacuguguuu

SEQ ID NO: 422587 - RNA, 19 nt, Artificial Sequence
  Synthetic
agaaaaaggcacuguguuu

SEQ ID NO: 422588 - RNA, 20 nt, Artificial Sequence
  Synthetic
aagaaaaaggcacuguguuu

SEQ ID NO: 422589 - RNA, 21 nt, Artificial Sequence
  Synthetic
gaagaaaaaggcacuguguuu

SEQ ID NO: 422590 - RNA, 22 nt, Artificial Sequence
  Synthetic
agaagaaaaaggcacuguguuu

SEQ ID NO: 422591 - RNA, 23 nt, Artificial Sequence
  Synthetic
aagaagaaaaaggcacuguguuu

SEQ ID NO: 422592 - RNA, 24 nt, Artificial Sequence
  Synthetic
aaagaagaaaaaggcacuguguuu

SEQ ID NO: 422593 - RNA, 18 nt, Artificial Sequence
  Synthetic
agagaacgcucuguguuu

SEQ ID NO: 422594 - RNA, 19 nt, Artificial Sequence
  Synthetic
cagagaacgcucuguguuu

SEQ ID NO: 422595 - RNA, 20 nt, Artificial Sequence
  Synthetic
gcagagaacgcucuguguuu

SEQ ID NO: 422596 - RNA, 21 nt, Artificial Sequence
  Synthetic
agcagagaacgcucuguguuu

SEQ ID NO: 422597 - RNA, 22 nt, Artificial Sequence
  Synthetic
gagcagagaacgcucuguguuu

SEQ ID NO: 422598 - RNA, 23 nt, Artificial Sequence
  Synthetic
agagcagagaacgcucuguguuu

SEQ ID NO: 422599 - RNA, 24 nt, Artificial Sequence
  Synthetic
uagagcagagaacgcucuguguuu

SEQ ID NO: 422600 - RNA, 18 nt, Artificial Sequence
  Synthetic
ugcaaaaucucuguguuu

SEQ ID NO: 422601 - RNA, 19 nt, Artificial Sequence
  Synthetic
cugcaaaaucucuguguuu

SEQ ID NO: 422602 - RNA, 20 nt, Artificial Sequence
  Synthetic
gcugcaaaaucucuguguuu

SEQ ID NO: 422603 - RNA, 21 nt, Artificial Sequence
  Synthetic
ggcugcaaaaucucuguguuu

SEQ ID NO: 422604 - RNA, 22 nt, Artificial Sequence
  Synthetic
aggcugcaaaaucucuguguuu

SEQ ID NO: 422605 - RNA, 23 nt, Artificial Sequence
  Synthetic
aaggcugcaaaaucucuguguuu

SEQ ID NO: 422606 - RNA, 24 nt, Artificial Sequence
  Synthetic
uaaggcugcaaaaucucuguguuu

SEQ ID NO: 422607 - RNA, 18 nt, Artificial Sequence
  Synthetic
auuauucuggguguguuu

SEQ ID NO: 422608 - RNA, 19 nt, Artificial Sequence
  Synthetic
cauuauucuggguguguuu

SEQ ID NO: 422609 - RNA, 20 nt, Artificial Sequence
  Synthetic
acauuauucuggguguguuu

SEQ ID NO: 422610 - RNA, 21 nt, Artificial Sequence
  Synthetic
aacauuauucuggguguguuu

SEQ ID NO: 422611 - RNA, 22 nt, Artificial Sequence
  Synthetic
aaacauuauucuggguguguuu

SEQ ID NO: 422612 - RNA, 23 nt, Artificial Sequence
  Synthetic
caaacauuauucuggguguguuu

SEQ ID NO: 422613 - RNA, 24 nt, Artificial Sequence
  Synthetic
ucaaacauuauucuggguguguuu

SEQ ID NO: 422614 - RNA, 18 nt, Artificial Sequence
  Synthetic
uuaaucacucuuguguuu

SEQ ID NO: 422615 - RNA, 19 nt, Artificial Sequence
  Synthetic
guuaaucacucuuguguuu

SEQ ID NO: 422616 - RNA, 20 nt, Artificial Sequence
  Synthetic
uguuaaucacucuuguguuu

SEQ ID NO: 422617 - RNA, 21 nt, Artificial Sequence
  Synthetic
guguuaaucacucuuguguuu

SEQ ID NO: 422618 - RNA, 22 nt, Artificial Sequence
  Synthetic
aguguuaaucacucuuguguuu

SEQ ID NO: 422619 - RNA, 23 nt, Artificial Sequence
  Synthetic
aaguguuaaucacucuuguguuu

SEQ ID NO: 422620 - RNA, 24 nt, Artificial Sequence
  Synthetic
aaaguguuaaucacucuuguguuu

SEQ ID NO: 422621 - RNA, 18 nt, Artificial Sequence
  Synthetic
uguuuucuuuuuguguuu

SEQ ID NO: 422622 - RNA, 19 nt, Artificial Sequence
  Synthetic
uuguuuucuuuuuguguuu

SEQ ID NO: 422623 - RNA, 20 nt, Artificial Sequence
  Synthetic
uuuguuuucuuuuuguguuu

SEQ ID NO: 422624 - RNA, 21 nt, Artificial Sequence
  Synthetic
auuuguuuucuuuuuguguuu

SEQ ID NO: 422625 - RNA, 22 nt, Artificial Sequence
  Synthetic
cauuuguuuucuuuuuguguuu

SEQ ID NO: 422626 - RNA, 23 nt, Artificial Sequence
  Synthetic
ucauuuguuuucuuuuuguguuu

SEQ ID NO: 422627 - RNA, 24 nt, Artificial Sequence
  Synthetic
gucauuuguuuucuuuuuguguuu

SEQ ID NO: 422628 - RNA, 18 nt, Artificial Sequence
  Synthetic
aauagauacaaauuguuu

SEQ ID NO: 422629 - RNA, 19 nt, Artificial Sequence
  Synthetic
aaauagauacaaauuguuu

SEQ ID NO: 422630 - RNA, 20 nt, Artificial Sequence
  Synthetic
uaaauagauacaaauuguuu

SEQ ID NO: 422631 - RNA, 21 nt, Artificial Sequence
  Synthetic
auaaauagauacaaauuguuu

SEQ ID NO: 422632 - RNA, 22 nt, Artificial Sequence
  Synthetic
aauaaauagauacaaauuguuu

SEQ ID NO: 422633 - RNA, 23 nt, Artificial Sequence
  Synthetic
aaauaaauagauacaaauuguuu

SEQ ID NO: 422634 - RNA, 24 nt, Artificial Sequence
  Synthetic
uaaauaaauagauacaaauuguuu

SEQ ID NO: 422635 - RNA, 18 nt, Artificial Sequence
  Synthetic
uugacccaauaauuguuu

SEQ ID NO: 422636 - RNA, 19 nt, Artificial Sequence
  Synthetic
uuugacccaauaauuguuu

SEQ ID NO: 422637 - RNA, 20 nt, Artificial Sequence
  Synthetic
uuuugacccaauaauuguuu

SEQ ID NO: 422638 - RNA, 21 nt, Artificial Sequence
  Synthetic
cuuuugacccaauaauuguuu

SEQ ID NO: 422639 - RNA, 22 nt, Artificial Sequence
  Synthetic
ucuuuugacccaauaauuguuu

SEQ ID NO: 422640 - RNA, 23 nt, Artificial Sequence
  Synthetic
uucuuuugacccaauaauuguuu

SEQ ID NO: 422641 - RNA, 24 nt, Artificial Sequence
  Synthetic
cuucuuuugacccaauaauuguuu

SEQ ID NO: 422642 - RNA, 18 nt, Artificial Sequence
  Synthetic
uguccucuggcauuguuu

SEQ ID NO: 422643 - RNA, 19 nt, Artificial Sequence
  Synthetic
cuguccucuggcauuguuu

SEQ ID NO: 422644 - RNA, 20 nt, Artificial Sequence
  Synthetic
ucuguccucuggcauuguuu

SEQ ID NO: 422645 - RNA, 21 nt, Artificial Sequence
  Synthetic
uucuguccucuggcauuguuu

SEQ ID NO: 422646 - RNA, 22 nt, Artificial Sequence
  Synthetic
guucuguccucuggcauuguuu

SEQ ID NO: 422647 - RNA, 23 nt, Artificial Sequence
  Synthetic
gguucuguccucuggcauuguuu

SEQ ID NO: 422648 - RNA, 24 nt, Artificial Sequence
  Synthetic
ggguucuguccucuggcauuguuu

SEQ ID NO: 422649 - RNA, 18 nt, Artificial Sequence
  Synthetic
guaauggcugcauuguuu

SEQ ID NO: 422650 - RNA, 19 nt, Artificial Sequence
  Synthetic
aguaauggcugcauuguuu

SEQ ID NO: 422651 - RNA, 20 nt, Artificial Sequence
  Synthetic
uaguaauggcugcauuguuu

SEQ ID NO: 422652 - RNA, 21 nt, Artificial Sequence
  Synthetic
guaguaauggcugcauuguuu

SEQ ID NO: 422653 - RNA, 22 nt, Artificial Sequence
  Synthetic
gguaguaauggcugcauuguuu

SEQ ID NO: 422654 - RNA, 23 nt, Artificial Sequence
  Synthetic
agguaguaauggcugcauuguuu

SEQ ID NO: 422655 - RNA, 24 nt, Artificial Sequence
  Synthetic
aagguaguaauggcugcauuguuu

SEQ ID NO: 422656 - RNA, 18 nt, Artificial Sequence
  Synthetic
aagcagaucagauuguuu

SEQ ID NO: 422657 - RNA, 19 nt, Artificial Sequence
  Synthetic
gaagcagaucagauuguuu

SEQ ID NO: 422658 - RNA, 20 nt, Artificial Sequence
  Synthetic
agaagcagaucagauuguuu

SEQ ID NO: 422659 - RNA, 21 nt, Artificial Sequence
  Synthetic
cagaagcagaucagauuguuu

SEQ ID NO: 422660 - RNA, 22 nt, Artificial Sequence
  Synthetic
ccagaagcagaucagauuguuu

SEQ ID NO: 422661 - RNA, 23 nt, Artificial Sequence
  Synthetic
uccagaagcagaucagauuguuu

SEQ ID NO: 422662 - RNA, 24 nt, Artificial Sequence
  Synthetic
guccagaagcagaucagauuguuu

SEQ ID NO: 422663 - RNA, 18 nt, Artificial Sequence
  Synthetic
ucauuaauaugauuguuu

SEQ ID NO: 422664 - RNA, 19 nt, Artificial Sequence
  Synthetic
aucauuaauaugauuguuu

SEQ ID NO: 422665 - RNA, 20 nt, Artificial Sequence
  Synthetic
aaucauuaauaugauuguuu

SEQ ID NO: 422666 - RNA, 21 nt, Artificial Sequence
  Synthetic
aaaucauuaauaugauuguuu

SEQ ID NO: 422667 - RNA, 22 nt, Artificial Sequence
  Synthetic
uaaaucauuaauaugauuguuu

SEQ ID NO: 422668 - RNA, 23 nt, Artificial Sequence
  Synthetic
uuaaaucauuaauaugauuguuu

SEQ ID NO: 422669 - RNA, 24 nt, Artificial Sequence
  Synthetic
uuuaaaucauuaauaugauuguuu

SEQ ID NO: 422670 - RNA, 18 nt, Artificial Sequence
  Synthetic
aaagcaaaaauauuguuu

SEQ ID NO: 422671 - RNA, 19 nt, Artificial Sequence
  Synthetic
aaaagcaaaaauauuguuu

SEQ ID NO: 422672 - RNA, 20 nt, Artificial Sequence
  Synthetic
gaaaagcaaaaauauuguuu

SEQ ID NO: 422673 - RNA, 21 nt, Artificial Sequence
  Synthetic
agaaaagcaaaaauauuguuu

SEQ ID NO: 422674 - RNA, 22 nt, Artificial Sequence
  Synthetic
aagaaaagcaaaaauauuguuu

SEQ ID NO: 422675 - RNA, 23 nt, Artificial Sequence
  Synthetic
aaagaaaagcaaaaauauuguuu

SEQ ID NO: 422676 - RNA, 24 nt, Artificial Sequence
  Synthetic
aaaagaaaagcaaaaauauuguuu

SEQ ID NO: 422677 - RNA, 18 nt, Artificial Sequence
  Synthetic
uguuaugcaguauuguuu

SEQ ID NO: 422678 - RNA, 19 nt, Artificial Sequence
  Synthetic
uuguuaugcaguauuguuu

SEQ ID NO: 422679 - RNA, 20 nt, Artificial Sequence
  Synthetic
guuguuaugcaguauuguuu

SEQ ID NO: 422680 - RNA, 21 nt, Artificial Sequence
  Synthetic
aguuguuaugcaguauuguuu

SEQ ID NO: 422681 - RNA, 22 nt, Artificial Sequence
  Synthetic
uaguuguuaugcaguauuguuu

SEQ ID NO: 422682 - RNA, 23 nt, Artificial Sequence
  Synthetic
auaguuguuaugcaguauuguuu

SEQ ID NO: 422683 - RNA, 24 nt, Artificial Sequence
  Synthetic
aauaguuguuaugcaguauuguuu

SEQ ID NO: 422684 - RNA, 18 nt, Artificial Sequence
  Synthetic
uucugcacaaacuuguuu

SEQ ID NO: 422685 - RNA, 19 nt, Artificial Sequence
  Synthetic
uuucugcacaaacuuguuu

SEQ ID NO: 422686 - RNA, 20 nt, Artificial Sequence
  Synthetic
auuucugcacaaacuuguuu

SEQ ID NO: 422687 - RNA, 21 nt, Artificial Sequence
  Synthetic
cauuucugcacaaacuuguuu

SEQ ID NO: 422688 - RNA, 22 nt, Artificial Sequence
  Synthetic
ucauuucugcacaaacuuguuu

SEQ ID NO: 422689 - RNA, 23 nt, Artificial Sequence
  Synthetic
uucauuucugcacaaacuuguuu

SEQ ID NO: 422690 - RNA, 24 nt, Artificial Sequence
  Synthetic
uuucauuucugcacaaacuuguuu

SEQ ID NO: 422691 - RNA, 18 nt, Artificial Sequence
  Synthetic
gucaggagucacuuguuu

SEQ ID NO: 422692 - RNA, 19 nt, Artificial Sequence
  Synthetic
ugucaggagucacuuguuu

SEQ ID NO: 422693 - RNA, 20 nt, Artificial Sequence
  Synthetic
uugucaggagucacuuguuu

SEQ ID NO: 422694 - RNA, 21 nt, Artificial Sequence
  Synthetic
guugucaggagucacuuguuu

SEQ ID NO: 422695 - RNA, 22 nt, Artificial Sequence
  Synthetic
uguugucaggagucacuuguuu

SEQ ID NO: 422696 - RNA, 23 nt, Artificial Sequence
  Synthetic
uuguugucaggagucacuuguuu

SEQ ID NO: 422697 - RNA, 24 nt, Artificial Sequence
  Synthetic
guuguugucaggagucacuuguuu

SEQ ID NO: 422698 - RNA, 18 nt, Artificial Sequence
  Synthetic
aguuuuuuguucuuguuu

SEQ ID NO: 422699 - RNA, 19 nt, Artificial Sequence
  Synthetic
gaguuuuuuguucuuguuu

SEQ ID NO: 422700 - RNA, 20 nt, Artificial Sequence
  Synthetic
agaguuuuuuguucuuguuu

SEQ ID NO: 422701 - RNA, 21 nt, Artificial Sequence
  Synthetic
uagaguuuuuuguucuuguuu

SEQ ID NO: 422702 - RNA, 22 nt, Artificial Sequence
  Synthetic
cuagaguuuuuuguucuuguuu

SEQ ID NO: 422703 - RNA, 23 nt, Artificial Sequence
  Synthetic
acuagaguuuuuuguucuuguuu

SEQ ID NO: 422704 - RNA, 24 nt, Artificial Sequence
  Synthetic
aacuagaguuuuuuguucuuguuu

SEQ ID NO: 422705 - RNA, 18 nt, Artificial Sequence
  Synthetic
ccaaaauugaaguuguuu

SEQ ID NO: 422706 - RNA, 19 nt, Artificial Sequence
  Synthetic
uccaaaauugaaguuguuu

SEQ ID NO: 422707 - RNA, 20 nt, Artificial Sequence
  Synthetic
auccaaaauugaaguuguuu

SEQ ID NO: 422708 - RNA, 21 nt, Artificial Sequence
  Synthetic
uauccaaaauugaaguuguuu

SEQ ID NO: 422709 - RNA, 22 nt, Artificial Sequence
  Synthetic
uuauccaaaauugaaguuguuu

SEQ ID NO: 422710 - RNA, 23 nt, Artificial Sequence
  Synthetic
cuuauccaaaauugaaguuguuu

SEQ ID NO: 422711 - RNA, 24 nt, Artificial Sequence
  Synthetic
ccuuauccaaaauugaaguuguuu

SEQ ID NO: 422712 - RNA, 18 nt, Artificial Sequence
  Synthetic
uucuguuuaaauuuguuu

SEQ ID NO: 422713 - RNA, 19 nt, Artificial Sequence
  Synthetic
guucuguuuaaauuuguuu

SEQ ID NO: 422714 - RNA, 20 nt, Artificial Sequence
  Synthetic
aguucuguuuaaauuuguuu

SEQ ID NO: 422715 - RNA, 21 nt, Artificial Sequence
  Synthetic
uaguucuguuuaaauuuguuu

SEQ ID NO: 422716 - RNA, 22 nt, Artificial Sequence
  Synthetic
uuaguucuguuuaaauuuguuu

SEQ ID NO: 422717 - RNA, 23 nt, Artificial Sequence
  Synthetic
cuuaguucuguuuaaauuuguuu

SEQ ID NO: 422718 - RNA, 24 nt, Artificial Sequence
  Synthetic
ucuuaguucuguuuaaauuuguuu

SEQ ID NO: 422719 - RNA, 18 nt, Artificial Sequence
  Synthetic
auuuuucuuuauuuguuu

SEQ ID NO: 422720 - RNA, 19 nt, Artificial Sequence
  Synthetic
cauuuuucuuuauuuguuu

SEQ ID NO: 422721 - RNA, 20 nt, Artificial Sequence
  Synthetic
gcauuuuucuuuauuuguuu

SEQ ID NO: 422722 - RNA, 21 nt, Artificial Sequence
  Synthetic
ugcauuuuucuuuauuuguuu

SEQ ID NO: 422723 - RNA, 22 nt, Artificial Sequence
  Synthetic
augcauuuuucuuuauuuguuu

SEQ ID NO: 422724 - RNA, 23 nt, Artificial Sequence
  Synthetic
gaugcauuuuucuuuauuuguuu

SEQ ID NO: 422725 - RNA, 24 nt, Artificial Sequence
  Synthetic
cgaugcauuuuucuuuauuuguuu

SEQ ID NO: 422726 - RNA, 18 nt, Artificial Sequence
  Synthetic
agaauauucccuuuguuu

SEQ ID NO: 422727 - RNA, 19 nt, Artificial Sequence
  Synthetic
aagaauauucccuuuguuu

SEQ ID NO: 422728 - RNA, 20 nt, Artificial Sequence
  Synthetic
caagaauauucccuuuguuu

SEQ ID NO: 422729 - RNA, 21 nt, Artificial Sequence
  Synthetic
gcaagaauauucccuuuguuu

SEQ ID NO: 422730 - RNA, 22 nt, Artificial Sequence
  Synthetic
ggcaagaauauucccuuuguuu

SEQ ID NO: 422731 - RNA, 23 nt, Artificial Sequence
  Synthetic
aggcaagaauauucccuuuguuu

SEQ ID NO: 422732 - RNA, 24 nt, Artificial Sequence
  Synthetic
uaggcaagaauauucccuuuguuu

SEQ ID NO: 422733 - RNA, 18 nt, Artificial Sequence
  Synthetic
auugauuauuguuuguuu

SEQ ID NO: 422734 - RNA, 19 nt, Artificial Sequence
  Synthetic
uauugauuauuguuuguuu

SEQ ID NO: 422735 - RNA, 20 nt, Artificial Sequence
  Synthetic
auauugauuauuguuuguuu

SEQ ID NO: 422736 - RNA, 21 nt, Artificial Sequence
  Synthetic
cauauugauuauuguuuguuu

SEQ ID NO: 422737 - RNA, 22 nt, Artificial Sequence
  Synthetic
ccauauugauuauuguuuguuu

SEQ ID NO: 422738 - RNA, 23 nt, Artificial Sequence
  Synthetic
gccauauugauuauuguuuguuu

SEQ ID NO: 422739 - RNA, 24 nt, Artificial Sequence
  Synthetic
ugccauauugauuauuguuuguuu

SEQ ID NO: 422740 - RNA, 18 nt, Artificial Sequence
  Synthetic
aaagcuauuuguuuguuu

SEQ ID NO: 422741 - RNA, 19 nt, Artificial Sequence
  Synthetic
uaaagcuauuuguuuguuu

SEQ ID NO: 422742 - RNA, 20 nt, Artificial Sequence
  Synthetic
auaaagcuauuuguuuguuu

SEQ ID NO: 422743 - RNA, 21 nt, Artificial Sequence
  Synthetic
gauaaagcuauuuguuuguuu

SEQ ID NO: 422744 - RNA, 22 nt, Artificial Sequence
  Synthetic
ggauaaagcuauuuguuuguuu

SEQ ID NO: 422745 - RNA, 23 nt, Artificial Sequence
  Synthetic
uggauaaagcuauuuguuuguuu

SEQ ID NO: 422746 - RNA, 24 nt, Artificial Sequence
  Synthetic
auggauaaagcuauuuguuuguuu

SEQ ID NO: 422747 - RNA, 18 nt, Artificial Sequence
  Synthetic
uugguuguuuguuuguuu

SEQ ID NO: 422748 - RNA, 19 nt, Artificial Sequence
  Synthetic
uuugguuguuuguuuguuu

SEQ ID NO: 422749 - RNA, 20 nt, Artificial Sequence
  Synthetic
uuuugguuguuuguuuguuu

SEQ ID NO: 422750 - RNA, 21 nt, Artificial Sequence
  Synthetic
auuuugguuguuuguuuguuu

SEQ ID NO: 422751 - RNA, 22 nt, Artificial Sequence
  Synthetic
gauuuugguuguuuguuuguuu

SEQ ID NO: 422752 - RNA, 23 nt, Artificial Sequence
  Synthetic
ugauuuugguuguuuguuuguuu

SEQ ID NO: 422753 - RNA, 24 nt, Artificial Sequence
  Synthetic
augauuuugguuguuuguuuguuu

SEQ ID NO: 422754 - RNA, 18 nt, Artificial Sequence
  Synthetic
uuaaauuuuuguuuguuu

SEQ ID NO: 422755 - RNA, 19 nt, Artificial Sequence
  Synthetic
cuuaaauuuuuguuuguuu

SEQ ID NO: 422756 - RNA, 20 nt, Artificial Sequence
  Synthetic
ccuuaaauuuuuguuuguuu

SEQ ID NO: 422757 - RNA, 21 nt, Artificial Sequence
  Synthetic
uccuuaaauuuuuguuuguuu

SEQ ID NO: 422758 - RNA, 22 nt, Artificial Sequence
  Synthetic
cuccuuaaauuuuuguuuguuu

SEQ ID NO: 422759 - RNA, 23 nt, Artificial Sequence
  Synthetic
gcuccuuaaauuuuuguuuguuu

SEQ ID NO: 422760 - RNA, 24 nt, Artificial Sequence
  Synthetic
ugcuccuuaaauuuuuguuuguuu

SEQ ID NO: 422761 - RNA, 18 nt, Artificial Sequence
  Synthetic
agagaaggacuuuuguuu

SEQ ID NO: 422762 - RNA, 19 nt, Artificial Sequence
  Synthetic
cagagaaggacuuuuguuu

SEQ ID NO: 422763 - RNA, 20 nt, Artificial Sequence
  Synthetic
ccagagaaggacuuuuguuu

SEQ ID NO: 422764 - RNA, 21 nt, Artificial Sequence
  Synthetic
gccagagaaggacuuuuguuu

SEQ ID NO: 422765 - RNA, 22 nt, Artificial Sequence
  Synthetic
agccagagaaggacuuuuguuu

SEQ ID NO: 422766 - RNA, 23 nt, Artificial Sequence
  Synthetic
aagccagagaaggacuuuuguuu

SEQ ID NO: 422767 - RNA, 24 nt, Artificial Sequence
  Synthetic
gaagccagagaaggacuuuuguuu

SEQ ID NO: 422768 - RNA, 18 nt, Artificial Sequence
  Synthetic
aucagcuaucuuuuguuu

SEQ ID NO: 422769 - RNA, 19 nt, Artificial Sequence
  Synthetic
uaucagcuaucuuuuguuu

SEQ ID NO: 422770 - RNA, 20 nt, Artificial Sequence
  Synthetic
auaucagcuaucuuuuguuu

SEQ ID NO: 422771 - RNA, 21 nt, Artificial Sequence
  Synthetic
uauaucagcuaucuuuuguuu

SEQ ID NO: 422772 - RNA, 22 nt, Artificial Sequence
  Synthetic
uuauaucagcuaucuuuuguuu

SEQ ID NO: 422773 - RNA, 23 nt, Artificial Sequence
  Synthetic
uuuauaucagcuaucuuuuguuu

SEQ ID NO: 422774 - RNA, 24 nt, Artificial Sequence
  Synthetic
guuuauaucagcuaucuuuuguuu

SEQ ID NO: 422775 - RNA, 18 nt, Artificial Sequence
  Synthetic
cuucugagguuuuuguuu

SEQ ID NO: 422776 - RNA, 19 nt, Artificial Sequence
  Synthetic
ccuucugagguuuuuguuu

SEQ ID NO: 422777 - RNA, 20 nt, Artificial Sequence
  Synthetic
gccuucugagguuuuuguuu

SEQ ID NO: 422778 - RNA, 21 nt, Artificial Sequence
  Synthetic
ugccuucugagguuuuuguuu

SEQ ID NO: 422779 - RNA, 22 nt, Artificial Sequence
  Synthetic
uugccuucugagguuuuuguuu

SEQ ID NO: 422780 - RNA, 23 nt, Artificial Sequence
  Synthetic
cuugccuucugagguuuuuguuu

SEQ ID NO: 422781 - RNA, 24 nt, Artificial Sequence
  Synthetic
acuugccuucugagguuuuuguuu

SEQ ID NO: 422782 - RNA, 18 nt, Artificial Sequence
  Synthetic
cuuuaauuuuuuuuguuu

SEQ ID NO: 422783 - RNA, 19 nt, Artificial Sequence
  Synthetic
ucuuuaauuuuuuuuguuu

SEQ ID NO: 422784 - RNA, 20 nt, Artificial Sequence
  Synthetic
uucuuuaauuuuuuuuguuu

SEQ ID NO: 422785 - RNA, 21 nt, Artificial Sequence
  Synthetic
guucuuuaauuuuuuuuguuu

SEQ ID NO: 422786 - RNA, 22 nt, Artificial Sequence
  Synthetic
gguucuuuaauuuuuuuuguuu

SEQ ID NO: 422787 - RNA, 23 nt, Artificial Sequence
  Synthetic
ugguucuuuaauuuuuuuuguuu

SEQ ID NO: 422788 - RNA, 24 nt, Artificial Sequence
  Synthetic
gugguucuuuaauuuuuuuuguuu

SEQ ID NO: 422789 - RNA, 18 nt, Artificial Sequence
  Synthetic
aucauaauuuaaaauuuu

SEQ ID NO: 422790 - RNA, 19 nt, Artificial Sequence
  Synthetic
uaucauaauuuaaaauuuu

SEQ ID NO: 422791 - RNA, 20 nt, Artificial Sequence
  Synthetic
auaucauaauuuaaaauuuu

SEQ ID NO: 422792 - RNA, 21 nt, Artificial Sequence
  Synthetic
uauaucauaauuuaaaauuuu

SEQ ID NO: 422793 - RNA, 22 nt, Artificial Sequence
  Synthetic
auauaucauaauuuaaaauuuu

SEQ ID NO: 422794 - RNA, 23 nt, Artificial Sequence
  Synthetic
aauauaucauaauuuaaaauuuu

SEQ ID NO: 422795 - RNA, 24 nt, Artificial Sequence
  Synthetic
gaauauaucauaauuuaaaauuuu

SEQ ID NO: 422796 - RNA, 18 nt, Artificial Sequence
  Synthetic
cuucaggcugcaaauuuu

SEQ ID NO: 422797 - RNA, 19 nt, Artificial Sequence
  Synthetic
ucuucaggcugcaaauuuu

SEQ ID NO: 422798 - RNA, 20 nt, Artificial Sequence
  Synthetic
aucuucaggcugcaaauuuu

SEQ ID NO: 422799 - RNA, 21 nt, Artificial Sequence
  Synthetic
caucuucaggcugcaaauuuu

SEQ ID NO: 422800 - RNA, 22 nt, Artificial Sequence
  Synthetic
gcaucuucaggcugcaaauuuu

SEQ ID NO: 422801 - RNA, 23 nt, Artificial Sequence
  Synthetic
ugcaucuucaggcugcaaauuuu

SEQ ID NO: 422802 - RNA, 24 nt, Artificial Sequence
  Synthetic
uugcaucuucaggcugcaaauuuu

SEQ ID NO: 422803 - RNA, 18 nt, Artificial Sequence
  Synthetic
accguucuuucaaauuuu

SEQ ID NO: 422804 - RNA, 19 nt, Artificial Sequence
  Synthetic
caccguucuuucaaauuuu

SEQ ID NO: 422805 - RNA, 20 nt, Artificial Sequence
  Synthetic
gcaccguucuuucaaauuuu

SEQ ID NO: 422806 - RNA, 21 nt, Artificial Sequence
  Synthetic
agcaccguucuuucaaauuuu

SEQ ID NO: 422807 - RNA, 22 nt, Artificial Sequence
  Synthetic
aagcaccguucuuucaaauuuu

SEQ ID NO: 422808 - RNA, 23 nt, Artificial Sequence
  Synthetic
gaagcaccguucuuucaaauuuu

SEQ ID NO: 422809 - RNA, 24 nt, Artificial Sequence
  Synthetic
ggaagcaccguucuuucaaauuuu

SEQ ID NO: 422810 - RNA, 18 nt, Artificial Sequence
  Synthetic
aaguuauuaugaaauuuu

SEQ ID NO: 422811 - RNA, 19 nt, Artificial Sequence
  Synthetic
uaaguuauuaugaaauuuu

SEQ ID NO: 422812 - RNA, 20 nt, Artificial Sequence
  Synthetic
uuaaguuauuaugaaauuuu

SEQ ID NO: 422813 - RNA, 21 nt, Artificial Sequence
  Synthetic
auuaaguuauuaugaaauuuu

SEQ ID NO: 422814 - RNA, 22 nt, Artificial Sequence
  Synthetic
uauuaaguuauuaugaaauuuu

SEQ ID NO: 422815 - RNA, 23 nt, Artificial Sequence
  Synthetic
guauuaaguuauuaugaaauuuu

SEQ ID NO: 422816 - RNA, 24 nt, Artificial Sequence
  Synthetic
gguauuaaguuauuaugaaauuuu

SEQ ID NO: 422817 - RNA, 18 nt, Artificial Sequence
  Synthetic
ucagcacagugaaauuuu

SEQ ID NO: 422818 - RNA, 19 nt, Artificial Sequence
  Synthetic
aucagcacagugaaauuuu

SEQ ID NO: 422819 - RNA, 20 nt, Artificial Sequence
  Synthetic
uaucagcacagugaaauuuu

SEQ ID NO: 422820 - RNA, 21 nt, Artificial Sequence
  Synthetic
cuaucagcacagugaaauuuu

SEQ ID NO: 422821 - RNA, 22 nt, Artificial Sequence
  Synthetic
ccuaucagcacagugaaauuuu

SEQ ID NO: 422822 - RNA, 23 nt, Artificial Sequence
  Synthetic
accuaucagcacagugaaauuuu

SEQ ID NO: 422823 - RNA, 24 nt, Artificial Sequence
  Synthetic
caccuaucagcacagugaaauuuu

SEQ ID NO: 422824 - RNA, 18 nt, Artificial Sequence
  Synthetic
aacagccuuugaaauuuu

SEQ ID NO: 422825 - RNA, 19 nt, Artificial Sequence
  Synthetic
caacagccuuugaaauuuu

SEQ ID NO: 422826 - RNA, 20 nt, Artificial Sequence
  Synthetic
acaacagccuuugaaauuuu

SEQ ID NO: 422827 - RNA, 21 nt, Artificial Sequence
  Synthetic
gacaacagccuuugaaauuuu

SEQ ID NO: 422828 - RNA, 22 nt, Artificial Sequence
  Synthetic
ggacaacagccuuugaaauuuu

SEQ ID NO: 422829 - RNA, 23 nt, Artificial Sequence
  Synthetic
gggacaacagccuuugaaauuuu

SEQ ID NO: 422830 - RNA, 24 nt, Artificial Sequence
  Synthetic
agggacaacagccuuugaaauuuu

SEQ ID NO: 422831 - RNA, 18 nt, Artificial Sequence
  Synthetic
ugauagcuuauaaauuuu

SEQ ID NO: 422832 - RNA, 19 nt, Artificial Sequence
  Synthetic
gugauagcuuauaaauuuu

SEQ ID NO: 422833 - RNA, 20 nt, Artificial Sequence
  Synthetic
agugauagcuuauaaauuuu

SEQ ID NO: 422834 - RNA, 21 nt, Artificial Sequence
  Synthetic
uagugauagcuuauaaauuuu

SEQ ID NO: 422835 - RNA, 22 nt, Artificial Sequence
  Synthetic
uuagugauagcuuauaaauuuu

SEQ ID NO: 422836 - RNA, 23 nt, Artificial Sequence
  Synthetic
uuuagugauagcuuauaaauuuu

SEQ ID NO: 422837 - RNA, 24 nt, Artificial Sequence
  Synthetic
auuuagugauagcuuauaaauuuu

SEQ ID NO: 422838 - RNA, 18 nt, Artificial Sequence
  Synthetic
uuaaaacuuguaaauuuu

SEQ ID NO: 422839 - RNA, 19 nt, Artificial Sequence
  Synthetic
guuaaaacuuguaaauuuu

SEQ ID NO: 422840 - RNA, 20 nt, Artificial Sequence
  Synthetic
aguuaaaacuuguaaauuuu

SEQ ID NO: 422841 - RNA, 21 nt, Artificial Sequence
  Synthetic
gaguuaaaacuuguaaauuuu

SEQ ID NO: 422842 - RNA, 22 nt, Artificial Sequence
  Synthetic
agaguuaaaacuuguaaauuuu

SEQ ID NO: 422843 - RNA, 23 nt, Artificial Sequence
  Synthetic
uagaguuaaaacuuguaaauuuu

SEQ ID NO: 422844 - RNA, 24 nt, Artificial Sequence
  Synthetic
uuagaguuaaaacuuguaaauuuu

SEQ ID NO: 422845 - RNA, 18 nt, Artificial Sequence
  Synthetic
uguaucacauuaaauuuu

SEQ ID NO: 422846 - RNA, 19 nt, Artificial Sequence
  Synthetic
uuguaucacauuaaauuuu

SEQ ID NO: 422847 - RNA, 20 nt, Artificial Sequence
  Synthetic
cuuguaucacauuaaauuuu

SEQ ID NO: 422848 - RNA, 21 nt, Artificial Sequence
  Synthetic
gcuuguaucacauuaaauuuu

SEQ ID NO: 422849 - RNA, 22 nt, Artificial Sequence
  Synthetic
ggcuuguaucacauuaaauuuu

SEQ ID NO: 422850 - RNA, 23 nt, Artificial Sequence
  Synthetic
uggcuuguaucacauuaaauuuu

SEQ ID NO: 422851 - RNA, 24 nt, Artificial Sequence
  Synthetic
cuggcuuguaucacauuaaauuuu

SEQ ID NO: 422852 - RNA, 18 nt, Artificial Sequence
  Synthetic
gcauuuacauuaaauuuu

SEQ ID NO: 422853 - RNA, 19 nt, Artificial Sequence
  Synthetic
agcauuuacauuaaauuuu

SEQ ID NO: 422854 - RNA, 20 nt, Artificial Sequence
  Synthetic
cagcauuuacauuaaauuuu

SEQ ID NO: 422855 - RNA, 21 nt, Artificial Sequence
  Synthetic
ucagcauuuacauuaaauuuu

SEQ ID NO: 422856 - RNA, 22 nt, Artificial Sequence
  Synthetic
uucagcauuuacauuaaauuuu

SEQ ID NO: 422857 - RNA, 23 nt, Artificial Sequence
  Synthetic
auucagcauuuacauuaaauuuu

SEQ ID NO: 422858 - RNA, 24 nt, Artificial Sequence
  Synthetic
aauucagcauuuacauuaaauuuu

SEQ ID NO: 422859 - RNA, 18 nt, Artificial Sequence
  Synthetic
uuauaucacuuaaauuuu

SEQ ID NO: 422860 - RNA, 19 nt, Artificial Sequence
  Synthetic
uuuauaucacuuaaauuuu

SEQ ID NO: 422861 - RNA, 20 nt, Artificial Sequence
  Synthetic
uuuuauaucacuuaaauuuu

SEQ ID NO: 422862 - RNA, 21 nt, Artificial Sequence
  Synthetic
uuuuuauaucacuuaaauuuu

SEQ ID NO: 422863 - RNA, 22 nt, Artificial Sequence
  Synthetic
auuuuuauaucacuuaaauuuu

SEQ ID NO: 422864 - RNA, 23 nt, Artificial Sequence
  Synthetic
gauuuuuauaucacuuaaauuuu

SEQ ID NO: 422865 - RNA, 24 nt, Artificial Sequence
  Synthetic
ggauuuuuauaucacuuaaauuuu

SEQ ID NO: 422866 - RNA, 18 nt, Artificial Sequence
  Synthetic
gcauucaucaacaauuuu

SEQ ID NO: 422867 - RNA, 19 nt, Artificial Sequence
  Synthetic
ugcauucaucaacaauuuu

SEQ ID NO: 422868 - RNA, 20 nt, Artificial Sequence
  Synthetic
gugcauucaucaacaauuuu

SEQ ID NO: 422869 - RNA, 21 nt, Artificial Sequence
  Synthetic
ugugcauucaucaacaauuuu

SEQ ID NO: 422870 - RNA, 22 nt, Artificial Sequence
  Synthetic
cugugcauucaucaacaauuuu

SEQ ID NO: 422871 - RNA, 23 nt, Artificial Sequence
  Synthetic
acugugcauucaucaacaauuuu

SEQ ID NO: 422872 - RNA, 24 nt, Artificial Sequence
  Synthetic
aacugugcauucaucaacaauuuu

SEQ ID NO: 422873 - RNA, 18 nt, Artificial Sequence
  Synthetic
auccuguuuuacaauuuu

SEQ ID NO: 422874 - RNA, 19 nt, Artificial Sequence
  Synthetic
gauccuguuuuacaauuuu

SEQ ID NO: 422875 - RNA, 20 nt, Artificial Sequence
  Synthetic
ggauccuguuuuacaauuuu

SEQ ID NO: 422876 - RNA, 21 nt, Artificial Sequence
  Synthetic
aggauccuguuuuacaauuuu

SEQ ID NO: 422877 - RNA, 22 nt, Artificial Sequence
  Synthetic
uaggauccuguuuuacaauuuu

SEQ ID NO: 422878 - RNA, 23 nt, Artificial Sequence
  Synthetic
uuaggauccuguuuuacaauuuu

SEQ ID NO: 422879 - RNA, 24 nt, Artificial Sequence
  Synthetic
auuaggauccuguuuuacaauuuu

SEQ ID NO: 422880 - RNA, 18 nt, Artificial Sequence
  Synthetic
uagaagaauugcaauuuu

SEQ ID NO: 422881 - RNA, 19 nt, Artificial Sequence
  Synthetic
uuagaagaauugcaauuuu

SEQ ID NO: 422882 - RNA, 20 nt, Artificial Sequence
  Synthetic
uuuagaagaauugcaauuuu

SEQ ID NO: 422883 - RNA, 21 nt, Artificial Sequence
  Synthetic
uuuuagaagaauugcaauuuu

SEQ ID NO: 422884 - RNA, 22 nt, Artificial Sequence
  Synthetic
auuuuagaagaauugcaauuuu

SEQ ID NO: 422885 - RNA, 23 nt, Artificial Sequence
  Synthetic
aauuuuagaagaauugcaauuuu

SEQ ID NO: 422886 - RNA, 24 nt, Artificial Sequence
  Synthetic
uaauuuuagaagaauugcaauuuu

SEQ ID NO: 422887 - RNA, 18 nt, Artificial Sequence
  Synthetic
gucuaugcacagaauuuu

SEQ ID NO: 422888 - RNA, 19 nt, Artificial Sequence
  Synthetic
ugucuaugcacagaauuuu

SEQ ID NO: 422889 - RNA, 20 nt, Artificial Sequence
  Synthetic
augucuaugcacagaauuuu

SEQ ID NO: 422890 - RNA, 21 nt, Artificial Sequence
  Synthetic
aaugucuaugcacagaauuuu

SEQ ID NO: 422891 - RNA, 22 nt, Artificial Sequence
  Synthetic
uaaugucuaugcacagaauuuu

SEQ ID NO: 422892 - RNA, 23 nt, Artificial Sequence
  Synthetic
cuaaugucuaugcacagaauuuu

SEQ ID NO: 422893 - RNA, 24 nt, Artificial Sequence
  Synthetic
ucuaaugucuaugcacagaauuuu

SEQ ID NO: 422894 - RNA, 18 nt, Artificial Sequence
  Synthetic
gaguacuuagagaauuuu

SEQ ID NO: 422895 - RNA, 19 nt, Artificial Sequence
  Synthetic
agaguacuuagagaauuuu

SEQ ID NO: 422896 - RNA, 20 nt, Artificial Sequence
  Synthetic
aagaguacuuagagaauuuu

SEQ ID NO: 422897 - RNA, 21 nt, Artificial Sequence
  Synthetic
caagaguacuuagagaauuuu

SEQ ID NO: 422898 - RNA, 22 nt, Artificial Sequence
  Synthetic
ucaagaguacuuagagaauuuu

SEQ ID NO: 422899 - RNA, 23 nt, Artificial Sequence
  Synthetic
cucaagaguacuuagagaauuuu

SEQ ID NO: 422900 - RNA, 24 nt, Artificial Sequence
  Synthetic
acucaagaguacuuagagaauuuu

SEQ ID NO: 422901 - RNA, 18 nt, Artificial Sequence
  Synthetic
ucauuauaauagaauuuu

SEQ ID NO: 422902 - RNA, 19 nt, Artificial Sequence
  Synthetic
uucauuauaauagaauuuu

SEQ ID NO: 422903 - RNA, 20 nt, Artificial Sequence
  Synthetic
uuucauuauaauagaauuuu

SEQ ID NO: 422904 - RNA, 21 nt, Artificial Sequence
  Synthetic
uuuucauuauaauagaauuuu

SEQ ID NO: 422905 - RNA, 22 nt, Artificial Sequence
  Synthetic
cuuuucauuauaauagaauuuu

SEQ ID NO: 422906 - RNA, 23 nt, Artificial Sequence
  Synthetic
gcuuuucauuauaauagaauuuu

SEQ ID NO: 422907 - RNA, 24 nt, Artificial Sequence
  Synthetic
ugcuuuucauuauaauagaauuuu

SEQ ID NO: 422908 - RNA, 18 nt, Artificial Sequence
  Synthetic
ugguuucauaugaauuuu

SEQ ID NO: 422909 - RNA, 19 nt, Artificial Sequence
  Synthetic
gugguuucauaugaauuuu

SEQ ID NO: 422910 - RNA, 20 nt, Artificial Sequence
  Synthetic
ugugguuucauaugaauuuu

SEQ ID NO: 422911 - RNA, 21 nt, Artificial Sequence
  Synthetic
uugugguuucauaugaauuuu

SEQ ID NO: 422912 - RNA, 22 nt, Artificial Sequence
  Synthetic
uuugugguuucauaugaauuuu

SEQ ID NO: 422913 - RNA, 23 nt, Artificial Sequence
  Synthetic
guuugugguuucauaugaauuuu

SEQ ID NO: 422914 - RNA, 24 nt, Artificial Sequence
  Synthetic
cguuugugguuucauaugaauuuu

SEQ ID NO: 422915 - RNA, 18 nt, Artificial Sequence
  Synthetic
ucaauaaaugugaauuuu

SEQ ID NO: 422916 - RNA, 19 nt, Artificial Sequence
  Synthetic
aucaauaaaugugaauuuu

SEQ ID NO: 422917 - RNA, 20 nt, Artificial Sequence
  Synthetic
uaucaauaaaugugaauuuu

SEQ ID NO: 422918 - RNA, 21 nt, Artificial Sequence
  Synthetic
guaucaauaaaugugaauuuu

SEQ ID NO: 422919 - RNA, 22 nt, Artificial Sequence
  Synthetic
gguaucaauaaaugugaauuuu

SEQ ID NO: 422920 - RNA, 23 nt, Artificial Sequence
  Synthetic
ugguaucaauaaaugugaauuuu

SEQ ID NO: 422921 - RNA, 24 nt, Artificial Sequence
  Synthetic
uugguaucaauaaaugugaauuuu

SEQ ID NO: 422922 - RNA, 18 nt, Artificial Sequence
  Synthetic
uaucuucauuugaauuuu

SEQ ID NO: 422923 - RNA, 19 nt, Artificial Sequence
  Synthetic
uuaucuucauuugaauuuu

SEQ ID NO: 422924 - RNA, 20 nt, Artificial Sequence
  Synthetic
guuaucuucauuugaauuuu

SEQ ID NO: 422925 - RNA, 21 nt, Artificial Sequence
  Synthetic
aguuaucuucauuugaauuuu

SEQ ID NO: 422926 - RNA, 22 nt, Artificial Sequence
  Synthetic
uaguuaucuucauuugaauuuu

SEQ ID NO: 422927 - RNA, 23 nt, Artificial Sequence
  Synthetic
uuaguuaucuucauuugaauuuu

SEQ ID NO: 422928 - RNA, 24 nt, Artificial Sequence
  Synthetic
uuuaguuaucuucauuugaauuuu

SEQ ID NO: 422929 - RNA, 18 nt, Artificial Sequence
  Synthetic
ugcggagaaaauaauuuu

SEQ ID NO: 422930 - RNA, 19 nt, Artificial Sequence
  Synthetic
gugcggagaaaauaauuuu

SEQ ID NO: 422931 - RNA, 20 nt, Artificial Sequence
  Synthetic
ugugcggagaaaauaauuuu

SEQ ID NO: 422932 - RNA, 21 nt, Artificial Sequence
  Synthetic
uugugcggagaaaauaauuuu

SEQ ID NO: 422933 - RNA, 22 nt, Artificial Sequence
  Synthetic
auugugcggagaaaauaauuuu

SEQ ID NO: 422934 - RNA, 23 nt, Artificial Sequence
  Synthetic
aauugugcggagaaaauaauuuu

SEQ ID NO: 422935 - RNA, 24 nt, Artificial Sequence
  Synthetic
aaauugugcggagaaaauaauuuu

SEQ ID NO: 422936 - RNA, 18 nt, Artificial Sequence
  Synthetic
aaucauaauaauaauuuu

SEQ ID NO: 422937 - RNA, 19 nt, Artificial Sequence
  Synthetic
uaaucauaauaauaauuuu

SEQ ID NO: 422938 - RNA, 20 nt, Artificial Sequence
  Synthetic
auaaucauaauaauaauuuu

SEQ ID NO: 422939 - RNA, 21 nt, Artificial Sequence
  Synthetic
cauaaucauaauaauaauuuu

SEQ ID NO: 422940 - RNA, 22 nt, Artificial Sequence
  Synthetic
ucauaaucauaauaauaauuuu

SEQ ID NO: 422941 - RNA, 23 nt, Artificial Sequence
  Synthetic
aucauaaucauaauaauaauuuu

SEQ ID NO: 422942 - RNA, 24 nt, Artificial Sequence
  Synthetic
aaucauaaucauaauaauaauuuu

SEQ ID NO: 422943 - RNA, 18 nt, Artificial Sequence
  Synthetic
uauuuauaagauaauuuu

SEQ ID NO: 422944 - RNA, 19 nt, Artificial Sequence
  Synthetic
uuauuuauaagauaauuuu

SEQ ID NO: 422945 - RNA, 20 nt, Artificial Sequence
  Synthetic
cuuauuuauaagauaauuuu

SEQ ID NO: 422946 - RNA, 21 nt, Artificial Sequence
  Synthetic
ucuuauuuauaagauaauuuu

SEQ ID NO: 422947 - RNA, 22 nt, Artificial Sequence
  Synthetic
gucuuauuuauaagauaauuuu

SEQ ID NO: 422948 - RNA, 23 nt, Artificial Sequence
  Synthetic
agucuuauuuauaagauaauuuu

SEQ ID NO: 422949 - RNA, 24 nt, Artificial Sequence
  Synthetic
uagucuuauuuauaagauaauuuu

SEQ ID NO: 422950 - RNA, 18 nt, Artificial Sequence
  Synthetic
uuuuucuuuccuaauuuu

SEQ ID NO: 422951 - RNA, 19 nt, Artificial Sequence
  Synthetic
uuuuuucuuuccuaauuuu

SEQ ID NO: 422952 - RNA, 20 nt, Artificial Sequence
  Synthetic
uuuuuuucuuuccuaauuuu

SEQ ID NO: 422953 - RNA, 21 nt, Artificial Sequence
  Synthetic
uuuuuuuucuuuccuaauuuu

SEQ ID NO: 422954 - RNA, 22 nt, Artificial Sequence
  Synthetic
uuuuuuuuucuuuccuaauuuu

SEQ ID NO: 422955 - RNA, 23 nt, Artificial Sequence
  Synthetic
cuuuuuuuuucuuuccuaauuuu

SEQ ID NO: 422956 - RNA, 24 nt, Artificial Sequence
  Synthetic
ccuuuuuuuuucuuuccuaauuuu

SEQ ID NO: 422957 - RNA, 18 nt, Artificial Sequence
  Synthetic
acaacucuuucuaauuuu

SEQ ID NO: 422958 - RNA, 19 nt, Artificial Sequence
  Synthetic
cacaacucuuucuaauuuu

SEQ ID NO: 422959 - RNA, 20 nt, Artificial Sequence
  Synthetic
gcacaacucuuucuaauuuu

SEQ ID NO: 422960 - RNA, 21 nt, Artificial Sequence
  Synthetic
agcacaacucuuucuaauuuu

SEQ ID NO: 422961 - RNA, 22 nt, Artificial Sequence
  Synthetic
cagcacaacucuuucuaauuuu

SEQ ID NO: 422962 - RNA, 23 nt, Artificial Sequence
  Synthetic
acagcacaacucuuucuaauuuu

SEQ ID NO: 422963 - RNA, 24 nt, Artificial Sequence
  Synthetic
cacagcacaacucuuucuaauuuu

SEQ ID NO: 422964 - RNA, 18 nt, Artificial Sequence
  Synthetic
uauuaaaacauuaauuuu

SEQ ID NO: 422965 - RNA, 19 nt, Artificial Sequence
  Synthetic
cuauuaaaacauuaauuuu

SEQ ID NO: 422966 - RNA, 20 nt, Artificial Sequence
  Synthetic
acuauuaaaacauuaauuuu

SEQ ID NO: 422967 - RNA, 21 nt, Artificial Sequence
  Synthetic
uacuauuaaaacauuaauuuu

SEQ ID NO: 422968 - RNA, 22 nt, Artificial Sequence
  Synthetic
auacuauuaaaacauuaauuuu

SEQ ID NO: 422969 - RNA, 23 nt, Artificial Sequence
  Synthetic
aauacuauuaaaacauuaauuuu

SEQ ID NO: 422970 - RNA, 24 nt, Artificial Sequence
  Synthetic
uaauacuauuaaaacauuaauuuu

SEQ ID NO: 422971 - RNA, 18 nt, Artificial Sequence
  Synthetic
gcacccaggauuaauuuu

SEQ ID NO: 422972 - RNA, 19 nt, Artificial Sequence
  Synthetic
agcacccaggauuaauuuu

SEQ ID NO: 422973 - RNA, 20 nt, Artificial Sequence
  Synthetic
gagcacccaggauuaauuuu

SEQ ID NO: 422974 - RNA, 21 nt, Artificial Sequence
  Synthetic
ugagcacccaggauuaauuuu

SEQ ID NO: 422975 - RNA, 22 nt, Artificial Sequence
  Synthetic
cugagcacccaggauuaauuuu

SEQ ID NO: 422976 - RNA, 23 nt, Artificial Sequence
  Synthetic
ucugagcacccaggauuaauuuu

SEQ ID NO: 422977 - RNA, 24 nt, Artificial Sequence
  Synthetic
uucugagcacccaggauuaauuuu

SEQ ID NO: 422978 - RNA, 18 nt, Artificial Sequence
  Synthetic
auucuuuauauuaauuuu

SEQ ID NO: 422979 - RNA, 19 nt, Artificial Sequence
  Synthetic
aauucuuuauauuaauuuu

SEQ ID NO: 422980 - RNA, 20 nt, Artificial Sequence
  Synthetic
gaauucuuuauauuaauuuu

SEQ ID NO: 422981 - RNA, 21 nt, Artificial Sequence
  Synthetic
ugaauucuuuauauuaauuuu

SEQ ID NO: 422982 - RNA, 22 nt, Artificial Sequence
  Synthetic
cugaauucuuuauauuaauuuu

SEQ ID NO: 422983 - RNA, 23 nt, Artificial Sequence
  Synthetic
ucugaauucuuuauauuaauuuu

SEQ ID NO: 422984 - RNA, 24 nt, Artificial Sequence
  Synthetic
uucugaauucuuuauauuaauuuu

SEQ ID NO: 422985 - RNA, 18 nt, Artificial Sequence
  Synthetic
uuaacuuuucuuaauuuu

SEQ ID NO: 422986 - RNA, 19 nt, Artificial Sequence
  Synthetic
auuaacuuuucuuaauuuu

SEQ ID NO: 422987 - RNA, 20 nt, Artificial Sequence
  Synthetic
aauuaacuuuucuuaauuuu

SEQ ID NO: 422988 - RNA, 21 nt, Artificial Sequence
  Synthetic
aaauuaacuuuucuuaauuuu

SEQ ID NO: 422989 - RNA, 22 nt, Artificial Sequence
  Synthetic
uaaauuaacuuuucuuaauuuu

SEQ ID NO: 422990 - RNA, 23 nt, Artificial Sequence
  Synthetic
guaaauuaacuuuucuuaauuuu

SEQ ID NO: 422991 - RNA, 24 nt, Artificial Sequence
  Synthetic
uguaaauuaacuuuucuuaauuuu

SEQ ID NO: 422992 - RNA, 18 nt, Artificial Sequence
  Synthetic
uuuuuuauuuuuaauuuu

SEQ ID NO: 422993 - RNA, 19 nt, Artificial Sequence
  Synthetic
uuuuuuuauuuuuaauuuu

SEQ ID NO: 422994 - RNA, 20 nt, Artificial Sequence
  Synthetic
uuuuuuuuauuuuuaauuuu

SEQ ID NO: 422995 - RNA, 21 nt, Artificial Sequence
  Synthetic
uuuuuuuuuauuuuuaauuuu

SEQ ID NO: 422996 - RNA, 22 nt, Artificial Sequence
  Synthetic
uuuuuuuuuuauuuuuaauuuu

SEQ ID NO: 422997 - RNA, 23 nt, Artificial Sequence
  Synthetic
auuuuuuuuuuauuuuuaauuuu

SEQ ID NO: 422998 - RNA, 24 nt, Artificial Sequence
  Synthetic
aauuuuuuuuuuauuuuuaauuuu

SEQ ID NO: 422999 - RNA, 18 nt, Artificial Sequence
  Synthetic
agguuuuuuuuuaauuuu

SEQ ID NO: 423000 - RNA, 19 nt, Artificial Sequence
  Synthetic
aagguuuuuuuuuaauuuu

SEQ ID NO: 423001 - RNA, 20 nt, Artificial Sequence
  Synthetic
uaagguuuuuuuuuaauuuu

SEQ ID NO: 423002 - RNA, 21 nt, Artificial Sequence
  Synthetic
auaagguuuuuuuuuaauuuu

SEQ ID NO: 423003 - RNA, 22 nt, Artificial Sequence
  Synthetic
aauaagguuuuuuuuuaauuuu

SEQ ID NO: 423004 - RNA, 23 nt, Artificial Sequence
  Synthetic
uaauaagguuuuuuuuuaauuuu

SEQ ID NO: 423005 - RNA, 24 nt, Artificial Sequence
  Synthetic
guaauaagguuuuuuuuuaauuuu

SEQ ID NO: 423006 - RNA, 18 nt, Artificial Sequence
  Synthetic
acuggaagaaaacauuuu

SEQ ID NO: 423007 - RNA, 19 nt, Artificial Sequence
  Synthetic
uacuggaagaaaacauuuu

SEQ ID NO: 423008 - RNA, 20 nt, Artificial Sequence
  Synthetic
uuacuggaagaaaacauuuu

SEQ ID NO: 423009 - RNA, 21 nt, Artificial Sequence
  Synthetic
uuuacuggaagaaaacauuuu

SEQ ID NO: 423010 - RNA, 22 nt, Artificial Sequence
  Synthetic
auuuacuggaagaaaacauuuu

SEQ ID NO: 423011 - RNA, 23 nt, Artificial Sequence
  Synthetic
gauuuacuggaagaaaacauuuu

SEQ ID NO: 423012 - RNA, 24 nt, Artificial Sequence
  Synthetic
agauuuacuggaagaaaacauuuu

SEQ ID NO: 423013 - RNA, 18 nt, Artificial Sequence
  Synthetic
aauacaaagaaacauuuu

SEQ ID NO: 423014 - RNA, 19 nt, Artificial Sequence
  Synthetic
aaauacaaagaaacauuuu

SEQ ID NO: 423015 - RNA, 20 nt, Artificial Sequence
  Synthetic
caaauacaaagaaacauuuu

SEQ ID NO: 423016 - RNA, 21 nt, Artificial Sequence
  Synthetic
acaaauacaaagaaacauuuu

SEQ ID NO: 423017 - RNA, 22 nt, Artificial Sequence
  Synthetic
uacaaauacaaagaaacauuuu

SEQ ID NO: 423018 - RNA, 23 nt, Artificial Sequence
  Synthetic
uuacaaauacaaagaaacauuuu

SEQ ID NO: 423019 - RNA, 24 nt, Artificial Sequence
  Synthetic
auuacaaauacaaagaaacauuuu

SEQ ID NO: 423020 - RNA, 18 nt, Artificial Sequence
  Synthetic
uucagcaaaccacauuuu

SEQ ID NO: 423021 - RNA, 19 nt, Artificial Sequence
  Synthetic
guucagcaaaccacauuuu

SEQ ID NO: 423022 - RNA, 20 nt, Artificial Sequence
  Synthetic
uguucagcaaaccacauuuu

SEQ ID NO: 423023 - RNA, 21 nt, Artificial Sequence
  Synthetic
cuguucagcaaaccacauuuu

SEQ ID NO: 423024 - RNA, 22 nt, Artificial Sequence
  Synthetic
acuguucagcaaaccacauuuu

SEQ ID NO: 423025 - RNA, 23 nt, Artificial Sequence
  Synthetic
uacuguucagcaaaccacauuuu

SEQ ID NO: 423026 - RNA, 24 nt, Artificial Sequence
  Synthetic
cuacuguucagcaaaccacauuuu

SEQ ID NO: 423027 - RNA, 18 nt, Artificial Sequence
  Synthetic
guuccaggaccacauuuu

SEQ ID NO: 423028 - RNA, 19 nt, Artificial Sequence
  Synthetic
gguuccaggaccacauuuu

SEQ ID NO: 423029 - RNA, 20 nt, Artificial Sequence
  Synthetic
ugguuccaggaccacauuuu

SEQ ID NO: 423030 - RNA, 21 nt, Artificial Sequence
  Synthetic
cugguuccaggaccacauuuu

SEQ ID NO: 423031 - RNA, 22 nt, Artificial Sequence
  Synthetic
gcugguuccaggaccacauuuu

SEQ ID NO: 423032 - RNA, 23 nt, Artificial Sequence
  Synthetic
ugcugguuccaggaccacauuuu

SEQ ID NO: 423033 - RNA, 24 nt, Artificial Sequence
  Synthetic
cugcugguuccaggaccacauuuu

SEQ ID NO: 423034 - RNA, 18 nt, Artificial Sequence
  Synthetic
agauaguguccacauuuu

SEQ ID NO: 423035 - RNA, 19 nt, Artificial Sequence
  Synthetic
gagauaguguccacauuuu

SEQ ID NO: 423036 - RNA, 20 nt, Artificial Sequence
  Synthetic
agagauaguguccacauuuu

SEQ ID NO: 423037 - RNA, 21 nt, Artificial Sequence
  Synthetic
uagagauaguguccacauuuu

SEQ ID NO: 423038 - RNA, 22 nt, Artificial Sequence
  Synthetic
cuagagauaguguccacauuuu

SEQ ID NO: 423039 - RNA, 23 nt, Artificial Sequence
  Synthetic
ucuagagauaguguccacauuuu

SEQ ID NO: 423040 - RNA, 24 nt, Artificial Sequence
  Synthetic
aucuagagauaguguccacauuuu

SEQ ID NO: 423041 - RNA, 18 nt, Artificial Sequence
  Synthetic
aacacagucugacauuuu

SEQ ID NO: 423042 - RNA, 19 nt, Artificial Sequence
  Synthetic
aaacacagucugacauuuu

SEQ ID NO: 423043 - RNA, 20 nt, Artificial Sequence
  Synthetic
gaaacacagucugacauuuu

SEQ ID NO: 423044 - RNA, 21 nt, Artificial Sequence
  Synthetic
ggaaacacagucugacauuuu

SEQ ID NO: 423045 - RNA, 22 nt, Artificial Sequence
  Synthetic
gggaaacacagucugacauuuu

SEQ ID NO: 423046 - RNA, 23 nt, Artificial Sequence
  Synthetic
ugggaaacacagucugacauuuu

SEQ ID NO: 423047 - RNA, 24 nt, Artificial Sequence
  Synthetic
augggaaacacagucugacauuuu

SEQ ID NO: 423048 - RNA, 18 nt, Artificial Sequence
  Synthetic
aaaagaaaaacccauuuu

SEQ ID NO: 423049 - RNA, 19 nt, Artificial Sequence
  Synthetic
gaaaagaaaaacccauuuu

SEQ ID NO: 423050 - RNA, 20 nt, Artificial Sequence
  Synthetic
agaaaagaaaaacccauuuu

SEQ ID NO: 423051 - RNA, 22 nt, Artificial Sequence
  Synthetic
auagaaaagaaaaacccauuuu

SEQ ID NO: 423052 - RNA, 23 nt, Artificial Sequence
  Synthetic
gauagaaaagaaaaacccauuuu

SEQ ID NO: 423053 - RNA, 24 nt, Artificial Sequence
  Synthetic
ugauagaaaagaaaaacccauuuu

SEQ ID NO: 423054 - RNA, 18 nt, Artificial Sequence
  Synthetic
gcuugugagacccauuuu

SEQ ID NO: 423055 - RNA, 19 nt, Artificial Sequence
  Synthetic
agcuugugagacccauuuu

SEQ ID NO: 423056 - RNA, 20 nt, Artificial Sequence
  Synthetic
uagcuugugagacccauuuu

SEQ ID NO: 423057 - RNA, 21 nt, Artificial Sequence
  Synthetic
cuagcuugugagacccauuuu

SEQ ID NO: 423058 - RNA, 22 nt, Artificial Sequence
  Synthetic
ucuagcuugugagacccauuuu

SEQ ID NO: 423059 - RNA, 23 nt, Artificial Sequence
  Synthetic
uucuagcuugugagacccauuuu

SEQ ID NO: 423060 - RNA, 24 nt, Artificial Sequence
  Synthetic
uuucuagcuugugagacccauuuu

SEQ ID NO: 423061 - RNA, 18 nt, Artificial Sequence
  Synthetic
cugaaaaaacgccauuuu

SEQ ID NO: 423062 - RNA, 19 nt, Artificial Sequence
  Synthetic
gcugaaaaaacgccauuuu

SEQ ID NO: 423063 - RNA, 20 nt, Artificial Sequence
  Synthetic
agcugaaaaaacgccauuuu

SEQ ID NO: 423064 - RNA, 21 nt, Artificial Sequence
  Synthetic
gagcugaaaaaacgccauuuu

SEQ ID NO: 423065 - RNA, 22 nt, Artificial Sequence
  Synthetic
ggagcugaaaaaacgccauuuu

SEQ ID NO: 423066 - RNA, 23 nt, Artificial Sequence
  Synthetic
aggagcugaaaaaacgccauuuu

SEQ ID NO: 423067 - RNA, 24 nt, Artificial Sequence
  Synthetic
aaggagcugaaaaaacgccauuuu

SEQ ID NO: 423068 - RNA, 18 nt, Artificial Sequence
  Synthetic
uaccuuguaguccauuuu

SEQ ID NO: 423069 - RNA, 19 nt, Artificial Sequence
  Synthetic
guaccuuguaguccauuuu

SEQ ID NO: 423070 - RNA, 20 nt, Artificial Sequence
  Synthetic
uguaccuuguaguccauuuu

SEQ ID NO: 423071 - RNA, 21 nt, Artificial Sequence
  Synthetic
auguaccuuguaguccauuuu

SEQ ID NO: 423072 - RNA, 22 nt, Artificial Sequence
  Synthetic
aauguaccuuguaguccauuuu

SEQ ID NO: 423073 - RNA, 23 nt, Artificial Sequence
  Synthetic
aaauguaccuuguaguccauuuu

SEQ ID NO: 423074 - RNA, 24 nt, Artificial Sequence
  Synthetic
gaaauguaccuuguaguccauuuu

SEQ ID NO: 423075 - RNA, 18 nt, Artificial Sequence
  Synthetic
uugcuccccaagcauuuu

SEQ ID NO: 423076 - RNA, 19 nt, Artificial Sequence
  Synthetic
auugcuccccaagcauuuu

SEQ ID NO: 423077 - RNA, 20 nt, Artificial Sequence
  Synthetic
gauugcuccccaagcauuuu

SEQ ID NO: 423078 - RNA, 21 nt, Artificial Sequence
  Synthetic
ggauugcuccccaagcauuuu

SEQ ID NO: 423079 - RNA, 22 nt, Artificial Sequence
  Synthetic
aggauugcuccccaagcauuuu

SEQ ID NO: 423080 - RNA, 23 nt, Artificial Sequence
  Synthetic
aaggauugcuccccaagcauuuu

SEQ ID NO: 423081 - RNA, 24 nt, Artificial Sequence
  Synthetic
aaaggauugcuccccaagcauuuu

SEQ ID NO: 423082 - RNA, 18 nt, Artificial Sequence
  Synthetic
cuguaaucccagcauuuu

SEQ ID NO: 423083 - RNA, 19 nt, Artificial Sequence
  Synthetic
ccuguaaucccagcauuuu

SEQ ID NO: 423084 - RNA, 20 nt, Artificial Sequence
  Synthetic
accuguaaucccagcauuuu

SEQ ID NO: 423085 - RNA, 21 nt, Artificial Sequence
  Synthetic
caccuguaaucccagcauuuu

SEQ ID NO: 423086 - RNA, 22 nt, Artificial Sequence
  Synthetic
acaccuguaaucccagcauuuu

SEQ ID NO: 423087 - RNA, 23 nt, Artificial Sequence
  Synthetic
cacaccuguaaucccagcauuuu

SEQ ID NO: 423088 - RNA, 24 nt, Artificial Sequence
  Synthetic
ucacaccuguaaucccagcauuuu

SEQ ID NO: 423089 - RNA, 18 nt, Artificial Sequence
  Synthetic
acagcacaagagcauuuu

SEQ ID NO: 423090 - RNA, 19 nt, Artificial Sequence
  Synthetic
gacagcacaagagcauuuu

SEQ ID NO: 423091 - RNA, 20 nt, Artificial Sequence
  Synthetic
ggacagcacaagagcauuuu

SEQ ID NO: 423092 - RNA, 21 nt, Artificial Sequence
  Synthetic
aggacagcacaagagcauuuu

SEQ ID NO: 423093 - RNA, 22 nt, Artificial Sequence
  Synthetic
aaggacagcacaagagcauuuu

SEQ ID NO: 423094 - RNA, 23 nt, Artificial Sequence
  Synthetic
uaaggacagcacaagagcauuuu

SEQ ID NO: 423095 - RNA, 24 nt, Artificial Sequence
  Synthetic
guaaggacagcacaagagcauuuu

SEQ ID NO: 423096 - RNA, 18 nt, Artificial Sequence
  Synthetic
ugaguuaacccgcauuuu

SEQ ID NO: 423097 - RNA, 19 nt, Artificial Sequence
  Synthetic
uugaguuaacccgcauuuu

SEQ ID NO: 423098 - RNA, 20 nt, Artificial Sequence
  Synthetic
auugaguuaacccgcauuuu

SEQ ID NO: 423099 - RNA, 21 nt, Artificial Sequence
  Synthetic
cauugaguuaacccgcauuuu

SEQ ID NO: 423100 - RNA, 22 nt, Artificial Sequence
  Synthetic
gcauugaguuaacccgcauuuu

SEQ ID NO: 423101 - RNA, 23 nt, Artificial Sequence
  Synthetic
agcauugaguuaacccgcauuuu

SEQ ID NO: 423102 - RNA, 24 nt, Artificial Sequence
  Synthetic
cagcauugaguuaacccgcauuuu

SEQ ID NO: 423103 - RNA, 18 nt, Artificial Sequence
  Synthetic
uauauugccaggcauuuu

SEQ ID NO: 423104 - RNA, 19 nt, Artificial Sequence
  Synthetic
uuauauugccaggcauuuu

SEQ ID NO: 423105 - RNA, 20 nt, Artificial Sequence
  Synthetic
guuauauugccaggcauuuu

SEQ ID NO: 423106 - RNA, 21 nt, Artificial Sequence
  Synthetic
uguuauauugccaggcauuuu

SEQ ID NO: 423107 - RNA, 22 nt, Artificial Sequence
  Synthetic
cuguuauauugccaggcauuuu

SEQ ID NO: 423108 - RNA, 23 nt, Artificial Sequence
  Synthetic
acuguuauauugccaggcauuuu

SEQ ID NO: 423109 - RNA, 24 nt, Artificial Sequence
  Synthetic
uacuguuauauugccaggcauuuu

SEQ ID NO: 423110 - RNA, 18 nt, Artificial Sequence
  Synthetic
uuccgggugcugcauuuu

SEQ ID NO: 423111 - RNA, 19 nt, Artificial Sequence
  Synthetic
auuccgggugcugcauuuu

SEQ ID NO: 423112 - RNA, 20 nt, Artificial Sequence
  Synthetic
cauuccgggugcugcauuuu

SEQ ID NO: 423113 - RNA, 21 nt, Artificial Sequence
  Synthetic
ucauuccgggugcugcauuuu

SEQ ID NO: 423114 - RNA, 22 nt, Artificial Sequence
  Synthetic
gucauuccgggugcugcauuuu

SEQ ID NO: 423115 - RNA, 23 nt, Artificial Sequence
  Synthetic
agucauuccgggugcugcauuuu

SEQ ID NO: 423116 - RNA, 24 nt, Artificial Sequence
  Synthetic
cagucauuccgggugcugcauuuu

SEQ ID NO: 423117 - RNA, 18 nt, Artificial Sequence
  Synthetic
uacaaauuaaaucauuuu

SEQ ID NO: 423118 - RNA, 19 nt, Artificial Sequence
  Synthetic
auacaaauuaaaucauuuu

SEQ ID NO: 423119 - RNA, 20 nt, Artificial Sequence
  Synthetic
aauacaaauuaaaucauuuu

SEQ ID NO: 423120 - RNA, 21 nt, Artificial Sequence
  Synthetic
aaauacaaauuaaaucauuuu

SEQ ID NO: 423121 - RNA, 22 nt, Artificial Sequence
  Synthetic
aaaauacaaauuaaaucauuuu

SEQ ID NO: 423122 - RNA, 23 nt, Artificial Sequence
  Synthetic
aaaaauacaaauuaaaucauuuu

SEQ ID NO: 423123 - RNA, 24 nt, Artificial Sequence
  Synthetic
gaaaaauacaaauuaaaucauuuu

SEQ ID NO: 423124 - RNA, 18 nt, Artificial Sequence
  Synthetic
uuauuaaacaaucauuuu

SEQ ID NO: 423125 - RNA, 19 nt, Artificial Sequence
  Synthetic
guuauuaaacaaucauuuu

SEQ ID NO: 423126 - RNA, 20 nt, Artificial Sequence
  Synthetic
aguuauuaaacaaucauuuu

SEQ ID NO: 423127 - RNA, 21 nt, Artificial Sequence
  Synthetic
uaguuauuaaacaaucauuuu

SEQ ID NO: 423128 - RNA, 22 nt, Artificial Sequence
  Synthetic
guaguuauuaaacaaucauuuu

SEQ ID NO: 423129 - RNA, 23 nt, Artificial Sequence
  Synthetic
uguaguuauuaaacaaucauuuu

SEQ ID NO: 423130 - RNA, 24 nt, Artificial Sequence
  Synthetic
guguaguuauuaaacaaucauuuu

SEQ ID NO: 423131 - RNA, 18 nt, Artificial Sequence
  Synthetic
uccucccuaacucauuuu

SEQ ID NO: 423132 - RNA, 19 nt, Artificial Sequence
  Synthetic
auccucccuaacucauuuu

SEQ ID NO: 423133 - RNA, 20 nt, Artificial Sequence
  Synthetic
aauccucccuaacucauuuu

SEQ ID NO: 423134 - RNA, 18 nt, Artificial Sequence
  Synthetic
cucugugauccucauuuu

SEQ ID NO: 423135 - RNA, 19 nt, Artificial Sequence
  Synthetic
ccucugugauccucauuuu

SEQ ID NO: 423136 - RNA, 20 nt, Artificial Sequence
  Synthetic
uccucugugauccucauuuu

SEQ ID NO: 423137 - RNA, 21 nt, Artificial Sequence
  Synthetic
cuccucugugauccucauuuu

SEQ ID NO: 423138 - RNA, 22 nt, Artificial Sequence
  Synthetic
ucuccucugugauccucauuuu

SEQ ID NO: 423139 - RNA, 23 nt, Artificial Sequence
  Synthetic
uucuccucugugauccucauuuu

SEQ ID NO: 423140 - RNA, 24 nt, Artificial Sequence
  Synthetic
uuucuccucugugauccucauuuu

SEQ ID NO: 423141 - RNA, 18 nt, Artificial Sequence
  Synthetic
aaauacugaagucauuuu

SEQ ID NO: 423142 - RNA, 19 nt, Artificial Sequence
  Synthetic
gaaauacugaagucauuuu

SEQ ID NO: 423143 - RNA, 20 nt, Artificial Sequence
  Synthetic
cgaaauacugaagucauuuu

SEQ ID NO: 423144 - RNA, 21 nt, Artificial Sequence
  Synthetic
ucgaaauacugaagucauuuu

SEQ ID NO: 423145 - RNA, 22 nt, Artificial Sequence
  Synthetic
aucgaaauacugaagucauuuu

SEQ ID NO: 423146 - RNA, 23 nt, Artificial Sequence
  Synthetic
caucgaaauacugaagucauuuu

SEQ ID NO: 423147 - RNA, 24 nt, Artificial Sequence
  Synthetic
ucaucgaaauacugaagucauuuu

SEQ ID NO: 423148 - RNA, 18 nt, Artificial Sequence
  Synthetic
agaauaacacuucauuuu

SEQ ID NO: 423149 - RNA, 19 nt, Artificial Sequence
  Synthetic
aagaauaacacuucauuuu

SEQ ID NO: 423150 - RNA, 20 nt, Artificial Sequence
  Synthetic
caagaauaacacuucauuuu

SEQ ID NO: 423151 - RNA, 21 nt, Artificial Sequence
  Synthetic
ccaagaauaacacuucauuuu

SEQ ID NO: 423152 - RNA, 22 nt, Artificial Sequence
  Synthetic
cccaagaauaacacuucauuuu

SEQ ID NO: 423153 - RNA, 23 nt, Artificial Sequence
  Synthetic
gcccaagaauaacacuucauuuu

SEQ ID NO: 423154 - RNA, 24 nt, Artificial Sequence
  Synthetic
agcccaagaauaacacuucauuuu

SEQ ID NO: 423155 - RNA, 18 nt, Artificial Sequence
  Synthetic
auaugguuauuucauuuu

SEQ ID NO: 423156 - RNA, 19 nt, Artificial Sequence
  Synthetic
uauaugguuauuucauuuu

SEQ ID NO: 423157 - RNA, 20 nt, Artificial Sequence
  Synthetic
uuauaugguuauuucauuuu

SEQ ID NO: 423158 - RNA, 21 nt, Artificial Sequence
  Synthetic
uuuauaugguuauuucauuuu

SEQ ID NO: 423159 - RNA, 22 nt, Artificial Sequence
  Synthetic
auuuauaugguuauuucauuuu

SEQ ID NO: 423160 - RNA, 23 nt, Artificial Sequence
  Synthetic
uauuuauaugguuauuucauuuu

SEQ ID NO: 423161 - RNA, 24 nt, Artificial Sequence
  Synthetic
uuauuuauaugguuauuucauuuu

SEQ ID NO: 423162 - RNA, 18 nt, Artificial Sequence
  Synthetic
ugguuuuucuuucauuuu

SEQ ID NO: 423163 - RNA, 19 nt, Artificial Sequence
  Synthetic
gugguuuuucuuucauuuu

SEQ ID NO: 423164 - RNA, 20 nt, Artificial Sequence
  Synthetic
ugugguuuuucuuucauuuu

SEQ ID NO: 423165 - RNA, 21 nt, Artificial Sequence
  Synthetic
augugguuuuucuuucauuuu

SEQ ID NO: 423166 - RNA, 22 nt, Artificial Sequence
  Synthetic
uaugugguuuuucuuucauuuu

SEQ ID NO: 423167 - RNA, 23 nt, Artificial Sequence
  Synthetic
guaugugguuuuucuuucauuuu

SEQ ID NO: 423168 - RNA, 24 nt, Artificial Sequence
  Synthetic
gguaugugguuuuucuuucauuuu

SEQ ID NO: 423169 - RNA, 18 nt, Artificial Sequence
  Synthetic
guccuucaagaagauuuu

SEQ ID NO: 423170 - RNA, 19 nt, Artificial Sequence
  Synthetic
uguccuucaagaagauuuu

SEQ ID NO: 423171 - RNA, 20 nt, Artificial Sequence
  Synthetic
auguccuucaagaagauuuu

SEQ ID NO: 423172 - RNA, 21 nt, Artificial Sequence
  Synthetic
cauguccuucaagaagauuuu

SEQ ID NO: 423173 - RNA, 22 nt, Artificial Sequence
  Synthetic
ccauguccuucaagaagauuuu

SEQ ID NO: 423174 - RNA, 23 nt, Artificial Sequence
  Synthetic
accauguccuucaagaagauuuu

SEQ ID NO: 423175 - RNA, 24 nt, Artificial Sequence
  Synthetic
aaccauguccuucaagaagauuuu

SEQ ID NO: 423176 - RNA, 18 nt, Artificial Sequence
  Synthetic
uuagcagguuaagauuuu

SEQ ID NO: 423177 - RNA, 19 nt, Artificial Sequence
  Synthetic
guuagcagguuaagauuuu

SEQ ID NO: 423178 - RNA, 20 nt, Artificial Sequence
  Synthetic
aguuagcagguuaagauuuu

SEQ ID NO: 423179 - RNA, 21 nt, Artificial Sequence
  Synthetic
gaguuagcagguuaagauuuu

SEQ ID NO: 423180 - RNA, 22 nt, Artificial Sequence
  Synthetic
ugaguuagcagguuaagauuuu

SEQ ID NO: 423181 - RNA, 23 nt, Artificial Sequence
  Synthetic
augaguuagcagguuaagauuuu

SEQ ID NO: 423182 - RNA, 24 nt, Artificial Sequence
  Synthetic
uaugaguuagcagguuaagauuuu

SEQ ID NO: 423183 - RNA, 18 nt, Artificial Sequence
  Synthetic
caggagcccacagauuuu

SEQ ID NO: 423184 - RNA, 19 nt, Artificial Sequence
  Synthetic
ccaggagcccacagauuuu

SEQ ID NO: 423185 - RNA, 20 nt, Artificial Sequence
  Synthetic
cccaggagcccacagauuuu

SEQ ID NO: 423186 - RNA, 21 nt, Artificial Sequence
  Synthetic
ucccaggagcccacagauuuu

SEQ ID NO: 423187 - RNA, 22 nt, Artificial Sequence
  Synthetic
aucccaggagcccacagauuuu

SEQ ID NO: 423188 - RNA, 23 nt, Artificial Sequence
  Synthetic
caucccaggagcccacagauuuu

SEQ ID NO: 423189 - RNA, 24 nt, Artificial Sequence
  Synthetic
acaucccaggagcccacagauuuu

SEQ ID NO: 423190 - RNA, 18 nt, Artificial Sequence
  Synthetic
auaaaaccaucagauuuu

SEQ ID NO: 423191 - RNA, 19 nt, Artificial Sequence
  Synthetic
uauaaaaccaucagauuuu

SEQ ID NO: 423192 - RNA, 20 nt, Artificial Sequence
  Synthetic
uuauaaaaccaucagauuuu

SEQ ID NO: 423193 - RNA, 21 nt, Artificial Sequence
  Synthetic
cuuauaaaaccaucagauuuu

SEQ ID NO: 423194 - RNA, 22 nt, Artificial Sequence
  Synthetic
ccuuauaaaaccaucagauuuu

SEQ ID NO: 423195 - RNA, 23 nt, Artificial Sequence
  Synthetic
cccuuauaaaaccaucagauuuu

SEQ ID NO: 423196 - RNA, 24 nt, Artificial Sequence
  Synthetic
acccuuauaaaaccaucagauuuu

SEQ ID NO: 423197 - RNA, 18 nt, Artificial Sequence
  Synthetic
gcggccucaucagauuuu

SEQ ID NO: 423198 - RNA, 19 nt, Artificial Sequence
  Synthetic
ugcggccucaucagauuuu

SEQ ID NO: 423199 - RNA, 20 nt, Artificial Sequence
  Synthetic
uugcggccucaucagauuuu

SEQ ID NO: 423200 - RNA, 21 nt, Artificial Sequence
  Synthetic
guugcggccucaucagauuuu

SEQ ID NO: 423201 - RNA, 22 nt, Artificial Sequence
  Synthetic
cguugcggccucaucagauuuu

SEQ ID NO: 423202 - RNA, 23 nt, Artificial Sequence
  Synthetic
gcguugcggccucaucagauuuu

SEQ ID NO: 423203 - RNA, 24 nt, Artificial Sequence
  Synthetic
ugcguugcggccucaucagauuuu

SEQ ID NO: 423204 - RNA, 18 nt, Artificial Sequence
  Synthetic
aagccuuuuucagauuuu

SEQ ID NO: 423205 - RNA, 19 nt, Artificial Sequence
  Synthetic
caagccuuuuucagauuuu

SEQ ID NO: 423206 - RNA, 20 nt, Artificial Sequence
  Synthetic
ccaagccuuuuucagauuuu

SEQ ID NO: 423207 - RNA, 21 nt, Artificial Sequence
  Synthetic
cccaagccuuuuucagauuuu

SEQ ID NO: 423208 - RNA, 22 nt, Artificial Sequence
  Synthetic
ccccaagccuuuuucagauuuu

SEQ ID NO: 423209 - RNA, 23 nt, Artificial Sequence
  Synthetic
uccccaagccuuuuucagauuuu

SEQ ID NO: 423210 - RNA, 24 nt, Artificial Sequence
  Synthetic
uuccccaagccuuuuucagauuuu

SEQ ID NO: 423211 - RNA, 18 nt, Artificial Sequence
  Synthetic
cucaguuuuagagauuuu

SEQ ID NO: 423212 - RNA, 19 nt, Artificial Sequence
  Synthetic
gcucaguuuuagagauuuu

SEQ ID NO: 423213 - RNA, 20 nt, Artificial Sequence
  Synthetic
cgcucaguuuuagagauuuu

SEQ ID NO: 423214 - RNA, 21 nt, Artificial Sequence
  Synthetic
ucgcucaguuuuagagauuuu

SEQ ID NO: 423215 - RNA, 22 nt, Artificial Sequence
  Synthetic
aucgcucaguuuuagagauuuu

SEQ ID NO: 423216 - RNA, 23 nt, Artificial Sequence
  Synthetic
caucgcucaguuuuagagauuuu

SEQ ID NO: 423217 - RNA, 24 nt, Artificial Sequence
  Synthetic
ucaucgcucaguuuuagagauuuu

SEQ ID NO: 423218 - RNA, 18 nt, Artificial Sequence
  Synthetic
aaaacagagggagauuuu

SEQ ID NO: 423219 - RNA, 19 nt, Artificial Sequence
  Synthetic
caaaacagagggagauuuu

SEQ ID NO: 423220 - RNA, 20 nt, Artificial Sequence
  Synthetic
acaaaacagagggagauuuu

SEQ ID NO: 423221 - RNA, 21 nt, Artificial Sequence
  Synthetic
aacaaaacagagggagauuuu

SEQ ID NO: 423222 - RNA, 22 nt, Artificial Sequence
  Synthetic
caacaaaacagagggagauuuu

SEQ ID NO: 423223 - RNA, 23 nt, Artificial Sequence
  Synthetic
gcaacaaaacagagggagauuuu

SEQ ID NO: 423224 - RNA, 24 nt, Artificial Sequence
  Synthetic
ugcaacaaaacagagggagauuuu

SEQ ID NO: 423225 - RNA, 18 nt, Artificial Sequence
  Synthetic
uugagauggggagauuuu

SEQ ID NO: 423226 - RNA, 19 nt, Artificial Sequence
  Synthetic
uuugagauggggagauuuu

SEQ ID NO: 423227 - RNA, 20 nt, Artificial Sequence
  Synthetic
cuuugagauggggagauuuu

SEQ ID NO: 423228 - RNA, 21 nt, Artificial Sequence
  Synthetic
acuuugagauggggagauuuu

SEQ ID NO: 423229 - RNA, 22 nt, Artificial Sequence
  Synthetic
gacuuugagauggggagauuuu

SEQ ID NO: 423230 - RNA, 23 nt, Artificial Sequence
  Synthetic
ugacuuugagauggggagauuuu

SEQ ID NO: 423231 - RNA, 24 nt, Artificial Sequence
  Synthetic
gugacuuugagauggggagauuuu

SEQ ID NO: 423232 - RNA, 18 nt, Artificial Sequence
  Synthetic
caguuccauugagauuuu

SEQ ID NO: 423233 - RNA, 19 nt, Artificial Sequence
  Synthetic
gcaguuccauugagauuuu

SEQ ID NO: 423234 - RNA, 20 nt, Artificial Sequence
  Synthetic
cgcaguuccauugagauuuu

SEQ ID NO: 423235 - RNA, 21 nt, Artificial Sequence
  Synthetic
gcgcaguuccauugagauuuu

SEQ ID NO: 423236 - RNA, 22 nt, Artificial Sequence
  Synthetic
agcgcaguuccauugagauuuu

SEQ ID NO: 423237 - RNA, 23 nt, Artificial Sequence
  Synthetic
uagcgcaguuccauugagauuuu

SEQ ID NO: 423238 - RNA, 24 nt, Artificial Sequence
  Synthetic
uuagcgcaguuccauugagauuuu

SEQ ID NO: 423239 - RNA, 18 nt, Artificial Sequence
  Synthetic
ccuguuugcuaggauuuu

SEQ ID NO: 423240 - RNA, 19 nt, Artificial Sequence
  Synthetic
uccuguuugcuaggauuuu

SEQ ID NO: 423241 - RNA, 20 nt, Artificial Sequence
  Synthetic
auccuguuugcuaggauuuu

SEQ ID NO: 423242 - RNA, 21 nt, Artificial Sequence
  Synthetic
aauccuguuugcuaggauuuu

SEQ ID NO: 423243 - RNA, 22 nt, Artificial Sequence
  Synthetic
caauccuguuugcuaggauuuu

SEQ ID NO: 423244 - RNA, 23 nt, Artificial Sequence
  Synthetic
ccaauccuguuugcuaggauuuu

SEQ ID NO: 423245 - RNA, 24 nt, Artificial Sequence
  Synthetic
gccaauccuguuugcuaggauuuu

SEQ ID NO: 423246 - RNA, 18 nt, Artificial Sequence
  Synthetic
cuauuuugcuaggauuuu

SEQ ID NO: 423247 - RNA, 19 nt, Artificial Sequence
  Synthetic
acuauuuugcuaggauuuu

SEQ ID NO: 423248 - RNA, 20 nt, Artificial Sequence
  Synthetic
cacuauuuugcuaggauuuu

SEQ ID NO: 423249 - RNA, 21 nt, Artificial Sequence
  Synthetic
acacuauuuugcuaggauuuu

SEQ ID NO: 423250 - RNA, 22 nt, Artificial Sequence
  Synthetic
uacacuauuuugcuaggauuuu

SEQ ID NO: 423251 - RNA, 23 nt, Artificial Sequence
  Synthetic
uuacacuauuuugcuaggauuuu

SEQ ID NO: 423252 - RNA, 24 nt, Artificial Sequence
  Synthetic
uuuacacuauuuugcuaggauuuu

SEQ ID NO: 423253 - RNA, 18 nt, Artificial Sequence
  Synthetic
gaggugaacugggauuuu

SEQ ID NO: 423254 - RNA, 19 nt, Artificial Sequence
  Synthetic
ugaggugaacugggauuuu

SEQ ID NO: 423255 - RNA, 20 nt, Artificial Sequence
  Synthetic
cugaggugaacugggauuuu

SEQ ID NO: 423256 - RNA, 21 nt, Artificial Sequence
  Synthetic
ccugaggugaacugggauuuu

SEQ ID NO: 423257 - RNA, 22 nt, Artificial Sequence
  Synthetic
cccugaggugaacugggauuuu

SEQ ID NO: 423258 - RNA, 23 nt, Artificial Sequence
  Synthetic
ucccugaggugaacugggauuuu

SEQ ID NO: 423259 - RNA, 24 nt, Artificial Sequence
  Synthetic
gucccugaggugaacugggauuuu

SEQ ID NO: 423260 - RNA, 18 nt, Artificial Sequence
  Synthetic
gauauagugcuggauuuu

SEQ ID NO: 423261 - RNA, 19 nt, Artificial Sequence
  Synthetic
ggauauagugcuggauuuu

SEQ ID NO: 423262 - RNA, 20 nt, Artificial Sequence
  Synthetic
uggauauagugcuggauuuu

SEQ ID NO: 423263 - RNA, 21 nt, Artificial Sequence
  Synthetic
auggauauagugcuggauuuu

SEQ ID NO: 423264 - RNA, 22 nt, Artificial Sequence
  Synthetic
uauggauauagugcuggauuuu

SEQ ID NO: 423265 - RNA, 23 nt, Artificial Sequence
  Synthetic
auauggauauagugcuggauuuu

SEQ ID NO: 423266 - RNA, 24 nt, Artificial Sequence
  Synthetic
gauauggauauagugcuggauuuu

SEQ ID NO: 423267 - RNA, 18 nt, Artificial Sequence
  Synthetic
gccccuuuucuggauuuu

SEQ ID NO: 423268 - RNA, 19 nt, Artificial Sequence
  Synthetic
ggccccuuuucuggauuuu

SEQ ID NO: 423269 - RNA, 20 nt, Artificial Sequence
  Synthetic
aggccccuuuucuggauuuu

SEQ ID NO: 423270 - RNA, 21 nt, Artificial Sequence
  Synthetic
caggccccuuuucuggauuuu

SEQ ID NO: 423271 - RNA, 22 nt, Artificial Sequence
  Synthetic
ccaggccccuuuucuggauuuu

SEQ ID NO: 423272 - RNA, 23 nt, Artificial Sequence
  Synthetic
uccaggccccuuuucuggauuuu

SEQ ID NO: 423273 - RNA, 24 nt, Artificial Sequence
  Synthetic
auccaggccccuuuucuggauuuu

SEQ ID NO: 423274 - RNA, 18 nt, Artificial Sequence
  Synthetic
ucuauucuucaugauuuu

SEQ ID NO: 423275 - RNA, 19 nt, Artificial Sequence
  Synthetic
aucuauucuucaugauuuu

SEQ ID NO: 423276 - RNA, 20 nt, Artificial Sequence
  Synthetic
uaucuauucuucaugauuuu

SEQ ID NO: 423277 - RNA, 21 nt, Artificial Sequence
  Synthetic
guaucuauucuucaugauuuu

SEQ ID NO: 423278 - RNA, 22 nt, Artificial Sequence
  Synthetic
gguaucuauucuucaugauuuu

SEQ ID NO: 423279 - RNA, 23 nt, Artificial Sequence
  Synthetic
ugguaucuauucuucaugauuuu

SEQ ID NO: 423280 - RNA, 24 nt, Artificial Sequence
  Synthetic
gugguaucuauucuucaugauuuu

SEQ ID NO: 423281 - RNA, 18 nt, Artificial Sequence
  Synthetic
ucaugggaaagugauuuu

SEQ ID NO: 423282 - RNA, 19 nt, Artificial Sequence
  Synthetic
gucaugggaaagugauuuu

SEQ ID NO: 423283 - RNA, 20 nt, Artificial Sequence
  Synthetic
agucaugggaaagugauuuu

SEQ ID NO: 423284 - RNA, 21 nt, Artificial Sequence
  Synthetic
aagucaugggaaagugauuuu

SEQ ID NO: 423285 - RNA, 22 nt, Artificial Sequence
  Synthetic
gaagucaugggaaagugauuuu

SEQ ID NO: 423286 - RNA, 23 nt, Artificial Sequence
  Synthetic
ugaagucaugggaaagugauuuu

SEQ ID NO: 423287 - RNA, 24 nt, Artificial Sequence
  Synthetic
cugaagucaugggaaagugauuuu

SEQ ID NO: 423288 - RNA, 18 nt, Artificial Sequence
  Synthetic
aaugacucaagugauuuu

SEQ ID NO: 423289 - RNA, 19 nt, Artificial Sequence
  Synthetic
gaaugacucaagugauuuu

SEQ ID NO: 423290 - RNA, 20 nt, Artificial Sequence
  Synthetic
ggaaugacucaagugauuuu

SEQ ID NO: 423291 - RNA, 21 nt, Artificial Sequence
  Synthetic
uggaaugacucaagugauuuu

SEQ ID NO: 423292 - RNA, 22 nt, Artificial Sequence
  Synthetic
auggaaugacucaagugauuuu

SEQ ID NO: 423293 - RNA, 23 nt, Artificial Sequence
  Synthetic
uauggaaugacucaagugauuuu

SEQ ID NO: 423294 - RNA, 24 nt, Artificial Sequence
  Synthetic
uuauggaaugacucaagugauuuu

SEQ ID NO: 423295 - RNA, 18 nt, Artificial Sequence
  Synthetic
ccuggauucauugauuuu

SEQ ID NO: 423296 - RNA, 19 nt, Artificial Sequence
  Synthetic
uccuggauucauugauuuu

SEQ ID NO: 423297 - RNA, 20 nt, Artificial Sequence
  Synthetic
cuccuggauucauugauuuu

SEQ ID NO: 423298 - RNA, 21 nt, Artificial Sequence
  Synthetic
gcuccuggauucauugauuuu

SEQ ID NO: 423299 - RNA, 22 nt, Artificial Sequence
  Synthetic
agcuccuggauucauugauuuu

SEQ ID NO: 423300 - RNA, 23 nt, Artificial Sequence
  Synthetic
cagcuccuggauucauugauuuu

SEQ ID NO: 423301 - RNA, 24 nt, Artificial Sequence
  Synthetic
ccagcuccuggauucauugauuuu

SEQ ID NO: 423302 - RNA, 18 nt, Artificial Sequence
  Synthetic
guuuagaaauuugauuuu

SEQ ID NO: 423303 - RNA, 19 nt, Artificial Sequence
  Synthetic
aguuuagaaauuugauuuu

SEQ ID NO: 423304 - RNA, 20 nt, Artificial Sequence
  Synthetic
caguuuagaaauuugauuuu

SEQ ID NO: 423305 - RNA, 21 nt, Artificial Sequence
  Synthetic
acaguuuagaaauuugauuuu

SEQ ID NO: 423306 - RNA, 22 nt, Artificial Sequence
  Synthetic
aacaguuuagaaauuugauuuu

SEQ ID NO: 423307 - RNA, 23 nt, Artificial Sequence
  Synthetic
uaacaguuuagaaauuugauuuu

SEQ ID NO: 423308 - RNA, 24 nt, Artificial Sequence
  Synthetic
guaacaguuuagaaauuugauuuu

SEQ ID NO: 423309 - RNA, 18 nt, Artificial Sequence
  Synthetic
ggauaaaaaaaauauuuu

SEQ ID NO: 423310 - RNA, 19 nt, Artificial Sequence
  Synthetic
aggauaaaaaaaauauuuu

SEQ ID NO: 423311 - RNA, 20 nt, Artificial Sequence
  Synthetic
uaggauaaaaaaaauauuuu

SEQ ID NO: 423312 - RNA, 21 nt, Artificial Sequence
  Synthetic
uuaggauaaaaaaaauauuuu

SEQ ID NO: 423313 - RNA, 22 nt, Artificial Sequence
  Synthetic
uuuaggauaaaaaaaauauuuu

SEQ ID NO: 423314 - RNA, 23 nt, Artificial Sequence
  Synthetic
auuuaggauaaaaaaaauauuuu

SEQ ID NO: 423315 - RNA, 24 nt, Artificial Sequence
  Synthetic
cauuuaggauaaaaaaaauauuuu

SEQ ID NO: 423316 - RNA, 18 nt, Artificial Sequence
  Synthetic
cugcuuaucaaauauuuu

SEQ ID NO: 423317 - RNA, 19 nt, Artificial Sequence
  Synthetic
acugcuuaucaaauauuuu

SEQ ID NO: 423318 - RNA, 20 nt, Artificial Sequence
  Synthetic
uacugcuuaucaaauauuuu

SEQ ID NO: 423319 - RNA, 21 nt, Artificial Sequence
  Synthetic
auacugcuuaucaaauauuuu

SEQ ID NO: 423320 - RNA, 22 nt, Artificial Sequence
  Synthetic
uauacugcuuaucaaauauuuu

SEQ ID NO: 423321 - RNA, 23 nt, Artificial Sequence
  Synthetic
uuauacugcuuaucaaauauuuu

SEQ ID NO: 423322 - RNA, 24 nt, Artificial Sequence
  Synthetic
uuuauacugcuuaucaaauauuuu

SEQ ID NO: 423323 - RNA, 18 nt, Artificial Sequence
  Synthetic
uaauauaaacaauauuuu

SEQ ID NO: 423324 - RNA, 19 nt, Artificial Sequence
  Synthetic
guaauauaaacaauauuuu

SEQ ID NO: 423325 - RNA, 20 nt, Artificial Sequence
  Synthetic
aguaauauaaacaauauuuu

SEQ ID NO: 423326 - RNA, 21 nt, Artificial Sequence
  Synthetic
gaguaauauaaacaauauuuu

SEQ ID NO: 423327 - RNA, 22 nt, Artificial Sequence
  Synthetic
ggaguaauauaaacaauauuuu

SEQ ID NO: 423328 - RNA, 23 nt, Artificial Sequence
  Synthetic
aggaguaauauaaacaauauuuu

SEQ ID NO: 423329 - RNA, 24 nt, Artificial Sequence
  Synthetic
uaggaguaauauaaacaauauuuu

SEQ ID NO: 423330 - RNA, 18 nt, Artificial Sequence
  Synthetic
uguguuuuuuaauauuuu

SEQ ID NO: 423331 - RNA, 19 nt, Artificial Sequence
  Synthetic
uuguguuuuuuaauauuuu

SEQ ID NO: 423332 - RNA, 20 nt, Artificial Sequence
  Synthetic
cuuguguuuuuuaauauuuu

SEQ ID NO: 423333 - RNA, 21 nt, Artificial Sequence
  Synthetic
ucuuguguuuuuuaauauuuu

SEQ ID NO: 423334 - RNA, 22 nt, Artificial Sequence
  Synthetic
cucuuguguuuuuuaauauuuu

SEQ ID NO: 423335 - RNA, 23 nt, Artificial Sequence
  Synthetic
ucucuuguguuuuuuaauauuuu

SEQ ID NO: 423336 - RNA, 24 nt, Artificial Sequence
  Synthetic
aucucuuguguuuuuuaauauuuu

SEQ ID NO: 423337 - RNA, 18 nt, Artificial Sequence
  Synthetic
ccaggaguaacauauuuu

SEQ ID NO: 423338 - RNA, 19 nt, Artificial Sequence
  Synthetic
uccaggaguaacauauuuu

SEQ ID NO: 423339 - RNA, 20 nt, Artificial Sequence
  Synthetic
cuccaggaguaacauauuuu

SEQ ID NO: 423340 - RNA, 21 nt, Artificial Sequence
  Synthetic
gcuccaggaguaacauauuuu

SEQ ID NO: 423341 - RNA, 22 nt, Artificial Sequence
  Synthetic
ggcuccaggaguaacauauuuu

SEQ ID NO: 423342 - RNA, 23 nt, Artificial Sequence
  Synthetic
aggcuccaggaguaacauauuuu

SEQ ID NO: 423343 - RNA, 24 nt, Artificial Sequence
  Synthetic
aaggcuccaggaguaacauauuuu

SEQ ID NO: 423344 - RNA, 18 nt, Artificial Sequence
  Synthetic
guaugggcuucauauuuu

SEQ ID NO: 423345 - RNA, 19 nt, Artificial Sequence
  Synthetic
gguaugggcuucauauuuu

SEQ ID NO: 423346 - RNA, 20 nt, Artificial Sequence
  Synthetic
agguaugggcuucauauuuu

SEQ ID NO: 423347 - RNA, 21 nt, Artificial Sequence
  Synthetic
aagguaugggcuucauauuuu

SEQ ID NO: 423348 - RNA, 22 nt, Artificial Sequence
  Synthetic
caagguaugggcuucauauuuu

SEQ ID NO: 423349 - RNA, 23 nt, Artificial Sequence
  Synthetic
ccaagguaugggcuucauauuuu

SEQ ID NO: 423350 - RNA, 24 nt, Artificial Sequence
  Synthetic
uccaagguaugggcuucauauuuu

SEQ ID NO: 423351 - RNA, 18 nt, Artificial Sequence
  Synthetic
uguugauuuucauauuuu

SEQ ID NO: 423352 - RNA, 19 nt, Artificial Sequence
  Synthetic
auguugauuuucauauuuu

SEQ ID NO: 423353 - RNA, 20 nt, Artificial Sequence
  Synthetic
aauguugauuuucauauuuu

SEQ ID NO: 423354 - RNA, 21 nt, Artificial Sequence
  Synthetic
aaauguugauuuucauauuuu

SEQ ID NO: 423355 - RNA, 22 nt, Artificial Sequence
  Synthetic
uaaauguugauuuucauauuuu

SEQ ID NO: 423356 - RNA, 23 nt, Artificial Sequence
  Synthetic
cuaaauguugauuuucauauuuu

SEQ ID NO: 423357 - RNA, 24 nt, Artificial Sequence
  Synthetic
ccuaaauguugauuuucauauuuu

SEQ ID NO: 423358 - RNA, 18 nt, Artificial Sequence
  Synthetic
aauacaauaagauauuuu

SEQ ID NO: 423359 - RNA, 19 nt, Artificial Sequence
  Synthetic
caauacaauaagauauuuu

SEQ ID NO: 423360 - RNA, 20 nt, Artificial Sequence
  Synthetic
acaauacaauaagauauuuu

SEQ ID NO: 423361 - RNA, 21 nt, Artificial Sequence
  Synthetic
uacaauacaauaagauauuuu

SEQ ID NO: 423362 - RNA, 22 nt, Artificial Sequence
  Synthetic
cuacaauacaauaagauauuuu

SEQ ID NO: 423363 - RNA, 23 nt, Artificial Sequence
  Synthetic
acuacaauacaauaagauauuuu

SEQ ID NO: 423364 - RNA, 24 nt, Artificial Sequence
  Synthetic
gacuacaauacaauaagauauuuu

SEQ ID NO: 423365 - RNA, 18 nt, Artificial Sequence
  Synthetic
auuaaaaaaauauauuuu

SEQ ID NO: 423366 - RNA, 19 nt, Artificial Sequence
  Synthetic
aauuaaaaaaauauauuuu

SEQ ID NO: 423367 - RNA, 20 nt, Artificial Sequence
  Synthetic
gaauuaaaaaaauauauuuu

SEQ ID NO: 423368 - RNA, 21 nt, Artificial Sequence
  Synthetic
agaauuaaaaaaauauauuuu

SEQ ID NO: 423369 - RNA, 22 nt, Artificial Sequence
  Synthetic
uagaauuaaaaaaauauauuuu

SEQ ID NO: 423370 - RNA, 23 nt, Artificial Sequence
  Synthetic
cuagaauuaaaaaaauauauuuu

SEQ ID NO: 423371 - RNA, 24 nt, Artificial Sequence
  Synthetic
ucuagaauuaaaaaaauauauuuu

SEQ ID NO: 423372 - RNA, 18 nt, Artificial Sequence
  Synthetic
uuuauuuauauauauuuu

SEQ ID NO: 423373 - RNA, 19 nt, Artificial Sequence
  Synthetic
uuuuauuuauauauauuuu

SEQ ID NO: 423374 - RNA, 20 nt, Artificial Sequence
  Synthetic
uuuuuauuuauauauauuuu

SEQ ID NO: 423375 - RNA, 21 nt, Artificial Sequence
  Synthetic
uuuuuuauuuauauauauuuu

SEQ ID NO: 423376 - RNA, 22 nt, Artificial Sequence
  Synthetic
auuuuuuauuuauauauauuuu

SEQ ID NO: 423377 - RNA, 23 nt, Artificial Sequence
  Synthetic
uauuuuuuauuuauauauauuuu

SEQ ID NO: 423378 - RNA, 24 nt, Artificial Sequence
  Synthetic
uuauuuuuuauuuauauauauuuu

SEQ ID NO: 423379 - RNA, 18 nt, Artificial Sequence
  Synthetic
gcacuuauuauauauuuu

SEQ ID NO: 423380 - RNA, 19 nt, Artificial Sequence
  Synthetic
ggcacuuauuauauauuuu

SEQ ID NO: 423381 - RNA, 20 nt, Artificial Sequence
  Synthetic
aggcacuuauuauauauuuu

SEQ ID NO: 423382 - RNA, 21 nt, Artificial Sequence
  Synthetic
uaggcacuuauuauauauuuu

SEQ ID NO: 423383 - RNA, 22 nt, Artificial Sequence
  Synthetic
auaggcacuuauuauauauuuu

SEQ ID NO: 423384 - RNA, 23 nt, Artificial Sequence
  Synthetic
gauaggcacuuauuauauauuuu

SEQ ID NO: 423385 - RNA, 24 nt, Artificial Sequence
  Synthetic
ugauaggcacuuauuauauauuuu

SEQ ID NO: 423386 - RNA, 18 nt, Artificial Sequence
  Synthetic
gaaaauauacuauauuuu

SEQ ID NO: 423387 - RNA, 19 nt, Artificial Sequence
  Synthetic
ggaaaauauacuauauuuu

SEQ ID NO: 423388 - RNA, 20 nt, Artificial Sequence
  Synthetic
uggaaaauauacuauauuuu

SEQ ID NO: 423389 - RNA, 21 nt, Artificial Sequence
  Synthetic
auggaaaauauacuauauuuu

SEQ ID NO: 423390 - RNA, 22 nt, Artificial Sequence
  Synthetic
cauggaaaauauacuauauuuu

SEQ ID NO: 423391 - RNA, 23 nt, Artificial Sequence
  Synthetic
acauggaaaauauacuauauuuu

SEQ ID NO: 423392 - RNA, 24 nt, Artificial Sequence
  Synthetic
cacauggaaaauauacuauauuuu

SEQ ID NO: 423393 - RNA, 18 nt, Artificial Sequence
  Synthetic
cuggcacauuuauauuuu

SEQ ID NO: 423394 - RNA, 19 nt, Artificial Sequence
  Synthetic
ccuggcacauuuauauuuu

SEQ ID NO: 423395 - RNA, 20 nt, Artificial Sequence
  Synthetic
accuggcacauuuauauuuu

SEQ ID NO: 423396 - RNA, 21 nt, Artificial Sequence
  Synthetic
uaccuggcacauuuauauuuu

SEQ ID NO: 423397 - RNA, 22 nt, Artificial Sequence
  Synthetic
auaccuggcacauuuauauuuu

SEQ ID NO: 423398 - RNA, 23 nt, Artificial Sequence
  Synthetic
aauaccuggcacauuuauauuuu

SEQ ID NO: 423399 - RNA, 24 nt, Artificial Sequence
  Synthetic
aaauaccuggcacauuuauauuuu

SEQ ID NO: 423400 - RNA, 18 nt, Artificial Sequence
  Synthetic
aguuucuaaaacuauuuu

SEQ ID NO: 423401 - RNA, 19 nt, Artificial Sequence
  Synthetic
aaguuucuaaaacuauuuu

SEQ ID NO: 423402 - RNA, 20 nt, Artificial Sequence
  Synthetic
caaguuucuaaaacuauuuu

SEQ ID NO: 423403 - RNA, 21 nt, Artificial Sequence
  Synthetic
gcaaguuucuaaaacuauuuu

SEQ ID NO: 423404 - RNA, 22 nt, Artificial Sequence
  Synthetic
ugcaaguuucuaaaacuauuuu

SEQ ID NO: 423405 - RNA, 23 nt, Artificial Sequence
  Synthetic
gugcaaguuucuaaaacuauuuu

SEQ ID NO: 423406 - RNA, 24 nt, Artificial Sequence
  Synthetic
ugugcaaguuucuaaaacuauuuu

SEQ ID NO: 423407 - RNA, 18 nt, Artificial Sequence
  Synthetic
uaguccuccaccuauuuu

SEQ ID NO: 423408 - RNA, 19 nt, Artificial Sequence
  Synthetic
uuaguccuccaccuauuuu

SEQ ID NO: 423409 - RNA, 20 nt, Artificial Sequence
  Synthetic
uuuaguccuccaccuauuuu

SEQ ID NO: 423410 - RNA, 21 nt, Artificial Sequence
  Synthetic
auuuaguccuccaccuauuuu

SEQ ID NO: 423411 - RNA, 22 nt, Artificial Sequence
  Synthetic
cauuuaguccuccaccuauuuu

SEQ ID NO: 423412 - RNA, 23 nt, Artificial Sequence
  Synthetic
acauuuaguccuccaccuauuuu

SEQ ID NO: 423413 - RNA, 24 nt, Artificial Sequence
  Synthetic
cacauuuaguccuccaccuauuuu

SEQ ID NO: 423414 - RNA, 18 nt, Artificial Sequence
  Synthetic
ucacauauacccuauuuu

SEQ ID NO: 423415 - RNA, 19 nt, Artificial Sequence
  Synthetic
cucacauauacccuauuuu

SEQ ID NO: 423416 - RNA, 20 nt, Artificial Sequence
  Synthetic
ucucacauauacccuauuuu

SEQ ID NO: 423417 - RNA, 21 nt, Artificial Sequence
  Synthetic
aucucacauauacccuauuuu

SEQ ID NO: 423418 - RNA, 22 nt, Artificial Sequence
  Synthetic
caucucacauauacccuauuuu

SEQ ID NO: 423419 - RNA, 23 nt, Artificial Sequence
  Synthetic
ucaucucacauauacccuauuuu

SEQ ID NO: 423420 - RNA, 24 nt, Artificial Sequence
  Synthetic
uucaucucacauauacccuauuuu

SEQ ID NO: 423421 - RNA, 18 nt, Artificial Sequence
  Synthetic
cagagaacaagcuauuuu

SEQ ID NO: 423422 - RNA, 19 nt, Artificial Sequence
  Synthetic
acagagaacaagcuauuuu

SEQ ID NO: 423423 - RNA, 20 nt, Artificial Sequence
  Synthetic
gacagagaacaagcuauuuu

SEQ ID NO: 423424 - RNA, 21 nt, Artificial Sequence
  Synthetic
ugacagagaacaagcuauuuu

SEQ ID NO: 423425 - RNA, 22 nt, Artificial Sequence
  Synthetic
uugacagagaacaagcuauuuu

SEQ ID NO: 423426 - RNA, 23 nt, Artificial Sequence
  Synthetic
auugacagagaacaagcuauuuu

SEQ ID NO: 423427 - RNA, 24 nt, Artificial Sequence
  Synthetic
cauugacagagaacaagcuauuuu

SEQ ID NO: 423428 - RNA, 18 nt, Artificial Sequence
  Synthetic
uuuaaauuaggcuauuuu

SEQ ID NO: 423429 - RNA, 19 nt, Artificial Sequence
  Synthetic
auuuaaauuaggcuauuuu

SEQ ID NO: 423430 - RNA, 20 nt, Artificial Sequence
  Synthetic
uauuuaaauuaggcuauuuu

SEQ ID NO: 423431 - RNA, 21 nt, Artificial Sequence
  Synthetic
uuauuuaaauuaggcuauuuu

SEQ ID NO: 423432 - RNA, 22 nt, Artificial Sequence
  Synthetic
auuauuuaaauuaggcuauuuu

SEQ ID NO: 423433 - RNA, 23 nt, Artificial Sequence
  Synthetic
aauuauuuaaauuaggcuauuuu

SEQ ID NO: 423434 - RNA, 24 nt, Artificial Sequence
  Synthetic
uaauuauuuaaauuaggcuauuuu

SEQ ID NO: 423435 - RNA, 18 nt, Artificial Sequence
  Synthetic
accuuguguaucuauuuu

SEQ ID NO: 423436 - RNA, 19 nt, Artificial Sequence
  Synthetic
uaccuuguguaucuauuuu

SEQ ID NO: 423437 - RNA, 20 nt, Artificial Sequence
  Synthetic
auaccuuguguaucuauuuu

SEQ ID NO: 423438 - RNA, 21 nt, Artificial Sequence
  Synthetic
uauaccuuguguaucuauuuu

SEQ ID NO: 423439 - RNA, 22 nt, Artificial Sequence
  Synthetic
guauaccuuguguaucuauuuu

SEQ ID NO: 423440 - RNA, 23 nt, Artificial Sequence
  Synthetic
aguauaccuuguguaucuauuuu

SEQ ID NO: 423441 - RNA, 24 nt, Artificial Sequence
  Synthetic
caguauaccuuguguaucuauuuu

SEQ ID NO: 423442 - RNA, 18 nt, Artificial Sequence
  Synthetic
gcgaaacaggucuauuuu

SEQ ID NO: 423443 - RNA, 19 nt, Artificial Sequence
  Synthetic
ggcgaaacaggucuauuuu

SEQ ID NO: 423444 - RNA, 20 nt, Artificial Sequence
  Synthetic
gggcgaaacaggucuauuuu

SEQ ID NO: 423445 - RNA, 21 nt, Artificial Sequence
  Synthetic
ugggcgaaacaggucuauuuu

SEQ ID NO: 423446 - RNA, 22 nt, Artificial Sequence
  Synthetic
gugggcgaaacaggucuauuuu

SEQ ID NO: 423447 - RNA, 23 nt, Artificial Sequence
  Synthetic
ugugggcgaaacaggucuauuuu

SEQ ID NO: 423448 - RNA, 24 nt, Artificial Sequence
  Synthetic
augugggcgaaacaggucuauuuu

SEQ ID NO: 423449 - RNA, 18 nt, Artificial Sequence
  Synthetic
gcacacagaaaguauuuu

SEQ ID NO: 423450 - RNA, 19 nt, Artificial Sequence
  Synthetic
ugcacacagaaaguauuuu

SEQ ID NO: 423451 - RNA, 20 nt, Artificial Sequence
  Synthetic
uugcacacagaaaguauuuu

SEQ ID NO: 423452 - RNA, 21 nt, Artificial Sequence
  Synthetic
guugcacacagaaaguauuuu

SEQ ID NO: 423453 - RNA, 22 nt, Artificial Sequence
  Synthetic
aguugcacacagaaaguauuuu

SEQ ID NO: 423454 - RNA, 23 nt, Artificial Sequence
  Synthetic
aaguugcacacagaaaguauuuu

SEQ ID NO: 423455 - RNA, 24 nt, Artificial Sequence
  Synthetic
aaaguugcacacagaaaguauuuu

SEQ ID NO: 423456 - RNA, 18 nt, Artificial Sequence
  Synthetic
gacaacgagaaguauuuu

SEQ ID NO: 423457 - RNA, 19 nt, Artificial Sequence
  Synthetic
ugacaacgagaaguauuuu

SEQ ID NO: 423458 - RNA, 20 nt, Artificial Sequence
  Synthetic
augacaacgagaaguauuuu

SEQ ID NO: 423459 - RNA, 21 nt, Artificial Sequence
  Synthetic
aaugacaacgagaaguauuuu

SEQ ID NO: 423460 - RNA, 22 nt, Artificial Sequence
  Synthetic
aaaugacaacgagaaguauuuu

SEQ ID NO: 423461 - RNA, 23 nt, Artificial Sequence
  Synthetic
uaaaugacaacgagaaguauuuu

SEQ ID NO: 423462 - RNA, 24 nt, Artificial Sequence
  Synthetic
cuaaaugacaacgagaaguauuuu

SEQ ID NO: 423463 - RNA, 18 nt, Artificial Sequence
  Synthetic
augaaauagcaguauuuu

SEQ ID NO: 423464 - RNA, 19 nt, Artificial Sequence
  Synthetic
aaugaaauagcaguauuuu

SEQ ID NO: 423465 - RNA, 20 nt, Artificial Sequence
  Synthetic
uaaugaaauagcaguauuuu

SEQ ID NO: 423466 - RNA, 21 nt, Artificial Sequence
  Synthetic
uuaaugaaauagcaguauuuu

SEQ ID NO: 423467 - RNA, 22 nt, Artificial Sequence
  Synthetic
auuaaugaaauagcaguauuuu

SEQ ID NO: 423468 - RNA, 23 nt, Artificial Sequence
  Synthetic
aauuaaugaaauagcaguauuuu

SEQ ID NO: 423469 - RNA, 24 nt, Artificial Sequence
  Synthetic
gaauuaaugaaauagcaguauuuu

SEQ ID NO: 423470 - RNA, 18 nt, Artificial Sequence
  Synthetic
gcaaaacaucaguauuuu

SEQ ID NO: 423471 - RNA, 19 nt, Artificial Sequence
  Synthetic
agcaaaacaucaguauuuu

SEQ ID NO: 423472 - RNA, 20 nt, Artificial Sequence
  Synthetic
uagcaaaacaucaguauuuu

SEQ ID NO: 423473 - RNA, 21 nt, Artificial Sequence
  Synthetic
auagcaaaacaucaguauuuu

SEQ ID NO: 423474 - RNA, 22 nt, Artificial Sequence
  Synthetic
uauagcaaaacaucaguauuuu

SEQ ID NO: 423475 - RNA, 23 nt, Artificial Sequence
  Synthetic
auauagcaaaacaucaguauuuu

SEQ ID NO: 423476 - RNA, 24 nt, Artificial Sequence
  Synthetic
aauauagcaaaacaucaguauuuu

SEQ ID NO: 423477 - RNA, 18 nt, Artificial Sequence
  Synthetic
gaacaccaucaguauuuu

SEQ ID NO: 423478 - RNA, 19 nt, Artificial Sequence
  Synthetic
agaacaccaucaguauuuu

SEQ ID NO: 423479 - RNA, 20 nt, Artificial Sequence
  Synthetic
aagaacaccaucaguauuuu

SEQ ID NO: 423480 - RNA, 21 nt, Artificial Sequence
  Synthetic
gaagaacaccaucaguauuuu

SEQ ID NO: 423481 - RNA, 22 nt, Artificial Sequence
  Synthetic
agaagaacaccaucaguauuuu

SEQ ID NO: 423482 - RNA, 23 nt, Artificial Sequence
  Synthetic
aagaagaacaccaucaguauuuu

SEQ ID NO: 423483 - RNA, 24 nt, Artificial Sequence
  Synthetic
uaagaagaacaccaucaguauuuu

SEQ ID NO: 423484 - RNA, 18 nt, Artificial Sequence
  Synthetic
ucauccuaucaguauuuu

SEQ ID NO: 423485 - RNA, 19 nt, Artificial Sequence
  Synthetic
aucauccuaucaguauuuu

SEQ ID NO: 423486 - RNA, 20 nt, Artificial Sequence
  Synthetic
caucauccuaucaguauuuu

SEQ ID NO: 423487 - RNA, 21 nt, Artificial Sequence
  Synthetic
acaucauccuaucaguauuuu

SEQ ID NO: 423488 - RNA, 22 nt, Artificial Sequence
  Synthetic
cacaucauccuaucaguauuuu

SEQ ID NO: 423489 - RNA, 23 nt, Artificial Sequence
  Synthetic
ucacaucauccuaucaguauuuu

SEQ ID NO: 423490 - RNA, 24 nt, Artificial Sequence
  Synthetic
uucacaucauccuaucaguauuuu

SEQ ID NO: 423491 - RNA, 18 nt, Artificial Sequence
  Synthetic
cuaggugauacguauuuu

SEQ ID NO: 423492 - RNA, 19 nt, Artificial Sequence
  Synthetic
acuaggugauacguauuuu

SEQ ID NO: 423493 - RNA, 20 nt, Artificial Sequence
  Synthetic
uacuaggugauacguauuuu

SEQ ID NO: 423494 - RNA, 21 nt, Artificial Sequence
  Synthetic
uuacuaggugauacguauuuu

SEQ ID NO: 423495 - RNA, 22 nt, Artificial Sequence
  Synthetic
auuacuaggugauacguauuuu

SEQ ID NO: 423496 - RNA, 23 nt, Artificial Sequence
  Synthetic
uauuacuaggugauacguauuuu

SEQ ID NO: 423497 - RNA, 24 nt, Artificial Sequence
  Synthetic
guauuacuaggugauacguauuuu

SEQ ID NO: 423498 - RNA, 18 nt, Artificial Sequence
  Synthetic
cucucuucuagguauuuu

SEQ ID NO: 423499 - RNA, 19 nt, Artificial Sequence
  Synthetic
ccucucuucuagguauuuu

SEQ ID NO: 423500 - RNA, 20 nt, Artificial Sequence
  Synthetic
uccucucuucuagguauuuu

SEQ ID NO: 423501 - RNA, 21 nt, Artificial Sequence
  Synthetic
cuccucucuucuagguauuuu

SEQ ID NO: 423502 - RNA, 22 nt, Artificial Sequence
  Synthetic
acuccucucuucuagguauuuu

SEQ ID NO: 423503 - RNA, 23 nt, Artificial Sequence
  Synthetic
aacuccucucuucuagguauuuu

SEQ ID NO: 423504 - RNA, 24 nt, Artificial Sequence
  Synthetic
caacuccucucuucuagguauuuu

SEQ ID NO: 423505 - RNA, 18 nt, Artificial Sequence
  Synthetic
auggauucuggguauuuu

SEQ ID NO: 423506 - RNA, 19 nt, Artificial Sequence
  Synthetic
cauggauucuggguauuuu

SEQ ID NO: 423507 - RNA, 20 nt, Artificial Sequence
  Synthetic
acauggauucuggguauuuu

SEQ ID NO: 423508 - RNA, 21 nt, Artificial Sequence
  Synthetic
uacauggauucuggguauuuu

SEQ ID NO: 423509 - RNA, 22 nt, Artificial Sequence
  Synthetic
guacauggauucuggguauuuu

SEQ ID NO: 423510 - RNA, 23 nt, Artificial Sequence
  Synthetic
gguacauggauucuggguauuuu

SEQ ID NO: 423511 - RNA, 24 nt, Artificial Sequence
  Synthetic
agguacauggauucuggguauuuu

SEQ ID NO: 423512 - RNA, 18 nt, Artificial Sequence
  Synthetic
auauauuuuguguauuuu

SEQ ID NO: 423513 - RNA, 19 nt, Artificial Sequence
  Synthetic
uauauauuuuguguauuuu

SEQ ID NO: 423514 - RNA, 20 nt, Artificial Sequence
  Synthetic
uuauauauuuuguguauuuu

SEQ ID NO: 423515 - RNA, 21 nt, Artificial Sequence
  Synthetic
uuuauauauuuuguguauuuu

SEQ ID NO: 423516 - RNA, 22 nt, Artificial Sequence
  Synthetic
uuuuauauauuuuguguauuuu

SEQ ID NO: 423517 - RNA, 23 nt, Artificial Sequence
  Synthetic
cuuuuauauauuuuguguauuuu

SEQ ID NO: 423518 - RNA, 24 nt, Artificial Sequence
  Synthetic
ucuuuuauauauuuuguguauuuu

SEQ ID NO: 423519 - RNA, 18 nt, Artificial Sequence
  Synthetic
ugacuuaaaaauuauuuu

SEQ ID NO: 423520 - RNA, 19 nt, Artificial Sequence
  Synthetic
augacuuaaaaauuauuuu

SEQ ID NO: 423521 - RNA, 20 nt, Artificial Sequence
  Synthetic
aaugacuuaaaaauuauuuu

SEQ ID NO: 423522 - RNA, 21 nt, Artificial Sequence
  Synthetic
aaaugacuuaaaaauuauuuu

SEQ ID NO: 423523 - RNA, 22 nt, Artificial Sequence
  Synthetic
gaaaugacuuaaaaauuauuuu

SEQ ID NO: 423524 - RNA, 23 nt, Artificial Sequence
  Synthetic
agaaaugacuuaaaaauuauuuu

SEQ ID NO: 423525 - RNA, 24 nt, Artificial Sequence
  Synthetic
uagaaaugacuuaaaaauuauuuu

SEQ ID NO: 423526 - RNA, 18 nt, Artificial Sequence
  Synthetic
aaauaagauaauuauuuu

SEQ ID NO: 423527 - RNA, 19 nt, Artificial Sequence
  Synthetic
caaauaagauaauuauuuu

SEQ ID NO: 423528 - RNA, 20 nt, Artificial Sequence
  Synthetic
acaaauaagauaauuauuuu

SEQ ID NO: 423529 - RNA, 21 nt, Artificial Sequence
  Synthetic
aacaaauaagauaauuauuuu

SEQ ID NO: 423530 - RNA, 22 nt, Artificial Sequence
  Synthetic
gaacaaauaagauaauuauuuu

SEQ ID NO: 423531 - RNA, 23 nt, Artificial Sequence
  Synthetic
agaacaaauaagauaauuauuuu

SEQ ID NO: 423532 - RNA, 24 nt, Artificial Sequence
  Synthetic
uagaacaaauaagauaauuauuuu

SEQ ID NO: 423533 - RNA, 18 nt, Artificial Sequence
  Synthetic
ccccaaaaacauuauuuu

SEQ ID NO: 423534 - RNA, 19 nt, Artificial Sequence
  Synthetic
cccccaaaaacauuauuuu

SEQ ID NO: 423535 - RNA, 20 nt, Artificial Sequence
  Synthetic
ucccccaaaaacauuauuuu

SEQ ID NO: 423536 - RNA, 21 nt, Artificial Sequence
  Synthetic
gucccccaaaaacauuauuuu

SEQ ID NO: 423537 - RNA, 22 nt, Artificial Sequence
  Synthetic
ugucccccaaaaacauuauuuu

SEQ ID NO: 423538 - RNA, 23 nt, Artificial Sequence
  Synthetic
uugucccccaaaaacauuauuuu

SEQ ID NO: 423539 - RNA, 24 nt, Artificial Sequence
  Synthetic
uuugucccccaaaaacauuauuuu

SEQ ID NO: 423540 - RNA, 18 nt, Artificial Sequence
  Synthetic
ugauguuaucauuauuuu

SEQ ID NO: 423541 - RNA, 19 nt, Artificial Sequence
  Synthetic
uugauguuaucauuauuuu

SEQ ID NO: 423542 - RNA, 20 nt, Artificial Sequence
  Synthetic
auugauguuaucauuauuuu

SEQ ID NO: 423543 - RNA, 21 nt, Artificial Sequence
  Synthetic
aauugauguuaucauuauuuu

SEQ ID NO: 423544 - RNA, 22 nt, Artificial Sequence
  Synthetic
aaauugauguuaucauuauuuu

SEQ ID NO: 423545 - RNA, 23 nt, Artificial Sequence
  Synthetic
aaaauugauguuaucauuauuuu

SEQ ID NO: 423546 - RNA, 24 nt, Artificial Sequence
  Synthetic
uaaaauugauguuaucauuauuuu

SEQ ID NO: 423547 - RNA, 18 nt, Artificial Sequence
  Synthetic
ggcaaaauauauuauuuu

SEQ ID NO: 423548 - RNA, 19 nt, Artificial Sequence
  Synthetic
uggcaaaauauauuauuuu

SEQ ID NO: 423549 - RNA, 20 nt, Artificial Sequence
  Synthetic
cuggcaaaauauauuauuuu

SEQ ID NO: 423550 - RNA, 21 nt, Artificial Sequence
  Synthetic
ccuggcaaaauauauuauuuu

SEQ ID NO: 423551 - RNA, 22 nt, Artificial Sequence
  Synthetic
accuggcaaaauauauuauuuu

SEQ ID NO: 423552 - RNA, 23 nt, Artificial Sequence
  Synthetic
aaccuggcaaaauauauuauuuu

SEQ ID NO: 423553 - RNA, 24 nt, Artificial Sequence
  Synthetic
uaaccuggcaaaauauauuauuuu

SEQ ID NO: 423554 - RNA, 18 nt, Artificial Sequence
  Synthetic
uaagugaacuauuauuuu

SEQ ID NO: 423555 - RNA, 19 nt, Artificial Sequence
  Synthetic
auaagugaacuauuauuuu

SEQ ID NO: 423556 - RNA, 20 nt, Artificial Sequence
  Synthetic
uauaagugaacuauuauuuu

SEQ ID NO: 423557 - RNA, 21 nt, Artificial Sequence
  Synthetic
uuauaagugaacuauuauuuu

SEQ ID NO: 423558 - RNA, 22 nt, Artificial Sequence
  Synthetic
uuuauaagugaacuauuauuuu

SEQ ID NO: 423559 - RNA, 23 nt, Artificial Sequence
  Synthetic
guuuauaagugaacuauuauuuu

SEQ ID NO: 423560 - RNA, 24 nt, Artificial Sequence
  Synthetic
cguuuauaagugaacuauuauuuu

SEQ ID NO: 423561 - RNA, 18 nt, Artificial Sequence
  Synthetic
uucucuuuuuauuauuuu

SEQ ID NO: 423562 - RNA, 19 nt, Artificial Sequence
  Synthetic
auucucuuuuuauuauuuu

SEQ ID NO: 423563 - RNA, 20 nt, Artificial Sequence
  Synthetic
cauucucuuuuuauuauuuu

SEQ ID NO: 423564 - RNA, 21 nt, Artificial Sequence
  Synthetic
ucauucucuuuuuauuauuuu

SEQ ID NO: 423565 - RNA, 22 nt, Artificial Sequence
  Synthetic
gucauucucuuuuuauuauuuu

SEQ ID NO: 423566 - RNA, 23 nt, Artificial Sequence
  Synthetic
ggucauucucuuuuuauuauuuu

SEQ ID NO: 423567 - RNA, 24 nt, Artificial Sequence
  Synthetic
uggucauucucuuuuuauuauuuu

SEQ ID NO: 423568 - RNA, 18 nt, Artificial Sequence
  Synthetic
ucgaaacacacuuauuuu

SEQ ID NO: 423569 - RNA, 19 nt, Artificial Sequence
  Synthetic
uucgaaacacacuuauuuu

SEQ ID NO: 423570 - RNA, 20 nt, Artificial Sequence
  Synthetic
uuucgaaacacacuuauuuu

SEQ ID NO: 423571 - RNA, 21 nt, Artificial Sequence
  Synthetic
guuucgaaacacacuuauuuu

SEQ ID NO: 423572 - RNA, 22 nt, Artificial Sequence
  Synthetic
uguuucgaaacacacuuauuuu

SEQ ID NO: 423573 - RNA, 23 nt, Artificial Sequence
  Synthetic
cuguuucgaaacacacuuauuuu

SEQ ID NO: 423574 - RNA, 24 nt, Artificial Sequence
  Synthetic
ccuguuucgaaacacacuuauuuu

SEQ ID NO: 423575 - RNA, 18 nt, Artificial Sequence
  Synthetic
ucguuguugucuuauuuu

SEQ ID NO: 423576 - RNA, 19 nt, Artificial Sequence
  Synthetic
uucguuguugucuuauuuu

SEQ ID NO: 423577 - RNA, 20 nt, Artificial Sequence
  Synthetic
cuucguuguugucuuauuuu

SEQ ID NO: 423578 - RNA, 21 nt, Artificial Sequence
  Synthetic
acuucguuguugucuuauuuu

SEQ ID NO: 423579 - RNA, 22 nt, Artificial Sequence
  Synthetic
aacuucguuguugucuuauuuu

SEQ ID NO: 423580 - RNA, 23 nt, Artificial Sequence
  Synthetic
aaacuucguuguugucuuauuuu

SEQ ID NO: 423581 - RNA, 24 nt, Artificial Sequence
  Synthetic
caaacuucguuguugucuuauuuu

SEQ ID NO: 423582 - RNA, 18 nt, Artificial Sequence
  Synthetic
cuaaccuauaguuauuuu

SEQ ID NO: 423583 - RNA, 19 nt, Artificial Sequence
  Synthetic
ucuaaccuauaguuauuuu

SEQ ID NO: 423584 - RNA, 20 nt, Artificial Sequence
  Synthetic
cucuaaccuauaguuauuuu

SEQ ID NO: 423585 - RNA, 21 nt, Artificial Sequence
  Synthetic
ucucuaaccuauaguuauuuu

SEQ ID NO: 423586 - RNA, 22 nt, Artificial Sequence
  Synthetic
cucucuaaccuauaguuauuuu

SEQ ID NO: 423587 - RNA, 23 nt, Artificial Sequence
  Synthetic
ucucucuaaccuauaguuauuuu

SEQ ID NO: 423588 - RNA, 24 nt, Artificial Sequence
  Synthetic
uucucucuaaccuauaguuauuuu

SEQ ID NO: 423589 - RNA, 18 nt, Artificial Sequence
  Synthetic
uaauuuauagguuauuuu

SEQ ID NO: 423590 - RNA, 19 nt, Artificial Sequence
  Synthetic
uuaauuuauagguuauuuu

SEQ ID NO: 423591 - RNA, 20 nt, Artificial Sequence
  Synthetic
auuaauuuauagguuauuuu

SEQ ID NO: 423592 - RNA, 21 nt, Artificial Sequence
  Synthetic
uauuaauuuauagguuauuuu

SEQ ID NO: 423593 - RNA, 22 nt, Artificial Sequence
  Synthetic
cuauuaauuuauagguuauuuu

SEQ ID NO: 423594 - RNA, 23 nt, Artificial Sequence
  Synthetic
ucuauuaauuuauagguuauuuu

SEQ ID NO: 423595 - RNA, 24 nt, Artificial Sequence
  Synthetic
aucuauuaauuuauagguuauuuu

SEQ ID NO: 423596 - RNA, 18 nt, Artificial Sequence
  Synthetic
ccuaaaggaauuuauuuu

SEQ ID NO: 423597 - RNA, 19 nt, Artificial Sequence
  Synthetic
accuaaaggaauuuauuuu

SEQ ID NO: 423598 - RNA, 20 nt, Artificial Sequence
  Synthetic
uaccuaaaggaauuuauuuu

SEQ ID NO: 423599 - RNA, 21 nt, Artificial Sequence
  Synthetic
guaccuaaaggaauuuauuuu

SEQ ID NO: 423600 - RNA, 22 nt, Artificial Sequence
  Synthetic
aguaccuaaaggaauuuauuuu

SEQ ID NO: 423601 - RNA, 23 nt, Artificial Sequence
  Synthetic
caguaccuaaaggaauuuauuuu

SEQ ID NO: 423602 - RNA, 24 nt, Artificial Sequence
  Synthetic
ucaguaccuaaaggaauuuauuuu

SEQ ID NO: 423603 - RNA, 18 nt, Artificial Sequence
  Synthetic
uuuagguagauuuauuuu

SEQ ID NO: 423604 - RNA, 19 nt, Artificial Sequence
  Synthetic
auuuagguagauuuauuuu

SEQ ID NO: 423605 - RNA, 20 nt, Artificial Sequence
  Synthetic
aauuuagguagauuuauuuu

SEQ ID NO: 423606 - RNA, 21 nt, Artificial Sequence
  Synthetic
gaauuuagguagauuuauuuu

SEQ ID NO: 423607 - RNA, 22 nt, Artificial Sequence
  Synthetic
agaauuuagguagauuuauuuu

SEQ ID NO: 423608 - RNA, 23 nt, Artificial Sequence
  Synthetic
uagaauuuagguagauuuauuuu

SEQ ID NO: 423609 - RNA, 24 nt, Artificial Sequence
  Synthetic
auagaauuuagguagauuuauuuu

SEQ ID NO: 423610 - RNA, 18 nt, Artificial Sequence
  Synthetic
caauuauguauuuauuuu

SEQ ID NO: 423611 - RNA, 19 nt, Artificial Sequence
  Synthetic
acaauuauguauuuauuuu

SEQ ID NO: 423612 - RNA, 20 nt, Artificial Sequence
  Synthetic
gacaauuauguauuuauuuu

SEQ ID NO: 423613 - RNA, 21 nt, Artificial Sequence
  Synthetic
ugacaauuauguauuuauuuu

SEQ ID NO: 423614 - RNA, 22 nt, Artificial Sequence
  Synthetic
cugacaauuauguauuuauuuu

SEQ ID NO: 423615 - RNA, 23 nt, Artificial Sequence
  Synthetic
ucugacaauuauguauuuauuuu

SEQ ID NO: 423616 - RNA, 24 nt, Artificial Sequence
  Synthetic
cucugacaauuauguauuuauuuu

SEQ ID NO: 423617 - RNA, 18 nt, Artificial Sequence
  Synthetic
uuuuuuuuuauuuauuuu

SEQ ID NO: 423618 - RNA, 19 nt, Artificial Sequence
  Synthetic
uuuuuuuuuuauuuauuuu

SEQ ID NO: 423619 - RNA, 20 nt, Artificial Sequence
  Synthetic
uuuuuuuuuuuauuuauuuu

SEQ ID NO: 423620 - RNA, 21 nt, Artificial Sequence
  Synthetic
auuuuuuuuuuuauuuauuuu

SEQ ID NO: 423621 - RNA, 22 nt, Artificial Sequence
  Synthetic
uauuuuuuuuuuuauuuauuuu

SEQ ID NO: 423622 - RNA, 23 nt, Artificial Sequence
  Synthetic
uuauuuuuuuuuuuauuuauuuu

SEQ ID NO: 423623 - RNA, 24 nt, Artificial Sequence
  Synthetic
uuuauuuuuuuuuuuauuuauuuu

SEQ ID NO: 423624 - RNA, 18 nt, Artificial Sequence
  Synthetic
uucauauaaguuuauuuu

SEQ ID NO: 423625 - RNA, 19 nt, Artificial Sequence
  Synthetic
cuucauauaaguuuauuuu

SEQ ID NO: 423626 - RNA, 20 nt, Artificial Sequence
  Synthetic
acuucauauaaguuuauuuu

SEQ ID NO: 423627 - RNA, 21 nt, Artificial Sequence
  Synthetic
uacuucauauaaguuuauuuu

SEQ ID NO: 423628 - RNA, 22 nt, Artificial Sequence
  Synthetic
auacuucauauaaguuuauuuu

SEQ ID NO: 423629 - RNA, 23 nt, Artificial Sequence
  Synthetic
cauacuucauauaaguuuauuuu

SEQ ID NO: 423630 - RNA, 24 nt, Artificial Sequence
  Synthetic
gcauacuucauauaaguuuauuuu

SEQ ID NO: 423631 - RNA, 18 nt, Artificial Sequence
  Synthetic
uaauucuauuuuuauuuu

SEQ ID NO: 423632 - RNA, 19 nt, Artificial Sequence
  Synthetic
auaauucuauuuuuauuuu

SEQ ID NO: 423633 - RNA, 20 nt, Artificial Sequence
  Synthetic
gauaauucuauuuuuauuuu

SEQ ID NO: 423634 - RNA, 21 nt, Artificial Sequence
  Synthetic
ugauaauucuauuuuuauuuu

SEQ ID NO: 423635 - RNA, 22 nt, Artificial Sequence
  Synthetic
augauaauucuauuuuuauuuu

SEQ ID NO: 423636 - RNA, 23 nt, Artificial Sequence
  Synthetic
uaugauaauucuauuuuuauuuu

SEQ ID NO: 423637 - RNA, 24 nt, Artificial Sequence
  Synthetic
auaugauaauucuauuuuuauuuu

SEQ ID NO: 423638 - RNA, 18 nt, Artificial Sequence
  Synthetic
auguaaacgaaaacuuuu

SEQ ID NO: 423639 - RNA, 19 nt, Artificial Sequence
  Synthetic
uauguaaacgaaaacuuuu

SEQ ID NO: 423640 - RNA, 20 nt, Artificial Sequence
  Synthetic
auauguaaacgaaaacuuuu

SEQ ID NO: 423641 - RNA, 21 nt, Artificial Sequence
  Synthetic
gauauguaaacgaaaacuuuu

SEQ ID NO: 423642 - RNA, 22 nt, Artificial Sequence
  Synthetic
agauauguaaacgaaaacuuuu

SEQ ID NO: 423643 - RNA, 23 nt, Artificial Sequence
  Synthetic
uagauauguaaacgaaaacuuuu

SEQ ID NO: 423644 - RNA, 24 nt, Artificial Sequence
  Synthetic
cuagauauguaaacgaaaacuuuu

SEQ ID NO: 423645 - RNA, 18 nt, Artificial Sequence
  Synthetic
ucaaaugacauaacuuuu

SEQ ID NO: 423646 - RNA, 19 nt, Artificial Sequence
  Synthetic
uucaaaugacauaacuuuu

SEQ ID NO: 423647 - RNA, 20 nt, Artificial Sequence
  Synthetic
uuucaaaugacauaacuuuu

SEQ ID NO: 423648 - RNA, 21 nt, Artificial Sequence
  Synthetic
auuucaaaugacauaacuuuu

SEQ ID NO: 423649 - RNA, 22 nt, Artificial Sequence
  Synthetic
uauuucaaaugacauaacuuuu

SEQ ID NO: 423650 - RNA, 23 nt, Artificial Sequence
  Synthetic
guauuucaaaugacauaacuuuu

SEQ ID NO: 423651 - RNA, 24 nt, Artificial Sequence
  Synthetic
uguauuucaaaugacauaacuuuu

SEQ ID NO: 423652 - RNA, 18 nt, Artificial Sequence
  Synthetic
gauuacuaguuaacuuuu

SEQ ID NO: 423653 - RNA, 19 nt, Artificial Sequence
  Synthetic
agauuacuaguuaacuuuu

SEQ ID NO: 423654 - RNA, 20 nt, Artificial Sequence
  Synthetic
aagauuacuaguuaacuuuu

SEQ ID NO: 423655 - RNA, 21 nt, Artificial Sequence
  Synthetic
uaagauuacuaguuaacuuuu

SEQ ID NO: 423656 - RNA, 22 nt, Artificial Sequence
  Synthetic
guaagauuacuaguuaacuuuu

SEQ ID NO: 423657 - RNA, 23 nt, Artificial Sequence
  Synthetic
uguaagauuacuaguuaacuuuu

SEQ ID NO: 423658 - RNA, 24 nt, Artificial Sequence
  Synthetic
auguaagauuacuaguuaacuuuu

SEQ ID NO: 423659 - RNA, 18 nt, Artificial Sequence
  Synthetic
cucaaucuguuaacuuuu

SEQ ID NO: 423660 - RNA, 19 nt, Artificial Sequence
  Synthetic
gcucaaucuguuaacuuuu

SEQ ID NO: 423661 - RNA, 20 nt, Artificial Sequence
  Synthetic
ugcucaaucuguuaacuuuu

SEQ ID NO: 423662 - RNA, 21 nt, Artificial Sequence
  Synthetic
augcucaaucuguuaacuuuu

SEQ ID NO: 423663 - RNA, 22 nt, Artificial Sequence
  Synthetic
aaugcucaaucuguuaacuuuu

SEQ ID NO: 423664 - RNA, 23 nt, Artificial Sequence
  Synthetic
aaaugcucaaucuguuaacuuuu

SEQ ID NO: 423665 - RNA, 24 nt, Artificial Sequence
  Synthetic
uaaaugcucaaucuguuaacuuuu

SEQ ID NO: 423666 - RNA, 18 nt, Artificial Sequence
  Synthetic
caaugauaucagacuuuu

SEQ ID NO: 423667 - RNA, 19 nt, Artificial Sequence
  Synthetic
ccaaugauaucagacuuuu

SEQ ID NO: 423668 - RNA, 20 nt, Artificial Sequence
  Synthetic
gccaaugauaucagacuuuu

SEQ ID NO: 423669 - RNA, 21 nt, Artificial Sequence
  Synthetic
agccaaugauaucagacuuuu

SEQ ID NO: 423670 - RNA, 22 nt, Artificial Sequence
  Synthetic
aagccaaugauaucagacuuuu

SEQ ID NO: 423671 - RNA, 23 nt, Artificial Sequence
  Synthetic
caagccaaugauaucagacuuuu

SEQ ID NO: 423672 - RNA, 24 nt, Artificial Sequence
  Synthetic
ccaagccaaugauaucagacuuuu

SEQ ID NO: 423673 - RNA, 18 nt, Artificial Sequence
  Synthetic
gaggcauuagugacuuuu

SEQ ID NO: 423674 - RNA, 19 nt, Artificial Sequence
  Synthetic
agaggcauuagugacuuuu

SEQ ID NO: 423675 - RNA, 20 nt, Artificial Sequence
  Synthetic
cagaggcauuagugacuuuu

SEQ ID NO: 423676 - RNA, 21 nt, Artificial Sequence
  Synthetic
acagaggcauuagugacuuuu

SEQ ID NO: 423677 - RNA, 22 nt, Artificial Sequence
  Synthetic
gacagaggcauuagugacuuuu

SEQ ID NO: 423678 - RNA, 23 nt, Artificial Sequence
  Synthetic
ggacagaggcauuagugacuuuu

SEQ ID NO: 423679 - RNA, 24 nt, Artificial Sequence
  Synthetic
uggacagaggcauuagugacuuuu

SEQ ID NO: 423680 - RNA, 18 nt, Artificial Sequence
  Synthetic
uuccugaaugugacuuuu

SEQ ID NO: 423681 - RNA, 19 nt, Artificial Sequence
  Synthetic
auuccugaaugugacuuuu

SEQ ID NO: 423682 - RNA, 20 nt, Artificial Sequence
  Synthetic
gauuccugaaugugacuuuu

SEQ ID NO: 423683 - RNA, 21 nt, Artificial Sequence
  Synthetic
ggauuccugaaugugacuuuu

SEQ ID NO: 423684 - RNA, 22 nt, Artificial Sequence
  Synthetic
uggauuccugaaugugacuuuu

SEQ ID NO: 423685 - RNA, 23 nt, Artificial Sequence
  Synthetic
auggauuccugaaugugacuuuu

SEQ ID NO: 423686 - RNA, 24 nt, Artificial Sequence
  Synthetic
aauggauuccugaaugugacuuuu

SEQ ID NO: 423687 - RNA, 18 nt, Artificial Sequence
  Synthetic
cuaccuucauugacuuuu

SEQ ID NO: 423688 - RNA, 19 nt, Artificial Sequence
  Synthetic
ccuaccuucauugacuuuu

SEQ ID NO: 423689 - RNA, 20 nt, Artificial Sequence
  Synthetic
uccuaccuucauugacuuuu

SEQ ID NO: 423690 - RNA, 21 nt, Artificial Sequence
  Synthetic
uuccuaccuucauugacuuuu

SEQ ID NO: 423691 - RNA, 22 nt, Artificial Sequence
  Synthetic
cuuccuaccuucauugacuuuu

SEQ ID NO: 423692 - RNA, 23 nt, Artificial Sequence
  Synthetic
gcuuccuaccuucauugacuuuu

SEQ ID NO: 423693 - RNA, 24 nt, Artificial Sequence
  Synthetic
ggcuuccuaccuucauugacuuuu

SEQ ID NO: 423694 - RNA, 18 nt, Artificial Sequence
  Synthetic
aucuuaucguugacuuuu

SEQ ID NO: 423695 - RNA, 19 nt, Artificial Sequence
  Synthetic
aaucuuaucguugacuuuu

SEQ ID NO: 423696 - RNA, 20 nt, Artificial Sequence
  Synthetic
aaaucuuaucguugacuuuu

SEQ ID NO: 423697 - RNA, 21 nt, Artificial Sequence
  Synthetic
aaaaucuuaucguugacuuuu

SEQ ID NO: 423698 - RNA, 22 nt, Artificial Sequence
  Synthetic
caaaaucuuaucguugacuuuu

SEQ ID NO: 423699 - RNA, 23 nt, Artificial Sequence
  Synthetic
ccaaaaucuuaucguugacuuuu

SEQ ID NO: 423700 - RNA, 24 nt, Artificial Sequence
  Synthetic
uccaaaaucuuaucguugacuuuu

SEQ ID NO: 423701 - RNA, 18 nt, Artificial Sequence
  Synthetic
uauucucaccauacuuuu

SEQ ID NO: 423702 - RNA, 19 nt, Artificial Sequence
  Synthetic
guauucucaccauacuuuu

SEQ ID NO: 423703 - RNA, 20 nt, Artificial Sequence
  Synthetic
cguauucucaccauacuuuu

SEQ ID NO: 423704 - RNA, 21 nt, Artificial Sequence
  Synthetic
ucguauucucaccauacuuuu

SEQ ID NO: 423705 - RNA, 22 nt, Artificial Sequence
  Synthetic
uucguauucucaccauacuuuu

SEQ ID NO: 423706 - RNA, 23 nt, Artificial Sequence
  Synthetic
auucguauucucaccauacuuuu

SEQ ID NO: 423707 - RNA, 24 nt, Artificial Sequence
  Synthetic
aauucguauucucaccauacuuuu

SEQ ID NO: 423708 - RNA, 18 nt, Artificial Sequence
  Synthetic
aauauucagcauacuuuu

SEQ ID NO: 423709 - RNA, 19 nt, Artificial Sequence
  Synthetic
gaauauucagcauacuuuu

SEQ ID NO: 423710 - RNA, 20 nt, Artificial Sequence
  Synthetic
agaauauucagcauacuuuu

SEQ ID NO: 423711 - RNA, 21 nt, Artificial Sequence
  Synthetic
uagaauauucagcauacuuuu

SEQ ID NO: 423712 - RNA, 22 nt, Artificial Sequence
  Synthetic
uuagaauauucagcauacuuuu

SEQ ID NO: 423713 - RNA, 23 nt, Artificial Sequence
  Synthetic
auuagaauauucagcauacuuuu

SEQ ID NO: 423714 - RNA, 24 nt, Artificial Sequence
  Synthetic
uauuagaauauucagcauacuuuu

SEQ ID NO: 423715 - RNA, 18 nt, Artificial Sequence
  Synthetic
uaggaaugcuauacuuuu

SEQ ID NO: 423716 - RNA, 19 nt, Artificial Sequence
  Synthetic
auaggaaugcuauacuuuu

SEQ ID NO: 423717 - RNA, 20 nt, Artificial Sequence
  Synthetic
aauaggaaugcuauacuuuu

SEQ ID NO: 423718 - RNA, 21 nt, Artificial Sequence
  Synthetic
caauaggaaugcuauacuuuu

SEQ ID NO: 423719 - RNA, 22 nt, Artificial Sequence
  Synthetic
ucaauaggaaugcuauacuuuu

SEQ ID NO: 423720 - RNA, 23 nt, Artificial Sequence
  Synthetic
gucaauaggaaugcuauacuuuu

SEQ ID NO: 423721 - RNA, 24 nt, Artificial Sequence
  Synthetic
ugucaauaggaaugcuauacuuuu

SEQ ID NO: 423722 - RNA, 18 nt, Artificial Sequence
  Synthetic
uuagaaccugguacuuuu

SEQ ID NO: 423723 - RNA, 19 nt, Artificial Sequence
  Synthetic
guuagaaccugguacuuuu

SEQ ID NO: 423724 - RNA, 20 nt, Artificial Sequence
  Synthetic
uguuagaaccugguacuuuu

SEQ ID NO: 423725 - RNA, 21 nt, Artificial Sequence
  Synthetic
auguuagaaccugguacuuuu

SEQ ID NO: 423726 - RNA, 22 nt, Artificial Sequence
  Synthetic
gauguuagaaccugguacuuuu

SEQ ID NO: 423727 - RNA, 23 nt, Artificial Sequence
  Synthetic
ugauguuagaaccugguacuuuu

SEQ ID NO: 423728 - RNA, 24 nt, Artificial Sequence
  Synthetic
cugauguuagaaccugguacuuuu

SEQ ID NO: 423729 - RNA, 18 nt, Artificial Sequence
  Synthetic
aaaaggagaauuacuuuu

SEQ ID NO: 423730 - RNA, 19 nt, Artificial Sequence
  Synthetic
uaaaaggagaauuacuuuu

SEQ ID NO: 423731 - RNA, 20 nt, Artificial Sequence
  Synthetic
guaaaaggagaauuacuuuu

SEQ ID NO: 423732 - RNA, 21 nt, Artificial Sequence
  Synthetic
uguaaaaggagaauuacuuuu

SEQ ID NO: 423733 - RNA, 22 nt, Artificial Sequence
  Synthetic
auguaaaaggagaauuacuuuu

SEQ ID NO: 423734 - RNA, 23 nt, Artificial Sequence
  Synthetic
gauguaaaaggagaauuacuuuu

SEQ ID NO: 423735 - RNA, 24 nt, Artificial Sequence
  Synthetic
ugauguaaaaggagaauuacuuuu

SEQ ID NO: 423736 - RNA, 18 nt, Artificial Sequence
  Synthetic
ggauuauuacuuacuuuu

SEQ ID NO: 423737 - RNA, 19 nt, Artificial Sequence
  Synthetic
uggauuauuacuuacuuuu

SEQ ID NO: 423738 - RNA, 20 nt, Artificial Sequence
  Synthetic
auggauuauuacuuacuuuu

SEQ ID NO: 423739 - RNA, 21 nt, Artificial Sequence
  Synthetic
uauggauuauuacuuacuuuu

SEQ ID NO: 423740 - RNA, 22 nt, Artificial Sequence
  Synthetic
uuauggauuauuacuuacuuuu

SEQ ID NO: 423741 - RNA, 23 nt, Artificial Sequence
  Synthetic
uuuauggauuauuacuuacuuuu

SEQ ID NO: 423742 - RNA, 24 nt, Artificial Sequence
  Synthetic
guuuauggauuauuacuuacuuuu

SEQ ID NO: 423743 - RNA, 18 nt, Artificial Sequence
  Synthetic
ccauuuauccuuacuuuu

SEQ ID NO: 423744 - RNA, 19 nt, Artificial Sequence
  Synthetic
accauuuauccuuacuuuu

SEQ ID NO: 423745 - RNA, 20 nt, Artificial Sequence
  Synthetic
gaccauuuauccuuacuuuu

SEQ ID NO: 423746 - RNA, 21 nt, Artificial Sequence
  Synthetic
ggaccauuuauccuuacuuuu

SEQ ID NO: 423747 - RNA, 22 nt, Artificial Sequence
  Synthetic
aggaccauuuauccuuacuuuu

SEQ ID NO: 423748 - RNA, 23 nt, Artificial Sequence
  Synthetic
aaggaccauuuauccuuacuuuu

SEQ ID NO: 423749 - RNA, 24 nt, Artificial Sequence
  Synthetic
caaggaccauuuauccuuacuuuu

SEQ ID NO: 423750 - RNA, 18 nt, Artificial Sequence
  Synthetic
caauaaauguuuacuuuu

SEQ ID NO: 423751 - RNA, 19 nt, Artificial Sequence
  Synthetic
acaauaaauguuuacuuuu

SEQ ID NO: 423752 - RNA, 20 nt, Artificial Sequence
  Synthetic
cacaauaaauguuuacuuuu

SEQ ID NO: 423753 - RNA, 21 nt, Artificial Sequence
  Synthetic
ucacaauaaauguuuacuuuu

SEQ ID NO: 423754 - RNA, 22 nt, Artificial Sequence
  Synthetic
gucacaauaaauguuuacuuuu

SEQ ID NO: 423755 - RNA, 23 nt, Artificial Sequence
  Synthetic
ugucacaauaaauguuuacuuuu

SEQ ID NO: 423756 - RNA, 24 nt, Artificial Sequence
  Synthetic
uugucacaauaaauguuuacuuuu

SEQ ID NO: 423757 - RNA, 18 nt, Artificial Sequence
  Synthetic
uuauugcauuuuacuuuu

SEQ ID NO: 423758 - RNA, 19 nt, Artificial Sequence
  Synthetic
auuauugcauuuuacuuuu

SEQ ID NO: 423759 - RNA, 20 nt, Artificial Sequence
  Synthetic
cauuauugcauuuuacuuuu

SEQ ID NO: 423760 - RNA, 21 nt, Artificial Sequence
  Synthetic
ucauuauugcauuuuacuuuu

SEQ ID NO: 423761 - RNA, 22 nt, Artificial Sequence
  Synthetic
gucauuauugcauuuuacuuuu

SEQ ID NO: 423762 - RNA, 23 nt, Artificial Sequence
  Synthetic
ugucauuauugcauuuuacuuuu

SEQ ID NO: 423763 - RNA, 24 nt, Artificial Sequence
  Synthetic
uugucauuauugcauuuuacuuuu

SEQ ID NO: 423764 - RNA, 18 nt, Artificial Sequence
  Synthetic
agcucuauuuuuacuuuu

SEQ ID NO: 423765 - RNA, 19 nt, Artificial Sequence
  Synthetic
aagcucuauuuuuacuuuu

SEQ ID NO: 423766 - RNA, 20 nt, Artificial Sequence
  Synthetic
gaagcucuauuuuuacuuuu

SEQ ID NO: 423767 - RNA, 21 nt, Artificial Sequence
  Synthetic
ggaagcucuauuuuuacuuuu

SEQ ID NO: 423768 - RNA, 22 nt, Artificial Sequence
  Synthetic
gggaagcucuauuuuuacuuuu

SEQ ID NO: 423769 - RNA, 23 nt, Artificial Sequence
  Synthetic
agggaagcucuauuuuuacuuuu

SEQ ID NO: 423770 - RNA, 24 nt, Artificial Sequence
  Synthetic
uagggaagcucuauuuuuacuuuu

SEQ ID NO: 423771 - RNA, 18 nt, Artificial Sequence
  Synthetic
uuacuuguacuaccuuuu

SEQ ID NO: 423772 - RNA, 19 nt, Artificial Sequence
  Synthetic
auuacuuguacuaccuuuu

SEQ ID NO: 423773 - RNA, 20 nt, Artificial Sequence
  Synthetic
cauuacuuguacuaccuuuu

SEQ ID NO: 423774 - RNA, 21 nt, Artificial Sequence
  Synthetic
acauuacuuguacuaccuuuu

SEQ ID NO: 423775 - RNA, 22 nt, Artificial Sequence
  Synthetic
cacauuacuuguacuaccuuuu

SEQ ID NO: 423776 - RNA, 23 nt, Artificial Sequence
  Synthetic
ucacauuacuuguacuaccuuuu

SEQ ID NO: 423777 - RNA, 24 nt, Artificial Sequence
  Synthetic
uucacauuacuuguacuaccuuuu

SEQ ID NO: 423778 - RNA, 18 nt, Artificial Sequence
  Synthetic
ucuccaacuuccccuuuu

SEQ ID NO: 423779 - RNA, 19 nt, Artificial Sequence
  Synthetic
gucuccaacuuccccuuuu

SEQ ID NO: 423780 - RNA, 20 nt, Artificial Sequence
  Synthetic
ugucuccaacuuccccuuuu

SEQ ID NO: 423781 - RNA, 21 nt, Artificial Sequence
  Synthetic
cugucuccaacuuccccuuuu

SEQ ID NO: 423782 - RNA, 22 nt, Artificial Sequence
  Synthetic
ucugucuccaacuuccccuuuu

SEQ ID NO: 423783 - RNA, 23 nt, Artificial Sequence
  Synthetic
gucugucuccaacuuccccuuuu

SEQ ID NO: 423784 - RNA, 24 nt, Artificial Sequence
  Synthetic
ugucugucuccaacuuccccuuuu

SEQ ID NO: 423785 - RNA, 18 nt, Artificial Sequence
  Synthetic
uauucaggaaagccuuuu

SEQ ID NO: 423786 - RNA, 19 nt, Artificial Sequence
  Synthetic
auauucaggaaagccuuuu

SEQ ID NO: 423787 - RNA, 20 nt, Artificial Sequence
  Synthetic
aauauucaggaaagccuuuu

SEQ ID NO: 423788 - RNA, 21 nt, Artificial Sequence
  Synthetic
aaauauucaggaaagccuuuu

SEQ ID NO: 423789 - RNA, 22 nt, Artificial Sequence
  Synthetic
caaauauucaggaaagccuuuu

SEQ ID NO: 423790 - RNA, 23 nt, Artificial Sequence
  Synthetic
acaaauauucaggaaagccuuuu

SEQ ID NO: 423791 - RNA, 24 nt, Artificial Sequence
  Synthetic
aacaaauauucaggaaagccuuuu

SEQ ID NO: 423792 - RNA, 18 nt, Artificial Sequence
  Synthetic
ggccccacaucgccuuuu

SEQ ID NO: 423793 - RNA, 19 nt, Artificial Sequence
  Synthetic
uggccccacaucgccuuuu

SEQ ID NO: 423794 - RNA, 20 nt, Artificial Sequence
  Synthetic
cuggccccacaucgccuuuu

SEQ ID NO: 423795 - RNA, 21 nt, Artificial Sequence
  Synthetic
ccuggccccacaucgccuuuu

SEQ ID NO: 423796 - RNA, 22 nt, Artificial Sequence
  Synthetic
gccuggccccacaucgccuuuu

SEQ ID NO: 423797 - RNA, 23 nt, Artificial Sequence
  Synthetic
ugccuggccccacaucgccuuuu

SEQ ID NO: 423798 - RNA, 24 nt, Artificial Sequence
  Synthetic
augccuggccccacaucgccuuuu

SEQ ID NO: 423799 - RNA, 18 nt, Artificial Sequence
  Synthetic
cuuucaaacaggccuuuu

SEQ ID NO: 423800 - RNA, 19 nt, Artificial Sequence
  Synthetic
ucuuucaaacaggccuuuu

SEQ ID NO: 423801 - RNA, 20 nt, Artificial Sequence
  Synthetic
cucuuucaaacaggccuuuu

SEQ ID NO: 423802 - RNA, 21 nt, Artificial Sequence
  Synthetic
ccucuuucaaacaggccuuuu

SEQ ID NO: 423803 - RNA, 22 nt, Artificial Sequence
  Synthetic
accucuuucaaacaggccuuuu

SEQ ID NO: 423804 - RNA, 23 nt, Artificial Sequence
  Synthetic
aaccucuuucaaacaggccuuuu

SEQ ID NO: 423805 - RNA, 24 nt, Artificial Sequence
  Synthetic
aaaccucuuucaaacaggccuuuu

SEQ ID NO: 423806 - RNA, 18 nt, Artificial Sequence
  Synthetic
acauuguuucugccuuuu

SEQ ID NO: 423807 - RNA, 19 nt, Artificial Sequence
  Synthetic
cacauuguuucugccuuuu

SEQ ID NO: 423808 - RNA, 20 nt, Artificial Sequence
  Synthetic
acacauuguuucugccuuuu

SEQ ID NO: 423809 - RNA, 21 nt, Artificial Sequence
  Synthetic
aacacauuguuucugccuuuu

SEQ ID NO: 423810 - RNA, 22 nt, Artificial Sequence
  Synthetic
gaacacauuguuucugccuuuu

SEQ ID NO: 423811 - RNA, 23 nt, Artificial Sequence
  Synthetic
agaacacauuguuucugccuuuu

SEQ ID NO: 423812 - RNA, 24 nt, Artificial Sequence
  Synthetic
aagaacacauuguuucugccuuuu

SEQ ID NO: 423813 - RNA, 18 nt, Artificial Sequence
  Synthetic
uuuuaaacaaauccuuuu

SEQ ID NO: 423814 - RNA, 19 nt, Artificial Sequence
  Synthetic
auuuuaaacaaauccuuuu

SEQ ID NO: 423815 - RNA, 20 nt, Artificial Sequence
  Synthetic
uauuuuaaacaaauccuuuu

SEQ ID NO: 423816 - RNA, 21 nt, Artificial Sequence
  Synthetic
cuauuuuaaacaaauccuuuu

SEQ ID NO: 423817 - RNA, 22 nt, Artificial Sequence
  Synthetic
acuauuuuaaacaaauccuuuu

SEQ ID NO: 423818 - RNA, 23 nt, Artificial Sequence
  Synthetic
uacuauuuuaaacaaauccuuuu

SEQ ID NO: 423819 - RNA, 24 nt, Artificial Sequence
  Synthetic
auacuauuuuaaacaaauccuuuu

SEQ ID NO: 423820 - RNA, 18 nt, Artificial Sequence
  Synthetic
gaauuuccaaauccuuuu

SEQ ID NO: 423821 - RNA, 19 nt, Artificial Sequence
  Synthetic
ugaauuuccaaauccuuuu

SEQ ID NO: 423822 - RNA, 20 nt, Artificial Sequence
  Synthetic
augaauuuccaaauccuuuu

SEQ ID NO: 423823 - RNA, 21 nt, Artificial Sequence
  Synthetic
aaugaauuuccaaauccuuuu

SEQ ID NO: 423824 - RNA, 22 nt, Artificial Sequence
  Synthetic
aaaugaauuuccaaauccuuuu

SEQ ID NO: 423825 - RNA, 23 nt, Artificial Sequence
  Synthetic
gaaaugaauuuccaaauccuuuu

SEQ ID NO: 423826 - RNA, 24 nt, Artificial Sequence
  Synthetic
ugaaaugaauuuccaaauccuuuu

SEQ ID NO: 423827 - RNA, 18 nt, Artificial Sequence
  Synthetic
cugccaggaaauccuuuu

SEQ ID NO: 423828 - RNA, 19 nt, Artificial Sequence
  Synthetic
ucugccaggaaauccuuuu

SEQ ID NO: 423829 - RNA, 20 nt, Artificial Sequence
  Synthetic
uucugccaggaaauccuuuu

SEQ ID NO: 423830 - RNA, 21 nt, Artificial Sequence
  Synthetic
auucugccaggaaauccuuuu

SEQ ID NO: 423831 - RNA, 22 nt, Artificial Sequence
  Synthetic
cauucugccaggaaauccuuuu

SEQ ID NO: 423832 - RNA, 23 nt, Artificial Sequence
  Synthetic
ccauucugccaggaaauccuuuu

SEQ ID NO: 423833 - RNA, 24 nt, Artificial Sequence
  Synthetic
accauucugccaggaaauccuuuu

SEQ ID NO: 423834 - RNA, 18 nt, Artificial Sequence
  Synthetic
caagcaagcccuccuuuu

SEQ ID NO: 423835 - RNA, 19 nt, Artificial Sequence
  Synthetic
ucaagcaagcccuccuuuu

SEQ ID NO: 423836 - RNA, 20 nt, Artificial Sequence
  Synthetic
cucaagcaagcccuccuuuu

SEQ ID NO: 423837 - RNA, 21 nt, Artificial Sequence
  Synthetic
ucucaagcaagcccuccuuuu

SEQ ID NO: 423838 - RNA, 22 nt, Artificial Sequence
  Synthetic
aucucaagcaagcccuccuuuu

SEQ ID NO: 423839 - RNA, 23 nt, Artificial Sequence
  Synthetic
caucucaagcaagcccuccuuuu

SEQ ID NO: 423840 - RNA, 24 nt, Artificial Sequence
  Synthetic
ucaucucaagcaagcccuccuuuu

SEQ ID NO: 423841 - RNA, 18 nt, Artificial Sequence
  Synthetic
uaccgucucccuccuuuu

SEQ ID NO: 423842 - RNA, 19 nt, Artificial Sequence
  Synthetic
cuaccgucucccuccuuuu

SEQ ID NO: 423843 - RNA, 20 nt, Artificial Sequence
  Synthetic
ccuaccgucucccuccuuuu

SEQ ID NO: 423844 - RNA, 21 nt, Artificial Sequence
  Synthetic
accuaccgucucccuccuuuu

SEQ ID NO: 423845 - RNA, 22 nt, Artificial Sequence
  Synthetic
uaccuaccgucucccuccuuuu

SEQ ID NO: 423846 - RNA, 23 nt, Artificial Sequence
  Synthetic
auaccuaccgucucccuccuuuu

SEQ ID NO: 423847 - RNA, 24 nt, Artificial Sequence
  Synthetic
aauaccuaccgucucccuccuuuu

SEQ ID NO: 423848 - RNA, 18 nt, Artificial Sequence
  Synthetic
ggccaagcuaguccuuuu

SEQ ID NO: 423849 - RNA, 19 nt, Artificial Sequence
  Synthetic
uggccaagcuaguccuuuu

SEQ ID NO: 423850 - RNA, 20 nt, Artificial Sequence
  Synthetic
uuggccaagcuaguccuuuu

SEQ ID NO: 423851 - RNA, 21 nt, Artificial Sequence
  Synthetic
auuggccaagcuaguccuuuu

SEQ ID NO: 423852 - RNA, 22 nt, Artificial Sequence
  Synthetic
uauuggccaagcuaguccuuuu

SEQ ID NO: 423853 - RNA, 23 nt, Artificial Sequence
  Synthetic
guauuggccaagcuaguccuuuu

SEQ ID NO: 423854 - RNA, 24 nt, Artificial Sequence
  Synthetic
uguauuggccaagcuaguccuuuu

SEQ ID NO: 423855 - RNA, 18 nt, Artificial Sequence
  Synthetic
aaauaaauguguccuuuu

SEQ ID NO: 423856 - RNA, 19 nt, Artificial Sequence
  Synthetic
uaaauaaauguguccuuuu

SEQ ID NO: 423857 - RNA, 20 nt, Artificial Sequence
  Synthetic
cuaaauaaauguguccuuuu

SEQ ID NO: 423858 - RNA, 21 nt, Artificial Sequence
  Synthetic
ucuaaauaaauguguccuuuu

SEQ ID NO: 423859 - RNA, 22 nt, Artificial Sequence
  Synthetic
cucuaaauaaauguguccuuuu

SEQ ID NO: 423860 - RNA, 23 nt, Artificial Sequence
  Synthetic
ucucuaaauaaauguguccuuuu

SEQ ID NO: 423861 - RNA, 24 nt, Artificial Sequence
  Synthetic
uucucuaaauaaauguguccuuuu

SEQ ID NO: 423862 - RNA, 18 nt, Artificial Sequence
  Synthetic
gcagaauuccuuccuuuu

SEQ ID NO: 423863 - RNA, 19 nt, Artificial Sequence
  Synthetic
agcagaauuccuuccuuuu

SEQ ID NO: 423864 - RNA, 20 nt, Artificial Sequence
  Synthetic
uagcagaauuccuuccuuuu

SEQ ID NO: 423865 - RNA, 21 nt, Artificial Sequence
  Synthetic
auagcagaauuccuuccuuuu

SEQ ID NO: 423866 - RNA, 22 nt, Artificial Sequence
  Synthetic
gauagcagaauuccuuccuuuu

SEQ ID NO: 423867 - RNA, 23 nt, Artificial Sequence
  Synthetic
cgauagcagaauuccuuccuuuu

SEQ ID NO: 423868 - RNA, 24 nt, Artificial Sequence
  Synthetic
ccgauagcagaauuccuuccuuuu

SEQ ID NO: 423869 - RNA, 18 nt, Artificial Sequence
  Synthetic
ggacuauggcuuccuuuu

SEQ ID NO: 423870 - RNA, 19 nt, Artificial Sequence
  Synthetic
gggacuauggcuuccuuuu

SEQ ID NO: 423871 - RNA, 20 nt, Artificial Sequence
  Synthetic
agggacuauggcuuccuuuu

SEQ ID NO: 423872 - RNA, 21 nt, Artificial Sequence
  Synthetic
aagggacuauggcuuccuuuu

SEQ ID NO: 423873 - RNA, 22 nt, Artificial Sequence
  Synthetic
caagggacuauggcuuccuuuu

SEQ ID NO: 423874 - RNA, 23 nt, Artificial Sequence
  Synthetic
acaagggacuauggcuuccuuuu

SEQ ID NO: 423875 - RNA, 24 nt, Artificial Sequence
  Synthetic
uacaagggacuauggcuuccuuuu

SEQ ID NO: 423876 - RNA, 18 nt, Artificial Sequence
  Synthetic
guagcuguucuuccuuuu

SEQ ID NO: 423877 - RNA, 19 nt, Artificial Sequence
  Synthetic
uguagcuguucuuccuuuu

SEQ ID NO: 423878 - RNA, 20 nt, Artificial Sequence
  Synthetic
uuguagcuguucuuccuuuu

SEQ ID NO: 423879 - RNA, 21 nt, Artificial Sequence
  Synthetic
cuuguagcuguucuuccuuuu

SEQ ID NO: 423880 - RNA, 22 nt, Artificial Sequence
  Synthetic
ccuuguagcuguucuuccuuuu

SEQ ID NO: 423881 - RNA, 23 nt, Artificial Sequence
  Synthetic
cccuuguagcuguucuuccuuuu

SEQ ID NO: 423882 - RNA, 24 nt, Artificial Sequence
  Synthetic
ucccuuguagcuguucuuccuuuu

SEQ ID NO: 423883 - RNA, 18 nt, Artificial Sequence
  Synthetic
aauuuuagaguuccuuuu

SEQ ID NO: 423884 - RNA, 19 nt, Artificial Sequence
  Synthetic
uaauuuuagaguuccuuuu

SEQ ID NO: 423885 - RNA, 20 nt, Artificial Sequence
  Synthetic
auaauuuuagaguuccuuuu

SEQ ID NO: 423886 - RNA, 21 nt, Artificial Sequence
  Synthetic
uauaauuuuagaguuccuuuu

SEQ ID NO: 423887 - RNA, 22 nt, Artificial Sequence
  Synthetic
auauaauuuuagaguuccuuuu

SEQ ID NO: 423888 - RNA, 23 nt, Artificial Sequence
  Synthetic
aauauaauuuuagaguuccuuuu

SEQ ID NO: 423889 - RNA, 24 nt, Artificial Sequence
  Synthetic
caauauaauuuuagaguuccuuuu

SEQ ID NO: 423890 - RNA, 18 nt, Artificial Sequence
  Synthetic
ugggaagggaaagcuuuu

SEQ ID NO: 423891 - RNA, 19 nt, Artificial Sequence
  Synthetic
gugggaagggaaagcuuuu

SEQ ID NO: 423892 - RNA, 20 nt, Artificial Sequence
  Synthetic
ggugggaagggaaagcuuuu

SEQ ID NO: 423893 - RNA, 21 nt, Artificial Sequence
  Synthetic
uggugggaagggaaagcuuuu

SEQ ID NO: 423894 - RNA, 22 nt, Artificial Sequence
  Synthetic
cuggugggaagggaaagcuuuu

SEQ ID NO: 423895 - RNA, 23 nt, Artificial Sequence
  Synthetic
ccuggugggaagggaaagcuuuu

SEQ ID NO: 423896 - RNA, 24 nt, Artificial Sequence
  Synthetic
uccuggugggaagggaaagcuuuu

SEQ ID NO: 423897 - RNA, 18 nt, Artificial Sequence
  Synthetic
gacaaauuauaagcuuuu

SEQ ID NO: 423898 - RNA, 19 nt, Artificial Sequence
  Synthetic
agacaaauuauaagcuuuu

SEQ ID NO: 423899 - RNA, 20 nt, Artificial Sequence
  Synthetic
uagacaaauuauaagcuuuu

SEQ ID NO: 423900 - RNA, 21 nt, Artificial Sequence
  Synthetic
uuagacaaauuauaagcuuuu

SEQ ID NO: 423901 - RNA, 22 nt, Artificial Sequence
  Synthetic
auuagacaaauuauaagcuuuu

SEQ ID NO: 423902 - RNA, 23 nt, Artificial Sequence
  Synthetic
uauuagacaaauuauaagcuuuu

SEQ ID NO: 423903 - RNA, 24 nt, Artificial Sequence
  Synthetic
uuauuagacaaauuauaagcuuuu

SEQ ID NO: 423904 - RNA, 18 nt, Artificial Sequence
  Synthetic
uuagauuacccagcuuuu

SEQ ID NO: 423905 - RNA, 19 nt, Artificial Sequence
  Synthetic
cuuagauuacccagcuuuu

SEQ ID NO: 423906 - RNA, 20 nt, Artificial Sequence
  Synthetic
ucuuagauuacccagcuuuu

SEQ ID NO: 423907 - RNA, 21 nt, Artificial Sequence
  Synthetic
gucuuagauuacccagcuuuu

SEQ ID NO: 423908 - RNA, 22 nt, Artificial Sequence
  Synthetic
ggucuuagauuacccagcuuuu

SEQ ID NO: 423909 - RNA, 23 nt, Artificial Sequence
  Synthetic
gggucuuagauuacccagcuuuu

SEQ ID NO: 423910 - RNA, 24 nt, Artificial Sequence
  Synthetic
agggucuuagauuacccagcuuuu

SEQ ID NO: 423911 - RNA, 18 nt, Artificial Sequence
  Synthetic
uggaaauuaucagcuuuu

SEQ ID NO: 423912 - RNA, 19 nt, Artificial Sequence
  Synthetic
guggaaauuaucagcuuuu

SEQ ID NO: 423913 - RNA, 20 nt, Artificial Sequence
  Synthetic
uguggaaauuaucagcuuuu

SEQ ID NO: 423914 - RNA, 21 nt, Artificial Sequence
  Synthetic
uuguggaaauuaucagcuuuu

SEQ ID NO: 423915 - RNA, 22 nt, Artificial Sequence
  Synthetic
auuguggaaauuaucagcuuuu

SEQ ID NO: 423916 - RNA, 23 nt, Artificial Sequence
  Synthetic
aauuguggaaauuaucagcuuuu

SEQ ID NO: 423917 - RNA, 24 nt, Artificial Sequence
  Synthetic
aaauuguggaaauuaucagcuuuu

SEQ ID NO: 423918 - RNA, 18 nt, Artificial Sequence
  Synthetic
auuccucgcagagcuuuu

SEQ ID NO: 423919 - RNA, 19 nt, Artificial Sequence
  Synthetic
uauuccucgcagagcuuuu

SEQ ID NO: 423920 - RNA, 20 nt, Artificial Sequence
  Synthetic
uuauuccucgcagagcuuuu

SEQ ID NO: 423921 - RNA, 21 nt, Artificial Sequence
  Synthetic
uuuauuccucgcagagcuuuu

SEQ ID NO: 423922 - RNA, 22 nt, Artificial Sequence
  Synthetic
uuuuauuccucgcagagcuuuu

SEQ ID NO: 423923 - RNA, 23 nt, Artificial Sequence
  Synthetic
guuuuauuccucgcagagcuuuu

SEQ ID NO: 423924 - RNA, 24 nt, Artificial Sequence
  Synthetic
uguuuuauuccucgcagagcuuuu

SEQ ID NO: 423925 - RNA, 18 nt, Artificial Sequence
  Synthetic
gugaguauucuagcuuuu

SEQ ID NO: 423926 - RNA, 19 nt, Artificial Sequence
  Synthetic
ugugaguauucuagcuuuu

SEQ ID NO: 423927 - RNA, 20 nt, Artificial Sequence
  Synthetic
gugugaguauucuagcuuuu

SEQ ID NO: 423928 - RNA, 21 nt, Artificial Sequence
  Synthetic
ugugugaguauucuagcuuuu

SEQ ID NO: 423929 - RNA, 22 nt, Artificial Sequence
  Synthetic
augugugaguauucuagcuuuu

SEQ ID NO: 423930 - RNA, 23 nt, Artificial Sequence
  Synthetic
uaugugugaguauucuagcuuuu

SEQ ID NO: 423931 - RNA, 24 nt, Artificial Sequence
  Synthetic
guaugugugaguauucuagcuuuu

SEQ ID NO: 423932 - RNA, 18 nt, Artificial Sequence
  Synthetic
uuuuaauguaacgcuuuu

SEQ ID NO: 423933 - RNA, 19 nt, Artificial Sequence
  Synthetic
uuuuuaauguaacgcuuuu

SEQ ID NO: 423934 - RNA, 20 nt, Artificial Sequence
  Synthetic
uuuuuuaauguaacgcuuuu

SEQ ID NO: 423935 - RNA, 21 nt, Artificial Sequence
  Synthetic
uuuuuuuaauguaacgcuuuu

SEQ ID NO: 423936 - RNA, 22 nt, Artificial Sequence
  Synthetic
auuuuuuuaauguaacgcuuuu

SEQ ID NO: 423937 - RNA, 23 nt, Artificial Sequence
  Synthetic
uauuuuuuuaauguaacgcuuuu

SEQ ID NO: 423938 - RNA, 24 nt, Artificial Sequence
  Synthetic
uuauuuuuuuaauguaacgcuuuu

SEQ ID NO: 423939 - RNA, 18 nt, Artificial Sequence
  Synthetic
ggaccaggcaaggcuuuu

SEQ ID NO: 423940 - RNA, 19 nt, Artificial Sequence
  Synthetic
aggaccaggcaaggcuuuu

SEQ ID NO: 423941 - RNA, 20 nt, Artificial Sequence
  Synthetic
uaggaccaggcaaggcuuuu

SEQ ID NO: 423942 - RNA, 21 nt, Artificial Sequence
  Synthetic
auaggaccaggcaaggcuuuu

SEQ ID NO: 423943 - RNA, 22 nt, Artificial Sequence
  Synthetic
aauaggaccaggcaaggcuuuu

SEQ ID NO: 423944 - RNA, 23 nt, Artificial Sequence
  Synthetic
caauaggaccaggcaaggcuuuu

SEQ ID NO: 423945 - RNA, 24 nt, Artificial Sequence
  Synthetic
ccaauaggaccaggcaaggcuuuu

SEQ ID NO: 423946 - RNA, 18 nt, Artificial Sequence
  Synthetic
agguuaggcaaggcuuuu

SEQ ID NO: 423947 - RNA, 19 nt, Artificial Sequence
  Synthetic
uagguuaggcaaggcuuuu

SEQ ID NO: 423948 - RNA, 20 nt, Artificial Sequence
  Synthetic
cuagguuaggcaaggcuuuu

SEQ ID NO: 423949 - RNA, 21 nt, Artificial Sequence
  Synthetic
ucuagguuaggcaaggcuuuu

SEQ ID NO: 423950 - RNA, 22 nt, Artificial Sequence
  Synthetic
cucuagguuaggcaaggcuuuu

SEQ ID NO: 423951 - RNA, 23 nt, Artificial Sequence
  Synthetic
acucuagguuaggcaaggcuuuu

SEQ ID NO: 423952 - RNA, 24 nt, Artificial Sequence
  Synthetic
cacucuagguuaggcaaggcuuuu

SEQ ID NO: 423953 - RNA, 18 nt, Artificial Sequence
  Synthetic
auuuaucggaaugcuuuu

SEQ ID NO: 423954 - RNA, 19 nt, Artificial Sequence
  Synthetic
uauuuaucggaaugcuuuu

SEQ ID NO: 423955 - RNA, 20 nt, Artificial Sequence
  Synthetic
uuauuuaucggaaugcuuuu

SEQ ID NO: 423956 - RNA, 21 nt, Artificial Sequence
  Synthetic
uuuauuuaucggaaugcuuuu

SEQ ID NO: 423957 - RNA, 22 nt, Artificial Sequence
  Synthetic
auuuauuuaucggaaugcuuuu

SEQ ID NO: 423958 - RNA, 23 nt, Artificial Sequence
  Synthetic
aauuuauuuaucggaaugcuuuu

SEQ ID NO: 423959 - RNA, 24 nt, Artificial Sequence
  Synthetic
aaauuuauuuaucggaaugcuuuu

SEQ ID NO: 423960 - RNA, 18 nt, Artificial Sequence
  Synthetic
uauauuugauaugcuuuu

SEQ ID NO: 423961 - RNA, 19 nt, Artificial Sequence
  Synthetic
cuauauuugauaugcuuuu

SEQ ID NO: 423962 - RNA, 20 nt, Artificial Sequence
  Synthetic
acuauauuugauaugcuuuu

SEQ ID NO: 423963 - RNA, 21 nt, Artificial Sequence
  Synthetic
uacuauauuugauaugcuuuu

SEQ ID NO: 423964 - RNA, 22 nt, Artificial Sequence
  Synthetic
guacuauauuugauaugcuuuu

SEQ ID NO: 423965 - RNA, 23 nt, Artificial Sequence
  Synthetic
aguacuauauuugauaugcuuuu

SEQ ID NO: 423966 - RNA, 24 nt, Artificial Sequence
  Synthetic
aaguacuauauuugauaugcuuuu

SEQ ID NO: 423967 - RNA, 18 nt, Artificial Sequence
  Synthetic
guggggcuuccugcuuuu

SEQ ID NO: 423968 - RNA, 19 nt, Artificial Sequence
  Synthetic
aguggggcuuccugcuuuu

SEQ ID NO: 423969 - RNA, 20 nt, Artificial Sequence
  Synthetic
aaguggggcuuccugcuuuu

SEQ ID NO: 423970 - RNA, 21 nt, Artificial Sequence
  Synthetic
aaaguggggcuuccugcuuuu

SEQ ID NO: 423971 - RNA, 22 nt, Artificial Sequence
  Synthetic
uaaaguggggcuuccugcuuuu

SEQ ID NO: 423972 - RNA, 23 nt, Artificial Sequence
  Synthetic
auaaaguggggcuuccugcuuuu

SEQ ID NO: 423973 - RNA, 24 nt, Artificial Sequence
  Synthetic
cauaaaguggggcuuccugcuuuu

SEQ ID NO: 423974 - RNA, 18 nt, Artificial Sequence
  Synthetic
uucuuagugagugcuuuu

SEQ ID NO: 423975 - RNA, 19 nt, Artificial Sequence
  Synthetic
uuucuuagugagugcuuuu

SEQ ID NO: 423976 - RNA, 20 nt, Artificial Sequence
  Synthetic
guuucuuagugagugcuuuu

SEQ ID NO: 423977 - RNA, 21 nt, Artificial Sequence
  Synthetic
gguuucuuagugagugcuuuu

SEQ ID NO: 423978 - RNA, 22 nt, Artificial Sequence
  Synthetic
ugguuucuuagugagugcuuuu

SEQ ID NO: 423979 - RNA, 23 nt, Artificial Sequence
  Synthetic
augguuucuuagugagugcuuuu

SEQ ID NO: 423980 - RNA, 24 nt, Artificial Sequence
  Synthetic
gaugguuucuuagugagugcuuuu

SEQ ID NO: 423981 - RNA, 18 nt, Artificial Sequence
  Synthetic
uuuuccaaacgugcuuuu

SEQ ID NO: 423982 - RNA, 19 nt, Artificial Sequence
  Synthetic
uuuuuccaaacgugcuuuu

SEQ ID NO: 423983 - RNA, 20 nt, Artificial Sequence
  Synthetic
cuuuuuccaaacgugcuuuu

SEQ ID NO: 423984 - RNA, 21 nt, Artificial Sequence
  Synthetic
ucuuuuuccaaacgugcuuuu

SEQ ID NO: 423985 - RNA, 22 nt, Artificial Sequence
  Synthetic
gucuuuuuccaaacgugcuuuu

SEQ ID NO: 423986 - RNA, 23 nt, Artificial Sequence
  Synthetic
ugucuuuuuccaaacgugcuuuu

SEQ ID NO: 423987 - RNA, 24 nt, Artificial Sequence
  Synthetic
cugucuuuuuccaaacgugcuuuu

SEQ ID NO: 423988 - RNA, 18 nt, Artificial Sequence
  Synthetic
uuuguuauaauugcuuuu

SEQ ID NO: 423989 - RNA, 19 nt, Artificial Sequence
  Synthetic
uuuuguuauaauugcuuuu

SEQ ID NO: 423990 - RNA, 20 nt, Artificial Sequence
  Synthetic
guuuuguuauaauugcuuuu

SEQ ID NO: 423991 - RNA, 21 nt, Artificial Sequence
  Synthetic
gguuuuguuauaauugcuuuu

SEQ ID NO: 423992 - RNA, 22 nt, Artificial Sequence
  Synthetic
ugguuuuguuauaauugcuuuu

SEQ ID NO: 423993 - RNA, 23 nt, Artificial Sequence
  Synthetic
uugguuuuguuauaauugcuuuu

SEQ ID NO: 423994 - RNA, 24 nt, Artificial Sequence
  Synthetic
uuugguuuuguuauaauugcuuuu

SEQ ID NO: 423995 - RNA, 18 nt, Artificial Sequence
  Synthetic
gcaaguugcauugcuuuu

SEQ ID NO: 423996 - RNA, 19 nt, Artificial Sequence
  Synthetic
agcaaguugcauugcuuuu

SEQ ID NO: 423997 - RNA, 20 nt, Artificial Sequence
  Synthetic
gagcaaguugcauugcuuuu

SEQ ID NO: 423998 - RNA, 21 nt, Artificial Sequence
  Synthetic
agagcaaguugcauugcuuuu

SEQ ID NO: 423999 - RNA, 22 nt, Artificial Sequence
  Synthetic
aagagcaaguugcauugcuuuu

SEQ ID NO: 424000 - RNA, 23 nt, Artificial Sequence
  Synthetic
uaagagcaaguugcauugcuuuu

SEQ ID NO: 424001 - RNA, 24 nt, Artificial Sequence
  Synthetic
uuaagagcaaguugcauugcuuuu

SEQ ID NO: 424002 - RNA, 18 nt, Artificial Sequence
  Synthetic
auuccucuuuuugcuuuu

SEQ ID NO: 424003 - RNA, 19 nt, Artificial Sequence
  Synthetic
uauuccucuuuuugcuuuu

SEQ ID NO: 424004 - RNA, 20 nt, Artificial Sequence
  Synthetic
uuauuccucuuuuugcuuuu

SEQ ID NO: 424005 - RNA, 21 nt, Artificial Sequence
  Synthetic
auuauuccucuuuuugcuuuu

SEQ ID NO: 424006 - RNA, 22 nt, Artificial Sequence
  Synthetic
uauuauuccucuuuuugcuuuu

SEQ ID NO: 424007 - RNA, 23 nt, Artificial Sequence
  Synthetic
uuauuauuccucuuuuugcuuuu

SEQ ID NO: 424008 - RNA, 24 nt, Artificial Sequence
  Synthetic
uuuauuauuccucuuuuugcuuuu

SEQ ID NO: 424009 - RNA, 18 nt, Artificial Sequence
  Synthetic
cuuuaacauacaucuuuu

SEQ ID NO: 424010 - RNA, 19 nt, Artificial Sequence
  Synthetic
gcuuuaacauacaucuuuu

SEQ ID NO: 424011 - RNA, 20 nt, Artificial Sequence
  Synthetic
ugcuuuaacauacaucuuuu

SEQ ID NO: 424012 - RNA, 21 nt, Artificial Sequence
  Synthetic
gugcuuuaacauacaucuuuu

SEQ ID NO: 424013 - RNA, 22 nt, Artificial Sequence
  Synthetic
ugugcuuuaacauacaucuuuu

SEQ ID NO: 424014 - RNA, 23 nt, Artificial Sequence
  Synthetic
cugugcuuuaacauacaucuuuu

SEQ ID NO: 424015 - RNA, 24 nt, Artificial Sequence
  Synthetic
gcugugcuuuaacauacaucuuuu

SEQ ID NO: 424016 - RNA, 18 nt, Artificial Sequence
  Synthetic
ggccccuauccaucuuuu

SEQ ID NO: 424017 - RNA, 19 nt, Artificial Sequence
  Synthetic
uggccccuauccaucuuuu

SEQ ID NO: 424018 - RNA, 20 nt, Artificial Sequence
  Synthetic
uuggccccuauccaucuuuu

SEQ ID NO: 424019 - RNA, 21 nt, Artificial Sequence
  Synthetic
uuuggccccuauccaucuuuu

SEQ ID NO: 424020 - RNA, 22 nt, Artificial Sequence
  Synthetic
uuuuggccccuauccaucuuuu

SEQ ID NO: 424021 - RNA, 23 nt, Artificial Sequence
  Synthetic
uuuuuggccccuauccaucuuuu

SEQ ID NO: 424022 - RNA, 24 nt, Artificial Sequence
  Synthetic
cuuuuuggccccuauccaucuuuu

SEQ ID NO: 424023 - RNA, 18 nt, Artificial Sequence
  Synthetic
caacucccacacucuuuu

SEQ ID NO: 424024 - RNA, 19 nt, Artificial Sequence
  Synthetic
ucaacucccacacucuuuu

SEQ ID NO: 424025 - RNA, 20 nt, Artificial Sequence
  Synthetic
gucaacucccacacucuuuu

SEQ ID NO: 424026 - RNA, 21 nt, Artificial Sequence
  Synthetic
agucaacucccacacucuuuu

SEQ ID NO: 424027 - RNA, 22 nt, Artificial Sequence
  Synthetic
cagucaacucccacacucuuuu

SEQ ID NO: 424028 - RNA, 23 nt, Artificial Sequence
  Synthetic
ucagucaacucccacacucuuuu

SEQ ID NO: 424029 - RNA, 24 nt, Artificial Sequence
  Synthetic
cucagucaacucccacacucuuuu

SEQ ID NO: 424030 - RNA, 18 nt, Artificial Sequence
  Synthetic
acagucuaaaucucuuuu

SEQ ID NO: 424031 - RNA, 19 nt, Artificial Sequence
  Synthetic
uacagucuaaaucucuuuu

SEQ ID NO: 424032 - RNA, 20 nt, Artificial Sequence
  Synthetic
auacagucuaaaucucuuuu

SEQ ID NO: 424033 - RNA, 21 nt, Artificial Sequence
  Synthetic
gauacagucuaaaucucuuuu

SEQ ID NO: 424034 - RNA, 22 nt, Artificial Sequence
  Synthetic
ugauacagucuaaaucucuuuu

SEQ ID NO: 424035 - RNA, 23 nt, Artificial Sequence
  Synthetic
uugauacagucuaaaucucuuuu

SEQ ID NO: 424036 - RNA, 24 nt, Artificial Sequence
  Synthetic
auugauacagucuaaaucucuuuu

SEQ ID NO: 424037 - RNA, 18 nt, Artificial Sequence
  Synthetic
auacuacuacucucuuuu

SEQ ID NO: 424038 - RNA, 19 nt, Artificial Sequence
  Synthetic
aauacuacuacucucuuuu

SEQ ID NO: 424039 - RNA, 20 nt, Artificial Sequence
  Synthetic
aaauacuacuacucucuuuu

SEQ ID NO: 424040 - RNA, 21 nt, Artificial Sequence
  Synthetic
aaaauacuacuacucucuuuu

SEQ ID NO: 424041 - RNA, 22 nt, Artificial Sequence
  Synthetic
caaaauacuacuacucucuuuu

SEQ ID NO: 424042 - RNA, 23 nt, Artificial Sequence
  Synthetic
acaaaauacuacuacucucuuuu

SEQ ID NO: 424043 - RNA, 24 nt, Artificial Sequence
  Synthetic
cacaaaauacuacuacucucuuuu

SEQ ID NO: 424044 - RNA, 18 nt, Artificial Sequence
  Synthetic
uccagaggcaagucuuuu

SEQ ID NO: 424045 - RNA, 19 nt, Artificial Sequence
  Synthetic
auccagaggcaagucuuuu

SEQ ID NO: 424046 - RNA, 20 nt, Artificial Sequence
  Synthetic
aauccagaggcaagucuuuu

SEQ ID NO: 424047 - RNA, 21 nt, Artificial Sequence
  Synthetic
gaauccagaggcaagucuuuu

SEQ ID NO: 424048 - RNA, 22 nt, Artificial Sequence
  Synthetic
ugaauccagaggcaagucuuuu

SEQ ID NO: 424049 - RNA, 23 nt, Artificial Sequence
  Synthetic
cugaauccagaggcaagucuuuu

SEQ ID NO: 424050 - RNA, 24 nt, Artificial Sequence
  Synthetic
ccugaauccagaggcaagucuuuu

SEQ ID NO: 424051 - RNA, 18 nt, Artificial Sequence
  Synthetic
cucaaagagaagucuuuu

SEQ ID NO: 424052 - RNA, 19 nt, Artificial Sequence
  Synthetic
ucucaaagagaagucuuuu

SEQ ID NO: 424053 - RNA, 20 nt, Artificial Sequence
  Synthetic
uucucaaagagaagucuuuu

SEQ ID NO: 424054 - RNA, 21 nt, Artificial Sequence
  Synthetic
cuucucaaagagaagucuuuu

SEQ ID NO: 424055 - RNA, 22 nt, Artificial Sequence
  Synthetic
gcuucucaaagagaagucuuuu

SEQ ID NO: 424056 - RNA, 23 nt, Artificial Sequence
  Synthetic
ugcuucucaaagagaagucuuuu

SEQ ID NO: 424057 - RNA, 24 nt, Artificial Sequence
  Synthetic
cugcuucucaaagagaagucuuuu

SEQ ID NO: 424058 - RNA, 18 nt, Artificial Sequence
  Synthetic
auuuuucaagagucuuuu

SEQ ID NO: 424059 - RNA, 19 nt, Artificial Sequence
  Synthetic
cauuuuucaagagucuuuu

SEQ ID NO: 424060 - RNA, 20 nt, Artificial Sequence
  Synthetic
ucauuuuucaagagucuuuu

SEQ ID NO: 424061 - RNA, 21 nt, Artificial Sequence
  Synthetic
cucauuuuucaagagucuuuu

SEQ ID NO: 424062 - RNA, 22 nt, Artificial Sequence
  Synthetic
acucauuuuucaagagucuuuu

SEQ ID NO: 424063 - RNA, 23 nt, Artificial Sequence
  Synthetic
gacucauuuuucaagagucuuuu

SEQ ID NO: 424064 - RNA, 24 nt, Artificial Sequence
  Synthetic
ugacucauuuuucaagagucuuuu

SEQ ID NO: 424065 - RNA, 18 nt, Artificial Sequence
  Synthetic
uccuaaugcaggucuuuu

SEQ ID NO: 424066 - RNA, 19 nt, Artificial Sequence
  Synthetic
cuccuaaugcaggucuuuu

SEQ ID NO: 424067 - RNA, 20 nt, Artificial Sequence
  Synthetic
ucuccuaaugcaggucuuuu

SEQ ID NO: 424068 - RNA, 21 nt, Artificial Sequence
  Synthetic
gucuccuaaugcaggucuuuu

SEQ ID NO: 424069 - RNA, 22 nt, Artificial Sequence
  Synthetic
ugucuccuaaugcaggucuuuu

SEQ ID NO: 424070 - RNA, 23 nt, Artificial Sequence
  Synthetic
cugucuccuaaugcaggucuuuu

SEQ ID NO: 424071 - RNA, 24 nt, Artificial Sequence
  Synthetic
gcugucuccuaaugcaggucuuuu

SEQ ID NO: 424072 - RNA, 18 nt, Artificial Sequence
  Synthetic
auauauugacugucuuuu

SEQ ID NO: 424073 - RNA, 19 nt, Artificial Sequence
  Synthetic
aauauauugacugucuuuu

SEQ ID NO: 424074 - RNA, 20 nt, Artificial Sequence
  Synthetic
aaauauauugacugucuuuu

SEQ ID NO: 424075 - RNA, 21 nt, Artificial Sequence
  Synthetic
gaaauauauugacugucuuuu

SEQ ID NO: 424076 - RNA, 22 nt, Artificial Sequence
  Synthetic
agaaauauauugacugucuuuu

SEQ ID NO: 424077 - RNA, 23 nt, Artificial Sequence
  Synthetic
uagaaauauauugacugucuuuu

SEQ ID NO: 424078 - RNA, 24 nt, Artificial Sequence
  Synthetic
uuagaaauauauugacugucuuuu

SEQ ID NO: 424079 - RNA, 18 nt, Artificial Sequence
  Synthetic
gcauaccaauugucuuuu

SEQ ID NO: 424080 - RNA, 19 nt, Artificial Sequence
  Synthetic
ugcauaccaauugucuuuu

SEQ ID NO: 424081 - RNA, 20 nt, Artificial Sequence
  Synthetic
gugcauaccaauugucuuuu

SEQ ID NO: 424082 - RNA, 21 nt, Artificial Sequence
  Synthetic
ggugcauaccaauugucuuuu

SEQ ID NO: 424083 - RNA, 22 nt, Artificial Sequence
  Synthetic
gggugcauaccaauugucuuuu

SEQ ID NO: 424084 - RNA, 23 nt, Artificial Sequence
  Synthetic
agggugcauaccaauugucuuuu

SEQ ID NO: 424085 - RNA, 24 nt, Artificial Sequence
  Synthetic
aagggugcauaccaauugucuuuu

SEQ ID NO: 424086 - RNA, 18 nt, Artificial Sequence
  Synthetic
ucccauuguaauucuuuu

SEQ ID NO: 424087 - RNA, 19 nt, Artificial Sequence
  Synthetic
uucccauuguaauucuuuu

SEQ ID NO: 424088 - RNA, 20 nt, Artificial Sequence
  Synthetic
auucccauuguaauucuuuu

SEQ ID NO: 424089 - RNA, 21 nt, Artificial Sequence
  Synthetic
uauucccauuguaauucuuuu

SEQ ID NO: 424090 - RNA, 22 nt, Artificial Sequence
  Synthetic
auauucccauuguaauucuuuu

SEQ ID NO: 424091 - RNA, 23 nt, Artificial Sequence
  Synthetic
uauauucccauuguaauucuuuu

SEQ ID NO: 424092 - RNA, 24 nt, Artificial Sequence
  Synthetic
guauauucccauuguaauucuuuu

SEQ ID NO: 424093 - RNA, 18 nt, Artificial Sequence
  Synthetic
guuuccuuuaauucuuuu

SEQ ID NO: 424094 - RNA, 19 nt, Artificial Sequence
  Synthetic
uguuuccuuuaauucuuuu

SEQ ID NO: 424095 - RNA, 20 nt, Artificial Sequence
  Synthetic
uuguuuccuuuaauucuuuu

SEQ ID NO: 424096 - RNA, 21 nt, Artificial Sequence
  Synthetic
auuguuuccuuuaauucuuuu

SEQ ID NO: 424097 - RNA, 22 nt, Artificial Sequence
  Synthetic
gauuguuuccuuuaauucuuuu

SEQ ID NO: 424098 - RNA, 23 nt, Artificial Sequence
  Synthetic
ugauuguuuccuuuaauucuuuu

SEQ ID NO: 424099 - RNA, 24 nt, Artificial Sequence
  Synthetic
gugauuguuuccuuuaauucuuuu

SEQ ID NO: 424100 - RNA, 18 nt, Artificial Sequence
  Synthetic
cccagcuuacauucuuuu

SEQ ID NO: 424101 - RNA, 19 nt, Artificial Sequence
  Synthetic
ucccagcuuacauucuuuu

SEQ ID NO: 424102 - RNA, 20 nt, Artificial Sequence
  Synthetic
uucccagcuuacauucuuuu

SEQ ID NO: 424103 - RNA, 21 nt, Artificial Sequence
  Synthetic
uuucccagcuuacauucuuuu

SEQ ID NO: 424104 - RNA, 22 nt, Artificial Sequence
  Synthetic
uuuucccagcuuacauucuuuu

SEQ ID NO: 424105 - RNA, 23 nt, Artificial Sequence
  Synthetic
uuuuucccagcuuacauucuuuu

SEQ ID NO: 424106 - RNA, 24 nt, Artificial Sequence
  Synthetic
uuuuuucccagcuuacauucuuuu

SEQ ID NO: 424107 - RNA, 18 nt, Artificial Sequence
  Synthetic
auauucaaagauucuuuu

SEQ ID NO: 424108 - RNA, 19 nt, Artificial Sequence
  Synthetic
uauauucaaagauucuuuu

SEQ ID NO: 424109 - RNA, 20 nt, Artificial Sequence
  Synthetic
auauauucaaagauucuuuu

SEQ ID NO: 424110 - RNA, 21 nt, Artificial Sequence
  Synthetic
uauauauucaaagauucuuuu

SEQ ID NO: 424111 - RNA, 22 nt, Artificial Sequence
  Synthetic
guauauauucaaagauucuuuu

SEQ ID NO: 424112 - RNA, 23 nt, Artificial Sequence
  Synthetic
aguauauauucaaagauucuuuu

SEQ ID NO: 424113 - RNA, 24 nt, Artificial Sequence
  Synthetic
aaguauauauucaaagauucuuuu

SEQ ID NO: 424114 - RNA, 18 nt, Artificial Sequence
  Synthetic
gcauaaaugucuucuuuu

SEQ ID NO: 424115 - RNA, 19 nt, Artificial Sequence
  Synthetic
ugcauaaaugucuucuuuu

SEQ ID NO: 424116 - RNA, 20 nt, Artificial Sequence
  Synthetic
cugcauaaaugucuucuuuu

SEQ ID NO: 424117 - RNA, 21 nt, Artificial Sequence
  Synthetic
gcugcauaaaugucuucuuuu

SEQ ID NO: 424118 - RNA, 22 nt, Artificial Sequence
  Synthetic
agcugcauaaaugucuucuuuu

SEQ ID NO: 424119 - RNA, 23 nt, Artificial Sequence
  Synthetic
uagcugcauaaaugucuucuuuu

SEQ ID NO: 424120 - RNA, 24 nt, Artificial Sequence
  Synthetic
uuagcugcauaaaugucuucuuuu

SEQ ID NO: 424121 - RNA, 18 nt, Artificial Sequence
  Synthetic
gcguaaaugucuucuuuu

SEQ ID NO: 424122 - RNA, 19 nt, Artificial Sequence
  Synthetic
cgcguaaaugucuucuuuu

SEQ ID NO: 424123 - RNA, 20 nt, Artificial Sequence
  Synthetic
ccgcguaaaugucuucuuuu

SEQ ID NO: 424124 - RNA, 21 nt, Artificial Sequence
  Synthetic
gccgcguaaaugucuucuuuu

SEQ ID NO: 424125 - RNA, 22 nt, Artificial Sequence
  Synthetic
ggccgcguaaaugucuucuuuu

SEQ ID NO: 424126 - RNA, 23 nt, Artificial Sequence
  Synthetic
uggccgcguaaaugucuucuuuu

SEQ ID NO: 424127 - RNA, 24 nt, Artificial Sequence
  Synthetic
uuggccgcguaaaugucuucuuuu

SEQ ID NO: 424128 - RNA, 18 nt, Artificial Sequence
  Synthetic
auuuguaugucuucuuuu

SEQ ID NO: 424129 - RNA, 19 nt, Artificial Sequence
  Synthetic
cauuuguaugucuucuuuu

SEQ ID NO: 424130 - RNA, 20 nt, Artificial Sequence
  Synthetic
ccauuuguaugucuucuuuu

SEQ ID NO: 424131 - RNA, 21 nt, Artificial Sequence
  Synthetic
gccauuuguaugucuucuuuu

SEQ ID NO: 424132 - RNA, 22 nt, Artificial Sequence
  Synthetic
ugccauuuguaugucuucuuuu

SEQ ID NO: 424133 - RNA, 23 nt, Artificial Sequence
  Synthetic
uugccauuuguaugucuucuuuu

SEQ ID NO: 424134 - RNA, 24 nt, Artificial Sequence
  Synthetic
uuugccauuuguaugucuucuuuu

SEQ ID NO: 424135 - RNA, 18 nt, Artificial Sequence
  Synthetic
augagccaacuuucuuuu

SEQ ID NO: 424136 - RNA, 19 nt, Artificial Sequence
  Synthetic
uaugagccaacuuucuuuu

SEQ ID NO: 424137 - RNA, 20 nt, Artificial Sequence
  Synthetic
auaugagccaacuuucuuuu

SEQ ID NO: 424138 - RNA, 21 nt, Artificial Sequence
  Synthetic
aauaugagccaacuuucuuuu

SEQ ID NO: 424139 - RNA, 22 nt, Artificial Sequence
  Synthetic
gaauaugagccaacuuucuuuu

SEQ ID NO: 424140 - RNA, 23 nt, Artificial Sequence
  Synthetic
ugaauaugagccaacuuucuuuu

SEQ ID NO: 424141 - RNA, 24 nt, Artificial Sequence
  Synthetic
uugaauaugagccaacuuucuuuu

SEQ ID NO: 424142 - RNA, 18 nt, Artificial Sequence
  Synthetic
uuuuaugaacuuucuuuu

SEQ ID NO: 424143 - RNA, 19 nt, Artificial Sequence
  Synthetic
cuuuuaugaacuuucuuuu

SEQ ID NO: 424144 - RNA, 20 nt, Artificial Sequence
  Synthetic
gcuuuuaugaacuuucuuuu

SEQ ID NO: 424145 - RNA, 21 nt, Artificial Sequence
  Synthetic
ugcuuuuaugaacuuucuuuu

SEQ ID NO: 424146 - RNA, 22 nt, Artificial Sequence
  Synthetic
augcuuuuaugaacuuucuuuu

SEQ ID NO: 424147 - RNA, 23 nt, Artificial Sequence
  Synthetic
uaugcuuuuaugaacuuucuuuu

SEQ ID NO: 424148 - RNA, 24 nt, Artificial Sequence
  Synthetic
auaugcuuuuaugaacuuucuuuu

SEQ ID NO: 424149 - RNA, 18 nt, Artificial Sequence
  Synthetic
gaugauuuucuuucuuuu

SEQ ID NO: 424150 - RNA, 19 nt, Artificial Sequence
  Synthetic
agaugauuuucuuucuuuu

SEQ ID NO: 424151 - RNA, 20 nt, Artificial Sequence
  Synthetic
gagaugauuuucuuucuuuu

SEQ ID NO: 424152 - RNA, 21 nt, Artificial Sequence
  Synthetic
agagaugauuuucuuucuuuu

SEQ ID NO: 424153 - RNA, 22 nt, Artificial Sequence
  Synthetic
gagagaugauuuucuuucuuuu

SEQ ID NO: 424154 - RNA, 23 nt, Artificial Sequence
  Synthetic
agagagaugauuuucuuucuuuu

SEQ ID NO: 424155 - RNA, 24 nt, Artificial Sequence
  Synthetic
cagagagaugauuuucuuucuuuu

SEQ ID NO: 424156 - RNA, 18 nt, Artificial Sequence
  Synthetic
aggccaaauguuucuuuu

SEQ ID NO: 424157 - RNA, 19 nt, Artificial Sequence
  Synthetic
uaggccaaauguuucuuuu

SEQ ID NO: 424158 - RNA, 20 nt, Artificial Sequence
  Synthetic
uuaggccaaauguuucuuuu

SEQ ID NO: 424159 - RNA, 21 nt, Artificial Sequence
  Synthetic
uuuaggccaaauguuucuuuu

SEQ ID NO: 424160 - RNA, 22 nt, Artificial Sequence
  Synthetic
cuuuaggccaaauguuucuuuu

SEQ ID NO: 424161 - RNA, 23 nt, Artificial Sequence
  Synthetic
acuuuaggccaaauguuucuuuu

SEQ ID NO: 424162 - RNA, 24 nt, Artificial Sequence
  Synthetic
aacuuuaggccaaauguuucuuuu

SEQ ID NO: 424163 - RNA, 18 nt, Artificial Sequence
  Synthetic
aaaaaccauguuucuuuu

SEQ ID NO: 424164 - RNA, 19 nt, Artificial Sequence
  Synthetic
aaaaaaccauguuucuuuu

SEQ ID NO: 424165 - RNA, 20 nt, Artificial Sequence
  Synthetic
aaaaaaaccauguuucuuuu

SEQ ID NO: 424166 - RNA, 21 nt, Artificial Sequence
  Synthetic
aaaaaaaaccauguuucuuuu

SEQ ID NO: 424167 - RNA, 22 nt, Artificial Sequence
  Synthetic
caaaaaaaaccauguuucuuuu

SEQ ID NO: 424168 - RNA, 23 nt, Artificial Sequence
  Synthetic
acaaaaaaaaccauguuucuuuu

SEQ ID NO: 424169 - RNA, 24 nt, Artificial Sequence
  Synthetic
aacaaaaaaaaccauguuucuuuu

SEQ ID NO: 424170 - RNA, 18 nt, Artificial Sequence
  Synthetic
uacuuaaaauuuucuuuu

SEQ ID NO: 424171 - RNA, 19 nt, Artificial Sequence
  Synthetic
uuacuuaaaauuuucuuuu

SEQ ID NO: 424172 - RNA, 20 nt, Artificial Sequence
  Synthetic
auuacuuaaaauuuucuuuu

SEQ ID NO: 424173 - RNA, 21 nt, Artificial Sequence
  Synthetic
uauuacuuaaaauuuucuuuu

SEQ ID NO: 424174 - RNA, 22 nt, Artificial Sequence
  Synthetic
uuauuacuuaaaauuuucuuuu

SEQ ID NO: 424175 - RNA, 23 nt, Artificial Sequence
  Synthetic
cuuauuacuuaaaauuuucuuuu

SEQ ID NO: 424176 - RNA, 24 nt, Artificial Sequence
  Synthetic
gcuuauuacuuaaaauuuucuuuu

SEQ ID NO: 424177 - RNA, 18 nt, Artificial Sequence
  Synthetic
agauuucuauuuucuuuu

SEQ ID NO: 424178 - RNA, 19 nt, Artificial Sequence
  Synthetic
cagauuucuauuuucuuuu

SEQ ID NO: 424179 - RNA, 20 nt, Artificial Sequence
  Synthetic
acagauuucuauuuucuuuu

SEQ ID NO: 424180 - RNA, 21 nt, Artificial Sequence
  Synthetic
gacagauuucuauuuucuuuu

SEQ ID NO: 424181 - RNA, 22 nt, Artificial Sequence
  Synthetic
agacagauuucuauuuucuuuu

SEQ ID NO: 424182 - RNA, 23 nt, Artificial Sequence
  Synthetic
aagacagauuucuauuuucuuuu

SEQ ID NO: 424183 - RNA, 24 nt, Artificial Sequence
  Synthetic
uaagacagauuucuauuuucuuuu

SEQ ID NO: 424184 - RNA, 18 nt, Artificial Sequence
  Synthetic
uuaugucccuuuucuuuu

SEQ ID NO: 424185 - RNA, 19 nt, Artificial Sequence
  Synthetic
uuuaugucccuuuucuuuu

SEQ ID NO: 424186 - RNA, 20 nt, Artificial Sequence
  Synthetic
auuuaugucccuuuucuuuu

SEQ ID NO: 424187 - RNA, 21 nt, Artificial Sequence
  Synthetic
uauuuaugucccuuuucuuuu

SEQ ID NO: 424188 - RNA, 22 nt, Artificial Sequence
  Synthetic
auauuuaugucccuuuucuuuu

SEQ ID NO: 424189 - RNA, 23 nt, Artificial Sequence
  Synthetic
cauauuuaugucccuuuucuuuu

SEQ ID NO: 424190 - RNA, 24 nt, Artificial Sequence
  Synthetic
acauauuuaugucccuuuucuuuu

SEQ ID NO: 424191 - RNA, 18 nt, Artificial Sequence
  Synthetic
uagaauuauuuuucuuuu

SEQ ID NO: 424192 - RNA, 19 nt, Artificial Sequence
  Synthetic
uuagaauuauuuuucuuuu

SEQ ID NO: 424193 - RNA, 20 nt, Artificial Sequence
  Synthetic
cuuagaauuauuuuucuuuu

SEQ ID NO: 424194 - RNA, 21 nt, Artificial Sequence
  Synthetic
ucuuagaauuauuuuucuuuu

SEQ ID NO: 424195 - RNA, 22 nt, Artificial Sequence
  Synthetic
aucuuagaauuauuuuucuuuu

SEQ ID NO: 424196 - RNA, 23 nt, Artificial Sequence
  Synthetic
caucuuagaauuauuuuucuuuu

SEQ ID NO: 424197 - RNA, 24 nt, Artificial Sequence
  Synthetic
acaucuuagaauuauuuuucuuuu

SEQ ID NO: 424198 - RNA, 18 nt, Artificial Sequence
  Synthetic
aauuuuuuuuuuucuuuu

SEQ ID NO: 424199 - RNA, 19 nt, Artificial Sequence
  Synthetic
caauuuuuuuuuuucuuuu

SEQ ID NO: 424200 - RNA, 20 nt, Artificial Sequence
  Synthetic
ccaauuuuuuuuuuucuuuu

SEQ ID NO: 424201 - RNA, 21 nt, Artificial Sequence
  Synthetic
cccaauuuuuuuuuuucuuuu

SEQ ID NO: 424202 - RNA, 22 nt, Artificial Sequence
  Synthetic
ccccaauuuuuuuuuuucuuuu

SEQ ID NO: 424203 - RNA, 23 nt, Artificial Sequence
  Synthetic
cccccaauuuuuuuuuuucuuuu

SEQ ID NO: 424204 - RNA, 24 nt, Artificial Sequence
  Synthetic
acccccaauuuuuuuuuuucuuuu

SEQ ID NO: 424205 - RNA, 18 nt, Artificial Sequence
  Synthetic
uguauucugaaaaguuuu

SEQ ID NO: 424206 - RNA, 19 nt, Artificial Sequence
  Synthetic
uuguauucugaaaaguuuu

SEQ ID NO: 424207 - RNA, 20 nt, Artificial Sequence
  Synthetic
uuuguauucugaaaaguuuu

SEQ ID NO: 424208 - RNA, 21 nt, Artificial Sequence
  Synthetic
auuuguauucugaaaaguuuu

SEQ ID NO: 424209 - RNA, 22 nt, Artificial Sequence
  Synthetic
aauuuguauucugaaaaguuuu

SEQ ID NO: 424210 - RNA, 23 nt, Artificial Sequence
  Synthetic
aaauuuguauucugaaaaguuuu

SEQ ID NO: 424211 - RNA, 24 nt, Artificial Sequence
  Synthetic
uaaauuuguauucugaaaaguuuu

SEQ ID NO: 424212 - RNA, 18 nt, Artificial Sequence
  Synthetic
auucacaucuaaaguuuu

SEQ ID NO: 424213 - RNA, 19 nt, Artificial Sequence
  Synthetic
cauucacaucuaaaguuuu

SEQ ID NO: 424214 - RNA, 20 nt, Artificial Sequence
  Synthetic
gcauucacaucuaaaguuuu

SEQ ID NO: 424215 - RNA, 21 nt, Artificial Sequence
  Synthetic
agcauucacaucuaaaguuuu

SEQ ID NO: 424216 - RNA, 22 nt, Artificial Sequence
  Synthetic
cagcauucacaucuaaaguuuu

SEQ ID NO: 424217 - RNA, 23 nt, Artificial Sequence
  Synthetic
ucagcauucacaucuaaaguuuu

SEQ ID NO: 424218 - RNA, 24 nt, Artificial Sequence
  Synthetic
uucagcauucacaucuaaaguuuu

SEQ ID NO: 424219 - RNA, 18 nt, Artificial Sequence
  Synthetic
acaacuuggacaaguuuu

SEQ ID NO: 424220 - RNA, 19 nt, Artificial Sequence
  Synthetic
gacaacuuggacaaguuuu

SEQ ID NO: 424221 - RNA, 20 nt, Artificial Sequence
  Synthetic
ggacaacuuggacaaguuuu

SEQ ID NO: 424222 - RNA, 21 nt, Artificial Sequence
  Synthetic
aggacaacuuggacaaguuuu

SEQ ID NO: 424223 - RNA, 22 nt, Artificial Sequence
  Synthetic
aaggacaacuuggacaaguuuu

SEQ ID NO: 424224 - RNA, 23 nt, Artificial Sequence
  Synthetic
gaaggacaacuuggacaaguuuu

SEQ ID NO: 424225 - RNA, 24 nt, Artificial Sequence
  Synthetic
ggaaggacaacuuggacaaguuuu

SEQ ID NO: 424226 - RNA, 18 nt, Artificial Sequence
  Synthetic
aacagaauuccaaguuuu

SEQ ID NO: 424227 - RNA, 19 nt, Artificial Sequence
  Synthetic
aaacagaauuccaaguuuu

SEQ ID NO: 424228 - RNA, 20 nt, Artificial Sequence
  Synthetic
gaaacagaauuccaaguuuu

SEQ ID NO: 424229 - RNA, 21 nt, Artificial Sequence
  Synthetic
ugaaacagaauuccaaguuuu

SEQ ID NO: 424230 - RNA, 22 nt, Artificial Sequence
  Synthetic
cugaaacagaauuccaaguuuu

SEQ ID NO: 424231 - RNA, 23 nt, Artificial Sequence
  Synthetic
ucugaaacagaauuccaaguuuu

SEQ ID NO: 424232 - RNA, 24 nt, Artificial Sequence
  Synthetic
uucugaaacagaauuccaaguuuu

SEQ ID NO: 424233 - RNA, 18 nt, Artificial Sequence
  Synthetic
ucacauguugcaaguuuu

SEQ ID NO: 424234 - RNA, 19 nt, Artificial Sequence
  Synthetic
aucacauguugcaaguuuu

SEQ ID NO: 424235 - RNA, 20 nt, Artificial Sequence
  Synthetic
caucacauguugcaaguuuu

SEQ ID NO: 424236 - RNA, 21 nt, Artificial Sequence
  Synthetic
acaucacauguugcaaguuuu

SEQ ID NO: 424237 - RNA, 22 nt, Artificial Sequence
  Synthetic
uacaucacauguugcaaguuuu

SEQ ID NO: 424238 - RNA, 23 nt, Artificial Sequence
  Synthetic
cuacaucacauguugcaaguuuu

SEQ ID NO: 424239 - RNA, 24 nt, Artificial Sequence
  Synthetic
gcuacaucacauguugcaaguuuu

SEQ ID NO: 424240 - RNA, 18 nt, Artificial Sequence
  Synthetic
cuuauuuuuucaaguuuu

SEQ ID NO: 424241 - RNA, 19 nt, Artificial Sequence
  Synthetic
ucuuauuuuuucaaguuuu

SEQ ID NO: 424242 - RNA, 20 nt, Artificial Sequence
  Synthetic
uucuuauuuuuucaaguuuu

SEQ ID NO: 424243 - RNA, 21 nt, Artificial Sequence
  Synthetic
uuucuuauuuuuucaaguuuu

SEQ ID NO: 424244 - RNA, 22 nt, Artificial Sequence
  Synthetic
uuuucuuauuuuuucaaguuuu

SEQ ID NO: 424245 - RNA, 23 nt, Artificial Sequence
  Synthetic
cuuuucuuauuuuuucaaguuuu

SEQ ID NO: 424246 - RNA, 24 nt, Artificial Sequence
  Synthetic
ucuuuucuuauuuuuucaaguuuu

SEQ ID NO: 424247 - RNA, 18 nt, Artificial Sequence
  Synthetic
cauuagaauguaaguuuu

SEQ ID NO: 424248 - RNA, 19 nt, Artificial Sequence
  Synthetic
ccauuagaauguaaguuuu

SEQ ID NO: 424249 - RNA, 20 nt, Artificial Sequence
  Synthetic
accauuagaauguaaguuuu

SEQ ID NO: 424250 - RNA, 21 nt, Artificial Sequence
  Synthetic
caccauuagaauguaaguuuu

SEQ ID NO: 424251 - RNA, 22 nt, Artificial Sequence
  Synthetic
ucaccauuagaauguaaguuuu

SEQ ID NO: 424252 - RNA, 23 nt, Artificial Sequence
  Synthetic
aucaccauuagaauguaaguuuu

SEQ ID NO: 424253 - RNA, 24 nt, Artificial Sequence
  Synthetic
uaucaccauuagaauguaaguuuu

SEQ ID NO: 424254 - RNA, 18 nt, Artificial Sequence
  Synthetic
uacucauucagcaguuuu

SEQ ID NO: 424255 - RNA, 19 nt, Artificial Sequence
  Synthetic
auacucauucagcaguuuu

SEQ ID NO: 424256 - RNA, 20 nt, Artificial Sequence
  Synthetic
aauacucauucagcaguuuu

SEQ ID NO: 424257 - RNA, 21 nt, Artificial Sequence
  Synthetic
caauacucauucagcaguuuu

SEQ ID NO: 424258 - RNA, 22 nt, Artificial Sequence
  Synthetic
ucaauacucauucagcaguuuu

SEQ ID NO: 424259 - RNA, 23 nt, Artificial Sequence
  Synthetic
uucaauacucauucagcaguuuu

SEQ ID NO: 424260 - RNA, 24 nt, Artificial Sequence
  Synthetic
cuucaauacucauucagcaguuuu

SEQ ID NO: 424261 - RNA, 18 nt, Artificial Sequence
  Synthetic
auuuaaugccucaguuuu

SEQ ID NO: 424262 - RNA, 19 nt, Artificial Sequence
  Synthetic
cauuuaaugccucaguuuu

SEQ ID NO: 424263 - RNA, 20 nt, Artificial Sequence
  Synthetic
gcauuuaaugccucaguuuu

SEQ ID NO: 424264 - RNA, 21 nt, Artificial Sequence
  Synthetic
agcauuuaaugccucaguuuu

SEQ ID NO: 424265 - RNA, 22 nt, Artificial Sequence
  Synthetic
aagcauuuaaugccucaguuuu

SEQ ID NO: 424266 - RNA, 23 nt, Artificial Sequence
  Synthetic
aaagcauuuaaugccucaguuuu

SEQ ID NO: 424267 - RNA, 24 nt, Artificial Sequence
  Synthetic
aaaagcauuuaaugccucaguuuu

SEQ ID NO: 424268 - RNA, 18 nt, Artificial Sequence
  Synthetic
cuacuaaaucagaguuuu

SEQ ID NO: 424269 - RNA, 19 nt, Artificial Sequence
  Synthetic
ccuacuaaaucagaguuuu

SEQ ID NO: 424270 - RNA, 20 nt, Artificial Sequence
  Synthetic
gccuacuaaaucagaguuuu

SEQ ID NO: 424271 - RNA, 21 nt, Artificial Sequence
  Synthetic
agccuacuaaaucagaguuuu

SEQ ID NO: 424272 - RNA, 22 nt, Artificial Sequence
  Synthetic
aagccuacuaaaucagaguuuu

SEQ ID NO: 424273 - RNA, 23 nt, Artificial Sequence
  Synthetic
caagccuacuaaaucagaguuuu

SEQ ID NO: 424274 - RNA, 24 nt, Artificial Sequence
  Synthetic
ccaagccuacuaaaucagaguuuu

SEQ ID NO: 424275 - RNA, 18 nt, Artificial Sequence
  Synthetic
gucauagaaaugaguuuu

SEQ ID NO: 424276 - RNA, 19 nt, Artificial Sequence
  Synthetic
ugucauagaaaugaguuuu

SEQ ID NO: 424277 - RNA, 20 nt, Artificial Sequence
  Synthetic
uugucauagaaaugaguuuu

SEQ ID NO: 424278 - RNA, 21 nt, Artificial Sequence
  Synthetic
uuugucauagaaaugaguuuu

SEQ ID NO: 424279 - RNA, 22 nt, Artificial Sequence
  Synthetic
auuugucauagaaaugaguuuu

SEQ ID NO: 424280 - RNA, 23 nt, Artificial Sequence
  Synthetic
aauuugucauagaaaugaguuuu

SEQ ID NO: 424281 - RNA, 24 nt, Artificial Sequence
  Synthetic
uaauuugucauagaaaugaguuuu

SEQ ID NO: 424282 - RNA, 18 nt, Artificial Sequence
  Synthetic
aagaugggaaugaguuuu

SEQ ID NO: 424283 - RNA, 19 nt, Artificial Sequence
  Synthetic
aaagaugggaaugaguuuu

SEQ ID NO: 424284 - RNA, 20 nt, Artificial Sequence
  Synthetic
aaaagaugggaaugaguuuu

SEQ ID NO: 424285 - RNA, 21 nt, Artificial Sequence
  Synthetic
caaaagaugggaaugaguuuu

SEQ ID NO: 424286 - RNA, 22 nt, Artificial Sequence
  Synthetic
acaaaagaugggaaugaguuuu

SEQ ID NO: 424287 - RNA, 23 nt, Artificial Sequence
  Synthetic
gacaaaagaugggaaugaguuuu

SEQ ID NO: 424288 - RNA, 24 nt, Artificial Sequence
  Synthetic
ugacaaaagaugggaaugaguuuu

SEQ ID NO: 424289 - RNA, 18 nt, Artificial Sequence
  Synthetic
uagguauuaaugaguuuu

SEQ ID NO: 424290 - RNA, 19 nt, Artificial Sequence
  Synthetic
auagguauuaaugaguuuu

SEQ ID NO: 424291 - RNA, 20 nt, Artificial Sequence
  Synthetic
uauagguauuaaugaguuuu

SEQ ID NO: 424292 - RNA, 21 nt, Artificial Sequence
  Synthetic
auauagguauuaaugaguuuu

SEQ ID NO: 424293 - RNA, 22 nt, Artificial Sequence
  Synthetic
cauauagguauuaaugaguuuu

SEQ ID NO: 424294 - RNA, 23 nt, Artificial Sequence
  Synthetic
acauauagguauuaaugaguuuu

SEQ ID NO: 424295 - RNA, 24 nt, Artificial Sequence
  Synthetic
gacauauagguauuaaugaguuuu

SEQ ID NO: 424296 - RNA, 18 nt, Artificial Sequence
  Synthetic
ggauuauucaugaguuuu

SEQ ID NO: 424297 - RNA, 19 nt, Artificial Sequence
  Synthetic
uggauuauucaugaguuuu

SEQ ID NO: 424298 - RNA, 20 nt, Artificial Sequence
  Synthetic
guggauuauucaugaguuuu

SEQ ID NO: 424299 - RNA, 21 nt, Artificial Sequence
  Synthetic
gguggauuauucaugaguuuu

SEQ ID NO: 424300 - RNA, 22 nt, Artificial Sequence
  Synthetic
ggguggauuauucaugaguuuu

SEQ ID NO: 424301 - RNA, 23 nt, Artificial Sequence
  Synthetic
gggguggauuauucaugaguuuu

SEQ ID NO: 424302 - RNA, 24 nt, Artificial Sequence
  Synthetic
agggguggauuauucaugaguuuu

SEQ ID NO: 424303 - RNA, 18 nt, Artificial Sequence
  Synthetic
aguuuugcccugaguuuu

SEQ ID NO: 424304 - RNA, 19 nt, Artificial Sequence
  Synthetic
gaguuuugcccugaguuuu

SEQ ID NO: 424305 - RNA, 20 nt, Artificial Sequence
  Synthetic
ugaguuuugcccugaguuuu

SEQ ID NO: 424306 - RNA, 21 nt, Artificial Sequence
  Synthetic
augaguuuugcccugaguuuu

SEQ ID NO: 424307 - RNA, 22 nt, Artificial Sequence
  Synthetic
uaugaguuuugcccugaguuuu

SEQ ID NO: 424308 - RNA, 23 nt, Artificial Sequence
  Synthetic
cuaugaguuuugcccugaguuuu

SEQ ID NO: 424309 - RNA, 24 nt, Artificial Sequence
  Synthetic
ccuaugaguuuugcccugaguuuu

SEQ ID NO: 424310 - RNA, 18 nt, Artificial Sequence
  Synthetic
ugauauugacauaguuuu

SEQ ID NO: 424311 - RNA, 19 nt, Artificial Sequence
  Synthetic
cugauauugacauaguuuu

SEQ ID NO: 424312 - RNA, 20 nt, Artificial Sequence
  Synthetic
gcugauauugacauaguuuu

SEQ ID NO: 424313 - RNA, 21 nt, Artificial Sequence
  Synthetic
ggcugauauugacauaguuuu

SEQ ID NO: 424314 - RNA, 22 nt, Artificial Sequence
  Synthetic
cggcugauauugacauaguuuu

SEQ ID NO: 424315 - RNA, 23 nt, Artificial Sequence
  Synthetic
ccggcugauauugacauaguuuu

SEQ ID NO: 424316 - RNA, 24 nt, Artificial Sequence
  Synthetic
uccggcugauauugacauaguuuu

SEQ ID NO: 424317 - RNA, 18 nt, Artificial Sequence
  Synthetic
guaggcacagauaguuuu

SEQ ID NO: 424318 - RNA, 19 nt, Artificial Sequence
  Synthetic
aguaggcacagauaguuuu

SEQ ID NO: 424319 - RNA, 20 nt, Artificial Sequence
  Synthetic
gaguaggcacagauaguuuu

SEQ ID NO: 424320 - RNA, 21 nt, Artificial Sequence
  Synthetic
ggaguaggcacagauaguuuu

SEQ ID NO: 424321 - RNA, 22 nt, Artificial Sequence
  Synthetic
aggaguaggcacagauaguuuu

SEQ ID NO: 424322 - RNA, 23 nt, Artificial Sequence
  Synthetic
aaggaguaggcacagauaguuuu

SEQ ID NO: 424323 - RNA, 24 nt, Artificial Sequence
  Synthetic
caaggaguaggcacagauaguuuu

SEQ ID NO: 424324 - RNA, 18 nt, Artificial Sequence
  Synthetic
guuacaaucacuaguuuu

SEQ ID NO: 424325 - RNA, 19 nt, Artificial Sequence
  Synthetic
uguuacaaucacuaguuuu

SEQ ID NO: 424326 - RNA, 20 nt, Artificial Sequence
  Synthetic
auguuacaaucacuaguuuu

SEQ ID NO: 424327 - RNA, 21 nt, Artificial Sequence
  Synthetic
cauguuacaaucacuaguuuu

SEQ ID NO: 424328 - RNA, 22 nt, Artificial Sequence
  Synthetic
ucauguuacaaucacuaguuuu

SEQ ID NO: 424329 - RNA, 23 nt, Artificial Sequence
  Synthetic
uucauguuacaaucacuaguuuu

SEQ ID NO: 424330 - RNA, 24 nt, Artificial Sequence
  Synthetic
uuucauguuacaaucacuaguuuu

SEQ ID NO: 424331 - RNA, 18 nt, Artificial Sequence
  Synthetic
uuucaugguuuuaguuuu

SEQ ID NO: 424332 - RNA, 19 nt, Artificial Sequence
  Synthetic
cuuucaugguuuuaguuuu

SEQ ID NO: 424333 - RNA, 20 nt, Artificial Sequence
  Synthetic
acuuucaugguuuuaguuuu

SEQ ID NO: 424334 - RNA, 21 nt, Artificial Sequence
  Synthetic
aacuuucaugguuuuaguuuu

SEQ ID NO: 424335 - RNA, 22 nt, Artificial Sequence
  Synthetic
uaacuuucaugguuuuaguuuu

SEQ ID NO: 424336 - RNA, 23 nt, Artificial Sequence
  Synthetic
uuaacuuucaugguuuuaguuuu

SEQ ID NO: 424337 - RNA, 24 nt, Artificial Sequence
  Synthetic
auuaacuuucaugguuuuaguuuu

SEQ ID NO: 424338 - RNA, 18 nt, Artificial Sequence
  Synthetic
agcucuauuuuuaguuuu

SEQ ID NO: 424339 - RNA, 19 nt, Artificial Sequence
  Synthetic
uagcucuauuuuuaguuuu

SEQ ID NO: 424340 - RNA, 20 nt, Artificial Sequence
  Synthetic
guagcucuauuuuuaguuuu

SEQ ID NO: 424341 - RNA, 21 nt, Artificial Sequence
  Synthetic
gguagcucuauuuuuaguuuu

SEQ ID NO: 424342 - RNA, 22 nt, Artificial Sequence
  Synthetic
ugguagcucuauuuuuaguuuu

SEQ ID NO: 424343 - RNA, 23 nt, Artificial Sequence
  Synthetic
augguagcucuauuuuuaguuuu

SEQ ID NO: 424344 - RNA, 24 nt, Artificial Sequence
  Synthetic
uaugguagcucuauuuuuaguuuu

SEQ ID NO: 424345 - RNA, 18 nt, Artificial Sequence
  Synthetic
aaaugccauucccguuuu

SEQ ID NO: 424346 - RNA, 19 nt, Artificial Sequence
  Synthetic
aaaaugccauucccguuuu

SEQ ID NO: 424347 - RNA, 20 nt, Artificial Sequence
  Synthetic
gaaaaugccauucccguuuu

SEQ ID NO: 424348 - RNA, 21 nt, Artificial Sequence
  Synthetic
agaaaaugccauucccguuuu

SEQ ID NO: 424349 - RNA, 22 nt, Artificial Sequence
  Synthetic
gagaaaaugccauucccguuuu

SEQ ID NO: 424350 - RNA, 23 nt, Artificial Sequence
  Synthetic
cgagaaaaugccauucccguuuu

SEQ ID NO: 424351 - RNA, 24 nt, Artificial Sequence
  Synthetic
ccgagaaaaugccauucccguuuu

SEQ ID NO: 424352 - RNA, 18 nt, Artificial Sequence
  Synthetic
caagaacauaagcguuuu

SEQ ID NO: 424353 - RNA, 19 nt, Artificial Sequence
  Synthetic
acaagaacauaagcguuuu

SEQ ID NO: 424354 - RNA, 20 nt, Artificial Sequence
  Synthetic
uacaagaacauaagcguuuu

SEQ ID NO: 424355 - RNA, 21 nt, Artificial Sequence
  Synthetic
guacaagaacauaagcguuuu

SEQ ID NO: 424356 - RNA, 22 nt, Artificial Sequence
  Synthetic
uguacaagaacauaagcguuuu

SEQ ID NO: 424357 - RNA, 23 nt, Artificial Sequence
  Synthetic
guguacaagaacauaagcguuuu

SEQ ID NO: 424358 - RNA, 24 nt, Artificial Sequence
  Synthetic
aguguacaagaacauaagcguuuu

SEQ ID NO: 424359 - RNA, 18 nt, Artificial Sequence
  Synthetic
cuaggaggaccgcguuuu

SEQ ID NO: 424360 - RNA, 19 nt, Artificial Sequence
  Synthetic
ccuaggaggaccgcguuuu

SEQ ID NO: 424361 - RNA, 20 nt, Artificial Sequence
  Synthetic
uccuaggaggaccgcguuuu

SEQ ID NO: 424362 - RNA, 21 nt, Artificial Sequence
  Synthetic
guccuaggaggaccgcguuuu

SEQ ID NO: 424363 - RNA, 22 nt, Artificial Sequence
  Synthetic
gguccuaggaggaccgcguuuu

SEQ ID NO: 424364 - RNA, 23 nt, Artificial Sequence
  Synthetic
ggguccuaggaggaccgcguuuu

SEQ ID NO: 424365 - RNA, 24 nt, Artificial Sequence
  Synthetic
uggguccuaggaggaccgcguuuu

SEQ ID NO: 424366 - RNA, 18 nt, Artificial Sequence
  Synthetic
gauuuguaacaucguuuu

SEQ ID NO: 424367 - RNA, 19 nt, Artificial Sequence
  Synthetic
ugauuuguaacaucguuuu

SEQ ID NO: 424368 - RNA, 20 nt, Artificial Sequence
  Synthetic
uugauuuguaacaucguuuu

SEQ ID NO: 424369 - RNA, 21 nt, Artificial Sequence
  Synthetic
auugauuuguaacaucguuuu

SEQ ID NO: 424370 - RNA, 22 nt, Artificial Sequence
  Synthetic
uauugauuuguaacaucguuuu

SEQ ID NO: 424371 - RNA, 23 nt, Artificial Sequence
  Synthetic
auauugauuuguaacaucguuuu

SEQ ID NO: 424372 - RNA, 24 nt, Artificial Sequence
  Synthetic
aauauugauuuguaacaucguuuu

SEQ ID NO: 424373 - RNA, 18 nt, Artificial Sequence
  Synthetic
acccuuggaaaagguuuu

SEQ ID NO: 424374 - RNA, 19 nt, Artificial Sequence
  Synthetic
gacccuuggaaaagguuuu

SEQ ID NO: 424375 - RNA, 20 nt, Artificial Sequence
  Synthetic
agacccuuggaaaagguuuu

SEQ ID NO: 424376 - RNA, 21 nt, Artificial Sequence
  Synthetic
aagacccuuggaaaagguuuu

SEQ ID NO: 424377 - RNA, 22 nt, Artificial Sequence
  Synthetic
gaagacccuuggaaaagguuuu

SEQ ID NO: 424378 - RNA, 23 nt, Artificial Sequence
  Synthetic
agaagacccuuggaaaagguuuu

SEQ ID NO: 424379 - RNA, 24 nt, Artificial Sequence
  Synthetic
cagaagacccuuggaaaagguuuu

SEQ ID NO: 424380 - RNA, 18 nt, Artificial Sequence
  Synthetic
ugguuaaggaaagguuuu

SEQ ID NO: 424381 - RNA, 19 nt, Artificial Sequence
  Synthetic
uugguuaaggaaagguuuu

SEQ ID NO: 424382 - RNA, 20 nt, Artificial Sequence
  Synthetic
auugguuaaggaaagguuuu

SEQ ID NO: 424383 - RNA, 21 nt, Artificial Sequence
  Synthetic
gauugguuaaggaaagguuuu

SEQ ID NO: 424384 - RNA, 22 nt, Artificial Sequence
  Synthetic
ugauugguuaaggaaagguuuu

SEQ ID NO: 424385 - RNA, 23 nt, Artificial Sequence
  Synthetic
cugauugguuaaggaaagguuuu

SEQ ID NO: 424386 - RNA, 24 nt, Artificial Sequence
  Synthetic
ucugauugguuaaggaaagguuuu

SEQ ID NO: 424387 - RNA, 18 nt, Artificial Sequence
  Synthetic
ggaguauuuugagguuuu

SEQ ID NO: 424388 - RNA, 19 nt, Artificial Sequence
  Synthetic
gggaguauuuugagguuuu

SEQ ID NO: 424389 - RNA, 20 nt, Artificial Sequence
  Synthetic
ugggaguauuuugagguuuu

SEQ ID NO: 424390 - RNA, 21 nt, Artificial Sequence
  Synthetic
gugggaguauuuugagguuuu

SEQ ID NO: 424391 - RNA, 22 nt, Artificial Sequence
  Synthetic
cgugggaguauuuugagguuuu

SEQ ID NO: 424392 - RNA, 23 nt, Artificial Sequence
  Synthetic
gcgugggaguauuuugagguuuu

SEQ ID NO: 424393 - RNA, 24 nt, Artificial Sequence
  Synthetic
ugcgugggaguauuuugagguuuu

SEQ ID NO: 424394 - RNA, 18 nt, Artificial Sequence
  Synthetic
aaaugcacacuagguuuu

SEQ ID NO: 424395 - RNA, 19 nt, Artificial Sequence
  Synthetic
aaaaugcacacuagguuuu

SEQ ID NO: 424396 - RNA, 20 nt, Artificial Sequence
  Synthetic
aaaaaugcacacuagguuuu

SEQ ID NO: 424397 - RNA, 21 nt, Artificial Sequence
  Synthetic
caaaaaugcacacuagguuuu

SEQ ID NO: 424398 - RNA, 22 nt, Artificial Sequence
  Synthetic
acaaaaaugcacacuagguuuu

SEQ ID NO: 424399 - RNA, 23 nt, Artificial Sequence
  Synthetic
aacaaaaaugcacacuagguuuu

SEQ ID NO: 424400 - RNA, 24 nt, Artificial Sequence
  Synthetic
aaacaaaaaugcacacuagguuuu

SEQ ID NO: 424401 - RNA, 18 nt, Artificial Sequence
  Synthetic
ccagaaacacaggguuuu

SEQ ID NO: 424402 - RNA, 19 nt, Artificial Sequence
  Synthetic
uccagaaacacaggguuuu

SEQ ID NO: 424403 - RNA, 20 nt, Artificial Sequence
  Synthetic
auccagaaacacaggguuuu

SEQ ID NO: 424404 - RNA, 21 nt, Artificial Sequence
  Synthetic
aauccagaaacacaggguuuu

SEQ ID NO: 424405 - RNA, 22 nt, Artificial Sequence
  Synthetic
aaauccagaaacacaggguuuu

SEQ ID NO: 424406 - RNA, 23 nt, Artificial Sequence
  Synthetic
aaaauccagaaacacaggguuuu

SEQ ID NO: 424407 - RNA, 24 nt, Artificial Sequence
  Synthetic
gaaaauccagaaacacaggguuuu

SEQ ID NO: 424408 - RNA, 18 nt, Artificial Sequence
  Synthetic
gaaaguacuaaugguuuu

SEQ ID NO: 424409 - RNA, 19 nt, Artificial Sequence
  Synthetic
ggaaaguacuaaugguuuu

SEQ ID NO: 424410 - RNA, 20 nt, Artificial Sequence
  Synthetic
aggaaaguacuaaugguuuu

SEQ ID NO: 424411 - RNA, 21 nt, Artificial Sequence
  Synthetic
caggaaaguacuaaugguuuu

SEQ ID NO: 424412 - RNA, 22 nt, Artificial Sequence
  Synthetic
ucaggaaaguacuaaugguuuu

SEQ ID NO: 424413 - RNA, 23 nt, Artificial Sequence
  Synthetic
uucaggaaaguacuaaugguuuu

SEQ ID NO: 424414 - RNA, 24 nt, Artificial Sequence
  Synthetic
uuucaggaaaguacuaaugguuuu

SEQ ID NO: 424415 - RNA, 18 nt, Artificial Sequence
  Synthetic
caaagaugagaugguuuu

SEQ ID NO: 424416 - RNA, 19 nt, Artificial Sequence
  Synthetic
ccaaagaugagaugguuuu

SEQ ID NO: 424417 - RNA, 20 nt, Artificial Sequence
  Synthetic
gccaaagaugagaugguuuu

SEQ ID NO: 424418 - RNA, 21 nt, Artificial Sequence
  Synthetic
ggccaaagaugagaugguuuu

SEQ ID NO: 424419 - RNA, 22 nt, Artificial Sequence
  Synthetic
aggccaaagaugagaugguuuu

SEQ ID NO: 424420 - RNA, 23 nt, Artificial Sequence
  Synthetic
aaggccaaagaugagaugguuuu

SEQ ID NO: 424421 - RNA, 24 nt, Artificial Sequence
  Synthetic
caaggccaaagaugagaugguuuu

SEQ ID NO: 424422 - RNA, 18 nt, Artificial Sequence
  Synthetic
aagccaggggcugguuuu

SEQ ID NO: 424423 - RNA, 19 nt, Artificial Sequence
  Synthetic
gaagccaggggcugguuuu

SEQ ID NO: 424424 - RNA, 20 nt, Artificial Sequence
  Synthetic
ugaagccaggggcugguuuu

SEQ ID NO: 424425 - RNA, 21 nt, Artificial Sequence
  Synthetic
augaagccaggggcugguuuu

SEQ ID NO: 424426 - RNA, 22 nt, Artificial Sequence
  Synthetic
aaugaagccaggggcugguuuu

SEQ ID NO: 424427 - RNA, 23 nt, Artificial Sequence
  Synthetic
caaugaagccaggggcugguuuu

SEQ ID NO: 424428 - RNA, 24 nt, Artificial Sequence
  Synthetic
ucaaugaagccaggggcugguuuu

SEQ ID NO: 424429 - RNA, 18 nt, Artificial Sequence
  Synthetic
agagguagaucugguuuu

SEQ ID NO: 424430 - RNA, 19 nt, Artificial Sequence
  Synthetic
cagagguagaucugguuuu

SEQ ID NO: 424431 - RNA, 20 nt, Artificial Sequence
  Synthetic
gcagagguagaucugguuuu

SEQ ID NO: 424432 - RNA, 21 nt, Artificial Sequence
  Synthetic
agcagagguagaucugguuuu

SEQ ID NO: 424433 - RNA, 22 nt, Artificial Sequence
  Synthetic
aagcagagguagaucugguuuu

SEQ ID NO: 424434 - RNA, 23 nt, Artificial Sequence
  Synthetic
uaagcagagguagaucugguuuu

SEQ ID NO: 424435 - RNA, 24 nt, Artificial Sequence
  Synthetic
auaagcagagguagaucugguuuu

SEQ ID NO: 424436 - RNA, 18 nt, Artificial Sequence
  Synthetic
agccacagaugugguuuu

SEQ ID NO: 424437 - RNA, 19 nt, Artificial Sequence
  Synthetic
aagccacagaugugguuuu

SEQ ID NO: 424438 - RNA, 20 nt, Artificial Sequence
  Synthetic
caagccacagaugugguuuu

SEQ ID NO: 424439 - RNA, 21 nt, Artificial Sequence
  Synthetic
acaagccacagaugugguuuu

SEQ ID NO: 424440 - RNA, 22 nt, Artificial Sequence
  Synthetic
uacaagccacagaugugguuuu

SEQ ID NO: 424441 - RNA, 23 nt, Artificial Sequence
  Synthetic
uuacaagccacagaugugguuuu

SEQ ID NO: 424442 - RNA, 24 nt, Artificial Sequence
  Synthetic
auuacaagccacagaugugguuuu

SEQ ID NO: 424443 - RNA, 18 nt, Artificial Sequence
  Synthetic
aaaaccuguauugguuuu

SEQ ID NO: 424444 - RNA, 19 nt, Artificial Sequence
  Synthetic
caaaaccuguauugguuuu

SEQ ID NO: 424445 - RNA, 20 nt, Artificial Sequence
  Synthetic
ucaaaaccuguauugguuuu

SEQ ID NO: 424446 - RNA, 21 nt, Artificial Sequence
  Synthetic
cucaaaaccuguauugguuuu

SEQ ID NO: 424447 - RNA, 22 nt, Artificial Sequence
  Synthetic
ucucaaaaccuguauugguuuu

SEQ ID NO: 424448 - RNA, 23 nt, Artificial Sequence
  Synthetic
cucucaaaaccuguauugguuuu

SEQ ID NO: 424449 - RNA, 24 nt, Artificial Sequence
  Synthetic
acucucaaaaccuguauugguuuu

SEQ ID NO: 424450 - RNA, 18 nt, Artificial Sequence
  Synthetic
uaguaaagauuugguuuu

SEQ ID NO: 424451 - RNA, 19 nt, Artificial Sequence
  Synthetic
uuaguaaagauuugguuuu

SEQ ID NO: 424452 - RNA, 20 nt, Artificial Sequence
  Synthetic
cuuaguaaagauuugguuuu

SEQ ID NO: 424453 - RNA, 21 nt, Artificial Sequence
  Synthetic
ucuuaguaaagauuugguuuu

SEQ ID NO: 424454 - RNA, 22 nt, Artificial Sequence
  Synthetic
uucuuaguaaagauuugguuuu

SEQ ID NO: 424455 - RNA, 23 nt, Artificial Sequence
  Synthetic
uuucuuaguaaagauuugguuuu

SEQ ID NO: 424456 - RNA, 24 nt, Artificial Sequence
  Synthetic
uuuucuuaguaaagauuugguuuu

SEQ ID NO: 424457 - RNA, 18 nt, Artificial Sequence
  Synthetic
uuuuagaaguuugguuuu

SEQ ID NO: 424458 - RNA, 19 nt, Artificial Sequence
  Synthetic
uuuuuagaaguuugguuuu

SEQ ID NO: 424459 - RNA, 20 nt, Artificial Sequence
  Synthetic
auuuuuagaaguuugguuuu

SEQ ID NO: 424460 - RNA, 21 nt, Artificial Sequence
  Synthetic
uauuuuuagaaguuugguuuu

SEQ ID NO: 424461 - RNA, 22 nt, Artificial Sequence
  Synthetic
uuauuuuuagaaguuugguuuu

SEQ ID NO: 424462 - RNA, 23 nt, Artificial Sequence
  Synthetic
cuuauuuuuagaaguuugguuuu

SEQ ID NO: 424463 - RNA, 24 nt, Artificial Sequence
  Synthetic
acuuauuuuuagaaguuugguuuu

SEQ ID NO: 424464 - RNA, 18 nt, Artificial Sequence
  Synthetic
aaaaaucuguuugguuuu

SEQ ID NO: 424465 - RNA, 19 nt, Artificial Sequence
  Synthetic
caaaaaucuguuugguuuu

SEQ ID NO: 424466 - RNA, 20 nt, Artificial Sequence
  Synthetic
ccaaaaaucuguuugguuuu

SEQ ID NO: 424467 - RNA, 21 nt, Artificial Sequence
  Synthetic
accaaaaaucuguuugguuuu

SEQ ID NO: 424468 - RNA, 22 nt, Artificial Sequence
  Synthetic
uaccaaaaaucuguuugguuuu

SEQ ID NO: 424469 - RNA, 23 nt, Artificial Sequence
  Synthetic
auaccaaaaaucuguuugguuuu

SEQ ID NO: 424470 - RNA, 24 nt, Artificial Sequence
  Synthetic
gauaccaaaaaucuguuugguuuu

SEQ ID NO: 424471 - RNA, 18 nt, Artificial Sequence
  Synthetic
uaagaauguaaauguuuu

SEQ ID NO: 424472 - RNA, 19 nt, Artificial Sequence
  Synthetic
guaagaauguaaauguuuu

SEQ ID NO: 424473 - RNA, 20 nt, Artificial Sequence
  Synthetic
uguaagaauguaaauguuuu

SEQ ID NO: 424474 - RNA, 21 nt, Artificial Sequence
  Synthetic
auguaagaauguaaauguuuu

SEQ ID NO: 424475 - RNA, 22 nt, Artificial Sequence
  Synthetic
uauguaagaauguaaauguuuu

SEQ ID NO: 424476 - RNA, 23 nt, Artificial Sequence
  Synthetic
uuauguaagaauguaaauguuuu

SEQ ID NO: 424477 - RNA, 24 nt, Artificial Sequence
  Synthetic
cuuauguaagaauguaaauguuuu

SEQ ID NO: 424478 - RNA, 18 nt, Artificial Sequence
  Synthetic
gauguuggaucauguuuu

SEQ ID NO: 424479 - RNA, 19 nt, Artificial Sequence
  Synthetic
agauguuggaucauguuuu

SEQ ID NO: 424480 - RNA, 20 nt, Artificial Sequence
  Synthetic
uagauguuggaucauguuuu

SEQ ID NO: 424481 - RNA, 21 nt, Artificial Sequence
  Synthetic
uuagauguuggaucauguuuu

SEQ ID NO: 424482 - RNA, 22 nt, Artificial Sequence
  Synthetic
uuuagauguuggaucauguuuu

SEQ ID NO: 424483 - RNA, 23 nt, Artificial Sequence
  Synthetic
auuuagauguuggaucauguuuu

SEQ ID NO: 424484 - RNA, 24 nt, Artificial Sequence
  Synthetic
uauuuagauguuggaucauguuuu

SEQ ID NO: 424485 - RNA, 18 nt, Artificial Sequence
  Synthetic
auaggaauaagauguuuu

SEQ ID NO: 424486 - RNA, 19 nt, Artificial Sequence
  Synthetic
aauaggaauaagauguuuu

SEQ ID NO: 424487 - RNA, 20 nt, Artificial Sequence
  Synthetic
aaauaggaauaagauguuuu

SEQ ID NO: 424488 - RNA, 21 nt, Artificial Sequence
  Synthetic
aaaauaggaauaagauguuuu

SEQ ID NO: 424489 - RNA, 22 nt, Artificial Sequence
  Synthetic
aaaaauaggaauaagauguuuu

SEQ ID NO: 424490 - RNA, 23 nt, Artificial Sequence
  Synthetic
uaaaaauaggaauaagauguuuu

SEQ ID NO: 424491 - RNA, 24 nt, Artificial Sequence
  Synthetic
uuaaaaauaggaauaagauguuuu

SEQ ID NO: 424492 - RNA, 18 nt, Artificial Sequence
  Synthetic
uggcaagaaugauguuuu

SEQ ID NO: 424493 - RNA, 19 nt, Artificial Sequence
  Synthetic
auggcaagaaugauguuuu

SEQ ID NO: 424494 - RNA, 20 nt, Artificial Sequence
  Synthetic
aauggcaagaaugauguuuu

SEQ ID NO: 424495 - RNA, 21 nt, Artificial Sequence
  Synthetic
caauggcaagaaugauguuuu

SEQ ID NO: 424496 - RNA, 22 nt, Artificial Sequence
  Synthetic
acaauggcaagaaugauguuuu

SEQ ID NO: 424497 - RNA, 23 nt, Artificial Sequence
  Synthetic
aacaauggcaagaaugauguuuu

SEQ ID NO: 424498 - RNA, 24 nt, Artificial Sequence
  Synthetic
caacaauggcaagaaugauguuuu

SEQ ID NO: 424499 - RNA, 18 nt, Artificial Sequence
  Synthetic
uuauuaccaugauguuuu

SEQ ID NO: 424500 - RNA, 19 nt, Artificial Sequence
  Synthetic
cuuauuaccaugauguuuu

SEQ ID NO: 424501 - RNA, 20 nt, Artificial Sequence
  Synthetic
ucuuauuaccaugauguuuu

SEQ ID NO: 424502 - RNA, 21 nt, Artificial Sequence
  Synthetic
uucuuauuaccaugauguuuu

SEQ ID NO: 424503 - RNA, 22 nt, Artificial Sequence
  Synthetic
uuucuuauuaccaugauguuuu

SEQ ID NO: 424504 - RNA, 23 nt, Artificial Sequence
  Synthetic
uuuucuuauuaccaugauguuuu

SEQ ID NO: 424505 - RNA, 24 nt, Artificial Sequence
  Synthetic
uuuuucuuauuaccaugauguuuu

SEQ ID NO: 424506 - RNA, 18 nt, Artificial Sequence
  Synthetic
aacacugucauauguuuu

SEQ ID NO: 424507 - RNA, 19 nt, Artificial Sequence
  Synthetic
caacacugucauauguuuu

SEQ ID NO: 424508 - RNA, 20 nt, Artificial Sequence
  Synthetic
ucaacacugucauauguuuu

SEQ ID NO: 424509 - RNA, 21 nt, Artificial Sequence
  Synthetic
aucaacacugucauauguuuu

SEQ ID NO: 424510 - RNA, 22 nt, Artificial Sequence
  Synthetic
aaucaacacugucauauguuuu

SEQ ID NO: 424511 - RNA, 23 nt, Artificial Sequence
  Synthetic
aaaucaacacugucauauguuuu

SEQ ID NO: 424512 - RNA, 24 nt, Artificial Sequence
  Synthetic
aaaaucaacacugucauauguuuu

SEQ ID NO: 424513 - RNA, 18 nt, Artificial Sequence
  Synthetic
uacuggaaaguauguuuu

SEQ ID NO: 424514 - RNA, 19 nt, Artificial Sequence
  Synthetic
auacuggaaaguauguuuu

SEQ ID NO: 424515 - RNA, 20 nt, Artificial Sequence
  Synthetic
gauacuggaaaguauguuuu

SEQ ID NO: 424516 - RNA, 21 nt, Artificial Sequence
  Synthetic
agauacuggaaaguauguuuu

SEQ ID NO: 424517 - RNA, 22 nt, Artificial Sequence
  Synthetic
aagauacuggaaaguauguuuu

SEQ ID NO: 424518 - RNA, 23 nt, Artificial Sequence
  Synthetic
aaagauacuggaaaguauguuuu

SEQ ID NO: 424519 - RNA, 24 nt, Artificial Sequence
  Synthetic
gaaagauacuggaaaguauguuuu

SEQ ID NO: 424520 - RNA, 18 nt, Artificial Sequence
  Synthetic
agggagugcuuauguuuu

SEQ ID NO: 424521 - RNA, 19 nt, Artificial Sequence
  Synthetic
uagggagugcuuauguuuu

SEQ ID NO: 424522 - RNA, 20 nt, Artificial Sequence
  Synthetic
uuagggagugcuuauguuuu

SEQ ID NO: 424523 - RNA, 21 nt, Artificial Sequence
  Synthetic
cuuagggagugcuuauguuuu

SEQ ID NO: 424524 - RNA, 22 nt, Artificial Sequence
  Synthetic
gcuuagggagugcuuauguuuu

SEQ ID NO: 424525 - RNA, 23 nt, Artificial Sequence
  Synthetic
agcuuagggagugcuuauguuuu

SEQ ID NO: 424526 - RNA, 24 nt, Artificial Sequence
  Synthetic
cagcuuagggagugcuuauguuuu

SEQ ID NO: 424527 - RNA, 18 nt, Artificial Sequence
  Synthetic
auucuauuuuuauguuuu

SEQ ID NO: 424528 - RNA, 19 nt, Artificial Sequence
  Synthetic
aauucuauuuuuauguuuu

SEQ ID NO: 424529 - RNA, 20 nt, Artificial Sequence
  Synthetic
uaauucuauuuuuauguuuu

SEQ ID NO: 424530 - RNA, 21 nt, Artificial Sequence
  Synthetic
auaauucuauuuuuauguuuu

SEQ ID NO: 424531 - RNA, 22 nt, Artificial Sequence
  Synthetic
gauaauucuauuuuuauguuuu

SEQ ID NO: 424532 - RNA, 23 nt, Artificial Sequence
  Synthetic
ugauaauucuauuuuuauguuuu

SEQ ID NO: 424533 - RNA, 24 nt, Artificial Sequence
  Synthetic
augauaauucuauuuuuauguuuu

SEQ ID NO: 424534 - RNA, 18 nt, Artificial Sequence
  Synthetic
gucagggaccacuguuuu

SEQ ID NO: 424535 - RNA, 19 nt, Artificial Sequence
  Synthetic
ggucagggaccacuguuuu

SEQ ID NO: 424536 - RNA, 20 nt, Artificial Sequence
  Synthetic
gggucagggaccacuguuuu

SEQ ID NO: 424537 - RNA, 21 nt, Artificial Sequence
  Synthetic
agggucagggaccacuguuuu

SEQ ID NO: 424538 - RNA, 22 nt, Artificial Sequence
  Synthetic
aagggucagggaccacuguuuu

SEQ ID NO: 424539 - RNA, 23 nt, Artificial Sequence
  Synthetic
aaagggucagggaccacuguuuu

SEQ ID NO: 424540 - RNA, 24 nt, Artificial Sequence
  Synthetic
aaaagggucagggaccacuguuuu

SEQ ID NO: 424541 - RNA, 18 nt, Artificial Sequence
  Synthetic
gcuguuucauacuguuuu

SEQ ID NO: 424542 - RNA, 19 nt, Artificial Sequence
  Synthetic
agcuguuucauacuguuuu

SEQ ID NO: 424543 - RNA, 20 nt, Artificial Sequence
  Synthetic
uagcuguuucauacuguuuu

SEQ ID NO: 424544 - RNA, 21 nt, Artificial Sequence
  Synthetic
auagcuguuucauacuguuuu

SEQ ID NO: 424545 - RNA, 22 nt, Artificial Sequence
  Synthetic
gauagcuguuucauacuguuuu

SEQ ID NO: 424546 - RNA, 23 nt, Artificial Sequence
  Synthetic
ugauagcuguuucauacuguuuu

SEQ ID NO: 424547 - RNA, 24 nt, Artificial Sequence
  Synthetic
augauagcuguuucauacuguuuu

SEQ ID NO: 424548 - RNA, 18 nt, Artificial Sequence
  Synthetic
gauccuguauacuguuuu

SEQ ID NO: 424549 - RNA, 19 nt, Artificial Sequence
  Synthetic
ugauccuguauacuguuuu

SEQ ID NO: 424550 - RNA, 20 nt, Artificial Sequence
  Synthetic
augauccuguauacuguuuu

SEQ ID NO: 424551 - RNA, 21 nt, Artificial Sequence
  Synthetic
caugauccuguauacuguuuu

SEQ ID NO: 424552 - RNA, 22 nt, Artificial Sequence
  Synthetic
ccaugauccuguauacuguuuu

SEQ ID NO: 424553 - RNA, 23 nt, Artificial Sequence
  Synthetic
uccaugauccuguauacuguuuu

SEQ ID NO: 424554 - RNA, 24 nt, Artificial Sequence
  Synthetic
guccaugauccuguauacuguuuu

SEQ ID NO: 424555 - RNA, 18 nt, Artificial Sequence
  Synthetic
accuuuuguuacuguuuu

SEQ ID NO: 424556 - RNA, 19 nt, Artificial Sequence
  Synthetic
caccuuuuguuacuguuuu

SEQ ID NO: 424557 - RNA, 20 nt, Artificial Sequence
  Synthetic
acaccuuuuguuacuguuuu

SEQ ID NO: 424558 - RNA, 21 nt, Artificial Sequence
  Synthetic
cacaccuuuuguuacuguuuu

SEQ ID NO: 424559 - RNA, 22 nt, Artificial Sequence
  Synthetic
acacaccuuuuguuacuguuuu

SEQ ID NO: 424560 - RNA, 23 nt, Artificial Sequence
  Synthetic
aacacaccuuuuguuacuguuuu

SEQ ID NO: 424561 - RNA, 24 nt, Artificial Sequence
  Synthetic
aaacacaccuuuuguuacuguuuu

SEQ ID NO: 424562 - RNA, 18 nt, Artificial Sequence
  Synthetic
aaauaaugacccuguuuu

SEQ ID NO: 424563 - RNA, 19 nt, Artificial Sequence
  Synthetic
aaaauaaugacccuguuuu

SEQ ID NO: 424564 - RNA, 20 nt, Artificial Sequence
  Synthetic
caaaauaaugacccuguuuu

SEQ ID NO: 424565 - RNA, 21 nt, Artificial Sequence
  Synthetic
acaaaauaaugacccuguuuu

SEQ ID NO: 424566 - RNA, 22 nt, Artificial Sequence
  Synthetic
cacaaaauaaugacccuguuuu

SEQ ID NO: 424567 - RNA, 23 nt, Artificial Sequence
  Synthetic
ucacaaaauaaugacccuguuuu

SEQ ID NO: 424568 - RNA, 24 nt, Artificial Sequence
  Synthetic
cucacaaaauaaugacccuguuuu

SEQ ID NO: 424569 - RNA, 18 nt, Artificial Sequence
  Synthetic
uugucaacccccuguuuu

SEQ ID NO: 424570 - RNA, 19 nt, Artificial Sequence
  Synthetic
cuugucaacccccuguuuu

SEQ ID NO: 424571 - RNA, 20 nt, Artificial Sequence
  Synthetic
ucuugucaacccccuguuuu

SEQ ID NO: 424572 - RNA, 21 nt, Artificial Sequence
  Synthetic
uucuugucaacccccuguuuu

SEQ ID NO: 424573 - RNA, 22 nt, Artificial Sequence
  Synthetic
auucuugucaacccccuguuuu

SEQ ID NO: 424574 - RNA, 23 nt, Artificial Sequence
  Synthetic
cauucuugucaacccccuguuuu

SEQ ID NO: 424575 - RNA, 24 nt, Artificial Sequence
  Synthetic
ccauucuugucaacccccuguuuu

SEQ ID NO: 424576 - RNA, 18 nt, Artificial Sequence
  Synthetic
ucauccaggcccuguuuu

SEQ ID NO: 424577 - RNA, 19 nt, Artificial Sequence
  Synthetic
cucauccaggcccuguuuu

SEQ ID NO: 424578 - RNA, 20 nt, Artificial Sequence
  Synthetic
ccucauccaggcccuguuuu

SEQ ID NO: 424579 - RNA, 21 nt, Artificial Sequence
  Synthetic
uccucauccaggcccuguuuu

SEQ ID NO: 424580 - RNA, 22 nt, Artificial Sequence
  Synthetic
guccucauccaggcccuguuuu

SEQ ID NO: 424581 - RNA, 23 nt, Artificial Sequence
  Synthetic
aguccucauccaggcccuguuuu

SEQ ID NO: 424582 - RNA, 24 nt, Artificial Sequence
  Synthetic
aaguccucauccaggcccuguuuu

SEQ ID NO: 424583 - RNA, 18 nt, Artificial Sequence
  Synthetic
augaagucauccuguuuu

SEQ ID NO: 424584 - RNA, 19 nt, Artificial Sequence
  Synthetic
caugaagucauccuguuuu

SEQ ID NO: 424585 - RNA, 20 nt, Artificial Sequence
  Synthetic
acaugaagucauccuguuuu

SEQ ID NO: 424586 - RNA, 21 nt, Artificial Sequence
  Synthetic
gacaugaagucauccuguuuu

SEQ ID NO: 424587 - RNA, 22 nt, Artificial Sequence
  Synthetic
ggacaugaagucauccuguuuu

SEQ ID NO: 424588 - RNA, 23 nt, Artificial Sequence
  Synthetic
aggacaugaagucauccuguuuu

SEQ ID NO: 424589 - RNA, 24 nt, Artificial Sequence
  Synthetic
aaggacaugaagucauccuguuuu

SEQ ID NO: 424590 - RNA, 18 nt, Artificial Sequence
  Synthetic
ucacuucuucgcuguuuu

SEQ ID NO: 424591 - RNA, 19 nt, Artificial Sequence
  Synthetic
uucacuucuucgcuguuuu

SEQ ID NO: 424592 - RNA, 20 nt, Artificial Sequence
  Synthetic
guucacuucuucgcuguuuu

SEQ ID NO: 424593 - RNA, 21 nt, Artificial Sequence
  Synthetic
uguucacuucuucgcuguuuu

SEQ ID NO: 424594 - RNA, 22 nt, Artificial Sequence
  Synthetic
uuguucacuucuucgcuguuuu

SEQ ID NO: 424595 - RNA, 23 nt, Artificial Sequence
  Synthetic
cuuguucacuucuucgcuguuuu

SEQ ID NO: 424596 - RNA, 24 nt, Artificial Sequence
  Synthetic
ucuuguucacuucuucgcuguuuu

SEQ ID NO: 424597 - RNA, 18 nt, Artificial Sequence
  Synthetic
acugccagaugcuguuuu

SEQ ID NO: 424598 - RNA, 19 nt, Artificial Sequence
  Synthetic
cacugccagaugcuguuuu

SEQ ID NO: 424599 - RNA, 20 nt, Artificial Sequence
  Synthetic
acacugccagaugcuguuuu

SEQ ID NO: 424600 - RNA, 21 nt, Artificial Sequence
  Synthetic
aacacugccagaugcuguuuu

SEQ ID NO: 424601 - RNA, 22 nt, Artificial Sequence
  Synthetic
gaacacugccagaugcuguuuu

SEQ ID NO: 424602 - RNA, 23 nt, Artificial Sequence
  Synthetic
ggaacacugccagaugcuguuuu

SEQ ID NO: 424603 - RNA, 24 nt, Artificial Sequence
  Synthetic
uggaacacugccagaugcuguuuu

SEQ ID NO: 424604 - RNA, 18 nt, Artificial Sequence
  Synthetic
ugaauaaacugcuguuuu

SEQ ID NO: 424605 - RNA, 19 nt, Artificial Sequence
  Synthetic
augaauaaacugcuguuuu

SEQ ID NO: 424606 - RNA, 20 nt, Artificial Sequence
  Synthetic
caugaauaaacugcuguuuu

SEQ ID NO: 424607 - RNA, 21 nt, Artificial Sequence
  Synthetic
acaugaauaaacugcuguuuu

SEQ ID NO: 424608 - RNA, 22 nt, Artificial Sequence
  Synthetic
gacaugaauaaacugcuguuuu

SEQ ID NO: 424609 - RNA, 23 nt, Artificial Sequence
  Synthetic
ugacaugaauaaacugcuguuuu

SEQ ID NO: 424610 - RNA, 24 nt, Artificial Sequence
  Synthetic
cugacaugaauaaacugcuguuuu

SEQ ID NO: 424611 - RNA, 18 nt, Artificial Sequence
  Synthetic
ggaaauggcaucuguuuu

SEQ ID NO: 424612 - RNA, 19 nt, Artificial Sequence
  Synthetic
uggaaauggcaucuguuuu

SEQ ID NO: 424613 - RNA, 20 nt, Artificial Sequence
  Synthetic
auggaaauggcaucuguuuu

SEQ ID NO: 424614 - RNA, 21 nt, Artificial Sequence
  Synthetic
aauggaaauggcaucuguuuu

SEQ ID NO: 424615 - RNA, 22 nt, Artificial Sequence
  Synthetic
uaauggaaauggcaucuguuuu

SEQ ID NO: 424616 - RNA, 23 nt, Artificial Sequence
  Synthetic
uuaauggaaauggcaucuguuuu

SEQ ID NO: 424617 - RNA, 24 nt, Artificial Sequence
  Synthetic
auuaauggaaauggcaucuguuuu

SEQ ID NO: 424618 - RNA, 18 nt, Artificial Sequence
  Synthetic
uauguuauauucuguuuu

SEQ ID NO: 424619 - RNA, 19 nt, Artificial Sequence
  Synthetic
uuauguuauauucuguuuu

SEQ ID NO: 424620 - RNA, 20 nt, Artificial Sequence
  Synthetic
uuuauguuauauucuguuuu

SEQ ID NO: 424621 - RNA, 21 nt, Artificial Sequence
  Synthetic
auuuauguuauauucuguuuu

SEQ ID NO: 424622 - RNA, 22 nt, Artificial Sequence
  Synthetic
uauuuauguuauauucuguuuu

SEQ ID NO: 424623 - RNA, 23 nt, Artificial Sequence
  Synthetic
uuauuuauguuauauucuguuuu

SEQ ID NO: 424624 - RNA, 24 nt, Artificial Sequence
  Synthetic
auuauuuauguuauauucuguuuu

SEQ ID NO: 424625 - RNA, 18 nt, Artificial Sequence
  Synthetic
aacuaggugauguguuuu

SEQ ID NO: 424626 - RNA, 19 nt, Artificial Sequence
  Synthetic
aaacuaggugauguguuuu

SEQ ID NO: 424627 - RNA, 20 nt, Artificial Sequence
  Synthetic
aaaacuaggugauguguuuu

SEQ ID NO: 424628 - RNA, 21 nt, Artificial Sequence
  Synthetic
gaaaacuaggugauguguuuu

SEQ ID NO: 424629 - RNA, 22 nt, Artificial Sequence
  Synthetic
ugaaaacuaggugauguguuuu

SEQ ID NO: 424630 - RNA, 23 nt, Artificial Sequence
  Synthetic
gugaaaacuaggugauguguuuu

SEQ ID NO: 424631 - RNA, 24 nt, Artificial Sequence
  Synthetic
cgugaaaacuaggugauguguuuu

SEQ ID NO: 424632 - RNA, 18 nt, Artificial Sequence
  Synthetic
ccugugucccuguguuuu

SEQ ID NO: 424633 - RNA, 19 nt, Artificial Sequence
  Synthetic
uccugugucccuguguuuu

SEQ ID NO: 424634 - RNA, 20 nt, Artificial Sequence
  Synthetic
cuccugugucccuguguuuu

SEQ ID NO: 424635 - RNA, 21 nt, Artificial Sequence
  Synthetic
ccuccugugucccuguguuuu

SEQ ID NO: 424636 - RNA, 22 nt, Artificial Sequence
  Synthetic
accuccugugucccuguguuuu

SEQ ID NO: 424637 - RNA, 23 nt, Artificial Sequence
  Synthetic
aaccuccugugucccuguguuuu

SEQ ID NO: 424638 - RNA, 24 nt, Artificial Sequence
  Synthetic
gaaccuccugugucccuguguuuu

SEQ ID NO: 424639 - RNA, 18 nt, Artificial Sequence
  Synthetic
auagauacaaauuguuuu

SEQ ID NO: 424640 - RNA, 19 nt, Artificial Sequence
  Synthetic
aauagauacaaauuguuuu

SEQ ID NO: 424641 - RNA, 20 nt, Artificial Sequence
  Synthetic
aaauagauacaaauuguuuu

SEQ ID NO: 424642 - RNA, 21 nt, Artificial Sequence
  Synthetic
uaaauagauacaaauuguuuu

SEQ ID NO: 424643 - RNA, 22 nt, Artificial Sequence
  Synthetic
auaaauagauacaaauuguuuu

SEQ ID NO: 424644 - RNA, 23 nt, Artificial Sequence
  Synthetic
aauaaauagauacaaauuguuuu

SEQ ID NO: 424645 - RNA, 24 nt, Artificial Sequence
  Synthetic
aaauaaauagauacaaauuguuuu

SEQ ID NO: 424646 - RNA, 18 nt, Artificial Sequence
  Synthetic
agcagaucagauuguuuu

SEQ ID NO: 424647 - RNA, 19 nt, Artificial Sequence
  Synthetic
aagcagaucagauuguuuu

SEQ ID NO: 424648 - RNA, 20 nt, Artificial Sequence
  Synthetic
gaagcagaucagauuguuuu

SEQ ID NO: 424649 - RNA, 21 nt, Artificial Sequence
  Synthetic
agaagcagaucagauuguuuu

SEQ ID NO: 424650 - RNA, 22 nt, Artificial Sequence
  Synthetic
cagaagcagaucagauuguuuu

SEQ ID NO: 424651 - RNA, 23 nt, Artificial Sequence
  Synthetic
ccagaagcagaucagauuguuuu

SEQ ID NO: 424652 - RNA, 24 nt, Artificial Sequence
  Synthetic
uccagaagcagaucagauuguuuu

SEQ ID NO: 424653 - RNA, 18 nt, Artificial Sequence
  Synthetic
gagaaccuugauuguuuu

SEQ ID NO: 424654 - RNA, 19 nt, Artificial Sequence
  Synthetic
agagaaccuugauuguuuu

SEQ ID NO: 424655 - RNA, 20 nt, Artificial Sequence
  Synthetic
uagagaaccuugauuguuuu

SEQ ID NO: 424656 - RNA, 21 nt, Artificial Sequence
  Synthetic
uuagagaaccuugauuguuuu

SEQ ID NO: 424657 - RNA, 22 nt, Artificial Sequence
  Synthetic
cuuagagaaccuugauuguuuu

SEQ ID NO: 424658 - RNA, 23 nt, Artificial Sequence
  Synthetic
gcuuagagaaccuugauuguuuu

SEQ ID NO: 424659 - RNA, 24 nt, Artificial Sequence
  Synthetic
ugcuuagagaaccuugauuguuuu

SEQ ID NO: 424660 - RNA, 18 nt, Artificial Sequence
  Synthetic
ucaggagucacuuguuuu

SEQ ID NO: 424661 - RNA, 19 nt, Artificial Sequence
  Synthetic
gucaggagucacuuguuuu

SEQ ID NO: 424662 - RNA, 20 nt, Artificial Sequence
  Synthetic
ugucaggagucacuuguuuu

SEQ ID NO: 424663 - RNA, 21 nt, Artificial Sequence
  Synthetic
uugucaggagucacuuguuuu

SEQ ID NO: 424664 - RNA, 22 nt, Artificial Sequence
  Synthetic
guugucaggagucacuuguuuu

SEQ ID NO: 424665 - RNA, 23 nt, Artificial Sequence
  Synthetic
uguugucaggagucacuuguuuu

SEQ ID NO: 424666 - RNA, 24 nt, Artificial Sequence
  Synthetic
uuguugucaggagucacuuguuuu

SEQ ID NO: 424667 - RNA, 18 nt, Artificial Sequence
  Synthetic
agccuauggccuuguuuu

SEQ ID NO: 424668 - RNA, 19 nt, Artificial Sequence
  Synthetic
gagccuauggccuuguuuu

SEQ ID NO: 424669 - RNA, 20 nt, Artificial Sequence
  Synthetic
agagccuauggccuuguuuu

SEQ ID NO: 424670 - RNA, 21 nt, Artificial Sequence
  Synthetic
aagagccuauggccuuguuuu

SEQ ID NO: 424671 - RNA, 22 nt, Artificial Sequence
  Synthetic
caagagccuauggccuuguuuu

SEQ ID NO: 424672 - RNA, 23 nt, Artificial Sequence
  Synthetic
acaagagccuauggccuuguuuu

SEQ ID NO: 424673 - RNA, 24 nt, Artificial Sequence
  Synthetic
aacaagagccuauggccuuguuuu

SEQ ID NO: 424674 - RNA, 18 nt, Artificial Sequence
  Synthetic
gcauaaaugucuuguuuu

SEQ ID NO: 424675 - RNA, 19 nt, Artificial Sequence
  Synthetic
ugcauaaaugucuuguuuu

SEQ ID NO: 424676 - RNA, 20 nt, Artificial Sequence
  Synthetic
cugcauaaaugucuuguuuu

SEQ ID NO: 424677 - RNA, 21 nt, Artificial Sequence
  Synthetic
gcugcauaaaugucuuguuuu

SEQ ID NO: 424678 - RNA, 22 nt, Artificial Sequence
  Synthetic
ggcugcauaaaugucuuguuuu

SEQ ID NO: 424679 - RNA, 23 nt, Artificial Sequence
  Synthetic
uggcugcauaaaugucuuguuuu

SEQ ID NO: 424680 - RNA, 24 nt, Artificial Sequence
  Synthetic
cuggcugcauaaaugucuuguuuu

SEQ ID NO: 424681 - RNA, 18 nt, Artificial Sequence
  Synthetic
augcuuaaguguuguuuu

SEQ ID NO: 424682 - RNA, 19 nt, Artificial Sequence
  Synthetic
uaugcuuaaguguuguuuu

SEQ ID NO: 424683 - RNA, 20 nt, Artificial Sequence
  Synthetic
guaugcuuaaguguuguuuu

SEQ ID NO: 424684 - RNA, 21 nt, Artificial Sequence
  Synthetic
gguaugcuuaaguguuguuuu

SEQ ID NO: 424685 - RNA, 22 nt, Artificial Sequence
  Synthetic
ugguaugcuuaaguguuguuuu

SEQ ID NO: 424686 - RNA, 23 nt, Artificial Sequence
  Synthetic
gugguaugcuuaaguguuguuuu

SEQ ID NO: 424687 - RNA, 24 nt, Artificial Sequence
  Synthetic
ugugguaugcuuaaguguuguuuu

SEQ ID NO: 424688 - RNA, 18 nt, Artificial Sequence
  Synthetic
uguuucagaauuuguuuu

SEQ ID NO: 424689 - RNA, 19 nt, Artificial Sequence
  Synthetic
cuguuucagaauuuguuuu

SEQ ID NO: 424690 - RNA, 20 nt, Artificial Sequence
  Synthetic
ucuguuucagaauuuguuuu

SEQ ID NO: 424691 - RNA, 21 nt, Artificial Sequence
  Synthetic
uucuguuucagaauuuguuuu

SEQ ID NO: 424692 - RNA, 22 nt, Artificial Sequence
  Synthetic
cuucuguuucagaauuuguuuu

SEQ ID NO: 424693 - RNA, 23 nt, Artificial Sequence
  Synthetic
ccuucuguuucagaauuuguuuu

SEQ ID NO: 424694 - RNA, 24 nt, Artificial Sequence
  Synthetic
accuucuguuucagaauuuguuuu

SEQ ID NO: 424695 - RNA, 18 nt, Artificial Sequence
  Synthetic
gcagaaaugauuuguuuu

SEQ ID NO: 424696 - RNA, 19 nt, Artificial Sequence
  Synthetic
ugcagaaaugauuuguuuu

SEQ ID NO: 424697 - RNA, 20 nt, Artificial Sequence
  Synthetic
uugcagaaaugauuuguuuu

SEQ ID NO: 424698 - RNA, 21 nt, Artificial Sequence
  Synthetic
cuugcagaaaugauuuguuuu

SEQ ID NO: 424699 - RNA, 22 nt, Artificial Sequence
  Synthetic
acuugcagaaaugauuuguuuu

SEQ ID NO: 424700 - RNA, 23 nt, Artificial Sequence
  Synthetic
uacuugcagaaaugauuuguuuu

SEQ ID NO: 424701 - RNA, 24 nt, Artificial Sequence
  Synthetic
auacuugcagaaaugauuuguuuu

SEQ ID NO: 424702 - RNA, 18 nt, Artificial Sequence
  Synthetic
gugaggccacuuuguuuu

SEQ ID NO: 424703 - RNA, 19 nt, Artificial Sequence
  Synthetic
agugaggccacuuuguuuu

SEQ ID NO: 424704 - RNA, 20 nt, Artificial Sequence
  Synthetic
gagugaggccacuuuguuuu

SEQ ID NO: 424705 - RNA, 21 nt, Artificial Sequence
  Synthetic
agagugaggccacuuuguuuu

SEQ ID NO: 424706 - RNA, 22 nt, Artificial Sequence
  Synthetic
aagagugaggccacuuuguuuu

SEQ ID NO: 424707 - RNA, 23 nt, Artificial Sequence
  Synthetic
uaagagugaggccacuuuguuuu

SEQ ID NO: 424708 - RNA, 24 nt, Artificial Sequence
  Synthetic
auaagagugaggccacuuuguuuu

SEQ ID NO: 424709 - RNA, 18 nt, Artificial Sequence
  Synthetic
gaauauucccuuuguuuu

SEQ ID NO: 424710 - RNA, 19 nt, Artificial Sequence
  Synthetic
agaauauucccuuuguuuu

SEQ ID NO: 424711 - RNA, 20 nt, Artificial Sequence
  Synthetic
aagaauauucccuuuguuuu

SEQ ID NO: 424712 - RNA, 21 nt, Artificial Sequence
  Synthetic
caagaauauucccuuuguuuu

SEQ ID NO: 424713 - RNA, 22 nt, Artificial Sequence
  Synthetic
gcaagaauauucccuuuguuuu

SEQ ID NO: 424714 - RNA, 23 nt, Artificial Sequence
  Synthetic
ggcaagaauauucccuuuguuuu

SEQ ID NO: 424715 - RNA, 24 nt, Artificial Sequence
  Synthetic
aggcaagaauauucccuuuguuuu

SEQ ID NO: 424716 - RNA, 18 nt, Artificial Sequence
  Synthetic
aagguaagauuuuguuuu

SEQ ID NO: 424717 - RNA, 19 nt, Artificial Sequence
  Synthetic
caagguaagauuuuguuuu

SEQ ID NO: 424718 - RNA, 20 nt, Artificial Sequence
  Synthetic
gcaagguaagauuuuguuuu

SEQ ID NO: 424719 - RNA, 21 nt, Artificial Sequence
  Synthetic
ggcaagguaagauuuuguuuu

SEQ ID NO: 424720 - RNA, 22 nt, Artificial Sequence
  Synthetic
aggcaagguaagauuuuguuuu

SEQ ID NO: 424721 - RNA, 23 nt, Artificial Sequence
  Synthetic
uaggcaagguaagauuuuguuuu

SEQ ID NO: 424722 - RNA, 24 nt, Artificial Sequence
  Synthetic
auaggcaagguaagauuuuguuuu

SEQ ID NO: 424723 - RNA, 18 nt, Artificial Sequence
  Synthetic
aucaggugauuuuguuuu

SEQ ID NO: 424724 - RNA, 19 nt, Artificial Sequence
  Synthetic
aaucaggugauuuuguuuu

SEQ ID NO: 424725 - RNA, 20 nt, Artificial Sequence
  Synthetic
uaaucaggugauuuuguuuu

SEQ ID NO: 424726 - RNA, 21 nt, Artificial Sequence
  Synthetic
uuaaucaggugauuuuguuuu

SEQ ID NO: 424727 - RNA, 22 nt, Artificial Sequence
  Synthetic
auuaaucaggugauuuuguuuu

SEQ ID NO: 424728 - RNA, 23 nt, Artificial Sequence
  Synthetic
cauuaaucaggugauuuuguuuu

SEQ ID NO: 424729 - RNA, 24 nt, Artificial Sequence
  Synthetic
gcauuaaucaggugauuuuguuuu

SEQ ID NO: 424730 - RNA, 18 nt, Artificial Sequence
  Synthetic
aguugcuuguuuuguuuu

SEQ ID NO: 424731 - RNA, 19 nt, Artificial Sequence
  Synthetic
aaguugcuuguuuuguuuu

SEQ ID NO: 424732 - RNA, 20 nt, Artificial Sequence
  Synthetic
aaaguugcuuguuuuguuuu

SEQ ID NO: 424733 - RNA, 21 nt, Artificial Sequence
  Synthetic
uaaaguugcuuguuuuguuuu

SEQ ID NO: 424734 - RNA, 22 nt, Artificial Sequence
  Synthetic
cuaaaguugcuuguuuuguuuu

SEQ ID NO: 424735 - RNA, 23 nt, Artificial Sequence
  Synthetic
ccuaaaguugcuuguuuuguuuu

SEQ ID NO: 424736 - RNA, 24 nt, Artificial Sequence
  Synthetic
gccuaaaguugcuuguuuuguuuu

SEQ ID NO: 424737 - RNA, 18 nt, Artificial Sequence
  Synthetic
uguuucuguuuuuguuuu

SEQ ID NO: 424738 - RNA, 19 nt, Artificial Sequence
  Synthetic
guguuucuguuuuuguuuu

SEQ ID NO: 424739 - RNA, 20 nt, Artificial Sequence
  Synthetic
uguguuucuguuuuuguuuu

SEQ ID NO: 424740 - RNA, 21 nt, Artificial Sequence
  Synthetic
uuguguuucuguuuuuguuuu

SEQ ID NO: 424741 - RNA, 22 nt, Artificial Sequence
  Synthetic
auuguguuucuguuuuuguuuu

SEQ ID NO: 424742 - RNA, 23 nt, Artificial Sequence
  Synthetic
aauuguguuucuguuuuuguuuu

SEQ ID NO: 424743 - RNA, 24 nt, Artificial Sequence
  Synthetic
gaauuguguuucuguuuuuguuuu

SEQ ID NO: 424744 - RNA, 18 nt, Artificial Sequence
  Synthetic
ucauugcagaaaauuuuu

SEQ ID NO: 424745 - RNA, 19 nt, Artificial Sequence
  Synthetic
uucauugcagaaaauuuuu

SEQ ID NO: 424746 - RNA, 20 nt, Artificial Sequence
  Synthetic
auucauugcagaaaauuuuu

SEQ ID NO: 424747 - RNA, 21 nt, Artificial Sequence
  Synthetic
uauucauugcagaaaauuuuu

SEQ ID NO: 424748 - RNA, 22 nt, Artificial Sequence
  Synthetic
auauucauugcagaaaauuuuu

SEQ ID NO: 424749 - RNA, 23 nt, Artificial Sequence
  Synthetic
cauauucauugcagaaaauuuuu

SEQ ID NO: 424750 - RNA, 24 nt, Artificial Sequence
  Synthetic
acauauucauugcagaaaauuuuu

SEQ ID NO: 424751 - RNA, 18 nt, Artificial Sequence
  Synthetic
accaaaaauaaaauuuuu

SEQ ID NO: 424752 - RNA, 19 nt, Artificial Sequence
  Synthetic
caccaaaaauaaaauuuuu

SEQ ID NO: 424753 - RNA, 20 nt, Artificial Sequence
  Synthetic
acaccaaaaauaaaauuuuu

SEQ ID NO: 424754 - RNA, 21 nt, Artificial Sequence
  Synthetic
aacaccaaaaauaaaauuuuu

SEQ ID NO: 424755 - RNA, 22 nt, Artificial Sequence
  Synthetic
gaacaccaaaaauaaaauuuuu

SEQ ID NO: 424756 - RNA, 23 nt, Artificial Sequence
  Synthetic
ugaacaccaaaaauaaaauuuuu

SEQ ID NO: 424757 - RNA, 24 nt, Artificial Sequence
  Synthetic
cugaacaccaaaaauaaaauuuuu

SEQ ID NO: 424758 - RNA, 18 nt, Artificial Sequence
  Synthetic
uauauauauaaaauuuuu

SEQ ID NO: 424759 - RNA, 19 nt, Artificial Sequence
  Synthetic
auauauauauaaaauuuuu

SEQ ID NO: 424760 - RNA, 20 nt, Artificial Sequence
  Synthetic
uauauauauauaaaauuuuu

SEQ ID NO: 424761 - RNA, 21 nt, Artificial Sequence
  Synthetic
auauauauauauaaaauuuuu

SEQ ID NO: 424762 - RNA, 22 nt, Artificial Sequence
  Synthetic
uauauauauauauaaaauuuuu

SEQ ID NO: 424763 - RNA, 23 nt, Artificial Sequence
  Synthetic
auauauauauauauaaaauuuuu

SEQ ID NO: 424764 - RNA, 24 nt, Artificial Sequence
  Synthetic
uauauauauauauauaaaauuuuu

SEQ ID NO: 424765 - RNA, 18 nt, Artificial Sequence
  Synthetic
aagcauucucaaauuuuu

SEQ ID NO: 424766 - RNA, 19 nt, Artificial Sequence
  Synthetic
aaagcauucucaaauuuuu

SEQ ID NO: 424767 - RNA, 20 nt, Artificial Sequence
  Synthetic
aaaagcauucucaaauuuuu

SEQ ID NO: 424768 - RNA, 21 nt, Artificial Sequence
  Synthetic
caaaagcauucucaaauuuuu

SEQ ID NO: 424769 - RNA, 22 nt, Artificial Sequence
  Synthetic
ccaaaagcauucucaaauuuuu

SEQ ID NO: 424770 - RNA, 23 nt, Artificial Sequence
  Synthetic
uccaaaagcauucucaaauuuuu

SEQ ID NO: 424771 - RNA, 24 nt, Artificial Sequence
  Synthetic
uuccaaaagcauucucaaauuuuu

SEQ ID NO: 424772 - RNA, 18 nt, Artificial Sequence
  Synthetic
gauggaggagaaauuuuu

SEQ ID NO: 424773 - RNA, 19 nt, Artificial Sequence
  Synthetic
ggauggaggagaaauuuuu

SEQ ID NO: 424774 - RNA, 20 nt, Artificial Sequence
  Synthetic
aggauggaggagaaauuuuu

SEQ ID NO: 424775 - RNA, 21 nt, Artificial Sequence
  Synthetic
gaggauggaggagaaauuuuu

SEQ ID NO: 424776 - RNA, 22 nt, Artificial Sequence
  Synthetic
ggaggauggaggagaaauuuuu

SEQ ID NO: 424777 - RNA, 23 nt, Artificial Sequence
  Synthetic
aggaggauggaggagaaauuuuu

SEQ ID NO: 424778 - RNA, 24 nt, Artificial Sequence
  Synthetic
aaggaggauggaggagaaauuuuu

SEQ ID NO: 424779 - RNA, 18 nt, Artificial Sequence
  Synthetic
cauaaguuagaaauuuuu

SEQ ID NO: 424780 - RNA, 19 nt, Artificial Sequence
  Synthetic
ucauaaguuagaaauuuuu

SEQ ID NO: 424781 - RNA, 20 nt, Artificial Sequence
  Synthetic
uucauaaguuagaaauuuuu

SEQ ID NO: 424782 - RNA, 21 nt, Artificial Sequence
  Synthetic
guucauaaguuagaaauuuuu

SEQ ID NO: 424783 - RNA, 22 nt, Artificial Sequence
  Synthetic
uguucauaaguuagaaauuuuu

SEQ ID NO: 424784 - RNA, 23 nt, Artificial Sequence
  Synthetic
auguucauaaguuagaaauuuuu

SEQ ID NO: 424785 - RNA, 24 nt, Artificial Sequence
  Synthetic
gauguucauaaguuagaaauuuuu

SEQ ID NO: 424786 - RNA, 18 nt, Artificial Sequence
  Synthetic
ugugccaauacaauuuuu

SEQ ID NO: 424787 - RNA, 19 nt, Artificial Sequence
  Synthetic
augugccaauacaauuuuu

SEQ ID NO: 424788 - RNA, 20 nt, Artificial Sequence
  Synthetic
aaugugccaauacaauuuuu

SEQ ID NO: 424789 - RNA, 21 nt, Artificial Sequence
  Synthetic
gaaugugccaauacaauuuuu

SEQ ID NO: 424790 - RNA, 22 nt, Artificial Sequence
  Synthetic
ugaaugugccaauacaauuuuu

SEQ ID NO: 424791 - RNA, 23 nt, Artificial Sequence
  Synthetic
uugaaugugccaauacaauuuuu

SEQ ID NO: 424792 - RNA, 24 nt, Artificial Sequence
  Synthetic
uuugaaugugccaauacaauuuuu

SEQ ID NO: 424793 - RNA, 18 nt, Artificial Sequence
  Synthetic
agaagaauugcaauuuuu

SEQ ID NO: 424794 - RNA, 19 nt, Artificial Sequence
  Synthetic
uagaagaauugcaauuuuu

SEQ ID NO: 424795 - RNA, 20 nt, Artificial Sequence
  Synthetic
uuagaagaauugcaauuuuu

SEQ ID NO: 424796 - RNA, 21 nt, Artificial Sequence
  Synthetic
uuuagaagaauugcaauuuuu

SEQ ID NO: 424797 - RNA, 22 nt, Artificial Sequence
  Synthetic
uuuuagaagaauugcaauuuuu

SEQ ID NO: 424798 - RNA, 23 nt, Artificial Sequence
  Synthetic
auuuuagaagaauugcaauuuuu

SEQ ID NO: 424799 - RNA, 24 nt, Artificial Sequence
  Synthetic
aauuuuagaagaauugcaauuuuu

SEQ ID NO: 424800 - RNA, 18 nt, Artificial Sequence
  Synthetic
aucauaauaauaauuuuu

SEQ ID NO: 424801 - RNA, 19 nt, Artificial Sequence
  Synthetic
aaucauaauaauaauuuuu

SEQ ID NO: 424802 - RNA, 20 nt, Artificial Sequence
  Synthetic
uaaucauaauaauaauuuuu

SEQ ID NO: 424803 - RNA, 21 nt, Artificial Sequence
  Synthetic
auaaucauaauaauaauuuuu

SEQ ID NO: 424804 - RNA, 22 nt, Artificial Sequence
  Synthetic
cauaaucauaauaauaauuuuu

SEQ ID NO: 424805 - RNA, 23 nt, Artificial Sequence
  Synthetic
ucauaaucauaauaauaauuuuu

SEQ ID NO: 424806 - RNA, 24 nt, Artificial Sequence
  Synthetic
aucauaaucauaauaauaauuuuu

SEQ ID NO: 424807 - RNA, 18 nt, Artificial Sequence
  Synthetic
auuuauaagauaauuuuu

SEQ ID NO: 424808 - RNA, 19 nt, Artificial Sequence
  Synthetic
uauuuauaagauaauuuuu

SEQ ID NO: 424809 - RNA, 20 nt, Artificial Sequence
  Synthetic
uuauuuauaagauaauuuuu

SEQ ID NO: 424810 - RNA, 21 nt, Artificial Sequence
  Synthetic
cuuauuuauaagauaauuuuu

SEQ ID NO: 424811 - RNA, 22 nt, Artificial Sequence
  Synthetic
ucuuauuuauaagauaauuuuu

SEQ ID NO: 424812 - RNA, 23 nt, Artificial Sequence
  Synthetic
gucuuauuuauaagauaauuuuu

SEQ ID NO: 424813 - RNA, 24 nt, Artificial Sequence
  Synthetic
agucuuauuuauaagauaauuuuu

SEQ ID NO: 424814 - RNA, 18 nt, Artificial Sequence
  Synthetic
accaauuuucuaauuuuu

SEQ ID NO: 424815 - RNA, 19 nt, Artificial Sequence
  Synthetic
caccaauuuucuaauuuuu

SEQ ID NO: 424816 - RNA, 20 nt, Artificial Sequence
  Synthetic
ucaccaauuuucuaauuuuu

SEQ ID NO: 424817 - RNA, 21 nt, Artificial Sequence
  Synthetic
cucaccaauuuucuaauuuuu

SEQ ID NO: 424818 - RNA, 22 nt, Artificial Sequence
  Synthetic
acucaccaauuuucuaauuuuu

SEQ ID NO: 424819 - RNA, 23 nt, Artificial Sequence
  Synthetic
uacucaccaauuuucuaauuuuu

SEQ ID NO: 424820 - RNA, 24 nt, Artificial Sequence
  Synthetic
uuacucaccaauuuucuaauuuuu

SEQ ID NO: 424821 - RNA, 18 nt, Artificial Sequence
  Synthetic
cucuucucuuuaauuuuu

SEQ ID NO: 424822 - RNA, 19 nt, Artificial Sequence
  Synthetic
ucucuucucuuuaauuuuu

SEQ ID NO: 424823 - RNA, 20 nt, Artificial Sequence
  Synthetic
uucucuucucuuuaauuuuu

SEQ ID NO: 424824 - RNA, 21 nt, Artificial Sequence
  Synthetic
guucucuucucuuuaauuuuu

SEQ ID NO: 424825 - RNA, 22 nt, Artificial Sequence
  Synthetic
uguucucuucucuuuaauuuuu

SEQ ID NO: 424826 - RNA, 23 nt, Artificial Sequence
  Synthetic
guguucucuucucuuuaauuuuu

SEQ ID NO: 424827 - RNA, 24 nt, Artificial Sequence
  Synthetic
aguguucucuucucuuuaauuuuu

SEQ ID NO: 424828 - RNA, 18 nt, Artificial Sequence
  Synthetic
aacgugaugaacauuuuu

SEQ ID NO: 424829 - RNA, 19 nt, Artificial Sequence
  Synthetic
uaacgugaugaacauuuuu

SEQ ID NO: 424830 - RNA, 20 nt, Artificial Sequence
  Synthetic
auaacgugaugaacauuuuu

SEQ ID NO: 424831 - RNA, 21 nt, Artificial Sequence
  Synthetic
aauaacgugaugaacauuuuu

SEQ ID NO: 424832 - RNA, 22 nt, Artificial Sequence
  Synthetic
aaauaacgugaugaacauuuuu

SEQ ID NO: 424833 - RNA, 23 nt, Artificial Sequence
  Synthetic
aaaauaacgugaugaacauuuuu

SEQ ID NO: 424834 - RNA, 24 nt, Artificial Sequence
  Synthetic
gaaaauaacgugaugaacauuuuu

SEQ ID NO: 424835 - RNA, 18 nt, Artificial Sequence
  Synthetic
aauuauagccacauuuuu

SEQ ID NO: 424836 - RNA, 19 nt, Artificial Sequence
  Synthetic
uaauuauagccacauuuuu

SEQ ID NO: 424837 - RNA, 20 nt, Artificial Sequence
  Synthetic
guaauuauagccacauuuuu

SEQ ID NO: 424838 - RNA, 21 nt, Artificial Sequence
  Synthetic
aguaauuauagccacauuuuu

SEQ ID NO: 424839 - RNA, 22 nt, Artificial Sequence
  Synthetic
aaguaauuauagccacauuuuu

SEQ ID NO: 424840 - RNA, 23 nt, Artificial Sequence
  Synthetic
aaaguaauuauagccacauuuuu

SEQ ID NO: 424841 - RNA, 24 nt, Artificial Sequence
  Synthetic
aaaaguaauuauagccacauuuuu

SEQ ID NO: 424842 - RNA, 18 nt, Artificial Sequence
  Synthetic
uuuguggaucacauuuuu

SEQ ID NO: 424843 - RNA, 19 nt, Artificial Sequence
  Synthetic
uuuuguggaucacauuuuu

SEQ ID NO: 424844 - RNA, 20 nt, Artificial Sequence
  Synthetic
uuuuuguggaucacauuuuu

SEQ ID NO: 424845 - RNA, 21 nt, Artificial Sequence
  Synthetic
uuuuuuguggaucacauuuuu

SEQ ID NO: 424846 - RNA, 22 nt, Artificial Sequence
  Synthetic
guuuuuuguggaucacauuuuu

SEQ ID NO: 424847 - RNA, 23 nt, Artificial Sequence
  Synthetic
uguuuuuuguggaucacauuuuu

SEQ ID NO: 424848 - RNA, 24 nt, Artificial Sequence
  Synthetic
uuguuuuuuguggaucacauuuuu

SEQ ID NO: 424849 - RNA, 18 nt, Artificial Sequence
  Synthetic
cuacuaacucgcauuuuu

SEQ ID NO: 424850 - RNA, 19 nt, Artificial Sequence
  Synthetic
acuacuaacucgcauuuuu

SEQ ID NO: 424851 - RNA, 20 nt, Artificial Sequence
  Synthetic
aacuacuaacucgcauuuuu

SEQ ID NO: 424852 - RNA, 21 nt, Artificial Sequence
  Synthetic
aaacuacuaacucgcauuuuu

SEQ ID NO: 424853 - RNA, 22 nt, Artificial Sequence
  Synthetic
aaaacuacuaacucgcauuuuu

SEQ ID NO: 424854 - RNA, 23 nt, Artificial Sequence
  Synthetic
aaaaacuacuaacucgcauuuuu

SEQ ID NO: 424855 - RNA, 24 nt, Artificial Sequence
  Synthetic
gaaaaacuacuaacucgcauuuuu

SEQ ID NO: 424856 - RNA, 18 nt, Artificial Sequence
  Synthetic
agcaguauuggcauuuuu

SEQ ID NO: 424857 - RNA, 19 nt, Artificial Sequence
  Synthetic
cagcaguauuggcauuuuu

SEQ ID NO: 424858 - RNA, 20 nt, Artificial Sequence
  Synthetic
ccagcaguauuggcauuuuu

SEQ ID NO: 424859 - RNA, 21 nt, Artificial Sequence
  Synthetic
accagcaguauuggcauuuuu

SEQ ID NO: 424860 - RNA, 22 nt, Artificial Sequence
  Synthetic
gaccagcaguauuggcauuuuu

SEQ ID NO: 424861 - RNA, 23 nt, Artificial Sequence
  Synthetic
ggaccagcaguauuggcauuuuu

SEQ ID NO: 424862 - RNA, 24 nt, Artificial Sequence
  Synthetic
uggaccagcaguauuggcauuuuu

SEQ ID NO: 424863 - RNA, 18 nt, Artificial Sequence
  Synthetic
ccagcccaaaucauuuuu

SEQ ID NO: 424864 - RNA, 19 nt, Artificial Sequence
  Synthetic
uccagcccaaaucauuuuu

SEQ ID NO: 424865 - RNA, 20 nt, Artificial Sequence
  Synthetic
uuccagcccaaaucauuuuu

SEQ ID NO: 424866 - RNA, 21 nt, Artificial Sequence
  Synthetic
auuccagcccaaaucauuuuu

SEQ ID NO: 424867 - RNA, 22 nt, Artificial Sequence
  Synthetic
aauuccagcccaaaucauuuuu

SEQ ID NO: 424868 - RNA, 23 nt, Artificial Sequence
  Synthetic
uaauuccagcccaaaucauuuuu

SEQ ID NO: 424869 - RNA, 24 nt, Artificial Sequence
  Synthetic
auaauuccagcccaaaucauuuuu

SEQ ID NO: 424870 - RNA, 18 nt, Artificial Sequence
  Synthetic
cauacccuccucauuuuu

SEQ ID NO: 424871 - RNA, 19 nt, Artificial Sequence
  Synthetic
ccauacccuccucauuuuu

SEQ ID NO: 424872 - RNA, 20 nt, Artificial Sequence
  Synthetic
uccauacccuccucauuuuu

SEQ ID NO: 424873 - RNA, 21 nt, Artificial Sequence
  Synthetic
auccauacccuccucauuuuu

SEQ ID NO: 424874 - RNA, 22 nt, Artificial Sequence
  Synthetic
aauccauacccuccucauuuuu

SEQ ID NO: 424875 - RNA, 23 nt, Artificial Sequence
  Synthetic
uaauccauacccuccucauuuuu

SEQ ID NO: 424876 - RNA, 24 nt, Artificial Sequence
  Synthetic
auaauccauacccuccucauuuuu

SEQ ID NO: 424877 - RNA, 18 nt, Artificial Sequence
  Synthetic
auacuuuuugucauuuuu

SEQ ID NO: 424878 - RNA, 19 nt, Artificial Sequence
  Synthetic
cauacuuuuugucauuuuu

SEQ ID NO: 424879 - RNA, 20 nt, Artificial Sequence
  Synthetic
gcauacuuuuugucauuuuu

SEQ ID NO: 424880 - RNA, 21 nt, Artificial Sequence
  Synthetic
ugcauacuuuuugucauuuuu

SEQ ID NO: 424881 - RNA, 22 nt, Artificial Sequence
  Synthetic
cugcauacuuuuugucauuuuu

SEQ ID NO: 424882 - RNA, 23 nt, Artificial Sequence
  Synthetic
ucugcauacuuuuugucauuuuu

SEQ ID NO: 424883 - RNA, 24 nt, Artificial Sequence
  Synthetic
cucugcauacuuuuugucauuuuu

SEQ ID NO: 424884 - RNA, 18 nt, Artificial Sequence
  Synthetic
uggauagaauucauuuuu

SEQ ID NO: 424885 - RNA, 19 nt, Artificial Sequence
  Synthetic
uuggauagaauucauuuuu

SEQ ID NO: 424886 - RNA, 20 nt, Artificial Sequence
  Synthetic
guuggauagaauucauuuuu

SEQ ID NO: 424887 - RNA, 21 nt, Artificial Sequence
  Synthetic
aguuggauagaauucauuuuu

SEQ ID NO: 424888 - RNA, 22 nt, Artificial Sequence
  Synthetic
uaguuggauagaauucauuuuu

SEQ ID NO: 424889 - RNA, 23 nt, Artificial Sequence
  Synthetic
cuaguuggauagaauucauuuuu

SEQ ID NO: 424890 - RNA, 24 nt, Artificial Sequence
  Synthetic
acuaguuggauagaauucauuuuu

SEQ ID NO: 424891 - RNA, 18 nt, Artificial Sequence
  Synthetic
aacuugcauuucauuuuu

SEQ ID NO: 424892 - RNA, 19 nt, Artificial Sequence
  Synthetic
uaacuugcauuucauuuuu

SEQ ID NO: 424893 - RNA, 20 nt, Artificial Sequence
  Synthetic
uuaacuugcauuucauuuuu

SEQ ID NO: 424894 - RNA, 21 nt, Artificial Sequence
  Synthetic
auuaacuugcauuucauuuuu

SEQ ID NO: 424895 - RNA, 22 nt, Artificial Sequence
  Synthetic
uauuaacuugcauuucauuuuu

SEQ ID NO: 424896 - RNA, 23 nt, Artificial Sequence
  Synthetic
auauuaacuugcauuucauuuuu

SEQ ID NO: 424897 - RNA, 24 nt, Artificial Sequence
  Synthetic
aauauuaacuugcauuucauuuuu

SEQ ID NO: 424898 - RNA, 18 nt, Artificial Sequence
  Synthetic
uccuucaagaagauuuuu

SEQ ID NO: 424899 - RNA, 19 nt, Artificial Sequence
  Synthetic
guccuucaagaagauuuuu

SEQ ID NO: 424900 - RNA, 20 nt, Artificial Sequence
  Synthetic
uguccuucaagaagauuuuu

SEQ ID NO: 424901 - RNA, 21 nt, Artificial Sequence
  Synthetic
auguccuucaagaagauuuuu

SEQ ID NO: 424902 - RNA, 22 nt, Artificial Sequence
  Synthetic
cauguccuucaagaagauuuuu

SEQ ID NO: 424903 - RNA, 23 nt, Artificial Sequence
  Synthetic
ccauguccuucaagaagauuuuu

SEQ ID NO: 424904 - RNA, 24 nt, Artificial Sequence
  Synthetic
accauguccuucaagaagauuuuu

SEQ ID NO: 424905 - RNA, 18 nt, Artificial Sequence
  Synthetic
ucacccccacagauuuuu

SEQ ID NO: 424906 - RNA, 19 nt, Artificial Sequence
  Synthetic
aucacccccacagauuuuu

SEQ ID NO: 424907 - RNA, 20 nt, Artificial Sequence
  Synthetic
caucacccccacagauuuuu

SEQ ID NO: 424908 - RNA, 21 nt, Artificial Sequence
  Synthetic
gcaucacccccacagauuuuu

SEQ ID NO: 424909 - RNA, 22 nt, Artificial Sequence
  Synthetic
agcaucacccccacagauuuuu

SEQ ID NO: 424910 - RNA, 23 nt, Artificial Sequence
  Synthetic
cagcaucacccccacagauuuuu

SEQ ID NO: 424911 - RNA, 24 nt, Artificial Sequence
  Synthetic
gcagcaucacccccacagauuuuu

SEQ ID NO: 424912 - RNA, 18 nt, Artificial Sequence
  Synthetic
gaaccuccuuagauuuuu

SEQ ID NO: 424913 - RNA, 19 nt, Artificial Sequence
  Synthetic
ugaaccuccuuagauuuuu

SEQ ID NO: 424914 - RNA, 20 nt, Artificial Sequence
  Synthetic
gugaaccuccuuagauuuuu

SEQ ID NO: 424915 - RNA, 21 nt, Artificial Sequence
  Synthetic
ugugaaccuccuuagauuuuu

SEQ ID NO: 424916 - RNA, 22 nt, Artificial Sequence
  Synthetic
uugugaaccuccuuagauuuuu

SEQ ID NO: 424917 - RNA, 23 nt, Artificial Sequence
  Synthetic
guugugaaccuccuuagauuuuu

SEQ ID NO: 424918 - RNA, 24 nt, Artificial Sequence
  Synthetic
aguugugaaccuccuuagauuuuu

SEQ ID NO: 424919 - RNA, 18 nt, Artificial Sequence
  Synthetic
agguuagagaugauuuuu

SEQ ID NO: 424920 - RNA, 19 nt, Artificial Sequence
  Synthetic
aagguuagagaugauuuuu

SEQ ID NO: 424921 - RNA, 20 nt, Artificial Sequence
  Synthetic
aaagguuagagaugauuuuu

SEQ ID NO: 424922 - RNA, 21 nt, Artificial Sequence
  Synthetic
uaaagguuagagaugauuuuu

SEQ ID NO: 424923 - RNA, 22 nt, Artificial Sequence
  Synthetic
uuaaagguuagagaugauuuuu

SEQ ID NO: 424924 - RNA, 23 nt, Artificial Sequence
  Synthetic
uuuaaagguuagagaugauuuuu

SEQ ID NO: 424925 - RNA, 24 nt, Artificial Sequence
  Synthetic
uuuuaaagguuagagaugauuuuu

SEQ ID NO: 424926 - RNA, 18 nt, Artificial Sequence
  Synthetic
augacucaagugauuuuu

SEQ ID NO: 424927 - RNA, 19 nt, Artificial Sequence
  Synthetic
aaugacucaagugauuuuu

SEQ ID NO: 424928 - RNA, 20 nt, Artificial Sequence
  Synthetic
gaaugacucaagugauuuuu

SEQ ID NO: 424929 - RNA, 21 nt, Artificial Sequence
  Synthetic
ggaaugacucaagugauuuuu

SEQ ID NO: 424930 - RNA, 22 nt, Artificial Sequence
  Synthetic
uggaaugacucaagugauuuuu

SEQ ID NO: 424931 - RNA, 23 nt, Artificial Sequence
  Synthetic
auggaaugacucaagugauuuuu

SEQ ID NO: 424932 - RNA, 24 nt, Artificial Sequence
  Synthetic
uauggaaugacucaagugauuuuu

SEQ ID NO: 424933 - RNA, 18 nt, Artificial Sequence
  Synthetic
cuggauucauugauuuuu

SEQ ID NO: 424934 - RNA, 19 nt, Artificial Sequence
  Synthetic
ccuggauucauugauuuuu

SEQ ID NO: 424935 - RNA, 20 nt, Artificial Sequence
  Synthetic
uccuggauucauugauuuuu

SEQ ID NO: 424936 - RNA, 21 nt, Artificial Sequence
  Synthetic
cuccuggauucauugauuuuu

SEQ ID NO: 424937 - RNA, 22 nt, Artificial Sequence
  Synthetic
gcuccuggauucauugauuuuu

SEQ ID NO: 424938 - RNA, 23 nt, Artificial Sequence
  Synthetic
ggcuccuggauucauugauuuuu

SEQ ID NO: 424939 - RNA, 24 nt, Artificial Sequence
  Synthetic
uggcuccuggauucauugauuuuu

SEQ ID NO: 424940 - RNA, 18 nt, Artificial Sequence
  Synthetic
aauauugcgaauauuuuu

SEQ ID NO: 424941 - RNA, 19 nt, Artificial Sequence
  Synthetic
uaauauugcgaauauuuuu

SEQ ID NO: 424942 - RNA, 20 nt, Artificial Sequence
  Synthetic
auaauauugcgaauauuuuu

SEQ ID NO: 424943 - RNA, 21 nt, Artificial Sequence
  Synthetic
uauaauauugcgaauauuuuu

SEQ ID NO: 424944 - RNA, 22 nt, Artificial Sequence
  Synthetic
uuauaauauugcgaauauuuuu

SEQ ID NO: 424945 - RNA, 23 nt, Artificial Sequence
  Synthetic
uuuauaauauugcgaauauuuuu

SEQ ID NO: 424946 - RNA, 24 nt, Artificial Sequence
  Synthetic
uuuuauaauauugcgaauauuuuu

SEQ ID NO: 424947 - RNA, 18 nt, Artificial Sequence
  Synthetic
auaaucacuaauauuuuu

SEQ ID NO: 424948 - RNA, 19 nt, Artificial Sequence
  Synthetic
uauaaucacuaauauuuuu

SEQ ID NO: 424949 - RNA, 20 nt, Artificial Sequence
  Synthetic
uuauaaucacuaauauuuuu

SEQ ID NO: 424950 - RNA, 21 nt, Artificial Sequence
  Synthetic
auuauaaucacuaauauuuuu

SEQ ID NO: 424951 - RNA, 22 nt, Artificial Sequence
  Synthetic
gauuauaaucacuaauauuuuu

SEQ ID NO: 424952 - RNA, 23 nt, Artificial Sequence
  Synthetic
ggauuauaaucacuaauauuuuu

SEQ ID NO: 424953 - RNA, 24 nt, Artificial Sequence
  Synthetic
gggauuauaaucacuaauauuuuu

SEQ ID NO: 424954 - RNA, 18 nt, Artificial Sequence
  Synthetic
uuaaaaaaauauauuuuu

SEQ ID NO: 424955 - RNA, 19 nt, Artificial Sequence
  Synthetic
auuaaaaaaauauauuuuu

SEQ ID NO: 424956 - RNA, 20 nt, Artificial Sequence
  Synthetic
aauuaaaaaaauauauuuuu

SEQ ID NO: 424957 - RNA, 21 nt, Artificial Sequence
  Synthetic
gaauuaaaaaaauauauuuuu

SEQ ID NO: 424958 - RNA, 22 nt, Artificial Sequence
  Synthetic
agaauuaaaaaaauauauuuuu

SEQ ID NO: 424959 - RNA, 23 nt, Artificial Sequence
  Synthetic
uagaauuaaaaaaauauauuuuu

SEQ ID NO: 424960 - RNA, 24 nt, Artificial Sequence
  Synthetic
cuagaauuaaaaaaauauauuuuu

SEQ ID NO: 424961 - RNA, 18 nt, Artificial Sequence
  Synthetic
uaugauuaauauauuuuu

SEQ ID NO: 424962 - RNA, 19 nt, Artificial Sequence
  Synthetic
cuaugauuaauauauuuuu

SEQ ID NO: 424963 - RNA, 20 nt, Artificial Sequence
  Synthetic
ucuaugauuaauauauuuuu

SEQ ID NO: 424964 - RNA, 21 nt, Artificial Sequence
  Synthetic
aucuaugauuaauauauuuuu

SEQ ID NO: 424965 - RNA, 22 nt, Artificial Sequence
  Synthetic
aaucuaugauuaauauauuuuu

SEQ ID NO: 424966 - RNA, 23 nt, Artificial Sequence
  Synthetic
aaaucuaugauuaauauauuuuu

SEQ ID NO: 424967 - RNA, 24 nt, Artificial Sequence
  Synthetic
aaaaucuaugauuaauauauuuuu

SEQ ID NO: 424968 - RNA, 18 nt, Artificial Sequence
  Synthetic
gaaucagagacuauuuuu

SEQ ID NO: 424969 - RNA, 19 nt, Artificial Sequence
  Synthetic
ggaaucagagacuauuuuu

SEQ ID NO: 424970 - RNA, 20 nt, Artificial Sequence
  Synthetic
uggaaucagagacuauuuuu

SEQ ID NO: 424971 - RNA, 21 nt, Artificial Sequence
  Synthetic
uuggaaucagagacuauuuuu

SEQ ID NO: 424972 - RNA, 22 nt, Artificial Sequence
  Synthetic
auuggaaucagagacuauuuuu

SEQ ID NO: 424973 - RNA, 23 nt, Artificial Sequence
  Synthetic
aauuggaaucagagacuauuuuu

SEQ ID NO: 424974 - RNA, 24 nt, Artificial Sequence
  Synthetic
aaauuggaaucagagacuauuuuu

SEQ ID NO: 424975 - RNA, 18 nt, Artificial Sequence
  Synthetic
cuuugucuaucuauuuuu

SEQ ID NO: 424976 - RNA, 19 nt, Artificial Sequence
  Synthetic
ucuuugucuaucuauuuuu

SEQ ID NO: 424977 - RNA, 20 nt, Artificial Sequence
  Synthetic
uucuuugucuaucuauuuuu

SEQ ID NO: 424978 - RNA, 21 nt, Artificial Sequence
  Synthetic
uuucuuugucuaucuauuuuu

SEQ ID NO: 424979 - RNA, 22 nt, Artificial Sequence
  Synthetic
uuuucuuugucuaucuauuuuu

SEQ ID NO: 424980 - RNA, 23 nt, Artificial Sequence
  Synthetic
auuuucuuugucuaucuauuuuu

SEQ ID NO: 424981 - RNA, 24 nt, Artificial Sequence
  Synthetic
aauuuucuuugucuaucuauuuuu

SEQ ID NO: 424982 - RNA, 18 nt, Artificial Sequence
  Synthetic
cucaucuucaguauuuuu

SEQ ID NO: 424983 - RNA, 19 nt, Artificial Sequence
  Synthetic
ucucaucuucaguauuuuu

SEQ ID NO: 424984 - RNA, 20 nt, Artificial Sequence
  Synthetic
cucucaucuucaguauuuuu

SEQ ID NO: 424985 - RNA, 21 nt, Artificial Sequence
  Synthetic
ucucucaucuucaguauuuuu

SEQ ID NO: 424986 - RNA, 22 nt, Artificial Sequence
  Synthetic
uucucucaucuucaguauuuuu

SEQ ID NO: 424987 - RNA, 23 nt, Artificial Sequence
  Synthetic
cuucucucaucuucaguauuuuu

SEQ ID NO: 424988 - RNA, 24 nt, Artificial Sequence
  Synthetic
ccuucucucaucuucaguauuuuu

SEQ ID NO: 424989 - RNA, 18 nt, Artificial Sequence
  Synthetic
accugaacaauuauuuuu

SEQ ID NO: 424990 - RNA, 19 nt, Artificial Sequence
  Synthetic
caccugaacaauuauuuuu

SEQ ID NO: 424991 - RNA, 20 nt, Artificial Sequence
  Synthetic
gcaccugaacaauuauuuuu

SEQ ID NO: 424992 - RNA, 21 nt, Artificial Sequence
  Synthetic
agcaccugaacaauuauuuuu

SEQ ID NO: 424993 - RNA, 22 nt, Artificial Sequence
  Synthetic
uagcaccugaacaauuauuuuu

SEQ ID NO: 424994 - RNA, 23 nt, Artificial Sequence
  Synthetic
guagcaccugaacaauuauuuuu

SEQ ID NO: 424995 - RNA, 24 nt, Artificial Sequence
  Synthetic
aguagcaccugaacaauuauuuuu

SEQ ID NO: 424996 - RNA, 18 nt, Artificial Sequence
  Synthetic
aauuuauagguuauuuuu

SEQ ID NO: 424997 - RNA, 19 nt, Artificial Sequence
  Synthetic
uaauuuauagguuauuuuu

SEQ ID NO: 424998 - RNA, 20 nt, Artificial Sequence
  Synthetic
uuaauuuauagguuauuuuu

SEQ ID NO: 424999 - RNA, 21 nt, Artificial Sequence
  Synthetic
auuaauuuauagguuauuuuu

SEQ ID NO: 425000 - RNA, 22 nt, Artificial Sequence
  Synthetic
uauuaauuuauagguuauuuuu

SEQ ID NO: 425001 - RNA, 23 nt, Artificial Sequence
  Synthetic
cuauuaauuuauagguuauuuuu

SEQ ID NO: 425002 - RNA, 24 nt, Artificial Sequence
  Synthetic
ucuauuaauuuauagguuauuuuu

SEQ ID NO: 425003 - RNA, 18 nt, Artificial Sequence
  Synthetic
acaaauuuauuuauuuuu

SEQ ID NO: 425004 - RNA, 19 nt, Artificial Sequence
  Synthetic
uacaaauuuauuuauuuuu

SEQ ID NO: 425005 - RNA, 20 nt, Artificial Sequence
  Synthetic
uuacaaauuuauuuauuuuu

SEQ ID NO: 425006 - RNA, 21 nt, Artificial Sequence
  Synthetic
uuuacaaauuuauuuauuuuu

SEQ ID NO: 425007 - RNA, 22 nt, Artificial Sequence
  Synthetic
uuuuacaaauuuauuuauuuuu

SEQ ID NO: 425008 - RNA, 23 nt, Artificial Sequence
  Synthetic
uuuuuacaaauuuauuuauuuuu

SEQ ID NO: 425009 - RNA, 24 nt, Artificial Sequence
  Synthetic
uuuuuuacaaauuuauuuauuuuu

SEQ ID NO: 425010 - RNA, 18 nt, Artificial Sequence
  Synthetic
uuauuuuauuuuauuuuu

SEQ ID NO: 425011 - RNA, 19 nt, Artificial Sequence
  Synthetic
uuuauuuuauuuuauuuuu

SEQ ID NO: 425012 - RNA, 20 nt, Artificial Sequence
  Synthetic
cuuuauuuuauuuuauuuuu

SEQ ID NO: 425013 - RNA, 21 nt, Artificial Sequence
  Synthetic
ucuuuauuuuauuuuauuuuu

SEQ ID NO: 425014 - RNA, 22 nt, Artificial Sequence
  Synthetic
cucuuuauuuuauuuuauuuuu

SEQ ID NO: 425015 - RNA, 23 nt, Artificial Sequence
  Synthetic
acucuuuauuuuauuuuauuuuu

SEQ ID NO: 425016 - RNA, 24 nt, Artificial Sequence
  Synthetic
uacucuuuauuuuauuuuauuuuu

SEQ ID NO: 425017 - RNA, 18 nt, Artificial Sequence
  Synthetic
guuauauuuuuuauuuuu

SEQ ID NO: 425018 - RNA, 19 nt, Artificial Sequence
  Synthetic
aguuauauuuuuuauuuuu

SEQ ID NO: 425019 - RNA, 20 nt, Artificial Sequence
  Synthetic
uaguuauauuuuuuauuuuu

SEQ ID NO: 425020 - RNA, 21 nt, Artificial Sequence
  Synthetic
guaguuauauuuuuuauuuuu

SEQ ID NO: 425021 - RNA, 22 nt, Artificial Sequence
  Synthetic
gguaguuauauuuuuuauuuuu

SEQ ID NO: 425022 - RNA, 23 nt, Artificial Sequence
  Synthetic
ugguaguuauauuuuuuauuuuu

SEQ ID NO: 425023 - RNA, 24 nt, Artificial Sequence
  Synthetic
augguaguuauauuuuuuauuuuu

SEQ ID NO: 425024 - RNA, 18 nt, Artificial Sequence
  Synthetic
aaaagguuuuuuauuuuu

SEQ ID NO: 425025 - RNA, 19 nt, Artificial Sequence
  Synthetic
uaaaagguuuuuuauuuuu

SEQ ID NO: 425026 - RNA, 20 nt, Artificial Sequence
  Synthetic
cuaaaagguuuuuuauuuuu

SEQ ID NO: 425027 - RNA, 21 nt, Artificial Sequence
  Synthetic
ucuaaaagguuuuuuauuuuu

SEQ ID NO: 425028 - RNA, 22 nt, Artificial Sequence
  Synthetic
aucuaaaagguuuuuuauuuuu

SEQ ID NO: 425029 - RNA, 23 nt, Artificial Sequence
  Synthetic
uaucuaaaagguuuuuuauuuuu

SEQ ID NO: 425030 - RNA, 24 nt, Artificial Sequence
  Synthetic
auaucuaaaagguuuuuuauuuuu

SEQ ID NO: 425031 - RNA, 18 nt, Artificial Sequence
  Synthetic
ggaucacccaaacuuuuu

SEQ ID NO: 425032 - RNA, 19 nt, Artificial Sequence
  Synthetic
aggaucacccaaacuuuuu

SEQ ID NO: 425033 - RNA, 20 nt, Artificial Sequence
  Synthetic
aaggaucacccaaacuuuuu

SEQ ID NO: 425034 - RNA, 21 nt, Artificial Sequence
  Synthetic
uaaggaucacccaaacuuuuu

SEQ ID NO: 425035 - RNA, 22 nt, Artificial Sequence
  Synthetic
cuaaggaucacccaaacuuuuu

SEQ ID NO: 425036 - RNA, 23 nt, Artificial Sequence
  Synthetic
gcuaaggaucacccaaacuuuuu

SEQ ID NO: 425037 - RNA, 24 nt, Artificial Sequence
  Synthetic
ugcuaaggaucacccaaacuuuuu

SEQ ID NO: 425038 - RNA, 18 nt, Artificial Sequence
  Synthetic
auuacuaguuaacuuuuu

SEQ ID NO: 425039 - RNA, 19 nt, Artificial Sequence
  Synthetic
gauuacuaguuaacuuuuu

SEQ ID NO: 425040 - RNA, 20 nt, Artificial Sequence
  Synthetic
agauuacuaguuaacuuuuu

SEQ ID NO: 425041 - RNA, 21 nt, Artificial Sequence
  Synthetic
aagauuacuaguuaacuuuuu

SEQ ID NO: 425042 - RNA, 22 nt, Artificial Sequence
  Synthetic
uaagauuacuaguuaacuuuuu

SEQ ID NO: 425043 - RNA, 23 nt, Artificial Sequence
  Synthetic
guaagauuacuaguuaacuuuuu

SEQ ID NO: 425044 - RNA, 24 nt, Artificial Sequence
  Synthetic
uguaagauuacuaguuaacuuuuu

SEQ ID NO: 425045 - RNA, 18 nt, Artificial Sequence
  Synthetic
auaacuuuuuaacuuuuu

SEQ ID NO: 425046 - RNA, 19 nt, Artificial Sequence
  Synthetic
aauaacuuuuuaacuuuuu

SEQ ID NO: 425047 - RNA, 20 nt, Artificial Sequence
  Synthetic
aaauaacuuuuuaacuuuuu

SEQ ID NO: 425048 - RNA, 21 nt, Artificial Sequence
  Synthetic
aaaauaacuuuuuaacuuuuu

SEQ ID NO: 425049 - RNA, 22 nt, Artificial Sequence
  Synthetic
aaaaauaacuuuuuaacuuuuu

SEQ ID NO: 425050 - RNA, 23 nt, Artificial Sequence
  Synthetic
caaaaauaacuuuuuaacuuuuu

SEQ ID NO: 425051 - RNA, 24 nt, Artificial Sequence
  Synthetic
ccaaaaauaacuuuuuaacuuuuu

SEQ ID NO: 425052 - RNA, 18 nt, Artificial Sequence
  Synthetic
auuugcuuaagacuuuuu

SEQ ID NO: 425053 - RNA, 19 nt, Artificial Sequence
  Synthetic
uauuugcuuaagacuuuuu

SEQ ID NO: 425054 - RNA, 20 nt, Artificial Sequence
  Synthetic
uuauuugcuuaagacuuuuu

SEQ ID NO: 425055 - RNA, 21 nt, Artificial Sequence
  Synthetic
uuuauuugcuuaagacuuuuu

SEQ ID NO: 425056 - RNA, 22 nt, Artificial Sequence
  Synthetic
auuuauuugcuuaagacuuuuu

SEQ ID NO: 425057 - RNA, 23 nt, Artificial Sequence
  Synthetic
cauuuauuugcuuaagacuuuuu

SEQ ID NO: 425058 - RNA, 24 nt, Artificial Sequence
  Synthetic
ucauuuauuugcuuaagacuuuuu

SEQ ID NO: 425059 - RNA, 18 nt, Artificial Sequence
  Synthetic
uuuuuacuuauacuuuuu

SEQ ID NO: 425060 - RNA, 19 nt, Artificial Sequence
  Synthetic
cuuuuuacuuauacuuuuu

SEQ ID NO: 425061 - RNA, 20 nt, Artificial Sequence
  Synthetic
ccuuuuuacuuauacuuuuu

SEQ ID NO: 425062 - RNA, 21 nt, Artificial Sequence
  Synthetic
uccuuuuuacuuauacuuuuu

SEQ ID NO: 425063 - RNA, 22 nt, Artificial Sequence
  Synthetic
auccuuuuuacuuauacuuuuu

SEQ ID NO: 425064 - RNA, 23 nt, Artificial Sequence
  Synthetic
aauccuuuuuacuuauacuuuuu

SEQ ID NO: 425065 - RNA, 24 nt, Artificial Sequence
  Synthetic
aaauccuuuuuacuuauacuuuuu

SEQ ID NO: 425066 - RNA, 18 nt, Artificial Sequence
  Synthetic
uucaagacauuacuuuuu

SEQ ID NO: 425067 - RNA, 19 nt, Artificial Sequence
  Synthetic
uuucaagacauuacuuuuu

SEQ ID NO: 425068 - RNA, 20 nt, Artificial Sequence
  Synthetic
auuucaagacauuacuuuuu

SEQ ID NO: 425069 - RNA, 21 nt, Artificial Sequence
  Synthetic
aauuucaagacauuacuuuuu

SEQ ID NO: 425070 - RNA, 22 nt, Artificial Sequence
  Synthetic
aaauuucaagacauuacuuuuu

SEQ ID NO: 425071 - RNA, 23 nt, Artificial Sequence
  Synthetic
gaaauuucaagacauuacuuuuu

SEQ ID NO: 425072 - RNA, 24 nt, Artificial Sequence
  Synthetic
ugaaauuucaagacauuacuuuuu

SEQ ID NO: 425073 - RNA, 18 nt, Artificial Sequence
  Synthetic
ucuccuaauuaccuuuuu

SEQ ID NO: 425074 - RNA, 19 nt, Artificial Sequence
  Synthetic
gucuccuaauuaccuuuuu

SEQ ID NO: 425075 - RNA, 20 nt, Artificial Sequence
  Synthetic
agucuccuaauuaccuuuuu

SEQ ID NO: 425076 - RNA, 21 nt, Artificial Sequence
  Synthetic
aagucuccuaauuaccuuuuu

SEQ ID NO: 425077 - RNA, 22 nt, Artificial Sequence
  Synthetic
uaagucuccuaauuaccuuuuu

SEQ ID NO: 425078 - RNA, 23 nt, Artificial Sequence
  Synthetic
cuaagucuccuaauuaccuuuuu

SEQ ID NO: 425079 - RNA, 24 nt, Artificial Sequence
  Synthetic
ucuaagucuccuaauuaccuuuuu

SEQ ID NO: 425080 - RNA, 18 nt, Artificial Sequence
  Synthetic
uugguuuuugcccuuuuu

SEQ ID NO: 425081 - RNA, 19 nt, Artificial Sequence
  Synthetic
uuugguuuuugcccuuuuu

SEQ ID NO: 425082 - RNA, 20 nt, Artificial Sequence
  Synthetic
cuuugguuuuugcccuuuuu

SEQ ID NO: 425083 - RNA, 21 nt, Artificial Sequence
  Synthetic
gcuuugguuuuugcccuuuuu

SEQ ID NO: 425084 - RNA, 22 nt, Artificial Sequence
  Synthetic
ugcuuugguuuuugcccuuuuu

SEQ ID NO: 425085 - RNA, 23 nt, Artificial Sequence
  Synthetic
uugcuuugguuuuugcccuuuuu

SEQ ID NO: 425086 - RNA, 24 nt, Artificial Sequence
  Synthetic
uuugcuuugguuuuugcccuuuuu

SEQ ID NO: 425087 - RNA, 18 nt, Artificial Sequence
  Synthetic
guaauagacucccuuuuu

SEQ ID NO: 425088 - RNA, 19 nt, Artificial Sequence
  Synthetic
uguaauagacucccuuuuu

SEQ ID NO: 425089 - RNA, 20 nt, Artificial Sequence
  Synthetic
uuguaauagacucccuuuuu

SEQ ID NO: 425090 - RNA, 21 nt, Artificial Sequence
  Synthetic
auuguaauagacucccuuuuu

SEQ ID NO: 425091 - RNA, 22 nt, Artificial Sequence
  Synthetic
gauuguaauagacucccuuuuu

SEQ ID NO: 425092 - RNA, 23 nt, Artificial Sequence
  Synthetic
ugauuguaauagacucccuuuuu

SEQ ID NO: 425093 - RNA, 24 nt, Artificial Sequence
  Synthetic
cugauuguaauagacucccuuuuu

SEQ ID NO: 425094 - RNA, 18 nt, Artificial Sequence
  Synthetic
uuucaaacaggccuuuuu

SEQ ID NO: 425095 - RNA, 19 nt, Artificial Sequence
  Synthetic
cuuucaaacaggccuuuuu

SEQ ID NO: 425096 - RNA, 20 nt, Artificial Sequence
  Synthetic
ucuuucaaacaggccuuuuu

SEQ ID NO: 425097 - RNA, 21 nt, Artificial Sequence
  Synthetic
cucuuucaaacaggccuuuuu

SEQ ID NO: 425098 - RNA, 22 nt, Artificial Sequence
  Synthetic
ccucuuucaaacaggccuuuuu

SEQ ID NO: 425099 - RNA, 23 nt, Artificial Sequence
  Synthetic
accucuuucaaacaggccuuuuu

SEQ ID NO: 425100 - RNA, 24 nt, Artificial Sequence
  Synthetic
aaccucuuucaaacaggccuuuuu

SEQ ID NO: 425101 - RNA, 18 nt, Artificial Sequence
  Synthetic
aauuuccaaauccuuuuu

SEQ ID NO: 425102 - RNA, 19 nt, Artificial Sequence
  Synthetic
gaauuuccaaauccuuuuu

SEQ ID NO: 425103 - RNA, 20 nt, Artificial Sequence
  Synthetic
ugaauuuccaaauccuuuuu

SEQ ID NO: 425104 - RNA, 21 nt, Artificial Sequence
  Synthetic
augaauuuccaaauccuuuuu

SEQ ID NO: 425105 - RNA, 22 nt, Artificial Sequence
  Synthetic
aaugaauuuccaaauccuuuuu

SEQ ID NO: 425106 - RNA, 23 nt, Artificial Sequence
  Synthetic
aaaugaauuuccaaauccuuuuu

SEQ ID NO: 425107 - RNA, 24 nt, Artificial Sequence
  Synthetic
gaaaugaauuuccaaauccuuuuu

SEQ ID NO: 425108 - RNA, 18 nt, Artificial Sequence
  Synthetic
accgucucccuccuuuuu

SEQ ID NO: 425109 - RNA, 19 nt, Artificial Sequence
  Synthetic
uaccgucucccuccuuuuu

SEQ ID NO: 425110 - RNA, 20 nt, Artificial Sequence
  Synthetic
cuaccgucucccuccuuuuu

SEQ ID NO: 425111 - RNA, 21 nt, Artificial Sequence
  Synthetic
ccuaccgucucccuccuuuuu

SEQ ID NO: 425112 - RNA, 22 nt, Artificial Sequence
  Synthetic
accuaccgucucccuccuuuuu

SEQ ID NO: 425113 - RNA, 23 nt, Artificial Sequence
  Synthetic
uaccuaccgucucccuccuuuuu

SEQ ID NO: 425114 - RNA, 24 nt, Artificial Sequence
  Synthetic
auaccuaccgucucccuccuuuuu

SEQ ID NO: 425115 - RNA, 18 nt, Artificial Sequence
  Synthetic
cccgagcaaguccuuuuu

SEQ ID NO: 425116 - RNA, 19 nt, Artificial Sequence
  Synthetic
gcccgagcaaguccuuuuu

SEQ ID NO: 425117 - RNA, 20 nt, Artificial Sequence
  Synthetic
agcccgagcaaguccuuuuu

SEQ ID NO: 425118 - RNA, 21 nt, Artificial Sequence
  Synthetic
cagcccgagcaaguccuuuuu

SEQ ID NO: 425119 - RNA, 22 nt, Artificial Sequence
  Synthetic
ccagcccgagcaaguccuuuuu

SEQ ID NO: 425120 - RNA, 23 nt, Artificial Sequence
  Synthetic
accagcccgagcaaguccuuuuu

SEQ ID NO: 425121 - RNA, 24 nt, Artificial Sequence
  Synthetic
aaccagcccgagcaaguccuuuuu

SEQ ID NO: 425122 - RNA, 18 nt, Artificial Sequence
  Synthetic
uauucuacuuuccuuuuu

SEQ ID NO: 425123 - RNA, 19 nt, Artificial Sequence
  Synthetic
uuauucuacuuuccuuuuu

SEQ ID NO: 425124 - RNA, 20 nt, Artificial Sequence
  Synthetic
auuauucuacuuuccuuuuu

SEQ ID NO: 425125 - RNA, 21 nt, Artificial Sequence
  Synthetic
aauuauucuacuuuccuuuuu

SEQ ID NO: 425126 - RNA, 22 nt, Artificial Sequence
  Synthetic
uaauuauucuacuuuccuuuuu

SEQ ID NO: 425127 - RNA, 23 nt, Artificial Sequence
  Synthetic
guaauuauucuacuuuccuuuuu

SEQ ID NO: 425128 - RNA, 24 nt, Artificial Sequence
  Synthetic
aguaauuauucuacuuuccuuuuu

SEQ ID NO: 425129 - RNA, 18 nt, Artificial Sequence
  Synthetic
uuucuuuuuuuccuuuuu

SEQ ID NO: 425130 - RNA, 19 nt, Artificial Sequence
  Synthetic
cuuucuuuuuuuccuuuuu

SEQ ID NO: 425131 - RNA, 20 nt, Artificial Sequence
  Synthetic
ucuuucuuuuuuuccuuuuu

SEQ ID NO: 425132 - RNA, 21 nt, Artificial Sequence
  Synthetic
uucuuucuuuuuuuccuuuuu

SEQ ID NO: 425133 - RNA, 22 nt, Artificial Sequence
  Synthetic
uuucuuucuuuuuuuccuuuuu

SEQ ID NO: 425134 - RNA, 23 nt, Artificial Sequence
  Synthetic
uuuucuuucuuuuuuuccuuuuu

SEQ ID NO: 425135 - RNA, 24 nt, Artificial Sequence
  Synthetic
cuuuucuuucuuuuuuuccuuuuu

SEQ ID NO: 425136 - RNA, 18 nt, Artificial Sequence
  Synthetic
ccuuugcugaugcuuuuu

SEQ ID NO: 425137 - RNA, 19 nt, Artificial Sequence
  Synthetic
uccuuugcugaugcuuuuu

SEQ ID NO: 425138 - RNA, 20 nt, Artificial Sequence
  Synthetic
auccuuugcugaugcuuuuu

SEQ ID NO: 425139 - RNA, 21 nt, Artificial Sequence
  Synthetic
uauccuuugcugaugcuuuuu

SEQ ID NO: 425140 - RNA, 22 nt, Artificial Sequence
  Synthetic
auauccuuugcugaugcuuuuu

SEQ ID NO: 425141 - RNA, 23 nt, Artificial Sequence
  Synthetic
aauauccuuugcugaugcuuuuu

SEQ ID NO: 425142 - RNA, 24 nt, Artificial Sequence
  Synthetic
uaauauccuuugcugaugcuuuuu

SEQ ID NO: 425143 - RNA, 18 nt, Artificial Sequence
  Synthetic
uccucccuaacucuuuuu

SEQ ID NO: 425144 - RNA, 19 nt, Artificial Sequence
  Synthetic
cuccucccuaacucuuuuu

SEQ ID NO: 425145 - RNA, 20 nt, Artificial Sequence
  Synthetic
acuccucccuaacucuuuuu

SEQ ID NO: 425146 - RNA, 21 nt, Artificial Sequence
  Synthetic
gacuccucccuaacucuuuuu

SEQ ID NO: 425147 - RNA, 22 nt, Artificial Sequence
  Synthetic
ggacuccucccuaacucuuuuu

SEQ ID NO: 425148 - RNA, 23 nt, Artificial Sequence
  Synthetic
gggacuccucccuaacucuuuuu

SEQ ID NO: 425149 - RNA, 24 nt, Artificial Sequence
  Synthetic
agggacuccucccuaacucuuuuu

SEQ ID NO: 425150 - RNA, 18 nt, Artificial Sequence
  Synthetic
aacuauuucucucuuuuu

SEQ ID NO: 425151 - RNA, 19 nt, Artificial Sequence
  Synthetic
caacuauuucucucuuuuu

SEQ ID NO: 425152 - RNA, 20 nt, Artificial Sequence
  Synthetic
ccaacuauuucucucuuuuu

SEQ ID NO: 425153 - RNA, 21 nt, Artificial Sequence
  Synthetic
accaacuauuucucucuuuuu

SEQ ID NO: 425154 - RNA, 22 nt, Artificial Sequence
  Synthetic
aaccaacuauuucucucuuuuu

SEQ ID NO: 425155 - RNA, 23 nt, Artificial Sequence
  Synthetic
gaaccaacuauuucucucuuuuu

SEQ ID NO: 425156 - RNA, 24 nt, Artificial Sequence
  Synthetic
ugaaccaacuauuucucucuuuuu

SEQ ID NO: 425157 - RNA, 18 nt, Artificial Sequence
  Synthetic
cuccaucuuucucuuuuu

SEQ ID NO: 425158 - RNA, 19 nt, Artificial Sequence
  Synthetic
ccuccaucuuucucuuuuu

SEQ ID NO: 425159 - RNA, 20 nt, Artificial Sequence
  Synthetic
uccuccaucuuucucuuuuu

SEQ ID NO: 425160 - RNA, 21 nt, Artificial Sequence
  Synthetic
uuccuccaucuuucucuuuuu

SEQ ID NO: 425161 - RNA, 22 nt, Artificial Sequence
  Synthetic
guuccuccaucuuucucuuuuu

SEQ ID NO: 425162 - RNA, 23 nt, Artificial Sequence
  Synthetic
aguuccuccaucuuucucuuuuu

SEQ ID NO: 425163 - RNA, 24 nt, Artificial Sequence
  Synthetic
uaguuccuccaucuuucucuuuuu

SEQ ID NO: 425164 - RNA, 18 nt, Artificial Sequence
  Synthetic
ccuuccccaagucuuuuu

SEQ ID NO: 425165 - RNA, 19 nt, Artificial Sequence
  Synthetic
uccuuccccaagucuuuuu

SEQ ID NO: 425166 - RNA, 20 nt, Artificial Sequence
  Synthetic
uuccuuccccaagucuuuuu

SEQ ID NO: 425167 - RNA, 21 nt, Artificial Sequence
  Synthetic
uuuccuuccccaagucuuuuu

SEQ ID NO: 425168 - RNA, 22 nt, Artificial Sequence
  Synthetic
uuuuccuuccccaagucuuuuu

SEQ ID NO: 425169 - RNA, 23 nt, Artificial Sequence
  Synthetic
uuuuuccuuccccaagucuuuuu

SEQ ID NO: 425170 - RNA, 24 nt, Artificial Sequence
  Synthetic
uuuuuuccuuccccaagucuuuuu

SEQ ID NO: 425171 - RNA, 18 nt, Artificial Sequence
  Synthetic
uucacuuuaagucuuuuu

SEQ ID NO: 425172 - RNA, 19 nt, Artificial Sequence
  Synthetic
auucacuuuaagucuuuuu

SEQ ID NO: 425173 - RNA, 20 nt, Artificial Sequence
  Synthetic
aauucacuuuaagucuuuuu

SEQ ID NO: 425174 - RNA, 21 nt, Artificial Sequence
  Synthetic
aaauucacuuuaagucuuuuu

SEQ ID NO: 425175 - RNA, 22 nt, Artificial Sequence
  Synthetic
aaaauucacuuuaagucuuuuu

SEQ ID NO: 425176 - RNA, 23 nt, Artificial Sequence
  Synthetic
aaaaauucacuuuaagucuuuuu

SEQ ID NO: 425177 - RNA, 24 nt, Artificial Sequence
  Synthetic
gaaaaauucacuuuaagucuuuuu

SEQ ID NO: 425178 - RNA, 18 nt, Artificial Sequence
  Synthetic
uuuuucaagagucuuuuu

SEQ ID NO: 425179 - RNA, 19 nt, Artificial Sequence
  Synthetic
auuuuucaagagucuuuuu

SEQ ID NO: 425180 - RNA, 20 nt, Artificial Sequence
  Synthetic
cauuuuucaagagucuuuuu

SEQ ID NO: 425181 - RNA, 21 nt, Artificial Sequence
  Synthetic
ucauuuuucaagagucuuuuu

SEQ ID NO: 425182 - RNA, 22 nt, Artificial Sequence
  Synthetic
cucauuuuucaagagucuuuuu

SEQ ID NO: 425183 - RNA, 23 nt, Artificial Sequence
  Synthetic
acucauuuuucaagagucuuuuu

SEQ ID NO: 425184 - RNA, 24 nt, Artificial Sequence
  Synthetic
gacucauuuuucaagagucuuuuu

SEQ ID NO: 425185 - RNA, 18 nt, Artificial Sequence
  Synthetic
uuuacuaggcuucuuuuu

SEQ ID NO: 425186 - RNA, 19 nt, Artificial Sequence
  Synthetic
auuuacuaggcuucuuuuu

SEQ ID NO: 425187 - RNA, 20 nt, Artificial Sequence
  Synthetic
uauuuacuaggcuucuuuuu

SEQ ID NO: 425188 - RNA, 21 nt, Artificial Sequence
  Synthetic
cuauuuacuaggcuucuuuuu

SEQ ID NO: 425189 - RNA, 22 nt, Artificial Sequence
  Synthetic
ucuauuuacuaggcuucuuuuu

SEQ ID NO: 425190 - RNA, 23 nt, Artificial Sequence
  Synthetic
uucuauuuacuaggcuucuuuuu

SEQ ID NO: 425191 - RNA, 24 nt, Artificial Sequence
  Synthetic
guucuauuuacuaggcuucuuuuu

SEQ ID NO: 425192 - RNA, 18 nt, Artificial Sequence
  Synthetic
augauuuucuuucuuuuu

SEQ ID NO: 425193 - RNA, 19 nt, Artificial Sequence
  Synthetic
gaugauuuucuuucuuuuu

SEQ ID NO: 425194 - RNA, 20 nt, Artificial Sequence
  Synthetic
agaugauuuucuuucuuuuu

SEQ ID NO: 425195 - RNA, 21 nt, Artificial Sequence
  Synthetic
gagaugauuuucuuucuuuuu

SEQ ID NO: 425196 - RNA, 22 nt, Artificial Sequence
  Synthetic
agagaugauuuucuuucuuuuu

SEQ ID NO: 425197 - RNA, 23 nt, Artificial Sequence
  Synthetic
gagagaugauuuucuuucuuuuu

SEQ ID NO: 425198 - RNA, 24 nt, Artificial Sequence
  Synthetic
agagagaugauuuucuuucuuuuu

SEQ ID NO: 425199 - RNA, 18 nt, Artificial Sequence
  Synthetic
uucauuauguuucuuuuu

SEQ ID NO: 425200 - RNA, 19 nt, Artificial Sequence
  Synthetic
cuucauuauguuucuuuuu

SEQ ID NO: 425201 - RNA, 20 nt, Artificial Sequence
  Synthetic
ucuucauuauguuucuuuuu

SEQ ID NO: 425202 - RNA, 21 nt, Artificial Sequence
  Synthetic
gucuucauuauguuucuuuuu

SEQ ID NO: 425203 - RNA, 22 nt, Artificial Sequence
  Synthetic
ugucuucauuauguuucuuuuu

SEQ ID NO: 425204 - RNA, 23 nt, Artificial Sequence
  Synthetic
uugucuucauuauguuucuuuuu

SEQ ID NO: 425205 - RNA, 24 nt, Artificial Sequence
  Synthetic
uuugucuucauuauguuucuuuuu

SEQ ID NO: 425206 - RNA, 18 nt, Artificial Sequence
  Synthetic
uaugucccuuuucuuuuu

SEQ ID NO: 425207 - RNA, 19 nt, Artificial Sequence
  Synthetic
uuaugucccuuuucuuuuu

SEQ ID NO: 425208 - RNA, 20 nt, Artificial Sequence
  Synthetic
uuuaugucccuuuucuuuuu

SEQ ID NO: 425209 - RNA, 21 nt, Artificial Sequence
  Synthetic
auuuaugucccuuuucuuuuu

SEQ ID NO: 425210 - RNA, 22 nt, Artificial Sequence
  Synthetic
uauuuaugucccuuuucuuuuu

SEQ ID NO: 425211 - RNA, 23 nt, Artificial Sequence
  Synthetic
auauuuaugucccuuuucuuuuu

SEQ ID NO: 425212 - RNA, 24 nt, Artificial Sequence
  Synthetic
cauauuuaugucccuuuucuuuuu

SEQ ID NO: 425213 - RNA, 18 nt, Artificial Sequence
  Synthetic
auuuuuuuuuuucuuuuu

SEQ ID NO: 425214 - RNA, 19 nt, Artificial Sequence
  Synthetic
aauuuuuuuuuuucuuuuu

SEQ ID NO: 425215 - RNA, 20 nt, Artificial Sequence
  Synthetic
caauuuuuuuuuuucuuuuu

SEQ ID NO: 425216 - RNA, 21 nt, Artificial Sequence
  Synthetic
ccaauuuuuuuuuuucuuuuu

SEQ ID NO: 425217 - RNA, 22 nt, Artificial Sequence
  Synthetic
cccaauuuuuuuuuuucuuuuu

SEQ ID NO: 425218 - RNA, 23 nt, Artificial Sequence
  Synthetic
ccccaauuuuuuuuuuucuuuuu

SEQ ID NO: 425219 - RNA, 24 nt, Artificial Sequence
  Synthetic
cccccaauuuuuuuuuuucuuuuu

SEQ ID NO: 425220 - RNA, 18 nt, Artificial Sequence
  Synthetic
aggcaccaggcaguuuuu

SEQ ID NO: 425221 - RNA, 19 nt, Artificial Sequence
  Synthetic
caggcaccaggcaguuuuu

SEQ ID NO: 425222 - RNA, 20 nt, Artificial Sequence
  Synthetic
ucaggcaccaggcaguuuuu

SEQ ID NO: 425223 - RNA, 21 nt, Artificial Sequence
  Synthetic
cucaggcaccaggcaguuuuu

SEQ ID NO: 425224 - RNA, 22 nt, Artificial Sequence
  Synthetic
ucucaggcaccaggcaguuuuu

SEQ ID NO: 425225 - RNA, 23 nt, Artificial Sequence
  Synthetic
uucucaggcaccaggcaguuuuu

SEQ ID NO: 425226 - RNA, 24 nt, Artificial Sequence
  Synthetic
uuucucaggcaccaggcaguuuuu

SEQ ID NO: 425227 - RNA, 18 nt, Artificial Sequence
  Synthetic
aagaacauaagcguuuuu

SEQ ID NO: 425228 - RNA, 19 nt, Artificial Sequence
  Synthetic
caagaacauaagcguuuuu

SEQ ID NO: 425229 - RNA, 20 nt, Artificial Sequence
  Synthetic
acaagaacauaagcguuuuu

SEQ ID NO: 425230 - RNA, 21 nt, Artificial Sequence
  Synthetic
uacaagaacauaagcguuuuu

SEQ ID NO: 425231 - RNA, 22 nt, Artificial Sequence
  Synthetic
guacaagaacauaagcguuuuu

SEQ ID NO: 425232 - RNA, 23 nt, Artificial Sequence
  Synthetic
uguacaagaacauaagcguuuuu

SEQ ID NO: 425233 - RNA, 24 nt, Artificial Sequence
  Synthetic
guguacaagaacauaagcguuuuu

SEQ ID NO: 425234 - RNA, 18 nt, Artificial Sequence
  Synthetic
auauuucugcagguuuuu

SEQ ID NO: 425235 - RNA, 19 nt, Artificial Sequence
  Synthetic
aauauuucugcagguuuuu

SEQ ID NO: 425236 - RNA, 20 nt, Artificial Sequence
  Synthetic
aaauauuucugcagguuuuu

SEQ ID NO: 425237 - RNA, 21 nt, Artificial Sequence
  Synthetic
uaaauauuucugcagguuuuu

SEQ ID NO: 425238 - RNA, 22 nt, Artificial Sequence
  Synthetic
auaaauauuucugcagguuuuu

SEQ ID NO: 425239 - RNA, 23 nt, Artificial Sequence
  Synthetic
uauaaauauuucugcagguuuuu

SEQ ID NO: 425240 - RNA, 24 nt, Artificial Sequence
  Synthetic
uuauaaauauuucugcagguuuuu

SEQ ID NO: 425241 - RNA, 18 nt, Artificial Sequence
  Synthetic
gaguauuuugagguuuuu

SEQ ID NO: 425242 - RNA, 19 nt, Artificial Sequence
  Synthetic
ggaguauuuugagguuuuu

SEQ ID NO: 425243 - RNA, 20 nt, Artificial Sequence
  Synthetic
gggaguauuuugagguuuuu

SEQ ID NO: 425244 - RNA, 21 nt, Artificial Sequence
  Synthetic
ugggaguauuuugagguuuuu

SEQ ID NO: 425245 - RNA, 22 nt, Artificial Sequence
  Synthetic
gugggaguauuuugagguuuuu

SEQ ID NO: 425246 - RNA, 23 nt, Artificial Sequence
  Synthetic
cgugggaguauuuugagguuuuu

SEQ ID NO: 425247 - RNA, 24 nt, Artificial Sequence
  Synthetic
gcgugggaguauuuugagguuuuu

SEQ ID NO: 425248 - RNA, 18 nt, Artificial Sequence
  Synthetic
cuguggcuuuggguuuuu

SEQ ID NO: 425249 - RNA, 19 nt, Artificial Sequence
  Synthetic
ccuguggcuuuggguuuuu

SEQ ID NO: 425250 - RNA, 20 nt, Artificial Sequence
  Synthetic
cccuguggcuuuggguuuuu

SEQ ID NO: 425251 - RNA, 21 nt, Artificial Sequence
  Synthetic
ucccuguggcuuuggguuuuu

SEQ ID NO: 425252 - RNA, 22 nt, Artificial Sequence
  Synthetic
gucccuguggcuuuggguuuuu

SEQ ID NO: 425253 - RNA, 23 nt, Artificial Sequence
  Synthetic
agucccuguggcuuuggguuuuu

SEQ ID NO: 425254 - RNA, 24 nt, Artificial Sequence
  Synthetic
cagucccuguggcuuuggguuuuu

SEQ ID NO: 425255 - RNA, 18 nt, Artificial Sequence
  Synthetic
aggagaggagugguuuuu

SEQ ID NO: 425256 - RNA, 19 nt, Artificial Sequence
  Synthetic
gaggagaggagugguuuuu

SEQ ID NO: 425257 - RNA, 20 nt, Artificial Sequence
  Synthetic
agaggagaggagugguuuuu

SEQ ID NO: 425258 - RNA, 21 nt, Artificial Sequence
  Synthetic
gagaggagaggagugguuuuu

SEQ ID NO: 425259 - RNA, 22 nt, Artificial Sequence
  Synthetic
agagaggagaggagugguuuuu

SEQ ID NO: 425260 - RNA, 23 nt, Artificial Sequence
  Synthetic
aagagaggagaggagugguuuuu

SEQ ID NO: 425261 - RNA, 24 nt, Artificial Sequence
  Synthetic
aaagagaggagaggagugguuuuu

SEQ ID NO: 425262 - RNA, 18 nt, Artificial Sequence
  Synthetic
ugaaaguauaauguuuuu

SEQ ID NO: 425263 - RNA, 19 nt, Artificial Sequence
  Synthetic
augaaaguauaauguuuuu

SEQ ID NO: 425264 - RNA, 20 nt, Artificial Sequence
  Synthetic
uaugaaaguauaauguuuuu

SEQ ID NO: 425265 - RNA, 21 nt, Artificial Sequence
  Synthetic
cuaugaaaguauaauguuuuu

SEQ ID NO: 425266 - RNA, 22 nt, Artificial Sequence
  Synthetic
ucuaugaaaguauaauguuuuu

SEQ ID NO: 425267 - RNA, 23 nt, Artificial Sequence
  Synthetic
uucuaugaaaguauaauguuuuu

SEQ ID NO: 425268 - RNA, 24 nt, Artificial Sequence
  Synthetic
auucuaugaaaguauaauguuuuu

SEQ ID NO: 425269 - RNA, 18 nt, Artificial Sequence
  Synthetic
auuuuaaguaauguuuuu

SEQ ID NO: 425270 - RNA, 19 nt, Artificial Sequence
  Synthetic
uauuuuaaguaauguuuuu

SEQ ID NO: 425271 - RNA, 20 nt, Artificial Sequence
  Synthetic
auauuuuaaguaauguuuuu

SEQ ID NO: 425272 - RNA, 21 nt, Artificial Sequence
  Synthetic
aauauuuuaaguaauguuuuu

SEQ ID NO: 425273 - RNA, 22 nt, Artificial Sequence
  Synthetic
aaauauuuuaaguaauguuuuu

SEQ ID NO: 425274 - RNA, 23 nt, Artificial Sequence
  Synthetic
aaaauauuuuaaguaauguuuuu

SEQ ID NO: 425275 - RNA, 24 nt, Artificial Sequence
  Synthetic
uaaaauauuuuaaguaauguuuuu

SEQ ID NO: 425276 - RNA, 18 nt, Artificial Sequence
  Synthetic
gaauaaacugcuguuuuu

SEQ ID NO: 425277 - RNA, 19 nt, Artificial Sequence
  Synthetic
ugaauaaacugcuguuuuu

SEQ ID NO: 425278 - RNA, 20 nt, Artificial Sequence
  Synthetic
augaauaaacugcuguuuuu

SEQ ID NO: 425279 - RNA, 21 nt, Artificial Sequence
  Synthetic
caugaauaaacugcuguuuuu

SEQ ID NO: 425280 - RNA, 22 nt, Artificial Sequence
  Synthetic
acaugaauaaacugcuguuuuu

SEQ ID NO: 425281 - RNA, 23 nt, Artificial Sequence
  Synthetic
gacaugaauaaacugcuguuuuu

SEQ ID NO: 425282 - RNA, 24 nt, Artificial Sequence
  Synthetic
ugacaugaauaaacugcuguuuuu

SEQ ID NO: 425283 - RNA, 18 nt, Artificial Sequence
  Synthetic
guauuucuuucuguuuuu

SEQ ID NO: 425284 - RNA, 19 nt, Artificial Sequence
  Synthetic
uguauuucuuucuguuuuu

SEQ ID NO: 425285 - RNA, 20 nt, Artificial Sequence
  Synthetic
guguauuucuuucuguuuuu

SEQ ID NO: 425286 - RNA, 21 nt, Artificial Sequence
  Synthetic
gguguauuucuuucuguuuuu

SEQ ID NO: 425287 - RNA, 22 nt, Artificial Sequence
  Synthetic
agguguauuucuuucuguuuuu

SEQ ID NO: 425288 - RNA, 23 nt, Artificial Sequence
  Synthetic
aagguguauuucuuucuguuuuu

SEQ ID NO: 425289 - RNA, 24 nt, Artificial Sequence
  Synthetic
gaagguguauuucuuucuguuuuu

SEQ ID NO: 425290 - RNA, 18 nt, Artificial Sequence
  Synthetic
aguagcaagauuguuuuu

SEQ ID NO: 425291 - RNA, 19 nt, Artificial Sequence
  Synthetic
aaguagcaagauuguuuuu

SEQ ID NO: 425292 - RNA, 20 nt, Artificial Sequence
  Synthetic
aaaguagcaagauuguuuuu

SEQ ID NO: 425293 - RNA, 21 nt, Artificial Sequence
  Synthetic
aaaaguagcaagauuguuuuu

SEQ ID NO: 425294 - RNA, 22 nt, Artificial Sequence
  Synthetic
aaaaaguagcaagauuguuuuu

SEQ ID NO: 425295 - RNA, 23 nt, Artificial Sequence
  Synthetic
gaaaaaguagcaagauuguuuuu

SEQ ID NO: 425296 - RNA, 24 nt, Artificial Sequence
  Synthetic
ugaaaaaguagcaagauuguuuuu

SEQ ID NO: 425297 - RNA, 18 nt, Artificial Sequence
  Synthetic
agaaaaggauuuguuuuu

SEQ ID NO: 425298 - RNA, 19 nt, Artificial Sequence
  Synthetic
uagaaaaggauuuguuuuu

SEQ ID NO: 425299 - RNA, 20 nt, Artificial Sequence
  Synthetic
guagaaaaggauuuguuuuu

SEQ ID NO: 425300 - RNA, 21 nt, Artificial Sequence
  Synthetic
aguagaaaaggauuuguuuuu

SEQ ID NO: 425301 - RNA, 22 nt, Artificial Sequence
  Synthetic
gaguagaaaaggauuuguuuuu

SEQ ID NO: 425302 - RNA, 23 nt, Artificial Sequence
  Synthetic
ggaguagaaaaggauuuguuuuu

SEQ ID NO: 425303 - RNA, 24 nt, Artificial Sequence
  Synthetic
aggaguagaaaaggauuuguuuuu

SEQ ID NO: 425304 - RNA, 18 nt, Artificial Sequence
  Synthetic
agucuuugauuuguuuuu

SEQ ID NO: 425305 - RNA, 19 nt, Artificial Sequence
  Synthetic
aagucuuugauuuguuuuu

SEQ ID NO: 425306 - RNA, 20 nt, Artificial Sequence
  Synthetic
uaagucuuugauuuguuuuu

SEQ ID NO: 425307 - RNA, 21 nt, Artificial Sequence
  Synthetic
guaagucuuugauuuguuuuu

SEQ ID NO: 425308 - RNA, 22 nt, Artificial Sequence
  Synthetic
gguaagucuuugauuuguuuuu

SEQ ID NO: 425309 - RNA, 23 nt, Artificial Sequence
  Synthetic
agguaagucuuugauuuguuuuu

SEQ ID NO: 425310 - RNA, 24 nt, Artificial Sequence
  Synthetic
aagguaagucuuugauuuguuuuu

SEQ ID NO: 425311 - RNA, 18 nt, Artificial Sequence
  Synthetic
ucagguuuauuuguuuuu

SEQ ID NO: 425312 - RNA, 19 nt, Artificial Sequence
  Synthetic
gucagguuuauuuguuuuu

SEQ ID NO: 425313 - RNA, 20 nt, Artificial Sequence
  Synthetic
ugucagguuuauuuguuuuu

SEQ ID NO: 425314 - RNA, 21 nt, Artificial Sequence
  Synthetic
gugucagguuuauuuguuuuu

SEQ ID NO: 425315 - RNA, 22 nt, Artificial Sequence
  Synthetic
ugugucagguuuauuuguuuuu

SEQ ID NO: 425316 - RNA, 23 nt, Artificial Sequence
  Synthetic
cugugucagguuuauuuguuuuu

SEQ ID NO: 425317 - RNA, 24 nt, Artificial Sequence
  Synthetic
acugugucagguuuauuuguuuuu

SEQ ID NO: 425318 - RNA, 18 nt, Artificial Sequence
  Synthetic
uuguuuuguuuuguuuuu

SEQ ID NO: 425319 - RNA, 19 nt, Artificial Sequence
  Synthetic
uuuguuuuguuuuguuuuu

SEQ ID NO: 425320 - RNA, 20 nt, Artificial Sequence
  Synthetic
uuuuguuuuguuuuguuuuu

SEQ ID NO: 425321 - RNA, 21 nt, Artificial Sequence
  Synthetic
guuuuguuuuguuuuguuuuu

SEQ ID NO: 425322 - RNA, 22 nt, Artificial Sequence
  Synthetic
uguuuuguuuuguuuuguuuuu

SEQ ID NO: 425323 - RNA, 23 nt, Artificial Sequence
  Synthetic
uuguuuuguuuuguuuuguuuuu

SEQ ID NO: 425324 - RNA, 24 nt, Artificial Sequence
  Synthetic
uuuguuuuguuuuguuuuguuuuu

SEQ ID NO: 425325 - RNA, 18 nt, Artificial Sequence
  Synthetic
uguuuuuguuuuguuuuu

SEQ ID NO: 425326 - RNA, 19 nt, Artificial Sequence
  Synthetic
uuguuuuuguuuuguuuuu

SEQ ID NO: 425327 - RNA, 20 nt, Artificial Sequence
  Synthetic
uuuguuuuuguuuuguuuuu

SEQ ID NO: 425328 - RNA, 21 nt, Artificial Sequence
  Synthetic
uuuuguuuuuguuuuguuuuu

SEQ ID NO: 425329 - RNA, 22 nt, Artificial Sequence
  Synthetic
uuuuuguuuuuguuuuguuuuu

SEQ ID NO: 425330 - RNA, 23 nt, Artificial Sequence
  Synthetic
guuuuuguuuuuguuuuguuuuu

SEQ ID NO: 425331 - RNA, 24 nt, Artificial Sequence
  Synthetic
uguuuuuguuuuuguuuuguuuuu

SEQ ID NO: 425332 - RNA, 18 nt, Artificial Sequence
  Synthetic
guuucuguuuuuguuuuu

SEQ ID NO: 425333 - RNA, 19 nt, Artificial Sequence
  Synthetic
uguuucuguuuuuguuuuu

SEQ ID NO: 425334 - RNA, 20 nt, Artificial Sequence
  Synthetic
guguuucuguuuuuguuuuu

SEQ ID NO: 425335 - RNA, 21 nt, Artificial Sequence
  Synthetic
uguguuucuguuuuuguuuuu

SEQ ID NO: 425336 - RNA, 22 nt, Artificial Sequence
  Synthetic
uuguguuucuguuuuuguuuuu

SEQ ID NO: 425337 - RNA, 23 nt, Artificial Sequence
  Synthetic
auuguguuucuguuuuuguuuuu

SEQ ID NO: 425338 - RNA, 24 nt, Artificial Sequence
  Synthetic
aauuguguuucuguuuuuguuuuu

SEQ ID NO: 425339 - RNA, 18 nt, Artificial Sequence
  Synthetic
aaacagaugacauuuuuu

SEQ ID NO: 425340 - RNA, 19 nt, Artificial Sequence
  Synthetic
aaaacagaugacauuuuuu

SEQ ID NO: 425341 - RNA, 20 nt, Artificial Sequence
  Synthetic
gaaaacagaugacauuuuuu

SEQ ID NO: 425342 - RNA, 21 nt, Artificial Sequence
  Synthetic
agaaaacagaugacauuuuuu

SEQ ID NO: 425343 - RNA, 22 nt, Artificial Sequence
  Synthetic
gagaaaacagaugacauuuuuu

SEQ ID NO: 425344 - RNA, 23 nt, Artificial Sequence
  Synthetic
ugagaaaacagaugacauuuuuu

SEQ ID NO: 425345 - RNA, 24 nt, Artificial Sequence
  Synthetic
uugagaaaacagaugacauuuuuu

SEQ ID NO: 425346 - RNA, 18 nt, Artificial Sequence
  Synthetic
aacuuuauuucauuuuuu

SEQ ID NO: 425347 - RNA, 19 nt, Artificial Sequence
  Synthetic
aaacuuuauuucauuuuuu

SEQ ID NO: 425348 - RNA, 20 nt, Artificial Sequence
  Synthetic
aaaacuuuauuucauuuuuu

SEQ ID NO: 425349 - RNA, 21 nt, Artificial Sequence
  Synthetic
uaaaacuuuauuucauuuuuu

SEQ ID NO: 425350 - RNA, 22 nt, Artificial Sequence
  Synthetic
guaaaacuuuauuucauuuuuu

SEQ ID NO: 425351 - RNA, 23 nt, Artificial Sequence
  Synthetic
uguaaaacuuuauuucauuuuuu

SEQ ID NO: 425352 - RNA, 24 nt, Artificial Sequence
  Synthetic
auguaaaacuuuauuucauuuuuu

SEQ ID NO: 425353 - RNA, 18 nt, Artificial Sequence
  Synthetic
uaauccuacauauuuuuu

SEQ ID NO: 425354 - RNA, 19 nt, Artificial Sequence
  Synthetic
auaauccuacauauuuuuu

SEQ ID NO: 425355 - RNA, 20 nt, Artificial Sequence
  Synthetic
cauaauccuacauauuuuuu

SEQ ID NO: 425356 - RNA, 21 nt, Artificial Sequence
  Synthetic
gcauaauccuacauauuuuuu

SEQ ID NO: 425357 - RNA, 22 nt, Artificial Sequence
  Synthetic
agcauaauccuacauauuuuuu

SEQ ID NO: 425358 - RNA, 23 nt, Artificial Sequence
  Synthetic
uagcauaauccuacauauuuuuu

SEQ ID NO: 425359 - RNA, 24 nt, Artificial Sequence
  Synthetic
uuagcauaauccuacauauuuuuu

SEQ ID NO: 425360 - RNA, 18 nt, Artificial Sequence
  Synthetic
uuaaaaguuauauuuuuu

SEQ ID NO: 425361 - RNA, 19 nt, Artificial Sequence
  Synthetic
cuuaaaaguuauauuuuuu

SEQ ID NO: 425362 - RNA, 20 nt, Artificial Sequence
  Synthetic
acuuaaaaguuauauuuuuu

SEQ ID NO: 425363 - RNA, 21 nt, Artificial Sequence
  Synthetic
cacuuaaaaguuauauuuuuu

SEQ ID NO: 425364 - RNA, 22 nt, Artificial Sequence
  Synthetic
ucacuuaaaaguuauauuuuuu

SEQ ID NO: 425365 - RNA, 23 nt, Artificial Sequence
  Synthetic
aucacuuaaaaguuauauuuuuu

SEQ ID NO: 425366 - RNA, 24 nt, Artificial Sequence
  Synthetic
aaucacuuaaaaguuauauuuuuu

SEQ ID NO: 425367 - RNA, 18 nt, Artificial Sequence
  Synthetic
auucuauuuuuauuuuuu

SEQ ID NO: 425368 - RNA, 19 nt, Artificial Sequence
  Synthetic
aauucuauuuuuauuuuuu

SEQ ID NO: 425369 - RNA, 20 nt, Artificial Sequence
  Synthetic
uaauucuauuuuuauuuuuu

SEQ ID NO: 425370 - RNA, 21 nt, Artificial Sequence
  Synthetic
auaauucuauuuuuauuuuuu

SEQ ID NO: 425371 - RNA, 22 nt, Artificial Sequence
  Synthetic
gauaauucuauuuuuauuuuuu

SEQ ID NO: 425372 - RNA, 23 nt, Artificial Sequence
  Synthetic
ugauaauucuauuuuuauuuuuu

SEQ ID NO: 425373 - RNA, 24 nt, Artificial Sequence
  Synthetic
augauaauucuauuuuuauuuuuu

SEQ ID NO: 425374 - RNA, 18 nt, Artificial Sequence
  Synthetic
uaacuuuuuaacuuuuuu

SEQ ID NO: 425375 - RNA, 19 nt, Artificial Sequence
  Synthetic
auaacuuuuuaacuuuuuu

SEQ ID NO: 425376 - RNA, 20 nt, Artificial Sequence
  Synthetic
aauaacuuuuuaacuuuuuu

SEQ ID NO: 425377 - RNA, 21 nt, Artificial Sequence
  Synthetic
aaauaacuuuuuaacuuuuuu

SEQ ID NO: 425378 - RNA, 22 nt, Artificial Sequence
  Synthetic
aaaauaacuuuuuaacuuuuuu

SEQ ID NO: 425379 - RNA, 23 nt, Artificial Sequence
  Synthetic
aaaaauaacuuuuuaacuuuuuu

SEQ ID NO: 425380 - RNA, 24 nt, Artificial Sequence
  Synthetic
caaaaauaacuuuuuaacuuuuuu

SEQ ID NO: 425381 - RNA, 18 nt, Artificial Sequence
  Synthetic
aaguuuaaggacuuuuuu

SEQ ID NO: 425382 - RNA, 19 nt, Artificial Sequence
  Synthetic
gaaguuuaaggacuuuuuu

SEQ ID NO: 425383 - RNA, 20 nt, Artificial Sequence
  Synthetic
agaaguuuaaggacuuuuuu

SEQ ID NO: 425384 - RNA, 21 nt, Artificial Sequence
  Synthetic
uagaaguuuaaggacuuuuuu

SEQ ID NO: 425385 - RNA, 22 nt, Artificial Sequence
  Synthetic
guagaaguuuaaggacuuuuuu

SEQ ID NO: 425386 - RNA, 23 nt, Artificial Sequence
  Synthetic
gguagaaguuuaaggacuuuuuu

SEQ ID NO: 425387 - RNA, 24 nt, Artificial Sequence
  Synthetic
ugguagaaguuuaaggacuuuuuu

SEQ ID NO: 425388 - RNA, 18 nt, Artificial Sequence
  Synthetic
cucuauuuuuacuuuuuu

SEQ ID NO: 425389 - RNA, 19 nt, Artificial Sequence
  Synthetic
gcucuauuuuuacuuuuuu

SEQ ID NO: 425390 - RNA, 20 nt, Artificial Sequence
  Synthetic
agcucuauuuuuacuuuuuu

SEQ ID NO: 425391 - RNA, 21 nt, Artificial Sequence
  Synthetic
aagcucuauuuuuacuuuuuu

SEQ ID NO: 425392 - RNA, 22 nt, Artificial Sequence
  Synthetic
gaagcucuauuuuuacuuuuuu

SEQ ID NO: 425393 - RNA, 23 nt, Artificial Sequence
  Synthetic
ggaagcucuauuuuuacuuuuuu

SEQ ID NO: 425394 - RNA, 24 nt, Artificial Sequence
  Synthetic
gggaagcucuauuuuuacuuuuuu

SEQ ID NO: 425395 - RNA, 18 nt, Artificial Sequence
  Synthetic
uccauguauaccuuuuuu

SEQ ID NO: 425396 - RNA, 19 nt, Artificial Sequence
  Synthetic
cuccauguauaccuuuuuu

SEQ ID NO: 425397 - RNA, 20 nt, Artificial Sequence
  Synthetic
gcuccauguauaccuuuuuu

SEQ ID NO: 425398 - RNA, 21 nt, Artificial Sequence
  Synthetic
ugcuccauguauaccuuuuuu

SEQ ID NO: 425399 - RNA, 22 nt, Artificial Sequence
  Synthetic
augcuccauguauaccuuuuuu

SEQ ID NO: 425400 - RNA, 23 nt, Artificial Sequence
  Synthetic
uaugcuccauguauaccuuuuuu

SEQ ID NO: 425401 - RNA, 24 nt, Artificial Sequence
  Synthetic
uuaugcuccauguauaccuuuuuu

SEQ ID NO: 425402 - RNA, 18 nt, Artificial Sequence
  Synthetic
cucagcuuccccuuuuuu

SEQ ID NO: 425403 - RNA, 19 nt, Artificial Sequence
  Synthetic
acucagcuuccccuuuuuu

SEQ ID NO: 425404 - RNA, 20 nt, Artificial Sequence
  Synthetic
aacucagcuuccccuuuuuu

SEQ ID NO: 425405 - RNA, 21 nt, Artificial Sequence
  Synthetic
uaacucagcuuccccuuuuuu

SEQ ID NO: 425406 - RNA, 22 nt, Artificial Sequence
  Synthetic
uuaacucagcuuccccuuuuuu

SEQ ID NO: 425407 - RNA, 23 nt, Artificial Sequence
  Synthetic
uuuaacucagcuuccccuuuuuu

SEQ ID NO: 425408 - RNA, 24 nt, Artificial Sequence
  Synthetic
guuuaacucagcuuccccuuuuuu

SEQ ID NO: 425409 - RNA, 18 nt, Artificial Sequence
  Synthetic
ucacuuuaagucuuuuuu

SEQ ID NO: 425410 - RNA, 19 nt, Artificial Sequence
  Synthetic
uucacuuuaagucuuuuuu

SEQ ID NO: 425411 - RNA, 20 nt, Artificial Sequence
  Synthetic
auucacuuuaagucuuuuuu

SEQ ID NO: 425412 - RNA, 21 nt, Artificial Sequence
  Synthetic
aauucacuuuaagucuuuuuu

SEQ ID NO: 425413 - RNA, 22 nt, Artificial Sequence
  Synthetic
aaauucacuuuaagucuuuuuu

SEQ ID NO: 425414 - RNA, 23 nt, Artificial Sequence
  Synthetic
aaaauucacuuuaagucuuuuuu

SEQ ID NO: 425415 - RNA, 24 nt, Artificial Sequence
  Synthetic
aaaaauucacuuuaagucuuuuuu

SEQ ID NO: 425416 - RNA, 18 nt, Artificial Sequence
  Synthetic
aauauuuuugucuuuuuu

SEQ ID NO: 425417 - RNA, 19 nt, Artificial Sequence
  Synthetic
aaauauuuuugucuuuuuu

SEQ ID NO: 425418 - RNA, 20 nt, Artificial Sequence
  Synthetic
uaaauauuuuugucuuuuuu

SEQ ID NO: 425419 - RNA, 21 nt, Artificial Sequence
  Synthetic
uuaaauauuuuugucuuuuuu

SEQ ID NO: 425420 - RNA, 22 nt, Artificial Sequence
  Synthetic
uuuaaauauuuuugucuuuuuu

SEQ ID NO: 425421 - RNA, 23 nt, Artificial Sequence
  Synthetic
cuuuaaauauuuuugucuuuuuu

SEQ ID NO: 425422 - RNA, 24 nt, Artificial Sequence
  Synthetic
gcuuuaaauauuuuugucuuuuuu

SEQ ID NO: 425423 - RNA, 18 nt, Artificial Sequence
  Synthetic
ugauuuucuuucuuuuuu

SEQ ID NO: 425424 - RNA, 19 nt, Artificial Sequence
  Synthetic
augauuuucuuucuuuuuu

SEQ ID NO: 425425 - RNA, 20 nt, Artificial Sequence
  Synthetic
gaugauuuucuuucuuuuuu

SEQ ID NO: 425426 - RNA, 21 nt, Artificial Sequence
  Synthetic
agaugauuuucuuucuuuuuu

SEQ ID NO: 425427 - RNA, 22 nt, Artificial Sequence
  Synthetic
gagaugauuuucuuucuuuuuu

SEQ ID NO: 425428 - RNA, 23 nt, Artificial Sequence
  Synthetic
agagaugauuuucuuucuuuuuu

SEQ ID NO: 425429 - RNA, 24 nt, Artificial Sequence
  Synthetic
gagagaugauuuucuuucuuuuuu

SEQ ID NO: 425430 - RNA, 18 nt, Artificial Sequence
  Synthetic
gaaaauuuuaaguuuuuu

SEQ ID NO: 425431 - RNA, 19 nt, Artificial Sequence
  Synthetic
agaaaauuuuaaguuuuuu

SEQ ID NO: 425432 - RNA, 20 nt, Artificial Sequence
  Synthetic
aagaaaauuuuaaguuuuuu

SEQ ID NO: 425433 - RNA, 21 nt, Artificial Sequence
  Synthetic
caagaaaauuuuaaguuuuuu

SEQ ID NO: 425434 - RNA, 22 nt, Artificial Sequence
  Synthetic
ucaagaaaauuuuaaguuuuuu

SEQ ID NO: 425435 - RNA, 23 nt, Artificial Sequence
  Synthetic
aucaagaaaauuuuaaguuuuuu

SEQ ID NO: 425436 - RNA, 24 nt, Artificial Sequence
  Synthetic
caucaagaaaauuuuaaguuuuuu

SEQ ID NO: 425437 - RNA, 18 nt, Artificial Sequence
  Synthetic
cucuauuuuuaguuuuuu

SEQ ID NO: 425438 - RNA, 19 nt, Artificial Sequence
  Synthetic
gcucuauuuuuaguuuuuu

SEQ ID NO: 425439 - RNA, 20 nt, Artificial Sequence
  Synthetic
agcucuauuuuuaguuuuuu

SEQ ID NO: 425440 - RNA, 21 nt, Artificial Sequence
  Synthetic
uagcucuauuuuuaguuuuuu

SEQ ID NO: 425441 - RNA, 22 nt, Artificial Sequence
  Synthetic
guagcucuauuuuuaguuuuuu

SEQ ID NO: 425442 - RNA, 23 nt, Artificial Sequence
  Synthetic
gguagcucuauuuuuaguuuuuu

SEQ ID NO: 425443 - RNA, 24 nt, Artificial Sequence
  Synthetic
ugguagcucuauuuuuaguuuuuu

SEQ ID NO: 425444 - RNA, 18 nt, Artificial Sequence
  Synthetic
ccacagaugugguuuuuu

SEQ ID NO: 425445 - RNA, 19 nt, Artificial Sequence
  Synthetic
gccacagaugugguuuuuu

SEQ ID NO: 425446 - RNA, 20 nt, Artificial Sequence
  Synthetic
agccacagaugugguuuuuu

SEQ ID NO: 425447 - RNA, 21 nt, Artificial Sequence
  Synthetic
aagccacagaugugguuuuuu

SEQ ID NO: 425448 - RNA, 22 nt, Artificial Sequence
  Synthetic
caagccacagaugugguuuuuu

SEQ ID NO: 425449 - RNA, 23 nt, Artificial Sequence
  Synthetic
acaagccacagaugugguuuuuu

SEQ ID NO: 425450 - RNA, 24 nt, Artificial Sequence
  Synthetic
uacaagccacagaugugguuuuuu

SEQ ID NO: 425451 - RNA, 18 nt, Artificial Sequence
  Synthetic
auuaccaugauguuuuuu

SEQ ID NO: 425452 - RNA, 19 nt, Artificial Sequence
  Synthetic
uauuaccaugauguuuuuu

SEQ ID NO: 425453 - RNA, 20 nt, Artificial Sequence
  Synthetic
uuauuaccaugauguuuuuu

SEQ ID NO: 425454 - RNA, 21 nt, Artificial Sequence
  Synthetic
cuuauuaccaugauguuuuuu

SEQ ID NO: 425455 - RNA, 22 nt, Artificial Sequence
  Synthetic
ucuuauuaccaugauguuuuuu

SEQ ID NO: 425456 - RNA, 23 nt, Artificial Sequence
  Synthetic
uucuuauuaccaugauguuuuuu

SEQ ID NO: 425457 - RNA, 24 nt, Artificial Sequence
  Synthetic
uuucuuauuaccaugauguuuuuu

SEQ ID NO: 425458 - RNA, 18 nt, Artificial Sequence
  Synthetic
cguuuaaagguguuuuuu

SEQ ID NO: 425459 - RNA, 19 nt, Artificial Sequence
  Synthetic
gcguuuaaagguguuuuuu

SEQ ID NO: 425460 - RNA, 20 nt, Artificial Sequence
  Synthetic
ugcguuuaaagguguuuuuu

SEQ ID NO: 425461 - RNA, 21 nt, Artificial Sequence
  Synthetic
cugcguuuaaagguguuuuuu

SEQ ID NO: 425462 - RNA, 22 nt, Artificial Sequence
  Synthetic
ucugcguuuaaagguguuuuuu

SEQ ID NO: 425463 - RNA, 23 nt, Artificial Sequence
  Synthetic
uucugcguuuaaagguguuuuuu

SEQ ID NO: 425464 - RNA, 24 nt, Artificial Sequence
  Synthetic
cuucugcguuuaaagguguuuuuu

SEQ ID NO: 425465 - RNA, 18 nt, Artificial Sequence
  Synthetic
cuguccucuuuguuuuuu

SEQ ID NO: 425466 - RNA, 19 nt, Artificial Sequence
  Synthetic
ucuguccucuuuguuuuuu

SEQ ID NO: 425467 - RNA, 20 nt, Artificial Sequence
  Synthetic
cucuguccucuuuguuuuuu

SEQ ID NO: 425468 - RNA, 21 nt, Artificial Sequence
  Synthetic
acucuguccucuuuguuuuuu

SEQ ID NO: 425469 - RNA, 22 nt, Artificial Sequence
  Synthetic
gacucuguccucuuuguuuuuu

SEQ ID NO: 425470 - RNA, 23 nt, Artificial Sequence
  Synthetic
ggacucuguccucuuuguuuuuu

SEQ ID NO: 425471 - RNA, 24 nt, Artificial Sequence
  Synthetic
uggacucuguccucuuuguuuuuu

SEQ ID NO: 425472 - RNA, 18 nt, Artificial Sequence
  Synthetic
uuuuuuguuuuguuuuuu

SEQ ID NO: 425473 - RNA, 19 nt, Artificial Sequence
  Synthetic
uuuuuuuguuuuguuuuuu

SEQ ID NO: 425474 - RNA, 20 nt, Artificial Sequence
  Synthetic
uuuuuuuuguuuuguuuuuu

SEQ ID NO: 425475 - RNA, 21 nt, Artificial Sequence
  Synthetic
uuuuuuuuuguuuuguuuuuu

SEQ ID NO: 425476 - RNA, 22 nt, Artificial Sequence
  Synthetic
uuuuuuuuuuguuuuguuuuuu

SEQ ID NO: 425477 - RNA, 23 nt, Artificial Sequence
  Synthetic
uuuuuuuuuuuguuuuguuuuuu

SEQ ID NO: 425478 - RNA, 24 nt, Artificial Sequence
  Synthetic
cuuuuuuuuuuuguuuuguuuuuu

SEQ ID NO: 425479 - RNA, 18 nt, Artificial Sequence
  Synthetic
uuucuguuuuuguuuuuu

SEQ ID NO: 425480 - RNA, 19 nt, Artificial Sequence
  Synthetic
guuucuguuuuuguuuuuu

SEQ ID NO: 425481 - RNA, 20 nt, Artificial Sequence
  Synthetic
uguuucuguuuuuguuuuuu

SEQ ID NO: 425482 - RNA, 21 nt, Artificial Sequence
  Synthetic
guguuucuguuuuuguuuuuu

SEQ ID NO: 425483 - RNA, 22 nt, Artificial Sequence
  Synthetic
uguguuucuguuuuuguuuuuu

SEQ ID NO: 425484 - RNA, 23 nt, Artificial Sequence
  Synthetic
uuguguuucuguuuuuguuuuuu

SEQ ID NO: 425485 - RNA, 24 nt, Artificial Sequence
  Synthetic
auuguguuucuguuuuuguuuuuu

SEQ ID NO: 425486 - RNA, 18 nt, Artificial Sequence
  Synthetic
uuuuucuuuaauuuuuuu

SEQ ID NO: 425487 - RNA, 19 nt, Artificial Sequence
  Synthetic
uuuuuucuuuaauuuuuuu

SEQ ID NO: 425488 - RNA, 20 nt, Artificial Sequence
  Synthetic
auuuuuucuuuaauuuuuuu

SEQ ID NO: 425489 - RNA, 21 nt, Artificial Sequence
  Synthetic
uauuuuuucuuuaauuuuuuu

SEQ ID NO: 425490 - RNA, 22 nt, Artificial Sequence
  Synthetic
uuauuuuuucuuuaauuuuuuu

SEQ ID NO: 425491 - RNA, 23 nt, Artificial Sequence
  Synthetic
uuuauuuuuucuuuaauuuuuuu

SEQ ID NO: 425492 - RNA, 24 nt, Artificial Sequence
  Synthetic
auuuauuuuuucuuuaauuuuuuu

SEQ ID NO: 425493 - RNA, 18 nt, Artificial Sequence
  Synthetic
aagcaaggacauuuuuuu

SEQ ID NO: 425494 - RNA, 19 nt, Artificial Sequence
  Synthetic
caagcaaggacauuuuuuu

SEQ ID NO: 425495 - RNA, 20 nt, Artificial Sequence
  Synthetic
ccaagcaaggacauuuuuuu

SEQ ID NO: 425496 - RNA, 21 nt, Artificial Sequence
  Synthetic
cccaagcaaggacauuuuuuu

SEQ ID NO: 425497 - RNA, 22 nt, Artificial Sequence
  Synthetic
gcccaagcaaggacauuuuuuu

SEQ ID NO: 425498 - RNA, 23 nt, Artificial Sequence
  Synthetic
ggcccaagcaaggacauuuuuuu

SEQ ID NO: 425499 - RNA, 24 nt, Artificial Sequence
  Synthetic
aggcccaagcaaggacauuuuuuu

SEQ ID NO: 425500 - RNA, 18 nt, Artificial Sequence
  Synthetic
gauuguuaccauuuuuuu

SEQ ID NO: 425501 - RNA, 19 nt, Artificial Sequence
  Synthetic
ugauuguuaccauuuuuuu

SEQ ID NO: 425502 - RNA, 20 nt, Artificial Sequence
  Synthetic
augauuguuaccauuuuuuu

SEQ ID NO: 425503 - RNA, 21 nt, Artificial Sequence
  Synthetic
gaugauuguuaccauuuuuuu

SEQ ID NO: 425504 - RNA, 22 nt, Artificial Sequence
  Synthetic
agaugauuguuaccauuuuuuu

SEQ ID NO: 425505 - RNA, 23 nt, Artificial Sequence
  Synthetic
cagaugauuguuaccauuuuuuu

SEQ ID NO: 425506 - RNA, 24 nt, Artificial Sequence
  Synthetic
ucagaugauuguuaccauuuuuuu

SEQ ID NO: 425507 - RNA, 18 nt, Artificial Sequence
  Synthetic
gucuaaaaauauuuuuuu

SEQ ID NO: 425508 - RNA, 19 nt, Artificial Sequence
  Synthetic
agucuaaaaauauuuuuuu

SEQ ID NO: 425509 - RNA, 20 nt, Artificial Sequence
  Synthetic
cagucuaaaaauauuuuuuu

SEQ ID NO: 425510 - RNA, 21 nt, Artificial Sequence
  Synthetic
gcagucuaaaaauauuuuuuu

SEQ ID NO: 425511 - RNA, 22 nt, Artificial Sequence
  Synthetic
ugcagucuaaaaauauuuuuuu

SEQ ID NO: 425512 - RNA, 23 nt, Artificial Sequence
  Synthetic
augcagucuaaaaauauuuuuuu

SEQ ID NO: 425513 - RNA, 24 nt, Artificial Sequence
  Synthetic
aaugcagucuaaaaauauuuuuuu

SEQ ID NO: 425514 - RNA, 18 nt, Artificial Sequence
  Synthetic
uauauuuuuuauuuuuuu

SEQ ID NO: 425515 - RNA, 19 nt, Artificial Sequence
  Synthetic
uuauauuuuuuauuuuuuu

SEQ ID NO: 425516 - RNA, 20 nt, Artificial Sequence
  Synthetic
guuauauuuuuuauuuuuuu

SEQ ID NO: 425517 - RNA, 21 nt, Artificial Sequence
  Synthetic
aguuauauuuuuuauuuuuuu

SEQ ID NO: 425518 - RNA, 22 nt, Artificial Sequence
  Synthetic
uaguuauauuuuuuauuuuuuu

SEQ ID NO: 425519 - RNA, 23 nt, Artificial Sequence
  Synthetic
guaguuauauuuuuuauuuuuuu

SEQ ID NO: 425520 - RNA, 24 nt, Artificial Sequence
  Synthetic
gguaguuauauuuuuuauuuuuuu

SEQ ID NO: 425521 - RNA, 18 nt, Artificial Sequence
  Synthetic
cuuucaagaacuuuuuuu

SEQ ID NO: 425522 - RNA, 19 nt, Artificial Sequence
  Synthetic
ucuuucaagaacuuuuuuu

SEQ ID NO: 425523 - RNA, 20 nt, Artificial Sequence
  Synthetic
uucuuucaagaacuuuuuuu

SEQ ID NO: 425524 - RNA, 21 nt, Artificial Sequence
  Synthetic
guucuuucaagaacuuuuuuu

SEQ ID NO: 425525 - RNA, 22 nt, Artificial Sequence
  Synthetic
gguucuuucaagaacuuuuuuu

SEQ ID NO: 425526 - RNA, 23 nt, Artificial Sequence
  Synthetic
ugguucuuucaagaacuuuuuuu

SEQ ID NO: 425527 - RNA, 24 nt, Artificial Sequence
  Synthetic
uugguucuuucaagaacuuuuuuu

SEQ ID NO: 425528 - RNA, 18 nt, Artificial Sequence
  Synthetic
ucagcuuccccuuuuuuu

SEQ ID NO: 425529 - RNA, 19 nt, Artificial Sequence
  Synthetic
cucagcuuccccuuuuuuu

SEQ ID NO: 425530 - RNA, 20 nt, Artificial Sequence
  Synthetic
acucagcuuccccuuuuuuu

SEQ ID NO: 425531 - RNA, 21 nt, Artificial Sequence
  Synthetic
aacucagcuuccccuuuuuuu

SEQ ID NO: 425532 - RNA, 22 nt, Artificial Sequence
  Synthetic
uaacucagcuuccccuuuuuuu

SEQ ID NO: 425533 - RNA, 23 nt, Artificial Sequence
  Synthetic
uuaacucagcuuccccuuuuuuu

SEQ ID NO: 425534 - RNA, 24 nt, Artificial Sequence
  Synthetic
uuuaacucagcuuccccuuuuuuu

SEQ ID NO: 425535 - RNA, 18 nt, Artificial Sequence
  Synthetic
cucucucucucuuuuuuu

SEQ ID NO: 425536 - RNA, 19 nt, Artificial Sequence
  Synthetic
ucucucucucucuuuuuuu

SEQ ID NO: 425537 - RNA, 20 nt, Artificial Sequence
  Synthetic
cucucucucucucuuuuuuu

SEQ ID NO: 425538 - RNA, 21 nt, Artificial Sequence
  Synthetic
ucucucucucucucuuuuuuu

SEQ ID NO: 425539 - RNA, 22 nt, Artificial Sequence
  Synthetic
aucucucucucucucuuuuuuu

SEQ ID NO: 425540 - RNA, 23 nt, Artificial Sequence
  Synthetic
caucucucucucucucuuuuuuu

SEQ ID NO: 425541 - RNA, 24 nt, Artificial Sequence
  Synthetic
gcaucucucucucucucuuuuuuu

SEQ ID NO: 425542 - RNA, 18 nt, Artificial Sequence
  Synthetic
uuucugcugucuuuuuuu

SEQ ID NO: 425543 - RNA, 19 nt, Artificial Sequence
  Synthetic
uuuucugcugucuuuuuuu

SEQ ID NO: 425544 - RNA, 20 nt, Artificial Sequence
  Synthetic
uuuuucugcugucuuuuuuu

SEQ ID NO: 425545 - RNA, 21 nt, Artificial Sequence
  Synthetic
auuuuucugcugucuuuuuuu

SEQ ID NO: 425546 - RNA, 22 nt, Artificial Sequence
  Synthetic
uauuuuucugcugucuuuuuuu

SEQ ID NO: 425547 - RNA, 23 nt, Artificial Sequence
  Synthetic
guauuuuucugcugucuuuuuuu

SEQ ID NO: 425548 - RNA, 24 nt, Artificial Sequence
  Synthetic
uguauuuuucugcugucuuuuuuu

SEQ ID NO: 425549 - RNA, 18 nt, Artificial Sequence
  Synthetic
guggcuuuggguuuuuuu

SEQ ID NO: 425550 - RNA, 19 nt, Artificial Sequence
  Synthetic
uguggcuuuggguuuuuuu

SEQ ID NO: 425551 - RNA, 20 nt, Artificial Sequence
  Synthetic
cuguggcuuuggguuuuuuu

SEQ ID NO: 425552 - RNA, 21 nt, Artificial Sequence
  Synthetic
ccuguggcuuuggguuuuuuu

SEQ ID NO: 425553 - RNA, 22 nt, Artificial Sequence
  Synthetic
cccuguggcuuuggguuuuuuu

SEQ ID NO: 425554 - RNA, 23 nt, Artificial Sequence
  Synthetic
ucccuguggcuuuggguuuuuuu

SEQ ID NO: 425555 - RNA, 24 nt, Artificial Sequence
  Synthetic
gucccuguggcuuuggguuuuuuu

SEQ ID NO: 425556 - RNA, 18 nt, Artificial Sequence
  Synthetic
acauugauguguuuuuuu

SEQ ID NO: 425557 - RNA, 19 nt, Artificial Sequence
  Synthetic
uacauugauguguuuuuuu

SEQ ID NO: 425558 - RNA, 20 nt, Artificial Sequence
  Synthetic
auacauugauguguuuuuuu

SEQ ID NO: 425559 - RNA, 21 nt, Artificial Sequence
  Synthetic
aauacauugauguguuuuuuu

SEQ ID NO: 425560 - RNA, 22 nt, Artificial Sequence
  Synthetic
caauacauugauguguuuuuuu

SEQ ID NO: 425561 - RNA, 23 nt, Artificial Sequence
  Synthetic
gcaauacauugauguguuuuuuu

SEQ ID NO: 425562 - RNA, 24 nt, Artificial Sequence
  Synthetic
ggcaauacauugauguguuuuuuu

SEQ ID NO: 425563 - RNA, 18 nt, Artificial Sequence
  Synthetic
aaggucuaaauuuuuuuu

SEQ ID NO: 425564 - RNA, 19 nt, Artificial Sequence
  Synthetic
uaaggucuaaauuuuuuuu

SEQ ID NO: 425565 - RNA, 20 nt, Artificial Sequence
  Synthetic
uuaaggucuaaauuuuuuuu

SEQ ID NO: 425566 - RNA, 21 nt, Artificial Sequence
  Synthetic
guuaaggucuaaauuuuuuuu

SEQ ID NO: 425567 - RNA, 22 nt, Artificial Sequence
  Synthetic
uguuaaggucuaaauuuuuuuu

SEQ ID NO: 425568 - RNA, 23 nt, Artificial Sequence
  Synthetic
uuguuaaggucuaaauuuuuuuu

SEQ ID NO: 425569 - RNA, 24 nt, Artificial Sequence
  Synthetic
cuuguuaaggucuaaauuuuuuuu

SEQ ID NO: 425570 - RNA, 18 nt, Artificial Sequence
  Synthetic
ugaauaauaauuuuuuuu

SEQ ID NO: 425571 - RNA, 19 nt, Artificial Sequence
  Synthetic
cugaauaauaauuuuuuuu

SEQ ID NO: 425572 - RNA, 20 nt, Artificial Sequence
  Synthetic
acugaauaauaauuuuuuuu

SEQ ID NO: 425573 - RNA, 21 nt, Artificial Sequence
  Synthetic
cacugaauaauaauuuuuuuu

SEQ ID NO: 425574 - RNA, 22 nt, Artificial Sequence
  Synthetic
acacugaauaauaauuuuuuuu

SEQ ID NO: 425575 - RNA, 23 nt, Artificial Sequence
  Synthetic
cacacugaauaauaauuuuuuuu

SEQ ID NO: 425576 - RNA, 24 nt, Artificial Sequence
  Synthetic
acacacugaauaauaauuuuuuuu

SEQ ID NO: 425577 - RNA, 18 nt, Artificial Sequence
  Synthetic
gcagugaucauuuuuuuu

SEQ ID NO: 425578 - RNA, 19 nt, Artificial Sequence
  Synthetic
ugcagugaucauuuuuuuu

SEQ ID NO: 425579 - RNA, 20 nt, Artificial Sequence
  Synthetic
cugcagugaucauuuuuuuu

SEQ ID NO: 425580 - RNA, 21 nt, Artificial Sequence
  Synthetic
ucugcagugaucauuuuuuuu

SEQ ID NO: 425581 - RNA, 22 nt, Artificial Sequence
  Synthetic
aucugcagugaucauuuuuuuu

SEQ ID NO: 425582 - RNA, 23 nt, Artificial Sequence
  Synthetic
uaucugcagugaucauuuuuuuu

SEQ ID NO: 425583 - RNA, 24 nt, Artificial Sequence
  Synthetic
uuaucugcagugaucauuuuuuuu

SEQ ID NO: 425584 - RNA, 18 nt, Artificial Sequence
  Synthetic
gaaaauuggauuuuuuuu

SEQ ID NO: 425585 - RNA, 19 nt, Artificial Sequence
  Synthetic
ugaaaauuggauuuuuuuu

SEQ ID NO: 425586 - RNA, 20 nt, Artificial Sequence
  Synthetic
cugaaaauuggauuuuuuuu

SEQ ID NO: 425587 - RNA, 21 nt, Artificial Sequence
  Synthetic
ccugaaaauuggauuuuuuuu

SEQ ID NO: 425588 - RNA, 22 nt, Artificial Sequence
  Synthetic
accugaaaauuggauuuuuuuu

SEQ ID NO: 425589 - RNA, 23 nt, Artificial Sequence
  Synthetic
aaccugaaaauuggauuuuuuuu

SEQ ID NO: 425590 - RNA, 24 nt, Artificial Sequence
  Synthetic
aaaccugaaaauuggauuuuuuuu

SEQ ID NO: 425591 - RNA, 18 nt, Artificial Sequence
  Synthetic
auuuuuuguauuuuuuuu

SEQ ID NO: 425592 - RNA, 19 nt, Artificial Sequence
  Synthetic
aauuuuuuguauuuuuuuu

SEQ ID NO: 425593 - RNA, 20 nt, Artificial Sequence
  Synthetic
uaauuuuuuguauuuuuuuu

SEQ ID NO: 425594 - RNA, 21 nt, Artificial Sequence
  Synthetic
cuaauuuuuuguauuuuuuuu

SEQ ID NO: 425595 - RNA, 22 nt, Artificial Sequence
  Synthetic
gcuaauuuuuuguauuuuuuuu

SEQ ID NO: 425596 - RNA, 23 nt, Artificial Sequence
  Synthetic
agcuaauuuuuuguauuuuuuuu

SEQ ID NO: 425597 - RNA, 24 nt, Artificial Sequence
  Synthetic
cagcuaauuuuuuguauuuuuuuu

SEQ ID NO: 425598 - RNA, 18 nt, Artificial Sequence
  Synthetic
agaccuuugguuuuuuuu

SEQ ID NO: 425599 - RNA, 19 nt, Artificial Sequence
  Synthetic
aagaccuuugguuuuuuuu

SEQ ID NO: 425600 - RNA, 20 nt, Artificial Sequence
  Synthetic
caagaccuuugguuuuuuuu

SEQ ID NO: 425601 - RNA, 21 nt, Artificial Sequence
  Synthetic
ucaagaccuuugguuuuuuuu

SEQ ID NO: 425602 - RNA, 22 nt, Artificial Sequence
  Synthetic
uucaagaccuuugguuuuuuuu

SEQ ID NO: 425603 - RNA, 23 nt, Artificial Sequence
  Synthetic
auucaagaccuuugguuuuuuuu

SEQ ID NO: 425604 - RNA, 24 nt, Artificial Sequence
  Synthetic
aauucaagaccuuugguuuuuuuu

SEQ ID NO: 425605 - RNA, 18 nt, Artificial Sequence
  Synthetic
guuucuuuguuuuuuuuu

SEQ ID NO: 425606 - RNA, 19 nt, Artificial Sequence
  Synthetic
uguuucuuuguuuuuuuuu

SEQ ID NO: 425607 - RNA, 20 nt, Artificial Sequence
  Synthetic
uuguuucuuuguuuuuuuuu

SEQ ID NO: 425608 - RNA, 21 nt, Artificial Sequence
  Synthetic
uuuguuucuuuguuuuuuuuu

SEQ ID NO: 425609 - RNA, 22 nt, Artificial Sequence
  Synthetic
cuuuguuucuuuguuuuuuuuu

SEQ ID NO: 425610 - RNA, 23 nt, Artificial Sequence
  Synthetic
acuuuguuucuuuguuuuuuuuu

SEQ ID NO: 425611 - RNA, 24 nt, Artificial Sequence
  Synthetic
uacuuuguuucuuuguuuuuuuuu

SEQ ID NO: 425612 - RNA, 18 nt, Artificial Sequence
  Synthetic
uuggauacuuuuuuuuuu

SEQ ID NO: 425613 - RNA, 19 nt, Artificial Sequence
  Synthetic
auuggauacuuuuuuuuuu

SEQ ID NO: 425614 - RNA, 20 nt, Artificial Sequence
  Synthetic
aauuggauacuuuuuuuuuu

SEQ ID NO: 425615 - RNA, 21 nt, Artificial Sequence
  Synthetic
caauuggauacuuuuuuuuuu

SEQ ID NO: 425616 - RNA, 22 nt, Artificial Sequence
  Synthetic
ucaauuggauacuuuuuuuuuu

SEQ ID NO: 425617 - RNA, 23 nt, Artificial Sequence
  Synthetic
cucaauuggauacuuuuuuuuuu

SEQ ID NO: 425618 - RNA, 24 nt, Artificial Sequence
  Synthetic
ccucaauuggauacuuuuuuuuuu

SEQ ID NO: 425619 - RNA, 18 nt, Artificial Sequence
  Synthetic
uuuuuaauuuuuuuuuuu

SEQ ID NO: 425620 - RNA, 19 nt, Artificial Sequence
  Synthetic
uuuuuuaauuuuuuuuuuu

SEQ ID NO: 425621 - RNA, 20 nt, Artificial Sequence
  Synthetic
uuuuuuuaauuuuuuuuuuu

SEQ ID NO: 425622 - RNA, 21 nt, Artificial Sequence
  Synthetic
cuuuuuuuaauuuuuuuuuuu

SEQ ID NO: 425623 - RNA, 22 nt, Artificial Sequence
  Synthetic
ucuuuuuuuaauuuuuuuuuuu

SEQ ID NO: 425624 - RNA, 23 nt, Artificial Sequence
  Synthetic
cucuuuuuuuaauuuuuuuuuuu

SEQ ID NO: 425625 - RNA, 24 nt, Artificial Sequence
  Synthetic
ucucuuuuuuuaauuuuuuuuuuu

SEQ ID NO: 425626 - RNA, 18 nt, Artificial Sequence
  Synthetic
accuaauuuuuuuuuuuu

SEQ ID NO: 425627 - RNA, 19 nt, Artificial Sequence
  Synthetic
caccuaauuuuuuuuuuuu

SEQ ID NO: 425628 - RNA, 20 nt, Artificial Sequence
  Synthetic
ccaccuaauuuuuuuuuuuu

SEQ ID NO: 425629 - RNA, 21 nt, Artificial Sequence
  Synthetic
cccaccuaauuuuuuuuuuuu

SEQ ID NO: 425630 - RNA, 22 nt, Artificial Sequence
  Synthetic
gcccaccuaauuuuuuuuuuuu

SEQ ID NO: 425631 - RNA, 23 nt, Artificial Sequence
  Synthetic
ugcccaccuaauuuuuuuuuuuu

SEQ ID NO: 425632 - RNA, 24 nt, Artificial Sequence
  Synthetic
augcccaccuaauuuuuuuuuuuu

SEQ ID NO: 425633 - RNA, 18 nt, Artificial Sequence
  Synthetic
gagaauuuuuuuuuuuuu

SEQ ID NO: 425634 - RNA, 19 nt, Artificial Sequence
  Synthetic
agagaauuuuuuuuuuuuu

SEQ ID NO: 425635 - RNA, 20 nt, Artificial Sequence
  Synthetic
gagagaauuuuuuuuuuuuu

SEQ ID NO: 425636 - RNA, 21 nt, Artificial Sequence
  Synthetic
ugagagaauuuuuuuuuuuuu

SEQ ID NO: 425637 - RNA, 22 nt, Artificial Sequence
  Synthetic
gugagagaauuuuuuuuuuuuu

SEQ ID NO: 425638 - RNA, 23 nt, Artificial Sequence
  Synthetic
ugugagagaauuuuuuuuuuuuu

SEQ ID NO: 425639 - RNA, 24 nt, Artificial Sequence
  Synthetic
cugugagagaauuuuuuuuuuuuu

SEQ ID NO: 425640 - RNA, 18 nt, Artificial Sequence
  Synthetic
aauacuuuuuuuuuuuuu

SEQ ID NO: 425641 - RNA, 19 nt, Artificial Sequence
  Synthetic
aaauacuuuuuuuuuuuuu

SEQ ID NO: 425642 - RNA, 20 nt, Artificial Sequence
  Synthetic
uaaauacuuuuuuuuuuuuu

SEQ ID NO: 425643 - RNA, 21 nt, Artificial Sequence
  Synthetic
guaaauacuuuuuuuuuuuuu

SEQ ID NO: 425644 - RNA, 22 nt, Artificial Sequence
  Synthetic
gguaaauacuuuuuuuuuuuuu

SEQ ID NO: 425645 - RNA, 23 nt, Artificial Sequence
  Synthetic
agguaaauacuuuuuuuuuuuuu

SEQ ID NO: 425646 - RNA, 24 nt, Artificial Sequence
  Synthetic
uagguaaauacuuuuuuuuuuuuu

SEQ ID NO: 425647 - RNA, 18 nt, Artificial Sequence
  Synthetic
uggcuuuuuuuuuuuuuu

SEQ ID NO: 425648 - RNA, 19 nt, Artificial Sequence
  Synthetic
cuggcuuuuuuuuuuuuuu

SEQ ID NO: 425649 - RNA, 20 nt, Artificial Sequence
  Synthetic
acuggcuuuuuuuuuuuuuu

SEQ ID NO: 425650 - RNA, 21 nt, Artificial Sequence
  Synthetic
aacuggcuuuuuuuuuuuuuu

SEQ ID NO: 425651 - RNA, 22 nt, Artificial Sequence
  Synthetic
caacuggcuuuuuuuuuuuuuu

SEQ ID NO: 425652 - RNA, 23 nt, Artificial Sequence
  Synthetic
acaacuggcuuuuuuuuuuuuuu

SEQ ID NO: 425653 - RNA, 24 nt, Artificial Sequence
  Synthetic
cacaacuggcuuuuuuuuuuuuuu

SEQ ID NO: 425654 - RNA, 18 nt, Artificial Sequence
  Synthetic
gagguuuuuuuuuuuuuu

SEQ ID NO: 425655 - RNA, 19 nt, Artificial Sequence
  Synthetic
agagguuuuuuuuuuuuuu

SEQ ID NO: 425656 - RNA, 20 nt, Artificial Sequence
  Synthetic
aagagguuuuuuuuuuuuuu

SEQ ID NO: 425657 - RNA, 21 nt, Artificial Sequence
  Synthetic
uaagagguuuuuuuuuuuuuu

SEQ ID NO: 425658 - RNA, 22 nt, Artificial Sequence
  Synthetic
uuaagagguuuuuuuuuuuuuu

SEQ ID NO: 425659 - RNA, 23 nt, Artificial Sequence
  Synthetic
cuuaagagguuuuuuuuuuuuuu

SEQ ID NO: 425660 - RNA, 24 nt, Artificial Sequence
  Synthetic
gcuuaagagguuuuuuuuuuuuuu

SEQ ID NO: 425661 - RNA, 18 nt, Artificial Sequence
  Synthetic
uuuguuuuuuuuuuuuuu

SEQ ID NO: 425662 - RNA, 19 nt, Artificial Sequence
  Synthetic
uuuuguuuuuuuuuuuuuu

SEQ ID NO: 425663 - RNA, 20 nt, Artificial Sequence
  Synthetic
uuuuuguuuuuuuuuuuuuu

SEQ ID NO: 425664 - RNA, 21 nt, Artificial Sequence
  Synthetic
cuuuuuguuuuuuuuuuuuuu

SEQ ID NO: 425665 - RNA, 22 nt, Artificial Sequence
  Synthetic
ucuuuuuguuuuuuuuuuuuuu

SEQ ID NO: 425666 - RNA, 23 nt, Artificial Sequence
  Synthetic
uucuuuuuguuuuuuuuuuuuuu

SEQ ID NO: 425667 - RNA, 24 nt, Artificial Sequence
  Synthetic
cuucuuuuuguuuuuuuuuuuuuu

SEQ ID NO: 425668 - RNA, 18 nt, Artificial Sequence
  Synthetic
uucuuuuuuuuuuuuuuu

SEQ ID NO: 425669 - RNA, 19 nt, Artificial Sequence
  Synthetic
uuucuuuuuuuuuuuuuuu

SEQ ID NO: 425670 - RNA, 20 nt, Artificial Sequence
  Synthetic
uuuucuuuuuuuuuuuuuuu

SEQ ID NO: 425671 - RNA, 21 nt, Artificial Sequence
  Synthetic
guuuucuuuuuuuuuuuuuuu

SEQ ID NO: 425672 - RNA, 22 nt, Artificial Sequence
  Synthetic
uguuuucuuuuuuuuuuuuuuu

SEQ ID NO: 425673 - RNA, 23 nt, Artificial Sequence
  Synthetic
uuguuuucuuuuuuuuuuuuuuu

SEQ ID NO: 425674 - RNA, 24 nt, Artificial Sequence
  Synthetic
guuguuuucuuuuuuuuuuuuuuu

SEQ ID NO: 425675 - RNA, 18 nt, Artificial Sequence
  Synthetic
ccuuuuuuuuuuuuuuuu

SEQ ID NO: 425676 - RNA, 19 nt, Artificial Sequence
  Synthetic
uccuuuuuuuuuuuuuuuu

SEQ ID NO: 425677 - RNA, 20 nt, Artificial Sequence
  Synthetic
auccuuuuuuuuuuuuuuuu

SEQ ID NO: 425678 - RNA, 21 nt, Artificial Sequence
  Synthetic
aauccuuuuuuuuuuuuuuuu

SEQ ID NO: 425679 - RNA, 22 nt, Artificial Sequence
  Synthetic
gaauccuuuuuuuuuuuuuuuu

SEQ ID NO: 425680 - RNA, 23 nt, Artificial Sequence
  Synthetic
ugaauccuuuuuuuuuuuuuuuu

SEQ ID NO: 425681 - RNA, 24 nt, Artificial Sequence
  Synthetic
uugaauccuuuuuuuuuuuuuuuu

SEQ ID NO: 425682 - RNA, 20 nt, Artificial Sequence
  Synthetic
uuucuuuuuuuuuuuuuuuu

SEQ ID NO: 425683 - RNA, 21 nt, Artificial Sequence
  Synthetic
cuuucuuuuuuuuuuuuuuuu

SEQ ID NO: 425684 - RNA, 22 nt, Artificial Sequence
  Synthetic
ucuuucuuuuuuuuuuuuuuuu

SEQ ID NO: 425685 - RNA, 23 nt, Artificial Sequence
  Synthetic
uucuuucuuuuuuuuuuuuuuuu

SEQ ID NO: 425686 - RNA, 24 nt, Artificial Sequence
  Synthetic
uuucuuucuuuuuuuuuuuuuuuu

SEQ ID NO: 425687 - RNA, 18 nt, Artificial Sequence
  Synthetic
guuuuuuuuuuuuuuuuu

SEQ ID NO: 425688 - RNA, 19 nt, Artificial Sequence
  Synthetic
uguuuuuuuuuuuuuuuuu

SEQ ID NO: 425689 - RNA, 20 nt, Artificial Sequence
  Synthetic
uuguuuuuuuuuuuuuuuuu

SEQ ID NO: 425690 - RNA, 21 nt, Artificial Sequence
  Synthetic
uuuguuuuuuuuuuuuuuuuu

SEQ ID NO: 425691 - RNA, 22 nt, Artificial Sequence
  Synthetic
uuuuguuuuuuuuuuuuuuuuu

SEQ ID NO: 425692 - RNA, 23 nt, Artificial Sequence
  Synthetic
uuuuuguuuuuuuuuuuuuuuuu

SEQ ID NO: 425693 - RNA, 24 nt, Artificial Sequence
  Synthetic
guuuuuguuuuuuuuuuuuuuuuu

SEQ ID NO: 425694 - RNA, 19 nt, Artificial Sequence
  Synthetic
uuuuuuuuuuuuuuuuuuu

SEQ ID NO: 425695 - RNA, 21 nt, Artificial Sequence
  Synthetic
aauuuuuuuuuuuuuuuuuuu

SEQ ID NO: 425696 - RNA, 22 nt, Artificial Sequence
  Synthetic
caauuuuuuuuuuuuuuuuuuu

SEQ ID NO: 425697 - RNA, 23 nt, Artificial Sequence
  Synthetic
ucaauuuuuuuuuuuuuuuuuuu

SEQ ID NO: 425698 - RNA, 24 nt, Artificial Sequence
  Synthetic
gucaauuuuuuuuuuuuuuuuuuu

SEQ ID NO: 425699 - RNA, 22 nt, Artificial Sequence
  Synthetic
uaauuuuuuuuuuuuuuuuuuu

SEQ ID NO: 425700 - RNA, 23 nt, Artificial Sequence
  Synthetic
uuaauuuuuuuuuuuuuuuuuuu

SEQ ID NO: 425701 - RNA, 24 nt, Artificial Sequence
  Synthetic
cuuaauuuuuuuuuuuuuuuuuuu

SEQ ID NO: 425702 - RNA, 21 nt, Artificial Sequence
  Synthetic
gauuuuuuuuuuuuuuuuuuu

SEQ ID NO: 425703 - RNA, 22 nt, Artificial Sequence
  Synthetic
ugauuuuuuuuuuuuuuuuuuu

SEQ ID NO: 425704 - RNA, 23 nt, Artificial Sequence
  Synthetic
gugauuuuuuuuuuuuuuuuuuu

SEQ ID NO: 425705 - RNA, 24 nt, Artificial Sequence
  Synthetic
agugauuuuuuuuuuuuuuuuuuu

SEQ ID NO: 425706 - RNA, 20 nt, Artificial Sequence
  Synthetic
cuuuuuuuuuuuuuuuuuuu

SEQ ID NO: 425707 - RNA, 21 nt, Artificial Sequence
  Synthetic
ccuuuuuuuuuuuuuuuuuuu

SEQ ID NO: 425708 - RNA, 22 nt, Artificial Sequence
  Synthetic
uccuuuuuuuuuuuuuuuuuuu

SEQ ID NO: 425709 - RNA, 23 nt, Artificial Sequence
  Synthetic
uuccuuuuuuuuuuuuuuuuuuu

SEQ ID NO: 425710 - RNA, 24 nt, Artificial Sequence
  Synthetic
auuccuuuuuuuuuuuuuuuuuuu

SEQ ID NO: 425711 - RNA, 21 nt, Artificial Sequence
  Synthetic
auuuuuuuuuuuuuuuuuuuu

SEQ ID NO: 425712 - RNA, 22 nt, Artificial Sequence
  Synthetic
gauuuuuuuuuuuuuuuuuuuu

SEQ ID NO: 425713 - RNA, 23 nt, Artificial Sequence
  Synthetic
ugauuuuuuuuuuuuuuuuuuuu

SEQ ID NO: 425714 - RNA, 24 nt, Artificial Sequence
  Synthetic
gugauuuuuuuuuuuuuuuuuuuu

SEQ ID NO: 425715 - RNA, 21 nt, Artificial Sequence
  Synthetic
cuuuuuuuuuuuuuuuuuuuu

SEQ ID NO: 425716 - RNA, 22 nt, Artificial Sequence
  Synthetic
acuuuuuuuuuuuuuuuuuuuu

SEQ ID NO: 425717 - RNA, 23 nt, Artificial Sequence
  Synthetic
uacuuuuuuuuuuuuuuuuuuuu

SEQ ID NO: 425718 - RNA, 24 nt, Artificial Sequence
  Synthetic
auacuuuuuuuuuuuuuuuuuuuu

SEQ ID NO: 425719 - RNA, 22 nt, Artificial Sequence
  Synthetic
ucuuuuuuuuuuuuuuuuuuuu

SEQ ID NO: 425720 - RNA, 23 nt, Artificial Sequence
  Synthetic
uucuuuuuuuuuuuuuuuuuuuu

SEQ ID NO: 425721 - RNA, 24 nt, Artificial Sequence
  Synthetic
uuucuuuuuuuuuuuuuuuuuuuu

SEQ ID NO: 425722 - RNA, 21 nt, Artificial Sequence
  Synthetic
uuuuuuuuuuuuuuuuuuuuu

SEQ ID NO: 425723 - RNA, 22 nt, Artificial Sequence
  Synthetic
uuuuuuuuuuuuuuuuuuuuuu

SEQ ID NO: 425724 - RNA, 23 nt, Artificial Sequence
  Synthetic
uuuuuuuuuuuuuuuuuuuuuuu

SEQ ID NO: 425725 - RNA, 24 nt, Artificial Sequence
  Synthetic
cuuuuuuuuuuuuuuuuuuuuuuu

SEQ ID NO: 425726 - RNA, 18 nt, Artificial Sequence
  Synthetic
aaaaaaaaaaaaaaaaaa

SEQ ID NO: 425727 - RNA, 19 nt, Artificial Sequence
  Synthetic
aaaaaaaaaaaaaaaaaaa

SEQ ID NO: 425728 - RNA, 21 nt, Artificial Sequence
  Synthetic
caaaaaaaaaaaaaaaaaaaa

SEQ ID NO: 425729 - RNA, 22 nt, Artificial Sequence
  Synthetic
ccaaaaaaaaaaaaaaaaaaaa

SEQ ID NO: 425730 - RNA, 23 nt, Artificial Sequence
  Synthetic
uccaaaaaaaaaaaaaaaaaaaa

SEQ ID NO: 425731 - RNA, 24 nt, Artificial Sequence
  Synthetic
cuccaaaaaaaaaaaaaaaaaaaa

SEQ ID NO: 425732 - RNA, 20 nt, Artificial Sequence
  Synthetic
caaaaaaaaaaaaaaaaaaa

SEQ ID NO: 425733 - RNA, 21 nt, Artificial Sequence
  Synthetic
ucaaaaaaaaaaaaaaaaaaa

SEQ ID NO: 425734 - RNA, 22 nt, Artificial Sequence
  Synthetic
cucaaaaaaaaaaaaaaaaaaa

SEQ ID NO: 425735 - RNA, 23 nt, Artificial Sequence
  Synthetic
ucucaaaaaaaaaaaaaaaaaaa

SEQ ID NO: 425736 - RNA, 24 nt, Artificial Sequence
  Synthetic
gucucaaaaaaaaaaaaaaaaaaa

SEQ ID NO: 425737 - RNA, 19 nt, Artificial Sequence
  Synthetic
caaaaaaaaaaaaaaaaaa

SEQ ID NO: 425738 - RNA, 20 nt, Artificial Sequence
  Synthetic
ccaaaaaaaaaaaaaaaaaa

SEQ ID NO: 425739 - RNA, 21 nt, Artificial Sequence
  Synthetic
accaaaaaaaaaaaaaaaaaa

SEQ ID NO: 425740 - RNA, 22 nt, Artificial Sequence
  Synthetic
uaccaaaaaaaaaaaaaaaaaa

SEQ ID NO: 425741 - RNA, 23 nt, Artificial Sequence
  Synthetic
cuaccaaaaaaaaaaaaaaaaaa

SEQ ID NO: 425742 - RNA, 24 nt, Artificial Sequence
  Synthetic
ucuaccaaaaaaaaaaaaaaaaaa

SEQ ID NO: 425743 - RNA, 19 nt, Artificial Sequence
  Synthetic
uaaaaaaaaaaaaaaaaaa

SEQ ID NO: 425744 - RNA, 20 nt, Artificial Sequence
  Synthetic
guaaaaaaaaaaaaaaaaaa

SEQ ID NO: 425745 - RNA, 21 nt, Artificial Sequence
  Synthetic
aguaaaaaaaaaaaaaaaaaa

SEQ ID NO: 425746 - RNA, 22 nt, Artificial Sequence
  Synthetic
aaguaaaaaaaaaaaaaaaaaa

SEQ ID NO: 425747 - RNA, 23 nt, Artificial Sequence
  Synthetic
uaaguaaaaaaaaaaaaaaaaaa

SEQ ID NO: 425748 - RNA, 24 nt, Artificial Sequence
  Synthetic
uuaaguaaaaaaaaaaaaaaaaaa

SEQ ID NO: 425749 - RNA, 19 nt, Artificial Sequence
  Synthetic
guaaaaaaaaaaaaaaaaa

SEQ ID NO: 425750 - RNA, 20 nt, Artificial Sequence
  Synthetic
aguaaaaaaaaaaaaaaaaa

SEQ ID NO: 425751 - RNA, 21 nt, Artificial Sequence
  Synthetic
aaguaaaaaaaaaaaaaaaaa

SEQ ID NO: 425752 - RNA, 22 nt, Artificial Sequence
  Synthetic
uaaguaaaaaaaaaaaaaaaaa

SEQ ID NO: 425753 - RNA, 23 nt, Artificial Sequence
  Synthetic
uuaaguaaaaaaaaaaaaaaaaa

SEQ ID NO: 425754 - RNA, 24 nt, Artificial Sequence
  Synthetic
auuaaguaaaaaaaaaaaaaaaaa

SEQ ID NO: 425755 - RNA, 21 nt, Artificial Sequence
  Synthetic
aucucaaaaaaaaaaaaaaaa

SEQ ID NO: 425756 - RNA, 22 nt, Artificial Sequence
  Synthetic
caucucaaaaaaaaaaaaaaaa

SEQ ID NO: 425757 - RNA, 23 nt, Artificial Sequence
  Synthetic
ccaucucaaaaaaaaaaaaaaaa

SEQ ID NO: 425758 - RNA, 24 nt, Artificial Sequence
  Synthetic
uccaucucaaaaaaaaaaaaaaaa

SEQ ID NO: 425759 - RNA, 21 nt, Artificial Sequence
  Synthetic
ugucucaaaaaaaaaaaaaaa

SEQ ID NO: 425760 - RNA, 22 nt, Artificial Sequence
  Synthetic
cugucucaaaaaaaaaaaaaaa

SEQ ID NO: 425761 - RNA, 23 nt, Artificial Sequence
  Synthetic
ucugucucaaaaaaaaaaaaaaa

SEQ ID NO: 425762 - RNA, 24 nt, Artificial Sequence
  Synthetic
cucugucucaaaaaaaaaaaaaaa

SEQ ID NO: 425763 - RNA, 18 nt, Artificial Sequence
  Synthetic
cgggaaaaaaaaaaaaaa

SEQ ID NO: 425764 - RNA, 19 nt, Artificial Sequence
  Synthetic
ucgggaaaaaaaaaaaaaa

SEQ ID NO: 425765 - RNA, 20 nt, Artificial Sequence
  Synthetic
cucgggaaaaaaaaaaaaaa

SEQ ID NO: 425766 - RNA, 21 nt, Artificial Sequence
  Synthetic
ucucgggaaaaaaaaaaaaaa

SEQ ID NO: 425767 - RNA, 22 nt, Artificial Sequence
  Synthetic
aucucgggaaaaaaaaaaaaaa

SEQ ID NO: 425768 - RNA, 23 nt, Artificial Sequence
  Synthetic
caucucgggaaaaaaaaaaaaaa

SEQ ID NO: 425769 - RNA, 24 nt, Artificial Sequence
  Synthetic
ccaucucgggaaaaaaaaaaaaaa

SEQ ID NO: 425770 - RNA, 18 nt, Artificial Sequence
  Synthetic
aucuaaaaaaaaaaaaaa

SEQ ID NO: 425771 - RNA, 19 nt, Artificial Sequence
  Synthetic
caucuaaaaaaaaaaaaaa

SEQ ID NO: 425772 - RNA, 20 nt, Artificial Sequence
  Synthetic
acaucuaaaaaaaaaaaaaa

SEQ ID NO: 425773 - RNA, 21 nt, Artificial Sequence
  Synthetic
uacaucuaaaaaaaaaaaaaa

SEQ ID NO: 425774 - RNA, 22 nt, Artificial Sequence
  Synthetic
auacaucuaaaaaaaaaaaaaa

SEQ ID NO: 425775 - RNA, 23 nt, Artificial Sequence
  Synthetic
cauacaucuaaaaaaaaaaaaaa

SEQ ID NO: 425776 - RNA, 24 nt, Artificial Sequence
  Synthetic
gcauacaucuaaaaaaaaaaaaaa

SEQ ID NO: 425777 - RNA, 18 nt, Artificial Sequence
  Synthetic
cuuuaaaaaaaaaaaaaa

SEQ ID NO: 425778 - RNA, 19 nt, Artificial Sequence
  Synthetic
acuuuaaaaaaaaaaaaaa

SEQ ID NO: 425779 - RNA, 20 nt, Artificial Sequence
  Synthetic
gacuuuaaaaaaaaaaaaaa

SEQ ID NO: 425780 - RNA, 21 nt, Artificial Sequence
  Synthetic
agacuuuaaaaaaaaaaaaaa

SEQ ID NO: 425781 - RNA, 22 nt, Artificial Sequence
  Synthetic
cagacuuuaaaaaaaaaaaaaa

SEQ ID NO: 425782 - RNA, 23 nt, Artificial Sequence
  Synthetic
acagacuuuaaaaaaaaaaaaaa

SEQ ID NO: 425783 - RNA, 24 nt, Artificial Sequence
  Synthetic
uacagacuuuaaaaaaaaaaaaaa

SEQ ID NO: 425784 - RNA, 18 nt, Artificial Sequence
  Synthetic
guaucaaaaaaaaaaaaa

SEQ ID NO: 425785 - RNA, 19 nt, Artificial Sequence
  Synthetic
uguaucaaaaaaaaaaaaa

SEQ ID NO: 425786 - RNA, 20 nt, Artificial Sequence
  Synthetic
cuguaucaaaaaaaaaaaaa

SEQ ID NO: 425787 - RNA, 21 nt, Artificial Sequence
  Synthetic
ucuguaucaaaaaaaaaaaaa

SEQ ID NO: 425788 - RNA, 22 nt, Artificial Sequence
  Synthetic
cucuguaucaaaaaaaaaaaaa

SEQ ID NO: 425789 - RNA, 23 nt, Artificial Sequence
  Synthetic
acucuguaucaaaaaaaaaaaaa

SEQ ID NO: 425790 - RNA, 24 nt, Artificial Sequence
  Synthetic
gacucuguaucaaaaaaaaaaaaa

SEQ ID NO: 425791 - RNA, 18 nt, Artificial Sequence
  Synthetic
acuguaaaaaaaaaaaaa

SEQ ID NO: 425792 - RNA, 19 nt, Artificial Sequence
  Synthetic
aacuguaaaaaaaaaaaaa

SEQ ID NO: 425793 - RNA, 20 nt, Artificial Sequence
  Synthetic
caacuguaaaaaaaaaaaaa

SEQ ID NO: 425794 - RNA, 21 nt, Artificial Sequence
  Synthetic
gcaacuguaaaaaaaaaaaaa

SEQ ID NO: 425795 - RNA, 22 nt, Artificial Sequence
  Synthetic
ugcaacuguaaaaaaaaaaaaa

SEQ ID NO: 425796 - RNA, 23 nt, Artificial Sequence
  Synthetic
augcaacuguaaaaaaaaaaaaa

SEQ ID NO: 425797 - RNA, 24 nt, Artificial Sequence
  Synthetic
uaugcaacuguaaaaaaaaaaaaa

SEQ ID NO: 425798 - RNA, 18 nt, Artificial Sequence
  Synthetic
acuuuaaaaaaaaaaaaa

SEQ ID NO: 425799 - RNA, 19 nt, Artificial Sequence
  Synthetic
gacuuuaaaaaaaaaaaaa

SEQ ID NO: 425800 - RNA, 20 nt, Artificial Sequence
  Synthetic
agacuuuaaaaaaaaaaaaa

SEQ ID NO: 425801 - RNA, 21 nt, Artificial Sequence
  Synthetic
cagacuuuaaaaaaaaaaaaa

SEQ ID NO: 425802 - RNA, 22 nt, Artificial Sequence
  Synthetic
acagacuuuaaaaaaaaaaaaa

SEQ ID NO: 425803 - RNA, 23 nt, Artificial Sequence
  Synthetic
uacagacuuuaaaaaaaaaaaaa

SEQ ID NO: 425804 - RNA, 24 nt, Artificial Sequence
  Synthetic
uuacagacuuuaaaaaaaaaaaaa

SEQ ID NO: 425805 - RNA, 18 nt, Artificial Sequence
  Synthetic
aaaaaagaaaaaaaaaaa

SEQ ID NO: 425806 - RNA, 19 nt, Artificial Sequence
  Synthetic
caaaaaagaaaaaaaaaaa

SEQ ID NO: 425807 - RNA, 20 nt, Artificial Sequence
  Synthetic
ccaaaaaagaaaaaaaaaaa

SEQ ID NO: 425808 - RNA, 21 nt, Artificial Sequence
  Synthetic
uccaaaaaagaaaaaaaaaaa

SEQ ID NO: 425809 - RNA, 22 nt, Artificial Sequence
  Synthetic
cuccaaaaaagaaaaaaaaaaa

SEQ ID NO: 425810 - RNA, 23 nt, Artificial Sequence
  Synthetic
ucuccaaaaaagaaaaaaaaaaa

SEQ ID NO: 425811 - RNA, 24 nt, Artificial Sequence
  Synthetic
gucuccaaaaaagaaaaaaaaaaa

SEQ ID NO: 425812 - RNA, 18 nt, Artificial Sequence
  Synthetic
aaaagugaaaaaaaaaaa

SEQ ID NO: 425813 - RNA, 19 nt, Artificial Sequence
  Synthetic
uaaaagugaaaaaaaaaaa

SEQ ID NO: 425814 - RNA, 20 nt, Artificial Sequence
  Synthetic
auaaaagugaaaaaaaaaaa

SEQ ID NO: 425815 - RNA, 21 nt, Artificial Sequence
  Synthetic
aauaaaagugaaaaaaaaaaa

SEQ ID NO: 425816 - RNA, 22 nt, Artificial Sequence
  Synthetic
aaauaaaagugaaaaaaaaaaa

SEQ ID NO: 425817 - RNA, 23 nt, Artificial Sequence
  Synthetic
aaaauaaaagugaaaaaaaaaaa

SEQ ID NO: 425818 - RNA, 24 nt, Artificial Sequence
  Synthetic
uaaaauaaaagugaaaaaaaaaaa

SEQ ID NO: 425819 - RNA, 18 nt, Artificial Sequence
  Synthetic
cuuuauacaaaaaaaaaa

SEQ ID NO: 425820 - RNA, 19 nt, Artificial Sequence
  Synthetic
ccuuuauacaaaaaaaaaa

SEQ ID NO: 425821 - RNA, 20 nt, Artificial Sequence
  Synthetic
accuuuauacaaaaaaaaaa

SEQ ID NO: 425822 - RNA, 21 nt, Artificial Sequence
  Synthetic
aaccuuuauacaaaaaaaaaa

SEQ ID NO: 425823 - RNA, 22 nt, Artificial Sequence
  Synthetic
caaccuuuauacaaaaaaaaaa

SEQ ID NO: 425824 - RNA, 23 nt, Artificial Sequence
  Synthetic
ucaaccuuuauacaaaaaaaaaa

SEQ ID NO: 425825 - RNA, 24 nt, Artificial Sequence
  Synthetic
uucaaccuuuauacaaaaaaaaaa

SEQ ID NO: 425826 - RNA, 18 nt, Artificial Sequence
  Synthetic
ggaaggagaaaaaaaaaa

SEQ ID NO: 425827 - RNA, 19 nt, Artificial Sequence
  Synthetic
gggaaggagaaaaaaaaaa

SEQ ID NO: 425828 - RNA, 20 nt, Artificial Sequence
  Synthetic
agggaaggagaaaaaaaaaa

SEQ ID NO: 425829 - RNA, 21 nt, Artificial Sequence
  Synthetic
cagggaaggagaaaaaaaaaa

SEQ ID NO: 425830 - RNA, 22 nt, Artificial Sequence
  Synthetic
acagggaaggagaaaaaaaaaa

SEQ ID NO: 425831 - RNA, 23 nt, Artificial Sequence
  Synthetic
aacagggaaggagaaaaaaaaaa

SEQ ID NO: 425832 - RNA, 24 nt, Artificial Sequence
  Synthetic
aaacagggaaggagaaaaaaaaaa

SEQ ID NO: 425833 - RNA, 18 nt, Artificial Sequence
  Synthetic
cguacuuuaaaaaaaaaa

SEQ ID NO: 425834 - RNA, 19 nt, Artificial Sequence
  Synthetic
acguacuuuaaaaaaaaaa

SEQ ID NO: 425835 - RNA, 20 nt, Artificial Sequence
  Synthetic
aacguacuuuaaaaaaaaaa

SEQ ID NO: 425836 - RNA, 21 nt, Artificial Sequence
  Synthetic
aaacguacuuuaaaaaaaaaa

SEQ ID NO: 425837 - RNA, 22 nt, Artificial Sequence
  Synthetic
gaaacguacuuuaaaaaaaaaa

SEQ ID NO: 425838 - RNA, 23 nt, Artificial Sequence
  Synthetic
ugaaacguacuuuaaaaaaaaaa

SEQ ID NO: 425839 - RNA, 24 nt, Artificial Sequence
  Synthetic
uugaaacguacuuuaaaaaaaaaa

SEQ ID NO: 425840 - RNA, 18 nt, Artificial Sequence
  Synthetic
aaacaaaacaaaaaaaaa

SEQ ID NO: 425841 - RNA, 19 nt, Artificial Sequence
  Synthetic
aaaacaaaacaaaaaaaaa

SEQ ID NO: 425842 - RNA, 20 nt, Artificial Sequence
  Synthetic
aaaaacaaaacaaaaaaaaa

SEQ ID NO: 425843 - RNA, 21 nt, Artificial Sequence
  Synthetic
aaaaaacaaaacaaaaaaaaa

SEQ ID NO: 425844 - RNA, 22 nt, Artificial Sequence
  Synthetic
aaaaaaacaaaacaaaaaaaaa

SEQ ID NO: 425845 - RNA, 23 nt, Artificial Sequence
  Synthetic
aaaaaaaacaaaacaaaaaaaaa

SEQ ID NO: 425846 - RNA, 24 nt, Artificial Sequence
  Synthetic
caaaaaaaacaaaacaaaaaaaaa

SEQ ID NO: 425847 - RNA, 18 nt, Artificial Sequence
  Synthetic
uaggggcacaaaaaaaaa

SEQ ID NO: 425848 - RNA, 19 nt, Artificial Sequence
  Synthetic
cuaggggcacaaaaaaaaa

SEQ ID NO: 425849 - RNA, 20 nt, Artificial Sequence
  Synthetic
acuaggggcacaaaaaaaaa

SEQ ID NO: 425850 - RNA, 21 nt, Artificial Sequence
  Synthetic
uacuaggggcacaaaaaaaaa

SEQ ID NO: 425851 - RNA, 22 nt, Artificial Sequence
  Synthetic
cuacuaggggcacaaaaaaaaa

SEQ ID NO: 425852 - RNA, 23 nt, Artificial Sequence
  Synthetic
gcuacuaggggcacaaaaaaaaa

SEQ ID NO: 425853 - RNA, 24 nt, Artificial Sequence
  Synthetic
agcuacuaggggcacaaaaaaaaa

SEQ ID NO: 425854 - RNA, 18 nt, Artificial Sequence
  Synthetic
cucagucucaaaaaaaaa

SEQ ID NO: 425855 - RNA, 19 nt, Artificial Sequence
  Synthetic
acucagucucaaaaaaaaa

SEQ ID NO: 425856 - RNA, 20 nt, Artificial Sequence
  Synthetic
gacucagucucaaaaaaaaa

SEQ ID NO: 425857 - RNA, 21 nt, Artificial Sequence
  Synthetic
agacucagucucaaaaaaaaa

SEQ ID NO: 425858 - RNA, 22 nt, Artificial Sequence
  Synthetic
aagacucagucucaaaaaaaaa

SEQ ID NO: 425859 - RNA, 23 nt, Artificial Sequence
  Synthetic
caagacucagucucaaaaaaaaa

SEQ ID NO: 425860 - RNA, 24 nt, Artificial Sequence
  Synthetic
gcaagacucagucucaaaaaaaaa

SEQ ID NO: 425861 - RNA, 18 nt, Artificial Sequence
  Synthetic
uuaggaaagaaaaaaaaa

SEQ ID NO: 425862 - RNA, 19 nt, Artificial Sequence
  Synthetic
auuaggaaagaaaaaaaaa

SEQ ID NO: 425863 - RNA, 20 nt, Artificial Sequence
  Synthetic
aauuaggaaagaaaaaaaaa

SEQ ID NO: 425864 - RNA, 21 nt, Artificial Sequence
  Synthetic
aaauuaggaaagaaaaaaaaa

SEQ ID NO: 425865 - RNA, 22 nt, Artificial Sequence
  Synthetic
aaaauuaggaaagaaaaaaaaa

SEQ ID NO: 425866 - RNA, 23 nt, Artificial Sequence
  Synthetic
uaaaauuaggaaagaaaaaaaaa

SEQ ID NO: 425867 - RNA, 24 nt, Artificial Sequence
  Synthetic
auaaaauuaggaaagaaaaaaaaa

SEQ ID NO: 425868 - RNA, 18 nt, Artificial Sequence
  Synthetic
gggaaggagaaaaaaaaa

SEQ ID NO: 425869 - RNA, 19 nt, Artificial Sequence
  Synthetic
agggaaggagaaaaaaaaa

SEQ ID NO: 425870 - RNA, 20 nt, Artificial Sequence
  Synthetic
cagggaaggagaaaaaaaaa

SEQ ID NO: 425871 - RNA, 21 nt, Artificial Sequence
  Synthetic
acagggaaggagaaaaaaaaa

SEQ ID NO: 425872 - RNA, 22 nt, Artificial Sequence
  Synthetic
aacagggaaggagaaaaaaaaa

SEQ ID NO: 425873 - RNA, 23 nt, Artificial Sequence
  Synthetic
aaacagggaaggagaaaaaaaaa

SEQ ID NO: 425874 - RNA, 24 nt, Artificial Sequence
  Synthetic
gaaacagggaaggagaaaaaaaaa

SEQ ID NO: 425875 - RNA, 18 nt, Artificial Sequence
  Synthetic
ugcucaauuaaaaaaaaa

SEQ ID NO: 425876 - RNA, 19 nt, Artificial Sequence
  Synthetic
cugcucaauuaaaaaaaaa

SEQ ID NO: 425877 - RNA, 20 nt, Artificial Sequence
  Synthetic
acugcucaauuaaaaaaaaa

SEQ ID NO: 425878 - RNA, 21 nt, Artificial Sequence
  Synthetic
aacugcucaauuaaaaaaaaa

SEQ ID NO: 425879 - RNA, 22 nt, Artificial Sequence
  Synthetic
uaacugcucaauuaaaaaaaaa

SEQ ID NO: 425880 - RNA, 23 nt, Artificial Sequence
  Synthetic
uuaacugcucaauuaaaaaaaaa

SEQ ID NO: 425881 - RNA, 24 nt, Artificial Sequence
  Synthetic
auuaacugcucaauuaaaaaaaaa

SEQ ID NO: 425882 - RNA, 18 nt, Artificial Sequence
  Synthetic
aguauaauuaaaaaaaaa

SEQ ID NO: 425883 - RNA, 19 nt, Artificial Sequence
  Synthetic
aaguauaauuaaaaaaaaa

SEQ ID NO: 425884 - RNA, 20 nt, Artificial Sequence
  Synthetic
uaaguauaauuaaaaaaaaa

SEQ ID NO: 425885 - RNA, 21 nt, Artificial Sequence
  Synthetic
uuaaguauaauuaaaaaaaaa

SEQ ID NO: 425886 - RNA, 22 nt, Artificial Sequence
  Synthetic
cuuaaguauaauuaaaaaaaaa

SEQ ID NO: 425887 - RNA, 23 nt, Artificial Sequence
  Synthetic
acuuaaguauaauuaaaaaaaaa

SEQ ID NO: 425888 - RNA, 24 nt, Artificial Sequence
  Synthetic
aacuuaaguauaauuaaaaaaaaa

SEQ ID NO: 425889 - RNA, 18 nt, Artificial Sequence
  Synthetic
cccugucuccaaaaaaaa

SEQ ID NO: 425890 - RNA, 19 nt, Artificial Sequence
  Synthetic
acccugucuccaaaaaaaa

SEQ ID NO: 425891 - RNA, 20 nt, Artificial Sequence
  Synthetic
gacccugucuccaaaaaaaa

SEQ ID NO: 425892 - RNA, 21 nt, Artificial Sequence
  Synthetic
ugacccugucuccaaaaaaaa

SEQ ID NO: 425893 - RNA, 22 nt, Artificial Sequence
  Synthetic
augacccugucuccaaaaaaaa

SEQ ID NO: 425894 - RNA, 23 nt, Artificial Sequence
  Synthetic
uaugacccugucuccaaaaaaaa

SEQ ID NO: 425895 - RNA, 24 nt, Artificial Sequence
  Synthetic
guaugacccugucuccaaaaaaaa

SEQ ID NO: 425896 - RNA, 18 nt, Artificial Sequence
  Synthetic
auuaggaaagaaaaaaaa

SEQ ID NO: 425897 - RNA, 19 nt, Artificial Sequence
  Synthetic
aauuaggaaagaaaaaaaa

SEQ ID NO: 425898 - RNA, 20 nt, Artificial Sequence
  Synthetic
aaauuaggaaagaaaaaaaa

SEQ ID NO: 425899 - RNA, 21 nt, Artificial Sequence
  Synthetic
aaaauuaggaaagaaaaaaaa

SEQ ID NO: 425900 - RNA, 22 nt, Artificial Sequence
  Synthetic
uaaaauuaggaaagaaaaaaaa

SEQ ID NO: 425901 - RNA, 23 nt, Artificial Sequence
  Synthetic
auaaaauuaggaaagaaaaaaaa

SEQ ID NO: 425902 - RNA, 24 nt, Artificial Sequence
  Synthetic
cauaaaauuaggaaagaaaaaaaa

SEQ ID NO: 425903 - RNA, 18 nt, Artificial Sequence
  Synthetic
agaaagauagaaaaaaaa

SEQ ID NO: 425904 - RNA, 19 nt, Artificial Sequence
  Synthetic
aagaaagauagaaaaaaaa

SEQ ID NO: 425905 - RNA, 20 nt, Artificial Sequence
  Synthetic
aaagaaagauagaaaaaaaa

SEQ ID NO: 425906 - RNA, 21 nt, Artificial Sequence
  Synthetic
gaaagaaagauagaaaaaaaa

SEQ ID NO: 425907 - RNA, 22 nt, Artificial Sequence
  Synthetic
agaaagaaagauagaaaaaaaa

SEQ ID NO: 425908 - RNA, 23 nt, Artificial Sequence
  Synthetic
aagaaagaaagauagaaaaaaaa

SEQ ID NO: 425909 - RNA, 24 nt, Artificial Sequence
  Synthetic
aaagaaagaaagauagaaaaaaaa

SEQ ID NO: 425910 - RNA, 18 nt, Artificial Sequence
  Synthetic
uaguaaaaggaaaaaaaa

SEQ ID NO: 425911 - RNA, 19 nt, Artificial Sequence
  Synthetic
auaguaaaaggaaaaaaaa

SEQ ID NO: 425912 - RNA, 20 nt, Artificial Sequence
  Synthetic
cauaguaaaaggaaaaaaaa

SEQ ID NO: 425913 - RNA, 21 nt, Artificial Sequence
  Synthetic
ccauaguaaaaggaaaaaaaa

SEQ ID NO: 425914 - RNA, 22 nt, Artificial Sequence
  Synthetic
cccauaguaaaaggaaaaaaaa

SEQ ID NO: 425915 - RNA, 23 nt, Artificial Sequence
  Synthetic
ucccauaguaaaaggaaaaaaaa

SEQ ID NO: 425916 - RNA, 24 nt, Artificial Sequence
  Synthetic
uucccauaguaaaaggaaaaaaaa

SEQ ID NO: 425917 - RNA, 18 nt, Artificial Sequence
  Synthetic
aacagaaauuaaaaaaaa

SEQ ID NO: 425918 - RNA, 19 nt, Artificial Sequence
  Synthetic
gaacagaaauuaaaaaaaa

SEQ ID NO: 425919 - RNA, 20 nt, Artificial Sequence
  Synthetic
agaacagaaauuaaaaaaaa

SEQ ID NO: 425920 - RNA, 21 nt, Artificial Sequence
  Synthetic
gagaacagaaauuaaaaaaaa

SEQ ID NO: 425921 - RNA, 22 nt, Artificial Sequence
  Synthetic
agagaacagaaauuaaaaaaaa

SEQ ID NO: 425922 - RNA, 23 nt, Artificial Sequence
  Synthetic
aagagaacagaaauuaaaaaaaa

SEQ ID NO: 425923 - RNA, 24 nt, Artificial Sequence
  Synthetic
aaagagaacagaaauuaaaaaaaa

SEQ ID NO: 425924 - RNA, 18 nt, Artificial Sequence
  Synthetic
auguucaauuaaaaaaaa

SEQ ID NO: 425925 - RNA, 19 nt, Artificial Sequence
  Synthetic
uauguucaauuaaaaaaaa

SEQ ID NO: 425926 - RNA, 20 nt, Artificial Sequence
  Synthetic
guauguucaauuaaaaaaaa

SEQ ID NO: 425927 - RNA, 21 nt, Artificial Sequence
  Synthetic
uguauguucaauuaaaaaaaa

SEQ ID NO: 425928 - RNA, 22 nt, Artificial Sequence
  Synthetic
guguauguucaauuaaaaaaaa

SEQ ID NO: 425929 - RNA, 23 nt, Artificial Sequence
  Synthetic
uguguauguucaauuaaaaaaaa

SEQ ID NO: 425930 - RNA, 24 nt, Artificial Sequence
  Synthetic
auguguauguucaauuaaaaaaaa

SEQ ID NO: 425931 - RNA, 18 nt, Artificial Sequence
  Synthetic
uaagaauauuaaaaaaaa

SEQ ID NO: 425932 - RNA, 19 nt, Artificial Sequence
  Synthetic
cuaagaauauuaaaaaaaa

SEQ ID NO: 425933 - RNA, 20 nt, Artificial Sequence
  Synthetic
ucuaagaauauuaaaaaaaa

SEQ ID NO: 425934 - RNA, 21 nt, Artificial Sequence
  Synthetic
uucuaagaauauuaaaaaaaa

SEQ ID NO: 425935 - RNA, 22 nt, Artificial Sequence
  Synthetic
auucuaagaauauuaaaaaaaa

SEQ ID NO: 425936 - RNA, 23 nt, Artificial Sequence
  Synthetic
gauucuaagaauauuaaaaaaaa

SEQ ID NO: 425937 - RNA, 24 nt, Artificial Sequence
  Synthetic
cgauucuaagaauauuaaaaaaaa

SEQ ID NO: 425938 - RNA, 18 nt, Artificial Sequence
  Synthetic
caaaacaaaacaaaaaaa

SEQ ID NO: 425939 - RNA, 19 nt, Artificial Sequence
  Synthetic
acaaaacaaaacaaaaaaa

SEQ ID NO: 425940 - RNA, 20 nt, Artificial Sequence
  Synthetic
aacaaaacaaaacaaaaaaa

SEQ ID NO: 425941 - RNA, 21 nt, Artificial Sequence
  Synthetic
aaacaaaacaaaacaaaaaaa

SEQ ID NO: 425942 - RNA, 22 nt, Artificial Sequence
  Synthetic
aaaacaaaacaaaacaaaaaaa

SEQ ID NO: 425943 - RNA, 23 nt, Artificial Sequence
  Synthetic
caaaacaaaacaaaacaaaaaaa

SEQ ID NO: 425944 - RNA, 24 nt, Artificial Sequence
  Synthetic
acaaaacaaaacaaaacaaaaaaa

SEQ ID NO: 425945 - RNA, 18 nt, Artificial Sequence
  Synthetic
uaauugaaaacaaaaaaa

SEQ ID NO: 425946 - RNA, 19 nt, Artificial Sequence
  Synthetic
guaauugaaaacaaaaaaa

SEQ ID NO: 425947 - RNA, 20 nt, Artificial Sequence
  Synthetic
aguaauugaaaacaaaaaaa

SEQ ID NO: 425948 - RNA, 21 nt, Artificial Sequence
  Synthetic
caguaauugaaaacaaaaaaa

SEQ ID NO: 425949 - RNA, 22 nt, Artificial Sequence
  Synthetic
ucaguaauugaaaacaaaaaaa

SEQ ID NO: 425950 - RNA, 23 nt, Artificial Sequence
  Synthetic
uucaguaauugaaaacaaaaaaa

SEQ ID NO: 425951 - RNA, 24 nt, Artificial Sequence
  Synthetic
uuucaguaauugaaaacaaaaaaa

SEQ ID NO: 425952 - RNA, 18 nt, Artificial Sequence
  Synthetic
uacugucacacaaaaaaa

SEQ ID NO: 425953 - RNA, 19 nt, Artificial Sequence
  Synthetic
uuacugucacacaaaaaaa

SEQ ID NO: 425954 - RNA, 20 nt, Artificial Sequence
  Synthetic
guuacugucacacaaaaaaa

SEQ ID NO: 425955 - RNA, 21 nt, Artificial Sequence
  Synthetic
uguuacugucacacaaaaaaa

SEQ ID NO: 425956 - RNA, 22 nt, Artificial Sequence
  Synthetic
auguuacugucacacaaaaaaa

SEQ ID NO: 425957 - RNA, 23 nt, Artificial Sequence
  Synthetic
aauguuacugucacacaaaaaaa

SEQ ID NO: 425958 - RNA, 24 nt, Artificial Sequence
  Synthetic
uaauguuacugucacacaaaaaaa

SEQ ID NO: 425959 - RNA, 18 nt, Artificial Sequence
  Synthetic
acccugucuccaaaaaaa

SEQ ID NO: 425960 - RNA, 19 nt, Artificial Sequence
  Synthetic
gacccugucuccaaaaaaa

SEQ ID NO: 425961 - RNA, 20 nt, Artificial Sequence
  Synthetic
ugacccugucuccaaaaaaa

SEQ ID NO: 425962 - RNA, 21 nt, Artificial Sequence
  Synthetic
augacccugucuccaaaaaaa

SEQ ID NO: 425963 - RNA, 22 nt, Artificial Sequence
  Synthetic
uaugacccugucuccaaaaaaa

SEQ ID NO: 425964 - RNA, 23 nt, Artificial Sequence
  Synthetic
guaugacccugucuccaaaaaaa

SEQ ID NO: 425965 - RNA, 24 nt, Artificial Sequence
  Synthetic
gguaugacccugucuccaaaaaaa

SEQ ID NO: 425966 - RNA, 18 nt, Artificial Sequence
  Synthetic
auaaccccaucaaaaaaa

SEQ ID NO: 425967 - RNA, 19 nt, Artificial Sequence
  Synthetic
aauaaccccaucaaaaaaa

SEQ ID NO: 425968 - RNA, 20 nt, Artificial Sequence
  Synthetic
aaauaaccccaucaaaaaaa

SEQ ID NO: 425969 - RNA, 21 nt, Artificial Sequence
  Synthetic
caaauaaccccaucaaaaaaa

SEQ ID NO: 425970 - RNA, 22 nt, Artificial Sequence
  Synthetic
acaaauaaccccaucaaaaaaa

SEQ ID NO: 425971 - RNA, 23 nt, Artificial Sequence
  Synthetic
aacaaauaaccccaucaaaaaaa

SEQ ID NO: 425972 - RNA, 24 nt, Artificial Sequence
  Synthetic
aaacaaauaaccccaucaaaaaaa

SEQ ID NO: 425973 - RNA, 18 nt, Artificial Sequence
  Synthetic
gacucagucucaaaaaaa

SEQ ID NO: 425974 - RNA, 19 nt, Artificial Sequence
  Synthetic
agacucagucucaaaaaaa

SEQ ID NO: 425975 - RNA, 20 nt, Artificial Sequence
  Synthetic
aagacucagucucaaaaaaa

SEQ ID NO: 425976 - RNA, 21 nt, Artificial Sequence
  Synthetic
caagacucagucucaaaaaaa

SEQ ID NO: 425977 - RNA, 22 nt, Artificial Sequence
  Synthetic
gcaagacucagucucaaaaaaa

SEQ ID NO: 425978 - RNA, 23 nt, Artificial Sequence
  Synthetic
agcaagacucagucucaaaaaaa

SEQ ID NO: 425979 - RNA, 24 nt, Artificial Sequence
  Synthetic
gagcaagacucagucucaaaaaaa

SEQ ID NO: 425980 - RNA, 18 nt, Artificial Sequence
  Synthetic
aauuaggaaagaaaaaaa

SEQ ID NO: 425981 - RNA, 19 nt, Artificial Sequence
  Synthetic
aaauuaggaaagaaaaaaa

SEQ ID NO: 425982 - RNA, 20 nt, Artificial Sequence
  Synthetic
aaaauuaggaaagaaaaaaa

SEQ ID NO: 425983 - RNA, 21 nt, Artificial Sequence
  Synthetic
uaaaauuaggaaagaaaaaaa

SEQ ID NO: 425984 - RNA, 22 nt, Artificial Sequence
  Synthetic
auaaaauuaggaaagaaaaaaa

SEQ ID NO: 425985 - RNA, 23 nt, Artificial Sequence
  Synthetic
cauaaaauuaggaaagaaaaaaa

SEQ ID NO: 425986 - RNA, 24 nt, Artificial Sequence
  Synthetic
ucauaaaauuaggaaagaaaaaaa

SEQ ID NO: 425987 - RNA, 18 nt, Artificial Sequence
  Synthetic
gacuaauaaagaaaaaaa

SEQ ID NO: 425988 - RNA, 19 nt, Artificial Sequence
  Synthetic
agacuaauaaagaaaaaaa

SEQ ID NO: 425989 - RNA, 20 nt, Artificial Sequence
  Synthetic
aagacuaauaaagaaaaaaa

SEQ ID NO: 425990 - RNA, 21 nt, Artificial Sequence
  Synthetic
caagacuaauaaagaaaaaaa

SEQ ID NO: 425991 - RNA, 22 nt, Artificial Sequence
  Synthetic
gcaagacuaauaaagaaaaaaa

SEQ ID NO: 425992 - RNA, 23 nt, Artificial Sequence
  Synthetic
agcaagacuaauaaagaaaaaaa

SEQ ID NO: 425993 - RNA, 24 nt, Artificial Sequence
  Synthetic
uagcaagacuaauaaagaaaaaaa

SEQ ID NO: 425994 - RNA, 18 nt, Artificial Sequence
  Synthetic
gauuaaccaagaaaaaaa

SEQ ID NO: 425995 - RNA, 19 nt, Artificial Sequence
  Synthetic
agauuaaccaagaaaaaaa

SEQ ID NO: 425996 - RNA, 20 nt, Artificial Sequence
  Synthetic
uagauuaaccaagaaaaaaa

SEQ ID NO: 425997 - RNA, 21 nt, Artificial Sequence
  Synthetic
uuagauuaaccaagaaaaaaa

SEQ ID NO: 425998 - RNA, 22 nt, Artificial Sequence
  Synthetic
guuagauuaaccaagaaaaaaa

SEQ ID NO: 425999 - RNA, 23 nt, Artificial Sequence
  Synthetic
aguuagauuaaccaagaaaaaaa

SEQ ID NO: 426000 - RNA, 24 nt, Artificial Sequence
  Synthetic
uaguuagauuaaccaagaaaaaaa

SEQ ID NO: 426001 - RNA, 18 nt, Artificial Sequence
  Synthetic
cgaacuugcagaaaaaaa

SEQ ID NO: 426002 - RNA, 19 nt, Artificial Sequence
  Synthetic
gcgaacuugcagaaaaaaa

SEQ ID NO: 426003 - RNA, 20 nt, Artificial Sequence
  Synthetic
agcgaacuugcagaaaaaaa

SEQ ID NO: 426004 - RNA, 21 nt, Artificial Sequence
  Synthetic
cagcgaacuugcagaaaaaaa

SEQ ID NO: 426005 - RNA, 22 nt, Artificial Sequence
  Synthetic
gcagcgaacuugcagaaaaaaa

SEQ ID NO: 426006 - RNA, 23 nt, Artificial Sequence
  Synthetic
agcagcgaacuugcagaaaaaaa

SEQ ID NO: 426007 - RNA, 24 nt, Artificial Sequence
  Synthetic
aagcagcgaacuugcagaaaaaaa

SEQ ID NO: 426008 - RNA, 18 nt, Artificial Sequence
  Synthetic
ggagggaggggaaaaaaa

SEQ ID NO: 426009 - RNA, 19 nt, Artificial Sequence
  Synthetic
gggagggaggggaaaaaaa

SEQ ID NO: 426010 - RNA, 20 nt, Artificial Sequence
  Synthetic
agggagggaggggaaaaaaa

SEQ ID NO: 426011 - RNA, 21 nt, Artificial Sequence
  Synthetic
gagggagggaggggaaaaaaa

SEQ ID NO: 426012 - RNA, 22 nt, Artificial Sequence
  Synthetic
agagggagggaggggaaaaaaa

SEQ ID NO: 426013 - RNA, 23 nt, Artificial Sequence
  Synthetic
aagagggagggaggggaaaaaaa

SEQ ID NO: 426014 - RNA, 24 nt, Artificial Sequence
  Synthetic
aaagagggagggaggggaaaaaaa

SEQ ID NO: 426015 - RNA, 18 nt, Artificial Sequence
  Synthetic
gagugagugggaaaaaaa

SEQ ID NO: 426016 - RNA, 19 nt, Artificial Sequence
  Synthetic
ggagugagugggaaaaaaa

SEQ ID NO: 426017 - RNA, 20 nt, Artificial Sequence
  Synthetic
uggagugagugggaaaaaaa

SEQ ID NO: 426018 - RNA, 21 nt, Artificial Sequence
  Synthetic
auggagugagugggaaaaaaa

SEQ ID NO: 426019 - RNA, 22 nt, Artificial Sequence
  Synthetic
aauggagugagugggaaaaaaa

SEQ ID NO: 426020 - RNA, 23 nt, Artificial Sequence
  Synthetic
aaauggagugagugggaaaaaaa

SEQ ID NO: 426021 - RNA, 24 nt, Artificial Sequence
  Synthetic
aaaauggagugagugggaaaaaaa

SEQ ID NO: 426022 - RNA, 18 nt, Artificial Sequence
  Synthetic
ucguaagacugaaaaaaa

SEQ ID NO: 426023 - RNA, 19 nt, Artificial Sequence
  Synthetic
uucguaagacugaaaaaaa

SEQ ID NO: 426024 - RNA, 20 nt, Artificial Sequence
  Synthetic
auucguaagacugaaaaaaa

SEQ ID NO: 426025 - RNA, 21 nt, Artificial Sequence
  Synthetic
cauucguaagacugaaaaaaa

SEQ ID NO: 426026 - RNA, 22 nt, Artificial Sequence
  Synthetic
ucauucguaagacugaaaaaaa

SEQ ID NO: 426027 - RNA, 23 nt, Artificial Sequence
  Synthetic
cucauucguaagacugaaaaaaa

SEQ ID NO: 426028 - RNA, 24 nt, Artificial Sequence
  Synthetic
ucucauucguaagacugaaaaaaa

SEQ ID NO: 426029 - RNA, 18 nt, Artificial Sequence
  Synthetic
uaaaauaaaauaaaaaaa

SEQ ID NO: 426030 - RNA, 19 nt, Artificial Sequence
  Synthetic
auaaaauaaaauaaaaaaa

SEQ ID NO: 426031 - RNA, 20 nt, Artificial Sequence
  Synthetic
aauaaaauaaaauaaaaaaa

SEQ ID NO: 426032 - RNA, 21 nt, Artificial Sequence
  Synthetic
aaauaaaauaaaauaaaaaaa

SEQ ID NO: 426033 - RNA, 22 nt, Artificial Sequence
  Synthetic
aaaauaaaauaaaauaaaaaaa

SEQ ID NO: 426034 - RNA, 23 nt, Artificial Sequence
  Synthetic
uaaaauaaaauaaaauaaaaaaa

SEQ ID NO: 426035 - RNA, 24 nt, Artificial Sequence
  Synthetic
auaaaauaaaauaaaauaaaaaaa

SEQ ID NO: 426036 - RNA, 18 nt, Artificial Sequence
  Synthetic
gggagcaagauaaaaaaa

SEQ ID NO: 426037 - RNA, 19 nt, Artificial Sequence
  Synthetic
agggagcaagauaaaaaaa

SEQ ID NO: 426038 - RNA, 20 nt, Artificial Sequence
  Synthetic
uagggagcaagauaaaaaaa

SEQ ID NO: 426039 - RNA, 21 nt, Artificial Sequence
  Synthetic
cuagggagcaagauaaaaaaa

SEQ ID NO: 426040 - RNA, 22 nt, Artificial Sequence
  Synthetic
acuagggagcaagauaaaaaaa

SEQ ID NO: 426041 - RNA, 23 nt, Artificial Sequence
  Synthetic
aacuagggagcaagauaaaaaaa

SEQ ID NO: 426042 - RNA, 24 nt, Artificial Sequence
  Synthetic
aaacuagggagcaagauaaaaaaa

SEQ ID NO: 426043 - RNA, 18 nt, Artificial Sequence
  Synthetic
ccauaaauuauaaaaaaa

SEQ ID NO: 426044 - RNA, 19 nt, Artificial Sequence
  Synthetic
gccauaaauuauaaaaaaa

SEQ ID NO: 426045 - RNA, 20 nt, Artificial Sequence
  Synthetic
agccauaaauuauaaaaaaa

SEQ ID NO: 426046 - RNA, 21 nt, Artificial Sequence
  Synthetic
cagccauaaauuauaaaaaaa

SEQ ID NO: 426047 - RNA, 22 nt, Artificial Sequence
  Synthetic
acagccauaaauuauaaaaaaa

SEQ ID NO: 426048 - RNA, 23 nt, Artificial Sequence
  Synthetic
aacagccauaaauuauaaaaaaa

SEQ ID NO: 426049 - RNA, 24 nt, Artificial Sequence
  Synthetic
caacagccauaaauuauaaaaaaa

SEQ ID NO: 426050 - RNA, 18 nt, Artificial Sequence
  Synthetic
cagagacuacuaaaaaaa

SEQ ID NO: 426051 - RNA, 19 nt, Artificial Sequence
  Synthetic
acagagacuacuaaaaaaa

SEQ ID NO: 426052 - RNA, 20 nt, Artificial Sequence
  Synthetic
uacagagacuacuaaaaaaa

SEQ ID NO: 426053 - RNA, 21 nt, Artificial Sequence
  Synthetic
cuacagagacuacuaaaaaaa

SEQ ID NO: 426054 - RNA, 22 nt, Artificial Sequence
  Synthetic
ccuacagagacuacuaaaaaaa

SEQ ID NO: 426055 - RNA, 23 nt, Artificial Sequence
  Synthetic
accuacagagacuacuaaaaaaa

SEQ ID NO: 426056 - RNA, 24 nt, Artificial Sequence
  Synthetic
aaccuacagagacuacuaaaaaaa

SEQ ID NO: 426057 - RNA, 18 nt, Artificial Sequence
  Synthetic
auguuacauguaaaaaaa

SEQ ID NO: 426058 - RNA, 19 nt, Artificial Sequence
  Synthetic
aauguuacauguaaaaaaa

SEQ ID NO: 426059 - RNA, 20 nt, Artificial Sequence
  Synthetic
aaauguuacauguaaaaaaa

SEQ ID NO: 426060 - RNA, 21 nt, Artificial Sequence
  Synthetic
gaaauguuacauguaaaaaaa

SEQ ID NO: 426061 - RNA, 22 nt, Artificial Sequence
  Synthetic
ugaaauguuacauguaaaaaaa

SEQ ID NO: 426062 - RNA, 23 nt, Artificial Sequence
  Synthetic
augaaauguuacauguaaaaaaa

SEQ ID NO: 426063 - RNA, 24 nt, Artificial Sequence
  Synthetic
aaugaaauguuacauguaaaaaaa

SEQ ID NO: 426064 - RNA, 18 nt, Artificial Sequence
  Synthetic
aaaaaaaaauuaaaaaaa

SEQ ID NO: 426065 - RNA, 19 nt, Artificial Sequence
  Synthetic
aaaaaaaaaauuaaaaaaa

SEQ ID NO: 426066 - RNA, 20 nt, Artificial Sequence
  Synthetic
aaaaaaaaaaauuaaaaaaa

SEQ ID NO: 426067 - RNA, 21 nt, Artificial Sequence
  Synthetic
aaaaaaaaaaaauuaaaaaaa

SEQ ID NO: 426068 - RNA, 22 nt, Artificial Sequence
  Synthetic
aaaaaaaaaaaaauuaaaaaaa

SEQ ID NO: 426069 - RNA, 23 nt, Artificial Sequence
  Synthetic
caaaaaaaaaaaaauuaaaaaaa

SEQ ID NO: 426070 - RNA, 24 nt, Artificial Sequence
  Synthetic
ucaaaaaaaaaaaaauuaaaaaaa

SEQ ID NO: 426071 - RNA, 18 nt, Artificial Sequence
  Synthetic
gaacagaaauuaaaaaaa

SEQ ID NO: 426072 - RNA, 19 nt, Artificial Sequence
  Synthetic
agaacagaaauuaaaaaaa

SEQ ID NO: 426073 - RNA, 20 nt, Artificial Sequence
  Synthetic
gagaacagaaauuaaaaaaa

SEQ ID NO: 426074 - RNA, 21 nt, Artificial Sequence
  Synthetic
agagaacagaaauuaaaaaaa

SEQ ID NO: 426075 - RNA, 22 nt, Artificial Sequence
  Synthetic
aagagaacagaaauuaaaaaaa

SEQ ID NO: 426076 - RNA, 23 nt, Artificial Sequence
  Synthetic
aaagagaacagaaauuaaaaaaa

SEQ ID NO: 426077 - RNA, 24 nt, Artificial Sequence
  Synthetic
aaaagagaacagaaauuaaaaaaa

SEQ ID NO: 426078 - RNA, 18 nt, Artificial Sequence
  Synthetic
uggcaguacuuaaaaaaa

SEQ ID NO: 426079 - RNA, 19 nt, Artificial Sequence
  Synthetic
uuggcaguacuuaaaaaaa

SEQ ID NO: 426080 - RNA, 20 nt, Artificial Sequence
  Synthetic
cuuggcaguacuuaaaaaaa

SEQ ID NO: 426081 - RNA, 21 nt, Artificial Sequence
  Synthetic
ccuuggcaguacuuaaaaaaa

SEQ ID NO: 426082 - RNA, 22 nt, Artificial Sequence
  Synthetic
uccuuggcaguacuuaaaaaaa

SEQ ID NO: 426083 - RNA, 23 nt, Artificial Sequence
  Synthetic
uuccuuggcaguacuuaaaaaaa

SEQ ID NO: 426084 - RNA, 24 nt, Artificial Sequence
  Synthetic
auuccuuggcaguacuuaaaaaaa

SEQ ID NO: 426085 - RNA, 18 nt, Artificial Sequence
  Synthetic
acuguaaucuuaaaaaaa

SEQ ID NO: 426086 - RNA, 19 nt, Artificial Sequence
  Synthetic
cacuguaaucuuaaaaaaa

SEQ ID NO: 426087 - RNA, 20 nt, Artificial Sequence
  Synthetic
gcacuguaaucuuaaaaaaa

SEQ ID NO: 426088 - RNA, 21 nt, Artificial Sequence
  Synthetic
agcacuguaaucuuaaaaaaa

SEQ ID NO: 426089 - RNA, 22 nt, Artificial Sequence
  Synthetic
cagcacuguaaucuuaaaaaaa

SEQ ID NO: 426090 - RNA, 23 nt, Artificial Sequence
  Synthetic
ucagcacuguaaucuuaaaaaaa

SEQ ID NO: 426091 - RNA, 24 nt, Artificial Sequence
  Synthetic
aucagcacuguaaucuuaaaaaaa

SEQ ID NO: 426092 - RNA, 18 nt, Artificial Sequence
  Synthetic
aaaacaagaaacaaaaaa

SEQ ID NO: 426093 - RNA, 19 nt, Artificial Sequence
  Synthetic
aaaaacaagaaacaaaaaa

SEQ ID NO: 426094 - RNA, 20 nt, Artificial Sequence
  Synthetic
aaaaaacaagaaacaaaaaa

SEQ ID NO: 426095 - RNA, 21 nt, Artificial Sequence
  Synthetic
aaaaaaacaagaaacaaaaaa

SEQ ID NO: 426096 - RNA, 22 nt, Artificial Sequence
  Synthetic
aaaaaaaacaagaaacaaaaaa

SEQ ID NO: 426097 - RNA, 23 nt, Artificial Sequence
  Synthetic
aaaaaaaaacaagaaacaaaaaa

SEQ ID NO: 426098 - RNA, 24 nt, Artificial Sequence
  Synthetic
aaaaaaaaaacaagaaacaaaaaa

SEQ ID NO: 426099 - RNA, 18 nt, Artificial Sequence
  Synthetic
uauauuaccaacaaaaaa

SEQ ID NO: 426100 - RNA, 19 nt, Artificial Sequence
  Synthetic
uuauauuaccaacaaaaaa

SEQ ID NO: 426101 - RNA, 20 nt, Artificial Sequence
  Synthetic
auuauauuaccaacaaaaaa

SEQ ID NO: 426102 - RNA, 21 nt, Artificial Sequence
  Synthetic
aauuauauuaccaacaaaaaa

SEQ ID NO: 426103 - RNA, 22 nt, Artificial Sequence
  Synthetic
gaauuauauuaccaacaaaaaa

SEQ ID NO: 426104 - RNA, 23 nt, Artificial Sequence
  Synthetic
agaauuauauuaccaacaaaaaa

SEQ ID NO: 426105 - RNA, 24 nt, Artificial Sequence
  Synthetic
aagaauuauauuaccaacaaaaaa

SEQ ID NO: 426106 - RNA, 18 nt, Artificial Sequence
  Synthetic
uuaaaaaugaacaaaaaa

SEQ ID NO: 426107 - RNA, 19 nt, Artificial Sequence
  Synthetic
auuaaaaaugaacaaaaaa

SEQ ID NO: 426108 - RNA, 20 nt, Artificial Sequence
  Synthetic
cauuaaaaaugaacaaaaaa

SEQ ID NO: 426109 - RNA, 21 nt, Artificial Sequence
  Synthetic
ccauuaaaaaugaacaaaaaa

SEQ ID NO: 426110 - RNA, 22 nt, Artificial Sequence
  Synthetic
cccauuaaaaaugaacaaaaaa

SEQ ID NO: 426111 - RNA, 23 nt, Artificial Sequence
  Synthetic
ucccauuaaaaaugaacaaaaaa

SEQ ID NO: 426112 - RNA, 24 nt, Artificial Sequence
  Synthetic
uucccauuaaaaaugaacaaaaaa

SEQ ID NO: 426113 - RNA, 18 nt, Artificial Sequence
  Synthetic
uuacugucacacaaaaaa

SEQ ID NO: 426114 - RNA, 19 nt, Artificial Sequence
  Synthetic
guuacugucacacaaaaaa

SEQ ID NO: 426115 - RNA, 20 nt, Artificial Sequence
  Synthetic
uguuacugucacacaaaaaa

SEQ ID NO: 426116 - RNA, 21 nt, Artificial Sequence
  Synthetic
auguuacugucacacaaaaaa

SEQ ID NO: 426117 - RNA, 22 nt, Artificial Sequence
  Synthetic
aauguuacugucacacaaaaaa

SEQ ID NO: 426118 - RNA, 23 nt, Artificial Sequence
  Synthetic
uaauguuacugucacacaaaaaa

SEQ ID NO: 426119 - RNA, 24 nt, Artificial Sequence
  Synthetic
auaauguuacugucacacaaaaaa

SEQ ID NO: 426120 - RNA, 18 nt, Artificial Sequence
  Synthetic
uauacagaccacaaaaaa

SEQ ID NO: 426121 - RNA, 19 nt, Artificial Sequence
  Synthetic
uuauacagaccacaaaaaa

SEQ ID NO: 426122 - RNA, 20 nt, Artificial Sequence
  Synthetic
auuauacagaccacaaaaaa

SEQ ID NO: 426123 - RNA, 21 nt, Artificial Sequence
  Synthetic
aauuauacagaccacaaaaaa

SEQ ID NO: 426124 - RNA, 22 nt, Artificial Sequence
  Synthetic
aaauuauacagaccacaaaaaa

SEQ ID NO: 426125 - RNA, 23 nt, Artificial Sequence
  Synthetic
caaauuauacagaccacaaaaaa

SEQ ID NO: 426126 - RNA, 24 nt, Artificial Sequence
  Synthetic
ccaaauuauacagaccacaaaaaa

SEQ ID NO: 426127 - RNA, 18 nt, Artificial Sequence
  Synthetic
auuagaagccacaaaaaa

SEQ ID NO: 426128 - RNA, 19 nt, Artificial Sequence
  Synthetic
cauuagaagccacaaaaaa

SEQ ID NO: 426129 - RNA, 20 nt, Artificial Sequence
  Synthetic
gcauuagaagccacaaaaaa

SEQ ID NO: 426130 - RNA, 21 nt, Artificial Sequence
  Synthetic
ugcauuagaagccacaaaaaa

SEQ ID NO: 426131 - RNA, 22 nt, Artificial Sequence
  Synthetic
uugcauuagaagccacaaaaaa

SEQ ID NO: 426132 - RNA, 23 nt, Artificial Sequence
  Synthetic
uuugcauuagaagccacaaaaaa

SEQ ID NO: 426133 - RNA, 24 nt, Artificial Sequence
  Synthetic
uuuugcauuagaagccacaaaaaa

SEQ ID NO: 426134 - RNA, 18 nt, Artificial Sequence
  Synthetic
aaaaggagguacaaaaaa

SEQ ID NO: 426135 - RNA, 19 nt, Artificial Sequence
  Synthetic
uaaaaggagguacaaaaaa

SEQ ID NO: 426136 - RNA, 20 nt, Artificial Sequence
  Synthetic
auaaaaggagguacaaaaaa

SEQ ID NO: 426137 - RNA, 21 nt, Artificial Sequence
  Synthetic
cauaaaaggagguacaaaaaa

SEQ ID NO: 426138 - RNA, 22 nt, Artificial Sequence
  Synthetic
acauaaaaggagguacaaaaaa

SEQ ID NO: 426139 - RNA, 23 nt, Artificial Sequence
  Synthetic
aacauaaaaggagguacaaaaaa

SEQ ID NO: 426140 - RNA, 24 nt, Artificial Sequence
  Synthetic
gaacauaaaaggagguacaaaaaa

SEQ ID NO: 426141 - RNA, 18 nt, Artificial Sequence
  Synthetic
agagaggauuacaaaaaa

SEQ ID NO: 426142 - RNA, 19 nt, Artificial Sequence
  Synthetic
aagagaggauuacaaaaaa

SEQ ID NO: 426143 - RNA, 20 nt, Artificial Sequence
  Synthetic
gaagagaggauuacaaaaaa

SEQ ID NO: 426144 - RNA, 21 nt, Artificial Sequence
  Synthetic
agaagagaggauuacaaaaaa

SEQ ID NO: 426145 - RNA, 22 nt, Artificial Sequence
  Synthetic
uagaagagaggauuacaaaaaa

SEQ ID NO: 426146 - RNA, 23 nt, Artificial Sequence
  Synthetic
auagaagagaggauuacaaaaaa

SEQ ID NO: 426147 - RNA, 24 nt, Artificial Sequence
  Synthetic
cauagaagagaggauuacaaaaaa

SEQ ID NO: 426148 - RNA, 18 nt, Artificial Sequence
  Synthetic
cauguuacuuacaaaaaa

SEQ ID NO: 426149 - RNA, 19 nt, Artificial Sequence
  Synthetic
acauguuacuuacaaaaaa

SEQ ID NO: 426150 - RNA, 20 nt, Artificial Sequence
  Synthetic
cacauguuacuuacaaaaaa

SEQ ID NO: 426151 - RNA, 21 nt, Artificial Sequence
  Synthetic
acacauguuacuuacaaaaaa

SEQ ID NO: 426152 - RNA, 22 nt, Artificial Sequence
  Synthetic
aacacauguuacuuacaaaaaa

SEQ ID NO: 426153 - RNA, 23 nt, Artificial Sequence
  Synthetic
uaacacauguuacuuacaaaaaa

SEQ ID NO: 426154 - RNA, 24 nt, Artificial Sequence
  Synthetic
guaacacauguuacuuacaaaaaa

SEQ ID NO: 426155 - RNA, 18 nt, Artificial Sequence
  Synthetic
auugaauaucccaaaaaa

SEQ ID NO: 426156 - RNA, 19 nt, Artificial Sequence
  Synthetic
aauugaauaucccaaaaaa

SEQ ID NO: 426157 - RNA, 20 nt, Artificial Sequence
  Synthetic
aaauugaauaucccaaaaaa

SEQ ID NO: 426158 - RNA, 21 nt, Artificial Sequence
  Synthetic
gaaauugaauaucccaaaaaa

SEQ ID NO: 426159 - RNA, 22 nt, Artificial Sequence
  Synthetic
agaaauugaauaucccaaaaaa

SEQ ID NO: 426160 - RNA, 23 nt, Artificial Sequence
  Synthetic
aagaaauugaauaucccaaaaaa

SEQ ID NO: 426161 - RNA, 24 nt, Artificial Sequence
  Synthetic
gaagaaauugaauaucccaaaaaa

SEQ ID NO: 426162 - RNA, 18 nt, Artificial Sequence
  Synthetic
gacccugucuccaaaaaa

SEQ ID NO: 426163 - RNA, 19 nt, Artificial Sequence
  Synthetic
ugacccugucuccaaaaaa

SEQ ID NO: 426164 - RNA, 20 nt, Artificial Sequence
  Synthetic
augacccugucuccaaaaaa

SEQ ID NO: 426165 - RNA, 21 nt, Artificial Sequence
  Synthetic
uaugacccugucuccaaaaaa

SEQ ID NO: 426166 - RNA, 22 nt, Artificial Sequence
  Synthetic
guaugacccugucuccaaaaaa

SEQ ID NO: 426167 - RNA, 23 nt, Artificial Sequence
  Synthetic
gguaugacccugucuccaaaaaa

SEQ ID NO: 426168 - RNA, 24 nt, Artificial Sequence
  Synthetic
ggguaugacccugucuccaaaaaa

SEQ ID NO: 426169 - RNA, 18 nt, Artificial Sequence
  Synthetic
agacuccaaagcaaaaaa

SEQ ID NO: 426170 - RNA, 19 nt, Artificial Sequence
  Synthetic
aagacuccaaagcaaaaaa

SEQ ID NO: 426171 - RNA, 20 nt, Artificial Sequence
  Synthetic
caagacuccaaagcaaaaaa

SEQ ID NO: 426172 - RNA, 21 nt, Artificial Sequence
  Synthetic
ucaagacuccaaagcaaaaaa

SEQ ID NO: 426173 - RNA, 22 nt, Artificial Sequence
  Synthetic
uucaagacuccaaagcaaaaaa

SEQ ID NO: 426174 - RNA, 23 nt, Artificial Sequence
  Synthetic
uuucaagacuccaaagcaaaaaa

SEQ ID NO: 426175 - RNA, 24 nt, Artificial Sequence
  Synthetic
auuucaagacuccaaagcaaaaaa

SEQ ID NO: 426176 - RNA, 18 nt, Artificial Sequence
  Synthetic
cucagaaauaucaaaaaa

SEQ ID NO: 426177 - RNA, 19 nt, Artificial Sequence
  Synthetic
ucucagaaauaucaaaaaa

SEQ ID NO: 426178 - RNA, 20 nt, Artificial Sequence
  Synthetic
aucucagaaauaucaaaaaa

SEQ ID NO: 426179 - RNA, 21 nt, Artificial Sequence
  Synthetic
aaucucagaaauaucaaaaaa

SEQ ID NO: 426180 - RNA, 22 nt, Artificial Sequence
  Synthetic
aaaucucagaaauaucaaaaaa

SEQ ID NO: 426181 - RNA, 23 nt, Artificial Sequence
  Synthetic
aaaaucucagaaauaucaaaaaa

SEQ ID NO: 426182 - RNA, 24 nt, Artificial Sequence
  Synthetic
aaaaaucucagaaauaucaaaaaa

SEQ ID NO: 426183 - RNA, 18 nt, Artificial Sequence
  Synthetic
agacuccaucucaaaaaa

SEQ ID NO: 426184 - RNA, 19 nt, Artificial Sequence
  Synthetic
gagacuccaucucaaaaaa

SEQ ID NO: 426185 - RNA, 20 nt, Artificial Sequence
  Synthetic
ugagacuccaucucaaaaaa

SEQ ID NO: 426186 - RNA, 21 nt, Artificial Sequence
  Synthetic
gugagacuccaucucaaaaaa

SEQ ID NO: 426187 - RNA, 22 nt, Artificial Sequence
  Synthetic
agugagacuccaucucaaaaaa

SEQ ID NO: 426188 - RNA, 23 nt, Artificial Sequence
  Synthetic
gagugagacuccaucucaaaaaa

SEQ ID NO: 426189 - RNA, 24 nt, Artificial Sequence
  Synthetic
agagugagacuccaucucaaaaaa

SEQ ID NO: 426190 - RNA, 18 nt, Artificial Sequence
  Synthetic
uuucaacaauucaaaaaa

SEQ ID NO: 426191 - RNA, 19 nt, Artificial Sequence
  Synthetic
guuucaacaauucaaaaaa

SEQ ID NO: 426192 - RNA, 20 nt, Artificial Sequence
  Synthetic
gguuucaacaauucaaaaaa

SEQ ID NO: 426193 - RNA, 21 nt, Artificial Sequence
  Synthetic
ugguuucaacaauucaaaaaa

SEQ ID NO: 426194 - RNA, 22 nt, Artificial Sequence
  Synthetic
augguuucaacaauucaaaaaa

SEQ ID NO: 426195 - RNA, 23 nt, Artificial Sequence
  Synthetic
caugguuucaacaauucaaaaaa

SEQ ID NO: 426196 - RNA, 24 nt, Artificial Sequence
  Synthetic
ccaugguuucaacaauucaaaaaa

SEQ ID NO: 426197 - RNA, 18 nt, Artificial Sequence
  Synthetic
aaaaagaaaaagaaaaaa

SEQ ID NO: 426198 - RNA, 19 nt, Artificial Sequence
  Synthetic
gaaaaagaaaaagaaaaaa

SEQ ID NO: 426199 - RNA, 20 nt, Artificial Sequence
  Synthetic
agaaaaagaaaaagaaaaaa

SEQ ID NO: 426200 - RNA, 21 nt, Artificial Sequence
  Synthetic
aagaaaaagaaaaagaaaaaa

SEQ ID NO: 426201 - RNA, 22 nt, Artificial Sequence
  Synthetic
aaagaaaaagaaaaagaaaaaa

SEQ ID NO: 426202 - RNA, 23 nt, Artificial Sequence
  Synthetic
gaaagaaaaagaaaaagaaaaaa

SEQ ID NO: 426203 - RNA, 24 nt, Artificial Sequence
  Synthetic
agaaagaaaaagaaaaagaaaaaa

SEQ ID NO: 426204 - RNA, 18 nt, Artificial Sequence
  Synthetic
agacuaaugaagaaaaaa

SEQ ID NO: 426205 - RNA, 19 nt, Artificial Sequence
  Synthetic
cagacuaaugaagaaaaaa

SEQ ID NO: 426206 - RNA, 20 nt, Artificial Sequence
  Synthetic
ccagacuaaugaagaaaaaa

SEQ ID NO: 426207 - RNA, 21 nt, Artificial Sequence
  Synthetic
gccagacuaaugaagaaaaaa

SEQ ID NO: 426208 - RNA, 22 nt, Artificial Sequence
  Synthetic
agccagacuaaugaagaaaaaa

SEQ ID NO: 426209 - RNA, 23 nt, Artificial Sequence
  Synthetic
gagccagacuaaugaagaaaaaa

SEQ ID NO: 426210 - RNA, 24 nt, Artificial Sequence
  Synthetic
ugagccagacuaaugaagaaaaaa

SEQ ID NO: 426211 - RNA, 18 nt, Artificial Sequence
  Synthetic
aauuaugcagagaaaaaa

SEQ ID NO: 426212 - RNA, 19 nt, Artificial Sequence
  Synthetic
caauuaugcagagaaaaaa

SEQ ID NO: 426213 - RNA, 20 nt, Artificial Sequence
  Synthetic
ucaauuaugcagagaaaaaa

SEQ ID NO: 426214 - RNA, 21 nt, Artificial Sequence
  Synthetic
uucaauuaugcagagaaaaaa

SEQ ID NO: 426215 - RNA, 22 nt, Artificial Sequence
  Synthetic
uuucaauuaugcagagaaaaaa

SEQ ID NO: 426216 - RNA, 23 nt, Artificial Sequence
  Synthetic
uuuucaauuaugcagagaaaaaa

SEQ ID NO: 426217 - RNA, 24 nt, Artificial Sequence
  Synthetic
auuuucaauuaugcagagaaaaaa

SEQ ID NO: 426218 - RNA, 18 nt, Artificial Sequence
  Synthetic
acuggcaaugagaaaaaa

SEQ ID NO: 426219 - RNA, 19 nt, Artificial Sequence
  Synthetic
aacuggcaaugagaaaaaa

SEQ ID NO: 426220 - RNA, 20 nt, Artificial Sequence
  Synthetic
aaacuggcaaugagaaaaaa

SEQ ID NO: 426221 - RNA, 21 nt, Artificial Sequence
  Synthetic
uaaacuggcaaugagaaaaaa

SEQ ID NO: 426222 - RNA, 22 nt, Artificial Sequence
  Synthetic
cuaaacuggcaaugagaaaaaa

SEQ ID NO: 426223 - RNA, 23 nt, Artificial Sequence
  Synthetic
ucuaaacuggcaaugagaaaaaa

SEQ ID NO: 426224 - RNA, 24 nt, Artificial Sequence
  Synthetic
gucuaaacuggcaaugagaaaaaa

SEQ ID NO: 426225 - RNA, 18 nt, Artificial Sequence
  Synthetic
uucaucagugagaaaaaa

SEQ ID NO: 426226 - RNA, 19 nt, Artificial Sequence
  Synthetic
cuucaucagugagaaaaaa

SEQ ID NO: 426227 - RNA, 20 nt, Artificial Sequence
  Synthetic
acuucaucagugagaaaaaa

SEQ ID NO: 426228 - RNA, 21 nt, Artificial Sequence
  Synthetic
aacuucaucagugagaaaaaa

SEQ ID NO: 426229 - RNA, 22 nt, Artificial Sequence
  Synthetic
gaacuucaucagugagaaaaaa

SEQ ID NO: 426230 - RNA, 23 nt, Artificial Sequence
  Synthetic
agaacuucaucagugagaaaaaa

SEQ ID NO: 426231 - RNA, 24 nt, Artificial Sequence
  Synthetic
uagaacuucaucagugagaaaaaa

SEQ ID NO: 426232 - RNA, 18 nt, Artificial Sequence
  Synthetic
aaagaaagauagaaaaaa

SEQ ID NO: 426233 - RNA, 19 nt, Artificial Sequence
  Synthetic
gaaagaaagauagaaaaaa

SEQ ID NO: 426234 - RNA, 20 nt, Artificial Sequence
  Synthetic
agaaagaaagauagaaaaaa

SEQ ID NO: 426235 - RNA, 21 nt, Artificial Sequence
  Synthetic
aagaaagaaagauagaaaaaa

SEQ ID NO: 426236 - RNA, 22 nt, Artificial Sequence
  Synthetic
aaagaaagaaagauagaaaaaa

SEQ ID NO: 426237 - RNA, 23 nt, Artificial Sequence
  Synthetic
aaaagaaagaaagauagaaaaaa

SEQ ID NO: 426238 - RNA, 24 nt, Artificial Sequence
  Synthetic
gaaaagaaagaaagauagaaaaaa

SEQ ID NO: 426239 - RNA, 18 nt, Artificial Sequence
  Synthetic
auguuaaccuagaaaaaa

SEQ ID NO: 426240 - RNA, 19 nt, Artificial Sequence
  Synthetic
uauguuaaccuagaaaaaa

SEQ ID NO: 426241 - RNA, 20 nt, Artificial Sequence
  Synthetic
guauguuaaccuagaaaaaa

SEQ ID NO: 426242 - RNA, 21 nt, Artificial Sequence
  Synthetic
uguauguuaaccuagaaaaaa

SEQ ID NO: 426243 - RNA, 22 nt, Artificial Sequence
  Synthetic
cuguauguuaaccuagaaaaaa

SEQ ID NO: 426244 - RNA, 23 nt, Artificial Sequence
  Synthetic
acuguauguuaaccuagaaaaaa

SEQ ID NO: 426245 - RNA, 24 nt, Artificial Sequence
  Synthetic
aacuguauguuaaccuagaaaaaa

SEQ ID NO: 426246 - RNA, 18 nt, Artificial Sequence
  Synthetic
aaauuuguaaggaaaaaa

SEQ ID NO: 426247 - RNA, 19 nt, Artificial Sequence
  Synthetic
gaaauuuguaaggaaaaaa

SEQ ID NO: 426248 - RNA, 20 nt, Artificial Sequence
  Synthetic
agaaauuuguaaggaaaaaa

SEQ ID NO: 426249 - RNA, 21 nt, Artificial Sequence
  Synthetic
aagaaauuuguaaggaaaaaa

SEQ ID NO: 426250 - RNA, 22 nt, Artificial Sequence
  Synthetic
aaagaaauuuguaaggaaaaaa

SEQ ID NO: 426251 - RNA, 23 nt, Artificial Sequence
  Synthetic
aaaagaaauuuguaaggaaaaaa

SEQ ID NO: 426252 - RNA, 24 nt, Artificial Sequence
  Synthetic
gaaaagaaauuuguaaggaaaaaa

SEQ ID NO: 426253 - RNA, 18 nt, Artificial Sequence
  Synthetic
uuuuuuuccaggaaaaaa

SEQ ID NO: 426254 - RNA, 19 nt, Artificial Sequence
  Synthetic
cuuuuuuuccaggaaaaaa

SEQ ID NO: 426255 - RNA, 20 nt, Artificial Sequence
  Synthetic
ucuuuuuuuccaggaaaaaa

SEQ ID NO: 426256 - RNA, 21 nt, Artificial Sequence
  Synthetic
aucuuuuuuuccaggaaaaaa

SEQ ID NO: 426257 - RNA, 22 nt, Artificial Sequence
  Synthetic
caucuuuuuuuccaggaaaaaa

SEQ ID NO: 426258 - RNA, 23 nt, Artificial Sequence
  Synthetic
ccaucuuuuuuuccaggaaaaaa

SEQ ID NO: 426259 - RNA, 24 nt, Artificial Sequence
  Synthetic
cccaucuuuuuuuccaggaaaaaa

SEQ ID NO: 426260 - RNA, 18 nt, Artificial Sequence
  Synthetic
guguuacagaggaaaaaa

SEQ ID NO: 426261 - RNA, 19 nt, Artificial Sequence
  Synthetic
aguguuacagaggaaaaaa

SEQ ID NO: 426262 - RNA, 20 nt, Artificial Sequence
  Synthetic
aaguguuacagaggaaaaaa

SEQ ID NO: 426263 - RNA, 21 nt, Artificial Sequence
  Synthetic
uaaguguuacagaggaaaaaa

SEQ ID NO: 426264 - RNA, 22 nt, Artificial Sequence
  Synthetic
guaaguguuacagaggaaaaaa

SEQ ID NO: 426265 - RNA, 23 nt, Artificial Sequence
  Synthetic
aguaaguguuacagaggaaaaaa

SEQ ID NO: 426266 - RNA, 24 nt, Artificial Sequence
  Synthetic
caguaaguguuacagaggaaaaaa

SEQ ID NO: 426267 - RNA, 18 nt, Artificial Sequence
  Synthetic
uuccucuuagggaaaaaa

SEQ ID NO: 426268 - RNA, 19 nt, Artificial Sequence
  Synthetic
cuuccucuuagggaaaaaa

SEQ ID NO: 426269 - RNA, 20 nt, Artificial Sequence
  Synthetic
ucuuccucuuagggaaaaaa

SEQ ID NO: 426270 - RNA, 21 nt, Artificial Sequence
  Synthetic
gucuuccucuuagggaaaaaa

SEQ ID NO: 426271 - RNA, 22 nt, Artificial Sequence
  Synthetic
ugucuuccucuuagggaaaaaa

SEQ ID NO: 426272 - RNA, 23 nt, Artificial Sequence
  Synthetic
uugucuuccucuuagggaaaaaa

SEQ ID NO: 426273 - RNA, 24 nt, Artificial Sequence
  Synthetic
auugucuuccucuuagggaaaaaa

SEQ ID NO: 426274 - RNA, 18 nt, Artificial Sequence
  Synthetic
cuaagaacuuggaaaaaa

SEQ ID NO: 426275 - RNA, 19 nt, Artificial Sequence
  Synthetic
ucuaagaacuuggaaaaaa

SEQ ID NO: 426276 - RNA, 20 nt, Artificial Sequence
  Synthetic
aucuaagaacuuggaaaaaa

SEQ ID NO: 426277 - RNA, 21 nt, Artificial Sequence
  Synthetic
uaucuaagaacuuggaaaaaa

SEQ ID NO: 426278 - RNA, 22 nt, Artificial Sequence
  Synthetic
uuaucuaagaacuuggaaaaaa

SEQ ID NO: 426279 - RNA, 23 nt, Artificial Sequence
  Synthetic
uuuaucuaagaacuuggaaaaaa

SEQ ID NO: 426280 - RNA, 24 nt, Artificial Sequence
  Synthetic
uuuuaucuaagaacuuggaaaaaa

SEQ ID NO: 426281 - RNA, 18 nt, Artificial Sequence
  Synthetic
aguauuuaaaugaaaaaa

SEQ ID NO: 426282 - RNA, 19 nt, Artificial Sequence
  Synthetic
aaguauuuaaaugaaaaaa

SEQ ID NO: 426283 - RNA, 20 nt, Artificial Sequence
  Synthetic
uaaguauuuaaaugaaaaaa

SEQ ID NO: 426284 - RNA, 21 nt, Artificial Sequence
  Synthetic
auaaguauuuaaaugaaaaaa

SEQ ID NO: 426285 - RNA, 22 nt, Artificial Sequence
  Synthetic
gauaaguauuuaaaugaaaaaa

SEQ ID NO: 426286 - RNA, 23 nt, Artificial Sequence
  Synthetic
agauaaguauuuaaaugaaaaaa

SEQ ID NO: 426287 - RNA, 24 nt, Artificial Sequence
  Synthetic
aagauaaguauuuaaaugaaaaaa

SEQ ID NO: 426288 - RNA, 18 nt, Artificial Sequence
  Synthetic
uacaaaauccugaaaaaa

SEQ ID NO: 426289 - RNA, 19 nt, Artificial Sequence
  Synthetic
auacaaaauccugaaaaaa

SEQ ID NO: 426290 - RNA, 20 nt, Artificial Sequence
  Synthetic
cauacaaaauccugaaaaaa

SEQ ID NO: 426291 - RNA, 21 nt, Artificial Sequence
  Synthetic
acauacaaaauccugaaaaaa

SEQ ID NO: 426292 - RNA, 22 nt, Artificial Sequence
  Synthetic
uacauacaaaauccugaaaaaa

SEQ ID NO: 426293 - RNA, 23 nt, Artificial Sequence
  Synthetic
cuacauacaaaauccugaaaaaa

SEQ ID NO: 426294 - RNA, 24 nt, Artificial Sequence
  Synthetic
gcuacauacaaaauccugaaaaaa

SEQ ID NO: 426295 - RNA, 18 nt, Artificial Sequence
  Synthetic
cggaguaugaauaaaaaa

SEQ ID NO: 426296 - RNA, 19 nt, Artificial Sequence
  Synthetic
gcggaguaugaauaaaaaa

SEQ ID NO: 426297 - RNA, 20 nt, Artificial Sequence
  Synthetic
ugcggaguaugaauaaaaaa

SEQ ID NO: 426298 - RNA, 21 nt, Artificial Sequence
  Synthetic
augcggaguaugaauaaaaaa

SEQ ID NO: 426299 - RNA, 22 nt, Artificial Sequence
  Synthetic
uaugcggaguaugaauaaaaaa

SEQ ID NO: 426300 - RNA, 23 nt, Artificial Sequence
  Synthetic
auaugcggaguaugaauaaaaaa

SEQ ID NO: 426301 - RNA, 24 nt, Artificial Sequence
  Synthetic
aauaugcggaguaugaauaaaaaa

SEQ ID NO: 426302 - RNA, 18 nt, Artificial Sequence
  Synthetic
aauaacccuaauaaaaaa

SEQ ID NO: 426303 - RNA, 19 nt, Artificial Sequence
  Synthetic
aaauaacccuaauaaaaaa

SEQ ID NO: 426304 - RNA, 20 nt, Artificial Sequence
  Synthetic
caaauaacccuaauaaaaaa

SEQ ID NO: 426305 - RNA, 21 nt, Artificial Sequence
  Synthetic
acaaauaacccuaauaaaaaa

SEQ ID NO: 426306 - RNA, 22 nt, Artificial Sequence
  Synthetic
aacaaauaacccuaauaaaaaa

SEQ ID NO: 426307 - RNA, 23 nt, Artificial Sequence
  Synthetic
aaacaaauaacccuaauaaaaaa

SEQ ID NO: 426308 - RNA, 24 nt, Artificial Sequence
  Synthetic
aaaacaaauaacccuaauaaaaaa

SEQ ID NO: 426309 - RNA, 18 nt, Artificial Sequence
  Synthetic
aaauguuuggauaaaaaa

SEQ ID NO: 426310 - RNA, 19 nt, Artificial Sequence
  Synthetic
uaaauguuuggauaaaaaa

SEQ ID NO: 426311 - RNA, 20 nt, Artificial Sequence
  Synthetic
guaaauguuuggauaaaaaa

SEQ ID NO: 426312 - RNA, 21 nt, Artificial Sequence
  Synthetic
aguaaauguuuggauaaaaaa

SEQ ID NO: 426313 - RNA, 22 nt, Artificial Sequence
  Synthetic
aaguaaauguuuggauaaaaaa

SEQ ID NO: 426314 - RNA, 23 nt, Artificial Sequence
  Synthetic
uaaguaaauguuuggauaaaaaa

SEQ ID NO: 426315 - RNA, 24 nt, Artificial Sequence
  Synthetic
cuaaguaaauguuuggauaaaaaa

SEQ ID NO: 426316 - RNA, 18 nt, Artificial Sequence
  Synthetic
auacaggcuucuaaaaaa

SEQ ID NO: 426317 - RNA, 19 nt, Artificial Sequence
  Synthetic
aauacaggcuucuaaaaaa

SEQ ID NO: 426318 - RNA, 20 nt, Artificial Sequence
  Synthetic
aaauacaggcuucuaaaaaa

SEQ ID NO: 426319 - RNA, 21 nt, Artificial Sequence
  Synthetic
gaaauacaggcuucuaaaaaa

SEQ ID NO: 426320 - RNA, 22 nt, Artificial Sequence
  Synthetic
agaaauacaggcuucuaaaaaa

SEQ ID NO: 426321 - RNA, 23 nt, Artificial Sequence
  Synthetic
cagaaauacaggcuucuaaaaaa

SEQ ID NO: 426322 - RNA, 24 nt, Artificial Sequence
  Synthetic
gcagaaauacaggcuucuaaaaaa

SEQ ID NO: 426323 - RNA, 18 nt, Artificial Sequence
  Synthetic
aaccaaagcaguaaaaaa

SEQ ID NO: 426324 - RNA, 19 nt, Artificial Sequence
  Synthetic
uaaccaaagcaguaaaaaa

SEQ ID NO: 426325 - RNA, 20 nt, Artificial Sequence
  Synthetic
uuaaccaaagcaguaaaaaa

SEQ ID NO: 426326 - RNA, 21 nt, Artificial Sequence
  Synthetic
auuaaccaaagcaguaaaaaa

SEQ ID NO: 426327 - RNA, 22 nt, Artificial Sequence
  Synthetic
cauuaaccaaagcaguaaaaaa

SEQ ID NO: 426328 - RNA, 23 nt, Artificial Sequence
  Synthetic
ucauuaaccaaagcaguaaaaaa

SEQ ID NO: 426329 - RNA, 24 nt, Artificial Sequence
  Synthetic
uucauuaaccaaagcaguaaaaaa

SEQ ID NO: 426330 - RNA, 18 nt, Artificial Sequence
  Synthetic
cuuuuaaugaguaaaaaa

SEQ ID NO: 426331 - RNA, 19 nt, Artificial Sequence
  Synthetic
ucuuuuaaugaguaaaaaa

SEQ ID NO: 426332 - RNA, 20 nt, Artificial Sequence
  Synthetic
aucuuuuaaugaguaaaaaa

SEQ ID NO: 426333 - RNA, 21 nt, Artificial Sequence
  Synthetic
aaucuuuuaaugaguaaaaaa

SEQ ID NO: 426334 - RNA, 22 nt, Artificial Sequence
  Synthetic
aaaucuuuuaaugaguaaaaaa

SEQ ID NO: 426335 - RNA, 23 nt, Artificial Sequence
  Synthetic
aaaaucuuuuaaugaguaaaaaa

SEQ ID NO: 426336 - RNA, 24 nt, Artificial Sequence
  Synthetic
aaaaaucuuuuaaugaguaaaaaa

SEQ ID NO: 426337 - RNA, 18 nt, Artificial Sequence
  Synthetic
uuuuucucagguaaaaaa

SEQ ID NO: 426338 - RNA, 19 nt, Artificial Sequence
  Synthetic
auuuuucucagguaaaaaa

SEQ ID NO: 426339 - RNA, 20 nt, Artificial Sequence
  Synthetic
uauuuuucucagguaaaaaa

SEQ ID NO: 426340 - RNA, 21 nt, Artificial Sequence
  Synthetic
auauuuuucucagguaaaaaa

SEQ ID NO: 426341 - RNA, 22 nt, Artificial Sequence
  Synthetic
aauauuuuucucagguaaaaaa

SEQ ID NO: 426342 - RNA, 23 nt, Artificial Sequence
  Synthetic
caauauuuuucucagguaaaaaa

SEQ ID NO: 426343 - RNA, 24 nt, Artificial Sequence
  Synthetic
ucaauauuuuucucagguaaaaaa

SEQ ID NO: 426344 - RNA, 18 nt, Artificial Sequence
  Synthetic
auuuucuuguguaaaaaa

SEQ ID NO: 426345 - RNA, 19 nt, Artificial Sequence
  Synthetic
aauuuucuuguguaaaaaa

SEQ ID NO: 426346 - RNA, 20 nt, Artificial Sequence
  Synthetic
caauuuucuuguguaaaaaa

SEQ ID NO: 426347 - RNA, 21 nt, Artificial Sequence
  Synthetic
acaauuuucuuguguaaaaaa

SEQ ID NO: 426348 - RNA, 22 nt, Artificial Sequence
  Synthetic
cacaauuuucuuguguaaaaaa

SEQ ID NO: 426349 - RNA, 23 nt, Artificial Sequence
  Synthetic
gcacaauuuucuuguguaaaaaa

SEQ ID NO: 426350 - RNA, 24 nt, Artificial Sequence
  Synthetic
agcacaauuuucuuguguaaaaaa

SEQ ID NO: 426351 - RNA, 18 nt, Artificial Sequence
  Synthetic
aaaguugaaauuaaaaaa

SEQ ID NO: 426352 - RNA, 19 nt, Artificial Sequence
  Synthetic
aaaaguugaaauuaaaaaa

SEQ ID NO: 426353 - RNA, 20 nt, Artificial Sequence
  Synthetic
uaaaaguugaaauuaaaaaa

SEQ ID NO: 426354 - RNA, 21 nt, Artificial Sequence
  Synthetic
cuaaaaguugaaauuaaaaaa

SEQ ID NO: 426355 - RNA, 22 nt, Artificial Sequence
  Synthetic
ucuaaaaguugaaauuaaaaaa

SEQ ID NO: 426356 - RNA, 23 nt, Artificial Sequence
  Synthetic
aucuaaaaguugaaauuaaaaaa

SEQ ID NO: 426357 - RNA, 24 nt, Artificial Sequence
  Synthetic
uaucuaaaaguugaaauuaaaaaa

SEQ ID NO: 426358 - RNA, 18 nt, Artificial Sequence
  Synthetic
aaaauaaaaguuaaaaaa

SEQ ID NO: 426359 - RNA, 19 nt, Artificial Sequence
  Synthetic
uaaaauaaaaguuaaaaaa

SEQ ID NO: 426360 - RNA, 20 nt, Artificial Sequence
  Synthetic
cuaaaauaaaaguuaaaaaa

SEQ ID NO: 426361 - RNA, 21 nt, Artificial Sequence
  Synthetic
ccuaaaauaaaaguuaaaaaa

SEQ ID NO: 426362 - RNA, 22 nt, Artificial Sequence
  Synthetic
accuaaaauaaaaguuaaaaaa

SEQ ID NO: 426363 - RNA, 23 nt, Artificial Sequence
  Synthetic
aaccuaaaauaaaaguuaaaaaa

SEQ ID NO: 426364 - RNA, 24 nt, Artificial Sequence
  Synthetic
aaaccuaaaauaaaaguuaaaaaa

SEQ ID NO: 426365 - RNA, 18 nt, Artificial Sequence
  Synthetic
uuaccuuguguuaaaaaa

SEQ ID NO: 426366 - RNA, 19 nt, Artificial Sequence
  Synthetic
uuuaccuuguguuaaaaaa

SEQ ID NO: 426367 - RNA, 20 nt, Artificial Sequence
  Synthetic
uuuuaccuuguguuaaaaaa

SEQ ID NO: 426368 - RNA, 21 nt, Artificial Sequence
  Synthetic
uuuuuaccuuguguuaaaaaa

SEQ ID NO: 426369 - RNA, 22 nt, Artificial Sequence
  Synthetic
uuuuuuaccuuguguuaaaaaa

SEQ ID NO: 426370 - RNA, 23 nt, Artificial Sequence
  Synthetic
uuuuuuuaccuuguguuaaaaaa

SEQ ID NO: 426371 - RNA, 24 nt, Artificial Sequence
  Synthetic
uuuuuuuuaccuuguguuaaaaaa

SEQ ID NO: 426372 - RNA, 18 nt, Artificial Sequence
  Synthetic
aaacaaaaauuuaaaaaa

SEQ ID NO: 426373 - RNA, 19 nt, Artificial Sequence
  Synthetic
aaaacaaaaauuuaaaaaa

SEQ ID NO: 426374 - RNA, 20 nt, Artificial Sequence
  Synthetic
uaaaacaaaaauuuaaaaaa

SEQ ID NO: 426375 - RNA, 21 nt, Artificial Sequence
  Synthetic
auaaaacaaaaauuuaaaaaa

SEQ ID NO: 426376 - RNA, 22 nt, Artificial Sequence
  Synthetic
aauaaaacaaaaauuuaaaaaa

SEQ ID NO: 426377 - RNA, 23 nt, Artificial Sequence
  Synthetic
aaauaaaacaaaaauuuaaaaaa

SEQ ID NO: 426378 - RNA, 24 nt, Artificial Sequence
  Synthetic
aaaauaaaacaaaaauuuaaaaaa

SEQ ID NO: 426379 - RNA, 18 nt, Artificial Sequence
  Synthetic
aauaauaaauuuaaaaaa

SEQ ID NO: 426380 - RNA, 19 nt, Artificial Sequence
  Synthetic
uaauaauaaauuuaaaaaa

SEQ ID NO: 426381 - RNA, 20 nt, Artificial Sequence
  Synthetic
auaauaauaaauuuaaaaaa

SEQ ID NO: 426382 - RNA, 21 nt, Artificial Sequence
  Synthetic
uauaauaauaaauuuaaaaaa

SEQ ID NO: 426383 - RNA, 22 nt, Artificial Sequence
  Synthetic
guauaauaauaaauuuaaaaaa

SEQ ID NO: 426384 - RNA, 23 nt, Artificial Sequence
  Synthetic
aguauaauaauaaauuuaaaaaa

SEQ ID NO: 426385 - RNA, 24 nt, Artificial Sequence
  Synthetic
aaguauaauaauaaauuuaaaaaa

SEQ ID NO: 426386 - RNA, 18 nt, Artificial Sequence
  Synthetic
ugcaauggcuuuaaaaaa

SEQ ID NO: 426387 - RNA, 19 nt, Artificial Sequence
  Synthetic
gugcaauggcuuuaaaaaa

SEQ ID NO: 426388 - RNA, 20 nt, Artificial Sequence
  Synthetic
ugugcaauggcuuuaaaaaa

SEQ ID NO: 426389 - RNA, 21 nt, Artificial Sequence
  Synthetic
augugcaauggcuuuaaaaaa

SEQ ID NO: 426390 - RNA, 22 nt, Artificial Sequence
  Synthetic
uaugugcaauggcuuuaaaaaa

SEQ ID NO: 426391 - RNA, 23 nt, Artificial Sequence
  Synthetic
auaugugcaauggcuuuaaaaaa

SEQ ID NO: 426392 - RNA, 24 nt, Artificial Sequence
  Synthetic
aauaugugcaauggcuuuaaaaaa

SEQ ID NO: 426393 - RNA, 18 nt, Artificial Sequence
  Synthetic
aaaauggauuuuaaaaaa

SEQ ID NO: 426394 - RNA, 19 nt, Artificial Sequence
  Synthetic
aaaaauggauuuuaaaaaa

SEQ ID NO: 426395 - RNA, 20 nt, Artificial Sequence
  Synthetic
uaaaaauggauuuuaaaaaa

SEQ ID NO: 426396 - RNA, 21 nt, Artificial Sequence
  Synthetic
cuaaaaauggauuuuaaaaaa

SEQ ID NO: 426397 - RNA, 22 nt, Artificial Sequence
  Synthetic
gcuaaaaauggauuuuaaaaaa

SEQ ID NO: 426398 - RNA, 23 nt, Artificial Sequence
  Synthetic
agcuaaaaauggauuuuaaaaaa

SEQ ID NO: 426399 - RNA, 24 nt, Artificial Sequence
  Synthetic
aagcuaaaaauggauuuuaaaaaa

SEQ ID NO: 426400 - RNA, 18 nt, Artificial Sequence
  Synthetic
aaacaauuuuuuaaaaaa

SEQ ID NO: 426401 - RNA, 19 nt, Artificial Sequence
  Synthetic
aaaacaauuuuuuaaaaaa

SEQ ID NO: 426402 - RNA, 20 nt, Artificial Sequence
  Synthetic
uaaaacaauuuuuuaaaaaa

SEQ ID NO: 426403 - RNA, 21 nt, Artificial Sequence
  Synthetic
auaaaacaauuuuuuaaaaaa

SEQ ID NO: 426404 - RNA, 22 nt, Artificial Sequence
  Synthetic
gauaaaacaauuuuuuaaaaaa

SEQ ID NO: 426405 - RNA, 23 nt, Artificial Sequence
  Synthetic
ugauaaaacaauuuuuuaaaaaa

SEQ ID NO: 426406 - RNA, 24 nt, Artificial Sequence
  Synthetic
uugauaaaacaauuuuuuaaaaaa

SEQ ID NO: 426407 - RNA, 18 nt, Artificial Sequence
  Synthetic
ucccccaaaaaacaaaaa

SEQ ID NO: 426408 - RNA, 19 nt, Artificial Sequence
  Synthetic
cucccccaaaaaacaaaaa

SEQ ID NO: 426409 - RNA, 20 nt, Artificial Sequence
  Synthetic
ccucccccaaaaaacaaaaa

SEQ ID NO: 426410 - RNA, 21 nt, Artificial Sequence
  Synthetic
accucccccaaaaaacaaaaa

SEQ ID NO: 426411 - RNA, 22 nt, Artificial Sequence
  Synthetic
caccucccccaaaaaacaaaaa

SEQ ID NO: 426412 - RNA, 23 nt, Artificial Sequence
  Synthetic
gcaccucccccaaaaaacaaaaa

SEQ ID NO: 426413 - RNA, 24 nt, Artificial Sequence
  Synthetic
ugcaccucccccaaaaaacaaaaa

SEQ ID NO: 426414 - RNA, 18 nt, Artificial Sequence
  Synthetic
aacaaaacaaaacaaaaa

SEQ ID NO: 426415 - RNA, 19 nt, Artificial Sequence
  Synthetic
aaacaaaacaaaacaaaaa

SEQ ID NO: 426416 - RNA, 20 nt, Artificial Sequence
  Synthetic
aaaacaaaacaaaacaaaaa

SEQ ID NO: 426417 - RNA, 21 nt, Artificial Sequence
  Synthetic
caaaacaaaacaaaacaaaaa

SEQ ID NO: 426418 - RNA, 22 nt, Artificial Sequence
  Synthetic
acaaaacaaaacaaaacaaaaa

SEQ ID NO: 426419 - RNA, 23 nt, Artificial Sequence
  Synthetic
aacaaaacaaaacaaaacaaaaa

SEQ ID NO: 426420 - RNA, 24 nt, Artificial Sequence
  Synthetic
aaacaaaacaaaacaaaacaaaaa

SEQ ID NO: 426421 - RNA, 18 nt, Artificial Sequence
  Synthetic
gcagagacacaacaaaaa

SEQ ID NO: 426422 - RNA, 19 nt, Artificial Sequence
  Synthetic
ggcagagacacaacaaaaa

SEQ ID NO: 426423 - RNA, 20 nt, Artificial Sequence
  Synthetic
uggcagagacacaacaaaaa

SEQ ID NO: 426424 - RNA, 21 nt, Artificial Sequence
  Synthetic
cuggcagagacacaacaaaaa

SEQ ID NO: 426425 - RNA, 22 nt, Artificial Sequence
  Synthetic
ccuggcagagacacaacaaaaa

SEQ ID NO: 426426 - RNA, 23 nt, Artificial Sequence
  Synthetic
gccuggcagagacacaacaaaaa

SEQ ID NO: 426427 - RNA, 24 nt, Artificial Sequence
  Synthetic
agccuggcagagacacaacaaaaa

SEQ ID NO: 426428 - RNA, 18 nt, Artificial Sequence
  Synthetic
uuauauuaccaacaaaaa

SEQ ID NO: 426429 - RNA, 19 nt, Artificial Sequence
  Synthetic
auuauauuaccaacaaaaa

SEQ ID NO: 426430 - RNA, 20 nt, Artificial Sequence
  Synthetic
aauuauauuaccaacaaaaa

SEQ ID NO: 426431 - RNA, 21 nt, Artificial Sequence
  Synthetic
gaauuauauuaccaacaaaaa

SEQ ID NO: 426432 - RNA, 22 nt, Artificial Sequence
  Synthetic
agaauuauauuaccaacaaaaa

SEQ ID NO: 426433 - RNA, 23 nt, Artificial Sequence
  Synthetic
aagaauuauauuaccaacaaaaa

SEQ ID NO: 426434 - RNA, 24 nt, Artificial Sequence
  Synthetic
uaagaauuauauuaccaacaaaaa

SEQ ID NO: 426435 - RNA, 18 nt, Artificial Sequence
  Synthetic
uguacaugagaacaaaaa

SEQ ID NO: 426436 - RNA, 19 nt, Artificial Sequence
  Synthetic
auguacaugagaacaaaaa

SEQ ID NO: 426437 - RNA, 20 nt, Artificial Sequence
  Synthetic
cauguacaugagaacaaaaa

SEQ ID NO: 426438 - RNA, 21 nt, Artificial Sequence
  Synthetic
ccauguacaugagaacaaaaa

SEQ ID NO: 426439 - RNA, 22 nt, Artificial Sequence
  Synthetic
uccauguacaugagaacaaaaa

SEQ ID NO: 426440 - RNA, 23 nt, Artificial Sequence
  Synthetic
cuccauguacaugagaacaaaaa

SEQ ID NO: 426441 - RNA, 24 nt, Artificial Sequence
  Synthetic
acuccauguacaugagaacaaaaa

SEQ ID NO: 426442 - RNA, 18 nt, Artificial Sequence
  Synthetic
auuaaaaaugaacaaaaa

SEQ ID NO: 426443 - RNA, 19 nt, Artificial Sequence
  Synthetic
cauuaaaaaugaacaaaaa

SEQ ID NO: 426444 - RNA, 20 nt, Artificial Sequence
  Synthetic
ccauuaaaaaugaacaaaaa

SEQ ID NO: 426445 - RNA, 21 nt, Artificial Sequence
  Synthetic
cccauuaaaaaugaacaaaaa

SEQ ID NO: 426446 - RNA, 22 nt, Artificial Sequence
  Synthetic
ucccauuaaaaaugaacaaaaa

SEQ ID NO: 426447 - RNA, 23 nt, Artificial Sequence
  Synthetic
uucccauuaaaaaugaacaaaaa

SEQ ID NO: 426448 - RNA, 24 nt, Artificial Sequence
  Synthetic
guucccauuaaaaaugaacaaaaa

SEQ ID NO: 426449 - RNA, 18 nt, Artificial Sequence
  Synthetic
caggccuaguaacaaaaa

SEQ ID NO: 426450 - RNA, 19 nt, Artificial Sequence
  Synthetic
gcaggccuaguaacaaaaa

SEQ ID NO: 426451 - RNA, 20 nt, Artificial Sequence
  Synthetic
ugcaggccuaguaacaaaaa

SEQ ID NO: 426452 - RNA, 21 nt, Artificial Sequence
  Synthetic
cugcaggccuaguaacaaaaa

SEQ ID NO: 426453 - RNA, 22 nt, Artificial Sequence
  Synthetic
ucugcaggccuaguaacaaaaa

SEQ ID NO: 426454 - RNA, 23 nt, Artificial Sequence
  Synthetic
aucugcaggccuaguaacaaaaa

SEQ ID NO: 426455 - RNA, 24 nt, Artificial Sequence
  Synthetic
gaucugcaggccuaguaacaaaaa

SEQ ID NO: 426456 - RNA, 18 nt, Artificial Sequence
  Synthetic
uuaaacaucacacaaaaa

SEQ ID NO: 426457 - RNA, 19 nt, Artificial Sequence
  Synthetic
auuaaacaucacacaaaaa

SEQ ID NO: 426458 - RNA, 20 nt, Artificial Sequence
  Synthetic
uauuaaacaucacacaaaaa

SEQ ID NO: 426459 - RNA, 21 nt, Artificial Sequence
  Synthetic
cuauuaaacaucacacaaaaa

SEQ ID NO: 426460 - RNA, 22 nt, Artificial Sequence
  Synthetic
gcuauuaaacaucacacaaaaa

SEQ ID NO: 426461 - RNA, 23 nt, Artificial Sequence
  Synthetic
agcuauuaaacaucacacaaaaa

SEQ ID NO: 426462 - RNA, 24 nt, Artificial Sequence
  Synthetic
cagcuauuaaacaucacacaaaaa

SEQ ID NO: 426463 - RNA, 18 nt, Artificial Sequence
  Synthetic
guuacugucacacaaaaa

SEQ ID NO: 426464 - RNA, 19 nt, Artificial Sequence
  Synthetic
uguuacugucacacaaaaa

SEQ ID NO: 426465 - RNA, 20 nt, Artificial Sequence
  Synthetic
auguuacugucacacaaaaa

SEQ ID NO: 426466 - RNA, 21 nt, Artificial Sequence
  Synthetic
aauguuacugucacacaaaaa

SEQ ID NO: 426467 - RNA, 22 nt, Artificial Sequence
  Synthetic
uaauguuacugucacacaaaaa

SEQ ID NO: 426468 - RNA, 23 nt, Artificial Sequence
  Synthetic
auaauguuacugucacacaaaaa

SEQ ID NO: 426469 - RNA, 24 nt, Artificial Sequence
  Synthetic
aauaauguuacugucacacaaaaa

SEQ ID NO: 426470 - RNA, 18 nt, Artificial Sequence
  Synthetic
ucauauaauacacaaaaa

SEQ ID NO: 426471 - RNA, 19 nt, Artificial Sequence
  Synthetic
uucauauaauacacaaaaa

SEQ ID NO: 426472 - RNA, 20 nt, Artificial Sequence
  Synthetic
cuucauauaauacacaaaaa

SEQ ID NO: 426473 - RNA, 21 nt, Artificial Sequence
  Synthetic
ccuucauauaauacacaaaaa

SEQ ID NO: 426474 - RNA, 22 nt, Artificial Sequence
  Synthetic
uccuucauauaauacacaaaaa

SEQ ID NO: 426475 - RNA, 23 nt, Artificial Sequence
  Synthetic
uuccuucauauaauacacaaaaa

SEQ ID NO: 426476 - RNA, 24 nt, Artificial Sequence
  Synthetic
auuccuucauauaauacacaaaaa

SEQ ID NO: 426477 - RNA, 18 nt, Artificial Sequence
  Synthetic
auaaaacucccacaaaaa

SEQ ID NO: 426478 - RNA, 19 nt, Artificial Sequence
  Synthetic
gauaaaacucccacaaaaa

SEQ ID NO: 426479 - RNA, 20 nt, Artificial Sequence
  Synthetic
ggauaaaacucccacaaaaa

SEQ ID NO: 426480 - RNA, 21 nt, Artificial Sequence
  Synthetic
aggauaaaacucccacaaaaa

SEQ ID NO: 426481 - RNA, 22 nt, Artificial Sequence
  Synthetic
aaggauaaaacucccacaaaaa

SEQ ID NO: 426482 - RNA, 23 nt, Artificial Sequence
  Synthetic
aaaggauaaaacucccacaaaaa

SEQ ID NO: 426483 - RNA, 24 nt, Artificial Sequence
  Synthetic
aaaaggauaaaacucccacaaaaa

SEQ ID NO: 426484 - RNA, 18 nt, Artificial Sequence
  Synthetic
auuacucggccacaaaaa

SEQ ID NO: 426485 - RNA, 19 nt, Artificial Sequence
  Synthetic
uauuacucggccacaaaaa

SEQ ID NO: 426486 - RNA, 20 nt, Artificial Sequence
  Synthetic
uuauuacucggccacaaaaa

SEQ ID NO: 426487 - RNA, 21 nt, Artificial Sequence
  Synthetic
auuauuacucggccacaaaaa

SEQ ID NO: 426488 - RNA, 22 nt, Artificial Sequence
  Synthetic
uauuauuacucggccacaaaaa

SEQ ID NO: 426489 - RNA, 23 nt, Artificial Sequence
  Synthetic
auauuauuacucggccacaaaaa

SEQ ID NO: 426490 - RNA, 24 nt, Artificial Sequence
  Synthetic
aauauuauuacucggccacaaaaa

SEQ ID NO: 426491 - RNA, 18 nt, Artificial Sequence
  Synthetic
ucaucuuuaucacaaaaa

SEQ ID NO: 426492 - RNA, 19 nt, Artificial Sequence
  Synthetic
aucaucuuuaucacaaaaa

SEQ ID NO: 426493 - RNA, 20 nt, Artificial Sequence
  Synthetic
aaucaucuuuaucacaaaaa

SEQ ID NO: 426494 - RNA, 21 nt, Artificial Sequence
  Synthetic
uaaucaucuuuaucacaaaaa

SEQ ID NO: 426495 - RNA, 22 nt, Artificial Sequence
  Synthetic
auaaucaucuuuaucacaaaaa

SEQ ID NO: 426496 - RNA, 23 nt, Artificial Sequence
  Synthetic
cauaaucaucuuuaucacaaaaa

SEQ ID NO: 426497 - RNA, 24 nt, Artificial Sequence
  Synthetic
ucauaaucaucuuuaucacaaaaa

SEQ ID NO: 426498 - RNA, 18 nt, Artificial Sequence
  Synthetic
ugucccuucucacaaaaa

SEQ ID NO: 426499 - RNA, 19 nt, Artificial Sequence
  Synthetic
cugucccuucucacaaaaa

SEQ ID NO: 426500 - RNA, 20 nt, Artificial Sequence
  Synthetic
ccugucccuucucacaaaaa

SEQ ID NO: 426501 - RNA, 21 nt, Artificial Sequence
  Synthetic
uccugucccuucucacaaaaa

SEQ ID NO: 426502 - RNA, 22 nt, Artificial Sequence
  Synthetic
auccugucccuucucacaaaaa

SEQ ID NO: 426503 - RNA, 23 nt, Artificial Sequence
  Synthetic
aauccugucccuucucacaaaaa

SEQ ID NO: 426504 - RNA, 24 nt, Artificial Sequence
  Synthetic
aaauccugucccuucucacaaaaa

SEQ ID NO: 426505 - RNA, 18 nt, Artificial Sequence
  Synthetic
uugugucauucacaaaaa

SEQ ID NO: 426506 - RNA, 19 nt, Artificial Sequence
  Synthetic
auugugucauucacaaaaa

SEQ ID NO: 426507 - RNA, 20 nt, Artificial Sequence
  Synthetic
gauugugucauucacaaaaa

SEQ ID NO: 426508 - RNA, 21 nt, Artificial Sequence
  Synthetic
agauugugucauucacaaaaa

SEQ ID NO: 426509 - RNA, 22 nt, Artificial Sequence
  Synthetic
uagauugugucauucacaaaaa

SEQ ID NO: 426510 - RNA, 23 nt, Artificial Sequence
  Synthetic
uuagauugugucauucacaaaaa

SEQ ID NO: 426511 - RNA, 24 nt, Artificial Sequence
  Synthetic
auuagauugugucauucacaaaaa

SEQ ID NO: 426512 - RNA, 18 nt, Artificial Sequence
  Synthetic
gugauaggaggacaaaaa

SEQ ID NO: 426513 - RNA, 19 nt, Artificial Sequence
  Synthetic
ugugauaggaggacaaaaa

SEQ ID NO: 426514 - RNA, 20 nt, Artificial Sequence
  Synthetic
augugauaggaggacaaaaa

SEQ ID NO: 426515 - RNA, 21 nt, Artificial Sequence
  Synthetic
aaugugauaggaggacaaaaa

SEQ ID NO: 426516 - RNA, 22 nt, Artificial Sequence
  Synthetic
aaaugugauaggaggacaaaaa

SEQ ID NO: 426517 - RNA, 23 nt, Artificial Sequence
  Synthetic
aaaaugugauaggaggacaaaaa

SEQ ID NO: 426518 - RNA, 24 nt, Artificial Sequence
  Synthetic
aaaaaugugauaggaggacaaaaa

SEQ ID NO: 426519 - RNA, 18 nt, Artificial Sequence
  Synthetic
acagggauuugacaaaaa

SEQ ID NO: 426520 - RNA, 19 nt, Artificial Sequence
  Synthetic
gacagggauuugacaaaaa

SEQ ID NO: 426521 - RNA, 20 nt, Artificial Sequence
  Synthetic
ugacagggauuugacaaaaa

SEQ ID NO: 426522 - RNA, 21 nt, Artificial Sequence
  Synthetic
gugacagggauuugacaaaaa

SEQ ID NO: 426523 - RNA, 22 nt, Artificial Sequence
  Synthetic
ggugacagggauuugacaaaaa

SEQ ID NO: 426524 - RNA, 23 nt, Artificial Sequence
  Synthetic
aggugacagggauuugacaaaaa

SEQ ID NO: 426525 - RNA, 24 nt, Artificial Sequence
  Synthetic
aaggugacagggauuugacaaaaa

SEQ ID NO: 426526 - RNA, 18 nt, Artificial Sequence
  Synthetic
uguucccuuugacaaaaa

SEQ ID NO: 426527 - RNA, 19 nt, Artificial Sequence
  Synthetic
uuguucccuuugacaaaaa

SEQ ID NO: 426528 - RNA, 20 nt, Artificial Sequence
  Synthetic
auuguucccuuugacaaaaa

SEQ ID NO: 426529 - RNA, 21 nt, Artificial Sequence
  Synthetic
aauuguucccuuugacaaaaa

SEQ ID NO: 426530 - RNA, 22 nt, Artificial Sequence
  Synthetic
aaauuguucccuuugacaaaaa

SEQ ID NO: 426531 - RNA, 23 nt, Artificial Sequence
  Synthetic
caaauuguucccuuugacaaaaa

SEQ ID NO: 426532 - RNA, 24 nt, Artificial Sequence
  Synthetic
ucaaauuguucccuuugacaaaaa

SEQ ID NO: 426533 - RNA, 18 nt, Artificial Sequence
  Synthetic
uaaaaggagguacaaaaa

SEQ ID NO: 426534 - RNA, 19 nt, Artificial Sequence
  Synthetic
auaaaaggagguacaaaaa

SEQ ID NO: 426535 - RNA, 20 nt, Artificial Sequence
  Synthetic
cauaaaaggagguacaaaaa

SEQ ID NO: 426536 - RNA, 21 nt, Artificial Sequence
  Synthetic
acauaaaaggagguacaaaaa

SEQ ID NO: 426537 - RNA, 22 nt, Artificial Sequence
  Synthetic
aacauaaaaggagguacaaaaa

SEQ ID NO: 426538 - RNA, 23 nt, Artificial Sequence
  Synthetic
gaacauaaaaggagguacaaaaa

SEQ ID NO: 426539 - RNA, 24 nt, Artificial Sequence
  Synthetic
agaacauaaaaggagguacaaaaa

SEQ ID NO: 426540 - RNA, 18 nt, Artificial Sequence
  Synthetic
aaacugcacuuacaaaaa

SEQ ID NO: 426541 - RNA, 19 nt, Artificial Sequence
  Synthetic
aaaacugcacuuacaaaaa

SEQ ID NO: 426542 - RNA, 20 nt, Artificial Sequence
  Synthetic
uaaaacugcacuuacaaaaa

SEQ ID NO: 426543 - RNA, 21 nt, Artificial Sequence
  Synthetic
auaaaacugcacuuacaaaaa

SEQ ID NO: 426544 - RNA, 22 nt, Artificial Sequence
  Synthetic
aauaaaacugcacuuacaaaaa

SEQ ID NO: 426545 - RNA, 23 nt, Artificial Sequence
  Synthetic
caauaaaacugcacuuacaaaaa

SEQ ID NO: 426546 - RNA, 24 nt, Artificial Sequence
  Synthetic
ucaauaaaacugcacuuacaaaaa

SEQ ID NO: 426547 - RNA, 18 nt, Artificial Sequence
  Synthetic
acuuucaauuuacaaaaa

SEQ ID NO: 426548 - RNA, 19 nt, Artificial Sequence
  Synthetic
aacuuucaauuuacaaaaa

SEQ ID NO: 426549 - RNA, 20 nt, Artificial Sequence
  Synthetic
aaacuuucaauuuacaaaaa

SEQ ID NO: 426550 - RNA, 21 nt, Artificial Sequence
  Synthetic
caaacuuucaauuuacaaaaa

SEQ ID NO: 426551 - RNA, 22 nt, Artificial Sequence
  Synthetic
acaaacuuucaauuuacaaaaa

SEQ ID NO: 426552 - RNA, 23 nt, Artificial Sequence
  Synthetic
cacaaacuuucaauuuacaaaaa

SEQ ID NO: 426553 - RNA, 24 nt, Artificial Sequence
  Synthetic
ccacaaacuuucaauuuacaaaaa

SEQ ID NO: 426554 - RNA, 18 nt, Artificial Sequence
  Synthetic
aagcuauguaaccaaaaa

SEQ ID NO: 426555 - RNA, 19 nt, Artificial Sequence
  Synthetic
gaagcuauguaaccaaaaa

SEQ ID NO: 426556 - RNA, 20 nt, Artificial Sequence
  Synthetic
ugaagcuauguaaccaaaaa

SEQ ID NO: 426557 - RNA, 21 nt, Artificial Sequence
  Synthetic
gugaagcuauguaaccaaaaa

SEQ ID NO: 426558 - RNA, 22 nt, Artificial Sequence
  Synthetic
ugugaagcuauguaaccaaaaa

SEQ ID NO: 426559 - RNA, 23 nt, Artificial Sequence
  Synthetic
augugaagcuauguaaccaaaaa

SEQ ID NO: 426560 - RNA, 24 nt, Artificial Sequence
  Synthetic
uaugugaagcuauguaaccaaaaa

SEQ ID NO: 426561 - RNA, 18 nt, Artificial Sequence
  Synthetic
aauugaauaucccaaaaa

SEQ ID NO: 426562 - RNA, 19 nt, Artificial Sequence
  Synthetic
aaauugaauaucccaaaaa

SEQ ID NO: 426563 - RNA, 20 nt, Artificial Sequence
  Synthetic
gaaauugaauaucccaaaaa

SEQ ID NO: 426564 - RNA, 21 nt, Artificial Sequence
  Synthetic
agaaauugaauaucccaaaaa

SEQ ID NO: 426565 - RNA, 22 nt, Artificial Sequence
  Synthetic
aagaaauugaauaucccaaaaa

SEQ ID NO: 426566 - RNA, 23 nt, Artificial Sequence
  Synthetic
gaagaaauugaauaucccaaaaa

SEQ ID NO: 426567 - RNA, 24 nt, Artificial Sequence
  Synthetic
agaagaaauugaauaucccaaaaa

SEQ ID NO: 426568 - RNA, 18 nt, Artificial Sequence
  Synthetic
auucauaacagccaaaaa

SEQ ID NO: 426569 - RNA, 19 nt, Artificial Sequence
  Synthetic
uauucauaacagccaaaaa

SEQ ID NO: 426570 - RNA, 20 nt, Artificial Sequence
  Synthetic
uuauucauaacagccaaaaa

SEQ ID NO: 426571 - RNA, 21 nt, Artificial Sequence
  Synthetic
cuuauucauaacagccaaaaa

SEQ ID NO: 426572 - RNA, 22 nt, Artificial Sequence
  Synthetic
ucuuauucauaacagccaaaaa

SEQ ID NO: 426573 - RNA, 23 nt, Artificial Sequence
  Synthetic
aucuuauucauaacagccaaaaa

SEQ ID NO: 426574 - RNA, 24 nt, Artificial Sequence
  Synthetic
caucuuauucauaacagccaaaaa

SEQ ID NO: 426575 - RNA, 18 nt, Artificial Sequence
  Synthetic
uucuagaggagccaaaaa

SEQ ID NO: 426576 - RNA, 19 nt, Artificial Sequence
  Synthetic
auucuagaggagccaaaaa

SEQ ID NO: 426577 - RNA, 20 nt, Artificial Sequence
  Synthetic
uauucuagaggagccaaaaa

SEQ ID NO: 426578 - RNA, 21 nt, Artificial Sequence
  Synthetic
cuauucuagaggagccaaaaa

SEQ ID NO: 426579 - RNA, 22 nt, Artificial Sequence
  Synthetic
ucuauucuagaggagccaaaaa

SEQ ID NO: 426580 - RNA, 23 nt, Artificial Sequence
  Synthetic
uucuauucuagaggagccaaaaa

SEQ ID NO: 426581 - RNA, 24 nt, Artificial Sequence
  Synthetic
cuucuauucuagaggagccaaaaa

SEQ ID NO: 426582 - RNA, 18 nt, Artificial Sequence
  Synthetic
auucacaauagccaaaaa

SEQ ID NO: 426583 - RNA, 19 nt, Artificial Sequence
  Synthetic
aauucacaauagccaaaaa

SEQ ID NO: 426584 - RNA, 20 nt, Artificial Sequence
  Synthetic
uaauucacaauagccaaaaa

SEQ ID NO: 426585 - RNA, 21 nt, Artificial Sequence
  Synthetic
auaauucacaauagccaaaaa

SEQ ID NO: 426586 - RNA, 22 nt, Artificial Sequence
  Synthetic
cauaauucacaauagccaaaaa

SEQ ID NO: 426587 - RNA, 23 nt, Artificial Sequence
  Synthetic
gcauaauucacaauagccaaaaa

SEQ ID NO: 426588 - RNA, 24 nt, Artificial Sequence
  Synthetic
ggcauaauucacaauagccaaaaa

SEQ ID NO: 426589 - RNA, 18 nt, Artificial Sequence
  Synthetic
auggugaaaugccaaaaa

SEQ ID NO: 426590 - RNA, 19 nt, Artificial Sequence
  Synthetic
cauggugaaaugccaaaaa

SEQ ID NO: 426591 - RNA, 20 nt, Artificial Sequence
  Synthetic
ccauggugaaaugccaaaaa

SEQ ID NO: 426592 - RNA, 21 nt, Artificial Sequence
  Synthetic
uccauggugaaaugccaaaaa

SEQ ID NO: 426593 - RNA, 22 nt, Artificial Sequence
  Synthetic
guccauggugaaaugccaaaaa

SEQ ID NO: 426594 - RNA, 23 nt, Artificial Sequence
  Synthetic
gguccauggugaaaugccaaaaa

SEQ ID NO: 426595 - RNA, 24 nt, Artificial Sequence
  Synthetic
ggguccauggugaaaugccaaaaa

SEQ ID NO: 426596 - RNA, 18 nt, Artificial Sequence
  Synthetic
aucaacauaauccaaaaa

SEQ ID NO: 426597 - RNA, 19 nt, Artificial Sequence
  Synthetic
uaucaacauaauccaaaaa

SEQ ID NO: 426598 - RNA, 20 nt, Artificial Sequence
  Synthetic
cuaucaacauaauccaaaaa

SEQ ID NO: 426599 - RNA, 21 nt, Artificial Sequence
  Synthetic
ucuaucaacauaauccaaaaa

SEQ ID NO: 426600 - RNA, 22 nt, Artificial Sequence
  Synthetic
gucuaucaacauaauccaaaaa

SEQ ID NO: 426601 - RNA, 23 nt, Artificial Sequence
  Synthetic
ugucuaucaacauaauccaaaaa

SEQ ID NO: 426602 - RNA, 24 nt, Artificial Sequence
  Synthetic
cugucuaucaacauaauccaaaaa

SEQ ID NO: 426603 - RNA, 18 nt, Artificial Sequence
  Synthetic
gaaaagaagguccaaaaa

SEQ ID NO: 426604 - RNA, 19 nt, Artificial Sequence
  Synthetic
ugaaaagaagguccaaaaa

SEQ ID NO: 426605 - RNA, 20 nt, Artificial Sequence
  Synthetic
gugaaaagaagguccaaaaa

SEQ ID NO: 426606 - RNA, 21 nt, Artificial Sequence
  Synthetic
ugugaaaagaagguccaaaaa

SEQ ID NO: 426607 - RNA, 22 nt, Artificial Sequence
  Synthetic
gugugaaaagaagguccaaaaa

SEQ ID NO: 426608 - RNA, 23 nt, Artificial Sequence
  Synthetic
ugugugaaaagaagguccaaaaa

SEQ ID NO: 426609 - RNA, 24 nt, Artificial Sequence
  Synthetic
gugugugaaaagaagguccaaaaa

SEQ ID NO: 426610 - RNA, 18 nt, Artificial Sequence
  Synthetic
aaaagcaaaaagcaaaaa

SEQ ID NO: 426611 - RNA, 19 nt, Artificial Sequence
  Synthetic
gaaaagcaaaaagcaaaaa

SEQ ID NO: 426612 - RNA, 20 nt, Artificial Sequence
  Synthetic
agaaaagcaaaaagcaaaaa

SEQ ID NO: 426613 - RNA, 21 nt, Artificial Sequence
  Synthetic
gagaaaagcaaaaagcaaaaa

SEQ ID NO: 426614 - RNA, 22 nt, Artificial Sequence
  Synthetic
ggagaaaagcaaaaagcaaaaa

SEQ ID NO: 426615 - RNA, 23 nt, Artificial Sequence
  Synthetic
aggagaaaagcaaaaagcaaaaa

SEQ ID NO: 426616 - RNA, 24 nt, Artificial Sequence
  Synthetic
aaggagaaaagcaaaaagcaaaaa

SEQ ID NO: 426617 - RNA, 18 nt, Artificial Sequence
  Synthetic
aaacugaaaaagcaaaaa

SEQ ID NO: 426618 - RNA, 19 nt, Artificial Sequence
  Synthetic
gaaacugaaaaagcaaaaa

SEQ ID NO: 426619 - RNA, 20 nt, Artificial Sequence
  Synthetic
ugaaacugaaaaagcaaaaa

SEQ ID NO: 426620 - RNA, 21 nt, Artificial Sequence
  Synthetic
cugaaacugaaaaagcaaaaa

SEQ ID NO: 426621 - RNA, 22 nt, Artificial Sequence
  Synthetic
gcugaaacugaaaaagcaaaaa

SEQ ID NO: 426622 - RNA, 23 nt, Artificial Sequence
  Synthetic
ggcugaaacugaaaaagcaaaaa

SEQ ID NO: 426623 - RNA, 24 nt, Artificial Sequence
  Synthetic
gggcugaaacugaaaaagcaaaaa

SEQ ID NO: 426624 - RNA, 18 nt, Artificial Sequence
  Synthetic
ucuccagaaaagcaaaaa

SEQ ID NO: 426625 - RNA, 19 nt, Artificial Sequence
  Synthetic
uucuccagaaaagcaaaaa

SEQ ID NO: 426626 - RNA, 20 nt, Artificial Sequence
  Synthetic
cuucuccagaaaagcaaaaa

SEQ ID NO: 426627 - RNA, 21 nt, Artificial Sequence
  Synthetic
gcuucuccagaaaagcaaaaa

SEQ ID NO: 426628 - RNA, 22 nt, Artificial Sequence
  Synthetic
ugcuucuccagaaaagcaaaaa

SEQ ID NO: 426629 - RNA, 23 nt, Artificial Sequence
  Synthetic
augcuucuccagaaaagcaaaaa

SEQ ID NO: 426630 - RNA, 24 nt, Artificial Sequence
  Synthetic
aaugcuucuccagaaaagcaaaaa

SEQ ID NO: 426631 - RNA, 18 nt, Artificial Sequence
  Synthetic
uuagcagaagagcaaaaa

SEQ ID NO: 426632 - RNA, 19 nt, Artificial Sequence
  Synthetic
guuagcagaagagcaaaaa

SEQ ID NO: 426633 - RNA, 20 nt, Artificial Sequence
  Synthetic
uguuagcagaagagcaaaaa

SEQ ID NO: 426634 - RNA, 21 nt, Artificial Sequence
  Synthetic
auguuagcagaagagcaaaaa

SEQ ID NO: 426635 - RNA, 22 nt, Artificial Sequence
  Synthetic
uauguuagcagaagagcaaaaa

SEQ ID NO: 426636 - RNA, 23 nt, Artificial Sequence
  Synthetic
cuauguuagcagaagagcaaaaa

SEQ ID NO: 426637 - RNA, 24 nt, Artificial Sequence
  Synthetic
ucuauguuagcagaagagcaaaaa

SEQ ID NO: 426638 - RNA, 21 nt, Artificial Sequence
  Synthetic
aucauacugaaugggcaaaaa

SEQ ID NO: 426639 - RNA, 22 nt, Artificial Sequence
  Synthetic
uaucauacugaaugggcaaaaa

SEQ ID NO: 426640 - RNA, 23 nt, Artificial Sequence
  Synthetic
auaucauacugaaugggcaaaaa

SEQ ID NO: 426641 - RNA, 24 nt, Artificial Sequence
  Synthetic
aauaucauacugaaugggcaaaaa

SEQ ID NO: 426642 - RNA, 18 nt, Artificial Sequence
  Synthetic
agauaaagccugcaaaaa

SEQ ID NO: 426643 - RNA, 19 nt, Artificial Sequence
  Synthetic
aagauaaagccugcaaaaa

SEQ ID NO: 426644 - RNA, 20 nt, Artificial Sequence
  Synthetic
aaagauaaagccugcaaaaa

SEQ ID NO: 426645 - RNA, 21 nt, Artificial Sequence
  Synthetic
aaaagauaaagccugcaaaaa

SEQ ID NO: 426646 - RNA, 22 nt, Artificial Sequence
  Synthetic
aaaaagauaaagccugcaaaaa

SEQ ID NO: 426647 - RNA, 23 nt, Artificial Sequence
  Synthetic
gaaaaagauaaagccugcaaaaa

SEQ ID NO: 426648 - RNA, 24 nt, Artificial Sequence
  Synthetic
ggaaaaagauaaagccugcaaaaa

SEQ ID NO: 426649 - RNA, 21 nt, Artificial Sequence
  Synthetic
aacaaacaaccccaucaaaaa

SEQ ID NO: 426650 - RNA, 22 nt, Artificial Sequence
  Synthetic
aaacaaacaaccccaucaaaaa

SEQ ID NO: 426651 - RNA, 23 nt, Artificial Sequence
  Synthetic
aaaacaaacaaccccaucaaaaa

SEQ ID NO: 426652 - RNA, 24 nt, Artificial Sequence
  Synthetic
aaaaacaaacaaccccaucaaaaa

SEQ ID NO: 426653 - RNA, 18 nt, Artificial Sequence
  Synthetic
aguggaauaacucaaaaa

SEQ ID NO: 426654 - RNA, 19 nt, Artificial Sequence
  Synthetic
aaguggaauaacucaaaaa

SEQ ID NO: 426655 - RNA, 20 nt, Artificial Sequence
  Synthetic
uaaguggaauaacucaaaaa

SEQ ID NO: 426656 - RNA, 21 nt, Artificial Sequence
  Synthetic
uuaaguggaauaacucaaaaa

SEQ ID NO: 426657 - RNA, 22 nt, Artificial Sequence
  Synthetic
cuuaaguggaauaacucaaaaa

SEQ ID NO: 426658 - RNA, 23 nt, Artificial Sequence
  Synthetic
ucuuaaguggaauaacucaaaaa

SEQ ID NO: 426659 - RNA, 24 nt, Artificial Sequence
  Synthetic
aucuuaaguggaauaacucaaaaa

SEQ ID NO: 426660 - RNA, 18 nt, Artificial Sequence
  Synthetic
gaaaaugacacucaaaaa

SEQ ID NO: 426661 - RNA, 19 nt, Artificial Sequence
  Synthetic
ugaaaaugacacucaaaaa

SEQ ID NO: 426662 - RNA, 20 nt, Artificial Sequence
  Synthetic
augaaaaugacacucaaaaa

SEQ ID NO: 426663 - RNA, 21 nt, Artificial Sequence
  Synthetic
aaugaaaaugacacucaaaaa

SEQ ID NO: 426664 - RNA, 22 nt, Artificial Sequence
  Synthetic
aaaugaaaaugacacucaaaaa

SEQ ID NO: 426665 - RNA, 23 nt, Artificial Sequence
  Synthetic
uaaaugaaaaugacacucaaaaa

SEQ ID NO: 426666 - RNA, 24 nt, Artificial Sequence
  Synthetic
auaaaugaaaaugacacucaaaaa

SEQ ID NO: 426667 - RNA, 18 nt, Artificial Sequence
  Synthetic
gggccugagacucaaaaa

SEQ ID NO: 426668 - RNA, 19 nt, Artificial Sequence
  Synthetic
agggccugagacucaaaaa

SEQ ID NO: 426669 - RNA, 20 nt, Artificial Sequence
  Synthetic
cagggccugagacucaaaaa

SEQ ID NO: 426670 - RNA, 21 nt, Artificial Sequence
  Synthetic
ccagggccugagacucaaaaa

SEQ ID NO: 426671 - RNA, 22 nt, Artificial Sequence
  Synthetic
gccagggccugagacucaaaaa

SEQ ID NO: 426672 - RNA, 23 nt, Artificial Sequence
  Synthetic
ggccagggccugagacucaaaaa

SEQ ID NO: 426673 - RNA, 24 nt, Artificial Sequence
  Synthetic
aggccagggccugagacucaaaaa

SEQ ID NO: 426674 - RNA, 18 nt, Artificial Sequence
  Synthetic
gagacuccaucucaaaaa

SEQ ID NO: 426675 - RNA, 19 nt, Artificial Sequence
  Synthetic
ugagacuccaucucaaaaa

SEQ ID NO: 426676 - RNA, 20 nt, Artificial Sequence
  Synthetic
gugagacuccaucucaaaaa

SEQ ID NO: 426677 - RNA, 21 nt, Artificial Sequence
  Synthetic
agugagacuccaucucaaaaa

SEQ ID NO: 426678 - RNA, 22 nt, Artificial Sequence
  Synthetic
gagugagacuccaucucaaaaa

SEQ ID NO: 426679 - RNA, 23 nt, Artificial Sequence
  Synthetic
agagugagacuccaucucaaaaa

SEQ ID NO: 426680 - RNA, 24 nt, Artificial Sequence
  Synthetic
cagagugagacuccaucucaaaaa

SEQ ID NO: 426681 - RNA, 18 nt, Artificial Sequence
  Synthetic
uuucauaacagucaaaaa

SEQ ID NO: 426682 - RNA, 19 nt, Artificial Sequence
  Synthetic
auuucauaacagucaaaaa

SEQ ID NO: 426683 - RNA, 20 nt, Artificial Sequence
  Synthetic
cauuucauaacagucaaaaa

SEQ ID NO: 426684 - RNA, 21 nt, Artificial Sequence
  Synthetic
gcauuucauaacagucaaaaa

SEQ ID NO: 426685 - RNA, 22 nt, Artificial Sequence
  Synthetic
ggcauuucauaacagucaaaaa

SEQ ID NO: 426686 - RNA, 23 nt, Artificial Sequence
  Synthetic
aggcauuucauaacagucaaaaa

SEQ ID NO: 426687 - RNA, 24 nt, Artificial Sequence
  Synthetic
aaggcauuucauaacagucaaaaa

SEQ ID NO: 426688 - RNA, 18 nt, Artificial Sequence
  Synthetic
cuucucauaauucaaaaa

SEQ ID NO: 426689 - RNA, 19 nt, Artificial Sequence
  Synthetic
ucuucucauaauucaaaaa

SEQ ID NO: 426690 - RNA, 20 nt, Artificial Sequence
  Synthetic
uucuucucauaauucaaaaa

SEQ ID NO: 426691 - RNA, 21 nt, Artificial Sequence
  Synthetic
auucuucucauaauucaaaaa

SEQ ID NO: 426692 - RNA, 22 nt, Artificial Sequence
  Synthetic
aauucuucucauaauucaaaaa

SEQ ID NO: 426693 - RNA, 23 nt, Artificial Sequence
  Synthetic
uaauucuucucauaauucaaaaa

SEQ ID NO: 426694 - RNA, 24 nt, Artificial Sequence
  Synthetic
cuaauucuucucauaauucaaaaa

SEQ ID NO: 426695 - RNA, 18 nt, Artificial Sequence
  Synthetic
gaaaaaugucuucaaaaa

SEQ ID NO: 426696 - RNA, 19 nt, Artificial Sequence
  Synthetic
ugaaaaaugucuucaaaaa

SEQ ID NO: 426697 - RNA, 20 nt, Artificial Sequence
  Synthetic
uugaaaaaugucuucaaaaa

SEQ ID NO: 426698 - RNA, 21 nt, Artificial Sequence
  Synthetic
auugaaaaaugucuucaaaaa

SEQ ID NO: 426699 - RNA, 22 nt, Artificial Sequence
  Synthetic
aauugaaaaaugucuucaaaaa

SEQ ID NO: 426700 - RNA, 23 nt, Artificial Sequence
  Synthetic
aaauugaaaaaugucuucaaaaa

SEQ ID NO: 426701 - RNA, 24 nt, Artificial Sequence
  Synthetic
gaaauugaaaaaugucuucaaaaa

SEQ ID NO: 426702 - RNA, 18 nt, Artificial Sequence
  Synthetic
aguuuaaaaaaagaaaaa

SEQ ID NO: 426703 - RNA, 19 nt, Artificial Sequence
  Synthetic
aaguuuaaaaaaagaaaaa

SEQ ID NO: 426704 - RNA, 20 nt, Artificial Sequence
  Synthetic
aaaguuuaaaaaaagaaaaa

SEQ ID NO: 426705 - RNA, 21 nt, Artificial Sequence
  Synthetic
gaaaguuuaaaaaaagaaaaa

SEQ ID NO: 426706 - RNA, 22 nt, Artificial Sequence
  Synthetic
agaaaguuuaaaaaaagaaaaa

SEQ ID NO: 426707 - RNA, 23 nt, Artificial Sequence
  Synthetic
aagaaaguuuaaaaaaagaaaaa

SEQ ID NO: 426708 - RNA, 24 nt, Artificial Sequence
  Synthetic
aaagaaaguuuaaaaaaagaaaaa

SEQ ID NO: 426709 - RNA, 18 nt, Artificial Sequence
  Synthetic
cauaucaaaaaagaaaaa

SEQ ID NO: 426710 - RNA, 19 nt, Artificial Sequence
  Synthetic
ucauaucaaaaaagaaaaa

SEQ ID NO: 426711 - RNA, 20 nt, Artificial Sequence
  Synthetic
aucauaucaaaaaagaaaaa

SEQ ID NO: 426712 - RNA, 21 nt, Artificial Sequence
  Synthetic
uaucauaucaaaaaagaaaaa

SEQ ID NO: 426713 - RNA, 22 nt, Artificial Sequence
  Synthetic
cuaucauaucaaaaaagaaaaa

SEQ ID NO: 426714 - RNA, 23 nt, Artificial Sequence
  Synthetic
acuaucauaucaaaaaagaaaaa

SEQ ID NO: 426715 - RNA, 24 nt, Artificial Sequence
  Synthetic
aacuaucauaucaaaaaagaaaaa

SEQ ID NO: 426716 - RNA, 18 nt, Artificial Sequence
  Synthetic
aaauuauaaaaagaaaaa

SEQ ID NO: 426717 - RNA, 19 nt, Artificial Sequence
  Synthetic
gaaauuauaaaaagaaaaa

SEQ ID NO: 426718 - RNA, 20 nt, Artificial Sequence
  Synthetic
ugaaauuauaaaaagaaaaa

SEQ ID NO: 426719 - RNA, 21 nt, Artificial Sequence
  Synthetic
uugaaauuauaaaaagaaaaa

SEQ ID NO: 426720 - RNA, 22 nt, Artificial Sequence
  Synthetic
guugaaauuauaaaaagaaaaa

SEQ ID NO: 426721 - RNA, 23 nt, Artificial Sequence
  Synthetic
aguugaaauuauaaaaagaaaaa

SEQ ID NO: 426722 - RNA, 24 nt, Artificial Sequence
  Synthetic
aaguugaaauuauaaaaagaaaaa

SEQ ID NO: 426723 - RNA, 18 nt, Artificial Sequence
  Synthetic
aaaaacuuaaaagaaaaa

SEQ ID NO: 426724 - RNA, 19 nt, Artificial Sequence
  Synthetic
aaaaaacuuaaaagaaaaa

SEQ ID NO: 426725 - RNA, 20 nt, Artificial Sequence
  Synthetic
gaaaaaacuuaaaagaaaaa

SEQ ID NO: 426726 - RNA, 21 nt, Artificial Sequence
  Synthetic
agaaaaaacuuaaaagaaaaa

SEQ ID NO: 426727 - RNA, 22 nt, Artificial Sequence
  Synthetic
aagaaaaaacuuaaaagaaaaa

SEQ ID NO: 426728 - RNA, 23 nt, Artificial Sequence
  Synthetic
aaagaaaaaacuuaaaagaaaaa

SEQ ID NO: 426729 - RNA, 24 nt, Artificial Sequence
  Synthetic
gaaagaaaaaacuuaaaagaaaaa

SEQ ID NO: 426730 - RNA, 18 nt, Artificial Sequence
  Synthetic
gaagagagcaaagaaaaa

SEQ ID NO: 426731 - RNA, 19 nt, Artificial Sequence
  Synthetic
agaagagagcaaagaaaaa

SEQ ID NO: 426732 - RNA, 20 nt, Artificial Sequence
  Synthetic
gagaagagagcaaagaaaaa

SEQ ID NO: 426733 - RNA, 21 nt, Artificial Sequence
  Synthetic
agagaagagagcaaagaaaaa

SEQ ID NO: 426734 - RNA, 22 nt, Artificial Sequence
  Synthetic
aagagaagagagcaaagaaaaa

SEQ ID NO: 426735 - RNA, 23 nt, Artificial Sequence
  Synthetic
gaagagaagagagcaaagaaaaa

SEQ ID NO: 426736 - RNA, 24 nt, Artificial Sequence
  Synthetic
agaagagaagagagcaaagaaaaa

SEQ ID NO: 426737 - RNA, 18 nt, Artificial Sequence
  Synthetic
aaagaaaagaaagaaaaa

SEQ ID NO: 426738 - RNA, 19 nt, Artificial Sequence
  Synthetic
uaaagaaaagaaagaaaaa

SEQ ID NO: 426739 - RNA, 20 nt, Artificial Sequence
  Synthetic
guaaagaaaagaaagaaaaa

SEQ ID NO: 426740 - RNA, 21 nt, Artificial Sequence
  Synthetic
aguaaagaaaagaaagaaaaa

SEQ ID NO: 426741 - RNA, 22 nt, Artificial Sequence
  Synthetic
aaguaaagaaaagaaagaaaaa

SEQ ID NO: 426742 - RNA, 23 nt, Artificial Sequence
  Synthetic
gaaguaaagaaaagaaagaaaaa

SEQ ID NO: 426743 - RNA, 24 nt, Artificial Sequence
  Synthetic
agaaguaaagaaaagaaagaaaaa

SEQ ID NO: 426744 - RNA, 18 nt, Artificial Sequence
  Synthetic
aagacuaauaaagaaaaa

SEQ ID NO: 426745 - RNA, 19 nt, Artificial Sequence
  Synthetic
caagacuaauaaagaaaaa

SEQ ID NO: 426746 - RNA, 20 nt, Artificial Sequence
  Synthetic
gcaagacuaauaaagaaaaa

SEQ ID NO: 426747 - RNA, 21 nt, Artificial Sequence
  Synthetic
agcaagacuaauaaagaaaaa

SEQ ID NO: 426748 - RNA, 22 nt, Artificial Sequence
  Synthetic
uagcaagacuaauaaagaaaaa

SEQ ID NO: 426749 - RNA, 23 nt, Artificial Sequence
  Synthetic
cuagcaagacuaauaaagaaaaa

SEQ ID NO: 426750 - RNA, 24 nt, Artificial Sequence
  Synthetic
gcuagcaagacuaauaaagaaaaa

SEQ ID NO: 426751 - RNA, 18 nt, Artificial Sequence
  Synthetic
uagauuaaccaagaaaaa

SEQ ID NO: 426752 - RNA, 19 nt, Artificial Sequence
  Synthetic
uuagauuaaccaagaaaaa

SEQ ID NO: 426753 - RNA, 20 nt, Artificial Sequence
  Synthetic
guuagauuaaccaagaaaaa

SEQ ID NO: 426754 - RNA, 21 nt, Artificial Sequence
  Synthetic
aguuagauuaaccaagaaaaa

SEQ ID NO: 426755 - RNA, 22 nt, Artificial Sequence
  Synthetic
uaguuagauuaaccaagaaaaa

SEQ ID NO: 426756 - RNA, 23 nt, Artificial Sequence
  Synthetic
guaguuagauuaaccaagaaaaa

SEQ ID NO: 426757 - RNA, 24 nt, Artificial Sequence
  Synthetic
aguaguuagauuaaccaagaaaaa

SEQ ID NO: 426758 - RNA, 18 nt, Artificial Sequence
  Synthetic
cagacuaaugaagaaaaa

SEQ ID NO: 426759 - RNA, 19 nt, Artificial Sequence
  Synthetic
ccagacuaaugaagaaaaa

SEQ ID NO: 426760 - RNA, 20 nt, Artificial Sequence
  Synthetic
gccagacuaaugaagaaaaa

SEQ ID NO: 426761 - RNA, 21 nt, Artificial Sequence
  Synthetic
agccagacuaaugaagaaaaa

SEQ ID NO: 426762 - RNA, 22 nt, Artificial Sequence
  Synthetic
gagccagacuaaugaagaaaaa

SEQ ID NO: 426763 - RNA, 23 nt, Artificial Sequence
  Synthetic
ugagccagacuaaugaagaaaaa

SEQ ID NO: 426764 - RNA, 24 nt, Artificial Sequence
  Synthetic
uugagccagacuaaugaagaaaaa

SEQ ID NO: 426765 - RNA, 18 nt, Artificial Sequence
  Synthetic
uaggucaacacagaaaaa

SEQ ID NO: 426766 - RNA, 19 nt, Artificial Sequence
  Synthetic
cuaggucaacacagaaaaa

SEQ ID NO: 426767 - RNA, 20 nt, Artificial Sequence
  Synthetic
gcuaggucaacacagaaaaa

SEQ ID NO: 426768 - RNA, 21 nt, Artificial Sequence
  Synthetic
ugcuaggucaacacagaaaaa

SEQ ID NO: 426769 - RNA, 22 nt, Artificial Sequence
  Synthetic
cugcuaggucaacacagaaaaa

SEQ ID NO: 426770 - RNA, 23 nt, Artificial Sequence
  Synthetic
gcugcuaggucaacacagaaaaa

SEQ ID NO: 426771 - RNA, 24 nt, Artificial Sequence
  Synthetic
agcugcuaggucaacacagaaaaa

SEQ ID NO: 426772 - RNA, 18 nt, Artificial Sequence
  Synthetic
cuucaugaaagagaaaaa

SEQ ID NO: 426773 - RNA, 19 nt, Artificial Sequence
  Synthetic
gcuucaugaaagagaaaaa

SEQ ID NO: 426774 - RNA, 20 nt, Artificial Sequence
  Synthetic
agcuucaugaaagagaaaaa

SEQ ID NO: 426775 - RNA, 21 nt, Artificial Sequence
  Synthetic
cagcuucaugaaagagaaaaa

SEQ ID NO: 426776 - RNA, 22 nt, Artificial Sequence
  Synthetic
gcagcuucaugaaagagaaaaa

SEQ ID NO: 426777 - RNA, 23 nt, Artificial Sequence
  Synthetic
agcagcuucaugaaagagaaaaa

SEQ ID NO: 426778 - RNA, 24 nt, Artificial Sequence
  Synthetic
aagcagcuucaugaaagagaaaaa

SEQ ID NO: 426779 - RNA, 18 nt, Artificial Sequence
  Synthetic
aaaguuuagagagaaaaa

SEQ ID NO: 426780 - RNA, 19 nt, Artificial Sequence
  Synthetic
uaaaguuuagagagaaaaa

SEQ ID NO: 426781 - RNA, 20 nt, Artificial Sequence
  Synthetic
cuaaaguuuagagagaaaaa

SEQ ID NO: 426782 - RNA, 21 nt, Artificial Sequence
  Synthetic
gcuaaaguuuagagagaaaaa

SEQ ID NO: 426783 - RNA, 22 nt, Artificial Sequence
  Synthetic
ggcuaaaguuuagagagaaaaa

SEQ ID NO: 426784 - RNA, 23 nt, Artificial Sequence
  Synthetic
uggcuaaaguuuagagagaaaaa

SEQ ID NO: 426785 - RNA, 24 nt, Artificial Sequence
  Synthetic
guggcuaaaguuuagagagaaaaa

SEQ ID NO: 426786 - RNA, 18 nt, Artificial Sequence
  Synthetic
caauaacuuagagaaaaa

SEQ ID NO: 426787 - RNA, 19 nt, Artificial Sequence
  Synthetic
acaauaacuuagagaaaaa

SEQ ID NO: 426788 - RNA, 20 nt, Artificial Sequence
  Synthetic
cacaauaacuuagagaaaaa

SEQ ID NO: 426789 - RNA, 21 nt, Artificial Sequence
  Synthetic
ccacaauaacuuagagaaaaa

SEQ ID NO: 426790 - RNA, 22 nt, Artificial Sequence
  Synthetic
uccacaauaacuuagagaaaaa

SEQ ID NO: 426791 - RNA, 23 nt, Artificial Sequence
  Synthetic
auccacaauaacuuagagaaaaa

SEQ ID NO: 426792 - RNA, 24 nt, Artificial Sequence
  Synthetic
cauccacaauaacuuagagaaaaa

SEQ ID NO: 426793 - RNA, 18 nt, Artificial Sequence
  Synthetic
aacuggcaaugagaaaaa

SEQ ID NO: 426794 - RNA, 19 nt, Artificial Sequence
  Synthetic
aaacuggcaaugagaaaaa

SEQ ID NO: 426795 - RNA, 20 nt, Artificial Sequence
  Synthetic
uaaacuggcaaugagaaaaa

SEQ ID NO: 426796 - RNA, 21 nt, Artificial Sequence
  Synthetic
cuaaacuggcaaugagaaaaa

SEQ ID NO: 426797 - RNA, 22 nt, Artificial Sequence
  Synthetic
ucuaaacuggcaaugagaaaaa

SEQ ID NO: 426798 - RNA, 23 nt, Artificial Sequence
  Synthetic
gucuaaacuggcaaugagaaaaa

SEQ ID NO: 426799 - RNA, 24 nt, Artificial Sequence
  Synthetic
ggucuaaacuggcaaugagaaaaa

SEQ ID NO: 426800 - RNA, 18 nt, Artificial Sequence
  Synthetic
gacacaggaugagaaaaa

SEQ ID NO: 426801 - RNA, 19 nt, Artificial Sequence
  Synthetic
agacacaggaugagaaaaa

SEQ ID NO: 426802 - RNA, 20 nt, Artificial Sequence
  Synthetic
uagacacaggaugagaaaaa

SEQ ID NO: 426803 - RNA, 21 nt, Artificial Sequence
  Synthetic
auagacacaggaugagaaaaa

SEQ ID NO: 426804 - RNA, 22 nt, Artificial Sequence
  Synthetic
aauagacacaggaugagaaaaa

SEQ ID NO: 426805 - RNA, 23 nt, Artificial Sequence
  Synthetic
uaauagacacaggaugagaaaaa

SEQ ID NO: 426806 - RNA, 24 nt, Artificial Sequence
  Synthetic
guaauagacacaggaugagaaaaa

SEQ ID NO: 426807 - RNA, 18 nt, Artificial Sequence
  Synthetic
uaauauguaugagaaaaa

SEQ ID NO: 426808 - RNA, 19 nt, Artificial Sequence
  Synthetic
auaauauguaugagaaaaa

SEQ ID NO: 426809 - RNA, 20 nt, Artificial Sequence
  Synthetic
cauaauauguaugagaaaaa

SEQ ID NO: 426810 - RNA, 21 nt, Artificial Sequence
  Synthetic
gcauaauauguaugagaaaaa

SEQ ID NO: 426811 - RNA, 22 nt, Artificial Sequence
  Synthetic
ugcauaauauguaugagaaaaa

SEQ ID NO: 426812 - RNA, 23 nt, Artificial Sequence
  Synthetic
augcauaauauguaugagaaaaa

SEQ ID NO: 426813 - RNA, 24 nt, Artificial Sequence
  Synthetic
aaugcauaauauguaugagaaaaa

SEQ ID NO: 426814 - RNA, 18 nt, Artificial Sequence
  Synthetic
uccauccucugagaaaaa

SEQ ID NO: 426815 - RNA, 19 nt, Artificial Sequence
  Synthetic
uuccauccucugagaaaaa

SEQ ID NO: 426816 - RNA, 20 nt, Artificial Sequence
  Synthetic
cuuccauccucugagaaaaa

SEQ ID NO: 426817 - RNA, 21 nt, Artificial Sequence
  Synthetic
ccuuccauccucugagaaaaa

SEQ ID NO: 426818 - RNA, 22 nt, Artificial Sequence
  Synthetic
cccuuccauccucugagaaaaa

SEQ ID NO: 426819 - RNA, 23 nt, Artificial Sequence
  Synthetic
gcccuuccauccucugagaaaaa

SEQ ID NO: 426820 - RNA, 24 nt, Artificial Sequence
  Synthetic
ggcccuuccauccucugagaaaaa

SEQ ID NO: 426821 - RNA, 18 nt, Artificial Sequence
  Synthetic
agauagaaaguagaaaaa

SEQ ID NO: 426822 - RNA, 19 nt, Artificial Sequence
  Synthetic
uagauagaaaguagaaaaa

SEQ ID NO: 426823 - RNA, 20 nt, Artificial Sequence
  Synthetic
uuagauagaaaguagaaaaa

SEQ ID NO: 426824 - RNA, 21 nt, Artificial Sequence
  Synthetic
cuuagauagaaaguagaaaaa

SEQ ID NO: 426825 - RNA, 22 nt, Artificial Sequence
  Synthetic
ccuuagauagaaaguagaaaaa

SEQ ID NO: 426826 - RNA, 23 nt, Artificial Sequence
  Synthetic
cccuuagauagaaaguagaaaaa

SEQ ID NO: 426827 - RNA, 24 nt, Artificial Sequence
  Synthetic
ucccuuagauagaaaguagaaaaa

SEQ ID NO: 426828 - RNA, 18 nt, Artificial Sequence
  Synthetic
uauguuucuuuagaaaaa

SEQ ID NO: 426829 - RNA, 19 nt, Artificial Sequence
  Synthetic
auauguuucuuuagaaaaa

SEQ ID NO: 426830 - RNA, 20 nt, Artificial Sequence
  Synthetic
aauauguuucuuuagaaaaa

SEQ ID NO: 426831 - RNA, 21 nt, Artificial Sequence
  Synthetic
aaauauguuucuuuagaaaaa

SEQ ID NO: 426832 - RNA, 22 nt, Artificial Sequence
  Synthetic
uaaauauguuucuuuagaaaaa

SEQ ID NO: 426833 - RNA, 23 nt, Artificial Sequence
  Synthetic
cuaaauauguuucuuuagaaaaa

SEQ ID NO: 426834 - RNA, 24 nt, Artificial Sequence
  Synthetic
ucuaaauauguuucuuuagaaaaa

SEQ ID NO: 426835 - RNA, 18 nt, Artificial Sequence
  Synthetic
aguuaaauuuuagaaaaa

SEQ ID NO: 426836 - RNA, 19 nt, Artificial Sequence
  Synthetic
aaguuaaauuuuagaaaaa

SEQ ID NO: 426837 - RNA, 20 nt, Artificial Sequence
  Synthetic
aaaguuaaauuuuagaaaaa

SEQ ID NO: 426838 - RNA, 21 nt, Artificial Sequence
  Synthetic
caaaguuaaauuuuagaaaaa

SEQ ID NO: 426839 - RNA, 22 nt, Artificial Sequence
  Synthetic
ucaaaguuaaauuuuagaaaaa

SEQ ID NO: 426840 - RNA, 23 nt, Artificial Sequence
  Synthetic
gucaaaguuaaauuuuagaaaaa

SEQ ID NO: 426841 - RNA, 24 nt, Artificial Sequence
  Synthetic
ggucaaaguuaaauuuuagaaaaa

SEQ ID NO: 426842 - RNA, 18 nt, Artificial Sequence
  Synthetic
ugucacucuggcgaaaaa

SEQ ID NO: 426843 - RNA, 19 nt, Artificial Sequence
  Synthetic
augucacucuggcgaaaaa

SEQ ID NO: 426844 - RNA, 20 nt, Artificial Sequence
  Synthetic
uaugucacucuggcgaaaaa

SEQ ID NO: 426845 - RNA, 21 nt, Artificial Sequence
  Synthetic
uuaugucacucuggcgaaaaa

SEQ ID NO: 426846 - RNA, 22 nt, Artificial Sequence
  Synthetic
auuaugucacucuggcgaaaaa

SEQ ID NO: 426847 - RNA, 23 nt, Artificial Sequence
  Synthetic
aauuaugucacucuggcgaaaaa

SEQ ID NO: 426848 - RNA, 24 nt, Artificial Sequence
  Synthetic
caauuaugucacucuggcgaaaaa

SEQ ID NO: 426849 - RNA, 18 nt, Artificial Sequence
  Synthetic
gaggcauguggcgaaaaa

SEQ ID NO: 426850 - RNA, 19 nt, Artificial Sequence
  Synthetic
agaggcauguggcgaaaaa

SEQ ID NO: 426851 - RNA, 20 nt, Artificial Sequence
  Synthetic
gagaggcauguggcgaaaaa

SEQ ID NO: 426852 - RNA, 21 nt, Artificial Sequence
  Synthetic
agagaggcauguggcgaaaaa

SEQ ID NO: 426853 - RNA, 22 nt, Artificial Sequence
  Synthetic
gagagaggcauguggcgaaaaa

SEQ ID NO: 426854 - RNA, 23 nt, Artificial Sequence
  Synthetic
agagagaggcauguggcgaaaaa

SEQ ID NO: 426855 - RNA, 24 nt, Artificial Sequence
  Synthetic
gagagagaggcauguggcgaaaaa

SEQ ID NO: 426856 - RNA, 18 nt, Artificial Sequence
  Synthetic
ucucaaaaaaaggaaaaa

SEQ ID NO: 426857 - RNA, 19 nt, Artificial Sequence
  Synthetic
aucucaaaaaaaggaaaaa

SEQ ID NO: 426858 - RNA, 20 nt, Artificial Sequence
  Synthetic
caucucaaaaaaaggaaaaa

SEQ ID NO: 426859 - RNA, 21 nt, Artificial Sequence
  Synthetic
ccaucucaaaaaaaggaaaaa

SEQ ID NO: 426860 - RNA, 22 nt, Artificial Sequence
  Synthetic
uccaucucaaaaaaaggaaaaa

SEQ ID NO: 426861 - RNA, 23 nt, Artificial Sequence
  Synthetic
cuccaucucaaaaaaaggaaaaa

SEQ ID NO: 426862 - RNA, 24 nt, Artificial Sequence
  Synthetic
acuccaucucaaaaaaaggaaaaa

SEQ ID NO: 426863 - RNA, 18 nt, Artificial Sequence
  Synthetic
caguuauugaaggaaaaa

SEQ ID NO: 426864 - RNA, 19 nt, Artificial Sequence
  Synthetic
ucaguuauugaaggaaaaa

SEQ ID NO: 426865 - RNA, 20 nt, Artificial Sequence
  Synthetic
aucaguuauugaaggaaaaa

SEQ ID NO: 426866 - RNA, 21 nt, Artificial Sequence
  Synthetic
uaucaguuauugaaggaaaaa

SEQ ID NO: 426867 - RNA, 22 nt, Artificial Sequence
  Synthetic
auaucaguuauugaaggaaaaa

SEQ ID NO: 426868 - RNA, 23 nt, Artificial Sequence
  Synthetic
cauaucaguuauugaaggaaaaa

SEQ ID NO: 426869 - RNA, 24 nt, Artificial Sequence
  Synthetic
ccauaucaguuauugaaggaaaaa

SEQ ID NO: 426870 - RNA, 18 nt, Artificial Sequence
  Synthetic
aaauaccaacaggaaaaa

SEQ ID NO: 426871 - RNA, 19 nt, Artificial Sequence
  Synthetic
aaaauaccaacaggaaaaa

SEQ ID NO: 426872 - RNA, 20 nt, Artificial Sequence
  Synthetic
uaaaauaccaacaggaaaaa

SEQ ID NO: 426873 - RNA, 21 nt, Artificial Sequence
  Synthetic
uuaaaauaccaacaggaaaaa

SEQ ID NO: 426874 - RNA, 22 nt, Artificial Sequence
  Synthetic
auuaaaauaccaacaggaaaaa

SEQ ID NO: 426875 - RNA, 23 nt, Artificial Sequence
  Synthetic
cauuaaaauaccaacaggaaaaa

SEQ ID NO: 426876 - RNA, 24 nt, Artificial Sequence
  Synthetic
ucauuaaaauaccaacaggaaaaa

SEQ ID NO: 426877 - RNA, 18 nt, Artificial Sequence
  Synthetic
uguugggaucaggaaaaa

SEQ ID NO: 426878 - RNA, 19 nt, Artificial Sequence
  Synthetic
uuguugggaucaggaaaaa

SEQ ID NO: 426879 - RNA, 20 nt, Artificial Sequence
  Synthetic
uuuguugggaucaggaaaaa

SEQ ID NO: 426880 - RNA, 21 nt, Artificial Sequence
  Synthetic
auuuguugggaucaggaaaaa

SEQ ID NO: 426881 - RNA, 22 nt, Artificial Sequence
  Synthetic
uauuuguugggaucaggaaaaa

SEQ ID NO: 426882 - RNA, 23 nt, Artificial Sequence
  Synthetic
cuauuuguugggaucaggaaaaa

SEQ ID NO: 426883 - RNA, 24 nt, Artificial Sequence
  Synthetic
acuauuuguugggaucaggaaaaa

SEQ ID NO: 426884 - RNA, 18 nt, Artificial Sequence
  Synthetic
uagccaggcagggaaaaa

SEQ ID NO: 426885 - RNA, 19 nt, Artificial Sequence
  Synthetic
auagccaggcagggaaaaa

SEQ ID NO: 426886 - RNA, 20 nt, Artificial Sequence
  Synthetic
gauagccaggcagggaaaaa

SEQ ID NO: 426887 - RNA, 21 nt, Artificial Sequence
  Synthetic
agauagccaggcagggaaaaa

SEQ ID NO: 426888 - RNA, 22 nt, Artificial Sequence
  Synthetic
uagauagccaggcagggaaaaa

SEQ ID NO: 426889 - RNA, 23 nt, Artificial Sequence
  Synthetic
auagauagccaggcagggaaaaa

SEQ ID NO: 426890 - RNA, 24 nt, Artificial Sequence
  Synthetic
gauagauagccaggcagggaaaaa

SEQ ID NO: 426891 - RNA, 18 nt, Artificial Sequence
  Synthetic
ugggggcucagggaaaaa

SEQ ID NO: 426892 - RNA, 19 nt, Artificial Sequence
  Synthetic
uugggggcucagggaaaaa

SEQ ID NO: 426893 - RNA, 20 nt, Artificial Sequence
  Synthetic
cuugggggcucagggaaaaa

SEQ ID NO: 426894 - RNA, 21 nt, Artificial Sequence
  Synthetic
gcuugggggcucagggaaaaa

SEQ ID NO: 426895 - RNA, 22 nt, Artificial Sequence
  Synthetic
agcuugggggcucagggaaaaa

SEQ ID NO: 426896 - RNA, 23 nt, Artificial Sequence
  Synthetic
cagcuugggggcucagggaaaaa

SEQ ID NO: 426897 - RNA, 24 nt, Artificial Sequence
  Synthetic
ccagcuugggggcucagggaaaaa

SEQ ID NO: 426898 - RNA, 18 nt, Artificial Sequence
  Synthetic
aaguugaguggggaaaaa

SEQ ID NO: 426899 - RNA, 19 nt, Artificial Sequence
  Synthetic
caaguugaguggggaaaaa

SEQ ID NO: 426900 - RNA, 20 nt, Artificial Sequence
  Synthetic
ccaaguugaguggggaaaaa

SEQ ID NO: 426901 - RNA, 21 nt, Artificial Sequence
  Synthetic
gccaaguugaguggggaaaaa

SEQ ID NO: 426902 - RNA, 22 nt, Artificial Sequence
  Synthetic
agccaaguugaguggggaaaaa

SEQ ID NO: 426903 - RNA, 23 nt, Artificial Sequence
  Synthetic
cagccaaguugaguggggaaaaa

SEQ ID NO: 426904 - RNA, 24 nt, Artificial Sequence
  Synthetic
gcagccaaguugaguggggaaaaa

SEQ ID NO: 426905 - RNA, 18 nt, Artificial Sequence
  Synthetic
cacacacuaugggaaaaa

SEQ ID NO: 426906 - RNA, 19 nt, Artificial Sequence
  Synthetic
gcacacacuaugggaaaaa

SEQ ID NO: 426907 - RNA, 20 nt, Artificial Sequence
  Synthetic
ugcacacacuaugggaaaaa

SEQ ID NO: 426908 - RNA, 21 nt, Artificial Sequence
  Synthetic
uugcacacacuaugggaaaaa

SEQ ID NO: 426909 - RNA, 22 nt, Artificial Sequence
  Synthetic
uuugcacacacuaugggaaaaa

SEQ ID NO: 426910 - RNA, 23 nt, Artificial Sequence
  Synthetic
guuugcacacacuaugggaaaaa

SEQ ID NO: 426911 - RNA, 24 nt, Artificial Sequence
  Synthetic
aguuugcacacacuaugggaaaaa

SEQ ID NO: 426912 - RNA, 18 nt, Artificial Sequence
  Synthetic
uggagugagugggaaaaa

SEQ ID NO: 426913 - RNA, 19 nt, Artificial Sequence
  Synthetic
auggagugagugggaaaaa

SEQ ID NO: 426914 - RNA, 20 nt, Artificial Sequence
  Synthetic
aauggagugagugggaaaaa

SEQ ID NO: 426915 - RNA, 21 nt, Artificial Sequence
  Synthetic
aaauggagugagugggaaaaa

SEQ ID NO: 426916 - RNA, 22 nt, Artificial Sequence
  Synthetic
aaaauggagugagugggaaaaa

SEQ ID NO: 426917 - RNA, 23 nt, Artificial Sequence
  Synthetic
aaaaauggagugagugggaaaaa

SEQ ID NO: 426918 - RNA, 24 nt, Artificial Sequence
  Synthetic
uaaaaauggagugagugggaaaaa

SEQ ID NO: 426919 - RNA, 18 nt, Artificial Sequence
  Synthetic
uaucuuaaaauggaaaaa

SEQ ID NO: 426920 - RNA, 19 nt, Artificial Sequence
  Synthetic
cuaucuuaaaauggaaaaa

SEQ ID NO: 426921 - RNA, 20 nt, Artificial Sequence
  Synthetic
ucuaucuuaaaauggaaaaa

SEQ ID NO: 426922 - RNA, 21 nt, Artificial Sequence
  Synthetic
aucuaucuuaaaauggaaaaa

SEQ ID NO: 426923 - RNA, 22 nt, Artificial Sequence
  Synthetic
gaucuaucuuaaaauggaaaaa

SEQ ID NO: 426924 - RNA, 23 nt, Artificial Sequence
  Synthetic
agaucuaucuuaaaauggaaaaa

SEQ ID NO: 426925 - RNA, 24 nt, Artificial Sequence
  Synthetic
uagaucuaucuuaaaauggaaaaa

SEQ ID NO: 426926 - RNA, 18 nt, Artificial Sequence
  Synthetic
ggauauaccauggaaaaa

SEQ ID NO: 426927 - RNA, 19 nt, Artificial Sequence
  Synthetic
uggauauaccauggaaaaa

SEQ ID NO: 426928 - RNA, 20 nt, Artificial Sequence
  Synthetic
auggauauaccauggaaaaa

SEQ ID NO: 426929 - RNA, 21 nt, Artificial Sequence
  Synthetic
aauggauauaccauggaaaaa

SEQ ID NO: 426930 - RNA, 22 nt, Artificial Sequence
  Synthetic
aaauggauauaccauggaaaaa

SEQ ID NO: 426931 - RNA, 23 nt, Artificial Sequence
  Synthetic
caaauggauauaccauggaaaaa

SEQ ID NO: 426932 - RNA, 24 nt, Artificial Sequence
  Synthetic
ucaaauggauauaccauggaaaaa

SEQ ID NO: 426933 - RNA, 18 nt, Artificial Sequence
  Synthetic
uaucauccacuggaaaaa

SEQ ID NO: 426934 - RNA, 19 nt, Artificial Sequence
  Synthetic
cuaucauccacuggaaaaa

SEQ ID NO: 426935 - RNA, 20 nt, Artificial Sequence
  Synthetic
ccuaucauccacuggaaaaa

SEQ ID NO: 426936 - RNA, 21 nt, Artificial Sequence
  Synthetic
accuaucauccacuggaaaaa

SEQ ID NO: 426937 - RNA, 22 nt, Artificial Sequence
  Synthetic
uaccuaucauccacuggaaaaa

SEQ ID NO: 426938 - RNA, 23 nt, Artificial Sequence
  Synthetic
auaccuaucauccacuggaaaaa

SEQ ID NO: 426939 - RNA, 24 nt, Artificial Sequence
  Synthetic
uauaccuaucauccacuggaaaaa

SEQ ID NO: 426940 - RNA, 18 nt, Artificial Sequence
  Synthetic
auguagcuacuggaaaaa

SEQ ID NO: 426941 - RNA, 19 nt, Artificial Sequence
  Synthetic
gauguagcuacuggaaaaa

SEQ ID NO: 426942 - RNA, 20 nt, Artificial Sequence
  Synthetic
ggauguagcuacuggaaaaa

SEQ ID NO: 426943 - RNA, 21 nt, Artificial Sequence
  Synthetic
aggauguagcuacuggaaaaa

SEQ ID NO: 426944 - RNA, 22 nt, Artificial Sequence
  Synthetic
gaggauguagcuacuggaaaaa

SEQ ID NO: 426945 - RNA, 23 nt, Artificial Sequence
  Synthetic
ugaggauguagcuacuggaaaaa

SEQ ID NO: 426946 - RNA, 24 nt, Artificial Sequence
  Synthetic
augaggauguagcuacuggaaaaa

SEQ ID NO: 426947 - RNA, 18 nt, Artificial Sequence
  Synthetic
aauugcugaguggaaaaa

SEQ ID NO: 426948 - RNA, 19 nt, Artificial Sequence
  Synthetic
aaauugcugaguggaaaaa

SEQ ID NO: 426949 - RNA, 20 nt, Artificial Sequence
  Synthetic
uaaauugcugaguggaaaaa

SEQ ID NO: 426950 - RNA, 21 nt, Artificial Sequence
  Synthetic
uuaaauugcugaguggaaaaa

SEQ ID NO: 426951 - RNA, 22 nt, Artificial Sequence
  Synthetic
cuuaaauugcugaguggaaaaa

SEQ ID NO: 426952 - RNA, 23 nt, Artificial Sequence
  Synthetic
gcuuaaauugcugaguggaaaaa

SEQ ID NO: 426953 - RNA, 24 nt, Artificial Sequence
  Synthetic
ggcuuaaauugcugaguggaaaaa

SEQ ID NO: 426954 - RNA, 18 nt, Artificial Sequence
  Synthetic
uauuacuguguggaaaaa

SEQ ID NO: 426955 - RNA, 19 nt, Artificial Sequence
  Synthetic
uuauuacuguguggaaaaa

SEQ ID NO: 426956 - RNA, 20 nt, Artificial Sequence
  Synthetic
guuauuacuguguggaaaaa

SEQ ID NO: 426957 - RNA, 21 nt, Artificial Sequence
  Synthetic
aguuauuacuguguggaaaaa

SEQ ID NO: 426958 - RNA, 22 nt, Artificial Sequence
  Synthetic
uaguuauuacuguguggaaaaa

SEQ ID NO: 426959 - RNA, 23 nt, Artificial Sequence
  Synthetic
cuaguuauuacuguguggaaaaa

SEQ ID NO: 426960 - RNA, 24 nt, Artificial Sequence
  Synthetic
ccuaguuauuacuguguggaaaaa

SEQ ID NO: 426961 - RNA, 18 nt, Artificial Sequence
  Synthetic
ggagagaaauuggaaaaa

SEQ ID NO: 426962 - RNA, 19 nt, Artificial Sequence
  Synthetic
uggagagaaauuggaaaaa

SEQ ID NO: 426963 - RNA, 20 nt, Artificial Sequence
  Synthetic
auggagagaaauuggaaaaa

SEQ ID NO: 426964 - RNA, 21 nt, Artificial Sequence
  Synthetic
cauggagagaaauuggaaaaa

SEQ ID NO: 426965 - RNA, 22 nt, Artificial Sequence
  Synthetic
gcauggagagaaauuggaaaaa

SEQ ID NO: 426966 - RNA, 23 nt, Artificial Sequence
  Synthetic
ggcauggagagaaauuggaaaaa

SEQ ID NO: 426967 - RNA, 24 nt, Artificial Sequence
  Synthetic
aggcauggagagaaauuggaaaaa

SEQ ID NO: 426968 - RNA, 18 nt, Artificial Sequence
  Synthetic
cauuaacuccaugaaaaa

SEQ ID NO: 426969 - RNA, 19 nt, Artificial Sequence
  Synthetic
acauuaacuccaugaaaaa

SEQ ID NO: 426970 - RNA, 20 nt, Artificial Sequence
  Synthetic
uacauuaacuccaugaaaaa

SEQ ID NO: 426971 - RNA, 21 nt, Artificial Sequence
  Synthetic
auacauuaacuccaugaaaaa

SEQ ID NO: 426972 - RNA, 22 nt, Artificial Sequence
  Synthetic
cauacauuaacuccaugaaaaa

SEQ ID NO: 426973 - RNA, 23 nt, Artificial Sequence
  Synthetic
ucauacauuaacuccaugaaaaa

SEQ ID NO: 426974 - RNA, 24 nt, Artificial Sequence
  Synthetic
uucauacauuaacuccaugaaaaa

SEQ ID NO: 426975 - RNA, 18 nt, Artificial Sequence
  Synthetic
gaguuaggagaugaaaaa

SEQ ID NO: 426976 - RNA, 19 nt, Artificial Sequence
  Synthetic
agaguuaggagaugaaaaa

SEQ ID NO: 426977 - RNA, 20 nt, Artificial Sequence
  Synthetic
aagaguuaggagaugaaaaa

SEQ ID NO: 426978 - RNA, 21 nt, Artificial Sequence
  Synthetic
caagaguuaggagaugaaaaa

SEQ ID NO: 426979 - RNA, 22 nt, Artificial Sequence
  Synthetic
gcaagaguuaggagaugaaaaa

SEQ ID NO: 426980 - RNA, 23 nt, Artificial Sequence
  Synthetic
ugcaagaguuaggagaugaaaaa

SEQ ID NO: 426981 - RNA, 24 nt, Artificial Sequence
  Synthetic
augcaagaguuaggagaugaaaaa

SEQ ID NO: 426982 - RNA, 18 nt, Artificial Sequence
  Synthetic
acauaaguagaugaaaaa

SEQ ID NO: 426983 - RNA, 19 nt, Artificial Sequence
  Synthetic
cacauaaguagaugaaaaa

SEQ ID NO: 426984 - RNA, 20 nt, Artificial Sequence
  Synthetic
ucacauaaguagaugaaaaa

SEQ ID NO: 426985 - RNA, 21 nt, Artificial Sequence
  Synthetic
cucacauaaguagaugaaaaa

SEQ ID NO: 426986 - RNA, 22 nt, Artificial Sequence
  Synthetic
ucucacauaaguagaugaaaaa

SEQ ID NO: 426987 - RNA, 23 nt, Artificial Sequence
  Synthetic
uucucacauaaguagaugaaaaa

SEQ ID NO: 426988 - RNA, 24 nt, Artificial Sequence
  Synthetic
uuucucacauaaguagaugaaaaa

SEQ ID NO: 426989 - RNA, 18 nt, Artificial Sequence
  Synthetic
guaagcuuagaugaaaaa

SEQ ID NO: 426990 - RNA, 19 nt, Artificial Sequence
  Synthetic
gguaagcuuagaugaaaaa

SEQ ID NO: 426991 - RNA, 20 nt, Artificial Sequence
  Synthetic
ggguaagcuuagaugaaaaa

SEQ ID NO: 426992 - RNA, 21 nt, Artificial Sequence
  Synthetic
uggguaagcuuagaugaaaaa

SEQ ID NO: 426993 - RNA, 22 nt, Artificial Sequence
  Synthetic
uuggguaagcuuagaugaaaaa

SEQ ID NO: 426994 - RNA, 23 nt, Artificial Sequence
  Synthetic
uuuggguaagcuuagaugaaaaa

SEQ ID NO: 426995 - RNA, 24 nt, Artificial Sequence
  Synthetic
guuuggguaagcuuagaugaaaaa

SEQ ID NO: 426996 - RNA, 18 nt, Artificial Sequence
  Synthetic
auuuuaguauaugaaaaa

SEQ ID NO: 426997 - RNA, 19 nt, Artificial Sequence
  Synthetic
uauuuuaguauaugaaaaa

SEQ ID NO: 426998 - RNA, 20 nt, Artificial Sequence
  Synthetic
auauuuuaguauaugaaaaa

SEQ ID NO: 426999 - RNA, 21 nt, Artificial Sequence
  Synthetic
uauauuuuaguauaugaaaaa

SEQ ID NO: 427000 - RNA, 22 nt, Artificial Sequence
  Synthetic
auauauuuuaguauaugaaaaa

SEQ ID NO: 427001 - RNA, 23 nt, Artificial Sequence
  Synthetic
uauauauuuuaguauaugaaaaa

SEQ ID NO: 427002 - RNA, 24 nt, Artificial Sequence
  Synthetic
guauauauuuuaguauaugaaaaa

SEQ ID NO: 427003 - RNA, 18 nt, Artificial Sequence
  Synthetic
aaauacauuuaugaaaaa

SEQ ID NO: 427004 - RNA, 19 nt, Artificial Sequence
  Synthetic
gaaauacauuuaugaaaaa

SEQ ID NO: 427005 - RNA, 20 nt, Artificial Sequence
  Synthetic
ugaaauacauuuaugaaaaa

SEQ ID NO: 427006 - RNA, 21 nt, Artificial Sequence
  Synthetic
augaaauacauuuaugaaaaa

SEQ ID NO: 427007 - RNA, 22 nt, Artificial Sequence
  Synthetic
aaugaaauacauuuaugaaaaa

SEQ ID NO: 427008 - RNA, 23 nt, Artificial Sequence
  Synthetic
aaaugaaauacauuuaugaaaaa

SEQ ID NO: 427009 - RNA, 24 nt, Artificial Sequence
  Synthetic
aaaaugaaauacauuuaugaaaaa

SEQ ID NO: 427010 - RNA, 18 nt, Artificial Sequence
  Synthetic
ggggaagguacugaaaaa

SEQ ID NO: 427011 - RNA, 19 nt, Artificial Sequence
  Synthetic
gggggaagguacugaaaaa

SEQ ID NO: 427012 - RNA, 20 nt, Artificial Sequence
  Synthetic
agggggaagguacugaaaaa

SEQ ID NO: 427013 - RNA, 21 nt, Artificial Sequence
  Synthetic
gagggggaagguacugaaaaa

SEQ ID NO: 427014 - RNA, 22 nt, Artificial Sequence
  Synthetic
ugagggggaagguacugaaaaa

SEQ ID NO: 427015 - RNA, 23 nt, Artificial Sequence
  Synthetic
cugagggggaagguacugaaaaa

SEQ ID NO: 427016 - RNA, 24 nt, Artificial Sequence
  Synthetic
ucugagggggaagguacugaaaaa

SEQ ID NO: 427017 - RNA, 18 nt, Artificial Sequence
  Synthetic
auacaaaauccugaaaaa

SEQ ID NO: 427018 - RNA, 19 nt, Artificial Sequence
  Synthetic
cauacaaaauccugaaaaa

SEQ ID NO: 427019 - RNA, 20 nt, Artificial Sequence
  Synthetic
acauacaaaauccugaaaaa

SEQ ID NO: 427020 - RNA, 21 nt, Artificial Sequence
  Synthetic
uacauacaaaauccugaaaaa

SEQ ID NO: 427021 - RNA, 22 nt, Artificial Sequence
  Synthetic
cuacauacaaaauccugaaaaa

SEQ ID NO: 427022 - RNA, 23 nt, Artificial Sequence
  Synthetic
gcuacauacaaaauccugaaaaa

SEQ ID NO: 427023 - RNA, 24 nt, Artificial Sequence
  Synthetic
ugcuacauacaaaauccugaaaaa

SEQ ID NO: 427024 - RNA, 18 nt, Artificial Sequence
  Synthetic
cuuauuuaaauugaaaaa

SEQ ID NO: 427025 - RNA, 19 nt, Artificial Sequence
  Synthetic
ucuuauuuaaauugaaaaa

SEQ ID NO: 427026 - RNA, 20 nt, Artificial Sequence
  Synthetic
cucuuauuuaaauugaaaaa

SEQ ID NO: 427027 - RNA, 21 nt, Artificial Sequence
  Synthetic
ucucuuauuuaaauugaaaaa

SEQ ID NO: 427028 - RNA, 22 nt, Artificial Sequence
  Synthetic
cucucuuauuuaaauugaaaaa

SEQ ID NO: 427029 - RNA, 23 nt, Artificial Sequence
  Synthetic
ucucucuuauuuaaauugaaaaa

SEQ ID NO: 427030 - RNA, 24 nt, Artificial Sequence
  Synthetic
uucucucuuauuuaaauugaaaaa

SEQ ID NO: 427031 - RNA, 18 nt, Artificial Sequence
  Synthetic
ccucucuguauugaaaaa

SEQ ID NO: 427032 - RNA, 19 nt, Artificial Sequence
  Synthetic
uccucucuguauugaaaaa

SEQ ID NO: 427033 - RNA, 20 nt, Artificial Sequence
  Synthetic
cuccucucuguauugaaaaa

SEQ ID NO: 427034 - RNA, 21 nt, Artificial Sequence
  Synthetic
ucuccucucuguauugaaaaa

SEQ ID NO: 427035 - RNA, 22 nt, Artificial Sequence
  Synthetic
uucuccucucuguauugaaaaa

SEQ ID NO: 427036 - RNA, 23 nt, Artificial Sequence
  Synthetic
uuucuccucucuguauugaaaaa

SEQ ID NO: 427037 - RNA, 24 nt, Artificial Sequence
  Synthetic
cuuucuccucucuguauugaaaaa

SEQ ID NO: 427038 - RNA, 18 nt, Artificial Sequence
  Synthetic
aguaaaugauuugaaaaa

SEQ ID NO: 427039 - RNA, 19 nt, Artificial Sequence
  Synthetic
uaguaaaugauuugaaaaa

SEQ ID NO: 427040 - RNA, 20 nt, Artificial Sequence
  Synthetic
auaguaaaugauuugaaaaa

SEQ ID NO: 427041 - RNA, 21 nt, Artificial Sequence
  Synthetic
uauaguaaaugauuugaaaaa

SEQ ID NO: 427042 - RNA, 22 nt, Artificial Sequence
  Synthetic
uuauaguaaaugauuugaaaaa

SEQ ID NO: 427043 - RNA, 23 nt, Artificial Sequence
  Synthetic
guuauaguaaaugauuugaaaaa

SEQ ID NO: 427044 - RNA, 24 nt, Artificial Sequence
  Synthetic
uguuauaguaaaugauuugaaaaa

SEQ ID NO: 427045 - RNA, 18 nt, Artificial Sequence
  Synthetic
ggaguuaaaaaauaaaaa

SEQ ID NO: 427046 - RNA, 19 nt, Artificial Sequence
  Synthetic
uggaguuaaaaaauaaaaa

SEQ ID NO: 427047 - RNA, 20 nt, Artificial Sequence
  Synthetic
auggaguuaaaaaauaaaaa

SEQ ID NO: 427048 - RNA, 21 nt, Artificial Sequence
  Synthetic
aauggaguuaaaaaauaaaaa

SEQ ID NO: 427049 - RNA, 22 nt, Artificial Sequence
  Synthetic
gaauggaguuaaaaaauaaaaa

SEQ ID NO: 427050 - RNA, 23 nt, Artificial Sequence
  Synthetic
agaauggaguuaaaaaauaaaaa

SEQ ID NO: 427051 - RNA, 24 nt, Artificial Sequence
  Synthetic
gagaauggaguuaaaaaauaaaaa

SEQ ID NO: 427052 - RNA, 18 nt, Artificial Sequence
  Synthetic
gaucauacaaaauaaaaa

SEQ ID NO: 427053 - RNA, 19 nt, Artificial Sequence
  Synthetic
ugaucauacaaaauaaaaa

SEQ ID NO: 427054 - RNA, 20 nt, Artificial Sequence
  Synthetic
uugaucauacaaaauaaaaa

SEQ ID NO: 427055 - RNA, 21 nt, Artificial Sequence
  Synthetic
cuugaucauacaaaauaaaaa

SEQ ID NO: 427056 - RNA, 22 nt, Artificial Sequence
  Synthetic
ucuugaucauacaaaauaaaaa

SEQ ID NO: 427057 - RNA, 23 nt, Artificial Sequence
  Synthetic
aucuugaucauacaaaauaaaaa

SEQ ID NO: 427058 - RNA, 24 nt, Artificial Sequence
  Synthetic
aaucuugaucauacaaaauaaaaa

SEQ ID NO: 427059 - RNA, 18 nt, Artificial Sequence
  Synthetic
aauaaaauaaaauaaaaa

SEQ ID NO: 427060 - RNA, 19 nt, Artificial Sequence
  Synthetic
aaauaaaauaaaauaaaaa

SEQ ID NO: 427061 - RNA, 20 nt, Artificial Sequence
  Synthetic
aaaauaaaauaaaauaaaaa

SEQ ID NO: 427062 - RNA, 21 nt, Artificial Sequence
  Synthetic
uaaaauaaaauaaaauaaaaa

SEQ ID NO: 427063 - RNA, 22 nt, Artificial Sequence
  Synthetic
auaaaauaaaauaaaauaaaaa

SEQ ID NO: 427064 - RNA, 23 nt, Artificial Sequence
  Synthetic
aauaaaauaaaauaaaauaaaaa

SEQ ID NO: 427065 - RNA, 24 nt, Artificial Sequence
  Synthetic
aaauaaaauaaaauaaaauaaaaa

SEQ ID NO: 427066 - RNA, 19 nt, Artificial Sequence
  Synthetic
uaauaaaauaaaauaaaaa

SEQ ID NO: 427067 - RNA, 20 nt, Artificial Sequence
  Synthetic
auaauaaaauaaaauaaaaa

SEQ ID NO: 427068 - RNA, 21 nt, Artificial Sequence
  Synthetic
aauaauaaaauaaaauaaaaa

SEQ ID NO: 427069 - RNA, 22 nt, Artificial Sequence
  Synthetic
uaauaauaaaauaaaauaaaaa

SEQ ID NO: 427070 - RNA, 23 nt, Artificial Sequence
  Synthetic
auaauaauaaaauaaaauaaaaa

SEQ ID NO: 427071 - RNA, 24 nt, Artificial Sequence
  Synthetic
aauaauaauaaaauaaaauaaaaa

SEQ ID NO: 427072 - RNA, 18 nt, Artificial Sequence
  Synthetic
aaauaaauaaaauaaaaa

SEQ ID NO: 427073 - RNA, 19 nt, Artificial Sequence
  Synthetic
aaaauaaauaaaauaaaaa

SEQ ID NO: 427074 - RNA, 20 nt, Artificial Sequence
  Synthetic
uaaaauaaauaaaauaaaaa

SEQ ID NO: 427075 - RNA, 21 nt, Artificial Sequence
  Synthetic
auaaaauaaauaaaauaaaaa

SEQ ID NO: 427076 - RNA, 22 nt, Artificial Sequence
  Synthetic
uauaaaauaaauaaaauaaaaa

SEQ ID NO: 427077 - RNA, 23 nt, Artificial Sequence
  Synthetic
auauaaaauaaauaaaauaaaaa

SEQ ID NO: 427078 - RNA, 24 nt, Artificial Sequence
  Synthetic
aauauaaaauaaauaaaauaaaaa

SEQ ID NO: 427079 - RNA, 18 nt, Artificial Sequence
  Synthetic
aaaaaucaugaauaaaaa

SEQ ID NO: 427080 - RNA, 19 nt, Artificial Sequence
  Synthetic
uaaaaaucaugaauaaaaa

SEQ ID NO: 427081 - RNA, 20 nt, Artificial Sequence
  Synthetic
uuaaaaaucaugaauaaaaa

SEQ ID NO: 427082 - RNA, 21 nt, Artificial Sequence
  Synthetic
auuaaaaaucaugaauaaaaa

SEQ ID NO: 427083 - RNA, 22 nt, Artificial Sequence
  Synthetic
gauuaaaaaucaugaauaaaaa

SEQ ID NO: 427084 - RNA, 23 nt, Artificial Sequence
  Synthetic
agauuaaaaaucaugaauaaaaa

SEQ ID NO: 427085 - RNA, 24 nt, Artificial Sequence
  Synthetic
gagauuaaaaaucaugaauaaaaa

SEQ ID NO: 427086 - RNA, 18 nt, Artificial Sequence
  Synthetic
acgcuagcaacauaaaaa

SEQ ID NO: 427087 - RNA, 19 nt, Artificial Sequence
  Synthetic
uacgcuagcaacauaaaaa

SEQ ID NO: 427088 - RNA, 20 nt, Artificial Sequence
  Synthetic
auacgcuagcaacauaaaaa

SEQ ID NO: 427089 - RNA, 21 nt, Artificial Sequence
  Synthetic
uauacgcuagcaacauaaaaa

SEQ ID NO: 427090 - RNA, 22 nt, Artificial Sequence
  Synthetic
cuauacgcuagcaacauaaaaa

SEQ ID NO: 427091 - RNA, 23 nt, Artificial Sequence
  Synthetic
ucuauacgcuagcaacauaaaaa

SEQ ID NO: 427092 - RNA, 24 nt, Artificial Sequence
  Synthetic
uucuauacgcuagcaacauaaaaa

SEQ ID NO: 427093 - RNA, 18 nt, Artificial Sequence
  Synthetic
uagugaacuccauaaaaa

SEQ ID NO: 427094 - RNA, 19 nt, Artificial Sequence
  Synthetic
cuagugaacuccauaaaaa

SEQ ID NO: 427095 - RNA, 20 nt, Artificial Sequence
  Synthetic
ccuagugaacuccauaaaaa

SEQ ID NO: 427096 - RNA, 21 nt, Artificial Sequence
  Synthetic
accuagugaacuccauaaaaa

SEQ ID NO: 427097 - RNA, 22 nt, Artificial Sequence
  Synthetic
caccuagugaacuccauaaaaa

SEQ ID NO: 427098 - RNA, 23 nt, Artificial Sequence
  Synthetic
gcaccuagugaacuccauaaaaa

SEQ ID NO: 427099 - RNA, 24 nt, Artificial Sequence
  Synthetic
ugcaccuagugaacuccauaaaaa

SEQ ID NO: 427100 - RNA, 18 nt, Artificial Sequence
  Synthetic
gugauaacaugauaaaaa

SEQ ID NO: 427101 - RNA, 19 nt, Artificial Sequence
  Synthetic
ugugauaacaugauaaaaa

SEQ ID NO: 427102 - RNA, 20 nt, Artificial Sequence
  Synthetic
augugauaacaugauaaaaa

SEQ ID NO: 427103 - RNA, 21 nt, Artificial Sequence
  Synthetic
aaugugauaacaugauaaaaa

SEQ ID NO: 427104 - RNA, 22 nt, Artificial Sequence
  Synthetic
aaaugugauaacaugauaaaaa

SEQ ID NO: 427105 - RNA, 23 nt, Artificial Sequence
  Synthetic
gaaaugugauaacaugauaaaaa

SEQ ID NO: 427106 - RNA, 24 nt, Artificial Sequence
  Synthetic
ggaaaugugauaacaugauaaaaa

SEQ ID NO: 427107 - RNA, 18 nt, Artificial Sequence
  Synthetic
accacauggugauaaaaa

SEQ ID NO: 427108 - RNA, 19 nt, Artificial Sequence
  Synthetic
aaccacauggugauaaaaa

SEQ ID NO: 427109 - RNA, 20 nt, Artificial Sequence
  Synthetic
caaccacauggugauaaaaa

SEQ ID NO: 427110 - RNA, 21 nt, Artificial Sequence
  Synthetic
ccaaccacauggugauaaaaa

SEQ ID NO: 427111 - RNA, 22 nt, Artificial Sequence
  Synthetic
uccaaccacauggugauaaaaa

SEQ ID NO: 427112 - RNA, 23 nt, Artificial Sequence
  Synthetic
auccaaccacauggugauaaaaa

SEQ ID NO: 427113 - RNA, 24 nt, Artificial Sequence
  Synthetic
uauccaaccacauggugauaaaaa

SEQ ID NO: 427114 - RNA, 18 nt, Artificial Sequence
  Synthetic
gccagagggauauaaaaa

SEQ ID NO: 427115 - RNA, 19 nt, Artificial Sequence
  Synthetic
ugccagagggauauaaaaa

SEQ ID NO: 427116 - RNA, 20 nt, Artificial Sequence
  Synthetic
augccagagggauauaaaaa

SEQ ID NO: 427117 - RNA, 21 nt, Artificial Sequence
  Synthetic
aaugccagagggauauaaaaa

SEQ ID NO: 427118 - RNA, 22 nt, Artificial Sequence
  Synthetic
aaaugccagagggauauaaaaa

SEQ ID NO: 427119 - RNA, 23 nt, Artificial Sequence
  Synthetic
uaaaugccagagggauauaaaaa

SEQ ID NO: 427120 - RNA, 24 nt, Artificial Sequence
  Synthetic
uuaaaugccagagggauauaaaaa

SEQ ID NO: 427121 - RNA, 18 nt, Artificial Sequence
  Synthetic
ucuuacaugauauaaaaa

SEQ ID NO: 427122 - RNA, 19 nt, Artificial Sequence
  Synthetic
uucuuacaugauauaaaaa

SEQ ID NO: 427123 - RNA, 20 nt, Artificial Sequence
  Synthetic
auucuuacaugauauaaaaa

SEQ ID NO: 427124 - RNA, 21 nt, Artificial Sequence
  Synthetic
aauucuuacaugauauaaaaa

SEQ ID NO: 427125 - RNA, 22 nt, Artificial Sequence
  Synthetic
caauucuuacaugauauaaaaa

SEQ ID NO: 427126 - RNA, 23 nt, Artificial Sequence
  Synthetic
ucaauucuuacaugauauaaaaa

SEQ ID NO: 427127 - RNA, 24 nt, Artificial Sequence
  Synthetic
cucaauucuuacaugauauaaaaa

SEQ ID NO: 427128 - RNA, 18 nt, Artificial Sequence
  Synthetic
aaaauagauauauaaaaa

SEQ ID NO: 427129 - RNA, 19 nt, Artificial Sequence
  Synthetic
gaaaauagauauauaaaaa

SEQ ID NO: 427130 - RNA, 20 nt, Artificial Sequence
  Synthetic
agaaaauagauauauaaaaa

SEQ ID NO: 427131 - RNA, 21 nt, Artificial Sequence
  Synthetic
gagaaaauagauauauaaaaa

SEQ ID NO: 427132 - RNA, 22 nt, Artificial Sequence
  Synthetic
ugagaaaauagauauauaaaaa

SEQ ID NO: 427133 - RNA, 23 nt, Artificial Sequence
  Synthetic
gugagaaaauagauauauaaaaa

SEQ ID NO: 427134 - RNA, 24 nt, Artificial Sequence
  Synthetic
ugugagaaaauagauauauaaaaa

SEQ ID NO: 427135 - RNA, 18 nt, Artificial Sequence
  Synthetic
aauauuuucuuauaaaaa

SEQ ID NO: 427136 - RNA, 19 nt, Artificial Sequence
  Synthetic
aaauauuuucuuauaaaaa

SEQ ID NO: 427137 - RNA, 20 nt, Artificial Sequence
  Synthetic
aaaauauuuucuuauaaaaa

SEQ ID NO: 427138 - RNA, 21 nt, Artificial Sequence
  Synthetic
caaaauauuuucuuauaaaaa

SEQ ID NO: 427139 - RNA, 22 nt, Artificial Sequence
  Synthetic
ccaaaauauuuucuuauaaaaa

SEQ ID NO: 427140 - RNA, 23 nt, Artificial Sequence
  Synthetic
uccaaaauauuuucuuauaaaaa

SEQ ID NO: 427141 - RNA, 24 nt, Artificial Sequence
  Synthetic
guccaaaauauuuucuuauaaaaa

SEQ ID NO: 427142 - RNA, 18 nt, Artificial Sequence
  Synthetic
uccucaaaaaacuaaaaa

SEQ ID NO: 427143 - RNA, 19 nt, Artificial Sequence
  Synthetic
uuccucaaaaaacuaaaaa

SEQ ID NO: 427144 - RNA, 20 nt, Artificial Sequence
  Synthetic
guuccucaaaaaacuaaaaa

SEQ ID NO: 427145 - RNA, 21 nt, Artificial Sequence
  Synthetic
gguuccucaaaaaacuaaaaa

SEQ ID NO: 427146 - RNA, 22 nt, Artificial Sequence
  Synthetic
agguuccucaaaaaacuaaaaa

SEQ ID NO: 427147 - RNA, 23 nt, Artificial Sequence
  Synthetic
gagguuccucaaaaaacuaaaaa

SEQ ID NO: 427148 - RNA, 24 nt, Artificial Sequence
  Synthetic
ggagguuccucaaaaaacuaaaaa

SEQ ID NO: 427149 - RNA, 18 nt, Artificial Sequence
  Synthetic
uuccucagaaacuaaaaa

SEQ ID NO: 427150 - RNA, 19 nt, Artificial Sequence
  Synthetic
guuccucagaaacuaaaaa

SEQ ID NO: 427151 - RNA, 20 nt, Artificial Sequence
  Synthetic
gguuccucagaaacuaaaaa

SEQ ID NO: 427152 - RNA, 21 nt, Artificial Sequence
  Synthetic
agguuccucagaaacuaaaaa

SEQ ID NO: 427153 - RNA, 22 nt, Artificial Sequence
  Synthetic
gagguuccucagaaacuaaaaa

SEQ ID NO: 427154 - RNA, 23 nt, Artificial Sequence
  Synthetic
ggagguuccucagaaacuaaaaa

SEQ ID NO: 427155 - RNA, 24 nt, Artificial Sequence
  Synthetic
uggagguuccucagaaacuaaaaa

SEQ ID NO: 427156 - RNA, 18 nt, Artificial Sequence
  Synthetic
uuuuucuugaacuaaaaa

SEQ ID NO: 427157 - RNA, 19 nt, Artificial Sequence
  Synthetic
cuuuuucuugaacuaaaaa

SEQ ID NO: 427158 - RNA, 20 nt, Artificial Sequence
  Synthetic
ucuuuuucuugaacuaaaaa

SEQ ID NO: 427159 - RNA, 21 nt, Artificial Sequence
  Synthetic
uucuuuuucuugaacuaaaaa

SEQ ID NO: 427160 - RNA, 22 nt, Artificial Sequence
  Synthetic
uuucuuuuucuugaacuaaaaa

SEQ ID NO: 427161 - RNA, 23 nt, Artificial Sequence
  Synthetic
uuuucuuuuucuugaacuaaaaa

SEQ ID NO: 427162 - RNA, 24 nt, Artificial Sequence
  Synthetic
uuuuucuuuuucuugaacuaaaaa

SEQ ID NO: 427163 - RNA, 18 nt, Artificial Sequence
  Synthetic
aucuaugaucacuaaaaa

SEQ ID NO: 427164 - RNA, 19 nt, Artificial Sequence
  Synthetic
aaucuaugaucacuaaaaa

SEQ ID NO: 427165 - RNA, 20 nt, Artificial Sequence
  Synthetic
gaaucuaugaucacuaaaaa

SEQ ID NO: 427166 - RNA, 21 nt, Artificial Sequence
  Synthetic
ugaaucuaugaucacuaaaaa

SEQ ID NO: 427167 - RNA, 22 nt, Artificial Sequence
  Synthetic
cugaaucuaugaucacuaaaaa

SEQ ID NO: 427168 - RNA, 23 nt, Artificial Sequence
  Synthetic
acugaaucuaugaucacuaaaaa

SEQ ID NO: 427169 - RNA, 24 nt, Artificial Sequence
  Synthetic
aacugaaucuaugaucacuaaaaa

SEQ ID NO: 427170 - RNA, 18 nt, Artificial Sequence
  Synthetic
aaaucaccugacuaaaaa

SEQ ID NO: 427171 - RNA, 19 nt, Artificial Sequence
  Synthetic
caaaucaccugacuaaaaa

SEQ ID NO: 427172 - RNA, 20 nt, Artificial Sequence
  Synthetic
acaaaucaccugacuaaaaa

SEQ ID NO: 427173 - RNA, 21 nt, Artificial Sequence
  Synthetic
aacaaaucaccugacuaaaaa

SEQ ID NO: 427174 - RNA, 22 nt, Artificial Sequence
  Synthetic
aaacaaaucaccugacuaaaaa

SEQ ID NO: 427175 - RNA, 23 nt, Artificial Sequence
  Synthetic
aaaacaaaucaccugacuaaaaa

SEQ ID NO: 427176 - RNA, 24 nt, Artificial Sequence
  Synthetic
gaaaacaaaucaccugacuaaaaa

SEQ ID NO: 427177 - RNA, 18 nt, Artificial Sequence
  Synthetic
uacagagacuacuaaaaa

SEQ ID NO: 427178 - RNA, 19 nt, Artificial Sequence
  Synthetic
cuacagagacuacuaaaaa

SEQ ID NO: 427179 - RNA, 20 nt, Artificial Sequence
  Synthetic
ccuacagagacuacuaaaaa

SEQ ID NO: 427180 - RNA, 21 nt, Artificial Sequence
  Synthetic
accuacagagacuacuaaaaa

SEQ ID NO: 427181 - RNA, 22 nt, Artificial Sequence
  Synthetic
aaccuacagagacuacuaaaaa

SEQ ID NO: 427182 - RNA, 23 nt, Artificial Sequence
  Synthetic
uaaccuacagagacuacuaaaaa

SEQ ID NO: 427183 - RNA, 24 nt, Artificial Sequence
  Synthetic
auaaccuacagagacuacuaaaaa

SEQ ID NO: 427184 - RNA, 18 nt, Artificial Sequence
  Synthetic
cccugucucuacuaaaaa

SEQ ID NO: 427185 - RNA, 19 nt, Artificial Sequence
  Synthetic
acccugucucuacuaaaaa

SEQ ID NO: 427186 - RNA, 20 nt, Artificial Sequence
  Synthetic
aacccugucucuacuaaaaa

SEQ ID NO: 427187 - RNA, 21 nt, Artificial Sequence
  Synthetic
aaacccugucucuacuaaaaa

SEQ ID NO: 427188 - RNA, 22 nt, Artificial Sequence
  Synthetic
gaaacccugucucuacuaaaaa

SEQ ID NO: 427189 - RNA, 23 nt, Artificial Sequence
  Synthetic
ugaaacccugucucuacuaaaaa

SEQ ID NO: 427190 - RNA, 24 nt, Artificial Sequence
  Synthetic
gugaaacccugucucuacuaaaaa

SEQ ID NO: 427191 - RNA, 18 nt, Artificial Sequence
  Synthetic
uggaaaacagccuaaaaa

SEQ ID NO: 427192 - RNA, 19 nt, Artificial Sequence
  Synthetic
uuggaaaacagccuaaaaa

SEQ ID NO: 427193 - RNA, 20 nt, Artificial Sequence
  Synthetic
cuuggaaaacagccuaaaaa

SEQ ID NO: 427194 - RNA, 21 nt, Artificial Sequence
  Synthetic
ucuuggaaaacagccuaaaaa

SEQ ID NO: 427195 - RNA, 22 nt, Artificial Sequence
  Synthetic
cucuuggaaaacagccuaaaaa

SEQ ID NO: 427196 - RNA, 23 nt, Artificial Sequence
  Synthetic
acucuuggaaaacagccuaaaaa

SEQ ID NO: 427197 - RNA, 24 nt, Artificial Sequence
  Synthetic
gacucuuggaaaacagccuaaaaa

SEQ ID NO: 427198 - RNA, 18 nt, Artificial Sequence
  Synthetic
ucucugccauccuaaaaa

SEQ ID NO: 427199 - RNA, 19 nt, Artificial Sequence
  Synthetic
cucucugccauccuaaaaa

SEQ ID NO: 427200 - RNA, 20 nt, Artificial Sequence
  Synthetic
ucucucugccauccuaaaaa

SEQ ID NO: 427201 - RNA, 21 nt, Artificial Sequence
  Synthetic
uucucucugccauccuaaaaa

SEQ ID NO: 427202 - RNA, 22 nt, Artificial Sequence
  Synthetic
auucucucugccauccuaaaaa

SEQ ID NO: 427203 - RNA, 23 nt, Artificial Sequence
  Synthetic
uauucucucugccauccuaaaaa

SEQ ID NO: 427204 - RNA, 24 nt, Artificial Sequence
  Synthetic
guauucucucugccauccuaaaaa

SEQ ID NO: 427205 - RNA, 18 nt, Artificial Sequence
  Synthetic
agaucaaaaagcuaaaaa

SEQ ID NO: 427206 - RNA, 19 nt, Artificial Sequence
  Synthetic
cagaucaaaaagcuaaaaa

SEQ ID NO: 427207 - RNA, 20 nt, Artificial Sequence
  Synthetic
acagaucaaaaagcuaaaaa

SEQ ID NO: 427208 - RNA, 21 nt, Artificial Sequence
  Synthetic
aacagaucaaaaagcuaaaaa

SEQ ID NO: 427209 - RNA, 22 nt, Artificial Sequence
  Synthetic
uaacagaucaaaaagcuaaaaa

SEQ ID NO: 427210 - RNA, 23 nt, Artificial Sequence
  Synthetic
guaacagaucaaaaagcuaaaaa

SEQ ID NO: 427211 - RNA, 24 nt, Artificial Sequence
  Synthetic
uguaacagaucaaaaagcuaaaaa

SEQ ID NO: 427212 - RNA, 18 nt, Artificial Sequence
  Synthetic
uccucaaaaaaguaaaaa

SEQ ID NO: 427213 - RNA, 19 nt, Artificial Sequence
  Synthetic
uuccucaaaaaaguaaaaa

SEQ ID NO: 427214 - RNA, 20 nt, Artificial Sequence
  Synthetic
guuccucaaaaaaguaaaaa

SEQ ID NO: 427215 - RNA, 21 nt, Artificial Sequence
  Synthetic
gguuccucaaaaaaguaaaaa

SEQ ID NO: 427216 - RNA, 22 nt, Artificial Sequence
  Synthetic
agguuccucaaaaaaguaaaaa

SEQ ID NO: 427217 - RNA, 23 nt, Artificial Sequence
  Synthetic
gagguuccucaaaaaaguaaaaa

SEQ ID NO: 427218 - RNA, 24 nt, Artificial Sequence
  Synthetic
ggagguuccucaaaaaaguaaaaa

SEQ ID NO: 427219 - RNA, 18 nt, Artificial Sequence
  Synthetic
ucuuuuaaugaguaaaaa

SEQ ID NO: 427220 - RNA, 19 nt, Artificial Sequence
  Synthetic
aucuuuuaaugaguaaaaa

SEQ ID NO: 427221 - RNA, 20 nt, Artificial Sequence
  Synthetic
aaucuuuuaaugaguaaaaa

SEQ ID NO: 427222 - RNA, 21 nt, Artificial Sequence
  Synthetic
aaaucuuuuaaugaguaaaaa

SEQ ID NO: 427223 - RNA, 22 nt, Artificial Sequence
  Synthetic
aaaaucuuuuaaugaguaaaaa

SEQ ID NO: 427224 - RNA, 23 nt, Artificial Sequence
  Synthetic
aaaaaucuuuuaaugaguaaaaa

SEQ ID NO: 427225 - RNA, 24 nt, Artificial Sequence
  Synthetic
aaaaaaucuuuuaaugaguaaaaa

SEQ ID NO: 427226 - RNA, 18 nt, Artificial Sequence
  Synthetic
auccaucuuuaguaaaaa

SEQ ID NO: 427227 - RNA, 19 nt, Artificial Sequence
  Synthetic
gauccaucuuuaguaaaaa

SEQ ID NO: 427228 - RNA, 20 nt, Artificial Sequence
  Synthetic
ugauccaucuuuaguaaaaa

SEQ ID NO: 427229 - RNA, 21 nt, Artificial Sequence
  Synthetic
augauccaucuuuaguaaaaa

SEQ ID NO: 427230 - RNA, 22 nt, Artificial Sequence
  Synthetic
gaugauccaucuuuaguaaaaa

SEQ ID NO: 427231 - RNA, 23 nt, Artificial Sequence
  Synthetic
ugaugauccaucuuuaguaaaaa

SEQ ID NO: 427232 - RNA, 24 nt, Artificial Sequence
  Synthetic
augaugauccaucuuuaguaaaaa

SEQ ID NO: 427233 - RNA, 18 nt, Artificial Sequence
  Synthetic
auacuuuuaggguaaaaa

SEQ ID NO: 427234 - RNA, 19 nt, Artificial Sequence
  Synthetic
aauacuuuuaggguaaaaa

SEQ ID NO: 427235 - RNA, 20 nt, Artificial Sequence
  Synthetic
aaauacuuuuaggguaaaaa

SEQ ID NO: 427236 - RNA, 21 nt, Artificial Sequence
  Synthetic
uaaauacuuuuaggguaaaaa

SEQ ID NO: 427237 - RNA, 22 nt, Artificial Sequence
  Synthetic
auaaauacuuuuaggguaaaaa

SEQ ID NO: 427238 - RNA, 23 nt, Artificial Sequence
  Synthetic
aauaaauacuuuuaggguaaaaa

SEQ ID NO: 427239 - RNA, 24 nt, Artificial Sequence
  Synthetic
aaauaaauacuuuuaggguaaaaa

SEQ ID NO: 427240 - RNA, 18 nt, Artificial Sequence
  Synthetic
agcucucauggguaaaaa

SEQ ID NO: 427241 - RNA, 19 nt, Artificial Sequence
  Synthetic
aagcucucauggguaaaaa

SEQ ID NO: 427242 - RNA, 20 nt, Artificial Sequence
  Synthetic
caagcucucauggguaaaaa

SEQ ID NO: 427243 - RNA, 21 nt, Artificial Sequence
  Synthetic
ccaagcucucauggguaaaaa

SEQ ID NO: 427244 - RNA, 22 nt, Artificial Sequence
  Synthetic
gccaagcucucauggguaaaaa

SEQ ID NO: 427245 - RNA, 23 nt, Artificial Sequence
  Synthetic
ugccaagcucucauggguaaaaa

SEQ ID NO: 427246 - RNA, 24 nt, Artificial Sequence
  Synthetic
uugccaagcucucauggguaaaaa

SEQ ID NO: 427247 - RNA, 18 nt, Artificial Sequence
  Synthetic
ugacaaagaauguaaaaa

SEQ ID NO: 427248 - RNA, 19 nt, Artificial Sequence
  Synthetic
augacaaagaauguaaaaa

SEQ ID NO: 427249 - RNA, 20 nt, Artificial Sequence
  Synthetic
gaugacaaagaauguaaaaa

SEQ ID NO: 427250 - RNA, 21 nt, Artificial Sequence
  Synthetic
ggaugacaaagaauguaaaaa

SEQ ID NO: 427251 - RNA, 22 nt, Artificial Sequence
  Synthetic
aggaugacaaagaauguaaaaa

SEQ ID NO: 427252 - RNA, 23 nt, Artificial Sequence
  Synthetic
uaggaugacaaagaauguaaaaa

SEQ ID NO: 427253 - RNA, 24 nt, Artificial Sequence
  Synthetic
auaggaugacaaagaauguaaaaa

SEQ ID NO: 427254 - RNA, 18 nt, Artificial Sequence
  Synthetic
aaaaaaaaaaauuaaaaa

SEQ ID NO: 427255 - RNA, 19 nt, Artificial Sequence
  Synthetic
aaaaaaaaaaaauuaaaaa

SEQ ID NO: 427256 - RNA, 20 nt, Artificial Sequence
  Synthetic
aaaaaaaaaaaaauuaaaaa

SEQ ID NO: 427257 - RNA, 21 nt, Artificial Sequence
  Synthetic
caaaaaaaaaaaaauuaaaaa

SEQ ID NO: 427258 - RNA, 22 nt, Artificial Sequence
  Synthetic
ucaaaaaaaaaaaaauuaaaaa

SEQ ID NO: 427259 - RNA, 23 nt, Artificial Sequence
  Synthetic
cucaaaaaaaaaaaaauuaaaaa

SEQ ID NO: 427260 - RNA, 24 nt, Artificial Sequence
  Synthetic
ucucaaaaaaaaaaaaauuaaaaa

SEQ ID NO: 427261 - RNA, 18 nt, Artificial Sequence
  Synthetic
aauuugcuuaauuaaaaa

SEQ ID NO: 427262 - RNA, 19 nt, Artificial Sequence
  Synthetic
gaauuugcuuaauuaaaaa

SEQ ID NO: 427263 - RNA, 20 nt, Artificial Sequence
  Synthetic
agaauuugcuuaauuaaaaa

SEQ ID NO: 427264 - RNA, 21 nt, Artificial Sequence
  Synthetic
cagaauuugcuuaauuaaaaa

SEQ ID NO: 427265 - RNA, 22 nt, Artificial Sequence
  Synthetic
acagaauuugcuuaauuaaaaa

SEQ ID NO: 427266 - RNA, 23 nt, Artificial Sequence
  Synthetic
gacagaauuugcuuaauuaaaaa

SEQ ID NO: 427267 - RNA, 24 nt, Artificial Sequence
  Synthetic
ugacagaauuugcuuaauuaaaaa

SEQ ID NO: 427268 - RNA, 18 nt, Artificial Sequence
  Synthetic
uccacaaaacauuaaaaa

SEQ ID NO: 427269 - RNA, 19 nt, Artificial Sequence
  Synthetic
auccacaaaacauuaaaaa

SEQ ID NO: 427270 - RNA, 20 nt, Artificial Sequence
  Synthetic
gauccacaaaacauuaaaaa

SEQ ID NO: 427271 - RNA, 21 nt, Artificial Sequence
  Synthetic
agauccacaaaacauuaaaaa

SEQ ID NO: 427272 - RNA, 22 nt, Artificial Sequence
  Synthetic
aagauccacaaaacauuaaaaa

SEQ ID NO: 427273 - RNA, 23 nt, Artificial Sequence
  Synthetic
gaagauccacaaaacauuaaaaa

SEQ ID NO: 427274 - RNA, 24 nt, Artificial Sequence
  Synthetic
ggaagauccacaaaacauuaaaaa

SEQ ID NO: 427275 - RNA, 18 nt, Artificial Sequence
  Synthetic
guccugaaauauuaaaaa

SEQ ID NO: 427276 - RNA, 19 nt, Artificial Sequence
  Synthetic
uguccugaaauauuaaaaa

SEQ ID NO: 427277 - RNA, 20 nt, Artificial Sequence
  Synthetic
uuguccugaaauauuaaaaa

SEQ ID NO: 427278 - RNA, 21 nt, Artificial Sequence
  Synthetic
uuuguccugaaauauuaaaaa

SEQ ID NO: 427279 - RNA, 22 nt, Artificial Sequence
  Synthetic
cuuuguccugaaauauuaaaaa

SEQ ID NO: 427280 - RNA, 23 nt, Artificial Sequence
  Synthetic
ccuuuguccugaaauauuaaaaa

SEQ ID NO: 427281 - RNA, 24 nt, Artificial Sequence
  Synthetic
gccuuuguccugaaauauuaaaaa

SEQ ID NO: 427282 - RNA, 18 nt, Artificial Sequence
  Synthetic
uccucgaaaacuuaaaaa

SEQ ID NO: 427283 - RNA, 19 nt, Artificial Sequence
  Synthetic
uuccucgaaaacuuaaaaa

SEQ ID NO: 427284 - RNA, 20 nt, Artificial Sequence
  Synthetic
guuccucgaaaacuuaaaaa

SEQ ID NO: 427285 - RNA, 21 nt, Artificial Sequence
  Synthetic
gguuccucgaaaacuuaaaaa

SEQ ID NO: 427286 - RNA, 22 nt, Artificial Sequence
  Synthetic
agguuccucgaaaacuuaaaaa

SEQ ID NO: 427287 - RNA, 23 nt, Artificial Sequence
  Synthetic
gagguuccucgaaaacuuaaaaa

SEQ ID NO: 427288 - RNA, 24 nt, Artificial Sequence
  Synthetic
ggagguuccucgaaaacuuaaaaa

SEQ ID NO: 427289 - RNA, 18 nt, Artificial Sequence
  Synthetic
caaagagaaaguuaaaaa

SEQ ID NO: 427290 - RNA, 19 nt, Artificial Sequence
  Synthetic
ccaaagagaaaguuaaaaa

SEQ ID NO: 427291 - RNA, 20 nt, Artificial Sequence
  Synthetic
uccaaagagaaaguuaaaaa

SEQ ID NO: 427292 - RNA, 21 nt, Artificial Sequence
  Synthetic
uuccaaagagaaaguuaaaaa

SEQ ID NO: 427293 - RNA, 22 nt, Artificial Sequence
  Synthetic
uuuccaaagagaaaguuaaaaa

SEQ ID NO: 427294 - RNA, 23 nt, Artificial Sequence
  Synthetic
guuuccaaagagaaaguuaaaaa

SEQ ID NO: 427295 - RNA, 24 nt, Artificial Sequence
  Synthetic
cguuuccaaagagaaaguuaaaaa

SEQ ID NO: 427296 - RNA, 18 nt, Artificial Sequence
  Synthetic
aaaacaaaaauuuaaaaa

SEQ ID NO: 427297 - RNA, 19 nt, Artificial Sequence
  Synthetic
uaaaacaaaaauuuaaaaa

SEQ ID NO: 427298 - RNA, 20 nt, Artificial Sequence
  Synthetic
auaaaacaaaaauuuaaaaa

SEQ ID NO: 427299 - RNA, 21 nt, Artificial Sequence
  Synthetic
aauaaaacaaaaauuuaaaaa

SEQ ID NO: 427300 - RNA, 22 nt, Artificial Sequence
  Synthetic
aaauaaaacaaaaauuuaaaaa

SEQ ID NO: 427301 - RNA, 23 nt, Artificial Sequence
  Synthetic
aaaauaaaacaaaaauuuaaaaa

SEQ ID NO: 427302 - RNA, 24 nt, Artificial Sequence
  Synthetic
gaaaauaaaacaaaaauuuaaaaa

SEQ ID NO: 427303 - RNA, 18 nt, Artificial Sequence
  Synthetic
gcauacuagauuuaaaaa

SEQ ID NO: 427304 - RNA, 19 nt, Artificial Sequence
  Synthetic
agcauacuagauuuaaaaa

SEQ ID NO: 427305 - RNA, 20 nt, Artificial Sequence
  Synthetic
uagcauacuagauuuaaaaa

SEQ ID NO: 427306 - RNA, 21 nt, Artificial Sequence
  Synthetic
cuagcauacuagauuuaaaaa

SEQ ID NO: 427307 - RNA, 22 nt, Artificial Sequence
  Synthetic
acuagcauacuagauuuaaaaa

SEQ ID NO: 427308 - RNA, 23 nt, Artificial Sequence
  Synthetic
cacuagcauacuagauuuaaaaa

SEQ ID NO: 427309 - RNA, 24 nt, Artificial Sequence
  Synthetic
acacuagcauacuagauuuaaaaa

SEQ ID NO: 427310 - RNA, 18 nt, Artificial Sequence
  Synthetic
uaccauuuucuuuaaaaa

SEQ ID NO: 427311 - RNA, 19 nt, Artificial Sequence
  Synthetic
auaccauuuucuuuaaaaa

SEQ ID NO: 427312 - RNA, 20 nt, Artificial Sequence
  Synthetic
uauaccauuuucuuuaaaaa

SEQ ID NO: 427313 - RNA, 21 nt, Artificial Sequence
  Synthetic
uuauaccauuuucuuuaaaaa

SEQ ID NO: 427314 - RNA, 22 nt, Artificial Sequence
  Synthetic
uuuauaccauuuucuuuaaaaa

SEQ ID NO: 427315 - RNA, 23 nt, Artificial Sequence
  Synthetic
uuuuauaccauuuucuuuaaaaa

SEQ ID NO: 427316 - RNA, 24 nt, Artificial Sequence
  Synthetic
cuuuuauaccauuuucuuuaaaaa

SEQ ID NO: 427317 - RNA, 18 nt, Artificial Sequence
  Synthetic
uaaaagaaaguuuaaaaa

SEQ ID NO: 427318 - RNA, 19 nt, Artificial Sequence
  Synthetic
auaaaagaaaguuuaaaaa

SEQ ID NO: 427319 - RNA, 20 nt, Artificial Sequence
  Synthetic
gauaaaagaaaguuuaaaaa

SEQ ID NO: 427320 - RNA, 21 nt, Artificial Sequence
  Synthetic
agauaaaagaaaguuuaaaaa

SEQ ID NO: 427321 - RNA, 22 nt, Artificial Sequence
  Synthetic
aagauaaaagaaaguuuaaaaa

SEQ ID NO: 427322 - RNA, 23 nt, Artificial Sequence
  Synthetic
uaagauaaaagaaaguuuaaaaa

SEQ ID NO: 427323 - RNA, 24 nt, Artificial Sequence
  Synthetic
guaagauaaaagaaaguuuaaaaa

SEQ ID NO: 427324 - RNA, 18 nt, Artificial Sequence
  Synthetic
aaguaauaaguuuaaaaa

SEQ ID NO: 427325 - RNA, 19 nt, Artificial Sequence
  Synthetic
gaaguaauaaguuuaaaaa

SEQ ID NO: 427326 - RNA, 20 nt, Artificial Sequence
  Synthetic
ggaaguaauaaguuuaaaaa

SEQ ID NO: 427327 - RNA, 21 nt, Artificial Sequence
  Synthetic
aggaaguaauaaguuuaaaaa

SEQ ID NO: 427328 - RNA, 22 nt, Artificial Sequence
  Synthetic
aaggaaguaauaaguuuaaaaa

SEQ ID NO: 427329 - RNA, 23 nt, Artificial Sequence
  Synthetic
gaaggaaguaauaaguuuaaaaa

SEQ ID NO: 427330 - RNA, 24 nt, Artificial Sequence
  Synthetic
agaaggaaguaauaaguuuaaaaa

SEQ ID NO: 427331 - RNA, 18 nt, Artificial Sequence
  Synthetic
uuaaaaaaauuuuaaaaa

SEQ ID NO: 427332 - RNA, 19 nt, Artificial Sequence
  Synthetic
uuuaaaaaaauuuuaaaaa

SEQ ID NO: 427333 - RNA, 20 nt, Artificial Sequence
  Synthetic
auuuaaaaaaauuuuaaaaa

SEQ ID NO: 427334 - RNA, 21 nt, Artificial Sequence
  Synthetic
aauuuaaaaaaauuuuaaaaa

SEQ ID NO: 427335 - RNA, 22 nt, Artificial Sequence
  Synthetic
aaauuuaaaaaaauuuuaaaaa

SEQ ID NO: 427336 - RNA, 23 nt, Artificial Sequence
  Synthetic
aaaauuuaaaaaaauuuuaaaaa

SEQ ID NO: 427337 - RNA, 24 nt, Artificial Sequence
  Synthetic
aaaaauuuaaaaaaauuuuaaaaa

SEQ ID NO: 427338 - RNA, 18 nt, Artificial Sequence
  Synthetic
caagacaaauuuuaaaaa

SEQ ID NO: 427339 - RNA, 19 nt, Artificial Sequence
  Synthetic
gcaagacaaauuuuaaaaa

SEQ ID NO: 427340 - RNA, 20 nt, Artificial Sequence
  Synthetic
ugcaagacaaauuuuaaaaa

SEQ ID NO: 427341 - RNA, 21 nt, Artificial Sequence
  Synthetic
gugcaagacaaauuuuaaaaa

SEQ ID NO: 427342 - RNA, 22 nt, Artificial Sequence
  Synthetic
ugugcaagacaaauuuuaaaaa

SEQ ID NO: 427343 - RNA, 23 nt, Artificial Sequence
  Synthetic
cugugcaagacaaauuuuaaaaa

SEQ ID NO: 427344 - RNA, 24 nt, Artificial Sequence
  Synthetic
acugugcaagacaaauuuuaaaaa

SEQ ID NO: 427345 - RNA, 18 nt, Artificial Sequence
  Synthetic
auuuuuauauuuuaaaaa

SEQ ID NO: 427346 - RNA, 19 nt, Artificial Sequence
  Synthetic
gauuuuuauauuuuaaaaa

SEQ ID NO: 427347 - RNA, 20 nt, Artificial Sequence
  Synthetic
agauuuuuauauuuuaaaaa

SEQ ID NO: 427348 - RNA, 21 nt, Artificial Sequence
  Synthetic
gagauuuuuauauuuuaaaaa

SEQ ID NO: 427349 - RNA, 22 nt, Artificial Sequence
  Synthetic
ggagauuuuuauauuuuaaaaa

SEQ ID NO: 427350 - RNA, 23 nt, Artificial Sequence
  Synthetic
gggagauuuuuauauuuuaaaaa

SEQ ID NO: 427351 - RNA, 24 nt, Artificial Sequence
  Synthetic
ugggagauuuuuauauuuuaaaaa

SEQ ID NO: 427352 - RNA, 18 nt, Artificial Sequence
  Synthetic
guauauuuauuuuaaaaa

SEQ ID NO: 427353 - RNA, 19 nt, Artificial Sequence
  Synthetic
gguauauuuauuuuaaaaa

SEQ ID NO: 427354 - RNA, 20 nt, Artificial Sequence
  Synthetic
agguauauuuauuuuaaaaa

SEQ ID NO: 427355 - RNA, 21 nt, Artificial Sequence
  Synthetic
aagguauauuuauuuuaaaaa

SEQ ID NO: 427356 - RNA, 22 nt, Artificial Sequence
  Synthetic
uaagguauauuuauuuuaaaaa

SEQ ID NO: 427357 - RNA, 23 nt, Artificial Sequence
  Synthetic
uuaagguauauuuauuuuaaaaa

SEQ ID NO: 427358 - RNA, 24 nt, Artificial Sequence
  Synthetic
auuaagguauauuuauuuuaaaaa

SEQ ID NO: 427359 - RNA, 18 nt, Artificial Sequence
  Synthetic
ccaauaguguuuuaaaaa

SEQ ID NO: 427360 - RNA, 19 nt, Artificial Sequence
  Synthetic
cccaauaguguuuuaaaaa

SEQ ID NO: 427361 - RNA, 20 nt, Artificial Sequence
  Synthetic
gcccaauaguguuuuaaaaa

SEQ ID NO: 427362 - RNA, 21 nt, Artificial Sequence
  Synthetic
agcccaauaguguuuuaaaaa

SEQ ID NO: 427363 - RNA, 22 nt, Artificial Sequence
  Synthetic
uagcccaauaguguuuuaaaaa

SEQ ID NO: 427364 - RNA, 23 nt, Artificial Sequence
  Synthetic
auagcccaauaguguuuuaaaaa

SEQ ID NO: 427365 - RNA, 24 nt, Artificial Sequence
  Synthetic
uauagcccaauaguguuuuaaaaa

SEQ ID NO: 427366 - RNA, 18 nt, Artificial Sequence
  Synthetic
aaaaccauuuuuuaaaaa

SEQ ID NO: 427367 - RNA, 19 nt, Artificial Sequence
  Synthetic
gaaaaccauuuuuuaaaaa

SEQ ID NO: 427368 - RNA, 20 nt, Artificial Sequence
  Synthetic
agaaaaccauuuuuuaaaaa

SEQ ID NO: 427369 - RNA, 21 nt, Artificial Sequence
  Synthetic
uagaaaaccauuuuuuaaaaa

SEQ ID NO: 427370 - RNA, 22 nt, Artificial Sequence
  Synthetic
uuagaaaaccauuuuuuaaaaa

SEQ ID NO: 427371 - RNA, 23 nt, Artificial Sequence
  Synthetic
uuuagaaaaccauuuuuuaaaaa

SEQ ID NO: 427372 - RNA, 24 nt, Artificial Sequence
  Synthetic
auuuagaaaaccauuuuuuaaaaa

SEQ ID NO: 427373 - RNA, 18 nt, Artificial Sequence
  Synthetic
acauacguuuuuuaaaaa

SEQ ID NO: 427374 - RNA, 19 nt, Artificial Sequence
  Synthetic
aacauacguuuuuuaaaaa

SEQ ID NO: 427375 - RNA, 20 nt, Artificial Sequence
  Synthetic
gaacauacguuuuuuaaaaa

SEQ ID NO: 427376 - RNA, 21 nt, Artificial Sequence
  Synthetic
ugaacauacguuuuuuaaaaa

SEQ ID NO: 427377 - RNA, 22 nt, Artificial Sequence
  Synthetic
uugaacauacguuuuuuaaaaa

SEQ ID NO: 427378 - RNA, 23 nt, Artificial Sequence
  Synthetic
guugaacauacguuuuuuaaaaa

SEQ ID NO: 427379 - RNA, 24 nt, Artificial Sequence
  Synthetic
uguugaacauacguuuuuuaaaaa

SEQ ID NO: 427380 - RNA, 18 nt, Artificial Sequence
  Synthetic
uccauauuuuuuuaaaaa

SEQ ID NO: 427381 - RNA, 19 nt, Artificial Sequence
  Synthetic
auccauauuuuuuuaaaaa

SEQ ID NO: 427382 - RNA, 20 nt, Artificial Sequence
  Synthetic
aauccauauuuuuuuaaaaa

SEQ ID NO: 427383 - RNA, 21 nt, Artificial Sequence
  Synthetic
aaauccauauuuuuuuaaaaa

SEQ ID NO: 427384 - RNA, 22 nt, Artificial Sequence
  Synthetic
gaaauccauauuuuuuuaaaaa

SEQ ID NO: 427385 - RNA, 23 nt, Artificial Sequence
  Synthetic
agaaauccauauuuuuuuaaaaa

SEQ ID NO: 427386 - RNA, 24 nt, Artificial Sequence
  Synthetic
cagaaauccauauuuuuuuaaaaa

SEQ ID NO: 427387 - RNA, 18 nt, Artificial Sequence
  Synthetic
ggaaaaacaaaaacaaaa

SEQ ID NO: 427388 - RNA, 19 nt, Artificial Sequence
  Synthetic
aggaaaaacaaaaacaaaa

SEQ ID NO: 427389 - RNA, 20 nt, Artificial Sequence
  Synthetic
aaggaaaaacaaaaacaaaa

SEQ ID NO: 427390 - RNA, 21 nt, Artificial Sequence
  Synthetic
aaaggaaaaacaaaaacaaaa

SEQ ID NO: 427391 - RNA, 22 nt, Artificial Sequence
  Synthetic
aaaaggaaaaacaaaaacaaaa

SEQ ID NO: 427392 - RNA, 23 nt, Artificial Sequence
  Synthetic
aaaaaggaaaaacaaaaacaaaa

SEQ ID NO: 427393 - RNA, 24 nt, Artificial Sequence
  Synthetic
uaaaaaggaaaaacaaaaacaaaa

SEQ ID NO: 427394 - RNA, 18 nt, Artificial Sequence
  Synthetic
auaucuagaaaaacaaaa

SEQ ID NO: 427395 - RNA, 19 nt, Artificial Sequence
  Synthetic
uauaucuagaaaaacaaaa

SEQ ID NO: 427396 - RNA, 20 nt, Artificial Sequence
  Synthetic
uuauaucuagaaaaacaaaa

SEQ ID NO: 427397 - RNA, 21 nt, Artificial Sequence
  Synthetic
uuuauaucuagaaaaacaaaa

SEQ ID NO: 427398 - RNA, 22 nt, Artificial Sequence
  Synthetic
guuuauaucuagaaaaacaaaa

SEQ ID NO: 427399 - RNA, 23 nt, Artificial Sequence
  Synthetic
aguuuauaucuagaaaaacaaaa

SEQ ID NO: 427400 - RNA, 24 nt, Artificial Sequence
  Synthetic
caguuuauaucuagaaaaacaaaa

SEQ ID NO: 427401 - RNA, 18 nt, Artificial Sequence
  Synthetic
aaacaaaacaaaacaaaa

SEQ ID NO: 427402 - RNA, 19 nt, Artificial Sequence
  Synthetic
aaaacaaaacaaaacaaaa

SEQ ID NO: 427403 - RNA, 20 nt, Artificial Sequence
  Synthetic
caaaacaaaacaaaacaaaa

SEQ ID NO: 427404 - RNA, 21 nt, Artificial Sequence
  Synthetic
acaaaacaaaacaaaacaaaa

SEQ ID NO: 427405 - RNA, 22 nt, Artificial Sequence
  Synthetic
aacaaaacaaaacaaaacaaaa

SEQ ID NO: 427406 - RNA, 23 nt, Artificial Sequence
  Synthetic
aaacaaaacaaaacaaaacaaaa

SEQ ID NO: 427407 - RNA, 24 nt, Artificial Sequence
  Synthetic
aaaacaaaacaaaacaaaacaaaa

SEQ ID NO: 427408 - RNA, 18 nt, Artificial Sequence
  Synthetic
agcacacacaaaacaaaa

SEQ ID NO: 427409 - RNA, 19 nt, Artificial Sequence
  Synthetic
aagcacacacaaaacaaaa

SEQ ID NO: 427410 - RNA, 20 nt, Artificial Sequence
  Synthetic
uaagcacacacaaaacaaaa

SEQ ID NO: 427411 - RNA, 21 nt, Artificial Sequence
  Synthetic
uuaagcacacacaaaacaaaa

SEQ ID NO: 427412 - RNA, 22 nt, Artificial Sequence
  Synthetic
auuaagcacacacaaaacaaaa

SEQ ID NO: 427413 - RNA, 23 nt, Artificial Sequence
  Synthetic
aauuaagcacacacaaaacaaaa

SEQ ID NO: 427414 - RNA, 24 nt, Artificial Sequence
  Synthetic
uaauuaagcacacacaaaacaaaa

SEQ ID NO: 427415 - RNA, 18 nt, Artificial Sequence
  Synthetic
caaaaaggcaaaacaaaa

SEQ ID NO: 427416 - RNA, 19 nt, Artificial Sequence
  Synthetic
ccaaaaaggcaaaacaaaa

SEQ ID NO: 427417 - RNA, 20 nt, Artificial Sequence
  Synthetic
accaaaaaggcaaaacaaaa

SEQ ID NO: 427418 - RNA, 21 nt, Artificial Sequence
  Synthetic
uaccaaaaaggcaaaacaaaa

SEQ ID NO: 427419 - RNA, 22 nt, Artificial Sequence
  Synthetic
auaccaaaaaggcaaaacaaaa

SEQ ID NO: 427420 - RNA, 23 nt, Artificial Sequence
  Synthetic
gauaccaaaaaggcaaaacaaaa

SEQ ID NO: 427421 - RNA, 24 nt, Artificial Sequence
  Synthetic
agauaccaaaaaggcaaaacaaaa

SEQ ID NO: 427422 - RNA, 18 nt, Artificial Sequence
  Synthetic
augauugauaaaacaaaa

SEQ ID NO: 427423 - RNA, 19 nt, Artificial Sequence
  Synthetic
uaugauugauaaaacaaaa

SEQ ID NO: 427424 - RNA, 20 nt, Artificial Sequence
  Synthetic
uuaugauugauaaaacaaaa

SEQ ID NO: 427425 - RNA, 21 nt, Artificial Sequence
  Synthetic
uuuaugauugauaaaacaaaa

SEQ ID NO: 427426 - RNA, 22 nt, Artificial Sequence
  Synthetic
auuuaugauugauaaaacaaaa

SEQ ID NO: 427427 - RNA, 23 nt, Artificial Sequence
  Synthetic
cauuuaugauugauaaaacaaaa

SEQ ID NO: 427428 - RNA, 24 nt, Artificial Sequence
  Synthetic
ucauuuaugauugauaaaacaaaa

SEQ ID NO: 427429 - RNA, 18 nt, Artificial Sequence
  Synthetic
uaauaaaaacaaacaaaa

SEQ ID NO: 427430 - RNA, 19 nt, Artificial Sequence
  Synthetic
uuaauaaaaacaaacaaaa

SEQ ID NO: 427431 - RNA, 20 nt, Artificial Sequence
  Synthetic
auuaauaaaaacaaacaaaa

SEQ ID NO: 427432 - RNA, 21 nt, Artificial Sequence
  Synthetic
uauuaauaaaaacaaacaaaa

SEQ ID NO: 427433 - RNA, 22 nt, Artificial Sequence
  Synthetic
auauuaauaaaaacaaacaaaa

SEQ ID NO: 427434 - RNA, 23 nt, Artificial Sequence
  Synthetic
uauauuaauaaaaacaaacaaaa

SEQ ID NO: 427435 - RNA, 24 nt, Artificial Sequence
  Synthetic
auauauuaauaaaaacaaacaaaa

SEQ ID NO: 427436 - RNA, 18 nt, Artificial Sequence
  Synthetic
aaaagaaaagaaacaaaa

SEQ ID NO: 427437 - RNA, 19 nt, Artificial Sequence
  Synthetic
aaaaagaaaagaaacaaaa

SEQ ID NO: 427438 - RNA, 20 nt, Artificial Sequence
  Synthetic
uaaaaagaaaagaaacaaaa

SEQ ID NO: 427439 - RNA, 21 nt, Artificial Sequence
  Synthetic
guaaaaagaaaagaaacaaaa

SEQ ID NO: 427440 - RNA, 22 nt, Artificial Sequence
  Synthetic
aguaaaaagaaaagaaacaaaa

SEQ ID NO: 427441 - RNA, 23 nt, Artificial Sequence
  Synthetic
aaguaaaaagaaaagaaacaaaa

SEQ ID NO: 427442 - RNA, 24 nt, Artificial Sequence
  Synthetic
aaaguaaaaagaaaagaaacaaaa

SEQ ID NO: 427443 - RNA, 18 nt, Artificial Sequence
  Synthetic
uuaaaauucgaaacaaaa

SEQ ID NO: 427444 - RNA, 19 nt, Artificial Sequence
  Synthetic
cuuaaaauucgaaacaaaa

SEQ ID NO: 427445 - RNA, 20 nt, Artificial Sequence
  Synthetic
ucuuaaaauucgaaacaaaa

SEQ ID NO: 427446 - RNA, 21 nt, Artificial Sequence
  Synthetic
aucuuaaaauucgaaacaaaa

SEQ ID NO: 427447 - RNA, 22 nt, Artificial Sequence
  Synthetic
uaucuuaaaauucgaaacaaaa

SEQ ID NO: 427448 - RNA, 23 nt, Artificial Sequence
  Synthetic
uuaucuuaaaauucgaaacaaaa

SEQ ID NO: 427449 - RNA, 24 nt, Artificial Sequence
  Synthetic
auuaucuuaaaauucgaaacaaaa

SEQ ID NO: 427450 - RNA, 18 nt, Artificial Sequence
  Synthetic
uuuaauauaacaacaaaa

SEQ ID NO: 427451 - RNA, 19 nt, Artificial Sequence
  Synthetic
guuuaauauaacaacaaaa

SEQ ID NO: 427452 - RNA, 20 nt, Artificial Sequence
  Synthetic
aguuuaauauaacaacaaaa

SEQ ID NO: 427453 - RNA, 21 nt, Artificial Sequence
  Synthetic
gaguuuaauauaacaacaaaa

SEQ ID NO: 427454 - RNA, 22 nt, Artificial Sequence
  Synthetic
ugaguuuaauauaacaacaaaa

SEQ ID NO: 427455 - RNA, 23 nt, Artificial Sequence
  Synthetic
augaguuuaauauaacaacaaaa

SEQ ID NO: 427456 - RNA, 24 nt, Artificial Sequence
  Synthetic
gaugaguuuaauauaacaacaaaa

SEQ ID NO: 427457 - RNA, 18 nt, Artificial Sequence
  Synthetic
ggcaaagacacaacaaaa

SEQ ID NO: 427458 - RNA, 19 nt, Artificial Sequence
  Synthetic
uggcaaagacacaacaaaa

SEQ ID NO: 427459 - RNA, 20 nt, Artificial Sequence
  Synthetic
cuggcaaagacacaacaaaa

SEQ ID NO: 427460 - RNA, 21 nt, Artificial Sequence
  Synthetic
ccuggcaaagacacaacaaaa

SEQ ID NO: 427461 - RNA, 22 nt, Artificial Sequence
  Synthetic
accuggcaaagacacaacaaaa

SEQ ID NO: 427462 - RNA, 23 nt, Artificial Sequence
  Synthetic
aaccuggcaaagacacaacaaaa

SEQ ID NO: 427463 - RNA, 24 nt, Artificial Sequence
  Synthetic
aaaccuggcaaagacacaacaaaa

SEQ ID NO: 427464 - RNA, 18 nt, Artificial Sequence
  Synthetic
cauagcucuccaacaaaa

SEQ ID NO: 427465 - RNA, 19 nt, Artificial Sequence
  Synthetic
ucauagcucuccaacaaaa

SEQ ID NO: 427466 - RNA, 20 nt, Artificial Sequence
  Synthetic
uucauagcucuccaacaaaa

SEQ ID NO: 427467 - RNA, 21 nt, Artificial Sequence
  Synthetic
uuucauagcucuccaacaaaa

SEQ ID NO: 427468 - RNA, 22 nt, Artificial Sequence
  Synthetic
auuucauagcucuccaacaaaa

SEQ ID NO: 427469 - RNA, 23 nt, Artificial Sequence
  Synthetic
uauuucauagcucuccaacaaaa

SEQ ID NO: 427470 - RNA, 24 nt, Artificial Sequence
  Synthetic
cuauuucauagcucuccaacaaaa

SEQ ID NO: 427471 - RNA, 18 nt, Artificial Sequence
  Synthetic
ccaaguuagucaacaaaa

SEQ ID NO: 427472 - RNA, 19 nt, Artificial Sequence
  Synthetic
gccaaguuagucaacaaaa

SEQ ID NO: 427473 - RNA, 20 nt, Artificial Sequence
  Synthetic
agccaaguuagucaacaaaa

SEQ ID NO: 427474 - RNA, 21 nt, Artificial Sequence
  Synthetic
uagccaaguuagucaacaaaa

SEQ ID NO: 427475 - RNA, 22 nt, Artificial Sequence
  Synthetic
guagccaaguuagucaacaaaa

SEQ ID NO: 427476 - RNA, 23 nt, Artificial Sequence
  Synthetic
gguagccaaguuagucaacaaaa

SEQ ID NO: 427477 - RNA, 24 nt, Artificial Sequence
  Synthetic
agguagccaaguuagucaacaaaa

SEQ ID NO: 427478 - RNA, 18 nt, Artificial Sequence
  Synthetic
aauacauaaagaacaaaa

SEQ ID NO: 427479 - RNA, 19 nt, Artificial Sequence
  Synthetic
aaauacauaaagaacaaaa

SEQ ID NO: 427480 - RNA, 20 nt, Artificial Sequence
  Synthetic
gaaauacauaaagaacaaaa

SEQ ID NO: 427481 - RNA, 21 nt, Artificial Sequence
  Synthetic
agaaauacauaaagaacaaaa

SEQ ID NO: 427482 - RNA, 22 nt, Artificial Sequence
  Synthetic
gagaaauacauaaagaacaaaa

SEQ ID NO: 427483 - RNA, 23 nt, Artificial Sequence
  Synthetic
agagaaauacauaaagaacaaaa

SEQ ID NO: 427484 - RNA, 24 nt, Artificial Sequence
  Synthetic
uagagaaauacauaaagaacaaaa

SEQ ID NO: 427485 - RNA, 18 nt, Artificial Sequence
  Synthetic
auucaggagugaacaaaa

SEQ ID NO: 427486 - RNA, 19 nt, Artificial Sequence
  Synthetic
uauucaggagugaacaaaa

SEQ ID NO: 427487 - RNA, 20 nt, Artificial Sequence
  Synthetic
auauucaggagugaacaaaa

SEQ ID NO: 427488 - RNA, 21 nt, Artificial Sequence
  Synthetic
gauauucaggagugaacaaaa

SEQ ID NO: 427489 - RNA, 22 nt, Artificial Sequence
  Synthetic
ggauauucaggagugaacaaaa

SEQ ID NO: 427490 - RNA, 23 nt, Artificial Sequence
  Synthetic
uggauauucaggagugaacaaaa

SEQ ID NO: 427491 - RNA, 24 nt, Artificial Sequence
  Synthetic
cuggauauucaggagugaacaaaa

SEQ ID NO: 427492 - RNA, 18 nt, Artificial Sequence
  Synthetic
gguuucccuugaacaaaa

SEQ ID NO: 427493 - RNA, 19 nt, Artificial Sequence
  Synthetic
ugguuucccuugaacaaaa

SEQ ID NO: 427494 - RNA, 20 nt, Artificial Sequence
  Synthetic
cugguuucccuugaacaaaa

SEQ ID NO: 427495 - RNA, 21 nt, Artificial Sequence
  Synthetic
acugguuucccuugaacaaaa

SEQ ID NO: 427496 - RNA, 22 nt, Artificial Sequence
  Synthetic
aacugguuucccuugaacaaaa

SEQ ID NO: 427497 - RNA, 23 nt, Artificial Sequence
  Synthetic
aaacugguuucccuugaacaaaa

SEQ ID NO: 427498 - RNA, 24 nt, Artificial Sequence
  Synthetic
aaaacugguuucccuugaacaaaa

SEQ ID NO: 427499 - RNA, 18 nt, Artificial Sequence
  Synthetic
gaaaaggaaauaacaaaa

SEQ ID NO: 427500 - RNA, 19 nt, Artificial Sequence
  Synthetic
agaaaaggaaauaacaaaa

SEQ ID NO: 427501 - RNA, 20 nt, Artificial Sequence
  Synthetic
cagaaaaggaaauaacaaaa

SEQ ID NO: 427502 - RNA, 21 nt, Artificial Sequence
  Synthetic
ccagaaaaggaaauaacaaaa

SEQ ID NO: 427503 - RNA, 22 nt, Artificial Sequence
  Synthetic
accagaaaaggaaauaacaaaa

SEQ ID NO: 427504 - RNA, 23 nt, Artificial Sequence
  Synthetic
aaccagaaaaggaaauaacaaaa

SEQ ID NO: 427505 - RNA, 24 nt, Artificial Sequence
  Synthetic
aaaccagaaaaggaaauaacaaaa

SEQ ID NO: 427506 - RNA, 18 nt, Artificial Sequence
  Synthetic
aaauacagacacacaaaa

SEQ ID NO: 427507 - RNA, 19 nt, Artificial Sequence
  Synthetic
caaauacagacacacaaaa

SEQ ID NO: 427508 - RNA, 20 nt, Artificial Sequence
  Synthetic
gcaaauacagacacacaaaa

SEQ ID NO: 427509 - RNA, 21 nt, Artificial Sequence
  Synthetic
ugcaaauacagacacacaaaa

SEQ ID NO: 427510 - RNA, 22 nt, Artificial Sequence
  Synthetic
gugcaaauacagacacacaaaa

SEQ ID NO: 427511 - RNA, 23 nt, Artificial Sequence
  Synthetic
ugugcaaauacagacacacaaaa

SEQ ID NO: 427512 - RNA, 24 nt, Artificial Sequence
  Synthetic
cugugcaaauacagacacacaaaa

SEQ ID NO: 427513 - RNA, 18 nt, Artificial Sequence
  Synthetic
uccuugcuacacacaaaa

SEQ ID NO: 427514 - RNA, 19 nt, Artificial Sequence
  Synthetic
cuccuugcuacacacaaaa

SEQ ID NO: 427515 - RNA, 20 nt, Artificial Sequence
  Synthetic
gcuccuugcuacacacaaaa

SEQ ID NO: 427516 - RNA, 21 nt, Artificial Sequence
  Synthetic
agcuccuugcuacacacaaaa

SEQ ID NO: 427517 - RNA, 22 nt, Artificial Sequence
  Synthetic
uagcuccuugcuacacacaaaa

SEQ ID NO: 427518 - RNA, 23 nt, Artificial Sequence
  Synthetic
guagcuccuugcuacacacaaaa

SEQ ID NO: 427519 - RNA, 24 nt, Artificial Sequence
  Synthetic
aguagcuccuugcuacacacaaaa

SEQ ID NO: 427520 - RNA, 18 nt, Artificial Sequence
  Synthetic
aauauucucaccacaaaa

SEQ ID NO: 427521 - RNA, 19 nt, Artificial Sequence
  Synthetic
aaauauucucaccacaaaa

SEQ ID NO: 427522 - RNA, 20 nt, Artificial Sequence
  Synthetic
uaaauauucucaccacaaaa

SEQ ID NO: 427523 - RNA, 21 nt, Artificial Sequence
  Synthetic
uuaaauauucucaccacaaaa

SEQ ID NO: 427524 - RNA, 22 nt, Artificial Sequence
  Synthetic
uuuaaauauucucaccacaaaa

SEQ ID NO: 427525 - RNA, 23 nt, Artificial Sequence
  Synthetic
uuuuaaauauucucaccacaaaa

SEQ ID NO: 427526 - RNA, 24 nt, Artificial Sequence
  Synthetic
auuuuaaauauucucaccacaaaa

SEQ ID NO: 427527 - RNA, 18 nt, Artificial Sequence
  Synthetic
gacaucagagccacaaaa

SEQ ID NO: 427528 - RNA, 19 nt, Artificial Sequence
  Synthetic
agacaucagagccacaaaa

SEQ ID NO: 427529 - RNA, 20 nt, Artificial Sequence
  Synthetic
aagacaucagagccacaaaa

SEQ ID NO: 427530 - RNA, 21 nt, Artificial Sequence
  Synthetic
aaagacaucagagccacaaaa

SEQ ID NO: 427531 - RNA, 22 nt, Artificial Sequence
  Synthetic
uaaagacaucagagccacaaaa

SEQ ID NO: 427532 - RNA, 23 nt, Artificial Sequence
  Synthetic
uuaaagacaucagagccacaaaa

SEQ ID NO: 427533 - RNA, 24 nt, Artificial Sequence
  Synthetic
guuaaagacaucagagccacaaaa

SEQ ID NO: 427534 - RNA, 18 nt, Artificial Sequence
  Synthetic
cuuuugagagccacaaaa

SEQ ID NO: 427535 - RNA, 19 nt, Artificial Sequence
  Synthetic
acuuuugagagccacaaaa

SEQ ID NO: 427536 - RNA, 20 nt, Artificial Sequence
  Synthetic
uacuuuugagagccacaaaa

SEQ ID NO: 427537 - RNA, 21 nt, Artificial Sequence
  Synthetic
uuacuuuugagagccacaaaa

SEQ ID NO: 427538 - RNA, 22 nt, Artificial Sequence
  Synthetic
cuuacuuuugagagccacaaaa

SEQ ID NO: 427539 - RNA, 23 nt, Artificial Sequence
  Synthetic
acuuacuuuugagagccacaaaa

SEQ ID NO: 427540 - RNA, 24 nt, Artificial Sequence
  Synthetic
uacuuacuuuugagagccacaaaa

SEQ ID NO: 427541 - RNA, 18 nt, Artificial Sequence
  Synthetic
uaucauucugccacaaaa

SEQ ID NO: 427542 - RNA, 19 nt, Artificial Sequence
  Synthetic
auaucauucugccacaaaa

SEQ ID NO: 427543 - RNA, 20 nt, Artificial Sequence
  Synthetic
aauaucauucugccacaaaa

SEQ ID NO: 427544 - RNA, 21 nt, Artificial Sequence
  Synthetic
gaauaucauucugccacaaaa

SEQ ID NO: 427545 - RNA, 22 nt, Artificial Sequence
  Synthetic
ggaauaucauucugccacaaaa

SEQ ID NO: 427546 - RNA, 23 nt, Artificial Sequence
  Synthetic
uggaauaucauucugccacaaaa

SEQ ID NO: 427547 - RNA, 24 nt, Artificial Sequence
  Synthetic
auggaauaucauucugccacaaaa

SEQ ID NO: 427548 - RNA, 18 nt, Artificial Sequence
  Synthetic
gcaugaacauccacaaaa

SEQ ID NO: 427549 - RNA, 19 nt, Artificial Sequence
  Synthetic
agcaugaacauccacaaaa

SEQ ID NO: 427550 - RNA, 20 nt, Artificial Sequence
  Synthetic
uagcaugaacauccacaaaa

SEQ ID NO: 427551 - RNA, 21 nt, Artificial Sequence
  Synthetic
auagcaugaacauccacaaaa

SEQ ID NO: 427552 - RNA, 22 nt, Artificial Sequence
  Synthetic
aauagcaugaacauccacaaaa

SEQ ID NO: 427553 - RNA, 23 nt, Artificial Sequence
  Synthetic
uaauagcaugaacauccacaaaa

SEQ ID NO: 427554 - RNA, 24 nt, Artificial Sequence
  Synthetic
uuaauagcaugaacauccacaaaa

SEQ ID NO: 427555 - RNA, 18 nt, Artificial Sequence
  Synthetic
uaugauacauccacaaaa

SEQ ID NO: 427556 - RNA, 19 nt, Artificial Sequence
  Synthetic
uuaugauacauccacaaaa

SEQ ID NO: 427557 - RNA, 20 nt, Artificial Sequence
  Synthetic
auuaugauacauccacaaaa

SEQ ID NO: 427558 - RNA, 21 nt, Artificial Sequence
  Synthetic
gauuaugauacauccacaaaa

SEQ ID NO: 427559 - RNA, 22 nt, Artificial Sequence
  Synthetic
agauuaugauacauccacaaaa

SEQ ID NO: 427560 - RNA, 23 nt, Artificial Sequence
  Synthetic
uagauuaugauacauccacaaaa

SEQ ID NO: 427561 - RNA, 24 nt, Artificial Sequence
  Synthetic
auagauuaugauacauccacaaaa

SEQ ID NO: 427562 - RNA, 18 nt, Artificial Sequence
  Synthetic
augaagauguccacaaaa

SEQ ID NO: 427563 - RNA, 19 nt, Artificial Sequence
  Synthetic
aaugaagauguccacaaaa

SEQ ID NO: 427564 - RNA, 20 nt, Artificial Sequence
  Synthetic
gaaugaagauguccacaaaa

SEQ ID NO: 427565 - RNA, 21 nt, Artificial Sequence
  Synthetic
agaaugaagauguccacaaaa

SEQ ID NO: 427566 - RNA, 22 nt, Artificial Sequence
  Synthetic
uagaaugaagauguccacaaaa

SEQ ID NO: 427567 - RNA, 23 nt, Artificial Sequence
  Synthetic
guagaaugaagauguccacaaaa

SEQ ID NO: 427568 - RNA, 24 nt, Artificial Sequence
  Synthetic
uguagaaugaagauguccacaaaa

SEQ ID NO: 427569 - RNA, 18 nt, Artificial Sequence
  Synthetic
acaaagggcagcacaaaa

SEQ ID NO: 427570 - RNA, 19 nt, Artificial Sequence
  Synthetic
uacaaagggcagcacaaaa

SEQ ID NO: 427571 - RNA, 20 nt, Artificial Sequence
  Synthetic
guacaaagggcagcacaaaa

SEQ ID NO: 427572 - RNA, 21 nt, Artificial Sequence
  Synthetic
cguacaaagggcagcacaaaa

SEQ ID NO: 427573 - RNA, 22 nt, Artificial Sequence
  Synthetic
ucguacaaagggcagcacaaaa

SEQ ID NO: 427574 - RNA, 23 nt, Artificial Sequence
  Synthetic
uucguacaaagggcagcacaaaa

SEQ ID NO: 427575 - RNA, 24 nt, Artificial Sequence
  Synthetic
auucguacaaagggcagcacaaaa

SEQ ID NO: 427576 - RNA, 18 nt, Artificial Sequence
  Synthetic
aucaucuuuaucacaaaa

SEQ ID NO: 427577 - RNA, 19 nt, Artificial Sequence
  Synthetic
aaucaucuuuaucacaaaa

SEQ ID NO: 427578 - RNA, 20 nt, Artificial Sequence
  Synthetic
uaaucaucuuuaucacaaaa

SEQ ID NO: 427579 - RNA, 21 nt, Artificial Sequence
  Synthetic
auaaucaucuuuaucacaaaa

SEQ ID NO: 427580 - RNA, 22 nt, Artificial Sequence
  Synthetic
cauaaucaucuuuaucacaaaa

SEQ ID NO: 427581 - RNA, 23 nt, Artificial Sequence
  Synthetic
ucauaaucaucuuuaucacaaaa

SEQ ID NO: 427582 - RNA, 24 nt, Artificial Sequence
  Synthetic
cucauaaucaucuuuaucacaaaa

SEQ ID NO: 427583 - RNA, 18 nt, Artificial Sequence
  Synthetic
augacaagugucacaaaa

SEQ ID NO: 427584 - RNA, 19 nt, Artificial Sequence
  Synthetic
aaugacaagugucacaaaa

SEQ ID NO: 427585 - RNA, 20 nt, Artificial Sequence
  Synthetic
aaaugacaagugucacaaaa

SEQ ID NO: 427586 - RNA, 21 nt, Artificial Sequence
  Synthetic
aaaaugacaagugucacaaaa

SEQ ID NO: 427587 - RNA, 22 nt, Artificial Sequence
  Synthetic
gaaaaugacaagugucacaaaa

SEQ ID NO: 427588 - RNA, 23 nt, Artificial Sequence
  Synthetic
ugaaaaugacaagugucacaaaa

SEQ ID NO: 427589 - RNA, 24 nt, Artificial Sequence
  Synthetic
uugaaaaugacaagugucacaaaa

SEQ ID NO: 427590 - RNA, 18 nt, Artificial Sequence
  Synthetic
aguaccaagcagacaaaa

SEQ ID NO: 427591 - RNA, 19 nt, Artificial Sequence
  Synthetic
aaguaccaagcagacaaaa

SEQ ID NO: 427592 - RNA, 20 nt, Artificial Sequence
  Synthetic
gaaguaccaagcagacaaaa

SEQ ID NO: 427593 - RNA, 21 nt, Artificial Sequence
  Synthetic
ugaaguaccaagcagacaaaa

SEQ ID NO: 427594 - RNA, 22 nt, Artificial Sequence
  Synthetic
gugaaguaccaagcagacaaaa

SEQ ID NO: 427595 - RNA, 23 nt, Artificial Sequence
  Synthetic
agugaaguaccaagcagacaaaa

SEQ ID NO: 427596 - RNA, 24 nt, Artificial Sequence
  Synthetic
gagugaaguaccaagcagacaaaa

SEQ ID NO: 427597 - RNA, 18 nt, Artificial Sequence
  Synthetic
aucacaaagccgacaaaa

SEQ ID NO: 427598 - RNA, 19 nt, Artificial Sequence
  Synthetic
aaucacaaagccgacaaaa

SEQ ID NO: 427599 - RNA, 20 nt, Artificial Sequence
  Synthetic
caaucacaaagccgacaaaa

SEQ ID NO: 427600 - RNA, 21 nt, Artificial Sequence
  Synthetic
gcaaucacaaagccgacaaaa

SEQ ID NO: 427601 - RNA, 22 nt, Artificial Sequence
  Synthetic
agcaaucacaaagccgacaaaa

SEQ ID NO: 427602 - RNA, 23 nt, Artificial Sequence
  Synthetic
aagcaaucacaaagccgacaaaa

SEQ ID NO: 427603 - RNA, 24 nt, Artificial Sequence
  Synthetic
aaagcaaucacaaagccgacaaaa

SEQ ID NO: 427604 - RNA, 18 nt, Artificial Sequence
  Synthetic
gaauccugauggacaaaa

SEQ ID NO: 427605 - RNA, 19 nt, Artificial Sequence
  Synthetic
agaauccugauggacaaaa

SEQ ID NO: 427606 - RNA, 20 nt, Artificial Sequence
  Synthetic
gagaauccugauggacaaaa

SEQ ID NO: 427607 - RNA, 21 nt, Artificial Sequence
  Synthetic
agagaauccugauggacaaaa

SEQ ID NO: 427608 - RNA, 22 nt, Artificial Sequence
  Synthetic
cagagaauccugauggacaaaa

SEQ ID NO: 427609 - RNA, 23 nt, Artificial Sequence
  Synthetic
ccagagaauccugauggacaaaa

SEQ ID NO: 427610 - RNA, 24 nt, Artificial Sequence
  Synthetic
accagagaauccugauggacaaaa

SEQ ID NO: 427611 - RNA, 18 nt, Artificial Sequence
  Synthetic
gacagggauuugacaaaa

SEQ ID NO: 427612 - RNA, 19 nt, Artificial Sequence
  Synthetic
ugacagggauuugacaaaa

SEQ ID NO: 427613 - RNA, 20 nt, Artificial Sequence
  Synthetic
gugacagggauuugacaaaa

SEQ ID NO: 427614 - RNA, 21 nt, Artificial Sequence
  Synthetic
ggugacagggauuugacaaaa

SEQ ID NO: 427615 - RNA, 22 nt, Artificial Sequence
  Synthetic
aggugacagggauuugacaaaa

SEQ ID NO: 427616 - RNA, 23 nt, Artificial Sequence
  Synthetic
aaggugacagggauuugacaaaa

SEQ ID NO: 427617 - RNA, 24 nt, Artificial Sequence
  Synthetic
gaaggugacagggauuugacaaaa

SEQ ID NO: 427618 - RNA, 18 nt, Artificial Sequence
  Synthetic
uuuuaacaaaauacaaaa

SEQ ID NO: 427619 - RNA, 19 nt, Artificial Sequence
  Synthetic
guuuuaacaaaauacaaaa

SEQ ID NO: 427620 - RNA, 20 nt, Artificial Sequence
  Synthetic
aguuuuaacaaaauacaaaa

SEQ ID NO: 427621 - RNA, 21 nt, Artificial Sequence
  Synthetic
aaguuuuaacaaaauacaaaa

SEQ ID NO: 427622 - RNA, 22 nt, Artificial Sequence
  Synthetic
uaaguuuuaacaaaauacaaaa

SEQ ID NO: 427623 - RNA, 23 nt, Artificial Sequence
  Synthetic
uuaaguuuuaacaaaauacaaaa

SEQ ID NO: 427624 - RNA, 24 nt, Artificial Sequence
  Synthetic
uuuaaguuuuaacaaaauacaaaa

SEQ ID NO: 427625 - RNA, 18 nt, Artificial Sequence
  Synthetic
ugaaacgagaauacaaaa

SEQ ID NO: 427626 - RNA, 19 nt, Artificial Sequence
  Synthetic
augaaacgagaauacaaaa

SEQ ID NO: 427627 - RNA, 20 nt, Artificial Sequence
  Synthetic
uaugaaacgagaauacaaaa

SEQ ID NO: 427628 - RNA, 21 nt, Artificial Sequence
  Synthetic
auaugaaacgagaauacaaaa

SEQ ID NO: 427629 - RNA, 22 nt, Artificial Sequence
  Synthetic
gauaugaaacgagaauacaaaa

SEQ ID NO: 427630 - RNA, 23 nt, Artificial Sequence
  Synthetic
ggauaugaaacgagaauacaaaa

SEQ ID NO: 427631 - RNA, 24 nt, Artificial Sequence
  Synthetic
gggauaugaaacgagaauacaaaa

SEQ ID NO: 427632 - RNA, 18 nt, Artificial Sequence
  Synthetic
aaacuuuggaauacaaaa

SEQ ID NO: 427633 - RNA, 19 nt, Artificial Sequence
  Synthetic
aaaacuuuggaauacaaaa

SEQ ID NO: 427634 - RNA, 20 nt, Artificial Sequence
  Synthetic
caaaacuuuggaauacaaaa

SEQ ID NO: 427635 - RNA, 21 nt, Artificial Sequence
  Synthetic
gcaaaacuuuggaauacaaaa

SEQ ID NO: 427636 - RNA, 22 nt, Artificial Sequence
  Synthetic
ggcaaaacuuuggaauacaaaa

SEQ ID NO: 427637 - RNA, 23 nt, Artificial Sequence
  Synthetic
uggcaaaacuuuggaauacaaaa

SEQ ID NO: 427638 - RNA, 24 nt, Artificial Sequence
  Synthetic
uuggcaaaacuuuggaauacaaaa

SEQ ID NO: 427639 - RNA, 18 nt, Artificial Sequence
  Synthetic
uucaucugacauacaaaa

SEQ ID NO: 427640 - RNA, 19 nt, Artificial Sequence
  Synthetic
auucaucugacauacaaaa

SEQ ID NO: 427641 - RNA, 20 nt, Artificial Sequence
  Synthetic
aauucaucugacauacaaaa

SEQ ID NO: 427642 - RNA, 21 nt, Artificial Sequence
  Synthetic
aaauucaucugacauacaaaa

SEQ ID NO: 427643 - RNA, 22 nt, Artificial Sequence
  Synthetic
caaauucaucugacauacaaaa

SEQ ID NO: 427644 - RNA, 23 nt, Artificial Sequence
  Synthetic
ccaaauucaucugacauacaaaa

SEQ ID NO: 427645 - RNA, 24 nt, Artificial Sequence
  Synthetic
accaaauucaucugacauacaaaa

SEQ ID NO: 427646 - RNA, 18 nt, Artificial Sequence
  Synthetic
caaaauucauauacaaaa

SEQ ID NO: 427647 - RNA, 19 nt, Artificial Sequence
  Synthetic
acaaaauucauauacaaaa

SEQ ID NO: 427648 - RNA, 20 nt, Artificial Sequence
  Synthetic
cacaaaauucauauacaaaa

SEQ ID NO: 427649 - RNA, 21 nt, Artificial Sequence
  Synthetic
acacaaaauucauauacaaaa

SEQ ID NO: 427650 - RNA, 22 nt, Artificial Sequence
  Synthetic
gacacaaaauucauauacaaaa

SEQ ID NO: 427651 - RNA, 23 nt, Artificial Sequence
  Synthetic
ugacacaaaauucauauacaaaa

SEQ ID NO: 427652 - RNA, 24 nt, Artificial Sequence
  Synthetic
uugacacaaaauucauauacaaaa

SEQ ID NO: 427653 - RNA, 18 nt, Artificial Sequence
  Synthetic
cuuagaaauaguacaaaa

SEQ ID NO: 427654 - RNA, 19 nt, Artificial Sequence
  Synthetic
ucuuagaaauaguacaaaa

SEQ ID NO: 427655 - RNA, 20 nt, Artificial Sequence
  Synthetic
uucuuagaaauaguacaaaa

SEQ ID NO: 427656 - RNA, 21 nt, Artificial Sequence
  Synthetic
guucuuagaaauaguacaaaa

SEQ ID NO: 427657 - RNA, 22 nt, Artificial Sequence
  Synthetic
uguucuuagaaauaguacaaaa

SEQ ID NO: 427658 - RNA, 23 nt, Artificial Sequence
  Synthetic
guguucuuagaaauaguacaaaa

SEQ ID NO: 427659 - RNA, 24 nt, Artificial Sequence
  Synthetic
gguguucuuagaaauaguacaaaa

SEQ ID NO: 427660 - RNA, 18 nt, Artificial Sequence
  Synthetic
auaaaaggagguacaaaa

SEQ ID NO: 427661 - RNA, 19 nt, Artificial Sequence
  Synthetic
cauaaaaggagguacaaaa

SEQ ID NO: 427662 - RNA, 20 nt, Artificial Sequence
  Synthetic
acauaaaaggagguacaaaa

SEQ ID NO: 427663 - RNA, 21 nt, Artificial Sequence
  Synthetic
aacauaaaaggagguacaaaa

SEQ ID NO: 427664 - RNA, 22 nt, Artificial Sequence
  Synthetic
gaacauaaaaggagguacaaaa

SEQ ID NO: 427665 - RNA, 23 nt, Artificial Sequence
  Synthetic
agaacauaaaaggagguacaaaa

SEQ ID NO: 427666 - RNA, 24 nt, Artificial Sequence
  Synthetic
gagaacauaaaaggagguacaaaa

SEQ ID NO: 427667 - RNA, 18 nt, Artificial Sequence
  Synthetic
aauauguuaauuacaaaa

SEQ ID NO: 427668 - RNA, 19 nt, Artificial Sequence
  Synthetic
uaauauguuaauuacaaaa

SEQ ID NO: 427669 - RNA, 20 nt, Artificial Sequence
  Synthetic
guaauauguuaauuacaaaa

SEQ ID NO: 427670 - RNA, 21 nt, Artificial Sequence
  Synthetic
uguaauauguuaauuacaaaa

SEQ ID NO: 427671 - RNA, 22 nt, Artificial Sequence
  Synthetic
uuguaauauguuaauuacaaaa

SEQ ID NO: 427672 - RNA, 23 nt, Artificial Sequence
  Synthetic
cuuguaauauguuaauuacaaaa

SEQ ID NO: 427673 - RNA, 24 nt, Artificial Sequence
  Synthetic
ccuuguaauauguuaauuacaaaa

SEQ ID NO: 427674 - RNA, 18 nt, Artificial Sequence
  Synthetic
auuuuugauauuacaaaa

SEQ ID NO: 427675 - RNA, 19 nt, Artificial Sequence
  Synthetic
gauuuuugauauuacaaaa

SEQ ID NO: 427676 - RNA, 20 nt, Artificial Sequence
  Synthetic
ugauuuuugauauuacaaaa

SEQ ID NO: 427677 - RNA, 21 nt, Artificial Sequence
  Synthetic
augauuuuugauauuacaaaa

SEQ ID NO: 427678 - RNA, 22 nt, Artificial Sequence
  Synthetic
gaugauuuuugauauuacaaaa

SEQ ID NO: 427679 - RNA, 23 nt, Artificial Sequence
  Synthetic
cgaugauuuuugauauuacaaaa

SEQ ID NO: 427680 - RNA, 24 nt, Artificial Sequence
  Synthetic
acgaugauuuuugauauuacaaaa

SEQ ID NO: 427681 - RNA, 18 nt, Artificial Sequence
  Synthetic
guuacuaagcuuacaaaa

SEQ ID NO: 427682 - RNA, 19 nt, Artificial Sequence
  Synthetic
aguuacuaagcuuacaaaa

SEQ ID NO: 427683 - RNA, 20 nt, Artificial Sequence
  Synthetic
caguuacuaagcuuacaaaa

SEQ ID NO: 427684 - RNA, 21 nt, Artificial Sequence
  Synthetic
ccaguuacuaagcuuacaaaa

SEQ ID NO: 427685 - RNA, 22 nt, Artificial Sequence
  Synthetic
gccaguuacuaagcuuacaaaa

SEQ ID NO: 427686 - RNA, 23 nt, Artificial Sequence
  Synthetic
ugccaguuacuaagcuuacaaaa

SEQ ID NO: 427687 - RNA, 24 nt, Artificial Sequence
  Synthetic
gugccaguuacuaagcuuacaaaa

SEQ ID NO: 427688 - RNA, 18 nt, Artificial Sequence
  Synthetic
cugguagaaaaaccaaaa

SEQ ID NO: 427689 - RNA, 19 nt, Artificial Sequence
  Synthetic
gcugguagaaaaaccaaaa

SEQ ID NO: 427690 - RNA, 20 nt, Artificial Sequence
  Synthetic
ugcugguagaaaaaccaaaa

SEQ ID NO: 427691 - RNA, 21 nt, Artificial Sequence
  Synthetic
augcugguagaaaaaccaaaa

SEQ ID NO: 427692 - RNA, 22 nt, Artificial Sequence
  Synthetic
aaugcugguagaaaaaccaaaa

SEQ ID NO: 427693 - RNA, 23 nt, Artificial Sequence
  Synthetic
aaaugcugguagaaaaaccaaaa

SEQ ID NO: 427694 - RNA, 24 nt, Artificial Sequence
  Synthetic
aaaaugcugguagaaaaaccaaaa

SEQ ID NO: 427695 - RNA, 18 nt, Artificial Sequence
  Synthetic
agaaaaugcaaaccaaaa

SEQ ID NO: 427696 - RNA, 19 nt, Artificial Sequence
  Synthetic
aagaaaaugcaaaccaaaa

SEQ ID NO: 427697 - RNA, 20 nt, Artificial Sequence
  Synthetic
aaagaaaaugcaaaccaaaa

SEQ ID NO: 427698 - RNA, 21 nt, Artificial Sequence
  Synthetic
aaaagaaaaugcaaaccaaaa

SEQ ID NO: 427699 - RNA, 22 nt, Artificial Sequence
  Synthetic
aaaaagaaaaugcaaaccaaaa

SEQ ID NO: 427700 - RNA, 23 nt, Artificial Sequence
  Synthetic
aaaaaagaaaaugcaaaccaaaa

SEQ ID NO: 427701 - RNA, 24 nt, Artificial Sequence
  Synthetic
gaaaaaagaaaaugcaaaccaaaa

SEQ ID NO: 427702 - RNA, 18 nt, Artificial Sequence
  Synthetic
aaauuaguacaaccaaaa

SEQ ID NO: 427703 - RNA, 19 nt, Artificial Sequence
  Synthetic
uaaauuaguacaaccaaaa

SEQ ID NO: 427704 - RNA, 20 nt, Artificial Sequence
  Synthetic
guaaauuaguacaaccaaaa

SEQ ID NO: 427705 - RNA, 21 nt, Artificial Sequence
  Synthetic
uguaaauuaguacaaccaaaa

SEQ ID NO: 427706 - RNA, 22 nt, Artificial Sequence
  Synthetic
auguaaauuaguacaaccaaaa

SEQ ID NO: 427707 - RNA, 23 nt, Artificial Sequence
  Synthetic
aauguaaauuaguacaaccaaaa

SEQ ID NO: 427708 - RNA, 24 nt, Artificial Sequence
  Synthetic
gaauguaaauuaguacaaccaaaa

SEQ ID NO: 427709 - RNA, 18 nt, Artificial Sequence
  Synthetic
uuucagauggaaccaaaa

SEQ ID NO: 427710 - RNA, 19 nt, Artificial Sequence
  Synthetic
auuucagauggaaccaaaa

SEQ ID NO: 427711 - RNA, 20 nt, Artificial Sequence
  Synthetic
cauuucagauggaaccaaaa

SEQ ID NO: 427712 - RNA, 21 nt, Artificial Sequence
  Synthetic
acauuucagauggaaccaaaa

SEQ ID NO: 427713 - RNA, 22 nt, Artificial Sequence
  Synthetic
uacauuucagauggaaccaaaa

SEQ ID NO: 427714 - RNA, 23 nt, Artificial Sequence
  Synthetic
uuacauuucagauggaaccaaaa

SEQ ID NO: 427715 - RNA, 24 nt, Artificial Sequence
  Synthetic
uuuacauuucagauggaaccaaaa

SEQ ID NO: 427716 - RNA, 21 nt, Artificial Sequence
  Synthetic
aaaguucauauggaaccaaaa

SEQ ID NO: 427717 - RNA, 22 nt, Artificial Sequence
  Synthetic
uaaaguucauauggaaccaaaa

SEQ ID NO: 427718 - RNA, 23 nt, Artificial Sequence
  Synthetic
uuaaaguucauauggaaccaaaa

SEQ ID NO: 427719 - RNA, 24 nt, Artificial Sequence
  Synthetic
uuuaaaguucauauggaaccaaaa

SEQ ID NO: 427720 - RNA, 18 nt, Artificial Sequence
  Synthetic
uuucauauggaaccaaaa

SEQ ID NO: 427721 - RNA, 19 nt, Artificial Sequence
  Synthetic
auuucauauggaaccaaaa

SEQ ID NO: 427722 - RNA, 20 nt, Artificial Sequence
  Synthetic
cauuucauauggaaccaaaa

SEQ ID NO: 427723 - RNA, 21 nt, Artificial Sequence
  Synthetic
acauuucauauggaaccaaaa

SEQ ID NO: 427724 - RNA, 22 nt, Artificial Sequence
  Synthetic
uacauuucauauggaaccaaaa

SEQ ID NO: 427725 - RNA, 23 nt, Artificial Sequence
  Synthetic
uuacauuucauauggaaccaaaa

SEQ ID NO: 427726 - RNA, 24 nt, Artificial Sequence
  Synthetic
uuuacauuucauauggaaccaaaa

SEQ ID NO: 427727 - RNA, 18 nt, Artificial Sequence
  Synthetic
guagauaaaauaccaaaa

SEQ ID NO: 427728 - RNA, 19 nt, Artificial Sequence
  Synthetic
gguagauaaaauaccaaaa

SEQ ID NO: 427729 - RNA, 20 nt, Artificial Sequence
  Synthetic
ugguagauaaaauaccaaaa

SEQ ID NO: 427730 - RNA, 21 nt, Artificial Sequence
  Synthetic
augguagauaaaauaccaaaa

SEQ ID NO: 427731 - RNA, 22 nt, Artificial Sequence
  Synthetic
aaugguagauaaaauaccaaaa

SEQ ID NO: 427732 - RNA, 23 nt, Artificial Sequence
  Synthetic
aaaugguagauaaaauaccaaaa

SEQ ID NO: 427733 - RNA, 24 nt, Artificial Sequence
  Synthetic
aaaaugguagauaaaauaccaaaa

SEQ ID NO: 427734 - RNA, 18 nt, Artificial Sequence
  Synthetic
uaauucacaguaccaaaa

SEQ ID NO: 427735 - RNA, 19 nt, Artificial Sequence
  Synthetic
uuaauucacaguaccaaaa

SEQ ID NO: 427736 - RNA, 20 nt, Artificial Sequence
  Synthetic
uuuaauucacaguaccaaaa

SEQ ID NO: 427737 - RNA, 21 nt, Artificial Sequence
  Synthetic
uuuuaauucacaguaccaaaa

SEQ ID NO: 427738 - RNA, 22 nt, Artificial Sequence
  Synthetic
auuuuaauucacaguaccaaaa

SEQ ID NO: 427739 - RNA, 23 nt, Artificial Sequence
  Synthetic
cauuuuaauucacaguaccaaaa

SEQ ID NO: 427740 - RNA, 24 nt, Artificial Sequence
  Synthetic
ucauuuuaauucacaguaccaaaa

SEQ ID NO: 427741 - RNA, 18 nt, Artificial Sequence
  Synthetic
guauacugaguaccaaaa

SEQ ID NO: 427742 - RNA, 19 nt, Artificial Sequence
  Synthetic
gguauacugaguaccaaaa

SEQ ID NO: 427743 - RNA, 20 nt, Artificial Sequence
  Synthetic
agguauacugaguaccaaaa

SEQ ID NO: 427744 - RNA, 21 nt, Artificial Sequence
  Synthetic
aagguauacugaguaccaaaa

SEQ ID NO: 427745 - RNA, 22 nt, Artificial Sequence
  Synthetic
aaagguauacugaguaccaaaa

SEQ ID NO: 427746 - RNA, 23 nt, Artificial Sequence
  Synthetic
gaaagguauacugaguaccaaaa

SEQ ID NO: 427747 - RNA, 24 nt, Artificial Sequence
  Synthetic
ugaaagguauacugaguaccaaaa

SEQ ID NO: 427748 - RNA, 21 nt, Artificial Sequence
  Synthetic
agcaugguacugguaccaaaa

SEQ ID NO: 427749 - RNA, 22 nt, Artificial Sequence
  Synthetic
cagcaugguacugguaccaaaa

SEQ ID NO: 427750 - RNA, 23 nt, Artificial Sequence
  Synthetic
acagcaugguacugguaccaaaa

SEQ ID NO: 427751 - RNA, 24 nt, Artificial Sequence
  Synthetic
aacagcaugguacugguaccaaaa

SEQ ID NO: 427752 - RNA, 18 nt, Artificial Sequence
  Synthetic
acauguaaaaacccaaaa

SEQ ID NO: 427753 - RNA, 19 nt, Artificial Sequence
  Synthetic
aacauguaaaaacccaaaa

SEQ ID NO: 427754 - RNA, 20 nt, Artificial Sequence
  Synthetic
gaacauguaaaaacccaaaa

SEQ ID NO: 427755 - RNA, 21 nt, Artificial Sequence
  Synthetic
agaacauguaaaaacccaaaa

SEQ ID NO: 427756 - RNA, 22 nt, Artificial Sequence
  Synthetic
aagaacauguaaaaacccaaaa

SEQ ID NO: 427757 - RNA, 23 nt, Artificial Sequence
  Synthetic
caagaacauguaaaaacccaaaa

SEQ ID NO: 427758 - RNA, 24 nt, Artificial Sequence
  Synthetic
acaagaacauguaaaaacccaaaa

SEQ ID NO: 427759 - RNA, 18 nt, Artificial Sequence
  Synthetic
gagaccaauaacccaaaa

SEQ ID NO: 427760 - RNA, 19 nt, Artificial Sequence
  Synthetic
agagaccaauaacccaaaa

SEQ ID NO: 427761 - RNA, 20 nt, Artificial Sequence
  Synthetic
aagagaccaauaacccaaaa

SEQ ID NO: 427762 - RNA, 21 nt, Artificial Sequence
  Synthetic
aaagagaccaauaacccaaaa

SEQ ID NO: 427763 - RNA, 22 nt, Artificial Sequence
  Synthetic
gaaagagaccaauaacccaaaa

SEQ ID NO: 427764 - RNA, 23 nt, Artificial Sequence
  Synthetic
agaaagagaccaauaacccaaaa

SEQ ID NO: 427765 - RNA, 24 nt, Artificial Sequence
  Synthetic
aagaaagagaccaauaacccaaaa

SEQ ID NO: 427766 - RNA, 18 nt, Artificial Sequence
  Synthetic
cuuacccaccccccaaaa

SEQ ID NO: 427767 - RNA, 19 nt, Artificial Sequence
  Synthetic
ccuuacccaccccccaaaa

SEQ ID NO: 427768 - RNA, 20 nt, Artificial Sequence
  Synthetic
cccuuacccaccccccaaaa

SEQ ID NO: 427769 - RNA, 21 nt, Artificial Sequence
  Synthetic
ucccuuacccaccccccaaaa

SEQ ID NO: 427770 - RNA, 22 nt, Artificial Sequence
  Synthetic
uucccuuacccaccccccaaaa

SEQ ID NO: 427771 - RNA, 23 nt, Artificial Sequence
  Synthetic
uuucccuuacccaccccccaaaa

SEQ ID NO: 427772 - RNA, 24 nt, Artificial Sequence
  Synthetic
cuuucccuuacccaccccccaaaa

SEQ ID NO: 427773 - RNA, 18 nt, Artificial Sequence
  Synthetic
agaauguuucccccaaaa

SEQ ID NO: 427774 - RNA, 19 nt, Artificial Sequence
  Synthetic
uagaauguuucccccaaaa

SEQ ID NO: 427775 - RNA, 20 nt, Artificial Sequence
  Synthetic
uuagaauguuucccccaaaa

SEQ ID NO: 427776 - RNA, 21 nt, Artificial Sequence
  Synthetic
uuuagaauguuucccccaaaa

SEQ ID NO: 427777 - RNA, 22 nt, Artificial Sequence
  Synthetic
auuuagaauguuucccccaaaa

SEQ ID NO: 427778 - RNA, 23 nt, Artificial Sequence
  Synthetic
cauuuagaauguuucccccaaaa

SEQ ID NO: 427779 - RNA, 24 nt, Artificial Sequence
  Synthetic
acauuuagaauguuucccccaaaa

SEQ ID NO: 427780 - RNA, 18 nt, Artificial Sequence
  Synthetic
gaauucagggucccaaaa

SEQ ID NO: 427781 - RNA, 19 nt, Artificial Sequence
  Synthetic
ggaauucagggucccaaaa

SEQ ID NO: 427782 - RNA, 20 nt, Artificial Sequence
  Synthetic
aggaauucagggucccaaaa

SEQ ID NO: 427783 - RNA, 21 nt, Artificial Sequence
  Synthetic
caggaauucagggucccaaaa

SEQ ID NO: 427784 - RNA, 22 nt, Artificial Sequence
  Synthetic
acaggaauucagggucccaaaa

SEQ ID NO: 427785 - RNA, 23 nt, Artificial Sequence
  Synthetic
uacaggaauucagggucccaaaa

SEQ ID NO: 427786 - RNA, 24 nt, Artificial Sequence
  Synthetic
cuacaggaauucagggucccaaaa

SEQ ID NO: 427787 - RNA, 18 nt, Artificial Sequence
  Synthetic
aucagaaaaaagccaaaa

SEQ ID NO: 427788 - RNA, 19 nt, Artificial Sequence
  Synthetic
gaucagaaaaaagccaaaa

SEQ ID NO: 427789 - RNA, 20 nt, Artificial Sequence
  Synthetic
agaucagaaaaaagccaaaa

SEQ ID NO: 427790 - RNA, 21 nt, Artificial Sequence
  Synthetic
uagaucagaaaaaagccaaaa

SEQ ID NO: 427791 - RNA, 22 nt, Artificial Sequence
  Synthetic
uuagaucagaaaaaagccaaaa

SEQ ID NO: 427792 - RNA, 23 nt, Artificial Sequence
  Synthetic
auuagaucagaaaaaagccaaaa

SEQ ID NO: 427793 - RNA, 24 nt, Artificial Sequence
  Synthetic
gauuagaucagaaaaaagccaaaa

SEQ ID NO: 427794 - RNA, 18 nt, Artificial Sequence
  Synthetic
uuagcacaaaagccaaaa

SEQ ID NO: 427795 - RNA, 19 nt, Artificial Sequence
  Synthetic
uuuagcacaaaagccaaaa

SEQ ID NO: 427796 - RNA, 20 nt, Artificial Sequence
  Synthetic
uuuuagcacaaaagccaaaa

SEQ ID NO: 427797 - RNA, 21 nt, Artificial Sequence
  Synthetic
uuuuuagcacaaaagccaaaa

SEQ ID NO: 427798 - RNA, 22 nt, Artificial Sequence
  Synthetic
auuuuuagcacaaaagccaaaa

SEQ ID NO: 427799 - RNA, 23 nt, Artificial Sequence
  Synthetic
cauuuuuagcacaaaagccaaaa

SEQ ID NO: 427800 - RNA, 24 nt, Artificial Sequence
  Synthetic
acauuuuuagcacaaaagccaaaa

SEQ ID NO: 427801 - RNA, 18 nt, Artificial Sequence
  Synthetic
ucuuaaaaagagccaaaa

SEQ ID NO: 427802 - RNA, 19 nt, Artificial Sequence
  Synthetic
gucuuaaaaagagccaaaa

SEQ ID NO: 427803 - RNA, 20 nt, Artificial Sequence
  Synthetic
ugucuuaaaaagagccaaaa

SEQ ID NO: 427804 - RNA, 21 nt, Artificial Sequence
  Synthetic
cugucuuaaaaagagccaaaa

SEQ ID NO: 427805 - RNA, 22 nt, Artificial Sequence
  Synthetic
acugucuuaaaaagagccaaaa

SEQ ID NO: 427806 - RNA, 23 nt, Artificial Sequence
  Synthetic
aacugucuuaaaaagagccaaaa

SEQ ID NO: 427807 - RNA, 24 nt, Artificial Sequence
  Synthetic
uaacugucuuaaaaagagccaaaa

SEQ ID NO: 427808 - RNA, 18 nt, Artificial Sequence
  Synthetic
uuguguuaaaugccaaaa

SEQ ID NO: 427809 - RNA, 19 nt, Artificial Sequence
  Synthetic
uuuguguuaaaugccaaaa

SEQ ID NO: 427810 - RNA, 20 nt, Artificial Sequence
  Synthetic
uuuuguguuaaaugccaaaa

SEQ ID NO: 427811 - RNA, 21 nt, Artificial Sequence
  Synthetic
guuuuguguuaaaugccaaaa

SEQ ID NO: 427812 - RNA, 22 nt, Artificial Sequence
  Synthetic
aguuuuguguuaaaugccaaaa

SEQ ID NO: 427813 - RNA, 23 nt, Artificial Sequence
  Synthetic
aaguuuuguguuaaaugccaaaa

SEQ ID NO: 427814 - RNA, 24 nt, Artificial Sequence
  Synthetic
aaaguuuuguguuaaaugccaaaa

SEQ ID NO: 427815 - RNA, 18 nt, Artificial Sequence
  Synthetic
guccagauucugccaaaa

SEQ ID NO: 427816 - RNA, 19 nt, Artificial Sequence
  Synthetic
gguccagauucugccaaaa

SEQ ID NO: 427817 - RNA, 20 nt, Artificial Sequence
  Synthetic
ggguccagauucugccaaaa

SEQ ID NO: 427818 - RNA, 21 nt, Artificial Sequence
  Synthetic
uggguccagauucugccaaaa

SEQ ID NO: 427819 - RNA, 22 nt, Artificial Sequence
  Synthetic
uuggguccagauucugccaaaa

SEQ ID NO: 427820 - RNA, 23 nt, Artificial Sequence
  Synthetic
guuggguccagauucugccaaaa

SEQ ID NO: 427821 - RNA, 24 nt, Artificial Sequence
  Synthetic
gguuggguccagauucugccaaaa

SEQ ID NO: 427822 - RNA, 18 nt, Artificial Sequence
  Synthetic
ugauauguaaauccaaaa

SEQ ID NO: 427823 - RNA, 19 nt, Artificial Sequence
  Synthetic
augauauguaaauccaaaa

SEQ ID NO: 427824 - RNA, 20 nt, Artificial Sequence
  Synthetic
aaugauauguaaauccaaaa

SEQ ID NO: 427825 - RNA, 21 nt, Artificial Sequence
  Synthetic
caaugauauguaaauccaaaa

SEQ ID NO: 427826 - RNA, 22 nt, Artificial Sequence
  Synthetic
acaaugauauguaaauccaaaa

SEQ ID NO: 427827 - RNA, 23 nt, Artificial Sequence
  Synthetic
cacaaugauauguaaauccaaaa

SEQ ID NO: 427828 - RNA, 24 nt, Artificial Sequence
  Synthetic
acacaaugauauguaaauccaaaa

SEQ ID NO: 427829 - RNA, 18 nt, Artificial Sequence
  Synthetic
uaucaacauaauccaaaa

SEQ ID NO: 427830 - RNA, 19 nt, Artificial Sequence
  Synthetic
cuaucaacauaauccaaaa

SEQ ID NO: 427831 - RNA, 20 nt, Artificial Sequence
  Synthetic
ucuaucaacauaauccaaaa

SEQ ID NO: 427832 - RNA, 21 nt, Artificial Sequence
  Synthetic
gucuaucaacauaauccaaaa

SEQ ID NO: 427833 - RNA, 22 nt, Artificial Sequence
  Synthetic
ugucuaucaacauaauccaaaa

SEQ ID NO: 427834 - RNA, 23 nt, Artificial Sequence
  Synthetic
cugucuaucaacauaauccaaaa

SEQ ID NO: 427835 - RNA, 24 nt, Artificial Sequence
  Synthetic
ucugucuaucaacauaauccaaaa

SEQ ID NO: 427836 - RNA, 18 nt, Artificial Sequence
  Synthetic
aacccuuaacauccaaaa

SEQ ID NO: 427837 - RNA, 19 nt, Artificial Sequence
  Synthetic
aaacccuuaacauccaaaa

SEQ ID NO: 427838 - RNA, 20 nt, Artificial Sequence
  Synthetic
aaaacccuuaacauccaaaa

SEQ ID NO: 427839 - RNA, 21 nt, Artificial Sequence
  Synthetic
uaaaacccuuaacauccaaaa

SEQ ID NO: 427840 - RNA, 22 nt, Artificial Sequence
  Synthetic
cuaaaacccuuaacauccaaaa

SEQ ID NO: 427841 - RNA, 23 nt, Artificial Sequence
  Synthetic
acuaaaacccuuaacauccaaaa

SEQ ID NO: 427842 - RNA, 24 nt, Artificial Sequence
  Synthetic
uacuaaaacccuuaacauccaaaa

SEQ ID NO: 427843 - RNA, 18 nt, Artificial Sequence
  Synthetic
gagacucugucuccaaaa

SEQ ID NO: 427844 - RNA, 19 nt, Artificial Sequence
  Synthetic
cgagacucugucuccaaaa

SEQ ID NO: 427845 - RNA, 20 nt, Artificial Sequence
  Synthetic
gcgagacucugucuccaaaa

SEQ ID NO: 427846 - RNA, 21 nt, Artificial Sequence
  Synthetic
agcgagacucugucuccaaaa

SEQ ID NO: 427847 - RNA, 22 nt, Artificial Sequence
  Synthetic
cagcgagacucugucuccaaaa

SEQ ID NO: 427848 - RNA, 23 nt, Artificial Sequence
  Synthetic
acagcgagacucugucuccaaaa

SEQ ID NO: 427849 - RNA, 24 nt, Artificial Sequence
  Synthetic
cacagcgagacucugucuccaaaa

SEQ ID NO: 427850 - RNA, 18 nt, Artificial Sequence
  Synthetic
ugaaaagaagguccaaaa

SEQ ID NO: 427851 - RNA, 19 nt, Artificial Sequence
  Synthetic
gugaaaagaagguccaaaa

SEQ ID NO: 427852 - RNA, 20 nt, Artificial Sequence
  Synthetic
ugugaaaagaagguccaaaa

SEQ ID NO: 427853 - RNA, 21 nt, Artificial Sequence
  Synthetic
gugugaaaagaagguccaaaa

SEQ ID NO: 427854 - RNA, 22 nt, Artificial Sequence
  Synthetic
ugugugaaaagaagguccaaaa

SEQ ID NO: 427855 - RNA, 23 nt, Artificial Sequence
  Synthetic
gugugugaaaagaagguccaaaa

SEQ ID NO: 427856 - RNA, 24 nt, Artificial Sequence
  Synthetic
agugugugaaaagaagguccaaaa

SEQ ID NO: 427857 - RNA, 18 nt, Artificial Sequence
  Synthetic
aauuacuagguuccaaaa

SEQ ID NO: 427858 - RNA, 19 nt, Artificial Sequence
  Synthetic
aaauuacuagguuccaaaa

SEQ ID NO: 427859 - RNA, 20 nt, Artificial Sequence
  Synthetic
aaaauuacuagguuccaaaa

SEQ ID NO: 427860 - RNA, 21 nt, Artificial Sequence
  Synthetic
caaaauuacuagguuccaaaa

SEQ ID NO: 427861 - RNA, 22 nt, Artificial Sequence
  Synthetic
ucaaaauuacuagguuccaaaa

SEQ ID NO: 427862 - RNA, 23 nt, Artificial Sequence
  Synthetic
uucaaaauuacuagguuccaaaa

SEQ ID NO: 427863 - RNA, 24 nt, Artificial Sequence
  Synthetic
auucaaaauuacuagguuccaaaa

SEQ ID NO: 427864 - RNA, 18 nt, Artificial Sequence
  Synthetic
caagacuccaaagcaaaa

SEQ ID NO: 427865 - RNA, 19 nt, Artificial Sequence
  Synthetic
ucaagacuccaaagcaaaa

SEQ ID NO: 427866 - RNA, 20 nt, Artificial Sequence
  Synthetic
uucaagacuccaaagcaaaa

SEQ ID NO: 427867 - RNA, 21 nt, Artificial Sequence
  Synthetic
uuucaagacuccaaagcaaaa

SEQ ID NO: 427868 - RNA, 22 nt, Artificial Sequence
  Synthetic
auuucaagacuccaaagcaaaa

SEQ ID NO: 427869 - RNA, 23 nt, Artificial Sequence
  Synthetic
aauuucaagacuccaaagcaaaa

SEQ ID NO: 427870 - RNA, 24 nt, Artificial Sequence
  Synthetic
aaauuucaagacuccaaagcaaaa

SEQ ID NO: 427871 - RNA, 18 nt, Artificial Sequence
  Synthetic
cuuauuugcaaagcaaaa

SEQ ID NO: 427872 - RNA, 19 nt, Artificial Sequence
  Synthetic
ucuuauuugcaaagcaaaa

SEQ ID NO: 427873 - RNA, 20 nt, Artificial Sequence
  Synthetic
cucuuauuugcaaagcaaaa

SEQ ID NO: 427874 - RNA, 21 nt, Artificial Sequence
  Synthetic
ucucuuauuugcaaagcaaaa

SEQ ID NO: 427875 - RNA, 22 nt, Artificial Sequence
  Synthetic
uucucuuauuugcaaagcaaaa

SEQ ID NO: 427876 - RNA, 23 nt, Artificial Sequence
  Synthetic
auucucuuauuugcaaagcaaaa

SEQ ID NO: 427877 - RNA, 24 nt, Artificial Sequence
  Synthetic
aauucucuuauuugcaaagcaaaa

SEQ ID NO: 427878 - RNA, 18 nt, Artificial Sequence
  Synthetic
auguuuaagaaagcaaaa

SEQ ID NO: 427879 - RNA, 19 nt, Artificial Sequence
  Synthetic
uauguuuaagaaagcaaaa

SEQ ID NO: 427880 - RNA, 20 nt, Artificial Sequence
  Synthetic
auauguuuaagaaagcaaaa

SEQ ID NO: 427881 - RNA, 21 nt, Artificial Sequence
  Synthetic
aauauguuuaagaaagcaaaa

SEQ ID NO: 427882 - RNA, 22 nt, Artificial Sequence
  Synthetic
aaauauguuuaagaaagcaaaa

SEQ ID NO: 427883 - RNA, 23 nt, Artificial Sequence
  Synthetic
aaaauauguuuaagaaagcaaaa

SEQ ID NO: 427884 - RNA, 24 nt, Artificial Sequence
  Synthetic
gaaaauauguuuaagaaagcaaaa

SEQ ID NO: 427885 - RNA, 18 nt, Artificial Sequence
  Synthetic
aaaggcaguaaagcaaaa

SEQ ID NO: 427886 - RNA, 19 nt, Artificial Sequence
  Synthetic
gaaaggcaguaaagcaaaa

SEQ ID NO: 427887 - RNA, 20 nt, Artificial Sequence
  Synthetic
ugaaaggcaguaaagcaaaa

SEQ ID NO: 427888 - RNA, 21 nt, Artificial Sequence
  Synthetic
augaaaggcaguaaagcaaaa

SEQ ID NO: 427889 - RNA, 22 nt, Artificial Sequence
  Synthetic
uaugaaaggcaguaaagcaaaa

SEQ ID NO: 427890 - RNA, 23 nt, Artificial Sequence
  Synthetic
auaugaaaggcaguaaagcaaaa

SEQ ID NO: 427891 - RNA, 24 nt, Artificial Sequence
  Synthetic
uauaugaaaggcaguaaagcaaaa

SEQ ID NO: 427892 - RNA, 18 nt, Artificial Sequence
  Synthetic
cugcucaaugaagcaaaa

SEQ ID NO: 427893 - RNA, 19 nt, Artificial Sequence
  Synthetic
gcugcucaaugaagcaaaa

SEQ ID NO: 427894 - RNA, 20 nt, Artificial Sequence
  Synthetic
cgcugcucaaugaagcaaaa

SEQ ID NO: 427895 - RNA, 21 nt, Artificial Sequence
  Synthetic
gcgcugcucaaugaagcaaaa

SEQ ID NO: 427896 - RNA, 22 nt, Artificial Sequence
  Synthetic
ugcgcugcucaaugaagcaaaa

SEQ ID NO: 427897 - RNA, 23 nt, Artificial Sequence
  Synthetic
augcgcugcucaaugaagcaaaa

SEQ ID NO: 427898 - RNA, 24 nt, Artificial Sequence
  Synthetic
uaugcgcugcucaaugaagcaaaa

SEQ ID NO: 427899 - RNA, 18 nt, Artificial Sequence
  Synthetic
uaaaaaguauaagcaaaa

SEQ ID NO: 427900 - RNA, 19 nt, Artificial Sequence
  Synthetic
uuaaaaaguauaagcaaaa

SEQ ID NO: 427901 - RNA, 20 nt, Artificial Sequence
  Synthetic
uuuaaaaaguauaagcaaaa

SEQ ID NO: 427902 - RNA, 21 nt, Artificial Sequence
  Synthetic
cuuuaaaaaguauaagcaaaa

SEQ ID NO: 427903 - RNA, 22 nt, Artificial Sequence
  Synthetic
gcuuuaaaaaguauaagcaaaa

SEQ ID NO: 427904 - RNA, 23 nt, Artificial Sequence
  Synthetic
agcuuuaaaaaguauaagcaaaa

SEQ ID NO: 427905 - RNA, 24 nt, Artificial Sequence
  Synthetic
gagcuuuaaaaaguauaagcaaaa

SEQ ID NO: 427906 - RNA, 18 nt, Artificial Sequence
  Synthetic
caaaagcaaacagcaaaa

SEQ ID NO: 427907 - RNA, 19 nt, Artificial Sequence
  Synthetic
ucaaaagcaaacagcaaaa

SEQ ID NO: 427908 - RNA, 20 nt, Artificial Sequence
  Synthetic
aucaaaagcaaacagcaaaa

SEQ ID NO: 427909 - RNA, 21 nt, Artificial Sequence
  Synthetic
gaucaaaagcaaacagcaaaa

SEQ ID NO: 427910 - RNA, 22 nt, Artificial Sequence
  Synthetic
ggaucaaaagcaaacagcaaaa

SEQ ID NO: 427911 - RNA, 23 nt, Artificial Sequence
  Synthetic
uggaucaaaagcaaacagcaaaa

SEQ ID NO: 427912 - RNA, 24 nt, Artificial Sequence
  Synthetic
uuggaucaaaagcaaacagcaaaa

SEQ ID NO: 427913 - RNA, 18 nt, Artificial Sequence
  Synthetic
ugcacuucuucagcaaaa

SEQ ID NO: 427914 - RNA, 19 nt, Artificial Sequence
  Synthetic
uugcacuucuucagcaaaa

SEQ ID NO: 427915 - RNA, 20 nt, Artificial Sequence
  Synthetic
uuugcacuucuucagcaaaa

SEQ ID NO: 427916 - RNA, 21 nt, Artificial Sequence
  Synthetic
auuugcacuucuucagcaaaa

SEQ ID NO: 427917 - RNA, 22 nt, Artificial Sequence
  Synthetic
aauuugcacuucuucagcaaaa

SEQ ID NO: 427918 - RNA, 23 nt, Artificial Sequence
  Synthetic
uaauuugcacuucuucagcaaaa

SEQ ID NO: 427919 - RNA, 24 nt, Artificial Sequence
  Synthetic
cuaauuugcacuucuucagcaaaa

SEQ ID NO: 427920 - RNA, 18 nt, Artificial Sequence
  Synthetic
guuagcagaagagcaaaa

SEQ ID NO: 427921 - RNA, 19 nt, Artificial Sequence
  Synthetic
uguuagcagaagagcaaaa

SEQ ID NO: 427922 - RNA, 20 nt, Artificial Sequence
  Synthetic
auguuagcagaagagcaaaa

SEQ ID NO: 427923 - RNA, 21 nt, Artificial Sequence
  Synthetic
uauguuagcagaagagcaaaa

SEQ ID NO: 427924 - RNA, 22 nt, Artificial Sequence
  Synthetic
cuauguuagcagaagagcaaaa

SEQ ID NO: 427925 - RNA, 23 nt, Artificial Sequence
  Synthetic
ucuauguuagcagaagagcaaaa

SEQ ID NO: 427926 - RNA, 24 nt, Artificial Sequence
  Synthetic
cucuauguuagcagaagagcaaaa

SEQ ID NO: 427927 - RNA, 18 nt, Artificial Sequence
  Synthetic
auaaugauaugagcaaaa

SEQ ID NO: 427928 - RNA, 19 nt, Artificial Sequence
  Synthetic
cauaaugauaugagcaaaa

SEQ ID NO: 427929 - RNA, 20 nt, Artificial Sequence
  Synthetic
ucauaaugauaugagcaaaa

SEQ ID NO: 427930 - RNA, 21 nt, Artificial Sequence
  Synthetic
uucauaaugauaugagcaaaa

SEQ ID NO: 427931 - RNA, 22 nt, Artificial Sequence
  Synthetic
guucauaaugauaugagcaaaa

SEQ ID NO: 427932 - RNA, 23 nt, Artificial Sequence
  Synthetic
uguucauaaugauaugagcaaaa

SEQ ID NO: 427933 - RNA, 24 nt, Artificial Sequence
  Synthetic
uuguucauaaugauaugagcaaaa

SEQ ID NO: 427934 - RNA, 18 nt, Artificial Sequence
  Synthetic
uuuacauuuauagcaaaa

SEQ ID NO: 427935 - RNA, 19 nt, Artificial Sequence
  Synthetic
uuuuacauuuauagcaaaa

SEQ ID NO: 427936 - RNA, 20 nt, Artificial Sequence
  Synthetic
auuuuacauuuauagcaaaa

SEQ ID NO: 427937 - RNA, 21 nt, Artificial Sequence
  Synthetic
aauuuuacauuuauagcaaaa

SEQ ID NO: 427938 - RNA, 22 nt, Artificial Sequence
  Synthetic
caauuuuacauuuauagcaaaa

SEQ ID NO: 427939 - RNA, 23 nt, Artificial Sequence
  Synthetic
gcaauuuuacauuuauagcaaaa

SEQ ID NO: 427940 - RNA, 24 nt, Artificial Sequence
  Synthetic
agcaauuuuacauuuauagcaaaa

SEQ ID NO: 427941 - RNA, 18 nt, Artificial Sequence
  Synthetic
gagaacugcuuagcaaaa

SEQ ID NO: 427942 - RNA, 19 nt, Artificial Sequence
  Synthetic
agagaacugcuuagcaaaa

SEQ ID NO: 427943 - RNA, 20 nt, Artificial Sequence
  Synthetic
cagagaacugcuuagcaaaa

SEQ ID NO: 427944 - RNA, 21 nt, Artificial Sequence
  Synthetic
acagagaacugcuuagcaaaa

SEQ ID NO: 427945 - RNA, 22 nt, Artificial Sequence
  Synthetic
gacagagaacugcuuagcaaaa

SEQ ID NO: 427946 - RNA, 23 nt, Artificial Sequence
  Synthetic
agacagagaacugcuuagcaaaa

SEQ ID NO: 427947 - RNA, 24 nt, Artificial Sequence
  Synthetic
gagacagagaacugcuuagcaaaa

SEQ ID NO: 427948 - RNA, 18 nt, Artificial Sequence
  Synthetic
aaauaaggagacgcaaaa

SEQ ID NO: 427949 - RNA, 19 nt, Artificial Sequence
  Synthetic
caaauaaggagacgcaaaa

SEQ ID NO: 427950 - RNA, 20 nt, Artificial Sequence
  Synthetic
gcaaauaaggagacgcaaaa

SEQ ID NO: 427951 - RNA, 21 nt, Artificial Sequence
  Synthetic
ggcaaauaaggagacgcaaaa

SEQ ID NO: 427952 - RNA, 22 nt, Artificial Sequence
  Synthetic
uggcaaauaaggagacgcaaaa

SEQ ID NO: 427953 - RNA, 23 nt, Artificial Sequence
  Synthetic
uuggcaaauaaggagacgcaaaa

SEQ ID NO: 427954 - RNA, 24 nt, Artificial Sequence
  Synthetic
uuuggcaaauaaggagacgcaaaa

SEQ ID NO: 427955 - RNA, 18 nt, Artificial Sequence
  Synthetic
ucuaaagugaaggcaaaa

SEQ ID NO: 427956 - RNA, 19 nt, Artificial Sequence
  Synthetic
uucuaaagugaaggcaaaa

SEQ ID NO: 427957 - RNA, 20 nt, Artificial Sequence
  Synthetic
auucuaaagugaaggcaaaa

SEQ ID NO: 427958 - RNA, 21 nt, Artificial Sequence
  Synthetic
aauucuaaagugaaggcaaaa

SEQ ID NO: 427959 - RNA, 22 nt, Artificial Sequence
  Synthetic
uaauucuaaagugaaggcaaaa

SEQ ID NO: 427960 - RNA, 23 nt, Artificial Sequence
  Synthetic
uuaauucuaaagugaaggcaaaa

SEQ ID NO: 427961 - RNA, 24 nt, Artificial Sequence
  Synthetic
cuuaauucuaaagugaaggcaaaa

SEQ ID NO: 427962 - RNA, 18 nt, Artificial Sequence
  Synthetic
aggugguauacggcaaaa

SEQ ID NO: 427963 - RNA, 19 nt, Artificial Sequence
  Synthetic
caggugguauacggcaaaa

SEQ ID NO: 427964 - RNA, 20 nt, Artificial Sequence
  Synthetic
gcaggugguauacggcaaaa

SEQ ID NO: 427965 - RNA, 21 nt, Artificial Sequence
  Synthetic
ggcaggugguauacggcaaaa

SEQ ID NO: 427966 - RNA, 22 nt, Artificial Sequence
  Synthetic
uggcaggugguauacggcaaaa

SEQ ID NO: 427967 - RNA, 23 nt, Artificial Sequence
  Synthetic
uuggcaggugguauacggcaaaa

SEQ ID NO: 427968 - RNA, 24 nt, Artificial Sequence
  Synthetic
cuuggcaggugguauacggcaaaa

SEQ ID NO: 427969 - RNA, 18 nt, Artificial Sequence
  Synthetic
cauacugaaugggcaaaa

SEQ ID NO: 427970 - RNA, 19 nt, Artificial Sequence
  Synthetic
ucauacugaaugggcaaaa

SEQ ID NO: 427971 - RNA, 20 nt, Artificial Sequence
  Synthetic
aucauacugaaugggcaaaa

SEQ ID NO: 427972 - RNA, 21 nt, Artificial Sequence
  Synthetic
uaucauacugaaugggcaaaa

SEQ ID NO: 427973 - RNA, 22 nt, Artificial Sequence
  Synthetic
auaucauacugaaugggcaaaa

SEQ ID NO: 427974 - RNA, 23 nt, Artificial Sequence
  Synthetic
aauaucauacugaaugggcaaaa

SEQ ID NO: 427975 - RNA, 24 nt, Artificial Sequence
  Synthetic
caauaucauacugaaugggcaaaa

SEQ ID NO: 427976 - RNA, 18 nt, Artificial Sequence
  Synthetic
uuuagaugucaugcaaaa

SEQ ID NO: 427977 - RNA, 19 nt, Artificial Sequence
  Synthetic
auuuagaugucaugcaaaa

SEQ ID NO: 427978 - RNA, 20 nt, Artificial Sequence
  Synthetic
gauuuagaugucaugcaaaa

SEQ ID NO: 427979 - RNA, 21 nt, Artificial Sequence
  Synthetic
agauuuagaugucaugcaaaa

SEQ ID NO: 427980 - RNA, 22 nt, Artificial Sequence
  Synthetic
aagauuuagaugucaugcaaaa

SEQ ID NO: 427981 - RNA, 23 nt, Artificial Sequence
  Synthetic
aaagauuuagaugucaugcaaaa

SEQ ID NO: 427982 - RNA, 24 nt, Artificial Sequence
  Synthetic
aaaagauuuagaugucaugcaaaa

SEQ ID NO: 427983 - RNA, 18 nt, Artificial Sequence
  Synthetic
guuguuggcuaugcaaaa

SEQ ID NO: 427984 - RNA, 19 nt, Artificial Sequence
  Synthetic
aguuguuggcuaugcaaaa

SEQ ID NO: 427985 - RNA, 20 nt, Artificial Sequence
  Synthetic
uaguuguuggcuaugcaaaa

SEQ ID NO: 427986 - RNA, 21 nt, Artificial Sequence
  Synthetic
uuaguuguuggcuaugcaaaa

SEQ ID NO: 427987 - RNA, 22 nt, Artificial Sequence
  Synthetic
uuuaguuguuggcuaugcaaaa

SEQ ID NO: 427988 - RNA, 23 nt, Artificial Sequence
  Synthetic
auuuaguuguuggcuaugcaaaa

SEQ ID NO: 427989 - RNA, 24 nt, Artificial Sequence
  Synthetic
aauuuaguuguuggcuaugcaaaa

SEQ ID NO: 427990 - RNA, 18 nt, Artificial Sequence
  Synthetic
uuuuggguuuuugcaaaa

SEQ ID NO: 427991 - RNA, 19 nt, Artificial Sequence
  Synthetic
auuuuggguuuuugcaaaa

SEQ ID NO: 427992 - RNA, 20 nt, Artificial Sequence
  Synthetic
uauuuuggguuuuugcaaaa

SEQ ID NO: 427993 - RNA, 21 nt, Artificial Sequence
  Synthetic
auauuuuggguuuuugcaaaa

SEQ ID NO: 427994 - RNA, 22 nt, Artificial Sequence
  Synthetic
aauauuuuggguuuuugcaaaa

SEQ ID NO: 427995 - RNA, 23 nt, Artificial Sequence
  Synthetic
aaauauuuuggguuuuugcaaaa

SEQ ID NO: 427996 - RNA, 24 nt, Artificial Sequence
  Synthetic
aaaauauuuuggguuuuugcaaaa

SEQ ID NO: 427997 - RNA, 18 nt, Artificial Sequence
  Synthetic
uuuagacaacaaucaaaa

SEQ ID NO: 427998 - RNA, 19 nt, Artificial Sequence
  Synthetic
cuuuagacaacaaucaaaa

SEQ ID NO: 427999 - RNA, 20 nt, Artificial Sequence
  Synthetic
ucuuuagacaacaaucaaaa

SEQ ID NO: 428000 - RNA, 21 nt, Artificial Sequence
  Synthetic
cucuuuagacaacaaucaaaa

SEQ ID NO: 428001 - RNA, 22 nt, Artificial Sequence
  Synthetic
acucuuuagacaacaaucaaaa

SEQ ID NO: 428002 - RNA, 23 nt, Artificial Sequence
  Synthetic
cacucuuuagacaacaaucaaaa

SEQ ID NO: 428003 - RNA, 24 nt, Artificial Sequence
  Synthetic
acacucuuuagacaacaaucaaaa

SEQ ID NO: 428004 - RNA, 18 nt, Artificial Sequence
  Synthetic
ucagcaagccaaucaaaa

SEQ ID NO: 428005 - RNA, 19 nt, Artificial Sequence
  Synthetic
aucagcaagccaaucaaaa

SEQ ID NO: 428006 - RNA, 20 nt, Artificial Sequence
  Synthetic
uaucagcaagccaaucaaaa

SEQ ID NO: 428007 - RNA, 21 nt, Artificial Sequence
  Synthetic
auaucagcaagccaaucaaaa

SEQ ID NO: 428008 - RNA, 22 nt, Artificial Sequence
  Synthetic
aauaucagcaagccaaucaaaa

SEQ ID NO: 428009 - RNA, 23 nt, Artificial Sequence
  Synthetic
uaauaucagcaagccaaucaaaa

SEQ ID NO: 428010 - RNA, 24 nt, Artificial Sequence
  Synthetic
cuaauaucagcaagccaaucaaaa

SEQ ID NO: 428011 - RNA, 18 nt, Artificial Sequence
  Synthetic
gagagaauggaaucaaaa

SEQ ID NO: 428012 - RNA, 19 nt, Artificial Sequence
  Synthetic
ugagagaauggaaucaaaa

SEQ ID NO: 428013 - RNA, 20 nt, Artificial Sequence
  Synthetic
gugagagaauggaaucaaaa

SEQ ID NO: 428014 - RNA, 21 nt, Artificial Sequence
  Synthetic
ugugagagaauggaaucaaaa

SEQ ID NO: 428015 - RNA, 22 nt, Artificial Sequence
  Synthetic
augugagagaauggaaucaaaa

SEQ ID NO: 428016 - RNA, 23 nt, Artificial Sequence
  Synthetic
caugugagagaauggaaucaaaa

SEQ ID NO: 428017 - RNA, 24 nt, Artificial Sequence
  Synthetic
ccaugugagagaauggaaucaaaa

SEQ ID NO: 428018 - RNA, 18 nt, Artificial Sequence
  Synthetic
ccagaaauugaaucaaaa

SEQ ID NO: 428019 - RNA, 19 nt, Artificial Sequence
  Synthetic
accagaaauugaaucaaaa

SEQ ID NO: 428020 - RNA, 20 nt, Artificial Sequence
  Synthetic
uaccagaaauugaaucaaaa

SEQ ID NO: 428021 - RNA, 21 nt, Artificial Sequence
  Synthetic
cuaccagaaauugaaucaaaa

SEQ ID NO: 428022 - RNA, 22 nt, Artificial Sequence
  Synthetic
acuaccagaaauugaaucaaaa

SEQ ID NO: 428023 - RNA, 23 nt, Artificial Sequence
  Synthetic
aacuaccagaaauugaaucaaaa

SEQ ID NO: 428024 - RNA, 24 nt, Artificial Sequence
  Synthetic
aaacuaccagaaauugaaucaaaa

SEQ ID NO: 428025 - RNA, 18 nt, Artificial Sequence
  Synthetic
uaaauuccuacaucaaaa

SEQ ID NO: 428026 - RNA, 19 nt, Artificial Sequence
  Synthetic
auaaauuccuacaucaaaa

SEQ ID NO: 428027 - RNA, 20 nt, Artificial Sequence
  Synthetic
aauaaauuccuacaucaaaa

SEQ ID NO: 428028 - RNA, 21 nt, Artificial Sequence
  Synthetic
caauaaauuccuacaucaaaa

SEQ ID NO: 428029 - RNA, 22 nt, Artificial Sequence
  Synthetic
ucaauaaauuccuacaucaaaa

SEQ ID NO: 428030 - RNA, 23 nt, Artificial Sequence
  Synthetic
aucaauaaauuccuacaucaaaa

SEQ ID NO: 428031 - RNA, 24 nt, Artificial Sequence
  Synthetic
uaucaauaaauuccuacaucaaaa

SEQ ID NO: 428032 - RNA, 18 nt, Artificial Sequence
  Synthetic
cugaaggguacaucaaaa

SEQ ID NO: 428033 - RNA, 19 nt, Artificial Sequence
  Synthetic
ccugaaggguacaucaaaa

SEQ ID NO: 428034 - RNA, 20 nt, Artificial Sequence
  Synthetic
gccugaaggguacaucaaaa

SEQ ID NO: 428035 - RNA, 21 nt, Artificial Sequence
  Synthetic
ggccugaaggguacaucaaaa

SEQ ID NO: 428036 - RNA, 22 nt, Artificial Sequence
  Synthetic
aggccugaaggguacaucaaaa

SEQ ID NO: 428037 - RNA, 23 nt, Artificial Sequence
  Synthetic
uaggccugaaggguacaucaaaa

SEQ ID NO: 428038 - RNA, 24 nt, Artificial Sequence
  Synthetic
auaggccugaaggguacaucaaaa

SEQ ID NO: 428039 - RNA, 18 nt, Artificial Sequence
  Synthetic
aaaaauaagggaucaaaa

SEQ ID NO: 428040 - RNA, 19 nt, Artificial Sequence
  Synthetic
gaaaaauaagggaucaaaa

SEQ ID NO: 428041 - RNA, 20 nt, Artificial Sequence
  Synthetic
agaaaaauaagggaucaaaa

SEQ ID NO: 428042 - RNA, 21 nt, Artificial Sequence
  Synthetic
aagaaaaauaagggaucaaaa

SEQ ID NO: 428043 - RNA, 22 nt, Artificial Sequence
  Synthetic
aaagaaaaauaagggaucaaaa

SEQ ID NO: 428044 - RNA, 23 nt, Artificial Sequence
  Synthetic
gaaagaaaaauaagggaucaaaa

SEQ ID NO: 428045 - RNA, 24 nt, Artificial Sequence
  Synthetic
agaaagaaaaauaagggaucaaaa

SEQ ID NO: 428046 - RNA, 18 nt, Artificial Sequence
  Synthetic
ucaacuaucauaucaaaa

SEQ ID NO: 428047 - RNA, 19 nt, Artificial Sequence
  Synthetic
aucaacuaucauaucaaaa

SEQ ID NO: 428048 - RNA, 20 nt, Artificial Sequence
  Synthetic
gaucaacuaucauaucaaaa

SEQ ID NO: 428049 - RNA, 21 nt, Artificial Sequence
  Synthetic
agaucaacuaucauaucaaaa

SEQ ID NO: 428050 - RNA, 22 nt, Artificial Sequence
  Synthetic
uagaucaacuaucauaucaaaa

SEQ ID NO: 428051 - RNA, 23 nt, Artificial Sequence
  Synthetic
guagaucaacuaucauaucaaaa

SEQ ID NO: 428052 - RNA, 24 nt, Artificial Sequence
  Synthetic
aguagaucaacuaucauaucaaaa

SEQ ID NO: 428053 - RNA, 18 nt, Artificial Sequence
  Synthetic
uaggugcuucuaucaaaa

SEQ ID NO: 428054 - RNA, 19 nt, Artificial Sequence
  Synthetic
guaggugcuucuaucaaaa

SEQ ID NO: 428055 - RNA, 20 nt, Artificial Sequence
  Synthetic
uguaggugcuucuaucaaaa

SEQ ID NO: 428056 - RNA, 21 nt, Artificial Sequence
  Synthetic
cuguaggugcuucuaucaaaa

SEQ ID NO: 428057 - RNA, 22 nt, Artificial Sequence
  Synthetic
gcuguaggugcuucuaucaaaa

SEQ ID NO: 428058 - RNA, 23 nt, Artificial Sequence
  Synthetic
agcuguaggugcuucuaucaaaa

SEQ ID NO: 428059 - RNA, 24 nt, Artificial Sequence
  Synthetic
cagcuguaggugcuucuaucaaaa

SEQ ID NO: 428060 - RNA, 18 nt, Artificial Sequence
  Synthetic
caguaccauguaucaaaa

SEQ ID NO: 428061 - RNA, 19 nt, Artificial Sequence
  Synthetic
ucaguaccauguaucaaaa

SEQ ID NO: 428062 - RNA, 20 nt, Artificial Sequence
  Synthetic
uucaguaccauguaucaaaa

SEQ ID NO: 428063 - RNA, 21 nt, Artificial Sequence
  Synthetic
auucaguaccauguaucaaaa

SEQ ID NO: 428064 - RNA, 22 nt, Artificial Sequence
  Synthetic
uauucaguaccauguaucaaaa

SEQ ID NO: 428065 - RNA, 23 nt, Artificial Sequence
  Synthetic
cuauucaguaccauguaucaaaa

SEQ ID NO: 428066 - RNA, 24 nt, Artificial Sequence
  Synthetic
acuauucaguaccauguaucaaaa

SEQ ID NO: 428067 - RNA, 18 nt, Artificial Sequence
  Synthetic
uagauuuuaaacucaaaa

SEQ ID NO: 428068 - RNA, 19 nt, Artificial Sequence
  Synthetic
cuagauuuuaaacucaaaa

SEQ ID NO: 428069 - RNA, 20 nt, Artificial Sequence
  Synthetic
acuagauuuuaaacucaaaa

SEQ ID NO: 428070 - RNA, 21 nt, Artificial Sequence
  Synthetic
cacuagauuuuaaacucaaaa

SEQ ID NO: 428071 - RNA, 22 nt, Artificial Sequence
  Synthetic
ccacuagauuuuaaacucaaaa

SEQ ID NO: 428072 - RNA, 23 nt, Artificial Sequence
  Synthetic
cccacuagauuuuaaacucaaaa

SEQ ID NO: 428073 - RNA, 24 nt, Artificial Sequence
  Synthetic
ccccacuagauuuuaaacucaaaa

SEQ ID NO: 428074 - RNA, 18 nt, Artificial Sequence
  Synthetic
accucuaagaacucaaaa

SEQ ID NO: 428075 - RNA, 19 nt, Artificial Sequence
  Synthetic
uaccucuaagaacucaaaa

SEQ ID NO: 428076 - RNA, 20 nt, Artificial Sequence
  Synthetic
auaccucuaagaacucaaaa

SEQ ID NO: 428077 - RNA, 21 nt, Artificial Sequence
  Synthetic
aauaccucuaagaacucaaaa

SEQ ID NO: 428078 - RNA, 22 nt, Artificial Sequence
  Synthetic
aaauaccucuaagaacucaaaa

SEQ ID NO: 428079 - RNA, 23 nt, Artificial Sequence
  Synthetic
gaaauaccucuaagaacucaaaa

SEQ ID NO: 428080 - RNA, 24 nt, Artificial Sequence
  Synthetic
ggaaauaccucuaagaacucaaaa

SEQ ID NO: 428081 - RNA, 18 nt, Artificial Sequence
  Synthetic
augaaaccauacucaaaa

SEQ ID NO: 428082 - RNA, 19 nt, Artificial Sequence
  Synthetic
aaugaaaccauacucaaaa

SEQ ID NO: 428083 - RNA, 20 nt, Artificial Sequence
  Synthetic
aaaugaaaccauacucaaaa

SEQ ID NO: 428084 - RNA, 21 nt, Artificial Sequence
  Synthetic
uaaaugaaaccauacucaaaa

SEQ ID NO: 428085 - RNA, 22 nt, Artificial Sequence
  Synthetic
cuaaaugaaaccauacucaaaa

SEQ ID NO: 428086 - RNA, 23 nt, Artificial Sequence
  Synthetic
ucuaaaugaaaccauacucaaaa

SEQ ID NO: 428087 - RNA, 24 nt, Artificial Sequence
  Synthetic
uucuaaaugaaaccauacucaaaa

SEQ ID NO: 428088 - RNA, 18 nt, Artificial Sequence
  Synthetic
caggaggaguacucaaaa

SEQ ID NO: 428089 - RNA, 19 nt, Artificial Sequence
  Synthetic
acaggaggaguacucaaaa

SEQ ID NO: 428090 - RNA, 20 nt, Artificial Sequence
  Synthetic
cacaggaggaguacucaaaa

SEQ ID NO: 428091 - RNA, 21 nt, Artificial Sequence
  Synthetic
acacaggaggaguacucaaaa

SEQ ID NO: 428092 - RNA, 22 nt, Artificial Sequence
  Synthetic
uacacaggaggaguacucaaaa

SEQ ID NO: 428093 - RNA, 23 nt, Artificial Sequence
  Synthetic
guacacaggaggaguacucaaaa

SEQ ID NO: 428094 - RNA, 24 nt, Artificial Sequence
  Synthetic
aguacacaggaggaguacucaaaa

SEQ ID NO: 428095 - RNA, 18 nt, Artificial Sequence
  Synthetic
cggagcaaaagcucaaaa

SEQ ID NO: 428096 - RNA, 19 nt, Artificial Sequence
  Synthetic
ccggagcaaaagcucaaaa

SEQ ID NO: 428097 - RNA, 20 nt, Artificial Sequence
  Synthetic
accggagcaaaagcucaaaa

SEQ ID NO: 428098 - RNA, 21 nt, Artificial Sequence
  Synthetic
aaccggagcaaaagcucaaaa

SEQ ID NO: 428099 - RNA, 22 nt, Artificial Sequence
  Synthetic
gaaccggagcaaaagcucaaaa

SEQ ID NO: 428100 - RNA, 23 nt, Artificial Sequence
  Synthetic
ugaaccggagcaaaagcucaaaa

SEQ ID NO: 428101 - RNA, 24 nt, Artificial Sequence
  Synthetic
augaaccggagcaaaagcucaaaa

SEQ ID NO: 428102 - RNA, 18 nt, Artificial Sequence
  Synthetic
cagaaaaugggcucaaaa

SEQ ID NO: 428103 - RNA, 19 nt, Artificial Sequence
  Synthetic
ccagaaaaugggcucaaaa

SEQ ID NO: 428104 - RNA, 20 nt, Artificial Sequence
  Synthetic
gccagaaaaugggcucaaaa

SEQ ID NO: 428105 - RNA, 21 nt, Artificial Sequence
  Synthetic
ugccagaaaaugggcucaaaa

SEQ ID NO: 428106 - RNA, 22 nt, Artificial Sequence
  Synthetic
augccagaaaaugggcucaaaa

SEQ ID NO: 428107 - RNA, 23 nt, Artificial Sequence
  Synthetic
gaugccagaaaaugggcucaaaa

SEQ ID NO: 428108 - RNA, 24 nt, Artificial Sequence
  Synthetic
agaugccagaaaaugggcucaaaa

SEQ ID NO: 428109 - RNA, 18 nt, Artificial Sequence
  Synthetic
aguuucucaaucucaaaa

SEQ ID NO: 428110 - RNA, 19 nt, Artificial Sequence
  Synthetic
aaguuucucaaucucaaaa

SEQ ID NO: 428111 - RNA, 20 nt, Artificial Sequence
  Synthetic
uaaguuucucaaucucaaaa

SEQ ID NO: 428112 - RNA, 21 nt, Artificial Sequence
  Synthetic
cuaaguuucucaaucucaaaa

SEQ ID NO: 428113 - RNA, 22 nt, Artificial Sequence
  Synthetic
gcuaaguuucucaaucucaaaa

SEQ ID NO: 428114 - RNA, 23 nt, Artificial Sequence
  Synthetic
agcuaaguuucucaaucucaaaa

SEQ ID NO: 428115 - RNA, 24 nt, Artificial Sequence
  Synthetic
uagcuaaguuucucaaucucaaaa

SEQ ID NO: 428116 - RNA, 18 nt, Artificial Sequence
  Synthetic
cagaaccccaucucaaaa

SEQ ID NO: 428117 - RNA, 19 nt, Artificial Sequence
  Synthetic
ccagaaccccaucucaaaa

SEQ ID NO: 428118 - RNA, 20 nt, Artificial Sequence
  Synthetic
gccagaaccccaucucaaaa

SEQ ID NO: 428119 - RNA, 21 nt, Artificial Sequence
  Synthetic
agccagaaccccaucucaaaa

SEQ ID NO: 428120 - RNA, 22 nt, Artificial Sequence
  Synthetic
gagccagaaccccaucucaaaa

SEQ ID NO: 428121 - RNA, 23 nt, Artificial Sequence
  Synthetic
agagccagaaccccaucucaaaa

SEQ ID NO: 428122 - RNA, 24 nt, Artificial Sequence
  Synthetic
cagagccagaaccccaucucaaaa

SEQ ID NO: 428123 - RNA, 18 nt, Artificial Sequence
  Synthetic
uguugcuggaagucaaaa

SEQ ID NO: 428124 - RNA, 19 nt, Artificial Sequence
  Synthetic
auguugcuggaagucaaaa

SEQ ID NO: 428125 - RNA, 20 nt, Artificial Sequence
  Synthetic
uauguugcuggaagucaaaa

SEQ ID NO: 428126 - RNA, 21 nt, Artificial Sequence
  Synthetic
auauguugcuggaagucaaaa

SEQ ID NO: 428127 - RNA, 22 nt, Artificial Sequence
  Synthetic
uauauguugcuggaagucaaaa

SEQ ID NO: 428128 - RNA, 23 nt, Artificial Sequence
  Synthetic
auauauguugcuggaagucaaaa

SEQ ID NO: 428129 - RNA, 24 nt, Artificial Sequence
  Synthetic
uauauauguugcuggaagucaaaa

SEQ ID NO: 428130 - RNA, 18 nt, Artificial Sequence
  Synthetic
auuucauaacagucaaaa

SEQ ID NO: 428131 - RNA, 19 nt, Artificial Sequence
  Synthetic
cauuucauaacagucaaaa

SEQ ID NO: 428132 - RNA, 20 nt, Artificial Sequence
  Synthetic
gcauuucauaacagucaaaa

SEQ ID NO: 428133 - RNA, 21 nt, Artificial Sequence
  Synthetic
ggcauuucauaacagucaaaa

SEQ ID NO: 428134 - RNA, 22 nt, Artificial Sequence
  Synthetic
aggcauuucauaacagucaaaa

SEQ ID NO: 428135 - RNA, 23 nt, Artificial Sequence
  Synthetic
aaggcauuucauaacagucaaaa

SEQ ID NO: 428136 - RNA, 24 nt, Artificial Sequence
  Synthetic
gaaggcauuucauaacagucaaaa

SEQ ID NO: 428137 - RNA, 18 nt, Artificial Sequence
  Synthetic
gccuauuuucagucaaaa

SEQ ID NO: 428138 - RNA, 19 nt, Artificial Sequence
  Synthetic
ugccuauuuucagucaaaa

SEQ ID NO: 428139 - RNA, 20 nt, Artificial Sequence
  Synthetic
uugccuauuuucagucaaaa

SEQ ID NO: 428140 - RNA, 21 nt, Artificial Sequence
  Synthetic
cuugccuauuuucagucaaaa

SEQ ID NO: 428141 - RNA, 22 nt, Artificial Sequence
  Synthetic
ucuugccuauuuucagucaaaa

SEQ ID NO: 428142 - RNA, 23 nt, Artificial Sequence
  Synthetic
uucuugccuauuuucagucaaaa

SEQ ID NO: 428143 - RNA, 24 nt, Artificial Sequence
  Synthetic
auucuugccuauuuucagucaaaa

SEQ ID NO: 428144 - RNA, 18 nt, Artificial Sequence
  Synthetic
ugauagauuaugucaaaa

SEQ ID NO: 428145 - RNA, 19 nt, Artificial Sequence
  Synthetic
uugauagauuaugucaaaa

SEQ ID NO: 428146 - RNA, 20 nt, Artificial Sequence
  Synthetic
uuugauagauuaugucaaaa

SEQ ID NO: 428147 - RNA, 21 nt, Artificial Sequence
  Synthetic
auuugauagauuaugucaaaa

SEQ ID NO: 428148 - RNA, 22 nt, Artificial Sequence
  Synthetic
cauuugauagauuaugucaaaa

SEQ ID NO: 428149 - RNA, 23 nt, Artificial Sequence
  Synthetic
ucauuugauagauuaugucaaaa

SEQ ID NO: 428150 - RNA, 24 nt, Artificial Sequence
  Synthetic
uucauuugauagauuaugucaaaa

SEQ ID NO: 428151 - RNA, 18 nt, Artificial Sequence
  Synthetic
gucaucucuuugucaaaa

SEQ ID NO: 428152 - RNA, 19 nt, Artificial Sequence
  Synthetic
agucaucucuuugucaaaa

SEQ ID NO: 428153 - RNA, 20 nt, Artificial Sequence
  Synthetic
uagucaucucuuugucaaaa

SEQ ID NO: 428154 - RNA, 21 nt, Artificial Sequence
  Synthetic
uuagucaucucuuugucaaaa

SEQ ID NO: 428155 - RNA, 22 nt, Artificial Sequence
  Synthetic
uuuagucaucucuuugucaaaa

SEQ ID NO: 428156 - RNA, 23 nt, Artificial Sequence
  Synthetic
auuuagucaucucuuugucaaaa

SEQ ID NO: 428157 - RNA, 24 nt, Artificial Sequence
  Synthetic
cauuuagucaucucuuugucaaaa

SEQ ID NO: 428158 - RNA, 18 nt, Artificial Sequence
  Synthetic
agcuguagagauucaaaa

SEQ ID NO: 428159 - RNA, 19 nt, Artificial Sequence
  Synthetic
uagcuguagagauucaaaa

SEQ ID NO: 428160 - RNA, 20 nt, Artificial Sequence
  Synthetic
auagcuguagagauucaaaa

SEQ ID NO: 428161 - RNA, 21 nt, Artificial Sequence
  Synthetic
aauagcuguagagauucaaaa

SEQ ID NO: 428162 - RNA, 22 nt, Artificial Sequence
  Synthetic
aaauagcuguagagauucaaaa

SEQ ID NO: 428163 - RNA, 23 nt, Artificial Sequence
  Synthetic
uaaauagcuguagagauucaaaa

SEQ ID NO: 428164 - RNA, 24 nt, Artificial Sequence
  Synthetic
uuaaauagcuguagagauucaaaa

SEQ ID NO: 428165 - RNA, 18 nt, Artificial Sequence
  Synthetic
aaaauaggguauucaaaa

SEQ ID NO: 428166 - RNA, 19 nt, Artificial Sequence
  Synthetic
uaaaauaggguauucaaaa

SEQ ID NO: 428167 - RNA, 20 nt, Artificial Sequence
  Synthetic
uuaaaauaggguauucaaaa

SEQ ID NO: 428168 - RNA, 21 nt, Artificial Sequence
  Synthetic
uuuaaaauaggguauucaaaa

SEQ ID NO: 428169 - RNA, 22 nt, Artificial Sequence
  Synthetic
auuuaaaauaggguauucaaaa

SEQ ID NO: 428170 - RNA, 23 nt, Artificial Sequence
  Synthetic
aauuuaaaauaggguauucaaaa

SEQ ID NO: 428171 - RNA, 24 nt, Artificial Sequence
  Synthetic
gaauuuaaaauaggguauucaaaa

SEQ ID NO: 428172 - RNA, 18 nt, Artificial Sequence
  Synthetic
guggggaggacuucaaaa

SEQ ID NO: 428173 - RNA, 19 nt, Artificial Sequence
  Synthetic
aguggggaggacuucaaaa

SEQ ID NO: 428174 - RNA, 20 nt, Artificial Sequence
  Synthetic
gaguggggaggacuucaaaa

SEQ ID NO: 428175 - RNA, 21 nt, Artificial Sequence
  Synthetic
ggaguggggaggacuucaaaa

SEQ ID NO: 428176 - RNA, 22 nt, Artificial Sequence
  Synthetic
aggaguggggaggacuucaaaa

SEQ ID NO: 428177 - RNA, 23 nt, Artificial Sequence
  Synthetic
aaggaguggggaggacuucaaaa

SEQ ID NO: 428178 - RNA, 24 nt, Artificial Sequence
  Synthetic
caaggaguggggaggacuucaaaa

SEQ ID NO: 428179 - RNA, 18 nt, Artificial Sequence
  Synthetic
aucacauugccuucaaaa

SEQ ID NO: 428180 - RNA, 19 nt, Artificial Sequence
  Synthetic
uaucacauugccuucaaaa

SEQ ID NO: 428181 - RNA, 20 nt, Artificial Sequence
  Synthetic
auaucacauugccuucaaaa

SEQ ID NO: 428182 - RNA, 21 nt, Artificial Sequence
  Synthetic
aauaucacauugccuucaaaa

SEQ ID NO: 428183 - RNA, 22 nt, Artificial Sequence
  Synthetic
aaauaucacauugccuucaaaa

SEQ ID NO: 428184 - RNA, 23 nt, Artificial Sequence
  Synthetic
uaaauaucacauugccuucaaaa

SEQ ID NO: 428185 - RNA, 24 nt, Artificial Sequence
  Synthetic
uuaaauaucacauugccuucaaaa

SEQ ID NO: 428186 - RNA, 18 nt, Artificial Sequence
  Synthetic
auuauuuuuauuucaaaa

SEQ ID NO: 428187 - RNA, 19 nt, Artificial Sequence
  Synthetic
aauuauuuuuauuucaaaa

SEQ ID NO: 428188 - RNA, 20 nt, Artificial Sequence
  Synthetic
aaauuauuuuuauuucaaaa

SEQ ID NO: 428189 - RNA, 21 nt, Artificial Sequence
  Synthetic
aaaauuauuuuuauuucaaaa

SEQ ID NO: 428190 - RNA, 22 nt, Artificial Sequence
  Synthetic
aaaaauuauuuuuauuucaaaa

SEQ ID NO: 428191 - RNA, 23 nt, Artificial Sequence
  Synthetic
uaaaaauuauuuuuauuucaaaa

SEQ ID NO: 428192 - RNA, 24 nt, Artificial Sequence
  Synthetic
guaaaaauuauuuuuauuucaaaa

SEQ ID NO: 428193 - RNA, 18 nt, Artificial Sequence
  Synthetic
gaauuuuuauuuucaaaa

SEQ ID NO: 428194 - RNA, 19 nt, Artificial Sequence
  Synthetic
agaauuuuuauuuucaaaa

SEQ ID NO: 428195 - RNA, 20 nt, Artificial Sequence
  Synthetic
uagaauuuuuauuuucaaaa

SEQ ID NO: 428196 - RNA, 21 nt, Artificial Sequence
  Synthetic
auagaauuuuuauuuucaaaa

SEQ ID NO: 428197 - RNA, 22 nt, Artificial Sequence
  Synthetic
gauagaauuuuuauuuucaaaa

SEQ ID NO: 428198 - RNA, 23 nt, Artificial Sequence
  Synthetic
ugauagaauuuuuauuuucaaaa

SEQ ID NO: 428199 - RNA, 24 nt, Artificial Sequence
  Synthetic
augauagaauuuuuauuuucaaaa

SEQ ID NO: 428200 - RNA, 18 nt, Artificial Sequence
  Synthetic
cuuuuuucuuuuucaaaa

SEQ ID NO: 428201 - RNA, 19 nt, Artificial Sequence
  Synthetic
acuuuuuucuuuuucaaaa

SEQ ID NO: 428202 - RNA, 20 nt, Artificial Sequence
  Synthetic
gacuuuuuucuuuuucaaaa

SEQ ID NO: 428203 - RNA, 21 nt, Artificial Sequence
  Synthetic
agacuuuuuucuuuuucaaaa

SEQ ID NO: 428204 - RNA, 22 nt, Artificial Sequence
  Synthetic
uagacuuuuuucuuuuucaaaa

SEQ ID NO: 428205 - RNA, 23 nt, Artificial Sequence
  Synthetic
auagacuuuuuucuuuuucaaaa

SEQ ID NO: 428206 - RNA, 24 nt, Artificial Sequence
  Synthetic
aauagacuuuuuucuuuuucaaaa

SEQ ID NO: 428207 - RNA, 18 nt, Artificial Sequence
  Synthetic
guuauuuaaaaaagaaaa

SEQ ID NO: 428208 - RNA, 19 nt, Artificial Sequence
  Synthetic
uguuauuuaaaaaagaaaa

SEQ ID NO: 428209 - RNA, 20 nt, Artificial Sequence
  Synthetic
uuguuauuuaaaaaagaaaa

SEQ ID NO: 428210 - RNA, 21 nt, Artificial Sequence
  Synthetic
uuuguuauuuaaaaaagaaaa

SEQ ID NO: 428211 - RNA, 22 nt, Artificial Sequence
  Synthetic
auuuguuauuuaaaaaagaaaa

SEQ ID NO: 428212 - RNA, 23 nt, Artificial Sequence
  Synthetic
uauuuguuauuuaaaaaagaaaa

SEQ ID NO: 428213 - RNA, 24 nt, Artificial Sequence
  Synthetic
guauuuguuauuuaaaaaagaaaa

SEQ ID NO: 428214 - RNA, 18 nt, Artificial Sequence
  Synthetic
ggaggcagaaaaagaaaa

SEQ ID NO: 428215 - RNA, 19 nt, Artificial Sequence
  Synthetic
uggaggcagaaaaagaaaa

SEQ ID NO: 428216 - RNA, 20 nt, Artificial Sequence
  Synthetic
cuggaggcagaaaaagaaaa

SEQ ID NO: 428217 - RNA, 21 nt, Artificial Sequence
  Synthetic
acuggaggcagaaaaagaaaa

SEQ ID NO: 428218 - RNA, 22 nt, Artificial Sequence
  Synthetic
aacuggaggcagaaaaagaaaa

SEQ ID NO: 428219 - RNA, 23 nt, Artificial Sequence
  Synthetic
gaacuggaggcagaaaaagaaaa

SEQ ID NO: 428220 - RNA, 24 nt, Artificial Sequence
  Synthetic
ggaacuggaggcagaaaaagaaaa

SEQ ID NO: 428221 - RNA, 18 nt, Artificial Sequence
  Synthetic
caacaacccaaaagaaaa

SEQ ID NO: 428222 - RNA, 19 nt, Artificial Sequence
  Synthetic
ccaacaacccaaaagaaaa

SEQ ID NO: 428223 - RNA, 20 nt, Artificial Sequence
  Synthetic
gccaacaacccaaaagaaaa

SEQ ID NO: 428224 - RNA, 21 nt, Artificial Sequence
  Synthetic
ggccaacaacccaaaagaaaa

SEQ ID NO: 428225 - RNA, 22 nt, Artificial Sequence
  Synthetic
aggccaacaacccaaaagaaaa

SEQ ID NO: 428226 - RNA, 23 nt, Artificial Sequence
  Synthetic
aaggccaacaacccaaaagaaaa

SEQ ID NO: 428227 - RNA, 24 nt, Artificial Sequence
  Synthetic
aaaggccaacaacccaaaagaaaa

SEQ ID NO: 428228 - RNA, 18 nt, Artificial Sequence
  Synthetic
aaaagaaagaaaagaaaa

SEQ ID NO: 428229 - RNA, 19 nt, Artificial Sequence
  Synthetic
aaaaagaaagaaaagaaaa

SEQ ID NO: 428230 - RNA, 20 nt, Artificial Sequence
  Synthetic
aaaaaagaaagaaaagaaaa

SEQ ID NO: 428231 - RNA, 21 nt, Artificial Sequence
  Synthetic
aaaaaaagaaagaaaagaaaa

SEQ ID NO: 428232 - RNA, 22 nt, Artificial Sequence
  Synthetic
gaaaaaaagaaagaaaagaaaa

SEQ ID NO: 428233 - RNA, 23 nt, Artificial Sequence
  Synthetic
ggaaaaaaagaaagaaaagaaaa

SEQ ID NO: 428234 - RNA, 24 nt, Artificial Sequence
  Synthetic
aggaaaaaaagaaagaaaagaaaa

SEQ ID NO: 428235 - RNA, 18 nt, Artificial Sequence
  Synthetic
uuaagauagaaaagaaaa

SEQ ID NO: 428236 - RNA, 19 nt, Artificial Sequence
  Synthetic
uuuaagauagaaaagaaaa

SEQ ID NO: 428237 - RNA, 20 nt, Artificial Sequence
  Synthetic
auuuaagauagaaaagaaaa

SEQ ID NO: 428238 - RNA, 21 nt, Artificial Sequence
  Synthetic
gauuuaagauagaaaagaaaa

SEQ ID NO: 428239 - RNA, 22 nt, Artificial Sequence
  Synthetic
ugauuuaagauagaaaagaaaa

SEQ ID NO: 428240 - RNA, 23 nt, Artificial Sequence
  Synthetic
cugauuuaagauagaaaagaaaa

SEQ ID NO: 428241 - RNA, 24 nt, Artificial Sequence
  Synthetic
ucugauuuaagauagaaaagaaaa

SEQ ID NO: 428242 - RNA, 18 nt, Artificial Sequence
  Synthetic
uugcuacggaaaagaaaa

SEQ ID NO: 428243 - RNA, 19 nt, Artificial Sequence
  Synthetic
uuugcuacggaaaagaaaa

SEQ ID NO: 428244 - RNA, 20 nt, Artificial Sequence
  Synthetic
guuugcuacggaaaagaaaa

SEQ ID NO: 428245 - RNA, 21 nt, Artificial Sequence
  Synthetic
uguuugcuacggaaaagaaaa

SEQ ID NO: 428246 - RNA, 22 nt, Artificial Sequence
  Synthetic
cuguuugcuacggaaaagaaaa

SEQ ID NO: 428247 - RNA, 23 nt, Artificial Sequence
  Synthetic
ucuguuugcuacggaaaagaaaa

SEQ ID NO: 428248 - RNA, 24 nt, Artificial Sequence
  Synthetic
uucuguuugcuacggaaaagaaaa

SEQ ID NO: 428249 - RNA, 18 nt, Artificial Sequence
  Synthetic
aaaaaacuuaaaagaaaa

SEQ ID NO: 428250 - RNA, 19 nt, Artificial Sequence
  Synthetic
gaaaaaacuuaaaagaaaa

SEQ ID NO: 428251 - RNA, 20 nt, Artificial Sequence
  Synthetic
agaaaaaacuuaaaagaaaa

SEQ ID NO: 428252 - RNA, 21 nt, Artificial Sequence
  Synthetic
aagaaaaaacuuaaaagaaaa

SEQ ID NO: 428253 - RNA, 22 nt, Artificial Sequence
  Synthetic
aaagaaaaaacuuaaaagaaaa

SEQ ID NO: 428254 - RNA, 23 nt, Artificial Sequence
  Synthetic
gaaagaaaaaacuuaaaagaaaa

SEQ ID NO: 428255 - RNA, 24 nt, Artificial Sequence
  Synthetic
ugaaagaaaaaacuuaaaagaaaa

SEQ ID NO: 428256 - RNA, 18 nt, Artificial Sequence
  Synthetic
caauuccuuaaaagaaaa

SEQ ID NO: 428257 - RNA, 19 nt, Artificial Sequence
  Synthetic
ucaauuccuuaaaagaaaa

SEQ ID NO: 428258 - RNA, 20 nt, Artificial Sequence
  Synthetic
aucaauuccuuaaaagaaaa

SEQ ID NO: 428259 - RNA, 21 nt, Artificial Sequence
  Synthetic
aaucaauuccuuaaaagaaaa

SEQ ID NO: 428260 - RNA, 22 nt, Artificial Sequence
  Synthetic
aaaucaauuccuuaaaagaaaa

SEQ ID NO: 428261 - RNA, 23 nt, Artificial Sequence
  Synthetic
aaaaucaauuccuuaaaagaaaa

SEQ ID NO: 428262 - RNA, 24 nt, Artificial Sequence
  Synthetic
aaaaaucaauuccuuaaaagaaaa

SEQ ID NO: 428263 - RNA, 18 nt, Artificial Sequence
  Synthetic
cuuguaaaacaaagaaaa

SEQ ID NO: 428264 - RNA, 19 nt, Artificial Sequence
  Synthetic
acuuguaaaacaaagaaaa

SEQ ID NO: 428265 - RNA, 20 nt, Artificial Sequence
  Synthetic
gacuuguaaaacaaagaaaa

SEQ ID NO: 428266 - RNA, 21 nt, Artificial Sequence
  Synthetic
ugacuuguaaaacaaagaaaa

SEQ ID NO: 428267 - RNA, 22 nt, Artificial Sequence
  Synthetic
uugacuuguaaaacaaagaaaa

SEQ ID NO: 428268 - RNA, 23 nt, Artificial Sequence
  Synthetic
cuugacuuguaaaacaaagaaaa

SEQ ID NO: 428269 - RNA, 24 nt, Artificial Sequence
  Synthetic
acuugacuuguaaaacaaagaaaa

SEQ ID NO: 428270 - RNA, 18 nt, Artificial Sequence
  Synthetic
acacacacacaaagaaaa

SEQ ID NO: 428271 - RNA, 19 nt, Artificial Sequence
  Synthetic
cacacacacacaaagaaaa

SEQ ID NO: 428272 - RNA, 20 nt, Artificial Sequence
  Synthetic
acacacacacacaaagaaaa

SEQ ID NO: 428273 - RNA, 21 nt, Artificial Sequence
  Synthetic
cacacacacacacaaagaaaa

SEQ ID NO: 428274 - RNA, 22 nt, Artificial Sequence
  Synthetic
acacacacacacacaaagaaaa

SEQ ID NO: 428275 - RNA, 23 nt, Artificial Sequence
  Synthetic
cacacacacacacacaaagaaaa

SEQ ID NO: 428276 - RNA, 24 nt, Artificial Sequence
  Synthetic
acacacacacacacacaaagaaaa

SEQ ID NO: 428277 - RNA, 18 nt, Artificial Sequence
  Synthetic
auuuuaaaagaaagaaaa

SEQ ID NO: 428278 - RNA, 19 nt, Artificial Sequence
  Synthetic
cauuuuaaaagaaagaaaa

SEQ ID NO: 428279 - RNA, 20 nt, Artificial Sequence
  Synthetic
gcauuuuaaaagaaagaaaa

SEQ ID NO: 428280 - RNA, 21 nt, Artificial Sequence
  Synthetic
ugcauuuuaaaagaaagaaaa

SEQ ID NO: 428281 - RNA, 22 nt, Artificial Sequence
  Synthetic
uugcauuuuaaaagaaagaaaa

SEQ ID NO: 428282 - RNA, 23 nt, Artificial Sequence
  Synthetic
auugcauuuuaaaagaaagaaaa

SEQ ID NO: 428283 - RNA, 24 nt, Artificial Sequence
  Synthetic
uauugcauuuuaaaagaaagaaaa

SEQ ID NO: 428284 - RNA, 18 nt, Artificial Sequence
  Synthetic
agaaagaaagaaagaaaa

SEQ ID NO: 428285 - RNA, 19 nt, Artificial Sequence
  Synthetic
aagaaagaaagaaagaaaa

SEQ ID NO: 428286 - RNA, 20 nt, Artificial Sequence
  Synthetic
gaagaaagaaagaaagaaaa

SEQ ID NO: 428287 - RNA, 21 nt, Artificial Sequence
  Synthetic
agaagaaagaaagaaagaaaa

SEQ ID NO: 428288 - RNA, 22 nt, Artificial Sequence
  Synthetic
aagaagaaagaaagaaagaaaa

SEQ ID NO: 428289 - RNA, 23 nt, Artificial Sequence
  Synthetic
gaagaagaaagaaagaaagaaaa

SEQ ID NO: 428290 - RNA, 24 nt, Artificial Sequence
  Synthetic
agaagaagaaagaaagaaagaaaa

SEQ ID NO: 428291 - RNA, 18 nt, Artificial Sequence
  Synthetic
aaacaugcagaaagaaaa

SEQ ID NO: 428292 - RNA, 19 nt, Artificial Sequence
  Synthetic
uaaacaugcagaaagaaaa

SEQ ID NO: 428293 - RNA, 20 nt, Artificial Sequence
  Synthetic
uuaaacaugcagaaagaaaa

SEQ ID NO: 428294 - RNA, 21 nt, Artificial Sequence
  Synthetic
cuuaaacaugcagaaagaaaa

SEQ ID NO: 428295 - RNA, 22 nt, Artificial Sequence
  Synthetic
acuuaaacaugcagaaagaaaa

SEQ ID NO: 428296 - RNA, 23 nt, Artificial Sequence
  Synthetic
cacuuaaacaugcagaaagaaaa

SEQ ID NO: 428297 - RNA, 24 nt, Artificial Sequence
  Synthetic
gcacuuaaacaugcagaaagaaaa

SEQ ID NO: 428298 - RNA, 18 nt, Artificial Sequence
  Synthetic
uguaaaugugaaagaaaa

SEQ ID NO: 428299 - RNA, 19 nt, Artificial Sequence
  Synthetic
uuguaaaugugaaagaaaa

SEQ ID NO: 428300 - RNA, 20 nt, Artificial Sequence
  Synthetic
uuuguaaaugugaaagaaaa

SEQ ID NO: 428301 - RNA, 21 nt, Artificial Sequence
  Synthetic
uuuuguaaaugugaaagaaaa

SEQ ID NO: 428302 - RNA, 22 nt, Artificial Sequence
  Synthetic
auuuuguaaaugugaaagaaaa

SEQ ID NO: 428303 - RNA, 23 nt, Artificial Sequence
  Synthetic
aauuuuguaaaugugaaagaaaa

SEQ ID NO: 428304 - RNA, 24 nt, Artificial Sequence
  Synthetic
aaauuuuguaaaugugaaagaaaa

SEQ ID NO: 428305 - RNA, 18 nt, Artificial Sequence
  Synthetic
caucgaaaguaaagaaaa

SEQ ID NO: 428306 - RNA, 19 nt, Artificial Sequence
  Synthetic
gcaucgaaaguaaagaaaa

SEQ ID NO: 428307 - RNA, 20 nt, Artificial Sequence
  Synthetic
ugcaucgaaaguaaagaaaa

SEQ ID NO: 428308 - RNA, 21 nt, Artificial Sequence
  Synthetic
augcaucgaaaguaaagaaaa

SEQ ID NO: 428309 - RNA, 22 nt, Artificial Sequence
  Synthetic
aaugcaucgaaaguaaagaaaa

SEQ ID NO: 428310 - RNA, 23 nt, Artificial Sequence
  Synthetic
aaaugcaucgaaaguaaagaaaa

SEQ ID NO: 428311 - RNA, 24 nt, Artificial Sequence
  Synthetic
aaaaugcaucgaaaguaaagaaaa

SEQ ID NO: 428312 - RNA, 18 nt, Artificial Sequence
  Synthetic
cuaccacaguaaagaaaa

SEQ ID NO: 428313 - RNA, 19 nt, Artificial Sequence
  Synthetic
acuaccacaguaaagaaaa

SEQ ID NO: 428314 - RNA, 20 nt, Artificial Sequence
  Synthetic
aacuaccacaguaaagaaaa

SEQ ID NO: 428315 - RNA, 21 nt, Artificial Sequence
  Synthetic
gaacuaccacaguaaagaaaa

SEQ ID NO: 428316 - RNA, 22 nt, Artificial Sequence
  Synthetic
ugaacuaccacaguaaagaaaa

SEQ ID NO: 428317 - RNA, 23 nt, Artificial Sequence
  Synthetic
uugaacuaccacaguaaagaaaa

SEQ ID NO: 428318 - RNA, 24 nt, Artificial Sequence
  Synthetic
uuugaacuaccacaguaaagaaaa

SEQ ID NO: 428319 - RNA, 18 nt, Artificial Sequence
  Synthetic
ccaaagaguuaaagaaaa

SEQ ID NO: 428320 - RNA, 19 nt, Artificial Sequence
  Synthetic
accaaagaguuaaagaaaa

SEQ ID NO: 428321 - RNA, 20 nt, Artificial Sequence
  Synthetic
caccaaagaguuaaagaaaa

SEQ ID NO: 428322 - RNA, 21 nt, Artificial Sequence
  Synthetic
acaccaaagaguuaaagaaaa

SEQ ID NO: 428323 - RNA, 22 nt, Artificial Sequence
  Synthetic
gacaccaaagaguuaaagaaaa

SEQ ID NO: 428324 - RNA, 23 nt, Artificial Sequence
  Synthetic
agacaccaaagaguuaaagaaaa

SEQ ID NO: 428325 - RNA, 24 nt, Artificial Sequence
  Synthetic
cagacaccaaagaguuaaagaaaa

SEQ ID NO: 428326 - RNA, 18 nt, Artificial Sequence
  Synthetic
uuacuuguggcaagaaaa

SEQ ID NO: 428327 - RNA, 19 nt, Artificial Sequence
  Synthetic
auuacuuguggcaagaaaa

SEQ ID NO: 428328 - RNA, 20 nt, Artificial Sequence
  Synthetic
uauuacuuguggcaagaaaa

SEQ ID NO: 428329 - RNA, 21 nt, Artificial Sequence
  Synthetic
uuauuacuuguggcaagaaaa

SEQ ID NO: 428330 - RNA, 22 nt, Artificial Sequence
  Synthetic
guuauuacuuguggcaagaaaa

SEQ ID NO: 428331 - RNA, 23 nt, Artificial Sequence
  Synthetic
uguuauuacuuguggcaagaaaa

SEQ ID NO: 428332 - RNA, 24 nt, Artificial Sequence
  Synthetic
uuguuauuacuuguggcaagaaaa

SEQ ID NO: 428333 - RNA, 20 nt, Artificial Sequence
  Synthetic
aagacuaauaaagaagaaaa

SEQ ID NO: 428334 - RNA, 21 nt, Artificial Sequence
  Synthetic
uaagacuaauaaagaagaaaa

SEQ ID NO: 428335 - RNA, 22 nt, Artificial Sequence
  Synthetic
guaagacuaauaaagaagaaaa

SEQ ID NO: 428336 - RNA, 23 nt, Artificial Sequence
  Synthetic
aguaagacuaauaaagaagaaaa

SEQ ID NO: 428337 - RNA, 24 nt, Artificial Sequence
  Synthetic
uaguaagacuaauaaagaagaaaa

SEQ ID NO: 428338 - RNA, 21 nt, Artificial Sequence
  Synthetic
ccagacuaauaaagaagaaaa

SEQ ID NO: 428339 - RNA, 22 nt, Artificial Sequence
  Synthetic
gccagacuaauaaagaagaaaa

SEQ ID NO: 428340 - RNA, 23 nt, Artificial Sequence
  Synthetic
agccagacuaauaaagaagaaaa

SEQ ID NO: 428341 - RNA, 24 nt, Artificial Sequence
  Synthetic
uagccagacuaauaaagaagaaaa

SEQ ID NO: 428342 - RNA, 18 nt, Artificial Sequence
  Synthetic
acuguaguuagaagaaaa

SEQ ID NO: 428343 - RNA, 19 nt, Artificial Sequence
  Synthetic
uacuguaguuagaagaaaa

SEQ ID NO: 428344 - RNA, 20 nt, Artificial Sequence
  Synthetic
cuacuguaguuagaagaaaa

SEQ ID NO: 428345 - RNA, 21 nt, Artificial Sequence
  Synthetic
acuacuguaguuagaagaaaa

SEQ ID NO: 428346 - RNA, 22 nt, Artificial Sequence
  Synthetic
cacuacuguaguuagaagaaaa

SEQ ID NO: 428347 - RNA, 23 nt, Artificial Sequence
  Synthetic
ucacuacuguaguuagaagaaaa

SEQ ID NO: 428348 - RNA, 24 nt, Artificial Sequence
  Synthetic
cucacuacuguaguuagaagaaaa

SEQ ID NO: 428349 - RNA, 18 nt, Artificial Sequence
  Synthetic
cagaggcgaggaagaaaa

SEQ ID NO: 428350 - RNA, 19 nt, Artificial Sequence
  Synthetic
ucagaggcgaggaagaaaa

SEQ ID NO: 428351 - RNA, 20 nt, Artificial Sequence
  Synthetic
aucagaggcgaggaagaaaa

SEQ ID NO: 428352 - RNA, 21 nt, Artificial Sequence
  Synthetic
aaucagaggcgaggaagaaaa

SEQ ID NO: 428353 - RNA, 22 nt, Artificial Sequence
  Synthetic
gaaucagaggcgaggaagaaaa

SEQ ID NO: 428354 - RNA, 23 nt, Artificial Sequence
  Synthetic
ggaaucagaggcgaggaagaaaa

SEQ ID NO: 428355 - RNA, 24 nt, Artificial Sequence
  Synthetic
gggaaucagaggcgaggaagaaaa

SEQ ID NO: 428356 - RNA, 18 nt, Artificial Sequence
  Synthetic
gaaauagagggaagaaaa

SEQ ID NO: 428357 - RNA, 19 nt, Artificial Sequence
  Synthetic
ggaaauagagggaagaaaa

SEQ ID NO: 428358 - RNA, 20 nt, Artificial Sequence
  Synthetic
gggaaauagagggaagaaaa

SEQ ID NO: 428359 - RNA, 21 nt, Artificial Sequence
  Synthetic
agggaaauagagggaagaaaa

SEQ ID NO: 428360 - RNA, 22 nt, Artificial Sequence
  Synthetic
cagggaaauagagggaagaaaa

SEQ ID NO: 428361 - RNA, 23 nt, Artificial Sequence
  Synthetic
acagggaaauagagggaagaaaa

SEQ ID NO: 428362 - RNA, 24 nt, Artificial Sequence
  Synthetic
uacagggaaauagagggaagaaaa

SEQ ID NO: 428363 - RNA, 18 nt, Artificial Sequence
  Synthetic
gcaauauggggaagaaaa

SEQ ID NO: 428364 - RNA, 19 nt, Artificial Sequence
  Synthetic
cgcaauauggggaagaaaa

SEQ ID NO: 428365 - RNA, 20 nt, Artificial Sequence
  Synthetic
gcgcaauauggggaagaaaa

SEQ ID NO: 428366 - RNA, 21 nt, Artificial Sequence
  Synthetic
ugcgcaauauggggaagaaaa

SEQ ID NO: 428367 - RNA, 22 nt, Artificial Sequence
  Synthetic
uugcgcaauauggggaagaaaa

SEQ ID NO: 428368 - RNA, 23 nt, Artificial Sequence
  Synthetic
cuugcgcaauauggggaagaaaa

SEQ ID NO: 428369 - RNA, 24 nt, Artificial Sequence
  Synthetic
acuugcgcaauauggggaagaaaa

SEQ ID NO: 428370 - RNA, 18 nt, Artificial Sequence
  Synthetic
ccagacuaaugaagaaaa

SEQ ID NO: 428371 - RNA, 19 nt, Artificial Sequence
  Synthetic
gccagacuaaugaagaaaa

SEQ ID NO: 428372 - RNA, 20 nt, Artificial Sequence
  Synthetic
agccagacuaaugaagaaaa

SEQ ID NO: 428373 - RNA, 21 nt, Artificial Sequence
  Synthetic
gagccagacuaaugaagaaaa

SEQ ID NO: 428374 - RNA, 22 nt, Artificial Sequence
  Synthetic
ugagccagacuaaugaagaaaa

SEQ ID NO: 428375 - RNA, 23 nt, Artificial Sequence
  Synthetic
uugagccagacuaaugaagaaaa

SEQ ID NO: 428376 - RNA, 24 nt, Artificial Sequence
  Synthetic
cuugagccagacuaaugaagaaaa

SEQ ID NO: 428377 - RNA, 18 nt, Artificial Sequence
  Synthetic
agaaauauaugaagaaaa

SEQ ID NO: 428378 - RNA, 19 nt, Artificial Sequence
  Synthetic
aagaaauauaugaagaaaa

SEQ ID NO: 428379 - RNA, 20 nt, Artificial Sequence
  Synthetic
caagaaauauaugaagaaaa

SEQ ID NO: 428380 - RNA, 21 nt, Artificial Sequence
  Synthetic
gcaagaaauauaugaagaaaa

SEQ ID NO: 428381 - RNA, 22 nt, Artificial Sequence
  Synthetic
agcaagaaauauaugaagaaaa

SEQ ID NO: 428382 - RNA, 23 nt, Artificial Sequence
  Synthetic
aagcaagaaauauaugaagaaaa

SEQ ID NO: 428383 - RNA, 24 nt, Artificial Sequence
  Synthetic
aaagcaagaaauauaugaagaaaa

SEQ ID NO: 428384 - RNA, 18 nt, Artificial Sequence
  Synthetic
acaaguaugugaagaaaa

SEQ ID NO: 428385 - RNA, 19 nt, Artificial Sequence
  Synthetic
gacaaguaugugaagaaaa

SEQ ID NO: 428386 - RNA, 20 nt, Artificial Sequence
  Synthetic
ugacaaguaugugaagaaaa

SEQ ID NO: 428387 - RNA, 21 nt, Artificial Sequence
  Synthetic
uugacaaguaugugaagaaaa

SEQ ID NO: 428388 - RNA, 22 nt, Artificial Sequence
  Synthetic
guugacaaguaugugaagaaaa

SEQ ID NO: 428389 - RNA, 23 nt, Artificial Sequence
  Synthetic
uguugacaaguaugugaagaaaa

SEQ ID NO: 428390 - RNA, 24 nt, Artificial Sequence
  Synthetic
auguugacaaguaugugaagaaaa

SEQ ID NO: 428391 - RNA, 18 nt, Artificial Sequence
  Synthetic
gagagagugugaagaaaa

SEQ ID NO: 428392 - RNA, 19 nt, Artificial Sequence
  Synthetic
ggagagagugugaagaaaa

SEQ ID NO: 428393 - RNA, 20 nt, Artificial Sequence
  Synthetic
uggagagagugugaagaaaa

SEQ ID NO: 428394 - RNA, 21 nt, Artificial Sequence
  Synthetic
cuggagagagugugaagaaaa

SEQ ID NO: 428395 - RNA, 22 nt, Artificial Sequence
  Synthetic
gcuggagagagugugaagaaaa

SEQ ID NO: 428396 - RNA, 23 nt, Artificial Sequence
  Synthetic
ugcuggagagagugugaagaaaa

SEQ ID NO: 428397 - RNA, 24 nt, Artificial Sequence
  Synthetic
augcuggagagagugugaagaaaa

SEQ ID NO: 428398 - RNA, 18 nt, Artificial Sequence
  Synthetic
accuuuauaauaagaaaa

SEQ ID NO: 428399 - RNA, 19 nt, Artificial Sequence
  Synthetic
uaccuuuauaauaagaaaa

SEQ ID NO: 428400 - RNA, 20 nt, Artificial Sequence
  Synthetic
uuaccuuuauaauaagaaaa

SEQ ID NO: 428401 - RNA, 21 nt, Artificial Sequence
  Synthetic
auuaccuuuauaauaagaaaa

SEQ ID NO: 428402 - RNA, 22 nt, Artificial Sequence
  Synthetic
uauuaccuuuauaauaagaaaa

SEQ ID NO: 428403 - RNA, 23 nt, Artificial Sequence
  Synthetic
uuauuaccuuuauaauaagaaaa

SEQ ID NO: 428404 - RNA, 24 nt, Artificial Sequence
  Synthetic
cuuauuaccuuuauaauaagaaaa

SEQ ID NO: 428405 - RNA, 18 nt, Artificial Sequence
  Synthetic
aucaauaacauaagaaaa

SEQ ID NO: 428406 - RNA, 19 nt, Artificial Sequence
  Synthetic
uaucaauaacauaagaaaa

SEQ ID NO: 428407 - RNA, 20 nt, Artificial Sequence
  Synthetic
guaucaauaacauaagaaaa

SEQ ID NO: 428408 - RNA, 21 nt, Artificial Sequence
  Synthetic
uguaucaauaacauaagaaaa

SEQ ID NO: 428409 - RNA, 22 nt, Artificial Sequence
  Synthetic
cuguaucaauaacauaagaaaa

SEQ ID NO: 428410 - RNA, 23 nt, Artificial Sequence
  Synthetic
ccuguaucaauaacauaagaaaa

SEQ ID NO: 428411 - RNA, 24 nt, Artificial Sequence
  Synthetic
accuguaucaauaacauaagaaaa

SEQ ID NO: 428412 - RNA, 18 nt, Artificial Sequence
  Synthetic
aaaaaaaggauaagaaaa

SEQ ID NO: 428413 - RNA, 19 nt, Artificial Sequence
  Synthetic
aaaaaaaaggauaagaaaa

SEQ ID NO: 428414 - RNA, 20 nt, Artificial Sequence
  Synthetic
aaaaaaaaaggauaagaaaa

SEQ ID NO: 428415 - RNA, 21 nt, Artificial Sequence
  Synthetic
aaaaaaaaaaggauaagaaaa

SEQ ID NO: 428416 - RNA, 22 nt, Artificial Sequence
  Synthetic
aaaaaaaaaaaggauaagaaaa

SEQ ID NO: 428417 - RNA, 23 nt, Artificial Sequence
  Synthetic
aaaaaaaaaaaaggauaagaaaa

SEQ ID NO: 428418 - RNA, 24 nt, Artificial Sequence
  Synthetic
aaaaaaaaaaaaaggauaagaaaa

SEQ ID NO: 428419 - RNA, 18 nt, Artificial Sequence
  Synthetic
aaaucauaucuaagaaaa

SEQ ID NO: 428420 - RNA, 19 nt, Artificial Sequence
  Synthetic
aaaaucauaucuaagaaaa

SEQ ID NO: 428421 - RNA, 20 nt, Artificial Sequence
  Synthetic
caaaaucauaucuaagaaaa

SEQ ID NO: 428422 - RNA, 21 nt, Artificial Sequence
  Synthetic
ccaaaaucauaucuaagaaaa

SEQ ID NO: 428423 - RNA, 22 nt, Artificial Sequence
  Synthetic
accaaaaucauaucuaagaaaa

SEQ ID NO: 428424 - RNA, 23 nt, Artificial Sequence
  Synthetic
aaccaaaaucauaucuaagaaaa

SEQ ID NO: 428425 - RNA, 24 nt, Artificial Sequence
  Synthetic
caaccaaaaucauaucuaagaaaa

SEQ ID NO: 428426 - RNA, 18 nt, Artificial Sequence
  Synthetic
uauuauucaguaagaaaa

SEQ ID NO: 428427 - RNA, 19 nt, Artificial Sequence
  Synthetic
auauuauucaguaagaaaa

SEQ ID NO: 428428 - RNA, 20 nt, Artificial Sequence
  Synthetic
aauauuauucaguaagaaaa

SEQ ID NO: 428429 - RNA, 21 nt, Artificial Sequence
  Synthetic
gaauauuauucaguaagaaaa

SEQ ID NO: 428430 - RNA, 22 nt, Artificial Sequence
  Synthetic
agaauauuauucaguaagaaaa

SEQ ID NO: 428431 - RNA, 23 nt, Artificial Sequence
  Synthetic
uagaauauuauucaguaagaaaa

SEQ ID NO: 428432 - RNA, 24 nt, Artificial Sequence
  Synthetic
auagaauauuauucaguaagaaaa

SEQ ID NO: 428433 - RNA, 18 nt, Artificial Sequence
  Synthetic
ugagugcucuuaagaaaa

SEQ ID NO: 428434 - RNA, 19 nt, Artificial Sequence
  Synthetic
cugagugcucuuaagaaaa

SEQ ID NO: 428435 - RNA, 20 nt, Artificial Sequence
  Synthetic
ucugagugcucuuaagaaaa

SEQ ID NO: 428436 - RNA, 21 nt, Artificial Sequence
  Synthetic
gucugagugcucuuaagaaaa

SEQ ID NO: 428437 - RNA, 22 nt, Artificial Sequence
  Synthetic
agucugagugcucuuaagaaaa

SEQ ID NO: 428438 - RNA, 23 nt, Artificial Sequence
  Synthetic
gagucugagugcucuuaagaaaa

SEQ ID NO: 428439 - RNA, 24 nt, Artificial Sequence
  Synthetic
agagucugagugcucuuaagaaaa

SEQ ID NO: 428440 - RNA, 18 nt, Artificial Sequence
  Synthetic
cgcuaauaaaacagaaaa

SEQ ID NO: 428441 - RNA, 19 nt, Artificial Sequence
  Synthetic
ucgcuaauaaaacagaaaa

SEQ ID NO: 428442 - RNA, 20 nt, Artificial Sequence
  Synthetic
uucgcuaauaaaacagaaaa

SEQ ID NO: 428443 - RNA, 21 nt, Artificial Sequence
  Synthetic
auucgcuaauaaaacagaaaa

SEQ ID NO: 428444 - RNA, 22 nt, Artificial Sequence
  Synthetic
cauucgcuaauaaaacagaaaa

SEQ ID NO: 428445 - RNA, 23 nt, Artificial Sequence
  Synthetic
ucauucgcuaauaaaacagaaaa

SEQ ID NO: 428446 - RNA, 24 nt, Artificial Sequence
  Synthetic
aucauucgcuaauaaaacagaaaa

SEQ ID NO: 428447 - RNA, 18 nt, Artificial Sequence
  Synthetic
acacacacacacagaaaa

SEQ ID NO: 428448 - RNA, 19 nt, Artificial Sequence
  Synthetic
cacacacacacacagaaaa

SEQ ID NO: 428449 - RNA, 20 nt, Artificial Sequence
  Synthetic
acacacacacacacagaaaa

SEQ ID NO: 428450 - RNA, 21 nt, Artificial Sequence
  Synthetic
aacacacacacacacagaaaa

SEQ ID NO: 428451 - RNA, 22 nt, Artificial Sequence
  Synthetic
aaacacacacacacacagaaaa

SEQ ID NO: 428452 - RNA, 23 nt, Artificial Sequence
  Synthetic
aaaacacacacacacacagaaaa

SEQ ID NO: 428453 - RNA, 24 nt, Artificial Sequence
  Synthetic
aaaaacacacacacacacagaaaa

SEQ ID NO: 428454 - RNA, 18 nt, Artificial Sequence
  Synthetic
uuaucaaacuacagaaaa

SEQ ID NO: 428455 - RNA, 19 nt, Artificial Sequence
  Synthetic
uuuaucaaacuacagaaaa

SEQ ID NO: 428456 - RNA, 20 nt, Artificial Sequence
  Synthetic
guuuaucaaacuacagaaaa

SEQ ID NO: 428457 - RNA, 21 nt, Artificial Sequence
  Synthetic
gguuuaucaaacuacagaaaa

SEQ ID NO: 428458 - RNA, 22 nt, Artificial Sequence
  Synthetic
ggguuuaucaaacuacagaaaa

SEQ ID NO: 428459 - RNA, 23 nt, Artificial Sequence
  Synthetic
aggguuuaucaaacuacagaaaa

SEQ ID NO: 428460 - RNA, 24 nt, Artificial Sequence
  Synthetic
uaggguuuaucaaacuacagaaaa

SEQ ID NO: 428461 - RNA, 18 nt, Artificial Sequence
  Synthetic
aaauauugcuacagaaaa

SEQ ID NO: 428462 - RNA, 19 nt, Artificial Sequence
  Synthetic
uaaauauugcuacagaaaa

SEQ ID NO: 428463 - RNA, 20 nt, Artificial Sequence
  Synthetic
auaaauauugcuacagaaaa

SEQ ID NO: 428464 - RNA, 21 nt, Artificial Sequence
  Synthetic
uauaaauauugcuacagaaaa

SEQ ID NO: 428465 - RNA, 22 nt, Artificial Sequence
  Synthetic
auauaaauauugcuacagaaaa

SEQ ID NO: 428466 - RNA, 23 nt, Artificial Sequence
  Synthetic
gauauaaauauugcuacagaaaa

SEQ ID NO: 428467 - RNA, 24 nt, Artificial Sequence
  Synthetic
agauauaaauauugcuacagaaaa

SEQ ID NO: 428468 - RNA, 18 nt, Artificial Sequence
  Synthetic
cuugaaugauccagaaaa

SEQ ID NO: 428469 - RNA, 19 nt, Artificial Sequence
  Synthetic
gcuugaaugauccagaaaa

SEQ ID NO: 428470 - RNA, 20 nt, Artificial Sequence
  Synthetic
agcuugaaugauccagaaaa

SEQ ID NO: 428471 - RNA, 21 nt, Artificial Sequence
  Synthetic
cagcuugaaugauccagaaaa

SEQ ID NO: 428472 - RNA, 22 nt, Artificial Sequence
  Synthetic
acagcuugaaugauccagaaaa

SEQ ID NO: 428473 - RNA, 23 nt, Artificial Sequence
  Synthetic
uacagcuugaaugauccagaaaa

SEQ ID NO: 428474 - RNA, 24 nt, Artificial Sequence
  Synthetic
auacagcuugaaugauccagaaaa

SEQ ID NO: 428475 - RNA, 18 nt, Artificial Sequence
  Synthetic
uuguacagcagcagaaaa

SEQ ID NO: 428476 - RNA, 19 nt, Artificial Sequence
  Synthetic
guuguacagcagcagaaaa

SEQ ID NO: 428477 - RNA, 20 nt, Artificial Sequence
  Synthetic
gguuguacagcagcagaaaa

SEQ ID NO: 428478 - RNA, 21 nt, Artificial Sequence
  Synthetic
ugguuguacagcagcagaaaa

SEQ ID NO: 428479 - RNA, 22 nt, Artificial Sequence
  Synthetic
augguuguacagcagcagaaaa

SEQ ID NO: 428480 - RNA, 23 nt, Artificial Sequence
  Synthetic
aaugguuguacagcagcagaaaa

SEQ ID NO: 428481 - RNA, 24 nt, Artificial Sequence
  Synthetic
gaaugguuguacagcagcagaaaa

SEQ ID NO: 428482 - RNA, 18 nt, Artificial Sequence
  Synthetic
cuggccauaugcagaaaa

SEQ ID NO: 428483 - RNA, 19 nt, Artificial Sequence
  Synthetic
gcuggccauaugcagaaaa

SEQ ID NO: 428484 - RNA, 20 nt, Artificial Sequence
  Synthetic
ggcuggccauaugcagaaaa

SEQ ID NO: 428485 - RNA, 21 nt, Artificial Sequence
  Synthetic
uggcuggccauaugcagaaaa

SEQ ID NO: 428486 - RNA, 22 nt, Artificial Sequence
  Synthetic
cuggcuggccauaugcagaaaa

SEQ ID NO: 428487 - RNA, 23 nt, Artificial Sequence
  Synthetic
acuggcuggccauaugcagaaaa

SEQ ID NO: 428488 - RNA, 24 nt, Artificial Sequence
  Synthetic
aacuggcuggccauaugcagaaaa

SEQ ID NO: 428489 - RNA, 18 nt, Artificial Sequence
  Synthetic
cuagucauaugcagaaaa

SEQ ID NO: 428490 - RNA, 19 nt, Artificial Sequence
  Synthetic
gcuagucauaugcagaaaa

SEQ ID NO: 428491 - RNA, 20 nt, Artificial Sequence
  Synthetic
ggcuagucauaugcagaaaa

SEQ ID NO: 428492 - RNA, 21 nt, Artificial Sequence
  Synthetic
uggcuagucauaugcagaaaa

SEQ ID NO: 428493 - RNA, 22 nt, Artificial Sequence
  Synthetic
cuggcuagucauaugcagaaaa

SEQ ID NO: 428494 - RNA, 23 nt, Artificial Sequence
  Synthetic
acuggcuagucauaugcagaaaa

SEQ ID NO: 428495 - RNA, 24 nt, Artificial Sequence
  Synthetic
aacuggcuagucauaugcagaaaa

SEQ ID NO: 428496 - RNA, 18 nt, Artificial Sequence
  Synthetic
cuugaugagugcagaaaa

SEQ ID NO: 428497 - RNA, 19 nt, Artificial Sequence
  Synthetic
acuugaugagugcagaaaa

SEQ ID NO: 428498 - RNA, 20 nt, Artificial Sequence
  Synthetic
uacuugaugagugcagaaaa

SEQ ID NO: 428499 - RNA, 21 nt, Artificial Sequence
  Synthetic
uuacuugaugagugcagaaaa

SEQ ID NO: 428500 - RNA, 22 nt, Artificial Sequence
  Synthetic
uuuacuugaugagugcagaaaa

SEQ ID NO: 428501 - RNA, 23 nt, Artificial Sequence
  Synthetic
uuuuacuugaugagugcagaaaa

SEQ ID NO: 428502 - RNA, 24 nt, Artificial Sequence
  Synthetic
cuuuuacuugaugagugcagaaaa

SEQ ID NO: 428503 - RNA, 18 nt, Artificial Sequence
  Synthetic
uuucggguucucagaaaa

SEQ ID NO: 428504 - RNA, 19 nt, Artificial Sequence
  Synthetic
guuucggguucucagaaaa

SEQ ID NO: 428505 - RNA, 20 nt, Artificial Sequence
  Synthetic
gguuucggguucucagaaaa

SEQ ID NO: 428506 - RNA, 21 nt, Artificial Sequence
  Synthetic
agguuucggguucucagaaaa

SEQ ID NO: 428507 - RNA, 22 nt, Artificial Sequence
  Synthetic
cagguuucggguucucagaaaa

SEQ ID NO: 428508 - RNA, 23 nt, Artificial Sequence
  Synthetic
gcagguuucggguucucagaaaa

SEQ ID NO: 428509 - RNA, 24 nt, Artificial Sequence
  Synthetic
agcagguuucggguucucagaaaa

SEQ ID NO: 428510 - RNA, 18 nt, Artificial Sequence
  Synthetic
auauugagagucagaaaa

SEQ ID NO: 428511 - RNA, 19 nt, Artificial Sequence
  Synthetic
cauauugagagucagaaaa

SEQ ID NO: 428512 - RNA, 20 nt, Artificial Sequence
  Synthetic
ucauauugagagucagaaaa

SEQ ID NO: 428513 - RNA, 21 nt, Artificial Sequence
  Synthetic
uucauauugagagucagaaaa

SEQ ID NO: 428514 - RNA, 22 nt, Artificial Sequence
  Synthetic
uuucauauugagagucagaaaa

SEQ ID NO: 428515 - RNA, 23 nt, Artificial Sequence
  Synthetic
uuuucauauugagagucagaaaa

SEQ ID NO: 428516 - RNA, 24 nt, Artificial Sequence
  Synthetic
cuuuucauauugagagucagaaaa

SEQ ID NO: 428517 - RNA, 18 nt, Artificial Sequence
  Synthetic
gcuucaugaaagagaaaa

SEQ ID NO: 428518 - RNA, 19 nt, Artificial Sequence
  Synthetic
agcuucaugaaagagaaaa

SEQ ID NO: 428519 - RNA, 20 nt, Artificial Sequence
  Synthetic
cagcuucaugaaagagaaaa

SEQ ID NO: 428520 - RNA, 21 nt, Artificial Sequence
  Synthetic
gcagcuucaugaaagagaaaa

SEQ ID NO: 428521 - RNA, 22 nt, Artificial Sequence
  Synthetic
agcagcuucaugaaagagaaaa

SEQ ID NO: 428522 - RNA, 23 nt, Artificial Sequence
  Synthetic
aagcagcuucaugaaagagaaaa

SEQ ID NO: 428523 - RNA, 24 nt, Artificial Sequence
  Synthetic
caagcagcuucaugaaagagaaaa

SEQ ID NO: 428524 - RNA, 18 nt, Artificial Sequence
  Synthetic
aaaccucacaagagaaaa

SEQ ID NO: 428525 - RNA, 19 nt, Artificial Sequence
  Synthetic
uaaaccucacaagagaaaa

SEQ ID NO: 428526 - RNA, 20 nt, Artificial Sequence
  Synthetic
guaaaccucacaagagaaaa

SEQ ID NO: 428527 - RNA, 21 nt, Artificial Sequence
  Synthetic
aguaaaccucacaagagaaaa

SEQ ID NO: 428528 - RNA, 22 nt, Artificial Sequence
  Synthetic
aaguaaaccucacaagagaaaa

SEQ ID NO: 428529 - RNA, 23 nt, Artificial Sequence
  Synthetic
aaaguaaaccucacaagagaaaa

SEQ ID NO: 428530 - RNA, 24 nt, Artificial Sequence
  Synthetic
caaaguaaaccucacaagagaaaa

SEQ ID NO: 428531 - RNA, 18 nt, Artificial Sequence
  Synthetic
agcuggugcaagagaaaa

SEQ ID NO: 428532 - RNA, 19 nt, Artificial Sequence
  Synthetic
uagcuggugcaagagaaaa

SEQ ID NO: 428533 - RNA, 20 nt, Artificial Sequence
  Synthetic
guagcuggugcaagagaaaa

SEQ ID NO: 428534 - RNA, 21 nt, Artificial Sequence
  Synthetic
aguagcuggugcaagagaaaa

SEQ ID NO: 428535 - RNA, 22 nt, Artificial Sequence
  Synthetic
aaguagcuggugcaagagaaaa

SEQ ID NO: 428536 - RNA, 23 nt, Artificial Sequence
  Synthetic
uaaguagcuggugcaagagaaaa

SEQ ID NO: 428537 - RNA, 24 nt, Artificial Sequence
  Synthetic
uuaaguagcuggugcaagagaaaa

SEQ ID NO: 428538 - RNA, 18 nt, Artificial Sequence
  Synthetic
agaauuuuuaagagaaaa

SEQ ID NO: 428539 - RNA, 19 nt, Artificial Sequence
  Synthetic
aagaauuuuuaagagaaaa

SEQ ID NO: 428540 - RNA, 20 nt, Artificial Sequence
  Synthetic
aaagaauuuuuaagagaaaa

SEQ ID NO: 428541 - RNA, 21 nt, Artificial Sequence
  Synthetic
uaaagaauuuuuaagagaaaa

SEQ ID NO: 428542 - RNA, 22 nt, Artificial Sequence
  Synthetic
cuaaagaauuuuuaagagaaaa

SEQ ID NO: 428543 - RNA, 23 nt, Artificial Sequence
  Synthetic
ucuaaagaauuuuuaagagaaaa

SEQ ID NO: 428544 - RNA, 24 nt, Artificial Sequence
  Synthetic
uucuaaagaauuuuuaagagaaaa

SEQ ID NO: 428545 - RNA, 18 nt, Artificial Sequence
  Synthetic
aacaaauuacagagaaaa

SEQ ID NO: 428546 - RNA, 19 nt, Artificial Sequence
  Synthetic
aaacaaauuacagagaaaa

SEQ ID NO: 428547 - RNA, 20 nt, Artificial Sequence
  Synthetic
aaaacaaauuacagagaaaa

SEQ ID NO: 428548 - RNA, 21 nt, Artificial Sequence
  Synthetic
uaaaacaaauuacagagaaaa

SEQ ID NO: 428549 - RNA, 22 nt, Artificial Sequence
  Synthetic
auaaaacaaauuacagagaaaa

SEQ ID NO: 428550 - RNA, 23 nt, Artificial Sequence
  Synthetic
uauaaaacaaauuacagagaaaa

SEQ ID NO: 428551 - RNA, 24 nt, Artificial Sequence
  Synthetic
auauaaaacaaauuacagagaaaa

SEQ ID NO: 428552 - RNA, 18 nt, Artificial Sequence
  Synthetic
aaauucccucagagaaaa

SEQ ID NO: 428553 - RNA, 19 nt, Artificial Sequence
  Synthetic
uaaauucccucagagaaaa

SEQ ID NO: 428554 - RNA, 20 nt, Artificial Sequence
  Synthetic
cuaaauucccucagagaaaa

SEQ ID NO: 428555 - RNA, 21 nt, Artificial Sequence
  Synthetic
acuaaauucccucagagaaaa

SEQ ID NO: 428556 - RNA, 22 nt, Artificial Sequence
  Synthetic
aacuaaauucccucagagaaaa

SEQ ID NO: 428557 - RNA, 23 nt, Artificial Sequence
  Synthetic
aaacuaaauucccucagagaaaa

SEQ ID NO: 428558 - RNA, 24 nt, Artificial Sequence
  Synthetic
aaaacuaaauucccucagagaaaa

SEQ ID NO: 428559 - RNA, 18 nt, Artificial Sequence
  Synthetic
agagagagagagagaaaa

SEQ ID NO: 428560 - RNA, 19 nt, Artificial Sequence
  Synthetic
gagagagagagagagaaaa

SEQ ID NO: 428561 - RNA, 20 nt, Artificial Sequence
  Synthetic
agagagagagagagagaaaa

SEQ ID NO: 428562 - RNA, 21 nt, Artificial Sequence
  Synthetic
gagagagagagagagagaaaa

SEQ ID NO: 428563 - RNA, 22 nt, Artificial Sequence
  Synthetic
agagagagagagagagagaaaa

SEQ ID NO: 428564 - RNA, 23 nt, Artificial Sequence
  Synthetic
gagagagagagagagagagaaaa

SEQ ID NO: 428565 - RNA, 24 nt, Artificial Sequence
  Synthetic
agagagagagagagagagagaaaa

SEQ ID NO: 428566 - RNA, 18 nt, Artificial Sequence
  Synthetic
aaaaagugagagagaaaa

SEQ ID NO: 428567 - RNA, 19 nt, Artificial Sequence
  Synthetic
caaaaagugagagagaaaa

SEQ ID NO: 428568 - RNA, 20 nt, Artificial Sequence
  Synthetic
ucaaaaagugagagagaaaa

SEQ ID NO: 428569 - RNA, 21 nt, Artificial Sequence
  Synthetic
uucaaaaagugagagagaaaa

SEQ ID NO: 428570 - RNA, 22 nt, Artificial Sequence
  Synthetic
auucaaaaagugagagagaaaa

SEQ ID NO: 428571 - RNA, 23 nt, Artificial Sequence
  Synthetic
aauucaaaaagugagagagaaaa

SEQ ID NO: 428572 - RNA, 24 nt, Artificial Sequence
  Synthetic
uaauucaaaaagugagagagaaaa

SEQ ID NO: 428573 - RNA, 18 nt, Artificial Sequence
  Synthetic
uaaaguuuagagagaaaa

SEQ ID NO: 428574 - RNA, 19 nt, Artificial Sequence
  Synthetic
cuaaaguuuagagagaaaa

SEQ ID NO: 428575 - RNA, 20 nt, Artificial Sequence
  Synthetic
gcuaaaguuuagagagaaaa

SEQ ID NO: 428576 - RNA, 21 nt, Artificial Sequence
  Synthetic
ggcuaaaguuuagagagaaaa

SEQ ID NO: 428577 - RNA, 22 nt, Artificial Sequence
  Synthetic
uggcuaaaguuuagagagaaaa

SEQ ID NO: 428578 - RNA, 23 nt, Artificial Sequence
  Synthetic
guggcuaaaguuuagagagaaaa

SEQ ID NO: 428579 - RNA, 24 nt, Artificial Sequence
  Synthetic
uguggcuaaaguuuagagagaaaa

SEQ ID NO: 428580 - RNA, 18 nt, Artificial Sequence
  Synthetic
uuaauucacgagagaaaa

SEQ ID NO: 428581 - RNA, 19 nt, Artificial Sequence
  Synthetic
cuuaauucacgagagaaaa

SEQ ID NO: 428582 - RNA, 20 nt, Artificial Sequence
  Synthetic
acuuaauucacgagagaaaa

SEQ ID NO: 428583 - RNA, 21 nt, Artificial Sequence
  Synthetic
gacuuaauucacgagagaaaa

SEQ ID NO: 428584 - RNA, 22 nt, Artificial Sequence
  Synthetic
agacuuaauucacgagagaaaa

SEQ ID NO: 428585 - RNA, 23 nt, Artificial Sequence
  Synthetic
cagacuuaauucacgagagaaaa

SEQ ID NO: 428586 - RNA, 24 nt, Artificial Sequence
  Synthetic
ucagacuuaauucacgagagaaaa

SEQ ID NO: 428587 - RNA, 18 nt, Artificial Sequence
  Synthetic
ugucaaauugagagaaaa

SEQ ID NO: 428588 - RNA, 19 nt, Artificial Sequence
  Synthetic
gugucaaauugagagaaaa

SEQ ID NO: 428589 - RNA, 20 nt, Artificial Sequence
  Synthetic
ugugucaaauugagagaaaa

SEQ ID NO: 428590 - RNA, 21 nt, Artificial Sequence
  Synthetic
augugucaaauugagagaaaa

SEQ ID NO: 428591 - RNA, 22 nt, Artificial Sequence
  Synthetic
aaugugucaaauugagagaaaa

SEQ ID NO: 428592 - RNA, 23 nt, Artificial Sequence
  Synthetic
caaugugucaaauugagagaaaa

SEQ ID NO: 428593 - RNA, 24 nt, Artificial Sequence
  Synthetic
ccaaugugucaaauugagagaaaa

SEQ ID NO: 428594 - RNA, 18 nt, Artificial Sequence
  Synthetic
aacuguaucuagagaaaa

SEQ ID NO: 428595 - RNA, 19 nt, Artificial Sequence
  Synthetic
uaacuguaucuagagaaaa

SEQ ID NO: 428596 - RNA, 20 nt, Artificial Sequence
  Synthetic
cuaacuguaucuagagaaaa

SEQ ID NO: 428597 - RNA, 21 nt, Artificial Sequence
  Synthetic
ucuaacuguaucuagagaaaa

SEQ ID NO: 428598 - RNA, 22 nt, Artificial Sequence
  Synthetic
uucuaacuguaucuagagaaaa

SEQ ID NO: 428599 - RNA, 23 nt, Artificial Sequence
  Synthetic
uuucuaacuguaucuagagaaaa

SEQ ID NO: 428600 - RNA, 24 nt, Artificial Sequence
  Synthetic
auuucuaacuguaucuagagaaaa

SEQ ID NO: 428601 - RNA, 18 nt, Artificial Sequence
  Synthetic
uuucagugaaggagaaaa

SEQ ID NO: 428602 - RNA, 19 nt, Artificial Sequence
  Synthetic
auuucagugaaggagaaaa

SEQ ID NO: 428603 - RNA, 20 nt, Artificial Sequence
  Synthetic
cauuucagugaaggagaaaa

SEQ ID NO: 428604 - RNA, 21 nt, Artificial Sequence
  Synthetic
ucauuucagugaaggagaaaa

SEQ ID NO: 428605 - RNA, 22 nt, Artificial Sequence
  Synthetic
uucauuucagugaaggagaaaa

SEQ ID NO: 428606 - RNA, 23 nt, Artificial Sequence
  Synthetic
cuucauuucagugaaggagaaaa

SEQ ID NO: 428607 - RNA, 24 nt, Artificial Sequence
  Synthetic
ucuucauuucagugaaggagaaaa

SEQ ID NO: 428608 - RNA, 18 nt, Artificial Sequence
  Synthetic
cuggaucuuaggagaaaa

SEQ ID NO: 428609 - RNA, 19 nt, Artificial Sequence
  Synthetic
ucuggaucuuaggagaaaa

SEQ ID NO: 428610 - RNA, 20 nt, Artificial Sequence
  Synthetic
gucuggaucuuaggagaaaa

SEQ ID NO: 428611 - RNA, 21 nt, Artificial Sequence
  Synthetic
ugucuggaucuuaggagaaaa

SEQ ID NO: 428612 - RNA, 22 nt, Artificial Sequence
  Synthetic
gugucuggaucuuaggagaaaa

SEQ ID NO: 428613 - RNA, 23 nt, Artificial Sequence
  Synthetic
ggugucuggaucuuaggagaaaa

SEQ ID NO: 428614 - RNA, 24 nt, Artificial Sequence
  Synthetic
uggugucuggaucuuaggagaaaa

SEQ ID NO: 428615 - RNA, 18 nt, Artificial Sequence
  Synthetic
gcaagaauauggagaaaa

SEQ ID NO: 428616 - RNA, 19 nt, Artificial Sequence
  Synthetic
ggcaagaauauggagaaaa

SEQ ID NO: 428617 - RNA, 20 nt, Artificial Sequence
  Synthetic
uggcaagaauauggagaaaa

SEQ ID NO: 428618 - RNA, 21 nt, Artificial Sequence
  Synthetic
uuggcaagaauauggagaaaa

SEQ ID NO: 428619 - RNA, 22 nt, Artificial Sequence
  Synthetic
guuggcaagaauauggagaaaa

SEQ ID NO: 428620 - RNA, 23 nt, Artificial Sequence
  Synthetic
uguuggcaagaauauggagaaaa

SEQ ID NO: 428621 - RNA, 24 nt, Artificial Sequence
  Synthetic
guguuggcaagaauauggagaaaa

SEQ ID NO: 428622 - RNA, 18 nt, Artificial Sequence
  Synthetic
gccagaauguggagaaaa

SEQ ID NO: 428623 - RNA, 19 nt, Artificial Sequence
  Synthetic
ggccagaauguggagaaaa

SEQ ID NO: 428624 - RNA, 20 nt, Artificial Sequence
  Synthetic
uggccagaauguggagaaaa

SEQ ID NO: 428625 - RNA, 21 nt, Artificial Sequence
  Synthetic
uuggccagaauguggagaaaa

SEQ ID NO: 428626 - RNA, 22 nt, Artificial Sequence
  Synthetic
guuggccagaauguggagaaaa

SEQ ID NO: 428627 - RNA, 23 nt, Artificial Sequence
  Synthetic
uguuggccagaauguggagaaaa

SEQ ID NO: 428628 - RNA, 24 nt, Artificial Sequence
  Synthetic
guguuggccagaauguggagaaaa

SEQ ID NO: 428629 - RNA, 18 nt, Artificial Sequence
  Synthetic
gagaggauguggagaaaa

SEQ ID NO: 428630 - RNA, 19 nt, Artificial Sequence
  Synthetic
ggagaggauguggagaaaa

SEQ ID NO: 428631 - RNA, 20 nt, Artificial Sequence
  Synthetic
uggagaggauguggagaaaa

SEQ ID NO: 428632 - RNA, 21 nt, Artificial Sequence
  Synthetic
cuggagaggauguggagaaaa

SEQ ID NO: 428633 - RNA, 22 nt, Artificial Sequence
  Synthetic
gcuggagaggauguggagaaaa

SEQ ID NO: 428634 - RNA, 23 nt, Artificial Sequence
  Synthetic
ugcuggagaggauguggagaaaa

SEQ ID NO: 428635 - RNA, 24 nt, Artificial Sequence
  Synthetic
augcuggagaggauguggagaaaa

SEQ ID NO: 428636 - RNA, 18 nt, Artificial Sequence
  Synthetic
auuuuccauuggagaaaa

SEQ ID NO: 428637 - RNA, 19 nt, Artificial Sequence
  Synthetic
cauuuuccauuggagaaaa

SEQ ID NO: 428638 - RNA, 20 nt, Artificial Sequence
  Synthetic
ccauuuuccauuggagaaaa

SEQ ID NO: 428639 - RNA, 21 nt, Artificial Sequence
  Synthetic
cccauuuuccauuggagaaaa

SEQ ID NO: 428640 - RNA, 22 nt, Artificial Sequence
  Synthetic
ucccauuuuccauuggagaaaa

SEQ ID NO: 428641 - RNA, 23 nt, Artificial Sequence
  Synthetic
uucccauuuuccauuggagaaaa

SEQ ID NO: 428642 - RNA, 24 nt, Artificial Sequence
  Synthetic
auucccauuuuccauuggagaaaa

SEQ ID NO: 428643 - RNA, 18 nt, Artificial Sequence
  Synthetic
auuuugcaaaugagaaaa

SEQ ID NO: 428644 - RNA, 19 nt, Artificial Sequence
  Synthetic
cauuuugcaaaugagaaaa

SEQ ID NO: 428645 - RNA, 20 nt, Artificial Sequence
  Synthetic
ucauuuugcaaaugagaaaa

SEQ ID NO: 428646 - RNA, 21 nt, Artificial Sequence
  Synthetic
uucauuuugcaaaugagaaaa

SEQ ID NO: 428647 - RNA, 22 nt, Artificial Sequence
  Synthetic
auucauuuugcaaaugagaaaa

SEQ ID NO: 428648 - RNA, 23 nt, Artificial Sequence
  Synthetic
uauucauuuugcaaaugagaaaa

SEQ ID NO: 428649 - RNA, 24 nt, Artificial Sequence
  Synthetic
uuauucauuuugcaaaugagaaaa

SEQ ID NO: 428650 - RNA, 18 nt, Artificial Sequence
  Synthetic
aguaccagaaugagaaaa

SEQ ID NO: 428651 - RNA, 19 nt, Artificial Sequence
  Synthetic
aaguaccagaaugagaaaa

SEQ ID NO: 428652 - RNA, 20 nt, Artificial Sequence
  Synthetic
uaaguaccagaaugagaaaa

SEQ ID NO: 428653 - RNA, 21 nt, Artificial Sequence
  Synthetic
auaaguaccagaaugagaaaa

SEQ ID NO: 428654 - RNA, 22 nt, Artificial Sequence
  Synthetic
gauaaguaccagaaugagaaaa

SEQ ID NO: 428655 - RNA, 23 nt, Artificial Sequence
  Synthetic
ugauaaguaccagaaugagaaaa

SEQ ID NO: 428656 - RNA, 24 nt, Artificial Sequence
  Synthetic
augauaaguaccagaaugagaaaa

SEQ ID NO: 428657 - RNA, 18 nt, Artificial Sequence
  Synthetic
agacacaggaugagaaaa

SEQ ID NO: 428658 - RNA, 19 nt, Artificial Sequence
  Synthetic
uagacacaggaugagaaaa

SEQ ID NO: 428659 - RNA, 20 nt, Artificial Sequence
  Synthetic
auagacacaggaugagaaaa

SEQ ID NO: 428660 - RNA, 21 nt, Artificial Sequence
  Synthetic
aauagacacaggaugagaaaa

SEQ ID NO: 428661 - RNA, 22 nt, Artificial Sequence
  Synthetic
uaauagacacaggaugagaaaa

SEQ ID NO: 428662 - RNA, 23 nt, Artificial Sequence
  Synthetic
guaauagacacaggaugagaaaa

SEQ ID NO: 428663 - RNA, 24 nt, Artificial Sequence
  Synthetic
gguaauagacacaggaugagaaaa

SEQ ID NO: 428664 - RNA, 18 nt, Artificial Sequence
  Synthetic
auaauauguaugagaaaa

SEQ ID NO: 428665 - RNA, 19 nt, Artificial Sequence
  Synthetic
cauaauauguaugagaaaa

SEQ ID NO: 428666 - RNA, 20 nt, Artificial Sequence
  Synthetic
gcauaauauguaugagaaaa

SEQ ID NO: 428667 - RNA, 21 nt, Artificial Sequence
  Synthetic
ugcauaauauguaugagaaaa

SEQ ID NO: 428668 - RNA, 22 nt, Artificial Sequence
  Synthetic
augcauaauauguaugagaaaa

SEQ ID NO: 428669 - RNA, 23 nt, Artificial Sequence
  Synthetic
aaugcauaauauguaugagaaaa

SEQ ID NO: 428670 - RNA, 24 nt, Artificial Sequence
  Synthetic
aaaugcauaauauguaugagaaaa

SEQ ID NO: 428671 - RNA, 18 nt, Artificial Sequence
  Synthetic
auuuuacuuaugagaaaa

SEQ ID NO: 428672 - RNA, 19 nt, Artificial Sequence
  Synthetic
uauuuuacuuaugagaaaa

SEQ ID NO: 428673 - RNA, 20 nt, Artificial Sequence
  Synthetic
cuauuuuacuuaugagaaaa

SEQ ID NO: 428674 - RNA, 21 nt, Artificial Sequence
  Synthetic
ccuauuuuacuuaugagaaaa

SEQ ID NO: 428675 - RNA, 22 nt, Artificial Sequence
  Synthetic
gccuauuuuacuuaugagaaaa

SEQ ID NO: 428676 - RNA, 23 nt, Artificial Sequence
  Synthetic
ugccuauuuuacuuaugagaaaa

SEQ ID NO: 428677 - RNA, 24 nt, Artificial Sequence
  Synthetic
augccuauuuuacuuaugagaaaa

SEQ ID NO: 428678 - RNA, 18 nt, Artificial Sequence
  Synthetic
acuucaucagugagaaaa

SEQ ID NO: 428679 - RNA, 19 nt, Artificial Sequence
  Synthetic
aacuucaucagugagaaaa

SEQ ID NO: 428680 - RNA, 20 nt, Artificial Sequence
  Synthetic
gaacuucaucagugagaaaa

SEQ ID NO: 428681 - RNA, 21 nt, Artificial Sequence
  Synthetic
agaacuucaucagugagaaaa

SEQ ID NO: 428682 - RNA, 22 nt, Artificial Sequence
  Synthetic
uagaacuucaucagugagaaaa

SEQ ID NO: 428683 - RNA, 23 nt, Artificial Sequence
  Synthetic
cuagaacuucaucagugagaaaa

SEQ ID NO: 428684 - RNA, 24 nt, Artificial Sequence
  Synthetic
ucuagaacuucaucagugagaaaa

SEQ ID NO: 428685 - RNA, 18 nt, Artificial Sequence
  Synthetic
uguuuccaggugagaaaa

SEQ ID NO: 428686 - RNA, 19 nt, Artificial Sequence
  Synthetic
cuguuuccaggugagaaaa

SEQ ID NO: 428687 - RNA, 20 nt, Artificial Sequence
  Synthetic
ccuguuuccaggugagaaaa

SEQ ID NO: 428688 - RNA, 21 nt, Artificial Sequence
  Synthetic
uccuguuuccaggugagaaaa

SEQ ID NO: 428689 - RNA, 22 nt, Artificial Sequence
  Synthetic
uuccuguuuccaggugagaaaa

SEQ ID NO: 428690 - RNA, 23 nt, Artificial Sequence
  Synthetic
guuccuguuuccaggugagaaaa

SEQ ID NO: 428691 - RNA, 24 nt, Artificial Sequence
  Synthetic
uguuccuguuuccaggugagaaaa

SEQ ID NO: 428692 - RNA, 18 nt, Artificial Sequence
  Synthetic
acuggggaggugagaaaa

SEQ ID NO: 428693 - RNA, 19 nt, Artificial Sequence
  Synthetic
aacuggggaggugagaaaa

SEQ ID NO: 428694 - RNA, 20 nt, Artificial Sequence
  Synthetic
aaacuggggaggugagaaaa

SEQ ID NO: 428695 - RNA, 21 nt, Artificial Sequence
  Synthetic
uaaacuggggaggugagaaaa

SEQ ID NO: 428696 - RNA, 22 nt, Artificial Sequence
  Synthetic
uuaaacuggggaggugagaaaa

SEQ ID NO: 428697 - RNA, 23 nt, Artificial Sequence
  Synthetic
uuuaaacuggggaggugagaaaa

SEQ ID NO: 428698 - RNA, 24 nt, Artificial Sequence
  Synthetic
guuuaaacuggggaggugagaaaa

SEQ ID NO: 428699 - RNA, 18 nt, Artificial Sequence
  Synthetic
agugugauugcuagaaaa

SEQ ID NO: 428700 - RNA, 19 nt, Artificial Sequence
  Synthetic
aagugugauugcuagaaaa

SEQ ID NO: 428701 - RNA, 20 nt, Artificial Sequence
  Synthetic
uaagugugauugcuagaaaa

SEQ ID NO: 428702 - RNA, 21 nt, Artificial Sequence
  Synthetic
uuaagugugauugcuagaaaa

SEQ ID NO: 428703 - RNA, 22 nt, Artificial Sequence
  Synthetic
uuuaagugugauugcuagaaaa

SEQ ID NO: 428704 - RNA, 23 nt, Artificial Sequence
  Synthetic
uuuuaagugugauugcuagaaaa

SEQ ID NO: 428705 - RNA, 24 nt, Artificial Sequence
  Synthetic
guuuuaagugugauugcuagaaaa

SEQ ID NO: 428706 - RNA, 18 nt, Artificial Sequence
  Synthetic
aaacaugaaucuagaaaa

SEQ ID NO: 428707 - RNA, 19 nt, Artificial Sequence
  Synthetic
aaaacaugaaucuagaaaa

SEQ ID NO: 428708 - RNA, 20 nt, Artificial Sequence
  Synthetic
gaaaacaugaaucuagaaaa

SEQ ID NO: 428709 - RNA, 21 nt, Artificial Sequence
  Synthetic
ggaaaacaugaaucuagaaaa

SEQ ID NO: 428710 - RNA, 22 nt, Artificial Sequence
  Synthetic
gggaaaacaugaaucuagaaaa

SEQ ID NO: 428711 - RNA, 23 nt, Artificial Sequence
  Synthetic
ugggaaaacaugaaucuagaaaa

SEQ ID NO: 428712 - RNA, 24 nt, Artificial Sequence
  Synthetic
augggaaaacaugaaucuagaaaa

SEQ ID NO: 428713 - RNA, 18 nt, Artificial Sequence
  Synthetic
uagauagaaaguagaaaa

SEQ ID NO: 428714 - RNA, 19 nt, Artificial Sequence
  Synthetic
uuagauagaaaguagaaaa

SEQ ID NO: 428715 - RNA, 20 nt, Artificial Sequence
  Synthetic
cuuagauagaaaguagaaaa

SEQ ID NO: 428716 - RNA, 21 nt, Artificial Sequence
  Synthetic
ccuuagauagaaaguagaaaa

SEQ ID NO: 428717 - RNA, 22 nt, Artificial Sequence
  Synthetic
cccuuagauagaaaguagaaaa

SEQ ID NO: 428718 - RNA, 23 nt, Artificial Sequence
  Synthetic
ucccuuagauagaaaguagaaaa

SEQ ID NO: 428719 - RNA, 24 nt, Artificial Sequence
  Synthetic
gucccuuagauagaaaguagaaaa

SEQ ID NO: 428720 - RNA, 18 nt, Artificial Sequence
  Synthetic
aacucacucaguagaaaa

SEQ ID NO: 428721 - RNA, 19 nt, Artificial Sequence
  Synthetic
uaacucacucaguagaaaa

SEQ ID NO: 428722 - RNA, 20 nt, Artificial Sequence
  Synthetic
auaacucacucaguagaaaa

SEQ ID NO: 428723 - RNA, 21 nt, Artificial Sequence
  Synthetic
gauaacucacucaguagaaaa

SEQ ID NO: 428724 - RNA, 22 nt, Artificial Sequence
  Synthetic
agauaacucacucaguagaaaa

SEQ ID NO: 428725 - RNA, 23 nt, Artificial Sequence
  Synthetic
aagauaacucacucaguagaaaa

SEQ ID NO: 428726 - RNA, 24 nt, Artificial Sequence
  Synthetic
aaagauaacucacucaguagaaaa

SEQ ID NO: 428727 - RNA, 18 nt, Artificial Sequence
  Synthetic
aauauggcuaguagaaaa

SEQ ID NO: 428728 - RNA, 19 nt, Artificial Sequence
  Synthetic
uaauauggcuaguagaaaa

SEQ ID NO: 428729 - RNA, 20 nt, Artificial Sequence
  Synthetic
cuaauauggcuaguagaaaa

SEQ ID NO: 428730 - RNA, 21 nt, Artificial Sequence
  Synthetic
ucuaauauggcuaguagaaaa

SEQ ID NO: 428731 - RNA, 22 nt, Artificial Sequence
  Synthetic
uucuaauauggcuaguagaaaa

SEQ ID NO: 428732 - RNA, 23 nt, Artificial Sequence
  Synthetic
uuucuaauauggcuaguagaaaa

SEQ ID NO: 428733 - RNA, 24 nt, Artificial Sequence
  Synthetic
uuuucuaauauggcuaguagaaaa

SEQ ID NO: 428734 - RNA, 18 nt, Artificial Sequence
  Synthetic
acccuacaugguagaaaa

SEQ ID NO: 428735 - RNA, 19 nt, Artificial Sequence
  Synthetic
gacccuacaugguagaaaa

SEQ ID NO: 428736 - RNA, 20 nt, Artificial Sequence
  Synthetic
ugacccuacaugguagaaaa

SEQ ID NO: 428737 - RNA, 21 nt, Artificial Sequence
  Synthetic
uugacccuacaugguagaaaa

SEQ ID NO: 428738 - RNA, 22 nt, Artificial Sequence
  Synthetic
auugacccuacaugguagaaaa

SEQ ID NO: 428739 - RNA, 23 nt, Artificial Sequence
  Synthetic
uauugacccuacaugguagaaaa

SEQ ID NO: 428740 - RNA, 24 nt, Artificial Sequence
  Synthetic
auauugacccuacaugguagaaaa

SEQ ID NO: 428741 - RNA, 18 nt, Artificial Sequence
  Synthetic
aaguuaaaauguagaaaa

SEQ ID NO: 428742 - RNA, 19 nt, Artificial Sequence
  Synthetic
gaaguuaaaauguagaaaa

SEQ ID NO: 428743 - RNA, 20 nt, Artificial Sequence
  Synthetic
agaaguuaaaauguagaaaa

SEQ ID NO: 428744 - RNA, 21 nt, Artificial Sequence
  Synthetic
gagaaguuaaaauguagaaaa

SEQ ID NO: 428745 - RNA, 22 nt, Artificial Sequence
  Synthetic
ugagaaguuaaaauguagaaaa

SEQ ID NO: 428746 - RNA, 23 nt, Artificial Sequence
  Synthetic
uugagaaguuaaaauguagaaaa

SEQ ID NO: 428747 - RNA, 24 nt, Artificial Sequence
  Synthetic
guugagaaguuaaaauguagaaaa

SEQ ID NO: 428748 - RNA, 18 nt, Artificial Sequence
  Synthetic
uuagcauaauguagaaaa

SEQ ID NO: 428749 - RNA, 19 nt, Artificial Sequence
  Synthetic
auuagcauaauguagaaaa

SEQ ID NO: 428750 - RNA, 20 nt, Artificial Sequence
  Synthetic
aauuagcauaauguagaaaa

SEQ ID NO: 428751 - RNA, 21 nt, Artificial Sequence
  Synthetic
uaauuagcauaauguagaaaa

SEQ ID NO: 428752 - RNA, 22 nt, Artificial Sequence
  Synthetic
auaauuagcauaauguagaaaa

SEQ ID NO: 428753 - RNA, 23 nt, Artificial Sequence
  Synthetic
cauaauuagcauaauguagaaaa

SEQ ID NO: 428754 - RNA, 24 nt, Artificial Sequence
  Synthetic
ucauaauuagcauaauguagaaaa

SEQ ID NO: 428755 - RNA, 18 nt, Artificial Sequence
  Synthetic
cauagaaacuuuagaaaa

SEQ ID NO: 428756 - RNA, 19 nt, Artificial Sequence
  Synthetic
acauagaaacuuuagaaaa

SEQ ID NO: 428757 - RNA, 20 nt, Artificial Sequence
  Synthetic
aacauagaaacuuuagaaaa

SEQ ID NO: 428758 - RNA, 21 nt, Artificial Sequence
  Synthetic
uaacauagaaacuuuagaaaa

SEQ ID NO: 428759 - RNA, 22 nt, Artificial Sequence
  Synthetic
uuaacauagaaacuuuagaaaa

SEQ ID NO: 428760 - RNA, 23 nt, Artificial Sequence
  Synthetic
uuuaacauagaaacuuuagaaaa

SEQ ID NO: 428761 - RNA, 24 nt, Artificial Sequence
  Synthetic
cuuuaacauagaaacuuuagaaaa

SEQ ID NO: 428762 - RNA, 18 nt, Artificial Sequence
  Synthetic
auauguuucuuuagaaaa

SEQ ID NO: 428763 - RNA, 19 nt, Artificial Sequence
  Synthetic
aauauguuucuuuagaaaa

SEQ ID NO: 428764 - RNA, 20 nt, Artificial Sequence
  Synthetic
aaauauguuucuuuagaaaa

SEQ ID NO: 428765 - RNA, 21 nt, Artificial Sequence
  Synthetic
uaaauauguuucuuuagaaaa

SEQ ID NO: 428766 - RNA, 22 nt, Artificial Sequence
  Synthetic
cuaaauauguuucuuuagaaaa

SEQ ID NO: 428767 - RNA, 23 nt, Artificial Sequence
  Synthetic
ucuaaauauguuucuuuagaaaa

SEQ ID NO: 428768 - RNA, 24 nt, Artificial Sequence
  Synthetic
aucuaaauauguuucuuuagaaaa

SEQ ID NO: 428769 - RNA, 18 nt, Artificial Sequence
  Synthetic
aaguuaaauuuuagaaaa

SEQ ID NO: 428770 - RNA, 19 nt, Artificial Sequence
  Synthetic
aaaguuaaauuuuagaaaa

SEQ ID NO: 428771 - RNA, 20 nt, Artificial Sequence
  Synthetic
caaaguuaaauuuuagaaaa

SEQ ID NO: 428772 - RNA, 21 nt, Artificial Sequence
  Synthetic
ucaaaguuaaauuuuagaaaa

SEQ ID NO: 428773 - RNA, 22 nt, Artificial Sequence
  Synthetic
gucaaaguuaaauuuuagaaaa

SEQ ID NO: 428774 - RNA, 23 nt, Artificial Sequence
  Synthetic
ggucaaaguuaaauuuuagaaaa

SEQ ID NO: 428775 - RNA, 24 nt, Artificial Sequence
  Synthetic
aggucaaaguuaaauuuuagaaaa

SEQ ID NO: 428776 - RNA, 18 nt, Artificial Sequence
  Synthetic
ucuguauguuuacgaaaa

SEQ ID NO: 428777 - RNA, 19 nt, Artificial Sequence
  Synthetic
cucuguauguuuacgaaaa

SEQ ID NO: 428778 - RNA, 20 nt, Artificial Sequence
  Synthetic
ucucuguauguuuacgaaaa

SEQ ID NO: 428779 - RNA, 21 nt, Artificial Sequence
  Synthetic
uucucuguauguuuacgaaaa

SEQ ID NO: 428780 - RNA, 22 nt, Artificial Sequence
  Synthetic
uuucucuguauguuuacgaaaa

SEQ ID NO: 428781 - RNA, 23 nt, Artificial Sequence
  Synthetic
auuucucuguauguuuacgaaaa

SEQ ID NO: 428782 - RNA, 24 nt, Artificial Sequence
  Synthetic
aauuucucuguauguuuacgaaaa

SEQ ID NO: 428783 - RNA, 18 nt, Artificial Sequence
  Synthetic
agaggcauguggcgaaaa

SEQ ID NO: 428784 - RNA, 19 nt, Artificial Sequence
  Synthetic
gagaggcauguggcgaaaa

SEQ ID NO: 428785 - RNA, 20 nt, Artificial Sequence
  Synthetic
agagaggcauguggcgaaaa

SEQ ID NO: 428786 - RNA, 21 nt, Artificial Sequence
  Synthetic
gagagaggcauguggcgaaaa

SEQ ID NO: 428787 - RNA, 22 nt, Artificial Sequence
  Synthetic
agagagaggcauguggcgaaaa

SEQ ID NO: 428788 - RNA, 23 nt, Artificial Sequence
  Synthetic
gagagagaggcauguggcgaaaa

SEQ ID NO: 428789 - RNA, 24 nt, Artificial Sequence
  Synthetic
agagagagaggcauguggcgaaaa

SEQ ID NO: 428790 - RNA, 18 nt, Artificial Sequence
  Synthetic
uuuuugcaaaaaggaaaa

SEQ ID NO: 428791 - RNA, 19 nt, Artificial Sequence
  Synthetic
guuuuugcaaaaaggaaaa

SEQ ID NO: 428792 - RNA, 20 nt, Artificial Sequence
  Synthetic
gguuuuugcaaaaaggaaaa

SEQ ID NO: 428793 - RNA, 21 nt, Artificial Sequence
  Synthetic
ggguuuuugcaaaaaggaaaa

SEQ ID NO: 428794 - RNA, 22 nt, Artificial Sequence
  Synthetic
uggguuuuugcaaaaaggaaaa

SEQ ID NO: 428795 - RNA, 23 nt, Artificial Sequence
  Synthetic
uuggguuuuugcaaaaaggaaaa

SEQ ID NO: 428796 - RNA, 24 nt, Artificial Sequence
  Synthetic
uuuggguuuuugcaaaaaggaaaa

SEQ ID NO: 428797 - RNA, 18 nt, Artificial Sequence
  Synthetic
aauacauaaaaaggaaaa

SEQ ID NO: 428798 - RNA, 19 nt, Artificial Sequence
  Synthetic
uaauacauaaaaaggaaaa

SEQ ID NO: 428799 - RNA, 20 nt, Artificial Sequence
  Synthetic
auaauacauaaaaaggaaaa

SEQ ID NO: 428800 - RNA, 21 nt, Artificial Sequence
  Synthetic
cauaauacauaaaaaggaaaa

SEQ ID NO: 428801 - RNA, 22 nt, Artificial Sequence
  Synthetic
acauaauacauaaaaaggaaaa

SEQ ID NO: 428802 - RNA, 23 nt, Artificial Sequence
  Synthetic
aacauaauacauaaaaaggaaaa

SEQ ID NO: 428803 - RNA, 24 nt, Artificial Sequence
  Synthetic
caacauaauacauaaaaaggaaaa

SEQ ID NO: 428804 - RNA, 18 nt, Artificial Sequence
  Synthetic
augagaauaaaaggaaaa

SEQ ID NO: 428805 - RNA, 19 nt, Artificial Sequence
  Synthetic
uaugagaauaaaaggaaaa

SEQ ID NO: 428806 - RNA, 20 nt, Artificial Sequence
  Synthetic
auaugagaauaaaaggaaaa

SEQ ID NO: 428807 - RNA, 21 nt, Artificial Sequence
  Synthetic
aauaugagaauaaaaggaaaa

SEQ ID NO: 428808 - RNA, 22 nt, Artificial Sequence
  Synthetic
caauaugagaauaaaaggaaaa

SEQ ID NO: 428809 - RNA, 23 nt, Artificial Sequence
  Synthetic
ucaauaugagaauaaaaggaaaa

SEQ ID NO: 428810 - RNA, 24 nt, Artificial Sequence
  Synthetic
aucaauaugagaauaaaaggaaaa

SEQ ID NO: 428811 - RNA, 18 nt, Artificial Sequence
  Synthetic
uacuugaauaaaggaaaa

SEQ ID NO: 428812 - RNA, 19 nt, Artificial Sequence
  Synthetic
cuacuugaauaaaggaaaa

SEQ ID NO: 428813 - RNA, 20 nt, Artificial Sequence
  Synthetic
gcuacuugaauaaaggaaaa

SEQ ID NO: 428814 - RNA, 21 nt, Artificial Sequence
  Synthetic
ugcuacuugaauaaaggaaaa

SEQ ID NO: 428815 - RNA, 22 nt, Artificial Sequence
  Synthetic
uugcuacuugaauaaaggaaaa

SEQ ID NO: 428816 - RNA, 23 nt, Artificial Sequence
  Synthetic
auugcuacuugaauaaaggaaaa

SEQ ID NO: 428817 - RNA, 24 nt, Artificial Sequence
  Synthetic
aauugcuacuugaauaaaggaaaa

SEQ ID NO: 428818 - RNA, 18 nt, Artificial Sequence
  Synthetic
uuuuucugagaaggaaaa

SEQ ID NO: 428819 - RNA, 19 nt, Artificial Sequence
  Synthetic
cuuuuucugagaaggaaaa

SEQ ID NO: 428820 - RNA, 20 nt, Artificial Sequence
  Synthetic
ucuuuuucugagaaggaaaa

SEQ ID NO: 428821 - RNA, 21 nt, Artificial Sequence
  Synthetic
uucuuuuucugagaaggaaaa

SEQ ID NO: 428822 - RNA, 22 nt, Artificial Sequence
  Synthetic
uuucuuuuucugagaaggaaaa

SEQ ID NO: 428823 - RNA, 23 nt, Artificial Sequence
  Synthetic
uuuucuuuuucugagaaggaaaa

SEQ ID NO: 428824 - RNA, 24 nt, Artificial Sequence
  Synthetic
auuuucuuuuucugagaaggaaaa

SEQ ID NO: 428825 - RNA, 18 nt, Artificial Sequence
  Synthetic
uccaucugggaaggaaaa

SEQ ID NO: 428826 - RNA, 19 nt, Artificial Sequence
  Synthetic
guccaucugggaaggaaaa

SEQ ID NO: 428827 - RNA, 20 nt, Artificial Sequence
  Synthetic
aguccaucugggaaggaaaa

SEQ ID NO: 428828 - RNA, 21 nt, Artificial Sequence
  Synthetic
aaguccaucugggaaggaaaa

SEQ ID NO: 428829 - RNA, 22 nt, Artificial Sequence
  Synthetic
uaaguccaucugggaaggaaaa

SEQ ID NO: 428830 - RNA, 23 nt, Artificial Sequence
  Synthetic
uuaaguccaucugggaaggaaaa

SEQ ID NO: 428831 - RNA, 24 nt, Artificial Sequence
  Synthetic
cuuaaguccaucugggaaggaaaa

SEQ ID NO: 428832 - RNA, 18 nt, Artificial Sequence
  Synthetic
ucaguuauugaaggaaaa

SEQ ID NO: 428833 - RNA, 19 nt, Artificial Sequence
  Synthetic
aucaguuauugaaggaaaa

SEQ ID NO: 428834 - RNA, 20 nt, Artificial Sequence
  Synthetic
uaucaguuauugaaggaaaa

SEQ ID NO: 428835 - RNA, 21 nt, Artificial Sequence
  Synthetic
auaucaguuauugaaggaaaa

SEQ ID NO: 428836 - RNA, 22 nt, Artificial Sequence
  Synthetic
cauaucaguuauugaaggaaaa

SEQ ID NO: 428837 - RNA, 23 nt, Artificial Sequence
  Synthetic
ccauaucaguuauugaaggaaaa

SEQ ID NO: 428838 - RNA, 24 nt, Artificial Sequence
  Synthetic
accauaucaguuauugaaggaaaa

SEQ ID NO: 428839 - RNA, 18 nt, Artificial Sequence
  Synthetic
gaaaaacaaacaggaaaa

SEQ ID NO: 428840 - RNA, 19 nt, Artificial Sequence
  Synthetic
agaaaaacaaacaggaaaa

SEQ ID NO: 428841 - RNA, 20 nt, Artificial Sequence
  Synthetic
gagaaaaacaaacaggaaaa

SEQ ID NO: 428842 - RNA, 21 nt, Artificial Sequence
  Synthetic
agagaaaaacaaacaggaaaa

SEQ ID NO: 428843 - RNA, 22 nt, Artificial Sequence
  Synthetic
cagagaaaaacaaacaggaaaa

SEQ ID NO: 428844 - RNA, 23 nt, Artificial Sequence
  Synthetic
ucagagaaaaacaaacaggaaaa

SEQ ID NO: 428845 - RNA, 24 nt, Artificial Sequence
  Synthetic
uucagagaaaaacaaacaggaaaa

SEQ ID NO: 428846 - RNA, 18 nt, Artificial Sequence
  Synthetic
acaauauguccaggaaaa

SEQ ID NO: 428847 - RNA, 19 nt, Artificial Sequence
  Synthetic
aacaauauguccaggaaaa

SEQ ID NO: 428848 - RNA, 20 nt, Artificial Sequence
  Synthetic
aaacaauauguccaggaaaa

SEQ ID NO: 428849 - RNA, 21 nt, Artificial Sequence
  Synthetic
uaaacaauauguccaggaaaa

SEQ ID NO: 428850 - RNA, 22 nt, Artificial Sequence
  Synthetic
auaaacaauauguccaggaaaa

SEQ ID NO: 428851 - RNA, 23 nt, Artificial Sequence
  Synthetic
uauaaacaauauguccaggaaaa

SEQ ID NO: 428852 - RNA, 24 nt, Artificial Sequence
  Synthetic
guauaaacaauauguccaggaaaa

SEQ ID NO: 428853 - RNA, 18 nt, Artificial Sequence
  Synthetic
auauuuauuccaggaaaa

SEQ ID NO: 428854 - RNA, 19 nt, Artificial Sequence
  Synthetic
gauauuuauuccaggaaaa

SEQ ID NO: 428855 - RNA, 20 nt, Artificial Sequence
  Synthetic
ggauauuuauuccaggaaaa

SEQ ID NO: 428856 - RNA, 21 nt, Artificial Sequence
  Synthetic
gggauauuuauuccaggaaaa

SEQ ID NO: 428857 - RNA, 22 nt, Artificial Sequence
  Synthetic
ggggauauuuauuccaggaaaa

SEQ ID NO: 428858 - RNA, 23 nt, Artificial Sequence
  Synthetic
gggggauauuuauuccaggaaaa

SEQ ID NO: 428859 - RNA, 24 nt, Artificial Sequence
  Synthetic
ggggggauauuuauuccaggaaaa

SEQ ID NO: 428860 - RNA, 18 nt, Artificial Sequence
  Synthetic
aacauucgagcaggaaaa

SEQ ID NO: 428861 - RNA, 19 nt, Artificial Sequence
  Synthetic
caacauucgagcaggaaaa

SEQ ID NO: 428862 - RNA, 20 nt, Artificial Sequence
  Synthetic
gcaacauucgagcaggaaaa

SEQ ID NO: 428863 - RNA, 21 nt, Artificial Sequence
  Synthetic
ggcaacauucgagcaggaaaa

SEQ ID NO: 428864 - RNA, 22 nt, Artificial Sequence
  Synthetic
aggcaacauucgagcaggaaaa

SEQ ID NO: 428865 - RNA, 23 nt, Artificial Sequence
  Synthetic
aaggcaacauucgagcaggaaaa

SEQ ID NO: 428866 - RNA, 24 nt, Artificial Sequence
  Synthetic
aaaggcaacauucgagcaggaaaa

SEQ ID NO: 428867 - RNA, 18 nt, Artificial Sequence
  Synthetic
aaaaguccaucaggaaaa

SEQ ID NO: 428868 - RNA, 19 nt, Artificial Sequence
  Synthetic
caaaaguccaucaggaaaa

SEQ ID NO: 428869 - RNA, 20 nt, Artificial Sequence
  Synthetic
acaaaaguccaucaggaaaa

SEQ ID NO: 428870 - RNA, 21 nt, Artificial Sequence
  Synthetic
aacaaaaguccaucaggaaaa

SEQ ID NO: 428871 - RNA, 22 nt, Artificial Sequence
  Synthetic
aaacaaaaguccaucaggaaaa

SEQ ID NO: 428872 - RNA, 23 nt, Artificial Sequence
  Synthetic
gaaacaaaaguccaucaggaaaa

SEQ ID NO: 428873 - RNA, 24 nt, Artificial Sequence
  Synthetic
ugaaacaaaaguccaucaggaaaa

SEQ ID NO: 428874 - RNA, 18 nt, Artificial Sequence
  Synthetic
uuguugggaucaggaaaa

SEQ ID NO: 428875 - RNA, 19 nt, Artificial Sequence
  Synthetic
uuuguugggaucaggaaaa

SEQ ID NO: 428876 - RNA, 20 nt, Artificial Sequence
  Synthetic
auuuguugggaucaggaaaa

SEQ ID NO: 428877 - RNA, 21 nt, Artificial Sequence
  Synthetic
uauuuguugggaucaggaaaa

SEQ ID NO: 428878 - RNA, 22 nt, Artificial Sequence
  Synthetic
cuauuuguugggaucaggaaaa

SEQ ID NO: 428879 - RNA, 23 nt, Artificial Sequence
  Synthetic
acuauuuguugggaucaggaaaa

SEQ ID NO: 428880 - RNA, 24 nt, Artificial Sequence
  Synthetic
aacuauuuguugggaucaggaaaa

SEQ ID NO: 428881 - RNA, 18 nt, Artificial Sequence
  Synthetic
agaauaguuucaggaaaa

SEQ ID NO: 428882 - RNA, 19 nt, Artificial Sequence
  Synthetic
cagaauaguuucaggaaaa

SEQ ID NO: 428883 - RNA, 20 nt, Artificial Sequence
  Synthetic
ccagaauaguuucaggaaaa

SEQ ID NO: 428884 - RNA, 21 nt, Artificial Sequence
  Synthetic
accagaauaguuucaggaaaa

SEQ ID NO: 428885 - RNA, 22 nt, Artificial Sequence
  Synthetic
aaccagaauaguuucaggaaaa

SEQ ID NO: 428886 - RNA, 23 nt, Artificial Sequence
  Synthetic
aaaccagaauaguuucaggaaaa

SEQ ID NO: 428887 - RNA, 24 nt, Artificial Sequence
  Synthetic
aaaaccagaauaguuucaggaaaa

SEQ ID NO: 428888 - RNA, 18 nt, Artificial Sequence
  Synthetic
acaaaccgaagaggaaaa

SEQ ID NO: 428889 - RNA, 19 nt, Artificial Sequence
  Synthetic
aacaaaccgaagaggaaaa

SEQ ID NO: 428890 - RNA, 20 nt, Artificial Sequence
  Synthetic
caacaaaccgaagaggaaaa

SEQ ID NO: 428891 - RNA, 21 nt, Artificial Sequence
  Synthetic
acaacaaaccgaagaggaaaa

SEQ ID NO: 428892 - RNA, 22 nt, Artificial Sequence
  Synthetic
aacaacaaaccgaagaggaaaa

SEQ ID NO: 428893 - RNA, 23 nt, Artificial Sequence
  Synthetic
caacaacaaaccgaagaggaaaa

SEQ ID NO: 428894 - RNA, 24 nt, Artificial Sequence
  Synthetic
acaacaacaaaccgaagaggaaaa

SEQ ID NO: 428895 - RNA, 18 nt, Artificial Sequence
  Synthetic
aaagucacuauaggaaaa

SEQ ID NO: 428896 - RNA, 19 nt, Artificial Sequence
  Synthetic
aaaagucacuauaggaaaa

SEQ ID NO: 428897 - RNA, 20 nt, Artificial Sequence
  Synthetic
caaaagucacuauaggaaaa

SEQ ID NO: 428898 - RNA, 21 nt, Artificial Sequence
  Synthetic
acaaaagucacuauaggaaaa

SEQ ID NO: 428899 - RNA, 22 nt, Artificial Sequence
  Synthetic
aacaaaagucacuauaggaaaa

SEQ ID NO: 428900 - RNA, 23 nt, Artificial Sequence
  Synthetic
gaacaaaagucacuauaggaaaa

SEQ ID NO: 428901 - RNA, 24 nt, Artificial Sequence
  Synthetic
agaacaaaagucacuauaggaaaa

SEQ ID NO: 428902 - RNA, 18 nt, Artificial Sequence
  Synthetic
ggugaagguguaggaaaa

SEQ ID NO: 428903 - RNA, 19 nt, Artificial Sequence
  Synthetic
uggugaagguguaggaaaa

SEQ ID NO: 428904 - RNA, 20 nt, Artificial Sequence
  Synthetic
uuggugaagguguaggaaaa

SEQ ID NO: 428905 - RNA, 21 nt, Artificial Sequence
  Synthetic
guuggugaagguguaggaaaa

SEQ ID NO: 428906 - RNA, 22 nt, Artificial Sequence
  Synthetic
uguuggugaagguguaggaaaa

SEQ ID NO: 428907 - RNA, 23 nt, Artificial Sequence
  Synthetic
guguuggugaagguguaggaaaa

SEQ ID NO: 428908 - RNA, 24 nt, Artificial Sequence
  Synthetic
uguguuggugaagguguaggaaaa

SEQ ID NO: 428909 - RNA, 21 nt, Artificial Sequence
  Synthetic
aaggguauucaauuaggaaaa

SEQ ID NO: 428910 - RNA, 22 nt, Artificial Sequence
  Synthetic
aaaggguauucaauuaggaaaa

SEQ ID NO: 428911 - RNA, 23 nt, Artificial Sequence
  Synthetic
uaaaggguauucaauuaggaaaa

SEQ ID NO: 428912 - RNA, 24 nt, Artificial Sequence
  Synthetic
auaaaggguauucaauuaggaaaa

SEQ ID NO: 428913 - RNA, 18 nt, Artificial Sequence
  Synthetic
aucuagcaguuaggaaaa

SEQ ID NO: 428914 - RNA, 19 nt, Artificial Sequence
  Synthetic
aaucuagcaguuaggaaaa

SEQ ID NO: 428915 - RNA, 20 nt, Artificial Sequence
  Synthetic
aaaucuagcaguuaggaaaa

SEQ ID NO: 428916 - RNA, 21 nt, Artificial Sequence
  Synthetic
gaaaucuagcaguuaggaaaa

SEQ ID NO: 428917 - RNA, 22 nt, Artificial Sequence
  Synthetic
ggaaaucuagcaguuaggaaaa

SEQ ID NO: 428918 - RNA, 23 nt, Artificial Sequence
  Synthetic
gggaaaucuagcaguuaggaaaa

SEQ ID NO: 428919 - RNA, 24 nt, Artificial Sequence
  Synthetic
ggggaaaucuagcaguuaggaaaa

SEQ ID NO: 428920 - RNA, 18 nt, Artificial Sequence
  Synthetic
aacacacuguuaggaaaa

SEQ ID NO: 428921 - RNA, 19 nt, Artificial Sequence
  Synthetic
uaacacacuguuaggaaaa

SEQ ID NO: 428922 - RNA, 20 nt, Artificial Sequence
  Synthetic
uuaacacacuguuaggaaaa

SEQ ID NO: 428923 - RNA, 21 nt, Artificial Sequence
  Synthetic
auuaacacacuguuaggaaaa

SEQ ID NO: 428924 - RNA, 22 nt, Artificial Sequence
  Synthetic
uauuaacacacuguuaggaaaa

SEQ ID NO: 428925 - RNA, 23 nt, Artificial Sequence
  Synthetic
uuauuaacacacuguuaggaaaa

SEQ ID NO: 428926 - RNA, 24 nt, Artificial Sequence
  Synthetic
uuuauuaacacacuguuaggaaaa

SEQ ID NO: 428927 - RNA, 18 nt, Artificial Sequence
  Synthetic
aaauugucuuuaggaaaa

SEQ ID NO: 428928 - RNA, 19 nt, Artificial Sequence
  Synthetic
aaaauugucuuuaggaaaa

SEQ ID NO: 428929 - RNA, 20 nt, Artificial Sequence
  Synthetic
caaaauugucuuuaggaaaa

SEQ ID NO: 428930 - RNA, 21 nt, Artificial Sequence
  Synthetic
acaaaauugucuuuaggaaaa

SEQ ID NO: 428931 - RNA, 22 nt, Artificial Sequence
  Synthetic
uacaaaauugucuuuaggaaaa

SEQ ID NO: 428932 - RNA, 23 nt, Artificial Sequence
  Synthetic
cuacaaaauugucuuuaggaaaa

SEQ ID NO: 428933 - RNA, 24 nt, Artificial Sequence
  Synthetic
acuacaaaauugucuuuaggaaaa

SEQ ID NO: 428934 - RNA, 18 nt, Artificial Sequence
  Synthetic
aaacaauccaacggaaaa

SEQ ID NO: 428935 - RNA, 19 nt, Artificial Sequence
  Synthetic
uaaacaauccaacggaaaa

SEQ ID NO: 428936 - RNA, 20 nt, Artificial Sequence
  Synthetic
guaaacaauccaacggaaaa

SEQ ID NO: 428937 - RNA, 21 nt, Artificial Sequence
  Synthetic
aguaaacaauccaacggaaaa

SEQ ID NO: 428938 - RNA, 22 nt, Artificial Sequence
  Synthetic
aaguaaacaauccaacggaaaa

SEQ ID NO: 428939 - RNA, 23 nt, Artificial Sequence
  Synthetic
aaaguaaacaauccaacggaaaa

SEQ ID NO: 428940 - RNA, 24 nt, Artificial Sequence
  Synthetic
gaaaguaaacaauccaacggaaaa

SEQ ID NO: 428941 - RNA, 18 nt, Artificial Sequence
  Synthetic
gacuuuccaaagggaaaa

SEQ ID NO: 428942 - RNA, 19 nt, Artificial Sequence
  Synthetic
agacuuuccaaagggaaaa

SEQ ID NO: 428943 - RNA, 20 nt, Artificial Sequence
  Synthetic
uagacuuuccaaagggaaaa

SEQ ID NO: 428944 - RNA, 21 nt, Artificial Sequence
  Synthetic
cuagacuuuccaaagggaaaa

SEQ ID NO: 428945 - RNA, 22 nt, Artificial Sequence
  Synthetic
ccuagacuuuccaaagggaaaa

SEQ ID NO: 428946 - RNA, 23 nt, Artificial Sequence
  Synthetic
uccuagacuuuccaaagggaaaa

SEQ ID NO: 428947 - RNA, 24 nt, Artificial Sequence
  Synthetic
auccuagacuuuccaaagggaaaa

SEQ ID NO: 428948 - RNA, 18 nt, Artificial Sequence
  Synthetic
agagacuguaagggaaaa

SEQ ID NO: 428949 - RNA, 19 nt, Artificial Sequence
  Synthetic
aagagacuguaagggaaaa

SEQ ID NO: 428950 - RNA, 20 nt, Artificial Sequence
  Synthetic
aaagagacuguaagggaaaa

SEQ ID NO: 428951 - RNA, 21 nt, Artificial Sequence
  Synthetic
caaagagacuguaagggaaaa

SEQ ID NO: 428952 - RNA, 22 nt, Artificial Sequence
  Synthetic
ucaaagagacuguaagggaaaa

SEQ ID NO: 428953 - RNA, 23 nt, Artificial Sequence
  Synthetic
uucaaagagacuguaagggaaaa

SEQ ID NO: 428954 - RNA, 24 nt, Artificial Sequence
  Synthetic
cuucaaagagacuguaagggaaaa

SEQ ID NO: 428955 - RNA, 18 nt, Artificial Sequence
  Synthetic
uugggggcucagggaaaa

SEQ ID NO: 428956 - RNA, 19 nt, Artificial Sequence
  Synthetic
cuugggggcucagggaaaa

SEQ ID NO: 428957 - RNA, 20 nt, Artificial Sequence
  Synthetic
gcuugggggcucagggaaaa

SEQ ID NO: 428958 - RNA, 21 nt, Artificial Sequence
  Synthetic
agcuugggggcucagggaaaa

SEQ ID NO: 428959 - RNA, 22 nt, Artificial Sequence
  Synthetic
cagcuugggggcucagggaaaa

SEQ ID NO: 428960 - RNA, 23 nt, Artificial Sequence
  Synthetic
ccagcuugggggcucagggaaaa

SEQ ID NO: 428961 - RNA, 24 nt, Artificial Sequence
  Synthetic
uccagcuugggggcucagggaaaa

SEQ ID NO: 428962 - RNA, 18 nt, Artificial Sequence
  Synthetic
agaaaaucugagggaaaa

SEQ ID NO: 428963 - RNA, 19 nt, Artificial Sequence
  Synthetic
gagaaaaucugagggaaaa

SEQ ID NO: 428964 - RNA, 20 nt, Artificial Sequence
  Synthetic
agagaaaaucugagggaaaa

SEQ ID NO: 428965 - RNA, 21 nt, Artificial Sequence
  Synthetic
aagagaaaaucugagggaaaa

SEQ ID NO: 428966 - RNA, 22 nt, Artificial Sequence
  Synthetic
gaagagaaaaucugagggaaaa

SEQ ID NO: 428967 - RNA, 23 nt, Artificial Sequence
  Synthetic
ggaagagaaaaucugagggaaaa

SEQ ID NO: 428968 - RNA, 24 nt, Artificial Sequence
  Synthetic
cggaagagaaaaucugagggaaaa

SEQ ID NO: 428969 - RNA, 18 nt, Artificial Sequence
  Synthetic
gugaaaggauggggaaaa

SEQ ID NO: 428970 - RNA, 19 nt, Artificial Sequence
  Synthetic
agugaaaggauggggaaaa

SEQ ID NO: 428971 - RNA, 20 nt, Artificial Sequence
  Synthetic
gagugaaaggauggggaaaa

SEQ ID NO: 428972 - RNA, 21 nt, Artificial Sequence
  Synthetic
ugagugaaaggauggggaaaa

SEQ ID NO: 428973 - RNA, 22 nt, Artificial Sequence
  Synthetic
gugagugaaaggauggggaaaa

SEQ ID NO: 428974 - RNA, 23 nt, Artificial Sequence
  Synthetic
agugagugaaaggauggggaaaa

SEQ ID NO: 428975 - RNA, 24 nt, Artificial Sequence
  Synthetic
aagugagugaaaggauggggaaaa

SEQ ID NO: 428976 - RNA, 18 nt, Artificial Sequence
  Synthetic
gucaagaccuggggaaaa

SEQ ID NO: 428977 - RNA, 19 nt, Artificial Sequence
  Synthetic
ugucaagaccuggggaaaa

SEQ ID NO: 428978 - RNA, 20 nt, Artificial Sequence
  Synthetic
gugucaagaccuggggaaaa

SEQ ID NO: 428979 - RNA, 21 nt, Artificial Sequence
  Synthetic
ugugucaagaccuggggaaaa

SEQ ID NO: 428980 - RNA, 22 nt, Artificial Sequence
  Synthetic
gugugucaagaccuggggaaaa

SEQ ID NO: 428981 - RNA, 23 nt, Artificial Sequence
  Synthetic
ggugugucaagaccuggggaaaa

SEQ ID NO: 428982 - RNA, 24 nt, Artificial Sequence
  Synthetic
gggugugucaagaccuggggaaaa

SEQ ID NO: 428983 - RNA, 18 nt, Artificial Sequence
  Synthetic
caagaauuuuggggaaaa

SEQ ID NO: 428984 - RNA, 19 nt, Artificial Sequence
  Synthetic
acaagaauuuuggggaaaa

SEQ ID NO: 428985 - RNA, 20 nt, Artificial Sequence
  Synthetic
aacaagaauuuuggggaaaa

SEQ ID NO: 428986 - RNA, 21 nt, Artificial Sequence
  Synthetic
gaacaagaauuuuggggaaaa

SEQ ID NO: 428987 - RNA, 22 nt, Artificial Sequence
  Synthetic
agaacaagaauuuuggggaaaa

SEQ ID NO: 428988 - RNA, 23 nt, Artificial Sequence
  Synthetic
aagaacaagaauuuuggggaaaa

SEQ ID NO: 428989 - RNA, 24 nt, Artificial Sequence
  Synthetic
gaagaacaagaauuuuggggaaaa

SEQ ID NO: 428990 - RNA, 18 nt, Artificial Sequence
  Synthetic
gcacacacuaugggaaaa

SEQ ID NO: 428991 - RNA, 19 nt, Artificial Sequence
  Synthetic
ugcacacacuaugggaaaa

SEQ ID NO: 428992 - RNA, 20 nt, Artificial Sequence
  Synthetic
uugcacacacuaugggaaaa

SEQ ID NO: 428993 - RNA, 21 nt, Artificial Sequence
  Synthetic
uuugcacacacuaugggaaaa

SEQ ID NO: 428994 - RNA, 22 nt, Artificial Sequence
  Synthetic
guuugcacacacuaugggaaaa

SEQ ID NO: 428995 - RNA, 23 nt, Artificial Sequence
  Synthetic
aguuugcacacacuaugggaaaa

SEQ ID NO: 428996 - RNA, 24 nt, Artificial Sequence
  Synthetic
caguuugcacacacuaugggaaaa

SEQ ID NO: 428997 - RNA, 18 nt, Artificial Sequence
  Synthetic
accauacuugugggaaaa

SEQ ID NO: 428998 - RNA, 19 nt, Artificial Sequence
  Synthetic
gaccauacuugugggaaaa

SEQ ID NO: 428999 - RNA, 20 nt, Artificial Sequence
  Synthetic
agaccauacuugugggaaaa

SEQ ID NO: 429000 - RNA, 21 nt, Artificial Sequence
  Synthetic
cagaccauacuugugggaaaa

SEQ ID NO: 429001 - RNA, 22 nt, Artificial Sequence
  Synthetic
ccagaccauacuugugggaaaa

SEQ ID NO: 429002 - RNA, 23 nt, Artificial Sequence
  Synthetic
cccagaccauacuugugggaaaa

SEQ ID NO: 429003 - RNA, 24 nt, Artificial Sequence
  Synthetic
gcccagaccauacuugugggaaaa

SEQ ID NO: 429004 - RNA, 18 nt, Artificial Sequence
  Synthetic
ugcuguaaauugggaaaa

SEQ ID NO: 429005 - RNA, 19 nt, Artificial Sequence
  Synthetic
augcuguaaauugggaaaa

SEQ ID NO: 429006 - RNA, 20 nt, Artificial Sequence
  Synthetic
aaugcuguaaauugggaaaa

SEQ ID NO: 429007 - RNA, 21 nt, Artificial Sequence
  Synthetic
uaaugcuguaaauugggaaaa

SEQ ID NO: 429008 - RNA, 22 nt, Artificial Sequence
  Synthetic
uuaaugcuguaaauugggaaaa

SEQ ID NO: 429009 - RNA, 23 nt, Artificial Sequence
  Synthetic
auuaaugcuguaaauugggaaaa

SEQ ID NO: 429010 - RNA, 24 nt, Artificial Sequence
  Synthetic
aauuaaugcuguaaauugggaaaa

SEQ ID NO: 429011 - RNA, 18 nt, Artificial Sequence
  Synthetic
aaauccuuauugggaaaa

SEQ ID NO: 429012 - RNA, 19 nt, Artificial Sequence
  Synthetic
uaaauccuuauugggaaaa

SEQ ID NO: 429013 - RNA, 20 nt, Artificial Sequence
  Synthetic
auaaauccuuauugggaaaa

SEQ ID NO: 429014 - RNA, 21 nt, Artificial Sequence
  Synthetic
uauaaauccuuauugggaaaa

SEQ ID NO: 429015 - RNA, 22 nt, Artificial Sequence
  Synthetic
cuauaaauccuuauugggaaaa

SEQ ID NO: 429016 - RNA, 23 nt, Artificial Sequence
  Synthetic
ucuauaaauccuuauugggaaaa

SEQ ID NO: 429017 - RNA, 24 nt, Artificial Sequence
  Synthetic
uucuauaaauccuuauugggaaaa

SEQ ID NO: 429018 - RNA, 18 nt, Artificial Sequence
  Synthetic
aaguagggaaauggaaaa

SEQ ID NO: 429019 - RNA, 19 nt, Artificial Sequence
  Synthetic
gaaguagggaaauggaaaa

SEQ ID NO: 429020 - RNA, 20 nt, Artificial Sequence
  Synthetic
agaaguagggaaauggaaaa

SEQ ID NO: 429021 - RNA, 21 nt, Artificial Sequence
  Synthetic
cagaaguagggaaauggaaaa

SEQ ID NO: 429022 - RNA, 22 nt, Artificial Sequence
  Synthetic
acagaaguagggaaauggaaaa

SEQ ID NO: 429023 - RNA, 23 nt, Artificial Sequence
  Synthetic
gacagaaguagggaaauggaaaa

SEQ ID NO: 429024 - RNA, 24 nt, Artificial Sequence
  Synthetic
ggacagaaguagggaaauggaaaa

SEQ ID NO: 429025 - RNA, 18 nt, Artificial Sequence
  Synthetic
auauuggugaauggaaaa

SEQ ID NO: 429026 - RNA, 19 nt, Artificial Sequence
  Synthetic
aauauuggugaauggaaaa

SEQ ID NO: 429027 - RNA, 20 nt, Artificial Sequence
  Synthetic
uaauauuggugaauggaaaa

SEQ ID NO: 429028 - RNA, 21 nt, Artificial Sequence
  Synthetic
auaauauuggugaauggaaaa

SEQ ID NO: 429029 - RNA, 22 nt, Artificial Sequence
  Synthetic
uauaauauuggugaauggaaaa

SEQ ID NO: 429030 - RNA, 23 nt, Artificial Sequence
  Synthetic
guauaauauuggugaauggaaaa

SEQ ID NO: 429031 - RNA, 24 nt, Artificial Sequence
  Synthetic
gguauaauauuggugaauggaaaa

SEQ ID NO: 429032 - RNA, 18 nt, Artificial Sequence
  Synthetic
uuucaugcucauggaaaa

SEQ ID NO: 429033 - RNA, 19 nt, Artificial Sequence
  Synthetic
auuucaugcucauggaaaa

SEQ ID NO: 429034 - RNA, 20 nt, Artificial Sequence
  Synthetic
aauuucaugcucauggaaaa

SEQ ID NO: 429035 - RNA, 21 nt, Artificial Sequence
  Synthetic
aaauuucaugcucauggaaaa

SEQ ID NO: 429036 - RNA, 22 nt, Artificial Sequence
  Synthetic
gaaauuucaugcucauggaaaa

SEQ ID NO: 429037 - RNA, 23 nt, Artificial Sequence
  Synthetic
agaaauuucaugcucauggaaaa

SEQ ID NO: 429038 - RNA, 24 nt, Artificial Sequence
  Synthetic
aagaaauuucaugcucauggaaaa

SEQ ID NO: 429039 - RNA, 18 nt, Artificial Sequence
  Synthetic
ugguggguggauggaaaa

SEQ ID NO: 429040 - RNA, 19 nt, Artificial Sequence
  Synthetic
gugguggguggauggaaaa

SEQ ID NO: 429041 - RNA, 20 nt, Artificial Sequence
  Synthetic
agugguggguggauggaaaa

SEQ ID NO: 429042 - RNA, 21 nt, Artificial Sequence
  Synthetic
cagugguggguggauggaaaa

SEQ ID NO: 429043 - RNA, 22 nt, Artificial Sequence
  Synthetic
gcagugguggguggauggaaaa

SEQ ID NO: 429044 - RNA, 23 nt, Artificial Sequence
  Synthetic
ugcagugguggguggauggaaaa

SEQ ID NO: 429045 - RNA, 24 nt, Artificial Sequence
  Synthetic
cugcagugguggguggauggaaaa

SEQ ID NO: 429046 - RNA, 18 nt, Artificial Sequence
  Synthetic
cuaucauccacuggaaaa

SEQ ID NO: 429047 - RNA, 19 nt, Artificial Sequence
  Synthetic
ccuaucauccacuggaaaa

SEQ ID NO: 429048 - RNA, 20 nt, Artificial Sequence
  Synthetic
accuaucauccacuggaaaa

SEQ ID NO: 429049 - RNA, 21 nt, Artificial Sequence
  Synthetic
uaccuaucauccacuggaaaa

SEQ ID NO: 429050 - RNA, 22 nt, Artificial Sequence
  Synthetic
auaccuaucauccacuggaaaa

SEQ ID NO: 429051 - RNA, 23 nt, Artificial Sequence
  Synthetic
uauaccuaucauccacuggaaaa

SEQ ID NO: 429052 - RNA, 24 nt, Artificial Sequence
  Synthetic
auauaccuaucauccacuggaaaa

SEQ ID NO: 429053 - RNA, 18 nt, Artificial Sequence
  Synthetic
gauguagcuacuggaaaa

SEQ ID NO: 429054 - RNA, 19 nt, Artificial Sequence
  Synthetic
ggauguagcuacuggaaaa

SEQ ID NO: 429055 - RNA, 20 nt, Artificial Sequence
  Synthetic
aggauguagcuacuggaaaa

SEQ ID NO: 429056 - RNA, 21 nt, Artificial Sequence
  Synthetic
gaggauguagcuacuggaaaa

SEQ ID NO: 429057 - RNA, 22 nt, Artificial Sequence
  Synthetic
ugaggauguagcuacuggaaaa

SEQ ID NO: 429058 - RNA, 23 nt, Artificial Sequence
  Synthetic
augaggauguagcuacuggaaaa

SEQ ID NO: 429059 - RNA, 24 nt, Artificial Sequence
  Synthetic
uaugaggauguagcuacuggaaaa

SEQ ID NO: 429060 - RNA, 18 nt, Artificial Sequence
  Synthetic
uuuuaggaaccuggaaaa

SEQ ID NO: 429061 - RNA, 19 nt, Artificial Sequence
  Synthetic
auuuuaggaaccuggaaaa

SEQ ID NO: 429062 - RNA, 20 nt, Artificial Sequence
  Synthetic
uauuuuaggaaccuggaaaa

SEQ ID NO: 429063 - RNA, 21 nt, Artificial Sequence
  Synthetic
guauuuuaggaaccuggaaaa

SEQ ID NO: 429064 - RNA, 22 nt, Artificial Sequence
  Synthetic
gguauuuuaggaaccuggaaaa

SEQ ID NO: 429065 - RNA, 23 nt, Artificial Sequence
  Synthetic
ggguauuuuaggaaccuggaaaa

SEQ ID NO: 429066 - RNA, 24 nt, Artificial Sequence
  Synthetic
aggguauuuuaggaaccuggaaaa

SEQ ID NO: 429067 - RNA, 18 nt, Artificial Sequence
  Synthetic
gcuucuuugccuggaaaa

SEQ ID NO: 429068 - RNA, 19 nt, Artificial Sequence
  Synthetic
agcuucuuugccuggaaaa

SEQ ID NO: 429069 - RNA, 20 nt, Artificial Sequence
  Synthetic
cagcuucuuugccuggaaaa

SEQ ID NO: 429070 - RNA, 21 nt, Artificial Sequence
  Synthetic
ccagcuucuuugccuggaaaa

SEQ ID NO: 429071 - RNA, 22 nt, Artificial Sequence
  Synthetic
uccagcuucuuugccuggaaaa

SEQ ID NO: 429072 - RNA, 23 nt, Artificial Sequence
  Synthetic
cuccagcuucuuugccuggaaaa

SEQ ID NO: 429073 - RNA, 24 nt, Artificial Sequence
  Synthetic
gcuccagcuucuuugccuggaaaa

SEQ ID NO: 429074 - RNA, 18 nt, Artificial Sequence
  Synthetic
uuauuaugugcuggaaaa

SEQ ID NO: 429075 - RNA, 19 nt, Artificial Sequence
  Synthetic
auuauuaugugcuggaaaa

SEQ ID NO: 429076 - RNA, 20 nt, Artificial Sequence
  Synthetic
gauuauuaugugcuggaaaa

SEQ ID NO: 429077 - RNA, 21 nt, Artificial Sequence
  Synthetic
agauuauuaugugcuggaaaa

SEQ ID NO: 429078 - RNA, 22 nt, Artificial Sequence
  Synthetic
cagauuauuaugugcuggaaaa

SEQ ID NO: 429079 - RNA, 23 nt, Artificial Sequence
  Synthetic
ucagauuauuaugugcuggaaaa

SEQ ID NO: 429080 - RNA, 24 nt, Artificial Sequence
  Synthetic
cucagauuauuaugugcuggaaaa

SEQ ID NO: 429081 - RNA, 18 nt, Artificial Sequence
  Synthetic
aaauugcugaguggaaaa

SEQ ID NO: 429082 - RNA, 19 nt, Artificial Sequence
  Synthetic
uaaauugcugaguggaaaa

SEQ ID NO: 429083 - RNA, 20 nt, Artificial Sequence
  Synthetic
uuaaauugcugaguggaaaa

SEQ ID NO: 429084 - RNA, 21 nt, Artificial Sequence
  Synthetic
cuuaaauugcugaguggaaaa

SEQ ID NO: 429085 - RNA, 22 nt, Artificial Sequence
  Synthetic
gcuuaaauugcugaguggaaaa

SEQ ID NO: 429086 - RNA, 23 nt, Artificial Sequence
  Synthetic
ggcuuaaauugcugaguggaaaa

SEQ ID NO: 429087 - RNA, 24 nt, Artificial Sequence
  Synthetic
gggcuuaaauugcugaguggaaaa

SEQ ID NO: 429088 - RNA, 18 nt, Artificial Sequence
  Synthetic
gaggaucuauguggaaaa

SEQ ID NO: 429089 - RNA, 19 nt, Artificial Sequence
  Synthetic
agaggaucuauguggaaaa

SEQ ID NO: 429090 - RNA, 20 nt, Artificial Sequence
  Synthetic
gagaggaucuauguggaaaa

SEQ ID NO: 429091 - RNA, 21 nt, Artificial Sequence
  Synthetic
agagaggaucuauguggaaaa

SEQ ID NO: 429092 - RNA, 22 nt, Artificial Sequence
  Synthetic
cagagaggaucuauguggaaaa

SEQ ID NO: 429093 - RNA, 23 nt, Artificial Sequence
  Synthetic
acagagaggaucuauguggaaaa

SEQ ID NO: 429094 - RNA, 24 nt, Artificial Sequence
  Synthetic
cacagagaggaucuauguggaaaa

SEQ ID NO: 429095 - RNA, 18 nt, Artificial Sequence
  Synthetic
uuauuacuguguggaaaa

SEQ ID NO: 429096 - RNA, 19 nt, Artificial Sequence
  Synthetic
guuauuacuguguggaaaa

SEQ ID NO: 429097 - RNA, 20 nt, Artificial Sequence
  Synthetic
aguuauuacuguguggaaaa

SEQ ID NO: 429098 - RNA, 21 nt, Artificial Sequence
  Synthetic
uaguuauuacuguguggaaaa

SEQ ID NO: 429099 - RNA, 22 nt, Artificial Sequence
  Synthetic
cuaguuauuacuguguggaaaa

SEQ ID NO: 429100 - RNA, 23 nt, Artificial Sequence
  Synthetic
ccuaguuauuacuguguggaaaa

SEQ ID NO: 429101 - RNA, 24 nt, Artificial Sequence
  Synthetic
accuaguuauuacuguguggaaaa

SEQ ID NO: 429102 - RNA, 18 nt, Artificial Sequence
  Synthetic
ggaaaagaaaaaugaaaa

SEQ ID NO: 429103 - RNA, 19 nt, Artificial Sequence
  Synthetic
cggaaaagaaaaaugaaaa

SEQ ID NO: 429104 - RNA, 20 nt, Artificial Sequence
  Synthetic
acggaaaagaaaaaugaaaa

SEQ ID NO: 429105 - RNA, 21 nt, Artificial Sequence
  Synthetic
uacggaaaagaaaaaugaaaa

SEQ ID NO: 429106 - RNA, 22 nt, Artificial Sequence
  Synthetic
cuacggaaaagaaaaaugaaaa

SEQ ID NO: 429107 - RNA, 23 nt, Artificial Sequence
  Synthetic
gcuacggaaaagaaaaaugaaaa

SEQ ID NO: 429108 - RNA, 24 nt, Artificial Sequence
  Synthetic
ugcuacggaaaagaaaaaugaaaa

SEQ ID NO: 429109 - RNA, 18 nt, Artificial Sequence
  Synthetic
uacaauguaaaaugaaaa

SEQ ID NO: 429110 - RNA, 19 nt, Artificial Sequence
  Synthetic
auacaauguaaaaugaaaa

SEQ ID NO: 429111 - RNA, 20 nt, Artificial Sequence
  Synthetic
aauacaauguaaaaugaaaa

SEQ ID NO: 429112 - RNA, 21 nt, Artificial Sequence
  Synthetic
uaauacaauguaaaaugaaaa

SEQ ID NO: 429113 - RNA, 22 nt, Artificial Sequence
  Synthetic
auaauacaauguaaaaugaaaa

SEQ ID NO: 429114 - RNA, 23 nt, Artificial Sequence
  Synthetic
aauaauacaauguaaaaugaaaa

SEQ ID NO: 429115 - RNA, 24 nt, Artificial Sequence
  Synthetic
aaauaauacaauguaaaaugaaaa

SEQ ID NO: 429116 - RNA, 18 nt, Artificial Sequence
  Synthetic
auucuucucaaaugaaaa

SEQ ID NO: 429117 - RNA, 19 nt, Artificial Sequence
  Synthetic
uauucuucucaaaugaaaa

SEQ ID NO: 429118 - RNA, 20 nt, Artificial Sequence
  Synthetic
uuauucuucucaaaugaaaa

SEQ ID NO: 429119 - RNA, 21 nt, Artificial Sequence
  Synthetic
uuuauucuucucaaaugaaaa

SEQ ID NO: 429120 - RNA, 22 nt, Artificial Sequence
  Synthetic
uuuuauucuucucaaaugaaaa

SEQ ID NO: 429121 - RNA, 23 nt, Artificial Sequence
  Synthetic
auuuuauucuucucaaaugaaaa

SEQ ID NO: 429122 - RNA, 24 nt, Artificial Sequence
  Synthetic
aauuuuauucuucucaaaugaaaa

SEQ ID NO: 429123 - RNA, 18 nt, Artificial Sequence
  Synthetic
uguccaggagaaugaaaa

SEQ ID NO: 429124 - RNA, 19 nt, Artificial Sequence
  Synthetic
auguccaggagaaugaaaa

SEQ ID NO: 429125 - RNA, 20 nt, Artificial Sequence
  Synthetic
gauguccaggagaaugaaaa

SEQ ID NO: 429126 - RNA, 21 nt, Artificial Sequence
  Synthetic
ugauguccaggagaaugaaaa

SEQ ID NO: 429127 - RNA, 22 nt, Artificial Sequence
  Synthetic
uugauguccaggagaaugaaaa

SEQ ID NO: 429128 - RNA, 23 nt, Artificial Sequence
  Synthetic
auugauguccaggagaaugaaaa

SEQ ID NO: 429129 - RNA, 24 nt, Artificial Sequence
  Synthetic
gauugauguccaggagaaugaaaa

SEQ ID NO: 429130 - RNA, 18 nt, Artificial Sequence
  Synthetic
aaaacugaauaaugaaaa

SEQ ID NO: 429131 - RNA, 19 nt, Artificial Sequence
  Synthetic
caaaacugaauaaugaaaa

SEQ ID NO: 429132 - RNA, 20 nt, Artificial Sequence
  Synthetic
ccaaaacugaauaaugaaaa

SEQ ID NO: 429133 - RNA, 21 nt, Artificial Sequence
  Synthetic
accaaaacugaauaaugaaaa

SEQ ID NO: 429134 - RNA, 22 nt, Artificial Sequence
  Synthetic
uaccaaaacugaauaaugaaaa

SEQ ID NO: 429135 - RNA, 23 nt, Artificial Sequence
  Synthetic
cuaccaaaacugaauaaugaaaa

SEQ ID NO: 429136 - RNA, 24 nt, Artificial Sequence
  Synthetic
ucuaccaaaacugaauaaugaaaa

SEQ ID NO: 429137 - RNA, 18 nt, Artificial Sequence
  Synthetic
aaaauuauagcaugaaaa

SEQ ID NO: 429138 - RNA, 19 nt, Artificial Sequence
  Synthetic
aaaaauuauagcaugaaaa

SEQ ID NO: 429139 - RNA, 20 nt, Artificial Sequence
  Synthetic
aaaaaauuauagcaugaaaa

SEQ ID NO: 429140 - RNA, 21 nt, Artificial Sequence
  Synthetic
uaaaaaauuauagcaugaaaa

SEQ ID NO: 429141 - RNA, 22 nt, Artificial Sequence
  Synthetic
guaaaaaauuauagcaugaaaa

SEQ ID NO: 429142 - RNA, 23 nt, Artificial Sequence
  Synthetic
aguaaaaaauuauagcaugaaaa

SEQ ID NO: 429143 - RNA, 24 nt, Artificial Sequence
  Synthetic
aaguaaaaaauuauagcaugaaaa

SEQ ID NO: 429144 - RNA, 18 nt, Artificial Sequence
  Synthetic
caugugugaggaugaaaa

SEQ ID NO: 429145 - RNA, 19 nt, Artificial Sequence
  Synthetic
gcaugugugaggaugaaaa

SEQ ID NO: 429146 - RNA, 20 nt, Artificial Sequence
  Synthetic
ugcaugugugaggaugaaaa

SEQ ID NO: 429147 - RNA, 21 nt, Artificial Sequence
  Synthetic
augcaugugugaggaugaaaa

SEQ ID NO: 429148 - RNA, 22 nt, Artificial Sequence
  Synthetic
gaugcaugugugaggaugaaaa

SEQ ID NO: 429149 - RNA, 23 nt, Artificial Sequence
  Synthetic
ggaugcaugugugaggaugaaaa

SEQ ID NO: 429150 - RNA, 24 nt, Artificial Sequence
  Synthetic
aggaugcaugugugaggaugaaaa

SEQ ID NO: 429151 - RNA, 18 nt, Artificial Sequence
  Synthetic
cuaaauggaugaugaaaa

SEQ ID NO: 429152 - RNA, 19 nt, Artificial Sequence
  Synthetic
ucuaaauggaugaugaaaa

SEQ ID NO: 429153 - RNA, 20 nt, Artificial Sequence
  Synthetic
aucuaaauggaugaugaaaa

SEQ ID NO: 429154 - RNA, 21 nt, Artificial Sequence
  Synthetic
aaucuaaauggaugaugaaaa

SEQ ID NO: 429155 - RNA, 22 nt, Artificial Sequence
  Synthetic
uaaucuaaauggaugaugaaaa

SEQ ID NO: 429156 - RNA, 23 nt, Artificial Sequence
  Synthetic
uuaaucuaaauggaugaugaaaa

SEQ ID NO: 429157 - RNA, 24 nt, Artificial Sequence
  Synthetic
uuuaaucuaaauggaugaugaaaa

SEQ ID NO: 429158 - RNA, 18 nt, Artificial Sequence
  Synthetic
aagugcuuaauaugaaaa

SEQ ID NO: 429159 - RNA, 19 nt, Artificial Sequence
  Synthetic
uaagugcuuaauaugaaaa

SEQ ID NO: 429160 - RNA, 20 nt, Artificial Sequence
  Synthetic
cuaagugcuuaauaugaaaa

SEQ ID NO: 429161 - RNA, 21 nt, Artificial Sequence
  Synthetic
acuaagugcuuaauaugaaaa

SEQ ID NO: 429162 - RNA, 22 nt, Artificial Sequence
  Synthetic
gacuaagugcuuaauaugaaaa

SEQ ID NO: 429163 - RNA, 23 nt, Artificial Sequence
  Synthetic
agacuaagugcuuaauaugaaaa

SEQ ID NO: 429164 - RNA, 24 nt, Artificial Sequence
  Synthetic
gagacuaagugcuuaauaugaaaa

SEQ ID NO: 429165 - RNA, 18 nt, Artificial Sequence
  Synthetic
aagaacuacauaugaaaa

SEQ ID NO: 429166 - RNA, 19 nt, Artificial Sequence
  Synthetic
gaagaacuacauaugaaaa

SEQ ID NO: 429167 - RNA, 20 nt, Artificial Sequence
  Synthetic
ggaagaacuacauaugaaaa

SEQ ID NO: 429168 - RNA, 21 nt, Artificial Sequence
  Synthetic
gggaagaacuacauaugaaaa

SEQ ID NO: 429169 - RNA, 22 nt, Artificial Sequence
  Synthetic
agggaagaacuacauaugaaaa

SEQ ID NO: 429170 - RNA, 23 nt, Artificial Sequence
  Synthetic
gagggaagaacuacauaugaaaa

SEQ ID NO: 429171 - RNA, 24 nt, Artificial Sequence
  Synthetic
agagggaagaacuacauaugaaaa

SEQ ID NO: 429172 - RNA, 18 nt, Artificial Sequence
  Synthetic
gaaauacauuuaugaaaa

SEQ ID NO: 429173 - RNA, 19 nt, Artificial Sequence
  Synthetic
ugaaauacauuuaugaaaa

SEQ ID NO: 429174 - RNA, 20 nt, Artificial Sequence
  Synthetic
augaaauacauuuaugaaaa

SEQ ID NO: 429175 - RNA, 21 nt, Artificial Sequence
  Synthetic
aaugaaauacauuuaugaaaa

SEQ ID NO: 429176 - RNA, 22 nt, Artificial Sequence
  Synthetic
aaaugaaauacauuuaugaaaa

SEQ ID NO: 429177 - RNA, 23 nt, Artificial Sequence
  Synthetic
aaaaugaaauacauuuaugaaaa

SEQ ID NO: 429178 - RNA, 24 nt, Artificial Sequence
  Synthetic
aaaaaugaaauacauuuaugaaaa

SEQ ID NO: 429179 - RNA, 18 nt, Artificial Sequence
  Synthetic
aauuggaaacacugaaaa

SEQ ID NO: 429180 - RNA, 19 nt, Artificial Sequence
  Synthetic
uaauuggaaacacugaaaa

SEQ ID NO: 429181 - RNA, 20 nt, Artificial Sequence
  Synthetic
guaauuggaaacacugaaaa

SEQ ID NO: 429182 - RNA, 21 nt, Artificial Sequence
  Synthetic
aguaauuggaaacacugaaaa

SEQ ID NO: 429183 - RNA, 22 nt, Artificial Sequence
  Synthetic
caguaauuggaaacacugaaaa

SEQ ID NO: 429184 - RNA, 23 nt, Artificial Sequence
  Synthetic
gcaguaauuggaaacacugaaaa

SEQ ID NO: 429185 - RNA, 24 nt, Artificial Sequence
  Synthetic
ugcaguaauuggaaacacugaaaa

SEQ ID NO: 429186 - RNA, 18 nt, Artificial Sequence
  Synthetic
agauaaauggacugaaaa

SEQ ID NO: 429187 - RNA, 19 nt, Artificial Sequence
  Synthetic
cagauaaauggacugaaaa

SEQ ID NO: 429188 - RNA, 20 nt, Artificial Sequence
  Synthetic
ccagauaaauggacugaaaa

SEQ ID NO: 429189 - RNA, 21 nt, Artificial Sequence
  Synthetic
gccagauaaauggacugaaaa

SEQ ID NO: 429190 - RNA, 22 nt, Artificial Sequence
  Synthetic
agccagauaaauggacugaaaa

SEQ ID NO: 429191 - RNA, 23 nt, Artificial Sequence
  Synthetic
uagccagauaaauggacugaaaa

SEQ ID NO: 429192 - RNA, 24 nt, Artificial Sequence
  Synthetic
auagccagauaaauggacugaaaa

SEQ ID NO: 429193 - RNA, 18 nt, Artificial Sequence
  Synthetic
gggggaagguacugaaaa

SEQ ID NO: 429194 - RNA, 19 nt, Artificial Sequence
  Synthetic
agggggaagguacugaaaa

SEQ ID NO: 429195 - RNA, 20 nt, Artificial Sequence
  Synthetic
gagggggaagguacugaaaa

SEQ ID NO: 429196 - RNA, 21 nt, Artificial Sequence
  Synthetic
ugagggggaagguacugaaaa

SEQ ID NO: 429197 - RNA, 22 nt, Artificial Sequence
  Synthetic
cugagggggaagguacugaaaa

SEQ ID NO: 429198 - RNA, 23 nt, Artificial Sequence
  Synthetic
ucugagggggaagguacugaaaa

SEQ ID NO: 429199 - RNA, 24 nt, Artificial Sequence
  Synthetic
gucugagggggaagguacugaaaa

SEQ ID NO: 429200 - RNA, 18 nt, Artificial Sequence
  Synthetic
ugggauucaaccugaaaa

SEQ ID NO: 429201 - RNA, 19 nt, Artificial Sequence
  Synthetic
augggauucaaccugaaaa

SEQ ID NO: 429202 - RNA, 20 nt, Artificial Sequence
  Synthetic
uaugggauucaaccugaaaa

SEQ ID NO: 429203 - RNA, 21 nt, Artificial Sequence
  Synthetic
uuaugggauucaaccugaaaa

SEQ ID NO: 429204 - RNA, 22 nt, Artificial Sequence
  Synthetic
guuaugggauucaaccugaaaa

SEQ ID NO: 429205 - RNA, 23 nt, Artificial Sequence
  Synthetic
aguuaugggauucaaccugaaaa

SEQ ID NO: 429206 - RNA, 24 nt, Artificial Sequence
  Synthetic
aaguuaugggauucaaccugaaaa

SEQ ID NO: 429207 - RNA, 18 nt, Artificial Sequence
  Synthetic
cuuuggguccccugaaaa

SEQ ID NO: 429208 - RNA, 19 nt, Artificial Sequence
  Synthetic
ucuuuggguccccugaaaa

SEQ ID NO: 429209 - RNA, 20 nt, Artificial Sequence
  Synthetic
gucuuuggguccccugaaaa

SEQ ID NO: 429210 - RNA, 21 nt, Artificial Sequence
  Synthetic
ugucuuuggguccccugaaaa

SEQ ID NO: 429211 - RNA, 22 nt, Artificial Sequence
  Synthetic
uugucuuuggguccccugaaaa

SEQ ID NO: 429212 - RNA, 23 nt, Artificial Sequence
  Synthetic
guugucuuuggguccccugaaaa

SEQ ID NO: 429213 - RNA, 24 nt, Artificial Sequence
  Synthetic
uguugucuuuggguccccugaaaa

SEQ ID NO: 429214 - RNA, 18 nt, Artificial Sequence
  Synthetic
uguuuugaagagugaaaa

SEQ ID NO: 429215 - RNA, 19 nt, Artificial Sequence
  Synthetic
auguuuugaagagugaaaa

SEQ ID NO: 429216 - RNA, 20 nt, Artificial Sequence
  Synthetic
aauguuuugaagagugaaaa

SEQ ID NO: 429217 - RNA, 21 nt, Artificial Sequence
  Synthetic
aaauguuuugaagagugaaaa

SEQ ID NO: 429218 - RNA, 22 nt, Artificial Sequence
  Synthetic
caaauguuuugaagagugaaaa

SEQ ID NO: 429219 - RNA, 23 nt, Artificial Sequence
  Synthetic
ucaaauguuuugaagagugaaaa

SEQ ID NO: 429220 - RNA, 24 nt, Artificial Sequence
  Synthetic
aucaaauguuuugaagagugaaaa

SEQ ID NO: 429221 - RNA, 18 nt, Artificial Sequence
  Synthetic
aacaaauacgugugaaaa

SEQ ID NO: 429222 - RNA, 19 nt, Artificial Sequence
  Synthetic
gaacaaauacgugugaaaa

SEQ ID NO: 429223 - RNA, 20 nt, Artificial Sequence
  Synthetic
ugaacaaauacgugugaaaa

SEQ ID NO: 429224 - RNA, 21 nt, Artificial Sequence
  Synthetic
augaacaaauacgugugaaaa

SEQ ID NO: 429225 - RNA, 22 nt, Artificial Sequence
  Synthetic
gaugaacaaauacgugugaaaa

SEQ ID NO: 429226 - RNA, 23 nt, Artificial Sequence
  Synthetic
ugaugaacaaauacgugugaaaa

SEQ ID NO: 429227 - RNA, 24 nt, Artificial Sequence
  Synthetic
cugaugaacaaauacgugugaaaa

SEQ ID NO: 429228 - RNA, 18 nt, Artificial Sequence
  Synthetic
uguauauaugugugaaaa

SEQ ID NO: 429229 - RNA, 19 nt, Artificial Sequence
  Synthetic
guguauauaugugugaaaa

SEQ ID NO: 429230 - RNA, 20 nt, Artificial Sequence
  Synthetic
uguguauauaugugugaaaa

SEQ ID NO: 429231 - RNA, 21 nt, Artificial Sequence
  Synthetic
guguguauauaugugugaaaa

SEQ ID NO: 429232 - RNA, 22 nt, Artificial Sequence
  Synthetic
uguguguauauaugugugaaaa

SEQ ID NO: 429233 - RNA, 23 nt, Artificial Sequence
  Synthetic
auguguguauauaugugugaaaa

SEQ ID NO: 429234 - RNA, 24 nt, Artificial Sequence
  Synthetic
uauguguguauauaugugugaaaa

SEQ ID NO: 429235 - RNA, 18 nt, Artificial Sequence
  Synthetic
ugugugugugugugaaaa

SEQ ID NO: 429236 - RNA, 19 nt, Artificial Sequence
  Synthetic
gugugugugugugugaaaa

SEQ ID NO: 429237 - RNA, 20 nt, Artificial Sequence
  Synthetic
ugugugugugugugugaaaa

SEQ ID NO: 429238 - RNA, 21 nt, Artificial Sequence
  Synthetic
gugugugugugugugugaaaa

SEQ ID NO: 429239 - RNA, 22 nt, Artificial Sequence
  Synthetic
ugugugugugugugugugaaaa

SEQ ID NO: 429240 - RNA, 23 nt, Artificial Sequence
  Synthetic
gugugugugugugugugugaaaa

SEQ ID NO: 429241 - RNA, 24 nt, Artificial Sequence
  Synthetic
ugugugugugugugugugugaaaa

SEQ ID NO: 429242 - RNA, 18 nt, Artificial Sequence
  Synthetic
cguggggaggauugaaaa

SEQ ID NO: 429243 - RNA, 19 nt, Artificial Sequence
  Synthetic
ucguggggaggauugaaaa

SEQ ID NO: 429244 - RNA, 20 nt, Artificial Sequence
  Synthetic
aucguggggaggauugaaaa

SEQ ID NO: 429245 - RNA, 21 nt, Artificial Sequence
  Synthetic
aaucguggggaggauugaaaa

SEQ ID NO: 429246 - RNA, 22 nt, Artificial Sequence
  Synthetic
caaucguggggaggauugaaaa

SEQ ID NO: 429247 - RNA, 23 nt, Artificial Sequence
  Synthetic
ccaaucguggggaggauugaaaa

SEQ ID NO: 429248 - RNA, 24 nt, Artificial Sequence
  Synthetic
gccaaucguggggaggauugaaaa

SEQ ID NO: 429249 - RNA, 18 nt, Artificial Sequence
  Synthetic
auauaguauuauugaaaa

SEQ ID NO: 429250 - RNA, 19 nt, Artificial Sequence
  Synthetic
aauauaguauuauugaaaa

SEQ ID NO: 429251 - RNA, 20 nt, Artificial Sequence
  Synthetic
aaauauaguauuauugaaaa

SEQ ID NO: 429252 - RNA, 21 nt, Artificial Sequence
  Synthetic
caaauauaguauuauugaaaa

SEQ ID NO: 429253 - RNA, 22 nt, Artificial Sequence
  Synthetic
acaaauauaguauuauugaaaa

SEQ ID NO: 429254 - RNA, 23 nt, Artificial Sequence
  Synthetic
cacaaauauaguauuauugaaaa

SEQ ID NO: 429255 - RNA, 24 nt, Artificial Sequence
  Synthetic
acacaaauauaguauuauugaaaa

SEQ ID NO: 429256 - RNA, 18 nt, Artificial Sequence
  Synthetic
gcuaagauaacuugaaaa

SEQ ID NO: 429257 - RNA, 19 nt, Artificial Sequence
  Synthetic
ugcuaagauaacuugaaaa

SEQ ID NO: 429258 - RNA, 20 nt, Artificial Sequence
  Synthetic
uugcuaagauaacuugaaaa

SEQ ID NO: 429259 - RNA, 21 nt, Artificial Sequence
  Synthetic
cuugcuaagauaacuugaaaa

SEQ ID NO: 429260 - RNA, 22 nt, Artificial Sequence
  Synthetic
gcuugcuaagauaacuugaaaa

SEQ ID NO: 429261 - RNA, 23 nt, Artificial Sequence
  Synthetic
agcuugcuaagauaacuugaaaa

SEQ ID NO: 429262 - RNA, 24 nt, Artificial Sequence
  Synthetic
cagcuugcuaagauaacuugaaaa

SEQ ID NO: 429263 - RNA, 18 nt, Artificial Sequence
  Synthetic
uaguaaaugauuugaaaa

SEQ ID NO: 429264 - RNA, 19 nt, Artificial Sequence
  Synthetic
auaguaaaugauuugaaaa

SEQ ID NO: 429265 - RNA, 20 nt, Artificial Sequence
  Synthetic
uauaguaaaugauuugaaaa

SEQ ID NO: 429266 - RNA, 21 nt, Artificial Sequence
  Synthetic
uuauaguaaaugauuugaaaa

SEQ ID NO: 429267 - RNA, 22 nt, Artificial Sequence
  Synthetic
guuauaguaaaugauuugaaaa

SEQ ID NO: 429268 - RNA, 23 nt, Artificial Sequence
  Synthetic
uguuauaguaaaugauuugaaaa

SEQ ID NO: 429269 - RNA, 24 nt, Artificial Sequence
  Synthetic
auguuauaguaaaugauuugaaaa

SEQ ID NO: 429270 - RNA, 18 nt, Artificial Sequence
  Synthetic
gauaaaaaauuuugaaaa

SEQ ID NO: 429271 - RNA, 19 nt, Artificial Sequence
  Synthetic
agauaaaaaauuuugaaaa

SEQ ID NO: 429272 - RNA, 20 nt, Artificial Sequence
  Synthetic
aagauaaaaaauuuugaaaa

SEQ ID NO: 429273 - RNA, 21 nt, Artificial Sequence
  Synthetic
aaagauaaaaaauuuugaaaa

SEQ ID NO: 429274 - RNA, 22 nt, Artificial Sequence
  Synthetic
uaaagauaaaaaauuuugaaaa

SEQ ID NO: 429275 - RNA, 23 nt, Artificial Sequence
  Synthetic
uuaaagauaaaaaauuuugaaaa

SEQ ID NO: 429276 - RNA, 24 nt, Artificial Sequence
  Synthetic
uuuaaagauaaaaaauuuugaaaa

SEQ ID NO: 429277 - RNA, 18 nt, Artificial Sequence
  Synthetic
auacaaaacuuuugaaaa

SEQ ID NO: 429278 - RNA, 19 nt, Artificial Sequence
  Synthetic
uauacaaaacuuuugaaaa

SEQ ID NO: 429279 - RNA, 20 nt, Artificial Sequence
  Synthetic
uuauacaaaacuuuugaaaa

SEQ ID NO: 429280 - RNA, 21 nt, Artificial Sequence
  Synthetic
auuauacaaaacuuuugaaaa

SEQ ID NO: 429281 - RNA, 22 nt, Artificial Sequence
  Synthetic
aauuauacaaaacuuuugaaaa

SEQ ID NO: 429282 - RNA, 23 nt, Artificial Sequence
  Synthetic
uaauuauacaaaacuuuugaaaa

SEQ ID NO: 429283 - RNA, 24 nt, Artificial Sequence
  Synthetic
cuaauuauacaaaacuuuugaaaa

SEQ ID NO: 429284 - RNA, 18 nt, Artificial Sequence
  Synthetic
aaauguagguuuugaaaa

SEQ ID NO: 429285 - RNA, 19 nt, Artificial Sequence
  Synthetic
aaaauguagguuuugaaaa

SEQ ID NO: 429286 - RNA, 20 nt, Artificial Sequence
  Synthetic
caaaauguagguuuugaaaa

SEQ ID NO: 429287 - RNA, 21 nt, Artificial Sequence
  Synthetic
ccaaaauguagguuuugaaaa

SEQ ID NO: 429288 - RNA, 22 nt, Artificial Sequence
  Synthetic
cccaaaauguagguuuugaaaa

SEQ ID NO: 429289 - RNA, 23 nt, Artificial Sequence
  Synthetic
acccaaaauguagguuuugaaaa

SEQ ID NO: 429290 - RNA, 24 nt, Artificial Sequence
  Synthetic
gacccaaaauguagguuuugaaaa

SEQ ID NO: 429291 - RNA, 18 nt, Artificial Sequence
  Synthetic
aucugaugguuuugaaaa

SEQ ID NO: 429292 - RNA, 19 nt, Artificial Sequence
  Synthetic
gaucugaugguuuugaaaa

SEQ ID NO: 429293 - RNA, 20 nt, Artificial Sequence
  Synthetic
agaucugaugguuuugaaaa

SEQ ID NO: 429294 - RNA, 21 nt, Artificial Sequence
  Synthetic
gagaucugaugguuuugaaaa

SEQ ID NO: 429295 - RNA, 22 nt, Artificial Sequence
  Synthetic
ugagaucugaugguuuugaaaa

SEQ ID NO: 429296 - RNA, 23 nt, Artificial Sequence
  Synthetic
augagaucugaugguuuugaaaa

SEQ ID NO: 429297 - RNA, 24 nt, Artificial Sequence
  Synthetic
caugagaucugaugguuuugaaaa

SEQ ID NO: 429298 - RNA, 18 nt, Artificial Sequence
  Synthetic
aaauccuaaaaaauaaaa

SEQ ID NO: 429299 - RNA, 19 nt, Artificial Sequence
  Synthetic
gaaauccuaaaaaauaaaa

SEQ ID NO: 429300 - RNA, 20 nt, Artificial Sequence
  Synthetic
ugaaauccuaaaaaauaaaa

SEQ ID NO: 429301 - RNA, 21 nt, Artificial Sequence
  Synthetic
uugaaauccuaaaaaauaaaa

SEQ ID NO: 429302 - RNA, 22 nt, Artificial Sequence
  Synthetic
guugaaauccuaaaaaauaaaa

SEQ ID NO: 429303 - RNA, 23 nt, Artificial Sequence
  Synthetic
uguugaaauccuaaaaaauaaaa

SEQ ID NO: 429304 - RNA, 24 nt, Artificial Sequence
  Synthetic
auguugaaauccuaaaaaauaaaa

SEQ ID NO: 429305 - RNA, 18 nt, Artificial Sequence
  Synthetic
auaaaaauaaaaauaaaa

SEQ ID NO: 429306 - RNA, 19 nt, Artificial Sequence
  Synthetic
aauaaaaauaaaaauaaaa

SEQ ID NO: 429307 - RNA, 20 nt, Artificial Sequence
  Synthetic
aaauaaaaauaaaaauaaaa

SEQ ID NO: 429308 - RNA, 21 nt, Artificial Sequence
  Synthetic
aaaauaaaaauaaaaauaaaa

SEQ ID NO: 429309 - RNA, 22 nt, Artificial Sequence
  Synthetic
aaaaauaaaaauaaaaauaaaa

SEQ ID NO: 429310 - RNA, 23 nt, Artificial Sequence
  Synthetic
aaaaaauaaaaauaaaaauaaaa

SEQ ID NO: 429311 - RNA, 24 nt, Artificial Sequence
  Synthetic
gaaaaaauaaaaauaaaaauaaaa

SEQ ID NO: 429312 - RNA, 18 nt, Artificial Sequence
  Synthetic
cuagagcuuaaaauaaaa

SEQ ID NO: 429313 - RNA, 19 nt, Artificial Sequence
  Synthetic
ccuagagcuuaaaauaaaa

SEQ ID NO: 429314 - RNA, 20 nt, Artificial Sequence
  Synthetic
cccuagagcuuaaaauaaaa

SEQ ID NO: 429315 - RNA, 21 nt, Artificial Sequence
  Synthetic
ccccuagagcuuaaaauaaaa

SEQ ID NO: 429316 - RNA, 22 nt, Artificial Sequence
  Synthetic
gccccuagagcuuaaaauaaaa

SEQ ID NO: 429317 - RNA, 23 nt, Artificial Sequence
  Synthetic
ugccccuagagcuuaaaauaaaa

SEQ ID NO: 429318 - RNA, 24 nt, Artificial Sequence
  Synthetic
gugccccuagagcuuaaaauaaaa

SEQ ID NO: 429319 - RNA, 18 nt, Artificial Sequence
  Synthetic
gggauuuuuaaaauaaaa

SEQ ID NO: 429320 - RNA, 19 nt, Artificial Sequence
  Synthetic
agggauuuuuaaaauaaaa

SEQ ID NO: 429321 - RNA, 20 nt, Artificial Sequence
  Synthetic
cagggauuuuuaaaauaaaa

SEQ ID NO: 429322 - RNA, 21 nt, Artificial Sequence
  Synthetic
ccagggauuuuuaaaauaaaa

SEQ ID NO: 429323 - RNA, 22 nt, Artificial Sequence
  Synthetic
accagggauuuuuaaaauaaaa

SEQ ID NO: 429324 - RNA, 23 nt, Artificial Sequence
  Synthetic
uaccagggauuuuuaaaauaaaa

SEQ ID NO: 429325 - RNA, 24 nt, Artificial Sequence
  Synthetic
cuaccagggauuuuuaaaauaaaa

SEQ ID NO: 429326 - RNA, 18 nt, Artificial Sequence
  Synthetic
gaaaaauuagaaauaaaa

SEQ ID NO: 429327 - RNA, 19 nt, Artificial Sequence
  Synthetic
agaaaaauuagaaauaaaa

SEQ ID NO: 429328 - RNA, 20 nt, Artificial Sequence
  Synthetic
aagaaaaauuagaaauaaaa

SEQ ID NO: 429329 - RNA, 21 nt, Artificial Sequence
  Synthetic
uaagaaaaauuagaaauaaaa

SEQ ID NO: 429330 - RNA, 22 nt, Artificial Sequence
  Synthetic
uuaagaaaaauuagaaauaaaa

SEQ ID NO: 429331 - RNA, 23 nt, Artificial Sequence
  Synthetic
auuaagaaaaauuagaaauaaaa

SEQ ID NO: 429332 - RNA, 24 nt, Artificial Sequence
  Synthetic
aauuaagaaaaauuagaaauaaaa

SEQ ID NO: 429333 - RNA, 21 nt, Artificial Sequence
  Synthetic
ccacugcucaaggaaauaaaa

SEQ ID NO: 429334 - RNA, 22 nt, Artificial Sequence
  Synthetic
accacugcucaaggaaauaaaa

SEQ ID NO: 429335 - RNA, 23 nt, Artificial Sequence
  Synthetic
aaccacugcucaaggaaauaaaa

SEQ ID NO: 429336 - RNA, 24 nt, Artificial Sequence
  Synthetic
aaaccacugcucaaggaaauaaaa

SEQ ID NO: 429337 - RNA, 18 nt, Artificial Sequence
  Synthetic
acaaauacauaaauaaaa

SEQ ID NO: 429338 - RNA, 19 nt, Artificial Sequence
  Synthetic
uacaaauacauaaauaaaa

SEQ ID NO: 429339 - RNA, 20 nt, Artificial Sequence
  Synthetic
uuacaaauacauaaauaaaa

SEQ ID NO: 429340 - RNA, 21 nt, Artificial Sequence
  Synthetic
cuuacaaauacauaaauaaaa

SEQ ID NO: 429341 - RNA, 22 nt, Artificial Sequence
  Synthetic
acuuacaaauacauaaauaaaa

SEQ ID NO: 429342 - RNA, 23 nt, Artificial Sequence
  Synthetic
cacuuacaaauacauaaauaaaa

SEQ ID NO: 429343 - RNA, 24 nt, Artificial Sequence
  Synthetic
acacuuacaaauacauaaauaaaa

SEQ ID NO: 429344 - RNA, 18 nt, Artificial Sequence
  Synthetic
aaggaacguuaaauaaaa

SEQ ID NO: 429345 - RNA, 19 nt, Artificial Sequence
  Synthetic
aaaggaacguuaaauaaaa

SEQ ID NO: 429346 - RNA, 20 nt, Artificial Sequence
  Synthetic
gaaaggaacguuaaauaaaa

SEQ ID NO: 429347 - RNA, 21 nt, Artificial Sequence
  Synthetic
agaaaggaacguuaaauaaaa

SEQ ID NO: 429348 - RNA, 22 nt, Artificial Sequence
  Synthetic
cagaaaggaacguuaaauaaaa

SEQ ID NO: 429349 - RNA, 23 nt, Artificial Sequence
  Synthetic
gcagaaaggaacguuaaauaaaa

SEQ ID NO: 429350 - RNA, 24 nt, Artificial Sequence
  Synthetic
ugcagaaaggaacguuaaauaaaa

SEQ ID NO: 429351 - RNA, 18 nt, Artificial Sequence
  Synthetic
caaagcaaggcaauaaaa

SEQ ID NO: 429352 - RNA, 19 nt, Artificial Sequence
  Synthetic
acaaagcaaggcaauaaaa

SEQ ID NO: 429353 - RNA, 20 nt, Artificial Sequence
  Synthetic
gacaaagcaaggcaauaaaa

SEQ ID NO: 429354 - RNA, 21 nt, Artificial Sequence
  Synthetic
agacaaagcaaggcaauaaaa

SEQ ID NO: 429355 - RNA, 22 nt, Artificial Sequence
  Synthetic
gagacaaagcaaggcaauaaaa

SEQ ID NO: 429356 - RNA, 23 nt, Artificial Sequence
  Synthetic
agagacaaagcaaggcaauaaaa

SEQ ID NO: 429357 - RNA, 24 nt, Artificial Sequence
  Synthetic
aagagacaaagcaaggcaauaaaa

SEQ ID NO: 429358 - RNA, 18 nt, Artificial Sequence
  Synthetic
aguuucauggcaauaaaa

SEQ ID NO: 429359 - RNA, 19 nt, Artificial Sequence
  Synthetic
aaguuucauggcaauaaaa

SEQ ID NO: 429360 - RNA, 20 nt, Artificial Sequence
  Synthetic
gaaguuucauggcaauaaaa

SEQ ID NO: 429361 - RNA, 21 nt, Artificial Sequence
  Synthetic
agaaguuucauggcaauaaaa

SEQ ID NO: 429362 - RNA, 22 nt, Artificial Sequence
  Synthetic
uagaaguuucauggcaauaaaa

SEQ ID NO: 429363 - RNA, 23 nt, Artificial Sequence
  Synthetic
cuagaaguuucauggcaauaaaa

SEQ ID NO: 429364 - RNA, 24 nt, Artificial Sequence
  Synthetic
ucuagaaguuucauggcaauaaaa

SEQ ID NO: 429365 - RNA, 18 nt, Artificial Sequence
  Synthetic
uuacuaaaaagaauaaaa

SEQ ID NO: 429366 - RNA, 19 nt, Artificial Sequence
  Synthetic
uuuacuaaaaagaauaaaa

SEQ ID NO: 429367 - RNA, 20 nt, Artificial Sequence
  Synthetic
cuuuacuaaaaagaauaaaa

SEQ ID NO: 429368 - RNA, 21 nt, Artificial Sequence
  Synthetic
ucuuuacuaaaaagaauaaaa

SEQ ID NO: 429369 - RNA, 22 nt, Artificial Sequence
  Synthetic
gucuuuacuaaaaagaauaaaa

SEQ ID NO: 429370 - RNA, 23 nt, Artificial Sequence
  Synthetic
ugucuuuacuaaaaagaauaaaa

SEQ ID NO: 429371 - RNA, 24 nt, Artificial Sequence
  Synthetic
cugucuuuacuaaaaagaauaaaa

SEQ ID NO: 429372 - RNA, 18 nt, Artificial Sequence
  Synthetic
uucacauacagaauaaaa

SEQ ID NO: 429373 - RNA, 19 nt, Artificial Sequence
  Synthetic
guucacauacagaauaaaa

SEQ ID NO: 429374 - RNA, 20 nt, Artificial Sequence
  Synthetic
uguucacauacagaauaaaa

SEQ ID NO: 429375 - RNA, 21 nt, Artificial Sequence
  Synthetic
auguucacauacagaauaaaa

SEQ ID NO: 429376 - RNA, 22 nt, Artificial Sequence
  Synthetic
aauguucacauacagaauaaaa

SEQ ID NO: 429377 - RNA, 23 nt, Artificial Sequence
  Synthetic
gaauguucacauacagaauaaaa

SEQ ID NO: 429378 - RNA, 24 nt, Artificial Sequence
  Synthetic
ugaauguucacauacagaauaaaa

SEQ ID NO: 429379 - RNA, 18 nt, Artificial Sequence
  Synthetic
aacaacuauagaauaaaa

SEQ ID NO: 429380 - RNA, 19 nt, Artificial Sequence
  Synthetic
uaacaacuauagaauaaaa

SEQ ID NO: 429381 - RNA, 20 nt, Artificial Sequence
  Synthetic
uuaacaacuauagaauaaaa

SEQ ID NO: 429382 - RNA, 21 nt, Artificial Sequence
  Synthetic
uuuaacaacuauagaauaaaa

SEQ ID NO: 429383 - RNA, 22 nt, Artificial Sequence
  Synthetic
auuuaacaacuauagaauaaaa

SEQ ID NO: 429384 - RNA, 23 nt, Artificial Sequence
  Synthetic
uauuuaacaacuauagaauaaaa

SEQ ID NO: 429385 - RNA, 24 nt, Artificial Sequence
  Synthetic
uuauuuaacaacuauagaauaaaa

SEQ ID NO: 429386 - RNA, 18 nt, Artificial Sequence
  Synthetic
cuccacuucugaauaaaa

SEQ ID NO: 429387 - RNA, 19 nt, Artificial Sequence
  Synthetic
acuccacuucugaauaaaa

SEQ ID NO: 429388 - RNA, 20 nt, Artificial Sequence
  Synthetic
cacuccacuucugaauaaaa

SEQ ID NO: 429389 - RNA, 21 nt, Artificial Sequence
  Synthetic
ucacuccacuucugaauaaaa

SEQ ID NO: 429390 - RNA, 22 nt, Artificial Sequence
  Synthetic
uucacuccacuucugaauaaaa

SEQ ID NO: 429391 - RNA, 23 nt, Artificial Sequence
  Synthetic
uuucacuccacuucugaauaaaa

SEQ ID NO: 429392 - RNA, 24 nt, Artificial Sequence
  Synthetic
uuuucacuccacuucugaauaaaa

SEQ ID NO: 429393 - RNA, 18 nt, Artificial Sequence
  Synthetic
uaaaguauaauaauaaaa

SEQ ID NO: 429394 - RNA, 19 nt, Artificial Sequence
  Synthetic
uuaaaguauaauaauaaaa

SEQ ID NO: 429395 - RNA, 20 nt, Artificial Sequence
  Synthetic
cuuaaaguauaauaauaaaa

SEQ ID NO: 429396 - RNA, 21 nt, Artificial Sequence
  Synthetic
acuuaaaguauaauaauaaaa

SEQ ID NO: 429397 - RNA, 22 nt, Artificial Sequence
  Synthetic
aacuuaaaguauaauaauaaaa

SEQ ID NO: 429398 - RNA, 23 nt, Artificial Sequence
  Synthetic
gaacuuaaaguauaauaauaaaa

SEQ ID NO: 429399 - RNA, 24 nt, Artificial Sequence
  Synthetic
agaacuuaaaguauaauaauaaaa

SEQ ID NO: 429400 - RNA, 18 nt, Artificial Sequence
  Synthetic
acaaaacucauaauaaaa

SEQ ID NO: 429401 - RNA, 19 nt, Artificial Sequence
  Synthetic
aacaaaacucauaauaaaa

SEQ ID NO: 429402 - RNA, 20 nt, Artificial Sequence
  Synthetic
aaacaaaacucauaauaaaa

SEQ ID NO: 429403 - RNA, 21 nt, Artificial Sequence
  Synthetic
aaaacaaaacucauaauaaaa

SEQ ID NO: 429404 - RNA, 22 nt, Artificial Sequence
  Synthetic
aaaaacaaaacucauaauaaaa

SEQ ID NO: 429405 - RNA, 23 nt, Artificial Sequence
  Synthetic
uaaaaacaaaacucauaauaaaa

SEQ ID NO: 429406 - RNA, 24 nt, Artificial Sequence
  Synthetic
auaaaaacaaaacucauaauaaaa

SEQ ID NO: 429407 - RNA, 18 nt, Artificial Sequence
  Synthetic
aaucauucgcuaauaaaa

SEQ ID NO: 429408 - RNA, 19 nt, Artificial Sequence
  Synthetic
caaucauucgcuaauaaaa

SEQ ID NO: 429409 - RNA, 20 nt, Artificial Sequence
  Synthetic
ucaaucauucgcuaauaaaa

SEQ ID NO: 429410 - RNA, 21 nt, Artificial Sequence
  Synthetic
aucaaucauucgcuaauaaaa

SEQ ID NO: 429411 - RNA, 22 nt, Artificial Sequence
  Synthetic
aaucaaucauucgcuaauaaaa

SEQ ID NO: 429412 - RNA, 23 nt, Artificial Sequence
  Synthetic
caaucaaucauucgcuaauaaaa

SEQ ID NO: 429413 - RNA, 24 nt, Artificial Sequence
  Synthetic
acaaucaaucauucgcuaauaaaa

SEQ ID NO: 429414 - RNA, 18 nt, Artificial Sequence
  Synthetic
uuugaaaugguaauaaaa

SEQ ID NO: 429415 - RNA, 19 nt, Artificial Sequence
  Synthetic
uuuugaaaugguaauaaaa

SEQ ID NO: 429416 - RNA, 20 nt, Artificial Sequence
  Synthetic
guuuugaaaugguaauaaaa

SEQ ID NO: 429417 - RNA, 21 nt, Artificial Sequence
  Synthetic
uguuuugaaaugguaauaaaa

SEQ ID NO: 429418 - RNA, 22 nt, Artificial Sequence
  Synthetic
guguuuugaaaugguaauaaaa

SEQ ID NO: 429419 - RNA, 23 nt, Artificial Sequence
  Synthetic
gguguuuugaaaugguaauaaaa

SEQ ID NO: 429420 - RNA, 24 nt, Artificial Sequence
  Synthetic
ggguguuuugaaaugguaauaaaa

SEQ ID NO: 429421 - RNA, 18 nt, Artificial Sequence
  Synthetic
ccucuccguaacauaaaa

SEQ ID NO: 429422 - RNA, 19 nt, Artificial Sequence
  Synthetic
cccucuccguaacauaaaa

SEQ ID NO: 429423 - RNA, 20 nt, Artificial Sequence
  Synthetic
gcccucuccguaacauaaaa

SEQ ID NO: 429424 - RNA, 21 nt, Artificial Sequence
  Synthetic
agcccucuccguaacauaaaa

SEQ ID NO: 429425 - RNA, 22 nt, Artificial Sequence
  Synthetic
aagcccucuccguaacauaaaa

SEQ ID NO: 429426 - RNA, 23 nt, Artificial Sequence
  Synthetic
gaagcccucuccguaacauaaaa

SEQ ID NO: 429427 - RNA, 24 nt, Artificial Sequence
  Synthetic
cgaagcccucuccguaacauaaaa

SEQ ID NO: 429428 - RNA, 18 nt, Artificial Sequence
  Synthetic
ccaacauaauacauaaaa

SEQ ID NO: 429429 - RNA, 19 nt, Artificial Sequence
  Synthetic
gccaacauaauacauaaaa

SEQ ID NO: 429430 - RNA, 20 nt, Artificial Sequence
  Synthetic
ggccaacauaauacauaaaa

SEQ ID NO: 429431 - RNA, 21 nt, Artificial Sequence
  Synthetic
uggccaacauaauacauaaaa

SEQ ID NO: 429432 - RNA, 22 nt, Artificial Sequence
  Synthetic
auggccaacauaauacauaaaa

SEQ ID NO: 429433 - RNA, 23 nt, Artificial Sequence
  Synthetic
uauggccaacauaauacauaaaa

SEQ ID NO: 429434 - RNA, 24 nt, Artificial Sequence
  Synthetic
uuauggccaacauaauacauaaaa

SEQ ID NO: 429435 - RNA, 18 nt, Artificial Sequence
  Synthetic
ucaugaaggcccauaaaa

SEQ ID NO: 429436 - RNA, 19 nt, Artificial Sequence
  Synthetic
aucaugaaggcccauaaaa

SEQ ID NO: 429437 - RNA, 20 nt, Artificial Sequence
  Synthetic
uaucaugaaggcccauaaaa

SEQ ID NO: 429438 - RNA, 21 nt, Artificial Sequence
  Synthetic
guaucaugaaggcccauaaaa

SEQ ID NO: 429439 - RNA, 22 nt, Artificial Sequence
  Synthetic
aguaucaugaaggcccauaaaa

SEQ ID NO: 429440 - RNA, 23 nt, Artificial Sequence
  Synthetic
uaguaucaugaaggcccauaaaa

SEQ ID NO: 429441 - RNA, 24 nt, Artificial Sequence
  Synthetic
uuaguaucaugaaggcccauaaaa

SEQ ID NO: 429442 - RNA, 21 nt, Artificial Sequence
  Synthetic
gaauacuaugcagccauaaaa

SEQ ID NO: 429443 - RNA, 22 nt, Artificial Sequence
  Synthetic
ggaauacuaugcagccauaaaa

SEQ ID NO: 429444 - RNA, 23 nt, Artificial Sequence
  Synthetic
uggaauacuaugcagccauaaaa

SEQ ID NO: 429445 - RNA, 24 nt, Artificial Sequence
  Synthetic
auggaauacuaugcagccauaaaa

SEQ ID NO: 429446 - RNA, 18 nt, Artificial Sequence
  Synthetic
gugaccaagagcauaaaa

SEQ ID NO: 429447 - RNA, 19 nt, Artificial Sequence
  Synthetic
ugugaccaagagcauaaaa

SEQ ID NO: 429448 - RNA, 20 nt, Artificial Sequence
  Synthetic
augugaccaagagcauaaaa

SEQ ID NO: 429449 - RNA, 21 nt, Artificial Sequence
  Synthetic
gaugugaccaagagcauaaaa

SEQ ID NO: 429450 - RNA, 22 nt, Artificial Sequence
  Synthetic
ugaugugaccaagagcauaaaa

SEQ ID NO: 429451 - RNA, 23 nt, Artificial Sequence
  Synthetic
augaugugaccaagagcauaaaa

SEQ ID NO: 429452 - RNA, 24 nt, Artificial Sequence
  Synthetic
caugaugugaccaagagcauaaaa

SEQ ID NO: 429453 - RNA, 18 nt, Artificial Sequence
  Synthetic
guagacauaugcauaaaa

SEQ ID NO: 429454 - RNA, 19 nt, Artificial Sequence
  Synthetic
uguagacauaugcauaaaa

SEQ ID NO: 429455 - RNA, 20 nt, Artificial Sequence
  Synthetic
guguagacauaugcauaaaa

SEQ ID NO: 429456 - RNA, 21 nt, Artificial Sequence
  Synthetic
aguguagacauaugcauaaaa

SEQ ID NO: 429457 - RNA, 22 nt, Artificial Sequence
  Synthetic
caguguagacauaugcauaaaa

SEQ ID NO: 429458 - RNA, 23 nt, Artificial Sequence
  Synthetic
ucaguguagacauaugcauaaaa

SEQ ID NO: 429459 - RNA, 24 nt, Artificial Sequence
  Synthetic
gucaguguagacauaugcauaaaa

SEQ ID NO: 429460 - RNA, 18 nt, Artificial Sequence
  Synthetic
augguaggaaagauaaaa

SEQ ID NO: 429461 - RNA, 19 nt, Artificial Sequence
  Synthetic
gaugguaggaaagauaaaa

SEQ ID NO: 429462 - RNA, 20 nt, Artificial Sequence
  Synthetic
agaugguaggaaagauaaaa

SEQ ID NO: 429463 - RNA, 21 nt, Artificial Sequence
  Synthetic
cagaugguaggaaagauaaaa

SEQ ID NO: 429464 - RNA, 22 nt, Artificial Sequence
  Synthetic
acagaugguaggaaagauaaaa

SEQ ID NO: 429465 - RNA, 23 nt, Artificial Sequence
  Synthetic
aacagaugguaggaaagauaaaa

SEQ ID NO: 429466 - RNA, 24 nt, Artificial Sequence
  Synthetic
uaacagaugguaggaaagauaaaa

SEQ ID NO: 429467 - RNA, 18 nt, Artificial Sequence
  Synthetic
aagaaauuggagauaaaa

SEQ ID NO: 429468 - RNA, 19 nt, Artificial Sequence
  Synthetic
gaagaaauuggagauaaaa

SEQ ID NO: 429469 - RNA, 20 nt, Artificial Sequence
  Synthetic
ggaagaaauuggagauaaaa

SEQ ID NO: 429470 - RNA, 21 nt, Artificial Sequence
  Synthetic
aggaagaaauuggagauaaaa

SEQ ID NO: 429471 - RNA, 22 nt, Artificial Sequence
  Synthetic
gaggaagaaauuggagauaaaa

SEQ ID NO: 429472 - RNA, 23 nt, Artificial Sequence
  Synthetic
ugaggaagaaauuggagauaaaa

SEQ ID NO: 429473 - RNA, 24 nt, Artificial Sequence
  Synthetic
cugaggaagaaauuggagauaaaa

SEQ ID NO: 429474 - RNA, 18 nt, Artificial Sequence
  Synthetic
gcaugcacagggauaaaa

SEQ ID NO: 429475 - RNA, 19 nt, Artificial Sequence
  Synthetic
agcaugcacagggauaaaa

SEQ ID NO: 429476 - RNA, 20 nt, Artificial Sequence
  Synthetic
cagcaugcacagggauaaaa

SEQ ID NO: 429477 - RNA, 21 nt, Artificial Sequence
  Synthetic
ucagcaugcacagggauaaaa

SEQ ID NO: 429478 - RNA, 22 nt, Artificial Sequence
  Synthetic
cucagcaugcacagggauaaaa

SEQ ID NO: 429479 - RNA, 23 nt, Artificial Sequence
  Synthetic
gcucagcaugcacagggauaaaa

SEQ ID NO: 429480 - RNA, 24 nt, Artificial Sequence
  Synthetic
agcucagcaugcacagggauaaaa

SEQ ID NO: 429481 - RNA, 18 nt, Artificial Sequence
  Synthetic
auuucacauuggauaaaa

SEQ ID NO: 429482 - RNA, 19 nt, Artificial Sequence
  Synthetic
cauuucacauuggauaaaa

SEQ ID NO: 429483 - RNA, 20 nt, Artificial Sequence
  Synthetic
ccauuucacauuggauaaaa

SEQ ID NO: 429484 - RNA, 21 nt, Artificial Sequence
  Synthetic
cccauuucacauuggauaaaa

SEQ ID NO: 429485 - RNA, 22 nt, Artificial Sequence
  Synthetic
ccccauuucacauuggauaaaa

SEQ ID NO: 429486 - RNA, 23 nt, Artificial Sequence
  Synthetic
gccccauuucacauuggauaaaa

SEQ ID NO: 429487 - RNA, 24 nt, Artificial Sequence
  Synthetic
agccccauuucacauuggauaaaa

SEQ ID NO: 429488 - RNA, 18 nt, Artificial Sequence
  Synthetic
aagcaaccaaugauaaaa

SEQ ID NO: 429489 - RNA, 19 nt, Artificial Sequence
  Synthetic
gaagcaaccaaugauaaaa

SEQ ID NO: 429490 - RNA, 20 nt, Artificial Sequence
  Synthetic
cgaagcaaccaaugauaaaa

SEQ ID NO: 429491 - RNA, 21 nt, Artificial Sequence
  Synthetic
acgaagcaaccaaugauaaaa

SEQ ID NO: 429492 - RNA, 22 nt, Artificial Sequence
  Synthetic
uacgaagcaaccaaugauaaaa

SEQ ID NO: 429493 - RNA, 23 nt, Artificial Sequence
  Synthetic
cuacgaagcaaccaaugauaaaa

SEQ ID NO: 429494 - RNA, 24 nt, Artificial Sequence
  Synthetic
ccuacgaagcaaccaaugauaaaa

SEQ ID NO: 429495 - RNA, 18 nt, Artificial Sequence
  Synthetic
ggucucagcaauauaaaa

SEQ ID NO: 429496 - RNA, 19 nt, Artificial Sequence
  Synthetic
gggucucagcaauauaaaa

SEQ ID NO: 429497 - RNA, 20 nt, Artificial Sequence
  Synthetic
ugggucucagcaauauaaaa

SEQ ID NO: 429498 - RNA, 21 nt, Artificial Sequence
  Synthetic
uugggucucagcaauauaaaa

SEQ ID NO: 429499 - RNA, 22 nt, Artificial Sequence
  Synthetic
uuugggucucagcaauauaaaa

SEQ ID NO: 429500 - RNA, 23 nt, Artificial Sequence
  Synthetic
auuugggucucagcaauauaaaa

SEQ ID NO: 429501 - RNA, 24 nt, Artificial Sequence
  Synthetic
gauuugggucucagcaauauaaaa

SEQ ID NO: 429502 - RNA, 18 nt, Artificial Sequence
  Synthetic
ucuaaccaucauauaaaa

SEQ ID NO: 429503 - RNA, 19 nt, Artificial Sequence
  Synthetic
aucuaaccaucauauaaaa

SEQ ID NO: 429504 - RNA, 20 nt, Artificial Sequence
  Synthetic
gaucuaaccaucauauaaaa

SEQ ID NO: 429505 - RNA, 21 nt, Artificial Sequence
  Synthetic
ugaucuaaccaucauauaaaa

SEQ ID NO: 429506 - RNA, 22 nt, Artificial Sequence
  Synthetic
gugaucuaaccaucauauaaaa

SEQ ID NO: 429507 - RNA, 23 nt, Artificial Sequence
  Synthetic
agugaucuaaccaucauauaaaa

SEQ ID NO: 429508 - RNA, 24 nt, Artificial Sequence
  Synthetic
cagugaucuaaccaucauauaaaa

SEQ ID NO: 429509 - RNA, 18 nt, Artificial Sequence
  Synthetic
uauagauuagauauaaaa

SEQ ID NO: 429510 - RNA, 19 nt, Artificial Sequence
  Synthetic
uuauagauuagauauaaaa

SEQ ID NO: 429511 - RNA, 20 nt, Artificial Sequence
  Synthetic
cuuauagauuagauauaaaa

SEQ ID NO: 429512 - RNA, 21 nt, Artificial Sequence
  Synthetic
gcuuauagauuagauauaaaa

SEQ ID NO: 429513 - RNA, 22 nt, Artificial Sequence
  Synthetic
ugcuuauagauuagauauaaaa

SEQ ID NO: 429514 - RNA, 23 nt, Artificial Sequence
  Synthetic
uugcuuauagauuagauauaaaa

SEQ ID NO: 429515 - RNA, 24 nt, Artificial Sequence
  Synthetic
cuugcuuauagauuagauauaaaa

SEQ ID NO: 429516 - RNA, 18 nt, Artificial Sequence
  Synthetic
ugccagagggauauaaaa

SEQ ID NO: 429517 - RNA, 19 nt, Artificial Sequence
  Synthetic
augccagagggauauaaaa

SEQ ID NO: 429518 - RNA, 20 nt, Artificial Sequence
  Synthetic
aaugccagagggauauaaaa

SEQ ID NO: 429519 - RNA, 21 nt, Artificial Sequence
  Synthetic
aaaugccagagggauauaaaa

SEQ ID NO: 429520 - RNA, 22 nt, Artificial Sequence
  Synthetic
uaaaugccagagggauauaaaa

SEQ ID NO: 429521 - RNA, 23 nt, Artificial Sequence
  Synthetic
uuaaaugccagagggauauaaaa

SEQ ID NO: 429522 - RNA, 24 nt, Artificial Sequence
  Synthetic
uuuaaaugccagagggauauaaaa

SEQ ID NO: 429523 - RNA, 18 nt, Artificial Sequence
  Synthetic
ucaucuuucacuauaaaa

SEQ ID NO: 429524 - RNA, 19 nt, Artificial Sequence
  Synthetic
aucaucuuucacuauaaaa

SEQ ID NO: 429525 - RNA, 20 nt, Artificial Sequence
  Synthetic
caucaucuuucacuauaaaa

SEQ ID NO: 429526 - RNA, 21 nt, Artificial Sequence
  Synthetic
ucaucaucuuucacuauaaaa

SEQ ID NO: 429527 - RNA, 22 nt, Artificial Sequence
  Synthetic
gucaucaucuuucacuauaaaa

SEQ ID NO: 429528 - RNA, 23 nt, Artificial Sequence
  Synthetic
ugucaucaucuuucacuauaaaa

SEQ ID NO: 429529 - RNA, 24 nt, Artificial Sequence
  Synthetic
cugucaucaucuuucacuauaaaa

SEQ ID NO: 429530 - RNA, 18 nt, Artificial Sequence
  Synthetic
guuaucucaucuauaaaa

SEQ ID NO: 429531 - RNA, 19 nt, Artificial Sequence
  Synthetic
gguuaucucaucuauaaaa

SEQ ID NO: 429532 - RNA, 20 nt, Artificial Sequence
  Synthetic
ugguuaucucaucuauaaaa

SEQ ID NO: 429533 - RNA, 21 nt, Artificial Sequence
  Synthetic
uugguuaucucaucuauaaaa

SEQ ID NO: 429534 - RNA, 22 nt, Artificial Sequence
  Synthetic
cuugguuaucucaucuauaaaa

SEQ ID NO: 429535 - RNA, 23 nt, Artificial Sequence
  Synthetic
ccuugguuaucucaucuauaaaa

SEQ ID NO: 429536 - RNA, 24 nt, Artificial Sequence
  Synthetic
cccuugguuaucucaucuauaaaa

SEQ ID NO: 429537 - RNA, 18 nt, Artificial Sequence
  Synthetic
guuuucucgucuauaaaa

SEQ ID NO: 429538 - RNA, 19 nt, Artificial Sequence
  Synthetic
uguuuucucgucuauaaaa

SEQ ID NO: 429539 - RNA, 20 nt, Artificial Sequence
  Synthetic
cuguuuucucgucuauaaaa

SEQ ID NO: 429540 - RNA, 21 nt, Artificial Sequence
  Synthetic
ccuguuuucucgucuauaaaa

SEQ ID NO: 429541 - RNA, 22 nt, Artificial Sequence
  Synthetic
accuguuuucucgucuauaaaa

SEQ ID NO: 429542 - RNA, 23 nt, Artificial Sequence
  Synthetic
aaccuguuuucucgucuauaaaa

SEQ ID NO: 429543 - RNA, 24 nt, Artificial Sequence
  Synthetic
gaaccuguuuucucgucuauaaaa

SEQ ID NO: 429544 - RNA, 18 nt, Artificial Sequence
  Synthetic
uuugguucccuuauaaaa

SEQ ID NO: 429545 - RNA, 19 nt, Artificial Sequence
  Synthetic
guuugguucccuuauaaaa

SEQ ID NO: 429546 - RNA, 20 nt, Artificial Sequence
  Synthetic
gguuugguucccuuauaaaa

SEQ ID NO: 429547 - RNA, 21 nt, Artificial Sequence
  Synthetic
ggguuugguucccuuauaaaa

SEQ ID NO: 429548 - RNA, 22 nt, Artificial Sequence
  Synthetic
uggguuugguucccuuauaaaa

SEQ ID NO: 429549 - RNA, 23 nt, Artificial Sequence
  Synthetic
guggguuugguucccuuauaaaa

SEQ ID NO: 429550 - RNA, 24 nt, Artificial Sequence
  Synthetic
aguggguuugguucccuuauaaaa

SEQ ID NO: 429551 - RNA, 18 nt, Artificial Sequence
  Synthetic
uacaugaguguuauaaaa

SEQ ID NO: 429552 - RNA, 19 nt, Artificial Sequence
  Synthetic
uuacaugaguguuauaaaa

SEQ ID NO: 429553 - RNA, 20 nt, Artificial Sequence
  Synthetic
auuacaugaguguuauaaaa

SEQ ID NO: 429554 - RNA, 21 nt, Artificial Sequence
  Synthetic
uauuacaugaguguuauaaaa

SEQ ID NO: 429555 - RNA, 22 nt, Artificial Sequence
  Synthetic
auauuacaugaguguuauaaaa

SEQ ID NO: 429556 - RNA, 23 nt, Artificial Sequence
  Synthetic
aauauuacaugaguguuauaaaa

SEQ ID NO: 429557 - RNA, 24 nt, Artificial Sequence
  Synthetic
caauauuacaugaguguuauaaaa

SEQ ID NO: 429558 - RNA, 18 nt, Artificial Sequence
  Synthetic
ucuaaacaauuuauaaaa

SEQ ID NO: 429559 - RNA, 19 nt, Artificial Sequence
  Synthetic
aucuaaacaauuuauaaaa

SEQ ID NO: 429560 - RNA, 20 nt, Artificial Sequence
  Synthetic
aaucuaaacaauuuauaaaa

SEQ ID NO: 429561 - RNA, 21 nt, Artificial Sequence
  Synthetic
aaaucuaaacaauuuauaaaa

SEQ ID NO: 429562 - RNA, 22 nt, Artificial Sequence
  Synthetic
aaaaucuaaacaauuuauaaaa

SEQ ID NO: 429563 - RNA, 23 nt, Artificial Sequence
  Synthetic
uaaaaucuaaacaauuuauaaaa

SEQ ID NO: 429564 - RNA, 24 nt, Artificial Sequence
  Synthetic
auaaaaucuaaacaauuuauaaaa

SEQ ID NO: 429565 - RNA, 18 nt, Artificial Sequence
  Synthetic
uaaaaggaaaaacuaaaa

SEQ ID NO: 429566 - RNA, 19 nt, Artificial Sequence
  Synthetic
uuaaaaggaaaaacuaaaa

SEQ ID NO: 429567 - RNA, 20 nt, Artificial Sequence
  Synthetic
auuaaaaggaaaaacuaaaa

SEQ ID NO: 429568 - RNA, 21 nt, Artificial Sequence
  Synthetic
aauuaaaaggaaaaacuaaaa

SEQ ID NO: 429569 - RNA, 22 nt, Artificial Sequence
  Synthetic
uaauuaaaaggaaaaacuaaaa

SEQ ID NO: 429570 - RNA, 23 nt, Artificial Sequence
  Synthetic
cuaauuaaaaggaaaaacuaaaa

SEQ ID NO: 429571 - RNA, 24 nt, Artificial Sequence
  Synthetic
acuaauuaaaaggaaaaacuaaaa

SEQ ID NO: 429572 - RNA, 18 nt, Artificial Sequence
  Synthetic
guaaaccaagaacuaaaa

SEQ ID NO: 429573 - RNA, 19 nt, Artificial Sequence
  Synthetic
aguaaaccaagaacuaaaa

SEQ ID NO: 429574 - RNA, 20 nt, Artificial Sequence
  Synthetic
uaguaaaccaagaacuaaaa

SEQ ID NO: 429575 - RNA, 21 nt, Artificial Sequence
  Synthetic
guaguaaaccaagaacuaaaa

SEQ ID NO: 429576 - RNA, 22 nt, Artificial Sequence
  Synthetic
uguaguaaaccaagaacuaaaa

SEQ ID NO: 429577 - RNA, 23 nt, Artificial Sequence
  Synthetic
auguaguaaaccaagaacuaaaa

SEQ ID NO: 429578 - RNA, 24 nt, Artificial Sequence
  Synthetic
gauguaguaaaccaagaacuaaaa

SEQ ID NO: 429579 - RNA, 18 nt, Artificial Sequence
  Synthetic
cuuuuucuugaacuaaaa

SEQ ID NO: 429580 - RNA, 19 nt, Artificial Sequence
  Synthetic
ucuuuuucuugaacuaaaa

SEQ ID NO: 429581 - RNA, 20 nt, Artificial Sequence
  Synthetic
uucuuuuucuugaacuaaaa

SEQ ID NO: 429582 - RNA, 21 nt, Artificial Sequence
  Synthetic
uuucuuuuucuugaacuaaaa

SEQ ID NO: 429583 - RNA, 22 nt, Artificial Sequence
  Synthetic
uuuucuuuuucuugaacuaaaa

SEQ ID NO: 429584 - RNA, 23 nt, Artificial Sequence
  Synthetic
uuuuucuuuuucuugaacuaaaa

SEQ ID NO: 429585 - RNA, 24 nt, Artificial Sequence
  Synthetic
auuuuucuuuuucuugaacuaaaa

SEQ ID NO: 429586 - RNA, 18 nt, Artificial Sequence
  Synthetic
gaaagagauacacuaaaa

SEQ ID NO: 429587 - RNA, 19 nt, Artificial Sequence
  Synthetic
ugaaagagauacacuaaaa

SEQ ID NO: 429588 - RNA, 20 nt, Artificial Sequence
  Synthetic
augaaagagauacacuaaaa

SEQ ID NO: 429589 - RNA, 21 nt, Artificial Sequence
  Synthetic
uaugaaagagauacacuaaaa

SEQ ID NO: 429590 - RNA, 22 nt, Artificial Sequence
  Synthetic
auaugaaagagauacacuaaaa

SEQ ID NO: 429591 - RNA, 23 nt, Artificial Sequence
  Synthetic
uauaugaaagagauacacuaaaa

SEQ ID NO: 429592 - RNA, 24 nt, Artificial Sequence
  Synthetic
guauaugaaagagauacacuaaaa

SEQ ID NO: 429593 - RNA, 18 nt, Artificial Sequence
  Synthetic
agaaggccaccacuaaaa

SEQ ID NO: 429594 - RNA, 19 nt, Artificial Sequence
  Synthetic
aagaaggccaccacuaaaa

SEQ ID NO: 429595 - RNA, 20 nt, Artificial Sequence
  Synthetic
gaagaaggccaccacuaaaa

SEQ ID NO: 429596 - RNA, 21 nt, Artificial Sequence
  Synthetic
ugaagaaggccaccacuaaaa

SEQ ID NO: 429597 - RNA, 22 nt, Artificial Sequence
  Synthetic
gugaagaaggccaccacuaaaa

SEQ ID NO: 429598 - RNA, 23 nt, Artificial Sequence
  Synthetic
ggugaagaaggccaccacuaaaa

SEQ ID NO: 429599 - RNA, 24 nt, Artificial Sequence
  Synthetic
aggugaagaaggccaccacuaaaa

SEQ ID NO: 429600 - RNA, 18 nt, Artificial Sequence
  Synthetic
aaucuaugaucacuaaaa

SEQ ID NO: 429601 - RNA, 19 nt, Artificial Sequence
  Synthetic
gaaucuaugaucacuaaaa

SEQ ID NO: 429602 - RNA, 20 nt, Artificial Sequence
  Synthetic
ugaaucuaugaucacuaaaa

SEQ ID NO: 429603 - RNA, 21 nt, Artificial Sequence
  Synthetic
cugaaucuaugaucacuaaaa

SEQ ID NO: 429604 - RNA, 22 nt, Artificial Sequence
  Synthetic
acugaaucuaugaucacuaaaa

SEQ ID NO: 429605 - RNA, 23 nt, Artificial Sequence
  Synthetic
aacugaaucuaugaucacuaaaa

SEQ ID NO: 429606 - RNA, 24 nt, Artificial Sequence
  Synthetic
gaacugaaucuaugaucacuaaaa

SEQ ID NO: 429607 - RNA, 18 nt, Artificial Sequence
  Synthetic
uauaguugucgacuaaaa

SEQ ID NO: 429608 - RNA, 19 nt, Artificial Sequence
  Synthetic
auauaguugucgacuaaaa

SEQ ID NO: 429609 - RNA, 20 nt, Artificial Sequence
  Synthetic
aauauaguugucgacuaaaa

SEQ ID NO: 429610 - RNA, 21 nt, Artificial Sequence
  Synthetic
uaauauaguugucgacuaaaa

SEQ ID NO: 429611 - RNA, 22 nt, Artificial Sequence
  Synthetic
auaauauaguugucgacuaaaa

SEQ ID NO: 429612 - RNA, 23 nt, Artificial Sequence
  Synthetic
cauaauauaguugucgacuaaaa

SEQ ID NO: 429613 - RNA, 24 nt, Artificial Sequence
  Synthetic
ccauaauauaguugucgacuaaaa

SEQ ID NO: 429614 - RNA, 18 nt, Artificial Sequence
  Synthetic
cagaaucugggacuaaaa

SEQ ID NO: 429615 - RNA, 19 nt, Artificial Sequence
  Synthetic
acagaaucugggacuaaaa

SEQ ID NO: 429616 - RNA, 20 nt, Artificial Sequence
  Synthetic
aacagaaucugggacuaaaa

SEQ ID NO: 429617 - RNA, 21 nt, Artificial Sequence
  Synthetic
aaacagaaucugggacuaaaa

SEQ ID NO: 429618 - RNA, 22 nt, Artificial Sequence
  Synthetic
uaaacagaaucugggacuaaaa

SEQ ID NO: 429619 - RNA, 23 nt, Artificial Sequence
  Synthetic
auaaacagaaucugggacuaaaa

SEQ ID NO: 429620 - RNA, 24 nt, Artificial Sequence
  Synthetic
aauaaacagaaucugggacuaaaa

SEQ ID NO: 429621 - RNA, 18 nt, Artificial Sequence
  Synthetic
aauguagaccuacuaaaa

SEQ ID NO: 429622 - RNA, 19 nt, Artificial Sequence
  Synthetic
aaauguagaccuacuaaaa

SEQ ID NO: 429623 - RNA, 20 nt, Artificial Sequence
  Synthetic
uaaauguagaccuacuaaaa

SEQ ID NO: 429624 - RNA, 21 nt, Artificial Sequence
  Synthetic
uuaaauguagaccuacuaaaa

SEQ ID NO: 429625 - RNA, 22 nt, Artificial Sequence
  Synthetic
cuuaaauguagaccuacuaaaa

SEQ ID NO: 429626 - RNA, 23 nt, Artificial Sequence
  Synthetic
ucuuaaauguagaccuacuaaaa

SEQ ID NO: 429627 - RNA, 24 nt, Artificial Sequence
  Synthetic
gucuuaaauguagaccuacuaaaa

SEQ ID NO: 429628 - RNA, 18 nt, Artificial Sequence
  Synthetic
agauaacacuuacuaaaa

SEQ ID NO: 429629 - RNA, 19 nt, Artificial Sequence
  Synthetic
aagauaacacuuacuaaaa

SEQ ID NO: 429630 - RNA, 20 nt, Artificial Sequence
  Synthetic
uaagauaacacuuacuaaaa

SEQ ID NO: 429631 - RNA, 21 nt, Artificial Sequence
  Synthetic
guaagauaacacuuacuaaaa

SEQ ID NO: 429632 - RNA, 22 nt, Artificial Sequence
  Synthetic
uguaagauaacacuuacuaaaa

SEQ ID NO: 429633 - RNA, 23 nt, Artificial Sequence
  Synthetic
auguaagauaacacuuacuaaaa

SEQ ID NO: 429634 - RNA, 24 nt, Artificial Sequence
  Synthetic
uauguaagauaacacuuacuaaaa

SEQ ID NO: 429635 - RNA, 18 nt, Artificial Sequence
  Synthetic
aaagacuuaaaccuaaaa

SEQ ID NO: 429636 - RNA, 19 nt, Artificial Sequence
  Synthetic
uaaagacuuaaaccuaaaa

SEQ ID NO: 429637 - RNA, 20 nt, Artificial Sequence
  Synthetic
uuaaagacuuaaaccuaaaa

SEQ ID NO: 429638 - RNA, 21 nt, Artificial Sequence
  Synthetic
auuaaagacuuaaaccuaaaa

SEQ ID NO: 429639 - RNA, 22 nt, Artificial Sequence
  Synthetic
cauuaaagacuuaaaccuaaaa

SEQ ID NO: 429640 - RNA, 23 nt, Artificial Sequence
  Synthetic
gcauuaaagacuuaaaccuaaaa

SEQ ID NO: 429641 - RNA, 24 nt, Artificial Sequence
  Synthetic
ugcauuaaagacuuaaaccuaaaa

SEQ ID NO: 429642 - RNA, 18 nt, Artificial Sequence
  Synthetic
augacagcacaccuaaaa

SEQ ID NO: 429643 - RNA, 19 nt, Artificial Sequence
  Synthetic
aaugacagcacaccuaaaa

SEQ ID NO: 429644 - RNA, 20 nt, Artificial Sequence
  Synthetic
caaugacagcacaccuaaaa

SEQ ID NO: 429645 - RNA, 21 nt, Artificial Sequence
  Synthetic
ucaaugacagcacaccuaaaa

SEQ ID NO: 429646 - RNA, 22 nt, Artificial Sequence
  Synthetic
uucaaugacagcacaccuaaaa

SEQ ID NO: 429647 - RNA, 23 nt, Artificial Sequence
  Synthetic
cuucaaugacagcacaccuaaaa

SEQ ID NO: 429648 - RNA, 24 nt, Artificial Sequence
  Synthetic
gcuucaaugacagcacaccuaaaa

SEQ ID NO: 429649 - RNA, 18 nt, Artificial Sequence
  Synthetic
augaaaauuagccuaaaa

SEQ ID NO: 429650 - RNA, 19 nt, Artificial Sequence
  Synthetic
gaugaaaauuagccuaaaa

SEQ ID NO: 429651 - RNA, 20 nt, Artificial Sequence
  Synthetic
agaugaaaauuagccuaaaa

SEQ ID NO: 429652 - RNA, 21 nt, Artificial Sequence
  Synthetic
uagaugaaaauuagccuaaaa

SEQ ID NO: 429653 - RNA, 22 nt, Artificial Sequence
  Synthetic
auagaugaaaauuagccuaaaa

SEQ ID NO: 429654 - RNA, 23 nt, Artificial Sequence
  Synthetic
cauagaugaaaauuagccuaaaa

SEQ ID NO: 429655 - RNA, 24 nt, Artificial Sequence
  Synthetic
ucauagaugaaaauuagccuaaaa

SEQ ID NO: 429656 - RNA, 18 nt, Artificial Sequence
  Synthetic
agccccucaauccuaaaa

SEQ ID NO: 429657 - RNA, 19 nt, Artificial Sequence
  Synthetic
cagccccucaauccuaaaa

SEQ ID NO: 429658 - RNA, 20 nt, Artificial Sequence
  Synthetic
gcagccccucaauccuaaaa

SEQ ID NO: 429659 - RNA, 21 nt, Artificial Sequence
  Synthetic
ggcagccccucaauccuaaaa

SEQ ID NO: 429660 - RNA, 22 nt, Artificial Sequence
  Synthetic
aggcagccccucaauccuaaaa

SEQ ID NO: 429661 - RNA, 23 nt, Artificial Sequence
  Synthetic
gaggcagccccucaauccuaaaa

SEQ ID NO: 429662 - RNA, 24 nt, Artificial Sequence
  Synthetic
cgaggcagccccucaauccuaaaa

SEQ ID NO: 429663 - RNA, 18 nt, Artificial Sequence
  Synthetic
acaaaaucaaagcuaaaa

SEQ ID NO: 429664 - RNA, 19 nt, Artificial Sequence
  Synthetic
uacaaaaucaaagcuaaaa

SEQ ID NO: 429665 - RNA, 20 nt, Artificial Sequence
  Synthetic
auacaaaaucaaagcuaaaa

SEQ ID NO: 429666 - RNA, 21 nt, Artificial Sequence
  Synthetic
uauacaaaaucaaagcuaaaa

SEQ ID NO: 429667 - RNA, 22 nt, Artificial Sequence
  Synthetic
guauacaaaaucaaagcuaaaa

SEQ ID NO: 429668 - RNA, 23 nt, Artificial Sequence
  Synthetic
uguauacaaaaucaaagcuaaaa

SEQ ID NO: 429669 - RNA, 24 nt, Artificial Sequence
  Synthetic
auguauacaaaaucaaagcuaaaa

SEQ ID NO: 429670 - RNA, 18 nt, Artificial Sequence
  Synthetic
auuuccaaauagcuaaaa

SEQ ID NO: 429671 - RNA, 19 nt, Artificial Sequence
  Synthetic
uauuuccaaauagcuaaaa

SEQ ID NO: 429672 - RNA, 20 nt, Artificial Sequence
  Synthetic
auauuuccaaauagcuaaaa

SEQ ID NO: 429673 - RNA, 21 nt, Artificial Sequence
  Synthetic
uauauuuccaaauagcuaaaa

SEQ ID NO: 429674 - RNA, 22 nt, Artificial Sequence
  Synthetic
guauauuuccaaauagcuaaaa

SEQ ID NO: 429675 - RNA, 23 nt, Artificial Sequence
  Synthetic
uguauauuuccaaauagcuaaaa

SEQ ID NO: 429676 - RNA, 24 nt, Artificial Sequence
  Synthetic
uuguauauuuccaaauagcuaaaa

SEQ ID NO: 429677 - RNA, 18 nt, Artificial Sequence
  Synthetic
auugaaagauggcuaaaa

SEQ ID NO: 429678 - RNA, 19 nt, Artificial Sequence
  Synthetic
aauugaaagauggcuaaaa

SEQ ID NO: 429679 - RNA, 20 nt, Artificial Sequence
  Synthetic
caauugaaagauggcuaaaa

SEQ ID NO: 429680 - RNA, 21 nt, Artificial Sequence
  Synthetic
acaauugaaagauggcuaaaa

SEQ ID NO: 429681 - RNA, 22 nt, Artificial Sequence
  Synthetic
aacaauugaaagauggcuaaaa

SEQ ID NO: 429682 - RNA, 23 nt, Artificial Sequence
  Synthetic
gaacaauugaaagauggcuaaaa

SEQ ID NO: 429683 - RNA, 24 nt, Artificial Sequence
  Synthetic
agaacaauugaaagauggcuaaaa

SEQ ID NO: 429684 - RNA, 18 nt, Artificial Sequence
  Synthetic
gauugccaucugcuaaaa

SEQ ID NO: 429685 - RNA, 19 nt, Artificial Sequence
  Synthetic
ugauugccaucugcuaaaa

SEQ ID NO: 429686 - RNA, 20 nt, Artificial Sequence
  Synthetic
uugauugccaucugcuaaaa

SEQ ID NO: 429687 - RNA, 21 nt, Artificial Sequence
  Synthetic
guugauugccaucugcuaaaa

SEQ ID NO: 429688 - RNA, 22 nt, Artificial Sequence
  Synthetic
uguugauugccaucugcuaaaa

SEQ ID NO: 429689 - RNA, 23 nt, Artificial Sequence
  Synthetic
uuguugauugccaucugcuaaaa

SEQ ID NO: 429690 - RNA, 24 nt, Artificial Sequence
  Synthetic
auuguugauugccaucugcuaaaa

SEQ ID NO: 429691 - RNA, 18 nt, Artificial Sequence
  Synthetic
cauauagaaaaucuaaaa

SEQ ID NO: 429692 - RNA, 19 nt, Artificial Sequence
  Synthetic
gcauauagaaaaucuaaaa

SEQ ID NO: 429693 - RNA, 20 nt, Artificial Sequence
  Synthetic
cgcauauagaaaaucuaaaa

SEQ ID NO: 429694 - RNA, 21 nt, Artificial Sequence
  Synthetic
ccgcauauagaaaaucuaaaa

SEQ ID NO: 429695 - RNA, 22 nt, Artificial Sequence
  Synthetic
accgcauauagaaaaucuaaaa

SEQ ID NO: 429696 - RNA, 23 nt, Artificial Sequence
  Synthetic
aaccgcauauagaaaaucuaaaa

SEQ ID NO: 429697 - RNA, 24 nt, Artificial Sequence
  Synthetic
aaaccgcauauagaaaaucuaaaa

SEQ ID NO: 429698 - RNA, 18 nt, Artificial Sequence
  Synthetic
ugcaggauaaaucuaaaa

SEQ ID NO: 429699 - RNA, 19 nt, Artificial Sequence
  Synthetic
augcaggauaaaucuaaaa

SEQ ID NO: 429700 - RNA, 20 nt, Artificial Sequence
  Synthetic
uaugcaggauaaaucuaaaa

SEQ ID NO: 429701 - RNA, 21 nt, Artificial Sequence
  Synthetic
guaugcaggauaaaucuaaaa

SEQ ID NO: 429702 - RNA, 22 nt, Artificial Sequence
  Synthetic
gguaugcaggauaaaucuaaaa

SEQ ID NO: 429703 - RNA, 23 nt, Artificial Sequence
  Synthetic
ggguaugcaggauaaaucuaaaa

SEQ ID NO: 429704 - RNA, 24 nt, Artificial Sequence
  Synthetic
gggguaugcaggauaaaucuaaaa

SEQ ID NO: 429705 - RNA, 18 nt, Artificial Sequence
  Synthetic
acuaguauuuaucuaaaa

SEQ ID NO: 429706 - RNA, 19 nt, Artificial Sequence
  Synthetic
gacuaguauuuaucuaaaa

SEQ ID NO: 429707 - RNA, 20 nt, Artificial Sequence
  Synthetic
ugacuaguauuuaucuaaaa

SEQ ID NO: 429708 - RNA, 21 nt, Artificial Sequence
  Synthetic
uugacuaguauuuaucuaaaa

SEQ ID NO: 429709 - RNA, 22 nt, Artificial Sequence
  Synthetic
auugacuaguauuuaucuaaaa

SEQ ID NO: 429710 - RNA, 23 nt, Artificial Sequence
  Synthetic
uauugacuaguauuuaucuaaaa

SEQ ID NO: 429711 - RNA, 24 nt, Artificial Sequence
  Synthetic
cuauugacuaguauuuaucuaaaa

SEQ ID NO: 429712 - RNA, 18 nt, Artificial Sequence
  Synthetic
uuagcaagaacucuaaaa

SEQ ID NO: 429713 - RNA, 19 nt, Artificial Sequence
  Synthetic
auuagcaagaacucuaaaa

SEQ ID NO: 429714 - RNA, 20 nt, Artificial Sequence
  Synthetic
cauuagcaagaacucuaaaa

SEQ ID NO: 429715 - RNA, 21 nt, Artificial Sequence
  Synthetic
ucauuagcaagaacucuaaaa

SEQ ID NO: 429716 - RNA, 22 nt, Artificial Sequence
  Synthetic
aucauuagcaagaacucuaaaa

SEQ ID NO: 429717 - RNA, 23 nt, Artificial Sequence
  Synthetic
caucauuagcaagaacucuaaaa

SEQ ID NO: 429718 - RNA, 24 nt, Artificial Sequence
  Synthetic
ccaucauuagcaagaacucuaaaa

SEQ ID NO: 429719 - RNA, 18 nt, Artificial Sequence
  Synthetic
guuucugacccucuaaaa

SEQ ID NO: 429720 - RNA, 19 nt, Artificial Sequence
  Synthetic
aguuucugacccucuaaaa

SEQ ID NO: 429721 - RNA, 20 nt, Artificial Sequence
  Synthetic
uaguuucugacccucuaaaa

SEQ ID NO: 429722 - RNA, 21 nt, Artificial Sequence
  Synthetic
auaguuucugacccucuaaaa

SEQ ID NO: 429723 - RNA, 22 nt, Artificial Sequence
  Synthetic
uauaguuucugacccucuaaaa

SEQ ID NO: 429724 - RNA, 23 nt, Artificial Sequence
  Synthetic
uuauaguuucugacccucuaaaa

SEQ ID NO: 429725 - RNA, 24 nt, Artificial Sequence
  Synthetic
uuuauaguuucugacccucuaaaa

SEQ ID NO: 429726 - RNA, 18 nt, Artificial Sequence
  Synthetic
cugauaaaggcucuaaaa

SEQ ID NO: 429727 - RNA, 19 nt, Artificial Sequence
  Synthetic
gcugauaaaggcucuaaaa

SEQ ID NO: 429728 - RNA, 20 nt, Artificial Sequence
  Synthetic
agcugauaaaggcucuaaaa

SEQ ID NO: 429729 - RNA, 21 nt, Artificial Sequence
  Synthetic
cagcugauaaaggcucuaaaa

SEQ ID NO: 429730 - RNA, 22 nt, Artificial Sequence
  Synthetic
acagcugauaaaggcucuaaaa

SEQ ID NO: 429731 - RNA, 23 nt, Artificial Sequence
  Synthetic
cacagcugauaaaggcucuaaaa

SEQ ID NO: 429732 - RNA, 24 nt, Artificial Sequence
  Synthetic
ucacagcugauaaaggcucuaaaa

SEQ ID NO: 429733 - RNA, 18 nt, Artificial Sequence
  Synthetic
uuccuaaaaucucuaaaa

SEQ ID NO: 429734 - RNA, 19 nt, Artificial Sequence
  Synthetic
uuuccuaaaaucucuaaaa

SEQ ID NO: 429735 - RNA, 20 nt, Artificial Sequence
  Synthetic
uuuuccuaaaaucucuaaaa

SEQ ID NO: 429736 - RNA, 21 nt, Artificial Sequence
  Synthetic
auuuuccuaaaaucucuaaaa

SEQ ID NO: 429737 - RNA, 22 nt, Artificial Sequence
  Synthetic
uauuuuccuaaaaucucuaaaa

SEQ ID NO: 429738 - RNA, 23 nt, Artificial Sequence
  Synthetic
auauuuuccuaaaaucucuaaaa

SEQ ID NO: 429739 - RNA, 24 nt, Artificial Sequence
  Synthetic
cauauuuuccuaaaaucucuaaaa

SEQ ID NO: 429740 - RNA, 18 nt, Artificial Sequence
  Synthetic
aauuauuggucucuaaaa

SEQ ID NO: 429741 - RNA, 19 nt, Artificial Sequence
  Synthetic
gaauuauuggucucuaaaa

SEQ ID NO: 429742 - RNA, 20 nt, Artificial Sequence
  Synthetic
ggaauuauuggucucuaaaa

SEQ ID NO: 429743 - RNA, 21 nt, Artificial Sequence
  Synthetic
uggaauuauuggucucuaaaa

SEQ ID NO: 429744 - RNA, 22 nt, Artificial Sequence
  Synthetic
auggaauuauuggucucuaaaa

SEQ ID NO: 429745 - RNA, 23 nt, Artificial Sequence
  Synthetic
aauggaauuauuggucucuaaaa

SEQ ID NO: 429746 - RNA, 24 nt, Artificial Sequence
  Synthetic
aaauggaauuauuggucucuaaaa

SEQ ID NO: 429747 - RNA, 18 nt, Artificial Sequence
  Synthetic
gguuuucugucucuaaaa

SEQ ID NO: 429748 - RNA, 19 nt, Artificial Sequence
  Synthetic
cgguuuucugucucuaaaa

SEQ ID NO: 429749 - RNA, 20 nt, Artificial Sequence
  Synthetic
ucgguuuucugucucuaaaa

SEQ ID NO: 429750 - RNA, 21 nt, Artificial Sequence
  Synthetic
cucgguuuucugucucuaaaa

SEQ ID NO: 429751 - RNA, 22 nt, Artificial Sequence
  Synthetic
ucucgguuuucugucucuaaaa

SEQ ID NO: 429752 - RNA, 23 nt, Artificial Sequence
  Synthetic
gucucgguuuucugucucuaaaa

SEQ ID NO: 429753 - RNA, 24 nt, Artificial Sequence
  Synthetic
agucucgguuuucugucucuaaaa

SEQ ID NO: 429754 - RNA, 18 nt, Artificial Sequence
  Synthetic
acccaauauggucuaaaa

SEQ ID NO: 429755 - RNA, 19 nt, Artificial Sequence
  Synthetic
uacccaauauggucuaaaa

SEQ ID NO: 429756 - RNA, 20 nt, Artificial Sequence
  Synthetic
uuacccaauauggucuaaaa

SEQ ID NO: 429757 - RNA, 21 nt, Artificial Sequence
  Synthetic
guuacccaauauggucuaaaa

SEQ ID NO: 429758 - RNA, 22 nt, Artificial Sequence
  Synthetic
aguuacccaauauggucuaaaa

SEQ ID NO: 429759 - RNA, 23 nt, Artificial Sequence
  Synthetic
aaguuacccaauauggucuaaaa

SEQ ID NO: 429760 - RNA, 24 nt, Artificial Sequence
  Synthetic
gaaguuacccaauauggucuaaaa

SEQ ID NO: 429761 - RNA, 18 nt, Artificial Sequence
  Synthetic
aaaacuagaugucuaaaa

SEQ ID NO: 429762 - RNA, 19 nt, Artificial Sequence
  Synthetic
caaaacuagaugucuaaaa

SEQ ID NO: 429763 - RNA, 20 nt, Artificial Sequence
  Synthetic
gcaaaacuagaugucuaaaa

SEQ ID NO: 429764 - RNA, 21 nt, Artificial Sequence
  Synthetic
ugcaaaacuagaugucuaaaa

SEQ ID NO: 429765 - RNA, 22 nt, Artificial Sequence
  Synthetic
uugcaaaacuagaugucuaaaa

SEQ ID NO: 429766 - RNA, 23 nt, Artificial Sequence
  Synthetic
cuugcaaaacuagaugucuaaaa

SEQ ID NO: 429767 - RNA, 24 nt, Artificial Sequence
  Synthetic
ccuugcaaaacuagaugucuaaaa

SEQ ID NO: 429768 - RNA, 18 nt, Artificial Sequence
  Synthetic
acaacaaacugucuaaaa

SEQ ID NO: 429769 - RNA, 19 nt, Artificial Sequence
  Synthetic
aacaacaaacugucuaaaa

SEQ ID NO: 429770 - RNA, 20 nt, Artificial Sequence
  Synthetic
uaacaacaaacugucuaaaa

SEQ ID NO: 429771 - RNA, 21 nt, Artificial Sequence
  Synthetic
auaacaacaaacugucuaaaa

SEQ ID NO: 429772 - RNA, 22 nt, Artificial Sequence
  Synthetic
aauaacaacaaacugucuaaaa

SEQ ID NO: 429773 - RNA, 23 nt, Artificial Sequence
  Synthetic
caauaacaacaaacugucuaaaa

SEQ ID NO: 429774 - RNA, 24 nt, Artificial Sequence
  Synthetic
acaauaacaacaaacugucuaaaa

SEQ ID NO: 429775 - RNA, 18 nt, Artificial Sequence
  Synthetic
auaauuaacauucuaaaa

SEQ ID NO: 429776 - RNA, 19 nt, Artificial Sequence
  Synthetic
cauaauuaacauucuaaaa

SEQ ID NO: 429777 - RNA, 20 nt, Artificial Sequence
  Synthetic
acauaauuaacauucuaaaa

SEQ ID NO: 429778 - RNA, 21 nt, Artificial Sequence
  Synthetic
aacauaauuaacauucuaaaa

SEQ ID NO: 429779 - RNA, 22 nt, Artificial Sequence
  Synthetic
aaacauaauuaacauucuaaaa

SEQ ID NO: 429780 - RNA, 23 nt, Artificial Sequence
  Synthetic
caaacauaauuaacauucuaaaa

SEQ ID NO: 429781 - RNA, 24 nt, Artificial Sequence
  Synthetic
ccaaacauaauuaacauucuaaaa

SEQ ID NO: 429782 - RNA, 18 nt, Artificial Sequence
  Synthetic
uuguucgugauucuaaaa

SEQ ID NO: 429783 - RNA, 19 nt, Artificial Sequence
  Synthetic
guuguucgugauucuaaaa

SEQ ID NO: 429784 - RNA, 20 nt, Artificial Sequence
  Synthetic
uguuguucgugauucuaaaa

SEQ ID NO: 429785 - RNA, 21 nt, Artificial Sequence
  Synthetic
uuguuguucgugauucuaaaa

SEQ ID NO: 429786 - RNA, 22 nt, Artificial Sequence
  Synthetic
guuguuguucgugauucuaaaa

SEQ ID NO: 429787 - RNA, 23 nt, Artificial Sequence
  Synthetic
uguuguuguucgugauucuaaaa

SEQ ID NO: 429788 - RNA, 24 nt, Artificial Sequence
  Synthetic
uuguuguuguucgugauucuaaaa

SEQ ID NO: 429789 - RNA, 18 nt, Artificial Sequence
  Synthetic
agauuuauauuucuaaaa

SEQ ID NO: 429790 - RNA, 19 nt, Artificial Sequence
  Synthetic
aagauuuauauuucuaaaa

SEQ ID NO: 429791 - RNA, 20 nt, Artificial Sequence
  Synthetic
aaagauuuauauuucuaaaa

SEQ ID NO: 429792 - RNA, 21 nt, Artificial Sequence
  Synthetic
aaaagauuuauauuucuaaaa

SEQ ID NO: 429793 - RNA, 22 nt, Artificial Sequence
  Synthetic
aaaaagauuuauauuucuaaaa

SEQ ID NO: 429794 - RNA, 23 nt, Artificial Sequence
  Synthetic
aaaaaagauuuauauuucuaaaa

SEQ ID NO: 429795 - RNA, 24 nt, Artificial Sequence
  Synthetic
uaaaaaagauuuauauuucuaaaa

SEQ ID NO: 429796 - RNA, 18 nt, Artificial Sequence
  Synthetic
ggaagucauuuucuaaaa

SEQ ID NO: 429797 - RNA, 19 nt, Artificial Sequence
  Synthetic
gggaagucauuuucuaaaa

SEQ ID NO: 429798 - RNA, 20 nt, Artificial Sequence
  Synthetic
ugggaagucauuuucuaaaa

SEQ ID NO: 429799 - RNA, 21 nt, Artificial Sequence
  Synthetic
uugggaagucauuuucuaaaa

SEQ ID NO: 429800 - RNA, 22 nt, Artificial Sequence
  Synthetic
uuugggaagucauuuucuaaaa

SEQ ID NO: 429801 - RNA, 23 nt, Artificial Sequence
  Synthetic
cuuugggaagucauuuucuaaaa

SEQ ID NO: 429802 - RNA, 24 nt, Artificial Sequence
  Synthetic
ucuuugggaagucauuuucuaaaa

SEQ ID NO: 429803 - RNA, 18 nt, Artificial Sequence
  Synthetic
caguccaaacaaguaaaa

SEQ ID NO: 429804 - RNA, 19 nt, Artificial Sequence
  Synthetic
ccaguccaaacaaguaaaa

SEQ ID NO: 429805 - RNA, 20 nt, Artificial Sequence
  Synthetic
gccaguccaaacaaguaaaa

SEQ ID NO: 429806 - RNA, 21 nt, Artificial Sequence
  Synthetic
agccaguccaaacaaguaaaa

SEQ ID NO: 429807 - RNA, 22 nt, Artificial Sequence
  Synthetic
aagccaguccaaacaaguaaaa

SEQ ID NO: 429808 - RNA, 23 nt, Artificial Sequence
  Synthetic
aaagccaguccaaacaaguaaaa

SEQ ID NO: 429809 - RNA, 24 nt, Artificial Sequence
  Synthetic
aaaagccaguccaaacaaguaaaa

SEQ ID NO: 429810 - RNA, 18 nt, Artificial Sequence
  Synthetic
ugaaagggagaaguaaaa

SEQ ID NO: 429811 - RNA, 19 nt, Artificial Sequence
  Synthetic
cugaaagggagaaguaaaa

SEQ ID NO: 429812 - RNA, 20 nt, Artificial Sequence
  Synthetic
ccugaaagggagaaguaaaa

SEQ ID NO: 429813 - RNA, 21 nt, Artificial Sequence
  Synthetic
uccugaaagggagaaguaaaa

SEQ ID NO: 429814 - RNA, 22 nt, Artificial Sequence
  Synthetic
auccugaaagggagaaguaaaa

SEQ ID NO: 429815 - RNA, 23 nt, Artificial Sequence
  Synthetic
cauccugaaagggagaaguaaaa

SEQ ID NO: 429816 - RNA, 24 nt, Artificial Sequence
  Synthetic
ccauccugaaagggagaaguaaaa

SEQ ID NO: 429817 - RNA, 18 nt, Artificial Sequence
  Synthetic
gcaucaucuucaguaaaa

SEQ ID NO: 429818 - RNA, 19 nt, Artificial Sequence
  Synthetic
ugcaucaucuucaguaaaa

SEQ ID NO: 429819 - RNA, 20 nt, Artificial Sequence
  Synthetic
augcaucaucuucaguaaaa

SEQ ID NO: 429820 - RNA, 21 nt, Artificial Sequence
  Synthetic
aaugcaucaucuucaguaaaa

SEQ ID NO: 429821 - RNA, 22 nt, Artificial Sequence
  Synthetic
gaaugcaucaucuucaguaaaa

SEQ ID NO: 429822 - RNA, 23 nt, Artificial Sequence
  Synthetic
agaaugcaucaucuucaguaaaa

SEQ ID NO: 429823 - RNA, 24 nt, Artificial Sequence
  Synthetic
cagaaugcaucaucuucaguaaaa

SEQ ID NO: 429824 - RNA, 18 nt, Artificial Sequence
  Synthetic
uuguauagaagaguaaaa

SEQ ID NO: 429825 - RNA, 19 nt, Artificial Sequence
  Synthetic
auuguauagaagaguaaaa

SEQ ID NO: 429826 - RNA, 20 nt, Artificial Sequence
  Synthetic
cauuguauagaagaguaaaa

SEQ ID NO: 429827 - RNA, 21 nt, Artificial Sequence
  Synthetic
ucauuguauagaagaguaaaa

SEQ ID NO: 429828 - RNA, 22 nt, Artificial Sequence
  Synthetic
cucauuguauagaagaguaaaa

SEQ ID NO: 429829 - RNA, 23 nt, Artificial Sequence
  Synthetic
acucauuguauagaagaguaaaa

SEQ ID NO: 429830 - RNA, 24 nt, Artificial Sequence
  Synthetic
uacucauuguauagaagaguaaaa

SEQ ID NO: 429831 - RNA, 18 nt, Artificial Sequence
  Synthetic
ugauaauguguaguaaaa

SEQ ID NO: 429832 - RNA, 19 nt, Artificial Sequence
  Synthetic
gugauaauguguaguaaaa

SEQ ID NO: 429833 - RNA, 20 nt, Artificial Sequence
  Synthetic
ggugauaauguguaguaaaa

SEQ ID NO: 429834 - RNA, 21 nt, Artificial Sequence
  Synthetic
uggugauaauguguaguaaaa

SEQ ID NO: 429835 - RNA, 22 nt, Artificial Sequence
  Synthetic
auggugauaauguguaguaaaa

SEQ ID NO: 429836 - RNA, 23 nt, Artificial Sequence
  Synthetic
aauggugauaauguguaguaaaa

SEQ ID NO: 429837 - RNA, 24 nt, Artificial Sequence
  Synthetic
uaauggugauaauguguaguaaaa

SEQ ID NO: 429838 - RNA, 18 nt, Artificial Sequence
  Synthetic
uccugaauuguaguaaaa

SEQ ID NO: 429839 - RNA, 19 nt, Artificial Sequence
  Synthetic
guccugaauuguaguaaaa

SEQ ID NO: 429840 - RNA, 20 nt, Artificial Sequence
  Synthetic
aguccugaauuguaguaaaa

SEQ ID NO: 429841 - RNA, 21 nt, Artificial Sequence
  Synthetic
caguccugaauuguaguaaaa

SEQ ID NO: 429842 - RNA, 22 nt, Artificial Sequence
  Synthetic
gcaguccugaauuguaguaaaa

SEQ ID NO: 429843 - RNA, 23 nt, Artificial Sequence
  Synthetic
ggcaguccugaauuguaguaaaa

SEQ ID NO: 429844 - RNA, 24 nt, Artificial Sequence
  Synthetic
uggcaguccugaauuguaguaaaa

SEQ ID NO: 429845 - RNA, 18 nt, Artificial Sequence
  Synthetic
gauccaucuuuaguaaaa

SEQ ID NO: 429846 - RNA, 19 nt, Artificial Sequence
  Synthetic
ugauccaucuuuaguaaaa

SEQ ID NO: 429847 - RNA, 20 nt, Artificial Sequence
  Synthetic
augauccaucuuuaguaaaa

SEQ ID NO: 429848 - RNA, 21 nt, Artificial Sequence
  Synthetic
gaugauccaucuuuaguaaaa

SEQ ID NO: 429849 - RNA, 22 nt, Artificial Sequence
  Synthetic
ugaugauccaucuuuaguaaaa

SEQ ID NO: 429850 - RNA, 23 nt, Artificial Sequence
  Synthetic
augaugauccaucuuuaguaaaa

SEQ ID NO: 429851 - RNA, 24 nt, Artificial Sequence
  Synthetic
uaugaugauccaucuuuaguaaaa

SEQ ID NO: 429852 - RNA, 18 nt, Artificial Sequence
  Synthetic
auucaaucugacguaaaa

SEQ ID NO: 429853 - RNA, 19 nt, Artificial Sequence
  Synthetic
cauucaaucugacguaaaa

SEQ ID NO: 429854 - RNA, 20 nt, Artificial Sequence
  Synthetic
ccauucaaucugacguaaaa

SEQ ID NO: 429855 - RNA, 21 nt, Artificial Sequence
  Synthetic
cccauucaaucugacguaaaa

SEQ ID NO: 429856 - RNA, 22 nt, Artificial Sequence
  Synthetic
ucccauucaaucugacguaaaa

SEQ ID NO: 429857 - RNA, 23 nt, Artificial Sequence
  Synthetic
uucccauucaaucugacguaaaa

SEQ ID NO: 429858 - RNA, 24 nt, Artificial Sequence
  Synthetic
auucccauucaaucugacguaaaa

SEQ ID NO: 429859 - RNA, 18 nt, Artificial Sequence
  Synthetic
gggagauuucagguaaaa

SEQ ID NO: 429860 - RNA, 19 nt, Artificial Sequence
  Synthetic
agggagauuucagguaaaa

SEQ ID NO: 429861 - RNA, 20 nt, Artificial Sequence
  Synthetic
gagggagauuucagguaaaa

SEQ ID NO: 429862 - RNA, 21 nt, Artificial Sequence
  Synthetic
agagggagauuucagguaaaa

SEQ ID NO: 429863 - RNA, 22 nt, Artificial Sequence
  Synthetic
aagagggagauuucagguaaaa

SEQ ID NO: 429864 - RNA, 23 nt, Artificial Sequence
  Synthetic
gaagagggagauuucagguaaaa

SEQ ID NO: 429865 - RNA, 24 nt, Artificial Sequence
  Synthetic
ugaagagggagauuucagguaaaa

SEQ ID NO: 429866 - RNA, 18 nt, Artificial Sequence
  Synthetic
aauacuuuuaggguaaaa

SEQ ID NO: 429867 - RNA, 19 nt, Artificial Sequence
  Synthetic
aaauacuuuuaggguaaaa

SEQ ID NO: 429868 - RNA, 20 nt, Artificial Sequence
  Synthetic
uaaauacuuuuaggguaaaa

SEQ ID NO: 429869 - RNA, 21 nt, Artificial Sequence
  Synthetic
auaaauacuuuuaggguaaaa

SEQ ID NO: 429870 - RNA, 22 nt, Artificial Sequence
  Synthetic
aauaaauacuuuuaggguaaaa

SEQ ID NO: 429871 - RNA, 23 nt, Artificial Sequence
  Synthetic
aaauaaauacuuuuaggguaaaa

SEQ ID NO: 429872 - RNA, 24 nt, Artificial Sequence
  Synthetic
aaaauaaauacuuuuaggguaaaa

SEQ ID NO: 429873 - RNA, 18 nt, Artificial Sequence
  Synthetic
ugagugauugugguaaaa

SEQ ID NO: 429874 - RNA, 19 nt, Artificial Sequence
  Synthetic
augagugauugugguaaaa

SEQ ID NO: 429875 - RNA, 20 nt, Artificial Sequence
  Synthetic
gaugagugauugugguaaaa

SEQ ID NO: 429876 - RNA, 21 nt, Artificial Sequence
  Synthetic
ggaugagugauugugguaaaa

SEQ ID NO: 429877 - RNA, 22 nt, Artificial Sequence
  Synthetic
uggaugagugauugugguaaaa

SEQ ID NO: 429878 - RNA, 23 nt, Artificial Sequence
  Synthetic
uuggaugagugauugugguaaaa

SEQ ID NO: 429879 - RNA, 24 nt, Artificial Sequence
  Synthetic
guuggaugagugauugugguaaaa

SEQ ID NO: 429880 - RNA, 18 nt, Artificial Sequence
  Synthetic
uuauaaaaauugguaaaa

SEQ ID NO: 429881 - RNA, 19 nt, Artificial Sequence
  Synthetic
auuauaaaaauugguaaaa

SEQ ID NO: 429882 - RNA, 20 nt, Artificial Sequence
  Synthetic
uauuauaaaaauugguaaaa

SEQ ID NO: 429883 - RNA, 21 nt, Artificial Sequence
  Synthetic
uuauuauaaaaauugguaaaa

SEQ ID NO: 429884 - RNA, 22 nt, Artificial Sequence
  Synthetic
guuauuauaaaaauugguaaaa

SEQ ID NO: 429885 - RNA, 23 nt, Artificial Sequence
  Synthetic
uguuauuauaaaaauugguaaaa

SEQ ID NO: 429886 - RNA, 24 nt, Artificial Sequence
  Synthetic
uuguuauuauaaaaauugguaaaa

SEQ ID NO: 429887 - RNA, 18 nt, Artificial Sequence
  Synthetic
uaaacuauuuugguaaaa

SEQ ID NO: 429888 - RNA, 19 nt, Artificial Sequence
  Synthetic
guaaacuauuuugguaaaa

SEQ ID NO: 429889 - RNA, 20 nt, Artificial Sequence
  Synthetic
aguaaacuauuuugguaaaa

SEQ ID NO: 429890 - RNA, 21 nt, Artificial Sequence
  Synthetic
caguaaacuauuuugguaaaa

SEQ ID NO: 429891 - RNA, 22 nt, Artificial Sequence
  Synthetic
acaguaaacuauuuugguaaaa

SEQ ID NO: 429892 - RNA, 23 nt, Artificial Sequence
  Synthetic
gacaguaaacuauuuugguaaaa

SEQ ID NO: 429893 - RNA, 24 nt, Artificial Sequence
  Synthetic
ugacaguaaacuauuuugguaaaa

SEQ ID NO: 429894 - RNA, 18 nt, Artificial Sequence
  Synthetic
auuuuaagaaauguaaaa

SEQ ID NO: 429895 - RNA, 19 nt, Artificial Sequence
  Synthetic
uauuuuaagaaauguaaaa

SEQ ID NO: 429896 - RNA, 20 nt, Artificial Sequence
  Synthetic
uuauuuuaagaaauguaaaa

SEQ ID NO: 429897 - RNA, 21 nt, Artificial Sequence
  Synthetic
auuauuuuaagaaauguaaaa

SEQ ID NO: 429898 - RNA, 22 nt, Artificial Sequence
  Synthetic
aauuauuuuaagaaauguaaaa

SEQ ID NO: 429899 - RNA, 23 nt, Artificial Sequence
  Synthetic
gaauuauuuuaagaaauguaaaa

SEQ ID NO: 429900 - RNA, 24 nt, Artificial Sequence
  Synthetic
agaauuauuuuaagaaauguaaaa

SEQ ID NO: 429901 - RNA, 18 nt, Artificial Sequence
  Synthetic
aauaaauuugauguaaaa

SEQ ID NO: 429902 - RNA, 19 nt, Artificial Sequence
  Synthetic
gaauaaauuugauguaaaa

SEQ ID NO: 429903 - RNA, 20 nt, Artificial Sequence
  Synthetic
ugaauaaauuugauguaaaa

SEQ ID NO: 429904 - RNA, 21 nt, Artificial Sequence
  Synthetic
uugaauaaauuugauguaaaa

SEQ ID NO: 429905 - RNA, 22 nt, Artificial Sequence
  Synthetic
auugaauaaauuugauguaaaa

SEQ ID NO: 429906 - RNA, 23 nt, Artificial Sequence
  Synthetic
gauugaauaaauuugauguaaaa

SEQ ID NO: 429907 - RNA, 24 nt, Artificial Sequence
  Synthetic
agauugaauaaauuugauguaaaa

SEQ ID NO: 429908 - RNA, 18 nt, Artificial Sequence
  Synthetic
caugccuaaacuguaaaa

SEQ ID NO: 429909 - RNA, 19 nt, Artificial Sequence
  Synthetic
ccaugccuaaacuguaaaa

SEQ ID NO: 429910 - RNA, 20 nt, Artificial Sequence
  Synthetic
cccaugccuaaacuguaaaa

SEQ ID NO: 429911 - RNA, 21 nt, Artificial Sequence
  Synthetic
acccaugccuaaacuguaaaa

SEQ ID NO: 429912 - RNA, 22 nt, Artificial Sequence
  Synthetic
uacccaugccuaaacuguaaaa

SEQ ID NO: 429913 - RNA, 23 nt, Artificial Sequence
  Synthetic
cuacccaugccuaaacuguaaaa

SEQ ID NO: 429914 - RNA, 24 nt, Artificial Sequence
  Synthetic
ccuacccaugccuaaacuguaaaa

SEQ ID NO: 429915 - RNA, 18 nt, Artificial Sequence
  Synthetic
uggaaaaauauuguaaaa

SEQ ID NO: 429916 - RNA, 19 nt, Artificial Sequence
  Synthetic
uuggaaaaauauuguaaaa

SEQ ID NO: 429917 - RNA, 20 nt, Artificial Sequence
  Synthetic
uuuggaaaaauauuguaaaa

SEQ ID NO: 429918 - RNA, 21 nt, Artificial Sequence
  Synthetic
uuuuggaaaaauauuguaaaa

SEQ ID NO: 429919 - RNA, 22 nt, Artificial Sequence
  Synthetic
uuuuuggaaaaauauuguaaaa

SEQ ID NO: 429920 - RNA, 23 nt, Artificial Sequence
  Synthetic
guuuuuggaaaaauauuguaaaa

SEQ ID NO: 429921 - RNA, 24 nt, Artificial Sequence
  Synthetic
gguuuuuggaaaaauauuguaaaa

SEQ ID NO: 429922 - RNA, 18 nt, Artificial Sequence
  Synthetic
auaagaguuauuguaaaa

SEQ ID NO: 429923 - RNA, 19 nt, Artificial Sequence
  Synthetic
uauaagaguuauuguaaaa

SEQ ID NO: 429924 - RNA, 20 nt, Artificial Sequence
  Synthetic
uuauaagaguuauuguaaaa

SEQ ID NO: 429925 - RNA, 21 nt, Artificial Sequence
  Synthetic
guuauaagaguuauuguaaaa

SEQ ID NO: 429926 - RNA, 22 nt, Artificial Sequence
  Synthetic
aguuauaagaguuauuguaaaa

SEQ ID NO: 429927 - RNA, 23 nt, Artificial Sequence
  Synthetic
caguuauaagaguuauuguaaaa

SEQ ID NO: 429928 - RNA, 24 nt, Artificial Sequence
  Synthetic
acaguuauaagaguuauuguaaaa

SEQ ID NO: 429929 - RNA, 18 nt, Artificial Sequence
  Synthetic
ucuuugagaaaauuaaaa

SEQ ID NO: 429930 - RNA, 19 nt, Artificial Sequence
  Synthetic
aucuuugagaaaauuaaaa

SEQ ID NO: 429931 - RNA, 20 nt, Artificial Sequence
  Synthetic
gaucuuugagaaaauuaaaa

SEQ ID NO: 429932 - RNA, 21 nt, Artificial Sequence
  Synthetic
ggaucuuugagaaaauuaaaa

SEQ ID NO: 429933 - RNA, 22 nt, Artificial Sequence
  Synthetic
aggaucuuugagaaaauuaaaa

SEQ ID NO: 429934 - RNA, 23 nt, Artificial Sequence
  Synthetic
gaggaucuuugagaaaauuaaaa

SEQ ID NO: 429935 - RNA, 24 nt, Artificial Sequence
  Synthetic
ugaggaucuuugagaaaauuaaaa

SEQ ID NO: 429936 - RNA, 18 nt, Artificial Sequence
  Synthetic
guuccaaccaaauuaaaa

SEQ ID NO: 429937 - RNA, 19 nt, Artificial Sequence
  Synthetic
uguuccaaccaaauuaaaa

SEQ ID NO: 429938 - RNA, 20 nt, Artificial Sequence
  Synthetic
guguuccaaccaaauuaaaa

SEQ ID NO: 429939 - RNA, 21 nt, Artificial Sequence
  Synthetic
uguguuccaaccaaauuaaaa

SEQ ID NO: 429940 - RNA, 22 nt, Artificial Sequence
  Synthetic
auguguuccaaccaaauuaaaa

SEQ ID NO: 429941 - RNA, 23 nt, Artificial Sequence
  Synthetic
cauguguuccaaccaaauuaaaa

SEQ ID NO: 429942 - RNA, 24 nt, Artificial Sequence
  Synthetic
ucauguguuccaaccaaauuaaaa

SEQ ID NO: 429943 - RNA, 18 nt, Artificial Sequence
  Synthetic
uauuaagcacaauuaaaa

SEQ ID NO: 429944 - RNA, 19 nt, Artificial Sequence
  Synthetic
guauuaagcacaauuaaaa

SEQ ID NO: 429945 - RNA, 20 nt, Artificial Sequence
  Synthetic
uguauuaagcacaauuaaaa

SEQ ID NO: 429946 - RNA, 21 nt, Artificial Sequence
  Synthetic
auguauuaagcacaauuaaaa

SEQ ID NO: 429947 - RNA, 22 nt, Artificial Sequence
  Synthetic
uauguauuaagcacaauuaaaa

SEQ ID NO: 429948 - RNA, 23 nt, Artificial Sequence
  Synthetic
auauguauuaagcacaauuaaaa

SEQ ID NO: 429949 - RNA, 24 nt, Artificial Sequence
  Synthetic
aauauguauuaagcacaauuaaaa

SEQ ID NO: 429950 - RNA, 18 nt, Artificial Sequence
  Synthetic
agaaccacagaauuaaaa

SEQ ID NO: 429951 - RNA, 19 nt, Artificial Sequence
  Synthetic
aagaaccacagaauuaaaa

SEQ ID NO: 429952 - RNA, 20 nt, Artificial Sequence
  Synthetic
aaagaaccacagaauuaaaa

SEQ ID NO: 429953 - RNA, 21 nt, Artificial Sequence
  Synthetic
uaaagaaccacagaauuaaaa

SEQ ID NO: 429954 - RNA, 22 nt, Artificial Sequence
  Synthetic
uuaaagaaccacagaauuaaaa

SEQ ID NO: 429955 - RNA, 23 nt, Artificial Sequence
  Synthetic
auuaaagaaccacagaauuaaaa

SEQ ID NO: 429956 - RNA, 24 nt, Artificial Sequence
  Synthetic
aauuaaagaaccacagaauuaaaa

SEQ ID NO: 429957 - RNA, 18 nt, Artificial Sequence
  Synthetic
uugcauaaauaauuaaaa

SEQ ID NO: 429958 - RNA, 19 nt, Artificial Sequence
  Synthetic
cuugcauaaauaauuaaaa

SEQ ID NO: 429959 - RNA, 20 nt, Artificial Sequence
  Synthetic
ucuugcauaaauaauuaaaa

SEQ ID NO: 429960 - RNA, 21 nt, Artificial Sequence
  Synthetic
cucuugcauaaauaauuaaaa

SEQ ID NO: 429961 - RNA, 22 nt, Artificial Sequence
  Synthetic
ucucuugcauaaauaauuaaaa

SEQ ID NO: 429962 - RNA, 23 nt, Artificial Sequence
  Synthetic
uucucuugcauaaauaauuaaaa

SEQ ID NO: 429963 - RNA, 24 nt, Artificial Sequence
  Synthetic
uuucucuugcauaaauaauuaaaa

SEQ ID NO: 429964 - RNA, 18 nt, Artificial Sequence
  Synthetic
auuucucaauaauuaaaa

SEQ ID NO: 429965 - RNA, 19 nt, Artificial Sequence
  Synthetic
uauuucucaauaauuaaaa

SEQ ID NO: 429966 - RNA, 20 nt, Artificial Sequence
  Synthetic
auauuucucaauaauuaaaa

SEQ ID NO: 429967 - RNA, 21 nt, Artificial Sequence
  Synthetic
uauauuucucaauaauuaaaa

SEQ ID NO: 429968 - RNA, 22 nt, Artificial Sequence
  Synthetic
uuauauuucucaauaauuaaaa

SEQ ID NO: 429969 - RNA, 23 nt, Artificial Sequence
  Synthetic
uuuauauuucucaauaauuaaaa

SEQ ID NO: 429970 - RNA, 24 nt, Artificial Sequence
  Synthetic
uuuuauauuucucaauaauuaaaa

SEQ ID NO: 429971 - RNA, 18 nt, Artificial Sequence
  Synthetic
gaauuugcuuaauuaaaa

SEQ ID NO: 429972 - RNA, 19 nt, Artificial Sequence
  Synthetic
agaauuugcuuaauuaaaa

SEQ ID NO: 429973 - RNA, 20 nt, Artificial Sequence
  Synthetic
cagaauuugcuuaauuaaaa

SEQ ID NO: 429974 - RNA, 21 nt, Artificial Sequence
  Synthetic
acagaauuugcuuaauuaaaa

SEQ ID NO: 429975 - RNA, 22 nt, Artificial Sequence
  Synthetic
gacagaauuugcuuaauuaaaa

SEQ ID NO: 429976 - RNA, 23 nt, Artificial Sequence
  Synthetic
ugacagaauuugcuuaauuaaaa

SEQ ID NO: 429977 - RNA, 24 nt, Artificial Sequence
  Synthetic
cugacagaauuugcuuaauuaaaa

SEQ ID NO: 429978 - RNA, 18 nt, Artificial Sequence
  Synthetic
gggagguucccauuaaaa

SEQ ID NO: 429979 - RNA, 19 nt, Artificial Sequence
  Synthetic
ugggagguucccauuaaaa

SEQ ID NO: 429980 - RNA, 20 nt, Artificial Sequence
  Synthetic
uugggagguucccauuaaaa

SEQ ID NO: 429981 - RNA, 21 nt, Artificial Sequence
  Synthetic
auugggagguucccauuaaaa

SEQ ID NO: 429982 - RNA, 22 nt, Artificial Sequence
  Synthetic
uauugggagguucccauuaaaa

SEQ ID NO: 429983 - RNA, 23 nt, Artificial Sequence
  Synthetic
uuauugggagguucccauuaaaa

SEQ ID NO: 429984 - RNA, 24 nt, Artificial Sequence
  Synthetic
auuauugggagguucccauuaaaa

SEQ ID NO: 429985 - RNA, 18 nt, Artificial Sequence
  Synthetic
cagacugacucauuaaaa

SEQ ID NO: 429986 - RNA, 19 nt, Artificial Sequence
  Synthetic
acagacugacucauuaaaa

SEQ ID NO: 429987 - RNA, 20 nt, Artificial Sequence
  Synthetic
gacagacugacucauuaaaa

SEQ ID NO: 429988 - RNA, 21 nt, Artificial Sequence
  Synthetic
agacagacugacucauuaaaa

SEQ ID NO: 429989 - RNA, 22 nt, Artificial Sequence
  Synthetic
gagacagacugacucauuaaaa

SEQ ID NO: 429990 - RNA, 23 nt, Artificial Sequence
  Synthetic
agagacagacugacucauuaaaa

SEQ ID NO: 429991 - RNA, 24 nt, Artificial Sequence
  Synthetic
gagagacagacugacucauuaaaa

SEQ ID NO: 429992 - RNA, 18 nt, Artificial Sequence
  Synthetic
auugucguuucauuaaaa

SEQ ID NO: 429993 - RNA, 19 nt, Artificial Sequence
  Synthetic
cauugucguuucauuaaaa

SEQ ID NO: 429994 - RNA, 20 nt, Artificial Sequence
  Synthetic
acauugucguuucauuaaaa

SEQ ID NO: 429995 - RNA, 21 nt, Artificial Sequence
  Synthetic
aacauugucguuucauuaaaa

SEQ ID NO: 429996 - RNA, 22 nt, Artificial Sequence
  Synthetic
aaacauugucguuucauuaaaa

SEQ ID NO: 429997 - RNA, 23 nt, Artificial Sequence
  Synthetic
uaaacauugucguuucauuaaaa

SEQ ID NO: 429998 - RNA, 24 nt, Artificial Sequence
  Synthetic
uuaaacauugucguuucauuaaaa

SEQ ID NO: 429999 - RNA, 18 nt, Artificial Sequence
  Synthetic
aaugauaagagauuaaaa

SEQ ID NO: 430000 - RNA, 19 nt, Artificial Sequence
  Synthetic
aaaugauaagagauuaaaa

SEQ ID NO: 430001 - RNA, 20 nt, Artificial Sequence
  Synthetic
uaaaugauaagagauuaaaa

SEQ ID NO: 430002 - RNA, 21 nt, Artificial Sequence
  Synthetic
cuaaaugauaagagauuaaaa

SEQ ID NO: 430003 - RNA, 22 nt, Artificial Sequence
  Synthetic
ucuaaaugauaagagauuaaaa

SEQ ID NO: 430004 - RNA, 23 nt, Artificial Sequence
  Synthetic
cucuaaaugauaagagauuaaaa

SEQ ID NO: 430005 - RNA, 24 nt, Artificial Sequence
  Synthetic
ucucuaaaugauaagagauuaaaa

SEQ ID NO: 430006 - RNA, 18 nt, Artificial Sequence
  Synthetic
gaagauggaggauuaaaa

SEQ ID NO: 430007 - RNA, 19 nt, Artificial Sequence
  Synthetic
ugaagauggaggauuaaaa

SEQ ID NO: 430008 - RNA, 20 nt, Artificial Sequence
  Synthetic
cugaagauggaggauuaaaa

SEQ ID NO: 430009 - RNA, 21 nt, Artificial Sequence
  Synthetic
gcugaagauggaggauuaaaa

SEQ ID NO: 430010 - RNA, 22 nt, Artificial Sequence
  Synthetic
agcugaagauggaggauuaaaa

SEQ ID NO: 430011 - RNA, 23 nt, Artificial Sequence
  Synthetic
gagcugaagauggaggauuaaaa

SEQ ID NO: 430012 - RNA, 24 nt, Artificial Sequence
  Synthetic
ugagcugaagauggaggauuaaaa

SEQ ID NO: 430013 - RNA, 18 nt, Artificial Sequence
  Synthetic
agaucgcggauauuaaaa

SEQ ID NO: 430014 - RNA, 19 nt, Artificial Sequence
  Synthetic
aagaucgcggauauuaaaa

SEQ ID NO: 430015 - RNA, 20 nt, Artificial Sequence
  Synthetic
aaagaucgcggauauuaaaa

SEQ ID NO: 430016 - RNA, 21 nt, Artificial Sequence
  Synthetic
caaagaucgcggauauuaaaa

SEQ ID NO: 430017 - RNA, 22 nt, Artificial Sequence
  Synthetic
acaaagaucgcggauauuaaaa

SEQ ID NO: 430018 - RNA, 23 nt, Artificial Sequence
  Synthetic
uacaaagaucgcggauauuaaaa

SEQ ID NO: 430019 - RNA, 24 nt, Artificial Sequence
  Synthetic
auacaaagaucgcggauauuaaaa

SEQ ID NO: 430020 - RNA, 18 nt, Artificial Sequence
  Synthetic
uugagaguacuauuaaaa

SEQ ID NO: 430021 - RNA, 19 nt, Artificial Sequence
  Synthetic
guugagaguacuauuaaaa

SEQ ID NO: 430022 - RNA, 20 nt, Artificial Sequence
  Synthetic
gguugagaguacuauuaaaa

SEQ ID NO: 430023 - RNA, 21 nt, Artificial Sequence
  Synthetic
ggguugagaguacuauuaaaa

SEQ ID NO: 430024 - RNA, 22 nt, Artificial Sequence
  Synthetic
uggguugagaguacuauuaaaa

SEQ ID NO: 430025 - RNA, 23 nt, Artificial Sequence
  Synthetic
cuggguugagaguacuauuaaaa

SEQ ID NO: 430026 - RNA, 24 nt, Artificial Sequence
  Synthetic
ucuggguugagaguacuauuaaaa

SEQ ID NO: 430027 - RNA, 18 nt, Artificial Sequence
  Synthetic
cacauggucuuauuaaaa

SEQ ID NO: 430028 - RNA, 19 nt, Artificial Sequence
  Synthetic
acacauggucuuauuaaaa

SEQ ID NO: 430029 - RNA, 20 nt, Artificial Sequence
  Synthetic
uacacauggucuuauuaaaa

SEQ ID NO: 430030 - RNA, 21 nt, Artificial Sequence
  Synthetic
auacacauggucuuauuaaaa

SEQ ID NO: 430031 - RNA, 22 nt, Artificial Sequence
  Synthetic
uauacacauggucuuauuaaaa

SEQ ID NO: 430032 - RNA, 23 nt, Artificial Sequence
  Synthetic
auauacacauggucuuauuaaaa

SEQ ID NO: 430033 - RNA, 24 nt, Artificial Sequence
  Synthetic
cauauacacauggucuuauuaaaa

SEQ ID NO: 430034 - RNA, 18 nt, Artificial Sequence
  Synthetic
uuuuaccuguuauuaaaa

SEQ ID NO: 430035 - RNA, 19 nt, Artificial Sequence
  Synthetic
cuuuuaccuguuauuaaaa

SEQ ID NO: 430036 - RNA, 20 nt, Artificial Sequence
  Synthetic
ucuuuuaccuguuauuaaaa

SEQ ID NO: 430037 - RNA, 21 nt, Artificial Sequence
  Synthetic
uucuuuuaccuguuauuaaaa

SEQ ID NO: 430038 - RNA, 22 nt, Artificial Sequence
  Synthetic
guucuuuuaccuguuauuaaaa

SEQ ID NO: 430039 - RNA, 23 nt, Artificial Sequence
  Synthetic
aguucuuuuaccuguuauuaaaa

SEQ ID NO: 430040 - RNA, 24 nt, Artificial Sequence
  Synthetic
uaguucuuuuaccuguuauuaaaa

SEQ ID NO: 430041 - RNA, 18 nt, Artificial Sequence
  Synthetic
aacaugaaaaacuuaaaa

SEQ ID NO: 430042 - RNA, 19 nt, Artificial Sequence
  Synthetic
gaacaugaaaaacuuaaaa

SEQ ID NO: 430043 - RNA, 20 nt, Artificial Sequence
  Synthetic
ugaacaugaaaaacuuaaaa

SEQ ID NO: 430044 - RNA, 21 nt, Artificial Sequence
  Synthetic
augaacaugaaaaacuuaaaa

SEQ ID NO: 430045 - RNA, 22 nt, Artificial Sequence
  Synthetic
aaugaacaugaaaaacuuaaaa

SEQ ID NO: 430046 - RNA, 23 nt, Artificial Sequence
  Synthetic
caaugaacaugaaaaacuuaaaa

SEQ ID NO: 430047 - RNA, 24 nt, Artificial Sequence
  Synthetic
acaaugaacaugaaaaacuuaaaa

SEQ ID NO: 430048 - RNA, 18 nt, Artificial Sequence
  Synthetic
guaccccugaacuuaaaa

SEQ ID NO: 430049 - RNA, 19 nt, Artificial Sequence
  Synthetic
uguaccccugaacuuaaaa

SEQ ID NO: 430050 - RNA, 20 nt, Artificial Sequence
  Synthetic
auguaccccugaacuuaaaa

SEQ ID NO: 430051 - RNA, 21 nt, Artificial Sequence
  Synthetic
cauguaccccugaacuuaaaa

SEQ ID NO: 430052 - RNA, 22 nt, Artificial Sequence
  Synthetic
acauguaccccugaacuuaaaa

SEQ ID NO: 430053 - RNA, 23 nt, Artificial Sequence
  Synthetic
cacauguaccccugaacuuaaaa

SEQ ID NO: 430054 - RNA, 24 nt, Artificial Sequence
  Synthetic
gcacauguaccccugaacuuaaaa

SEQ ID NO: 430055 - RNA, 18 nt, Artificial Sequence
  Synthetic
ugcucaguuaacuuaaaa

SEQ ID NO: 430056 - RNA, 19 nt, Artificial Sequence
  Synthetic
augcucaguuaacuuaaaa

SEQ ID NO: 430057 - RNA, 20 nt, Artificial Sequence
  Synthetic
aaugcucaguuaacuuaaaa

SEQ ID NO: 430058 - RNA, 21 nt, Artificial Sequence
  Synthetic
caaugcucaguuaacuuaaaa

SEQ ID NO: 430059 - RNA, 22 nt, Artificial Sequence
  Synthetic
gcaaugcucaguuaacuuaaaa

SEQ ID NO: 430060 - RNA, 23 nt, Artificial Sequence
  Synthetic
agcaaugcucaguuaacuuaaaa

SEQ ID NO: 430061 - RNA, 24 nt, Artificial Sequence
  Synthetic
aagcaaugcucaguuaacuuaaaa

SEQ ID NO: 430062 - RNA, 18 nt, Artificial Sequence
  Synthetic
uuguuuuuuaacuuaaaa

SEQ ID NO: 430063 - RNA, 19 nt, Artificial Sequence
  Synthetic
uuuguuuuuuaacuuaaaa

SEQ ID NO: 430064 - RNA, 20 nt, Artificial Sequence
  Synthetic
uuuuguuuuuuaacuuaaaa

SEQ ID NO: 430065 - RNA, 21 nt, Artificial Sequence
  Synthetic
guuuuguuuuuuaacuuaaaa

SEQ ID NO: 430066 - RNA, 22 nt, Artificial Sequence
  Synthetic
uguuuuguuuuuuaacuuaaaa

SEQ ID NO: 430067 - RNA, 23 nt, Artificial Sequence
  Synthetic
uuguuuuguuuuuuaacuuaaaa

SEQ ID NO: 430068 - RNA, 24 nt, Artificial Sequence
  Synthetic
uuuguuuuguuuuuuaacuuaaaa

SEQ ID NO: 430069 - RNA, 18 nt, Artificial Sequence
  Synthetic
aaucuacagaccuuaaaa

SEQ ID NO: 430070 - RNA, 19 nt, Artificial Sequence
  Synthetic
gaaucuacagaccuuaaaa

SEQ ID NO: 430071 - RNA, 20 nt, Artificial Sequence
  Synthetic
agaaucuacagaccuuaaaa

SEQ ID NO: 430072 - RNA, 21 nt, Artificial Sequence
  Synthetic
cagaaucuacagaccuuaaaa

SEQ ID NO: 430073 - RNA, 22 nt, Artificial Sequence
  Synthetic
gcagaaucuacagaccuuaaaa

SEQ ID NO: 430074 - RNA, 23 nt, Artificial Sequence
  Synthetic
ggcagaaucuacagaccuuaaaa

SEQ ID NO: 430075 - RNA, 24 nt, Artificial Sequence
  Synthetic
aggcagaaucuacagaccuuaaaa

SEQ ID NO: 430076 - RNA, 18 nt, Artificial Sequence
  Synthetic
cauguauuuaccuuaaaa

SEQ ID NO: 430077 - RNA, 19 nt, Artificial Sequence
  Synthetic
ucauguauuuaccuuaaaa

SEQ ID NO: 430078 - RNA, 20 nt, Artificial Sequence
  Synthetic
uucauguauuuaccuuaaaa

SEQ ID NO: 430079 - RNA, 21 nt, Artificial Sequence
  Synthetic
uuucauguauuuaccuuaaaa

SEQ ID NO: 430080 - RNA, 22 nt, Artificial Sequence
  Synthetic
uuuucauguauuuaccuuaaaa

SEQ ID NO: 430081 - RNA, 23 nt, Artificial Sequence
  Synthetic
uuuuucauguauuuaccuuaaaa

SEQ ID NO: 430082 - RNA, 24 nt, Artificial Sequence
  Synthetic
auuuuucauguauuuaccuuaaaa

SEQ ID NO: 430083 - RNA, 18 nt, Artificial Sequence
  Synthetic
agguaucgagccuuaaaa

SEQ ID NO: 430084 - RNA, 19 nt, Artificial Sequence
  Synthetic
gagguaucgagccuuaaaa

SEQ ID NO: 430085 - RNA, 20 nt, Artificial Sequence
  Synthetic
agagguaucgagccuuaaaa

SEQ ID NO: 430086 - RNA, 21 nt, Artificial Sequence
  Synthetic
aagagguaucgagccuuaaaa

SEQ ID NO: 430087 - RNA, 22 nt, Artificial Sequence
  Synthetic
caagagguaucgagccuuaaaa

SEQ ID NO: 430088 - RNA, 23 nt, Artificial Sequence
  Synthetic
gcaagagguaucgagccuuaaaa

SEQ ID NO: 430089 - RNA, 24 nt, Artificial Sequence
  Synthetic
ggcaagagguaucgagccuuaaaa

SEQ ID NO: 430090 - RNA, 18 nt, Artificial Sequence
  Synthetic
augacucuguccuuaaaa

SEQ ID NO: 430091 - RNA, 19 nt, Artificial Sequence
  Synthetic
uaugacucuguccuuaaaa

SEQ ID NO: 430092 - RNA, 20 nt, Artificial Sequence
  Synthetic
auaugacucuguccuuaaaa

SEQ ID NO: 430093 - RNA, 21 nt, Artificial Sequence
  Synthetic
aauaugacucuguccuuaaaa

SEQ ID NO: 430094 - RNA, 22 nt, Artificial Sequence
  Synthetic
caauaugacucuguccuuaaaa

SEQ ID NO: 430095 - RNA, 23 nt, Artificial Sequence
  Synthetic
ccaauaugacucuguccuuaaaa

SEQ ID NO: 430096 - RNA, 24 nt, Artificial Sequence
  Synthetic
uccaauaugacucuguccuuaaaa

SEQ ID NO: 430097 - RNA, 18 nt, Artificial Sequence
  Synthetic
agcagcaacagcuuaaaa

SEQ ID NO: 430098 - RNA, 19 nt, Artificial Sequence
  Synthetic
aagcagcaacagcuuaaaa

SEQ ID NO: 430099 - RNA, 20 nt, Artificial Sequence
  Synthetic
aaagcagcaacagcuuaaaa

SEQ ID NO: 430100 - RNA, 21 nt, Artificial Sequence
  Synthetic
uaaagcagcaacagcuuaaaa

SEQ ID NO: 430101 - RNA, 22 nt, Artificial Sequence
  Synthetic
uuaaagcagcaacagcuuaaaa

SEQ ID NO: 430102 - RNA, 23 nt, Artificial Sequence
  Synthetic
cuuaaagcagcaacagcuuaaaa

SEQ ID NO: 430103 - RNA, 24 nt, Artificial Sequence
  Synthetic
gcuuaaagcagcaacagcuuaaaa

SEQ ID NO: 430104 - RNA, 18 nt, Artificial Sequence
  Synthetic
acaaacacuagcuuaaaa

SEQ ID NO: 430105 - RNA, 19 nt, Artificial Sequence
  Synthetic
aacaaacacuagcuuaaaa

SEQ ID NO: 430106 - RNA, 20 nt, Artificial Sequence
  Synthetic
gaacaaacacuagcuuaaaa

SEQ ID NO: 430107 - RNA, 21 nt, Artificial Sequence
  Synthetic
agaacaaacacuagcuuaaaa

SEQ ID NO: 430108 - RNA, 22 nt, Artificial Sequence
  Synthetic
aagaacaaacacuagcuuaaaa

SEQ ID NO: 430109 - RNA, 23 nt, Artificial Sequence
  Synthetic
caagaacaaacacuagcuuaaaa

SEQ ID NO: 430110 - RNA, 24 nt, Artificial Sequence
  Synthetic
acaagaacaaacacuagcuuaaaa

SEQ ID NO: 430111 - RNA, 18 nt, Artificial Sequence
  Synthetic
gcauguucucgcuuaaaa

SEQ ID NO: 430112 - RNA, 19 nt, Artificial Sequence
  Synthetic
ugcauguucucgcuuaaaa

SEQ ID NO: 430113 - RNA, 20 nt, Artificial Sequence
  Synthetic
cugcauguucucgcuuaaaa

SEQ ID NO: 430114 - RNA, 21 nt, Artificial Sequence
  Synthetic
acugcauguucucgcuuaaaa

SEQ ID NO: 430115 - RNA, 22 nt, Artificial Sequence
  Synthetic
uacugcauguucucgcuuaaaa

SEQ ID NO: 430116 - RNA, 23 nt, Artificial Sequence
  Synthetic
guacugcauguucucgcuuaaaa

SEQ ID NO: 430117 - RNA, 24 nt, Artificial Sequence
  Synthetic
aguacugcauguucucgcuuaaaa

SEQ ID NO: 430118 - RNA, 18 nt, Artificial Sequence
  Synthetic
aguagaucuaucuuaaaa

SEQ ID NO: 430119 - RNA, 19 nt, Artificial Sequence
  Synthetic
gaguagaucuaucuuaaaa

SEQ ID NO: 430120 - RNA, 20 nt, Artificial Sequence
  Synthetic
ggaguagaucuaucuuaaaa

SEQ ID NO: 430121 - RNA, 21 nt, Artificial Sequence
  Synthetic
gggaguagaucuaucuuaaaa

SEQ ID NO: 430122 - RNA, 22 nt, Artificial Sequence
  Synthetic
ggggaguagaucuaucuuaaaa

SEQ ID NO: 430123 - RNA, 23 nt, Artificial Sequence
  Synthetic
uggggaguagaucuaucuuaaaa

SEQ ID NO: 430124 - RNA, 24 nt, Artificial Sequence
  Synthetic
uuggggaguagaucuaucuuaaaa

SEQ ID NO: 430125 - RNA, 18 nt, Artificial Sequence
  Synthetic
cuugauugucucuuaaaa

SEQ ID NO: 430126 - RNA, 19 nt, Artificial Sequence
  Synthetic
ccuugauugucucuuaaaa

SEQ ID NO: 430127 - RNA, 20 nt, Artificial Sequence
  Synthetic
uccuugauugucucuuaaaa

SEQ ID NO: 430128 - RNA, 21 nt, Artificial Sequence
  Synthetic
auccuugauugucucuuaaaa

SEQ ID NO: 430129 - RNA, 22 nt, Artificial Sequence
  Synthetic
aauccuugauugucucuuaaaa

SEQ ID NO: 430130 - RNA, 23 nt, Artificial Sequence
  Synthetic
aaauccuugauugucucuuaaaa

SEQ ID NO: 430131 - RNA, 24 nt, Artificial Sequence
  Synthetic
gaaauccuugauugucucuuaaaa

SEQ ID NO: 430132 - RNA, 18 nt, Artificial Sequence
  Synthetic
aggaaugauuucuuaaaa

SEQ ID NO: 430133 - RNA, 19 nt, Artificial Sequence
  Synthetic
aaggaaugauuucuuaaaa

SEQ ID NO: 430134 - RNA, 20 nt, Artificial Sequence
  Synthetic
uaaggaaugauuucuuaaaa

SEQ ID NO: 430135 - RNA, 21 nt, Artificial Sequence
  Synthetic
auaaggaaugauuucuuaaaa

SEQ ID NO: 430136 - RNA, 22 nt, Artificial Sequence
  Synthetic
uauaaggaaugauuucuuaaaa

SEQ ID NO: 430137 - RNA, 23 nt, Artificial Sequence
  Synthetic
cuauaaggaaugauuucuuaaaa

SEQ ID NO: 430138 - RNA, 24 nt, Artificial Sequence
  Synthetic
ucuauaaggaaugauuucuuaaaa

SEQ ID NO: 430139 - RNA, 18 nt, Artificial Sequence
  Synthetic
aaugauuuuuucuuaaaa

SEQ ID NO: 430140 - RNA, 19 nt, Artificial Sequence
  Synthetic
aaaugauuuuuucuuaaaa

SEQ ID NO: 430141 - RNA, 20 nt, Artificial Sequence
  Synthetic
aaaaugauuuuuucuuaaaa

SEQ ID NO: 430142 - RNA, 21 nt, Artificial Sequence
  Synthetic
gaaaaugauuuuuucuuaaaa

SEQ ID NO: 430143 - RNA, 22 nt, Artificial Sequence
  Synthetic
ugaaaaugauuuuuucuuaaaa

SEQ ID NO: 430144 - RNA, 23 nt, Artificial Sequence
  Synthetic
augaaaaugauuuuuucuuaaaa

SEQ ID NO: 430145 - RNA, 24 nt, Artificial Sequence
  Synthetic
caugaaaaugauuuuuucuuaaaa

SEQ ID NO: 430146 - RNA, 18 nt, Artificial Sequence
  Synthetic
gaaacauuacaguuaaaa

SEQ ID NO: 430147 - RNA, 19 nt, Artificial Sequence
  Synthetic
ggaaacauuacaguuaaaa

SEQ ID NO: 430148 - RNA, 20 nt, Artificial Sequence
  Synthetic
uggaaacauuacaguuaaaa

SEQ ID NO: 430149 - RNA, 21 nt, Artificial Sequence
  Synthetic
auggaaacauuacaguuaaaa

SEQ ID NO: 430150 - RNA, 22 nt, Artificial Sequence
  Synthetic
gauggaaacauuacaguuaaaa

SEQ ID NO: 430151 - RNA, 23 nt, Artificial Sequence
  Synthetic
ugauggaaacauuacaguuaaaa

SEQ ID NO: 430152 - RNA, 24 nt, Artificial Sequence
  Synthetic
uugauggaaacauuacaguuaaaa

SEQ ID NO: 430153 - RNA, 18 nt, Artificial Sequence
  Synthetic
aaaggacauugguuaaaa

SEQ ID NO: 430154 - RNA, 19 nt, Artificial Sequence
  Synthetic
aaaaggacauugguuaaaa

SEQ ID NO: 430155 - RNA, 20 nt, Artificial Sequence
  Synthetic
aaaaaggacauugguuaaaa

SEQ ID NO: 430156 - RNA, 21 nt, Artificial Sequence
  Synthetic
uaaaaaggacauugguuaaaa

SEQ ID NO: 430157 - RNA, 22 nt, Artificial Sequence
  Synthetic
uuaaaaaggacauugguuaaaa

SEQ ID NO: 430158 - RNA, 23 nt, Artificial Sequence
  Synthetic
auuaaaaaggacauugguuaaaa

SEQ ID NO: 430159 - RNA, 24 nt, Artificial Sequence
  Synthetic
gauuaaaaaggacauugguuaaaa

SEQ ID NO: 430160 - RNA, 18 nt, Artificial Sequence
  Synthetic
ccuuuaaagauguuaaaa

SEQ ID NO: 430161 - RNA, 19 nt, Artificial Sequence
  Synthetic
accuuuaaagauguuaaaa

SEQ ID NO: 430162 - RNA, 20 nt, Artificial Sequence
  Synthetic
uaccuuuaaagauguuaaaa

SEQ ID NO: 430163 - RNA, 21 nt, Artificial Sequence
  Synthetic
auaccuuuaaagauguuaaaa

SEQ ID NO: 430164 - RNA, 22 nt, Artificial Sequence
  Synthetic
gauaccuuuaaagauguuaaaa

SEQ ID NO: 430165 - RNA, 23 nt, Artificial Sequence
  Synthetic
ugauaccuuuaaagauguuaaaa

SEQ ID NO: 430166 - RNA, 24 nt, Artificial Sequence
  Synthetic
uugauaccuuuaaagauguuaaaa

SEQ ID NO: 430167 - RNA, 18 nt, Artificial Sequence
  Synthetic
auaauuccauuguuaaaa

SEQ ID NO: 430168 - RNA, 19 nt, Artificial Sequence
  Synthetic
uauaauuccauuguuaaaa

SEQ ID NO: 430169 - RNA, 20 nt, Artificial Sequence
  Synthetic
auauaauuccauuguuaaaa

SEQ ID NO: 430170 - RNA, 21 nt, Artificial Sequence
  Synthetic
gauauaauuccauuguuaaaa

SEQ ID NO: 430171 - RNA, 22 nt, Artificial Sequence
  Synthetic
ugauauaauuccauuguuaaaa

SEQ ID NO: 430172 - RNA, 23 nt, Artificial Sequence
  Synthetic
augauauaauuccauuguuaaaa

SEQ ID NO: 430173 - RNA, 24 nt, Artificial Sequence
  Synthetic
gaugauauaauuccauuguuaaaa

SEQ ID NO: 430174 - RNA, 18 nt, Artificial Sequence
  Synthetic
cucuuucauuuguuaaaa

SEQ ID NO: 430175 - RNA, 19 nt, Artificial Sequence
  Synthetic
acucuuucauuuguuaaaa

SEQ ID NO: 430176 - RNA, 20 nt, Artificial Sequence
  Synthetic
uacucuuucauuuguuaaaa

SEQ ID NO: 430177 - RNA, 21 nt, Artificial Sequence
  Synthetic
uuacucuuucauuuguuaaaa

SEQ ID NO: 430178 - RNA, 22 nt, Artificial Sequence
  Synthetic
uuuacucuuucauuuguuaaaa

SEQ ID NO: 430179 - RNA, 23 nt, Artificial Sequence
  Synthetic
cuuuacucuuucauuuguuaaaa

SEQ ID NO: 430180 - RNA, 24 nt, Artificial Sequence
  Synthetic
ccuuuacucuuucauuuguuaaaa

SEQ ID NO: 430181 - RNA, 18 nt, Artificial Sequence
  Synthetic
gauuuaaaaaauuuaaaa

SEQ ID NO: 430182 - RNA, 19 nt, Artificial Sequence
  Synthetic
ugauuuaaaaaauuuaaaa

SEQ ID NO: 430183 - RNA, 20 nt, Artificial Sequence
  Synthetic
uugauuuaaaaaauuuaaaa

SEQ ID NO: 430184 - RNA, 21 nt, Artificial Sequence
  Synthetic
uuugauuuaaaaaauuuaaaa

SEQ ID NO: 430185 - RNA, 22 nt, Artificial Sequence
  Synthetic
auuugauuuaaaaaauuuaaaa

SEQ ID NO: 430186 - RNA, 23 nt, Artificial Sequence
  Synthetic
uauuugauuuaaaaaauuuaaaa

SEQ ID NO: 430187 - RNA, 24 nt, Artificial Sequence
  Synthetic
auauuugauuuaaaaaauuuaaaa

SEQ ID NO: 430188 - RNA, 18 nt, Artificial Sequence
  Synthetic
uuuuuuauuaauuuaaaa

SEQ ID NO: 430189 - RNA, 19 nt, Artificial Sequence
  Synthetic
uuuuuuuauuaauuuaaaa

SEQ ID NO: 430190 - RNA, 20 nt, Artificial Sequence
  Synthetic
uuuuuuuuauuaauuuaaaa

SEQ ID NO: 430191 - RNA, 21 nt, Artificial Sequence
  Synthetic
auuuuuuuuauuaauuuaaaa

SEQ ID NO: 430192 - RNA, 22 nt, Artificial Sequence
  Synthetic
aauuuuuuuuauuaauuuaaaa

SEQ ID NO: 430193 - RNA, 23 nt, Artificial Sequence
  Synthetic
aaauuuuuuuuauuaauuuaaaa

SEQ ID NO: 430194 - RNA, 24 nt, Artificial Sequence
  Synthetic
aaaauuuuuuuuauuaauuuaaaa

SEQ ID NO: 430195 - RNA, 18 nt, Artificial Sequence
  Synthetic
aauccucuuaauuuaaaa

SEQ ID NO: 430196 - RNA, 19 nt, Artificial Sequence
  Synthetic
uaauccucuuaauuuaaaa

SEQ ID NO: 430197 - RNA, 20 nt, Artificial Sequence
  Synthetic
uuaauccucuuaauuuaaaa

SEQ ID NO: 430198 - RNA, 21 nt, Artificial Sequence
  Synthetic
auuaauccucuuaauuuaaaa

SEQ ID NO: 430199 - RNA, 22 nt, Artificial Sequence
  Synthetic
uauuaauccucuuaauuuaaaa

SEQ ID NO: 430200 - RNA, 23 nt, Artificial Sequence
  Synthetic
auauuaauccucuuaauuuaaaa

SEQ ID NO: 430201 - RNA, 24 nt, Artificial Sequence
  Synthetic
gauauuaauccucuuaauuuaaaa

SEQ ID NO: 430202 - RNA, 18 nt, Artificial Sequence
  Synthetic
ugaguaagacauuuaaaa

SEQ ID NO: 430203 - RNA, 19 nt, Artificial Sequence
  Synthetic
augaguaagacauuuaaaa

SEQ ID NO: 430204 - RNA, 20 nt, Artificial Sequence
  Synthetic
uaugaguaagacauuuaaaa

SEQ ID NO: 430205 - RNA, 21 nt, Artificial Sequence
  Synthetic
auaugaguaagacauuuaaaa

SEQ ID NO: 430206 - RNA, 22 nt, Artificial Sequence
  Synthetic
uauaugaguaagacauuuaaaa

SEQ ID NO: 430207 - RNA, 23 nt, Artificial Sequence
  Synthetic
cuauaugaguaagacauuuaaaa

SEQ ID NO: 430208 - RNA, 24 nt, Artificial Sequence
  Synthetic
acuauaugaguaagacauuuaaaa

SEQ ID NO: 430209 - RNA, 18 nt, Artificial Sequence
  Synthetic
auucugaagcauuuaaaa

SEQ ID NO: 430210 - RNA, 19 nt, Artificial Sequence
  Synthetic
gauucugaagcauuuaaaa

SEQ ID NO: 430211 - RNA, 20 nt, Artificial Sequence
  Synthetic
agauucugaagcauuuaaaa

SEQ ID NO: 430212 - RNA, 21 nt, Artificial Sequence
  Synthetic
uagauucugaagcauuuaaaa

SEQ ID NO: 430213 - RNA, 22 nt, Artificial Sequence
  Synthetic
auagauucugaagcauuuaaaa

SEQ ID NO: 430214 - RNA, 23 nt, Artificial Sequence
  Synthetic
aauagauucugaagcauuuaaaa

SEQ ID NO: 430215 - RNA, 24 nt, Artificial Sequence
  Synthetic
uaauagauucugaagcauuuaaaa

SEQ ID NO: 430216 - RNA, 18 nt, Artificial Sequence
  Synthetic
uucaaagaagauuuaaaa

SEQ ID NO: 430217 - RNA, 19 nt, Artificial Sequence
  Synthetic
uuucaaagaagauuuaaaa

SEQ ID NO: 430218 - RNA, 20 nt, Artificial Sequence
  Synthetic
auuucaaagaagauuuaaaa

SEQ ID NO: 430219 - RNA, 21 nt, Artificial Sequence
  Synthetic
uauuucaaagaagauuuaaaa

SEQ ID NO: 430220 - RNA, 22 nt, Artificial Sequence
  Synthetic
guauuucaaagaagauuuaaaa

SEQ ID NO: 430221 - RNA, 23 nt, Artificial Sequence
  Synthetic
aguauuucaaagaagauuuaaaa

SEQ ID NO: 430222 - RNA, 24 nt, Artificial Sequence
  Synthetic
gaguauuucaaagaagauuuaaaa

SEQ ID NO: 430223 - RNA, 18 nt, Artificial Sequence
  Synthetic
augauacccuauuuaaaa

SEQ ID NO: 430224 - RNA, 19 nt, Artificial Sequence
  Synthetic
caugauacccuauuuaaaa

SEQ ID NO: 430225 - RNA, 20 nt, Artificial Sequence
  Synthetic
ccaugauacccuauuuaaaa

SEQ ID NO: 430226 - RNA, 21 nt, Artificial Sequence
  Synthetic
accaugauacccuauuuaaaa

SEQ ID NO: 430227 - RNA, 22 nt, Artificial Sequence
  Synthetic
uaccaugauacccuauuuaaaa

SEQ ID NO: 430228 - RNA, 23 nt, Artificial Sequence
  Synthetic
auaccaugauacccuauuuaaaa

SEQ ID NO: 430229 - RNA, 24 nt, Artificial Sequence
  Synthetic
aauaccaugauacccuauuuaaaa

SEQ ID NO: 430230 - RNA, 18 nt, Artificial Sequence
  Synthetic
aguauuuguuauuuaaaa

SEQ ID NO: 430231 - RNA, 19 nt, Artificial Sequence
  Synthetic
aaguauuuguuauuuaaaa

SEQ ID NO: 430232 - RNA, 20 nt, Artificial Sequence
  Synthetic
aaaguauuuguuauuuaaaa

SEQ ID NO: 430233 - RNA, 21 nt, Artificial Sequence
  Synthetic
caaaguauuuguuauuuaaaa

SEQ ID NO: 430234 - RNA, 22 nt, Artificial Sequence
  Synthetic
acaaaguauuuguuauuuaaaa

SEQ ID NO: 430235 - RNA, 23 nt, Artificial Sequence
  Synthetic
uacaaaguauuuguuauuuaaaa

SEQ ID NO: 430236 - RNA, 24 nt, Artificial Sequence
  Synthetic
uuacaaaguauuuguuauuuaaaa

SEQ ID NO: 430237 - RNA, 18 nt, Artificial Sequence
  Synthetic
gccuauuuuuauuuaaaa

SEQ ID NO: 430238 - RNA, 19 nt, Artificial Sequence
  Synthetic
ugccuauuuuuauuuaaaa

SEQ ID NO: 430239 - RNA, 20 nt, Artificial Sequence
  Synthetic
augccuauuuuuauuuaaaa

SEQ ID NO: 430240 - RNA, 21 nt, Artificial Sequence
  Synthetic
aaugccuauuuuuauuuaaaa

SEQ ID NO: 430241 - RNA, 22 nt, Artificial Sequence
  Synthetic
aaaugccuauuuuuauuuaaaa

SEQ ID NO: 430242 - RNA, 23 nt, Artificial Sequence
  Synthetic
aaaaugccuauuuuuauuuaaaa

SEQ ID NO: 430243 - RNA, 24 nt, Artificial Sequence
  Synthetic
uaaaaugccuauuuuuauuuaaaa

SEQ ID NO: 430244 - RNA, 18 nt, Artificial Sequence
  Synthetic
uauguucauacuuuaaaa

SEQ ID NO: 430245 - RNA, 19 nt, Artificial Sequence
  Synthetic
uuauguucauacuuuaaaa

SEQ ID NO: 430246 - RNA, 20 nt, Artificial Sequence
  Synthetic
auuauguucauacuuuaaaa

SEQ ID NO: 430247 - RNA, 21 nt, Artificial Sequence
  Synthetic
aauuauguucauacuuuaaaa

SEQ ID NO: 430248 - RNA, 22 nt, Artificial Sequence
  Synthetic
gaauuauguucauacuuuaaaa

SEQ ID NO: 430249 - RNA, 23 nt, Artificial Sequence
  Synthetic
ugaauuauguucauacuuuaaaa

SEQ ID NO: 430250 - RNA, 24 nt, Artificial Sequence
  Synthetic
cugaauuauguucauacuuuaaaa

SEQ ID NO: 430251 - RNA, 18 nt, Artificial Sequence
  Synthetic
aauuuuguuucuuuaaaa

SEQ ID NO: 430252 - RNA, 19 nt, Artificial Sequence
  Synthetic
caauuuuguuucuuuaaaa

SEQ ID NO: 430253 - RNA, 20 nt, Artificial Sequence
  Synthetic
ucaauuuuguuucuuuaaaa

SEQ ID NO: 430254 - RNA, 21 nt, Artificial Sequence
  Synthetic
uucaauuuuguuucuuuaaaa

SEQ ID NO: 430255 - RNA, 22 nt, Artificial Sequence
  Synthetic
auucaauuuuguuucuuuaaaa

SEQ ID NO: 430256 - RNA, 23 nt, Artificial Sequence
  Synthetic
aauucaauuuuguuucuuuaaaa

SEQ ID NO: 430257 - RNA, 24 nt, Artificial Sequence
  Synthetic
aaauucaauuuuguuucuuuaaaa

SEQ ID NO: 430258 - RNA, 18 nt, Artificial Sequence
  Synthetic
aaauacaaaaguuuaaaa

SEQ ID NO: 430259 - RNA, 19 nt, Artificial Sequence
  Synthetic
caaauacaaaaguuuaaaa

SEQ ID NO: 430260 - RNA, 20 nt, Artificial Sequence
  Synthetic
ucaaauacaaaaguuuaaaa

SEQ ID NO: 430261 - RNA, 21 nt, Artificial Sequence
  Synthetic
uucaaauacaaaaguuuaaaa

SEQ ID NO: 430262 - RNA, 22 nt, Artificial Sequence
  Synthetic
uuucaaauacaaaaguuuaaaa

SEQ ID NO: 430263 - RNA, 23 nt, Artificial Sequence
  Synthetic
cuuucaaauacaaaaguuuaaaa

SEQ ID NO: 430264 - RNA, 24 nt, Artificial Sequence
  Synthetic
gcuuucaaauacaaaaguuuaaaa

SEQ ID NO: 430265 - RNA, 18 nt, Artificial Sequence
  Synthetic
uugaaacuuaguuuaaaa

SEQ ID NO: 430266 - RNA, 19 nt, Artificial Sequence
  Synthetic
auugaaacuuaguuuaaaa

SEQ ID NO: 430267 - RNA, 20 nt, Artificial Sequence
  Synthetic
aauugaaacuuaguuuaaaa

SEQ ID NO: 430268 - RNA, 21 nt, Artificial Sequence
  Synthetic
uaauugaaacuuaguuuaaaa

SEQ ID NO: 430269 - RNA, 22 nt, Artificial Sequence
  Synthetic
auaauugaaacuuaguuuaaaa

SEQ ID NO: 430270 - RNA, 23 nt, Artificial Sequence
  Synthetic
gauaauugaaacuuaguuuaaaa

SEQ ID NO: 430271 - RNA, 24 nt, Artificial Sequence
  Synthetic
ugauaauugaaacuuaguuuaaaa

SEQ ID NO: 430272 - RNA, 18 nt, Artificial Sequence
  Synthetic
uaaccaagauguuuaaaa

SEQ ID NO: 430273 - RNA, 19 nt, Artificial Sequence
  Synthetic
auaaccaagauguuuaaaa

SEQ ID NO: 430274 - RNA, 20 nt, Artificial Sequence
  Synthetic
uauaaccaagauguuuaaaa

SEQ ID NO: 430275 - RNA, 21 nt, Artificial Sequence
  Synthetic
uuauaaccaagauguuuaaaa

SEQ ID NO: 430276 - RNA, 22 nt, Artificial Sequence
  Synthetic
guuauaaccaagauguuuaaaa

SEQ ID NO: 430277 - RNA, 23 nt, Artificial Sequence
  Synthetic
aguuauaaccaagauguuuaaaa

SEQ ID NO: 430278 - RNA, 24 nt, Artificial Sequence
  Synthetic
caguuauaaccaagauguuuaaaa

SEQ ID NO: 430279 - RNA, 18 nt, Artificial Sequence
  Synthetic
uuuccucuauguuuaaaa

SEQ ID NO: 430280 - RNA, 19 nt, Artificial Sequence
  Synthetic
uuuuccucuauguuuaaaa

SEQ ID NO: 430281 - RNA, 20 nt, Artificial Sequence
  Synthetic
uuuuuccucuauguuuaaaa

SEQ ID NO: 430282 - RNA, 21 nt, Artificial Sequence
  Synthetic
cuuuuuccucuauguuuaaaa

SEQ ID NO: 430283 - RNA, 22 nt, Artificial Sequence
  Synthetic
ucuuuuuccucuauguuuaaaa

SEQ ID NO: 430284 - RNA, 23 nt, Artificial Sequence
  Synthetic
uucuuuuuccucuauguuuaaaa

SEQ ID NO: 430285 - RNA, 24 nt, Artificial Sequence
  Synthetic
cuucuuuuuccucuauguuuaaaa

SEQ ID NO: 430286 - RNA, 18 nt, Artificial Sequence
  Synthetic
uggaaauuauguuuaaaa

SEQ ID NO: 430287 - RNA, 19 nt, Artificial Sequence
  Synthetic
uuggaaauuauguuuaaaa

SEQ ID NO: 430288 - RNA, 20 nt, Artificial Sequence
  Synthetic
auuggaaauuauguuuaaaa

SEQ ID NO: 430289 - RNA, 21 nt, Artificial Sequence
  Synthetic
aauuggaaauuauguuuaaaa

SEQ ID NO: 430290 - RNA, 22 nt, Artificial Sequence
  Synthetic
gaauuggaaauuauguuuaaaa

SEQ ID NO: 430291 - RNA, 23 nt, Artificial Sequence
  Synthetic
ggaauuggaaauuauguuuaaaa

SEQ ID NO: 430292 - RNA, 24 nt, Artificial Sequence
  Synthetic
uggaauuggaaauuauguuuaaaa

SEQ ID NO: 430293 - RNA, 18 nt, Artificial Sequence
  Synthetic
ugaguagcuuguuuaaaa

SEQ ID NO: 430294 - RNA, 19 nt, Artificial Sequence
  Synthetic
uugaguagcuuguuuaaaa

SEQ ID NO: 430295 - RNA, 20 nt, Artificial Sequence
  Synthetic
uuugaguagcuuguuuaaaa

SEQ ID NO: 430296 - RNA, 21 nt, Artificial Sequence
  Synthetic
auuugaguagcuuguuuaaaa

SEQ ID NO: 430297 - RNA, 22 nt, Artificial Sequence
  Synthetic
cauuugaguagcuuguuuaaaa

SEQ ID NO: 430298 - RNA, 23 nt, Artificial Sequence
  Synthetic
acauuugaguagcuuguuuaaaa

SEQ ID NO: 430299 - RNA, 24 nt, Artificial Sequence
  Synthetic
aacauuugaguagcuuguuuaaaa

SEQ ID NO: 430300 - RNA, 18 nt, Artificial Sequence
  Synthetic
uaaaauuguuguuuaaaa

SEQ ID NO: 430301 - RNA, 19 nt, Artificial Sequence
  Synthetic
auaaaauuguuguuuaaaa

SEQ ID NO: 430302 - RNA, 20 nt, Artificial Sequence
  Synthetic
cauaaaauuguuguuuaaaa

SEQ ID NO: 430303 - RNA, 21 nt, Artificial Sequence
  Synthetic
gcauaaaauuguuguuuaaaa

SEQ ID NO: 430304 - RNA, 22 nt, Artificial Sequence
  Synthetic
ggcauaaaauuguuguuuaaaa

SEQ ID NO: 430305 - RNA, 23 nt, Artificial Sequence
  Synthetic
aggcauaaaauuguuguuuaaaa

SEQ ID NO: 430306 - RNA, 24 nt, Artificial Sequence
  Synthetic
uaggcauaaaauuguuguuuaaaa

SEQ ID NO: 430307 - RNA, 18 nt, Artificial Sequence
  Synthetic
aguuccguaauuuuaaaa

SEQ ID NO: 430308 - RNA, 19 nt, Artificial Sequence
  Synthetic
caguuccguaauuuuaaaa

SEQ ID NO: 430309 - RNA, 20 nt, Artificial Sequence
  Synthetic
ucaguuccguaauuuuaaaa

SEQ ID NO: 430310 - RNA, 21 nt, Artificial Sequence
  Synthetic
gucaguuccguaauuuuaaaa

SEQ ID NO: 430311 - RNA, 22 nt, Artificial Sequence
  Synthetic
ugucaguuccguaauuuuaaaa

SEQ ID NO: 430312 - RNA, 23 nt, Artificial Sequence
  Synthetic
cugucaguuccguaauuuuaaaa

SEQ ID NO: 430313 - RNA, 24 nt, Artificial Sequence
  Synthetic
acugucaguuccguaauuuuaaaa

SEQ ID NO: 430314 - RNA, 18 nt, Artificial Sequence
  Synthetic
cguuuacacauuuuaaaa

SEQ ID NO: 430315 - RNA, 19 nt, Artificial Sequence
  Synthetic
ucguuuacacauuuuaaaa

SEQ ID NO: 430316 - RNA, 20 nt, Artificial Sequence
  Synthetic
uucguuuacacauuuuaaaa

SEQ ID NO: 430317 - RNA, 21 nt, Artificial Sequence
  Synthetic
uuucguuuacacauuuuaaaa

SEQ ID NO: 430318 - RNA, 22 nt, Artificial Sequence
  Synthetic
uuuucguuuacacauuuuaaaa

SEQ ID NO: 430319 - RNA, 23 nt, Artificial Sequence
  Synthetic
uuuuucguuuacacauuuuaaaa

SEQ ID NO: 430320 - RNA, 24 nt, Artificial Sequence
  Synthetic
uuuuuucguuuacacauuuuaaaa

SEQ ID NO: 430321 - RNA, 18 nt, Artificial Sequence
  Synthetic
uagucagagauuuuaaaa

SEQ ID NO: 430322 - RNA, 19 nt, Artificial Sequence
  Synthetic
uuagucagagauuuuaaaa

SEQ ID NO: 430323 - RNA, 20 nt, Artificial Sequence
  Synthetic
guuagucagagauuuuaaaa

SEQ ID NO: 430324 - RNA, 21 nt, Artificial Sequence
  Synthetic
gguuagucagagauuuuaaaa

SEQ ID NO: 430325 - RNA, 22 nt, Artificial Sequence
  Synthetic
ugguuagucagagauuuuaaaa

SEQ ID NO: 430326 - RNA, 23 nt, Artificial Sequence
  Synthetic
uugguuagucagagauuuuaaaa

SEQ ID NO: 430327 - RNA, 24 nt, Artificial Sequence
  Synthetic
guugguuagucagagauuuuaaaa

SEQ ID NO: 430328 - RNA, 18 nt, Artificial Sequence
  Synthetic
cuugugccuauuuuaaaa

SEQ ID NO: 430329 - RNA, 19 nt, Artificial Sequence
  Synthetic
ccuugugccuauuuuaaaa

SEQ ID NO: 430330 - RNA, 20 nt, Artificial Sequence
  Synthetic
uccuugugccuauuuuaaaa

SEQ ID NO: 430331 - RNA, 21 nt, Artificial Sequence
  Synthetic
guccuugugccuauuuuaaaa

SEQ ID NO: 430332 - RNA, 22 nt, Artificial Sequence
  Synthetic
uguccuugugccuauuuuaaaa

SEQ ID NO: 430333 - RNA, 23 nt, Artificial Sequence
  Synthetic
auguccuugugccuauuuuaaaa

SEQ ID NO: 430334 - RNA, 24 nt, Artificial Sequence
  Synthetic
gauguccuugugccuauuuuaaaa

SEQ ID NO: 430335 - RNA, 18 nt, Artificial Sequence
  Synthetic
aauuugauuauuuuaaaa

SEQ ID NO: 430336 - RNA, 19 nt, Artificial Sequence
  Synthetic
aaauuugauuauuuuaaaa

SEQ ID NO: 430337 - RNA, 20 nt, Artificial Sequence
  Synthetic
aaaauuugauuauuuuaaaa

SEQ ID NO: 430338 - RNA, 21 nt, Artificial Sequence
  Synthetic
uaaaauuugauuauuuuaaaa

SEQ ID NO: 430339 - RNA, 22 nt, Artificial Sequence
  Synthetic
auaaaauuugauuauuuuaaaa

SEQ ID NO: 430340 - RNA, 23 nt, Artificial Sequence
  Synthetic
aauaaaauuugauuauuuuaaaa

SEQ ID NO: 430341 - RNA, 24 nt, Artificial Sequence
  Synthetic
aaauaaaauuugauuauuuuaaaa

SEQ ID NO: 430342 - RNA, 18 nt, Artificial Sequence
  Synthetic
uaaaauuuuauuuuaaaa

SEQ ID NO: 430343 - RNA, 19 nt, Artificial Sequence
  Synthetic
cuaaaauuuuauuuuaaaa

SEQ ID NO: 430344 - RNA, 20 nt, Artificial Sequence
  Synthetic
ucuaaaauuuuauuuuaaaa

SEQ ID NO: 430345 - RNA, 21 nt, Artificial Sequence
  Synthetic
aucuaaaauuuuauuuuaaaa

SEQ ID NO: 430346 - RNA, 22 nt, Artificial Sequence
  Synthetic
aaucuaaaauuuuauuuuaaaa

SEQ ID NO: 430347 - RNA, 23 nt, Artificial Sequence
  Synthetic
uaaucuaaaauuuuauuuuaaaa

SEQ ID NO: 430348 - RNA, 24 nt, Artificial Sequence
  Synthetic
auaaucuaaaauuuuauuuuaaaa

SEQ ID NO: 430349 - RNA, 18 nt, Artificial Sequence
  Synthetic
aucuuuuuuauuuuaaaa

SEQ ID NO: 430350 - RNA, 19 nt, Artificial Sequence
  Synthetic
uaucuuuuuuauuuuaaaa

SEQ ID NO: 430351 - RNA, 20 nt, Artificial Sequence
  Synthetic
uuaucuuuuuuauuuuaaaa

SEQ ID NO: 430352 - RNA, 21 nt, Artificial Sequence
  Synthetic
uuuaucuuuuuuauuuuaaaa

SEQ ID NO: 430353 - RNA, 22 nt, Artificial Sequence
  Synthetic
uuuuaucuuuuuuauuuuaaaa

SEQ ID NO: 430354 - RNA, 23 nt, Artificial Sequence
  Synthetic
auuuuaucuuuuuuauuuuaaaa

SEQ ID NO: 430355 - RNA, 24 nt, Artificial Sequence
  Synthetic
aauuuuaucuuuuuuauuuuaaaa

SEQ ID NO: 430356 - RNA, 18 nt, Artificial Sequence
  Synthetic
uaugugcuucuuuuaaaa

SEQ ID NO: 430357 - RNA, 19 nt, Artificial Sequence
  Synthetic
auaugugcuucuuuuaaaa

SEQ ID NO: 430358 - RNA, 20 nt, Artificial Sequence
  Synthetic
aauaugugcuucuuuuaaaa

SEQ ID NO: 430359 - RNA, 21 nt, Artificial Sequence
  Synthetic
gaauaugugcuucuuuuaaaa

SEQ ID NO: 430360 - RNA, 22 nt, Artificial Sequence
  Synthetic
ugaauaugugcuucuuuuaaaa

SEQ ID NO: 430361 - RNA, 23 nt, Artificial Sequence
  Synthetic
augaauaugugcuucuuuuaaaa

SEQ ID NO: 430362 - RNA, 24 nt, Artificial Sequence
  Synthetic
aaugaauaugugcuucuuuuaaaa

SEQ ID NO: 430363 - RNA, 18 nt, Artificial Sequence
  Synthetic
uguuccucguuuuuaaaa

SEQ ID NO: 430364 - RNA, 19 nt, Artificial Sequence
  Synthetic
auguuccucguuuuuaaaa

SEQ ID NO: 430365 - RNA, 20 nt, Artificial Sequence
  Synthetic
uauguuccucguuuuuaaaa

SEQ ID NO: 430366 - RNA, 21 nt, Artificial Sequence
  Synthetic
uuauguuccucguuuuuaaaa

SEQ ID NO: 430367 - RNA, 22 nt, Artificial Sequence
  Synthetic
cuuauguuccucguuuuuaaaa

SEQ ID NO: 430368 - RNA, 23 nt, Artificial Sequence
  Synthetic
ucuuauguuccucguuuuuaaaa

SEQ ID NO: 430369 - RNA, 24 nt, Artificial Sequence
  Synthetic
aucuuauguuccucguuuuuaaaa

SEQ ID NO: 430370 - RNA, 18 nt, Artificial Sequence
  Synthetic
uuaugaauguuuuuaaaa

SEQ ID NO: 430371 - RNA, 19 nt, Artificial Sequence
  Synthetic
cuuaugaauguuuuuaaaa

SEQ ID NO: 430372 - RNA, 20 nt, Artificial Sequence
  Synthetic
ccuuaugaauguuuuuaaaa

SEQ ID NO: 430373 - RNA, 21 nt, Artificial Sequence
  Synthetic
accuuaugaauguuuuuaaaa

SEQ ID NO: 430374 - RNA, 22 nt, Artificial Sequence
  Synthetic
aaccuuaugaauguuuuuaaaa

SEQ ID NO: 430375 - RNA, 23 nt, Artificial Sequence
  Synthetic
uaaccuuaugaauguuuuuaaaa

SEQ ID NO: 430376 - RNA, 24 nt, Artificial Sequence
  Synthetic
uuaaccuuaugaauguuuuuaaaa

SEQ ID NO: 430377 - RNA, 18 nt, Artificial Sequence
  Synthetic
aaaaaauuuuuuuuaaaa

SEQ ID NO: 430378 - RNA, 19 nt, Artificial Sequence
  Synthetic
uaaaaaauuuuuuuuaaaa

SEQ ID NO: 430379 - RNA, 20 nt, Artificial Sequence
  Synthetic
uuaaaaaauuuuuuuuaaaa

SEQ ID NO: 430380 - RNA, 21 nt, Artificial Sequence
  Synthetic
uuuaaaaaauuuuuuuuaaaa

SEQ ID NO: 430381 - RNA, 22 nt, Artificial Sequence
  Synthetic
uuuuaaaaaauuuuuuuuaaaa

SEQ ID NO: 430382 - RNA, 23 nt, Artificial Sequence
  Synthetic
cuuuuaaaaaauuuuuuuuaaaa

SEQ ID NO: 430383 - RNA, 24 nt, Artificial Sequence
  Synthetic
acuuuuaaaaaauuuuuuuuaaaa

SEQ ID NO: 430384 - RNA, 18 nt, Artificial Sequence
  Synthetic
aaaaaaaaaaaaaacaaa

SEQ ID NO: 430385 - RNA, 19 nt, Artificial Sequence
  Synthetic
aaaaaaaaaaaaaaacaaa

SEQ ID NO: 430386 - RNA, 20 nt, Artificial Sequence
  Synthetic
aaaaaaaaaaaaaaaacaaa

SEQ ID NO: 430387 - RNA, 21 nt, Artificial Sequence
  Synthetic
caaaaaaaaaaaaaaaacaaa

SEQ ID NO: 430388 - RNA, 22 nt, Artificial Sequence
  Synthetic
ucaaaaaaaaaaaaaaaacaaa

SEQ ID NO: 430389 - RNA, 23 nt, Artificial Sequence
  Synthetic
cucaaaaaaaaaaaaaaaacaaa

SEQ ID NO: 430390 - RNA, 24 nt, Artificial Sequence
  Synthetic
ucucaaaaaaaaaaaaaaaacaaa

SEQ ID NO: 430391 - RNA, 18 nt, Artificial Sequence
  Synthetic
gcuuccauaaaaaacaaa

SEQ ID NO: 430392 - RNA, 19 nt, Artificial Sequence
  Synthetic
agcuuccauaaaaaacaaa

SEQ ID NO: 430393 - RNA, 20 nt, Artificial Sequence
  Synthetic
aagcuuccauaaaaaacaaa

SEQ ID NO: 430394 - RNA, 21 nt, Artificial Sequence
  Synthetic
gaagcuuccauaaaaaacaaa

SEQ ID NO: 430395 - RNA, 22 nt, Artificial Sequence
  Synthetic
ugaagcuuccauaaaaaacaaa

SEQ ID NO: 430396 - RNA, 23 nt, Artificial Sequence
  Synthetic
augaagcuuccauaaaaaacaaa

SEQ ID NO: 430397 - RNA, 24 nt, Artificial Sequence
  Synthetic
caugaagcuuccauaaaaaacaaa

SEQ ID NO: 430398 - RNA, 18 nt, Artificial Sequence
  Synthetic
ccuucagagaaaaacaaa

SEQ ID NO: 430399 - RNA, 19 nt, Artificial Sequence
  Synthetic
accuucagagaaaaacaaa

SEQ ID NO: 430400 - RNA, 20 nt, Artificial Sequence
  Synthetic
uaccuucagagaaaaacaaa

SEQ ID NO: 430401 - RNA, 21 nt, Artificial Sequence
  Synthetic
auaccuucagagaaaaacaaa

SEQ ID NO: 430402 - RNA, 22 nt, Artificial Sequence
  Synthetic
aauaccuucagagaaaaacaaa

SEQ ID NO: 430403 - RNA, 23 nt, Artificial Sequence
  Synthetic
gaauaccuucagagaaaaacaaa

SEQ ID NO: 430404 - RNA, 24 nt, Artificial Sequence
  Synthetic
agaauaccuucagagaaaaacaaa

SEQ ID NO: 430405 - RNA, 18 nt, Artificial Sequence
  Synthetic
uauaucuagaaaaacaaa

SEQ ID NO: 430406 - RNA, 19 nt, Artificial Sequence
  Synthetic
uuauaucuagaaaaacaaa

SEQ ID NO: 430407 - RNA, 20 nt, Artificial Sequence
  Synthetic
uuuauaucuagaaaaacaaa

SEQ ID NO: 430408 - RNA, 21 nt, Artificial Sequence
  Synthetic
guuuauaucuagaaaaacaaa

SEQ ID NO: 430409 - RNA, 22 nt, Artificial Sequence
  Synthetic
aguuuauaucuagaaaaacaaa

SEQ ID NO: 430410 - RNA, 23 nt, Artificial Sequence
  Synthetic
caguuuauaucuagaaaaacaaa

SEQ ID NO: 430411 - RNA, 24 nt, Artificial Sequence
  Synthetic
acaguuuauaucuagaaaaacaaa

SEQ ID NO: 430412 - RNA, 18 nt, Artificial Sequence
  Synthetic
gcaaaaaugaaaaacaaa

SEQ ID NO: 430413 - RNA, 19 nt, Artificial Sequence
  Synthetic
agcaaaaaugaaaaacaaa

SEQ ID NO: 430414 - RNA, 20 nt, Artificial Sequence
  Synthetic
aagcaaaaaugaaaaacaaa

SEQ ID NO: 430415 - RNA, 21 nt, Artificial Sequence
  Synthetic
uaagcaaaaaugaaaaacaaa

SEQ ID NO: 430416 - RNA, 22 nt, Artificial Sequence
  Synthetic
auaagcaaaaaugaaaaacaaa

SEQ ID NO: 430417 - RNA, 23 nt, Artificial Sequence
  Synthetic
uauaagcaaaaaugaaaaacaaa

SEQ ID NO: 430418 - RNA, 24 nt, Artificial Sequence
  Synthetic
guauaagcaaaaaugaaaaacaaa

SEQ ID NO: 430419 - RNA, 18 nt, Artificial Sequence
  Synthetic
aacagauguaaaaacaaa

SEQ ID NO: 430420 - RNA, 19 nt, Artificial Sequence
  Synthetic
uaacagauguaaaaacaaa

SEQ ID NO: 430421 - RNA, 20 nt, Artificial Sequence
  Synthetic
cuaacagauguaaaaacaaa

SEQ ID NO: 430422 - RNA, 21 nt, Artificial Sequence
  Synthetic
ucuaacagauguaaaaacaaa

SEQ ID NO: 430423 - RNA, 22 nt, Artificial Sequence
  Synthetic
uucuaacagauguaaaaacaaa

SEQ ID NO: 430424 - RNA, 23 nt, Artificial Sequence
  Synthetic
uuucuaacagauguaaaaacaaa

SEQ ID NO: 430425 - RNA, 24 nt, Artificial Sequence
  Synthetic
guuucuaacagauguaaaaacaaa

SEQ ID NO: 430426 - RNA, 18 nt, Artificial Sequence
  Synthetic
acaacaaaacaaaacaaa

SEQ ID NO: 430427 - RNA, 19 nt, Artificial Sequence
  Synthetic
aacaacaaaacaaaacaaa

SEQ ID NO: 430428 - RNA, 20 nt, Artificial Sequence
  Synthetic
aaacaacaaaacaaaacaaa

SEQ ID NO: 430429 - RNA, 21 nt, Artificial Sequence
  Synthetic
aaaacaacaaaacaaaacaaa

SEQ ID NO: 430430 - RNA, 22 nt, Artificial Sequence
  Synthetic
aaaaacaacaaaacaaaacaaa

SEQ ID NO: 430431 - RNA, 23 nt, Artificial Sequence
  Synthetic
caaaaacaacaaaacaaaacaaa

SEQ ID NO: 430432 - RNA, 24 nt, Artificial Sequence
  Synthetic
acaaaaacaacaaaacaaaacaaa

SEQ ID NO: 430433 - RNA, 18 nt, Artificial Sequence
  Synthetic
caucauccagaaaacaaa

SEQ ID NO: 430434 - RNA, 19 nt, Artificial Sequence
  Synthetic
ucaucauccagaaaacaaa

SEQ ID NO: 430435 - RNA, 20 nt, Artificial Sequence
  Synthetic
aucaucauccagaaaacaaa

SEQ ID NO: 430436 - RNA, 21 nt, Artificial Sequence
  Synthetic
aaucaucauccagaaaacaaa

SEQ ID NO: 430437 - RNA, 22 nt, Artificial Sequence
  Synthetic
aaaucaucauccagaaaacaaa

SEQ ID NO: 430438 - RNA, 23 nt, Artificial Sequence
  Synthetic
uaaaucaucauccagaaaacaaa

SEQ ID NO: 430439 - RNA, 24 nt, Artificial Sequence
  Synthetic
auaaaucaucauccagaaaacaaa

SEQ ID NO: 430440 - RNA, 18 nt, Artificial Sequence
  Synthetic
cuaaaagcagaaaacaaa

SEQ ID NO: 430441 - RNA, 19 nt, Artificial Sequence
  Synthetic
gcuaaaagcagaaaacaaa

SEQ ID NO: 430442 - RNA, 20 nt, Artificial Sequence
  Synthetic
ggcuaaaagcagaaaacaaa

SEQ ID NO: 430443 - RNA, 21 nt, Artificial Sequence
  Synthetic
aggcuaaaagcagaaaacaaa

SEQ ID NO: 430444 - RNA, 22 nt, Artificial Sequence
  Synthetic
aaggcuaaaagcagaaaacaaa

SEQ ID NO: 430445 - RNA, 23 nt, Artificial Sequence
  Synthetic
uaaggcuaaaagcagaaaacaaa

SEQ ID NO: 430446 - RNA, 24 nt, Artificial Sequence
  Synthetic
uuaaggcuaaaagcagaaaacaaa

SEQ ID NO: 430447 - RNA, 18 nt, Artificial Sequence
  Synthetic
auauaaaaauaaaacaaa

SEQ ID NO: 430448 - RNA, 19 nt, Artificial Sequence
  Synthetic
aauauaaaaauaaaacaaa

SEQ ID NO: 430449 - RNA, 20 nt, Artificial Sequence
  Synthetic
aaauauaaaaauaaaacaaa

SEQ ID NO: 430450 - RNA, 21 nt, Artificial Sequence
  Synthetic
aaaauauaaaaauaaaacaaa

SEQ ID NO: 430451 - RNA, 22 nt, Artificial Sequence
  Synthetic
aaaaauauaaaaauaaaacaaa

SEQ ID NO: 430452 - RNA, 23 nt, Artificial Sequence
  Synthetic
uaaaaauauaaaaauaaaacaaa

SEQ ID NO: 430453 - RNA, 24 nt, Artificial Sequence
  Synthetic
uuaaaaauauaaaaauaaaacaaa

SEQ ID NO: 430454 - RNA, 18 nt, Artificial Sequence
  Synthetic
auaccucaauaaaacaaa

SEQ ID NO: 430455 - RNA, 19 nt, Artificial Sequence
  Synthetic
uauaccucaauaaaacaaa

SEQ ID NO: 430456 - RNA, 20 nt, Artificial Sequence
  Synthetic
uuauaccucaauaaaacaaa

SEQ ID NO: 430457 - RNA, 21 nt, Artificial Sequence
  Synthetic
auuauaccucaauaaaacaaa

SEQ ID NO: 430458 - RNA, 22 nt, Artificial Sequence
  Synthetic
aauuauaccucaauaaaacaaa

SEQ ID NO: 430459 - RNA, 23 nt, Artificial Sequence
  Synthetic
aaauuauaccucaauaaaacaaa

SEQ ID NO: 430460 - RNA, 24 nt, Artificial Sequence
  Synthetic
uaaauuauaccucaauaaaacaaa

SEQ ID NO: 430461 - RNA, 21 nt, Artificial Sequence
  Synthetic
auaaaagaggacacaaacaaa

SEQ ID NO: 430462 - RNA, 22 nt, Artificial Sequence
  Synthetic
aauaaaagaggacacaaacaaa

SEQ ID NO: 430463 - RNA, 23 nt, Artificial Sequence
  Synthetic
aaauaaaagaggacacaaacaaa

SEQ ID NO: 430464 - RNA, 24 nt, Artificial Sequence
  Synthetic
gaaauaaaagaggacacaaacaaa

SEQ ID NO: 430465 - RNA, 21 nt, Artificial Sequence
  Synthetic
auaaaagaggauacaaacaaa

SEQ ID NO: 430466 - RNA, 22 nt, Artificial Sequence
  Synthetic
aauaaaagaggauacaaacaaa

SEQ ID NO: 430467 - RNA, 23 nt, Artificial Sequence
  Synthetic
aaauaaaagaggauacaaacaaa

SEQ ID NO: 430468 - RNA, 24 nt, Artificial Sequence
  Synthetic
gaaauaaaagaggauacaaacaaa

SEQ ID NO: 430469 - RNA, 18 nt, Artificial Sequence
  Synthetic
agagaggacccaaacaaa

SEQ ID NO: 430470 - RNA, 19 nt, Artificial Sequence
  Synthetic
aagagaggacccaaacaaa

SEQ ID NO: 430471 - RNA, 20 nt, Artificial Sequence
  Synthetic
uaagagaggacccaaacaaa

SEQ ID NO: 430472 - RNA, 21 nt, Artificial Sequence
  Synthetic
auaagagaggacccaaacaaa

SEQ ID NO: 430473 - RNA, 22 nt, Artificial Sequence
  Synthetic
aauaagagaggacccaaacaaa

SEQ ID NO: 430474 - RNA, 23 nt, Artificial Sequence
  Synthetic
aaauaagagaggacccaaacaaa

SEQ ID NO: 430475 - RNA, 24 nt, Artificial Sequence
  Synthetic
gaaauaagagaggacccaaacaaa

SEQ ID NO: 430476 - RNA, 18 nt, Artificial Sequence
  Synthetic
cgaaaggacgcaaacaaa

SEQ ID NO: 430477 - RNA, 19 nt, Artificial Sequence
  Synthetic
acgaaaggacgcaaacaaa

SEQ ID NO: 430478 - RNA, 20 nt, Artificial Sequence
  Synthetic
uacgaaaggacgcaaacaaa

SEQ ID NO: 430479 - RNA, 21 nt, Artificial Sequence
  Synthetic
auacgaaaggacgcaaacaaa

SEQ ID NO: 430480 - RNA, 22 nt, Artificial Sequence
  Synthetic
aauacgaaaggacgcaaacaaa

SEQ ID NO: 430481 - RNA, 23 nt, Artificial Sequence
  Synthetic
aaauacgaaaggacgcaaacaaa

SEQ ID NO: 430482 - RNA, 24 nt, Artificial Sequence
  Synthetic
aaaauacgaaaggacgcaaacaaa

SEQ ID NO: 430483 - RNA, 18 nt, Artificial Sequence
  Synthetic
aagcauugcagaaacaaa

SEQ ID NO: 430484 - RNA, 19 nt, Artificial Sequence
  Synthetic
aaagcauugcagaaacaaa

SEQ ID NO: 430485 - RNA, 20 nt, Artificial Sequence
  Synthetic
aaaagcauugcagaaacaaa

SEQ ID NO: 430486 - RNA, 21 nt, Artificial Sequence
  Synthetic
uaaaagcauugcagaaacaaa

SEQ ID NO: 430487 - RNA, 22 nt, Artificial Sequence
  Synthetic
guaaaagcauugcagaaacaaa

SEQ ID NO: 430488 - RNA, 23 nt, Artificial Sequence
  Synthetic
aguaaaagcauugcagaaacaaa

SEQ ID NO: 430489 - RNA, 24 nt, Artificial Sequence
  Synthetic
aaguaaaagcauugcagaaacaaa

SEQ ID NO: 430490 - RNA, 18 nt, Artificial Sequence
  Synthetic
auuauuuuuagaaacaaa

SEQ ID NO: 430491 - RNA, 19 nt, Artificial Sequence
  Synthetic
gauuauuuuuagaaacaaa

SEQ ID NO: 430492 - RNA, 20 nt, Artificial Sequence
  Synthetic
ugauuauuuuuagaaacaaa

SEQ ID NO: 430493 - RNA, 21 nt, Artificial Sequence
  Synthetic
augauuauuuuuagaaacaaa

SEQ ID NO: 430494 - RNA, 22 nt, Artificial Sequence
  Synthetic
caugauuauuuuuagaaacaaa

SEQ ID NO: 430495 - RNA, 23 nt, Artificial Sequence
  Synthetic
acaugauuauuuuuagaaacaaa

SEQ ID NO: 430496 - RNA, 24 nt, Artificial Sequence
  Synthetic
aacaugauuauuuuuagaaacaaa

SEQ ID NO: 430497 - RNA, 18 nt, Artificial Sequence
  Synthetic
gaagacaauggaaacaaa

SEQ ID NO: 430498 - RNA, 19 nt, Artificial Sequence
  Synthetic
agaagacaauggaaacaaa

SEQ ID NO: 430499 - RNA, 20 nt, Artificial Sequence
  Synthetic
gagaagacaauggaaacaaa

SEQ ID NO: 430500 - RNA, 21 nt, Artificial Sequence
  Synthetic
ggagaagacaauggaaacaaa

SEQ ID NO: 430501 - RNA, 22 nt, Artificial Sequence
  Synthetic
uggagaagacaauggaaacaaa

SEQ ID NO: 430502 - RNA, 23 nt, Artificial Sequence
  Synthetic
auggagaagacaauggaaacaaa

SEQ ID NO: 430503 - RNA, 24 nt, Artificial Sequence
  Synthetic
cauggagaagacaauggaaacaaa

SEQ ID NO: 430504 - RNA, 18 nt, Artificial Sequence
  Synthetic
caguagaguauaaacaaa

SEQ ID NO: 430505 - RNA, 19 nt, Artificial Sequence
  Synthetic
ucaguagaguauaaacaaa

SEQ ID NO: 430506 - RNA, 20 nt, Artificial Sequence
  Synthetic
aucaguagaguauaaacaaa

SEQ ID NO: 430507 - RNA, 21 nt, Artificial Sequence
  Synthetic
aaucaguagaguauaaacaaa

SEQ ID NO: 430508 - RNA, 22 nt, Artificial Sequence
  Synthetic
aaaucaguagaguauaaacaaa

SEQ ID NO: 430509 - RNA, 23 nt, Artificial Sequence
  Synthetic
aaaaucaguagaguauaaacaaa

SEQ ID NO: 430510 - RNA, 24 nt, Artificial Sequence
  Synthetic
uaaaaucaguagaguauaaacaaa

SEQ ID NO: 430511 - RNA, 18 nt, Artificial Sequence
  Synthetic
gagaauaaaguaaacaaa

SEQ ID NO: 430512 - RNA, 19 nt, Artificial Sequence
  Synthetic
ggagaauaaaguaaacaaa

SEQ ID NO: 430513 - RNA, 20 nt, Artificial Sequence
  Synthetic
aggagaauaaaguaaacaaa

SEQ ID NO: 430514 - RNA, 21 nt, Artificial Sequence
  Synthetic
caggagaauaaaguaaacaaa

SEQ ID NO: 430515 - RNA, 22 nt, Artificial Sequence
  Synthetic
acaggagaauaaaguaaacaaa

SEQ ID NO: 430516 - RNA, 23 nt, Artificial Sequence
  Synthetic
uacaggagaauaaaguaaacaaa

SEQ ID NO: 430517 - RNA, 24 nt, Artificial Sequence
  Synthetic
cuacaggagaauaaaguaaacaaa

SEQ ID NO: 430518 - RNA, 18 nt, Artificial Sequence
  Synthetic
gaagaaaauguaaacaaa

SEQ ID NO: 430519 - RNA, 19 nt, Artificial Sequence
  Synthetic
ugaagaaaauguaaacaaa

SEQ ID NO: 430520 - RNA, 20 nt, Artificial Sequence
  Synthetic
gugaagaaaauguaaacaaa

SEQ ID NO: 430521 - RNA, 21 nt, Artificial Sequence
  Synthetic
agugaagaaaauguaaacaaa

SEQ ID NO: 430522 - RNA, 22 nt, Artificial Sequence
  Synthetic
cagugaagaaaauguaaacaaa

SEQ ID NO: 430523 - RNA, 23 nt, Artificial Sequence
  Synthetic
acagugaagaaaauguaaacaaa

SEQ ID NO: 430524 - RNA, 24 nt, Artificial Sequence
  Synthetic
gacagugaagaaaauguaaacaaa

SEQ ID NO: 430525 - RNA, 18 nt, Artificial Sequence
  Synthetic
uagaaaucauuaaacaaa

SEQ ID NO: 430526 - RNA, 19 nt, Artificial Sequence
  Synthetic
auagaaaucauuaaacaaa

SEQ ID NO: 430527 - RNA, 20 nt, Artificial Sequence
  Synthetic
uauagaaaucauuaaacaaa

SEQ ID NO: 430528 - RNA, 21 nt, Artificial Sequence
  Synthetic
auauagaaaucauuaaacaaa

SEQ ID NO: 430529 - RNA, 22 nt, Artificial Sequence
  Synthetic
uauauagaaaucauuaaacaaa

SEQ ID NO: 430530 - RNA, 23 nt, Artificial Sequence
  Synthetic
cuauauagaaaucauuaaacaaa

SEQ ID NO: 430531 - RNA, 24 nt, Artificial Sequence
  Synthetic
ccuauauagaaaucauuaaacaaa

SEQ ID NO: 430532 - RNA, 18 nt, Artificial Sequence
  Synthetic
aacaacgacaacaacaaa

SEQ ID NO: 430533 - RNA, 19 nt, Artificial Sequence
  Synthetic
caacaacgacaacaacaaa

SEQ ID NO: 430534 - RNA, 20 nt, Artificial Sequence
  Synthetic
acaacaacgacaacaacaaa

SEQ ID NO: 430535 - RNA, 21 nt, Artificial Sequence
  Synthetic
aacaacaacgacaacaacaaa

SEQ ID NO: 430536 - RNA, 22 nt, Artificial Sequence
  Synthetic
caacaacaacgacaacaacaaa

SEQ ID NO: 430537 - RNA, 23 nt, Artificial Sequence
  Synthetic
acaacaacaacgacaacaacaaa

SEQ ID NO: 430538 - RNA, 24 nt, Artificial Sequence
  Synthetic
aacaacaacaacgacaacaacaaa

SEQ ID NO: 430539 - RNA, 18 nt, Artificial Sequence
  Synthetic
caacuauaugccaacaaa

SEQ ID NO: 430540 - RNA, 19 nt, Artificial Sequence
  Synthetic
gcaacuauaugccaacaaa

SEQ ID NO: 430541 - RNA, 20 nt, Artificial Sequence
  Synthetic
agcaacuauaugccaacaaa

SEQ ID NO: 430542 - RNA, 21 nt, Artificial Sequence
  Synthetic
gagcaacuauaugccaacaaa

SEQ ID NO: 430543 - RNA, 22 nt, Artificial Sequence
  Synthetic
ugagcaacuauaugccaacaaa

SEQ ID NO: 430544 - RNA, 23 nt, Artificial Sequence
  Synthetic
augagcaacuauaugccaacaaa

SEQ ID NO: 430545 - RNA, 24 nt, Artificial Sequence
  Synthetic
uaugagcaacuauaugccaacaaa

SEQ ID NO: 430546 - RNA, 18 nt, Artificial Sequence
  Synthetic
auacaaaaagucaacaaa

SEQ ID NO: 430547 - RNA, 19 nt, Artificial Sequence
  Synthetic
cauacaaaaagucaacaaa

SEQ ID NO: 430548 - RNA, 20 nt, Artificial Sequence
  Synthetic
acauacaaaaagucaacaaa

SEQ ID NO: 430549 - RNA, 21 nt, Artificial Sequence
  Synthetic
aacauacaaaaagucaacaaa

SEQ ID NO: 430550 - RNA, 22 nt, Artificial Sequence
  Synthetic
aaacauacaaaaagucaacaaa

SEQ ID NO: 430551 - RNA, 23 nt, Artificial Sequence
  Synthetic
aaaacauacaaaaagucaacaaa

SEQ ID NO: 430552 - RNA, 24 nt, Artificial Sequence
  Synthetic
gaaaacauacaaaaagucaacaaa

SEQ ID NO: 430553 - RNA, 18 nt, Artificial Sequence
  Synthetic
agcaucaacaagaacaaa

SEQ ID NO: 430554 - RNA, 19 nt, Artificial Sequence
  Synthetic
gagcaucaacaagaacaaa

SEQ ID NO: 430555 - RNA, 20 nt, Artificial Sequence
  Synthetic
agagcaucaacaagaacaaa

SEQ ID NO: 430556 - RNA, 21 nt, Artificial Sequence
  Synthetic
cagagcaucaacaagaacaaa

SEQ ID NO: 430557 - RNA, 22 nt, Artificial Sequence
  Synthetic
acagagcaucaacaagaacaaa

SEQ ID NO: 430558 - RNA, 23 nt, Artificial Sequence
  Synthetic
cacagagcaucaacaagaacaaa

SEQ ID NO: 430559 - RNA, 24 nt, Artificial Sequence
  Synthetic
ccacagagcaucaacaagaacaaa

SEQ ID NO: 430560 - RNA, 18 nt, Artificial Sequence
  Synthetic
uugaauaggaagaacaaa

SEQ ID NO: 430561 - RNA, 19 nt, Artificial Sequence
  Synthetic
cuugaauaggaagaacaaa

SEQ ID NO: 430562 - RNA, 20 nt, Artificial Sequence
  Synthetic
ucuugaauaggaagaacaaa

SEQ ID NO: 430563 - RNA, 21 nt, Artificial Sequence
  Synthetic
aucuugaauaggaagaacaaa

SEQ ID NO: 430564 - RNA, 22 nt, Artificial Sequence
  Synthetic
aaucuugaauaggaagaacaaa

SEQ ID NO: 430565 - RNA, 23 nt, Artificial Sequence
  Synthetic
caaucuugaauaggaagaacaaa

SEQ ID NO: 430566 - RNA, 24 nt, Artificial Sequence
  Synthetic
gcaaucuugaauaggaagaacaaa

SEQ ID NO: 430567 - RNA, 18 nt, Artificial Sequence
  Synthetic
uugccacuuaagaacaaa

SEQ ID NO: 430568 - RNA, 19 nt, Artificial Sequence
  Synthetic
uuugccacuuaagaacaaa

SEQ ID NO: 430569 - RNA, 20 nt, Artificial Sequence
  Synthetic
auuugccacuuaagaacaaa

SEQ ID NO: 430570 - RNA, 21 nt, Artificial Sequence
  Synthetic
gauuugccacuuaagaacaaa

SEQ ID NO: 430571 - RNA, 22 nt, Artificial Sequence
  Synthetic
agauuugccacuuaagaacaaa

SEQ ID NO: 430572 - RNA, 23 nt, Artificial Sequence
  Synthetic
aagauuugccacuuaagaacaaa

SEQ ID NO: 430573 - RNA, 24 nt, Artificial Sequence
  Synthetic
aaagauuugccacuuaagaacaaa

SEQ ID NO: 430574 - RNA, 18 nt, Artificial Sequence
  Synthetic
ggaagaaaacagaacaaa

SEQ ID NO: 430575 - RNA, 19 nt, Artificial Sequence
  Synthetic
aggaagaaaacagaacaaa

SEQ ID NO: 430576 - RNA, 20 nt, Artificial Sequence
  Synthetic
gaggaagaaaacagaacaaa

SEQ ID NO: 430577 - RNA, 21 nt, Artificial Sequence
  Synthetic
cgaggaagaaaacagaacaaa

SEQ ID NO: 430578 - RNA, 22 nt, Artificial Sequence
  Synthetic
gcgaggaagaaaacagaacaaa

SEQ ID NO: 430579 - RNA, 23 nt, Artificial Sequence
  Synthetic
ggcgaggaagaaaacagaacaaa

SEQ ID NO: 430580 - RNA, 24 nt, Artificial Sequence
  Synthetic
aggcgaggaagaaaacagaacaaa

SEQ ID NO: 430581 - RNA, 18 nt, Artificial Sequence
  Synthetic
gcuuuaggggagaacaaa

SEQ ID NO: 430582 - RNA, 19 nt, Artificial Sequence
  Synthetic
agcuuuaggggagaacaaa

SEQ ID NO: 430583 - RNA, 20 nt, Artificial Sequence
  Synthetic
aagcuuuaggggagaacaaa

SEQ ID NO: 430584 - RNA, 21 nt, Artificial Sequence
  Synthetic
gaagcuuuaggggagaacaaa

SEQ ID NO: 430585 - RNA, 22 nt, Artificial Sequence
  Synthetic
agaagcuuuaggggagaacaaa

SEQ ID NO: 430586 - RNA, 23 nt, Artificial Sequence
  Synthetic
uagaagcuuuaggggagaacaaa

SEQ ID NO: 430587 - RNA, 24 nt, Artificial Sequence
  Synthetic
auagaagcuuuaggggagaacaaa

SEQ ID NO: 430588 - RNA, 18 nt, Artificial Sequence
  Synthetic
cauguacaugagaacaaa

SEQ ID NO: 430589 - RNA, 19 nt, Artificial Sequence
  Synthetic
ccauguacaugagaacaaa

SEQ ID NO: 430590 - RNA, 20 nt, Artificial Sequence
  Synthetic
uccauguacaugagaacaaa

SEQ ID NO: 430591 - RNA, 21 nt, Artificial Sequence
  Synthetic
cuccauguacaugagaacaaa

SEQ ID NO: 430592 - RNA, 22 nt, Artificial Sequence
  Synthetic
acuccauguacaugagaacaaa

SEQ ID NO: 430593 - RNA, 23 nt, Artificial Sequence
  Synthetic
uacuccauguacaugagaacaaa

SEQ ID NO: 430594 - RNA, 24 nt, Artificial Sequence
  Synthetic
auacuccauguacaugagaacaaa

SEQ ID NO: 430595 - RNA, 18 nt, Artificial Sequence
  Synthetic
aagaucguugagaacaaa

SEQ ID NO: 430596 - RNA, 19 nt, Artificial Sequence
  Synthetic
aaagaucguugagaacaaa

SEQ ID NO: 430597 - RNA, 20 nt, Artificial Sequence
  Synthetic
gaaagaucguugagaacaaa

SEQ ID NO: 430598 - RNA, 21 nt, Artificial Sequence
  Synthetic
ugaaagaucguugagaacaaa

SEQ ID NO: 430599 - RNA, 22 nt, Artificial Sequence
  Synthetic
cugaaagaucguugagaacaaa

SEQ ID NO: 430600 - RNA, 23 nt, Artificial Sequence
  Synthetic
acugaaagaucguugagaacaaa

SEQ ID NO: 430601 - RNA, 24 nt, Artificial Sequence
  Synthetic
cacugaaagaucguugagaacaaa

SEQ ID NO: 430602 - RNA, 18 nt, Artificial Sequence
  Synthetic
caauaacgaaugaacaaa

SEQ ID NO: 430603 - RNA, 19 nt, Artificial Sequence
  Synthetic
gcaauaacgaaugaacaaa

SEQ ID NO: 430604 - RNA, 20 nt, Artificial Sequence
  Synthetic
agcaauaacgaaugaacaaa

SEQ ID NO: 430605 - RNA, 21 nt, Artificial Sequence
  Synthetic
aagcaauaacgaaugaacaaa

SEQ ID NO: 430606 - RNA, 22 nt, Artificial Sequence
  Synthetic
aaagcaauaacgaaugaacaaa

SEQ ID NO: 430607 - RNA, 23 nt, Artificial Sequence
  Synthetic
aaaagcaauaacgaaugaacaaa

SEQ ID NO: 430608 - RNA, 24 nt, Artificial Sequence
  Synthetic
gaaaagcaauaacgaaugaacaaa

SEQ ID NO: 430609 - RNA, 18 nt, Artificial Sequence
  Synthetic
ugaggucacaugaacaaa

SEQ ID NO: 430610 - RNA, 19 nt, Artificial Sequence
  Synthetic
augaggucacaugaacaaa

SEQ ID NO: 430611 - RNA, 20 nt, Artificial Sequence
  Synthetic
aaugaggucacaugaacaaa

SEQ ID NO: 430612 - RNA, 21 nt, Artificial Sequence
  Synthetic
aaaugaggucacaugaacaaa

SEQ ID NO: 430613 - RNA, 22 nt, Artificial Sequence
  Synthetic
aaaaugaggucacaugaacaaa

SEQ ID NO: 430614 - RNA, 23 nt, Artificial Sequence
  Synthetic
gaaaaugaggucacaugaacaaa

SEQ ID NO: 430615 - RNA, 24 nt, Artificial Sequence
  Synthetic
ggaaaaugaggucacaugaacaaa

SEQ ID NO: 430616 - RNA, 18 nt, Artificial Sequence
  Synthetic
gaguacuuauugaacaaa

SEQ ID NO: 430617 - RNA, 19 nt, Artificial Sequence
  Synthetic
cgaguacuuauugaacaaa

SEQ ID NO: 430618 - RNA, 20 nt, Artificial Sequence
  Synthetic
ccgaguacuuauugaacaaa

SEQ ID NO: 430619 - RNA, 21 nt, Artificial Sequence
  Synthetic
uccgaguacuuauugaacaaa

SEQ ID NO: 430620 - RNA, 22 nt, Artificial Sequence
  Synthetic
guccgaguacuuauugaacaaa

SEQ ID NO: 430621 - RNA, 23 nt, Artificial Sequence
  Synthetic
gguccgaguacuuauugaacaaa

SEQ ID NO: 430622 - RNA, 24 nt, Artificial Sequence
  Synthetic
agguccgaguacuuauugaacaaa

SEQ ID NO: 430623 - RNA, 18 nt, Artificial Sequence
  Synthetic
ugguuucccuugaacaaa

SEQ ID NO: 430624 - RNA, 19 nt, Artificial Sequence
  Synthetic
cugguuucccuugaacaaa

SEQ ID NO: 430625 - RNA, 20 nt, Artificial Sequence
  Synthetic
acugguuucccuugaacaaa

SEQ ID NO: 430626 - RNA, 21 nt, Artificial Sequence
  Synthetic
aacugguuucccuugaacaaa

SEQ ID NO: 430627 - RNA, 22 nt, Artificial Sequence
  Synthetic
aaacugguuucccuugaacaaa

SEQ ID NO: 430628 - RNA, 23 nt, Artificial Sequence
  Synthetic
aaaacugguuucccuugaacaaa

SEQ ID NO: 430629 - RNA, 24 nt, Artificial Sequence
  Synthetic
gaaaacugguuucccuugaacaaa

SEQ ID NO: 430630 - RNA, 18 nt, Artificial Sequence
  Synthetic
gaaucuugaaauaacaaa

SEQ ID NO: 430631 - RNA, 19 nt, Artificial Sequence
  Synthetic
agaaucuugaaauaacaaa

SEQ ID NO: 430632 - RNA, 20 nt, Artificial Sequence
  Synthetic
aagaaucuugaaauaacaaa

SEQ ID NO: 430633 - RNA, 21 nt, Artificial Sequence
  Synthetic
aaagaaucuugaaauaacaaa

SEQ ID NO: 430634 - RNA, 22 nt, Artificial Sequence
  Synthetic
caaagaaucuugaaauaacaaa

SEQ ID NO: 430635 - RNA, 23 nt, Artificial Sequence
  Synthetic
ucaaagaaucuugaaauaacaaa

SEQ ID NO: 430636 - RNA, 24 nt, Artificial Sequence
  Synthetic
uucaaagaaucuugaaauaacaaa

SEQ ID NO: 430637 - RNA, 18 nt, Artificial Sequence
  Synthetic
aaauaugacaauaacaaa

SEQ ID NO: 430638 - RNA, 19 nt, Artificial Sequence
  Synthetic
gaaauaugacaauaacaaa

SEQ ID NO: 430639 - RNA, 20 nt, Artificial Sequence
  Synthetic
ugaaauaugacaauaacaaa

SEQ ID NO: 430640 - RNA, 21 nt, Artificial Sequence
  Synthetic
augaaauaugacaauaacaaa

SEQ ID NO: 430641 - RNA, 22 nt, Artificial Sequence
  Synthetic
caugaaauaugacaauaacaaa

SEQ ID NO: 430642 - RNA, 23 nt, Artificial Sequence
  Synthetic
ccaugaaauaugacaauaacaaa

SEQ ID NO: 430643 - RNA, 24 nt, Artificial Sequence
  Synthetic
uccaugaaauaugacaauaacaaa

SEQ ID NO: 430644 - RNA, 18 nt, Artificial Sequence
  Synthetic
aucaaagugaauaacaaa

SEQ ID NO: 430645 - RNA, 19 nt, Artificial Sequence
  Synthetic
aaucaaagugaauaacaaa

SEQ ID NO: 430646 - RNA, 20 nt, Artificial Sequence
  Synthetic
uaaucaaagugaauaacaaa

SEQ ID NO: 430647 - RNA, 21 nt, Artificial Sequence
  Synthetic
auaaucaaagugaauaacaaa

SEQ ID NO: 430648 - RNA, 22 nt, Artificial Sequence
  Synthetic
gauaaucaaagugaauaacaaa

SEQ ID NO: 430649 - RNA, 23 nt, Artificial Sequence
  Synthetic
ggauaaucaaagugaauaacaaa

SEQ ID NO: 430650 - RNA, 24 nt, Artificial Sequence
  Synthetic
aggauaaucaaagugaauaacaaa

SEQ ID NO: 430651 - RNA, 18 nt, Artificial Sequence
  Synthetic
cuaauauuauauaacaaa

SEQ ID NO: 430652 - RNA, 19 nt, Artificial Sequence
  Synthetic
ucuaauauuauauaacaaa

SEQ ID NO: 430653 - RNA, 20 nt, Artificial Sequence
  Synthetic
uucuaauauuauauaacaaa

SEQ ID NO: 430654 - RNA, 21 nt, Artificial Sequence
  Synthetic
uuucuaauauuauauaacaaa

SEQ ID NO: 430655 - RNA, 22 nt, Artificial Sequence
  Synthetic
auuucuaauauuauauaacaaa

SEQ ID NO: 430656 - RNA, 23 nt, Artificial Sequence
  Synthetic
uauuucuaauauuauauaacaaa

SEQ ID NO: 430657 - RNA, 24 nt, Artificial Sequence
  Synthetic
guauuucuaauauuauauaacaaa

SEQ ID NO: 430658 - RNA, 18 nt, Artificial Sequence
  Synthetic
aauacuaucucuaacaaa

SEQ ID NO: 430659 - RNA, 19 nt, Artificial Sequence
  Synthetic
caauacuaucucuaacaaa

SEQ ID NO: 430660 - RNA, 20 nt, Artificial Sequence
  Synthetic
acaauacuaucucuaacaaa

SEQ ID NO: 430661 - RNA, 21 nt, Artificial Sequence
  Synthetic
aacaauacuaucucuaacaaa

SEQ ID NO: 430662 - RNA, 22 nt, Artificial Sequence
  Synthetic
uaacaauacuaucucuaacaaa

SEQ ID NO: 430663 - RNA, 23 nt, Artificial Sequence
  Synthetic
auaacaauacuaucucuaacaaa

SEQ ID NO: 430664 - RNA, 24 nt, Artificial Sequence
  Synthetic
aauaacaauacuaucucuaacaaa

SEQ ID NO: 430665 - RNA, 18 nt, Artificial Sequence
  Synthetic
aaaggacauuguaacaaa

SEQ ID NO: 430666 - RNA, 19 nt, Artificial Sequence
  Synthetic
uaaaggacauuguaacaaa

SEQ ID NO: 430667 - RNA, 20 nt, Artificial Sequence
  Synthetic
guaaaggacauuguaacaaa

SEQ ID NO: 430668 - RNA, 21 nt, Artificial Sequence
  Synthetic
aguaaaggacauuguaacaaa

SEQ ID NO: 430669 - RNA, 22 nt, Artificial Sequence
  Synthetic
uaguaaaggacauuguaacaaa

SEQ ID NO: 430670 - RNA, 23 nt, Artificial Sequence
  Synthetic
cuaguaaaggacauuguaacaaa

SEQ ID NO: 430671 - RNA, 24 nt, Artificial Sequence
  Synthetic
ucuaguaaaggacauuguaacaaa

SEQ ID NO: 430672 - RNA, 18 nt, Artificial Sequence
  Synthetic
ggacuagguuguaacaaa

SEQ ID NO: 430673 - RNA, 19 nt, Artificial Sequence
  Synthetic
gggacuagguuguaacaaa

SEQ ID NO: 430674 - RNA, 20 nt, Artificial Sequence
  Synthetic
agggacuagguuguaacaaa

SEQ ID NO: 430675 - RNA, 21 nt, Artificial Sequence
  Synthetic
uagggacuagguuguaacaaa

SEQ ID NO: 430676 - RNA, 22 nt, Artificial Sequence
  Synthetic
auagggacuagguuguaacaaa

SEQ ID NO: 430677 - RNA, 23 nt, Artificial Sequence
  Synthetic
uauagggacuagguuguaacaaa

SEQ ID NO: 430678 - RNA, 24 nt, Artificial Sequence
  Synthetic
cuauagggacuagguuguaacaaa

SEQ ID NO: 430679 - RNA, 18 nt, Artificial Sequence
  Synthetic
gguuuucuaaaacacaaa

SEQ ID NO: 430680 - RNA, 19 nt, Artificial Sequence
  Synthetic
cgguuuucuaaaacacaaa

SEQ ID NO: 430681 - RNA, 20 nt, Artificial Sequence
  Synthetic
ucgguuuucuaaaacacaaa

SEQ ID NO: 430682 - RNA, 21 nt, Artificial Sequence
  Synthetic
aucgguuuucuaaaacacaaa

SEQ ID NO: 430683 - RNA, 22 nt, Artificial Sequence
  Synthetic
aaucgguuuucuaaaacacaaa

SEQ ID NO: 430684 - RNA, 23 nt, Artificial Sequence
  Synthetic
uaaucgguuuucuaaaacacaaa

SEQ ID NO: 430685 - RNA, 24 nt, Artificial Sequence
  Synthetic
uuaaucgguuuucuaaaacacaaa

SEQ ID NO: 430686 - RNA, 18 nt, Artificial Sequence
  Synthetic
gacugaaccccacacaaa

SEQ ID NO: 430687 - RNA, 19 nt, Artificial Sequence
  Synthetic
agacugaaccccacacaaa

SEQ ID NO: 430688 - RNA, 20 nt, Artificial Sequence
  Synthetic
uagacugaaccccacacaaa

SEQ ID NO: 430689 - RNA, 21 nt, Artificial Sequence
  Synthetic
cuagacugaaccccacacaaa

SEQ ID NO: 430690 - RNA, 22 nt, Artificial Sequence
  Synthetic
acuagacugaaccccacacaaa

SEQ ID NO: 430691 - RNA, 23 nt, Artificial Sequence
  Synthetic
uacuagacugaaccccacacaaa

SEQ ID NO: 430692 - RNA, 24 nt, Artificial Sequence
  Synthetic
auacuagacugaaccccacacaaa

SEQ ID NO: 430693 - RNA, 18 nt, Artificial Sequence
  Synthetic
uauuaaacaucacacaaa

SEQ ID NO: 430694 - RNA, 19 nt, Artificial Sequence
  Synthetic
cuauuaaacaucacacaaa

SEQ ID NO: 430695 - RNA, 20 nt, Artificial Sequence
  Synthetic
gcuauuaaacaucacacaaa

SEQ ID NO: 430696 - RNA, 21 nt, Artificial Sequence
  Synthetic
agcuauuaaacaucacacaaa

SEQ ID NO: 430697 - RNA, 22 nt, Artificial Sequence
  Synthetic
cagcuauuaaacaucacacaaa

SEQ ID NO: 430698 - RNA, 23 nt, Artificial Sequence
  Synthetic
acagcuauuaaacaucacacaaa

SEQ ID NO: 430699 - RNA, 24 nt, Artificial Sequence
  Synthetic
aacagcuauuaaacaucacacaaa

SEQ ID NO: 430700 - RNA, 18 nt, Artificial Sequence
  Synthetic
gucaauauucgacacaaa

SEQ ID NO: 430701 - RNA, 19 nt, Artificial Sequence
  Synthetic
ugucaauauucgacacaaa

SEQ ID NO: 430702 - RNA, 20 nt, Artificial Sequence
  Synthetic
cugucaauauucgacacaaa

SEQ ID NO: 430703 - RNA, 21 nt, Artificial Sequence
  Synthetic
ccugucaauauucgacacaaa

SEQ ID NO: 430704 - RNA, 22 nt, Artificial Sequence
  Synthetic
uccugucaauauucgacacaaa

SEQ ID NO: 430705 - RNA, 23 nt, Artificial Sequence
  Synthetic
cuccugucaauauucgacacaaa

SEQ ID NO: 430706 - RNA, 24 nt, Artificial Sequence
  Synthetic
ucuccugucaauauucgacacaaa

SEQ ID NO: 430707 - RNA, 18 nt, Artificial Sequence
  Synthetic
agcaccuagcuacacaaa

SEQ ID NO: 430708 - RNA, 19 nt, Artificial Sequence
  Synthetic
aagcaccuagcuacacaaa

SEQ ID NO: 430709 - RNA, 20 nt, Artificial Sequence
  Synthetic
gaagcaccuagcuacacaaa

SEQ ID NO: 430710 - RNA, 21 nt, Artificial Sequence
  Synthetic
agaagcaccuagcuacacaaa

SEQ ID NO: 430711 - RNA, 22 nt, Artificial Sequence
  Synthetic
aagaagcaccuagcuacacaaa

SEQ ID NO: 430712 - RNA, 23 nt, Artificial Sequence
  Synthetic
aaagaagcaccuagcuacacaaa

SEQ ID NO: 430713 - RNA, 24 nt, Artificial Sequence
  Synthetic
gaaagaagcaccuagcuacacaaa

SEQ ID NO: 430714 - RNA, 18 nt, Artificial Sequence
  Synthetic
aaaaaauauuuacacaaa

SEQ ID NO: 430715 - RNA, 19 nt, Artificial Sequence
  Synthetic
caaaaaauauuuacacaaa

SEQ ID NO: 430716 - RNA, 20 nt, Artificial Sequence
  Synthetic
gcaaaaaauauuuacacaaa

SEQ ID NO: 430717 - RNA, 21 nt, Artificial Sequence
  Synthetic
ugcaaaaaauauuuacacaaa

SEQ ID NO: 430718 - RNA, 22 nt, Artificial Sequence
  Synthetic
augcaaaaaauauuuacacaaa

SEQ ID NO: 430719 - RNA, 23 nt, Artificial Sequence
  Synthetic
aaugcaaaaaauauuuacacaaa

SEQ ID NO: 430720 - RNA, 24 nt, Artificial Sequence
  Synthetic
aaaugcaaaaaauauuuacacaaa

SEQ ID NO: 430721 - RNA, 18 nt, Artificial Sequence
  Synthetic
ucaacucaaacccacaaa

SEQ ID NO: 430722 - RNA, 19 nt, Artificial Sequence
  Synthetic
uucaacucaaacccacaaa

SEQ ID NO: 430723 - RNA, 20 nt, Artificial Sequence
  Synthetic
uuucaacucaaacccacaaa

SEQ ID NO: 430724 - RNA, 21 nt, Artificial Sequence
  Synthetic
guuucaacucaaacccacaaa

SEQ ID NO: 430725 - RNA, 22 nt, Artificial Sequence
  Synthetic
aguuucaacucaaacccacaaa

SEQ ID NO: 430726 - RNA, 23 nt, Artificial Sequence
  Synthetic
aaguuucaacucaaacccacaaa

SEQ ID NO: 430727 - RNA, 24 nt, Artificial Sequence
  Synthetic
gaaguuucaacucaaacccacaaa

SEQ ID NO: 430728 - RNA, 18 nt, Artificial Sequence
  Synthetic
ggauaaaacucccacaaa

SEQ ID NO: 430729 - RNA, 19 nt, Artificial Sequence
  Synthetic
aggauaaaacucccacaaa

SEQ ID NO: 430730 - RNA, 20 nt, Artificial Sequence
  Synthetic
aaggauaaaacucccacaaa

SEQ ID NO: 430731 - RNA, 21 nt, Artificial Sequence
  Synthetic
aaaggauaaaacucccacaaa

SEQ ID NO: 430732 - RNA, 22 nt, Artificial Sequence
  Synthetic
aaaaggauaaaacucccacaaa

SEQ ID NO: 430733 - RNA, 23 nt, Artificial Sequence
  Synthetic
caaaaggauaaaacucccacaaa

SEQ ID NO: 430734 - RNA, 24 nt, Artificial Sequence
  Synthetic
acaaaaggauaaaacucccacaaa

SEQ ID NO: 430735 - RNA, 18 nt, Artificial Sequence
  Synthetic
auaucauucugccacaaa

SEQ ID NO: 430736 - RNA, 19 nt, Artificial Sequence
  Synthetic
aauaucauucugccacaaa

SEQ ID NO: 430737 - RNA, 20 nt, Artificial Sequence
  Synthetic
gaauaucauucugccacaaa

SEQ ID NO: 430738 - RNA, 21 nt, Artificial Sequence
  Synthetic
ggaauaucauucugccacaaa

SEQ ID NO: 430739 - RNA, 22 nt, Artificial Sequence
  Synthetic
uggaauaucauucugccacaaa

SEQ ID NO: 430740 - RNA, 23 nt, Artificial Sequence
  Synthetic
auggaauaucauucugccacaaa

SEQ ID NO: 430741 - RNA, 24 nt, Artificial Sequence
  Synthetic
aauggaauaucauucugccacaaa

SEQ ID NO: 430742 - RNA, 18 nt, Artificial Sequence
  Synthetic
uuaugauacauccacaaa

SEQ ID NO: 430743 - RNA, 19 nt, Artificial Sequence
  Synthetic
auuaugauacauccacaaa

SEQ ID NO: 430744 - RNA, 20 nt, Artificial Sequence
  Synthetic
gauuaugauacauccacaaa

SEQ ID NO: 430745 - RNA, 21 nt, Artificial Sequence
  Synthetic
agauuaugauacauccacaaa

SEQ ID NO: 430746 - RNA, 22 nt, Artificial Sequence
  Synthetic
uagauuaugauacauccacaaa

SEQ ID NO: 430747 - RNA, 23 nt, Artificial Sequence
  Synthetic
auagauuaugauacauccacaaa

SEQ ID NO: 430748 - RNA, 24 nt, Artificial Sequence
  Synthetic
aauagauuaugauacauccacaaa

SEQ ID NO: 430749 - RNA, 18 nt, Artificial Sequence
  Synthetic
agucaugccauccacaaa

SEQ ID NO: 430750 - RNA, 19 nt, Artificial Sequence
  Synthetic
cagucaugccauccacaaa

SEQ ID NO: 430751 - RNA, 20 nt, Artificial Sequence
  Synthetic
acagucaugccauccacaaa

SEQ ID NO: 430752 - RNA, 21 nt, Artificial Sequence
  Synthetic
cacagucaugccauccacaaa

SEQ ID NO: 430753 - RNA, 22 nt, Artificial Sequence
  Synthetic
acacagucaugccauccacaaa

SEQ ID NO: 430754 - RNA, 23 nt, Artificial Sequence
  Synthetic
uacacagucaugccauccacaaa

SEQ ID NO: 430755 - RNA, 24 nt, Artificial Sequence
  Synthetic
guacacagucaugccauccacaaa

SEQ ID NO: 430756 - RNA, 18 nt, Artificial Sequence
  Synthetic
aaugaagauguccacaaa

SEQ ID NO: 430757 - RNA, 19 nt, Artificial Sequence
  Synthetic
gaaugaagauguccacaaa

SEQ ID NO: 430758 - RNA, 20 nt, Artificial Sequence
  Synthetic
agaaugaagauguccacaaa

SEQ ID NO: 430759 - RNA, 21 nt, Artificial Sequence
  Synthetic
uagaaugaagauguccacaaa

SEQ ID NO: 430760 - RNA, 22 nt, Artificial Sequence
  Synthetic
guagaaugaagauguccacaaa

SEQ ID NO: 430761 - RNA, 23 nt, Artificial Sequence
  Synthetic
uguagaaugaagauguccacaaa

SEQ ID NO: 430762 - RNA, 24 nt, Artificial Sequence
  Synthetic
auguagaaugaagauguccacaaa

SEQ ID NO: 430763 - RNA, 18 nt, Artificial Sequence
  Synthetic
ugauagcagaagcacaaa

SEQ ID NO: 430764 - RNA, 19 nt, Artificial Sequence
  Synthetic
augauagcagaagcacaaa

SEQ ID NO: 430765 - RNA, 20 nt, Artificial Sequence
  Synthetic
aaugauagcagaagcacaaa

SEQ ID NO: 430766 - RNA, 21 nt, Artificial Sequence
  Synthetic
gaaugauagcagaagcacaaa

SEQ ID NO: 430767 - RNA, 22 nt, Artificial Sequence
  Synthetic
agaaugauagcagaagcacaaa

SEQ ID NO: 430768 - RNA, 23 nt, Artificial Sequence
  Synthetic
cagaaugauagcagaagcacaaa

SEQ ID NO: 430769 - RNA, 24 nt, Artificial Sequence
  Synthetic
ucagaaugauagcagaagcacaaa

SEQ ID NO: 430770 - RNA, 18 nt, Artificial Sequence
  Synthetic
cuuuuuacacagcacaaa

SEQ ID NO: 430771 - RNA, 19 nt, Artificial Sequence
  Synthetic
gcuuuuuacacagcacaaa

SEQ ID NO: 430772 - RNA, 20 nt, Artificial Sequence
  Synthetic
agcuuuuuacacagcacaaa

SEQ ID NO: 430773 - RNA, 21 nt, Artificial Sequence
  Synthetic
aagcuuuuuacacagcacaaa

SEQ ID NO: 430774 - RNA, 22 nt, Artificial Sequence
  Synthetic
uaagcuuuuuacacagcacaaa

SEQ ID NO: 430775 - RNA, 23 nt, Artificial Sequence
  Synthetic
auaagcuuuuuacacagcacaaa

SEQ ID NO: 430776 - RNA, 24 nt, Artificial Sequence
  Synthetic
aauaagcuuuuuacacagcacaaa

SEQ ID NO: 430777 - RNA, 18 nt, Artificial Sequence
  Synthetic
uacaaagggcagcacaaa

SEQ ID NO: 430778 - RNA, 19 nt, Artificial Sequence
  Synthetic
guacaaagggcagcacaaa

SEQ ID NO: 430779 - RNA, 20 nt, Artificial Sequence
  Synthetic
cguacaaagggcagcacaaa

SEQ ID NO: 430780 - RNA, 21 nt, Artificial Sequence
  Synthetic
ucguacaaagggcagcacaaa

SEQ ID NO: 430781 - RNA, 22 nt, Artificial Sequence
  Synthetic
uucguacaaagggcagcacaaa

SEQ ID NO: 430782 - RNA, 23 nt, Artificial Sequence
  Synthetic
auucguacaaagggcagcacaaa

SEQ ID NO: 430783 - RNA, 24 nt, Artificial Sequence
  Synthetic
uauucguacaaagggcagcacaaa

SEQ ID NO: 430784 - RNA, 18 nt, Artificial Sequence
  Synthetic
uauuacaaagagcacaaa

SEQ ID NO: 430785 - RNA, 19 nt, Artificial Sequence
  Synthetic
uuauuacaaagagcacaaa

SEQ ID NO: 430786 - RNA, 20 nt, Artificial Sequence
  Synthetic
uuuauuacaaagagcacaaa

SEQ ID NO: 430787 - RNA, 21 nt, Artificial Sequence
  Synthetic
guuuauuacaaagagcacaaa

SEQ ID NO: 430788 - RNA, 22 nt, Artificial Sequence
  Synthetic
uguuuauuacaaagagcacaaa

SEQ ID NO: 430789 - RNA, 23 nt, Artificial Sequence
  Synthetic
auguuuauuacaaagagcacaaa

SEQ ID NO: 430790 - RNA, 24 nt, Artificial Sequence
  Synthetic
gauguuuauuacaaagagcacaaa

SEQ ID NO: 430791 - RNA, 18 nt, Artificial Sequence
  Synthetic
uacaggcgagggcacaaa

SEQ ID NO: 430792 - RNA, 19 nt, Artificial Sequence
  Synthetic
uuacaggcgagggcacaaa

SEQ ID NO: 430793 - RNA, 20 nt, Artificial Sequence
  Synthetic
uuuacaggcgagggcacaaa

SEQ ID NO: 430794 - RNA, 21 nt, Artificial Sequence
  Synthetic
uuuuacaggcgagggcacaaa

SEQ ID NO: 430795 - RNA, 22 nt, Artificial Sequence
  Synthetic
auuuuacaggcgagggcacaaa

SEQ ID NO: 430796 - RNA, 23 nt, Artificial Sequence
  Synthetic
cauuuuacaggcgagggcacaaa

SEQ ID NO: 430797 - RNA, 24 nt, Artificial Sequence
  Synthetic
ccauuuuacaggcgagggcacaaa

SEQ ID NO: 430798 - RNA, 18 nt, Artificial Sequence
  Synthetic
auucuugaaaaucacaaa

SEQ ID NO: 430799 - RNA, 19 nt, Artificial Sequence
  Synthetic
gauucuugaaaaucacaaa

SEQ ID NO: 430800 - RNA, 20 nt, Artificial Sequence
  Synthetic
agauucuugaaaaucacaaa

SEQ ID NO: 430801 - RNA, 21 nt, Artificial Sequence
  Synthetic
cagauucuugaaaaucacaaa

SEQ ID NO: 430802 - RNA, 22 nt, Artificial Sequence
  Synthetic
acagauucuugaaaaucacaaa

SEQ ID NO: 430803 - RNA, 23 nt, Artificial Sequence
  Synthetic
uacagauucuugaaaaucacaaa

SEQ ID NO: 430804 - RNA, 24 nt, Artificial Sequence
  Synthetic
uuacagauucuugaaaaucacaaa

SEQ ID NO: 430805 - RNA, 18 nt, Artificial Sequence
  Synthetic
aaguguggcagucacaaa

SEQ ID NO: 430806 - RNA, 19 nt, Artificial Sequence
  Synthetic
gaaguguggcagucacaaa

SEQ ID NO: 430807 - RNA, 20 nt, Artificial Sequence
  Synthetic
ggaaguguggcagucacaaa

SEQ ID NO: 430808 - RNA, 21 nt, Artificial Sequence
  Synthetic
aggaaguguggcagucacaaa

SEQ ID NO: 430809 - RNA, 22 nt, Artificial Sequence
  Synthetic
aaggaaguguggcagucacaaa

SEQ ID NO: 430810 - RNA, 23 nt, Artificial Sequence
  Synthetic
uaaggaaguguggcagucacaaa

SEQ ID NO: 430811 - RNA, 24 nt, Artificial Sequence
  Synthetic
cuaaggaaguguggcagucacaaa

SEQ ID NO: 430812 - RNA, 18 nt, Artificial Sequence
  Synthetic
gaucauauuauucacaaa

SEQ ID NO: 430813 - RNA, 19 nt, Artificial Sequence
  Synthetic
agaucauauuauucacaaa

SEQ ID NO: 430814 - RNA, 20 nt, Artificial Sequence
  Synthetic
gagaucauauuauucacaaa

SEQ ID NO: 430815 - RNA, 21 nt, Artificial Sequence
  Synthetic
ggagaucauauuauucacaaa

SEQ ID NO: 430816 - RNA, 22 nt, Artificial Sequence
  Synthetic
cggagaucauauuauucacaaa

SEQ ID NO: 430817 - RNA, 23 nt, Artificial Sequence
  Synthetic
acggagaucauauuauucacaaa

SEQ ID NO: 430818 - RNA, 24 nt, Artificial Sequence
  Synthetic
cacggagaucauauuauucacaaa

SEQ ID NO: 430819 - RNA, 18 nt, Artificial Sequence
  Synthetic
caccucagccuucacaaa

SEQ ID NO: 430820 - RNA, 19 nt, Artificial Sequence
  Synthetic
ucaccucagccuucacaaa

SEQ ID NO: 430821 - RNA, 20 nt, Artificial Sequence
  Synthetic
uucaccucagccuucacaaa

SEQ ID NO: 430822 - RNA, 21 nt, Artificial Sequence
  Synthetic
cuucaccucagccuucacaaa

SEQ ID NO: 430823 - RNA, 22 nt, Artificial Sequence
  Synthetic
ucuucaccucagccuucacaaa

SEQ ID NO: 430824 - RNA, 23 nt, Artificial Sequence
  Synthetic
cucuucaccucagccuucacaaa

SEQ ID NO: 430825 - RNA, 24 nt, Artificial Sequence
  Synthetic
acucuucaccucagccuucacaaa

SEQ ID NO: 430826 - RNA, 18 nt, Artificial Sequence
  Synthetic
acuagaggaaaagacaaa

SEQ ID NO: 430827 - RNA, 19 nt, Artificial Sequence
  Synthetic
gacuagaggaaaagacaaa

SEQ ID NO: 430828 - RNA, 20 nt, Artificial Sequence
  Synthetic
agacuagaggaaaagacaaa

SEQ ID NO: 430829 - RNA, 21 nt, Artificial Sequence
  Synthetic
aagacuagaggaaaagacaaa

SEQ ID NO: 430830 - RNA, 22 nt, Artificial Sequence
  Synthetic
aaagacuagaggaaaagacaaa

SEQ ID NO: 430831 - RNA, 23 nt, Artificial Sequence
  Synthetic
aaaagacuagaggaaaagacaaa

SEQ ID NO: 430832 - RNA, 24 nt, Artificial Sequence
  Synthetic
gaaaagacuagaggaaaagacaaa

SEQ ID NO: 430833 - RNA, 18 nt, Artificial Sequence
  Synthetic
ucacaauuuaaagacaaa

SEQ ID NO: 430834 - RNA, 19 nt, Artificial Sequence
  Synthetic
aucacaauuuaaagacaaa

SEQ ID NO: 430835 - RNA, 20 nt, Artificial Sequence
  Synthetic
uaucacaauuuaaagacaaa

SEQ ID NO: 430836 - RNA, 21 nt, Artificial Sequence
  Synthetic
auaucacaauuuaaagacaaa

SEQ ID NO: 430837 - RNA, 22 nt, Artificial Sequence
  Synthetic
uauaucacaauuuaaagacaaa

SEQ ID NO: 430838 - RNA, 23 nt, Artificial Sequence
  Synthetic
guauaucacaauuuaaagacaaa

SEQ ID NO: 430839 - RNA, 24 nt, Artificial Sequence
  Synthetic
aguauaucacaauuuaaagacaaa

SEQ ID NO: 430840 - RNA, 18 nt, Artificial Sequence
  Synthetic
cuagggacagaagacaaa

SEQ ID NO: 430841 - RNA, 19 nt, Artificial Sequence
  Synthetic
ccuagggacagaagacaaa

SEQ ID NO: 430842 - RNA, 20 nt, Artificial Sequence
  Synthetic
accuagggacagaagacaaa

SEQ ID NO: 430843 - RNA, 21 nt, Artificial Sequence
  Synthetic
uaccuagggacagaagacaaa

SEQ ID NO: 430844 - RNA, 22 nt, Artificial Sequence
  Synthetic
uuaccuagggacagaagacaaa

SEQ ID NO: 430845 - RNA, 23 nt, Artificial Sequence
  Synthetic
auuaccuagggacagaagacaaa

SEQ ID NO: 430846 - RNA, 24 nt, Artificial Sequence
  Synthetic
gauuaccuagggacagaagacaaa

SEQ ID NO: 430847 - RNA, 18 nt, Artificial Sequence
  Synthetic
ccaauggaauaagacaaa

SEQ ID NO: 430848 - RNA, 19 nt, Artificial Sequence
  Synthetic
accaauggaauaagacaaa

SEQ ID NO: 430849 - RNA, 20 nt, Artificial Sequence
  Synthetic
gaccaauggaauaagacaaa

SEQ ID NO: 430850 - RNA, 21 nt, Artificial Sequence
  Synthetic
agaccaauggaauaagacaaa

SEQ ID NO: 430851 - RNA, 22 nt, Artificial Sequence
  Synthetic
cagaccaauggaauaagacaaa

SEQ ID NO: 430852 - RNA, 23 nt, Artificial Sequence
  Synthetic
acagaccaauggaauaagacaaa

SEQ ID NO: 430853 - RNA, 24 nt, Artificial Sequence
  Synthetic
aacagaccaauggaauaagacaaa

SEQ ID NO: 430854 - RNA, 18 nt, Artificial Sequence
  Synthetic
acaccaauaacagacaaa

SEQ ID NO: 430855 - RNA, 19 nt, Artificial Sequence
  Synthetic
uacaccaauaacagacaaa

SEQ ID NO: 430856 - RNA, 20 nt, Artificial Sequence
  Synthetic
auacaccaauaacagacaaa

SEQ ID NO: 430857 - RNA, 21 nt, Artificial Sequence
  Synthetic
uauacaccaauaacagacaaa

SEQ ID NO: 430858 - RNA, 22 nt, Artificial Sequence
  Synthetic
uuauacaccaauaacagacaaa

SEQ ID NO: 430859 - RNA, 23 nt, Artificial Sequence
  Synthetic
cuuauacaccaauaacagacaaa

SEQ ID NO: 430860 - RNA, 24 nt, Artificial Sequence
  Synthetic
ucuuauacaccaauaacagacaaa

SEQ ID NO: 430861 - RNA, 18 nt, Artificial Sequence
  Synthetic
acaccaacgacagacaaa

SEQ ID NO: 430862 - RNA, 19 nt, Artificial Sequence
  Synthetic
uacaccaacgacagacaaa

SEQ ID NO: 430863 - RNA, 20 nt, Artificial Sequence
  Synthetic
auacaccaacgacagacaaa

SEQ ID NO: 430864 - RNA, 21 nt, Artificial Sequence
  Synthetic
uauacaccaacgacagacaaa

SEQ ID NO: 430865 - RNA, 22 nt, Artificial Sequence
  Synthetic
uuauacaccaacgacagacaaa

SEQ ID NO: 430866 - RNA, 23 nt, Artificial Sequence
  Synthetic
cuuauacaccaacgacagacaaa

SEQ ID NO: 430867 - RNA, 24 nt, Artificial Sequence
  Synthetic
ucuuauacaccaacgacagacaaa

SEQ ID NO: 430868 - RNA, 18 nt, Artificial Sequence
  Synthetic
auucuuauaucagacaaa

SEQ ID NO: 430869 - RNA, 19 nt, Artificial Sequence
  Synthetic
uauucuuauaucagacaaa

SEQ ID NO: 430870 - RNA, 20 nt, Artificial Sequence
  Synthetic
cuauucuuauaucagacaaa

SEQ ID NO: 430871 - RNA, 21 nt, Artificial Sequence
  Synthetic
gcuauucuuauaucagacaaa

SEQ ID NO: 430872 - RNA, 22 nt, Artificial Sequence
  Synthetic
agcuauucuuauaucagacaaa

SEQ ID NO: 430873 - RNA, 23 nt, Artificial Sequence
  Synthetic
uagcuauucuuauaucagacaaa

SEQ ID NO: 430874 - RNA, 24 nt, Artificial Sequence
  Synthetic
guagcuauucuuauaucagacaaa

SEQ ID NO: 430875 - RNA, 18 nt, Artificial Sequence
  Synthetic
ugaaugcaaggagacaaa

SEQ ID NO: 430876 - RNA, 19 nt, Artificial Sequence
  Synthetic
gugaaugcaaggagacaaa

SEQ ID NO: 430877 - RNA, 20 nt, Artificial Sequence
  Synthetic
cgugaaugcaaggagacaaa

SEQ ID NO: 430878 - RNA, 21 nt, Artificial Sequence
  Synthetic
ccgugaaugcaaggagacaaa

SEQ ID NO: 430879 - RNA, 22 nt, Artificial Sequence
  Synthetic
cccgugaaugcaaggagacaaa

SEQ ID NO: 430880 - RNA, 23 nt, Artificial Sequence
  Synthetic
ucccgugaaugcaaggagacaaa

SEQ ID NO: 430881 - RNA, 24 nt, Artificial Sequence
  Synthetic
uucccgugaaugcaaggagacaaa

SEQ ID NO: 430882 - RNA, 18 nt, Artificial Sequence
  Synthetic
uaaaagucuugagacaaa

SEQ ID NO: 430883 - RNA, 19 nt, Artificial Sequence
  Synthetic
uuaaaagucuugagacaaa

SEQ ID NO: 430884 - RNA, 20 nt, Artificial Sequence
  Synthetic
uuuaaaagucuugagacaaa

SEQ ID NO: 430885 - RNA, 21 nt, Artificial Sequence
  Synthetic
uuuuaaaagucuugagacaaa

SEQ ID NO: 430886 - RNA, 22 nt, Artificial Sequence
  Synthetic
uuuuuaaaagucuugagacaaa

SEQ ID NO: 430887 - RNA, 23 nt, Artificial Sequence
  Synthetic
uuuuuuaaaagucuugagacaaa

SEQ ID NO: 430888 - RNA, 24 nt, Artificial Sequence
  Synthetic
auuuuuuaaaagucuugagacaaa

SEQ ID NO: 430889 - RNA, 18 nt, Artificial Sequence
  Synthetic
acaccaagaauagacaaa

SEQ ID NO: 430890 - RNA, 19 nt, Artificial Sequence
  Synthetic
uacaccaagaauagacaaa

SEQ ID NO: 430891 - RNA, 20 nt, Artificial Sequence
  Synthetic
auacaccaagaauagacaaa

SEQ ID NO: 430892 - RNA, 21 nt, Artificial Sequence
  Synthetic
uauacaccaagaauagacaaa

SEQ ID NO: 430893 - RNA, 22 nt, Artificial Sequence
  Synthetic
cuauacaccaagaauagacaaa

SEQ ID NO: 430894 - RNA, 23 nt, Artificial Sequence
  Synthetic
ccuauacaccaagaauagacaaa

SEQ ID NO: 430895 - RNA, 24 nt, Artificial Sequence
  Synthetic
uccuauacaccaagaauagacaaa

SEQ ID NO: 430896 - RNA, 18 nt, Artificial Sequence
  Synthetic
gaauggaagcuagacaaa

SEQ ID NO: 430897 - RNA, 19 nt, Artificial Sequence
  Synthetic
ggaauggaagcuagacaaa

SEQ ID NO: 430898 - RNA, 20 nt, Artificial Sequence
  Synthetic
aggaauggaagcuagacaaa

SEQ ID NO: 430899 - RNA, 21 nt, Artificial Sequence
  Synthetic
aaggaauggaagcuagacaaa

SEQ ID NO: 430900 - RNA, 22 nt, Artificial Sequence
  Synthetic
aaaggaauggaagcuagacaaa

SEQ ID NO: 430901 - RNA, 23 nt, Artificial Sequence
  Synthetic
gaaaggaauggaagcuagacaaa

SEQ ID NO: 430902 - RNA, 24 nt, Artificial Sequence
  Synthetic
ugaaaggaauggaagcuagacaaa

SEQ ID NO: 430903 - RNA, 18 nt, Artificial Sequence
  Synthetic
uagauaggauuagacaaa

SEQ ID NO: 430904 - RNA, 19 nt, Artificial Sequence
  Synthetic
auagauaggauuagacaaa

SEQ ID NO: 430905 - RNA, 20 nt, Artificial Sequence
  Synthetic
uauagauaggauuagacaaa

SEQ ID NO: 430906 - RNA, 21 nt, Artificial Sequence
  Synthetic
auauagauaggauuagacaaa

SEQ ID NO: 430907 - RNA, 22 nt, Artificial Sequence
  Synthetic
aauauagauaggauuagacaaa

SEQ ID NO: 430908 - RNA, 23 nt, Artificial Sequence
  Synthetic
aaauauagauaggauuagacaaa

SEQ ID NO: 430909 - RNA, 24 nt, Artificial Sequence
  Synthetic
gaaauauagauaggauuagacaaa

SEQ ID NO: 430910 - RNA, 18 nt, Artificial Sequence
  Synthetic
ccagugccagacgacaaa

SEQ ID NO: 430911 - RNA, 19 nt, Artificial Sequence
  Synthetic
accagugccagacgacaaa

SEQ ID NO: 430912 - RNA, 20 nt, Artificial Sequence
  Synthetic
caccagugccagacgacaaa

SEQ ID NO: 430913 - RNA, 21 nt, Artificial Sequence
  Synthetic
gcaccagugccagacgacaaa

SEQ ID NO: 430914 - RNA, 22 nt, Artificial Sequence
  Synthetic
agcaccagugccagacgacaaa

SEQ ID NO: 430915 - RNA, 23 nt, Artificial Sequence
  Synthetic
cagcaccagugccagacgacaaa

SEQ ID NO: 430916 - RNA, 24 nt, Artificial Sequence
  Synthetic
acagcaccagugccagacgacaaa

SEQ ID NO: 430917 - RNA, 18 nt, Artificial Sequence
  Synthetic
aaucacaaagccgacaaa

SEQ ID NO: 430918 - RNA, 19 nt, Artificial Sequence
  Synthetic
caaucacaaagccgacaaa

SEQ ID NO: 430919 - RNA, 20 nt, Artificial Sequence
  Synthetic
gcaaucacaaagccgacaaa

SEQ ID NO: 430920 - RNA, 21 nt, Artificial Sequence
  Synthetic
agcaaucacaaagccgacaaa

SEQ ID NO: 430921 - RNA, 22 nt, Artificial Sequence
  Synthetic
aagcaaucacaaagccgacaaa

SEQ ID NO: 430922 - RNA, 23 nt, Artificial Sequence
  Synthetic
aaagcaaucacaaagccgacaaa

SEQ ID NO: 430923 - RNA, 24 nt, Artificial Sequence
  Synthetic
aaaagcaaucacaaagccgacaaa

SEQ ID NO: 430924 - RNA, 18 nt, Artificial Sequence
  Synthetic
aauuaaucuaaggacaaa

SEQ ID NO: 430925 - RNA, 19 nt, Artificial Sequence
  Synthetic
caauuaaucuaaggacaaa

SEQ ID NO: 430926 - RNA, 20 nt, Artificial Sequence
  Synthetic
gcaauuaaucuaaggacaaa

SEQ ID NO: 430927 - RNA, 21 nt, Artificial Sequence
  Synthetic
ggcaauuaaucuaaggacaaa

SEQ ID NO: 430928 - RNA, 22 nt, Artificial Sequence
  Synthetic
aggcaauuaaucuaaggacaaa

SEQ ID NO: 430929 - RNA, 23 nt, Artificial Sequence
  Synthetic
aaggcaauuaaucuaaggacaaa

SEQ ID NO: 430930 - RNA, 24 nt, Artificial Sequence
  Synthetic
aaaggcaauuaaucuaaggacaaa

SEQ ID NO: 430931 - RNA, 18 nt, Artificial Sequence
  Synthetic
auuauuucacaggacaaa

SEQ ID NO: 430932 - RNA, 19 nt, Artificial Sequence
  Synthetic
uauuauuucacaggacaaa

SEQ ID NO: 430933 - RNA, 20 nt, Artificial Sequence
  Synthetic
uuauuauuucacaggacaaa

SEQ ID NO: 430934 - RNA, 21 nt, Artificial Sequence
  Synthetic
auuauuauuucacaggacaaa

SEQ ID NO: 430935 - RNA, 22 nt, Artificial Sequence
  Synthetic
aauuauuauuucacaggacaaa

SEQ ID NO: 430936 - RNA, 23 nt, Artificial Sequence
  Synthetic
caauuauuauuucacaggacaaa

SEQ ID NO: 430937 - RNA, 24 nt, Artificial Sequence
  Synthetic
acaauuauuauuucacaggacaaa

SEQ ID NO: 430938 - RNA, 18 nt, Artificial Sequence
  Synthetic
ugagaacuucaggacaaa

SEQ ID NO: 430939 - RNA, 19 nt, Artificial Sequence
  Synthetic
augagaacuucaggacaaa

SEQ ID NO: 430940 - RNA, 20 nt, Artificial Sequence
  Synthetic
caugagaacuucaggacaaa

SEQ ID NO: 430941 - RNA, 21 nt, Artificial Sequence
  Synthetic
ucaugagaacuucaggacaaa

SEQ ID NO: 430942 - RNA, 22 nt, Artificial Sequence
  Synthetic
uucaugagaacuucaggacaaa

SEQ ID NO: 430943 - RNA, 23 nt, Artificial Sequence
  Synthetic
auucaugagaacuucaggacaaa

SEQ ID NO: 430944 - RNA, 24 nt, Artificial Sequence
  Synthetic
cauucaugagaacuucaggacaaa

SEQ ID NO: 430945 - RNA, 18 nt, Artificial Sequence
  Synthetic
guagggagaggggacaaa

SEQ ID NO: 430946 - RNA, 19 nt, Artificial Sequence
  Synthetic
aguagggagaggggacaaa

SEQ ID NO: 430947 - RNA, 20 nt, Artificial Sequence
  Synthetic
gaguagggagaggggacaaa

SEQ ID NO: 430948 - RNA, 21 nt, Artificial Sequence
  Synthetic
ggaguagggagaggggacaaa

SEQ ID NO: 430949 - RNA, 22 nt, Artificial Sequence
  Synthetic
aggaguagggagaggggacaaa

SEQ ID NO: 430950 - RNA, 23 nt, Artificial Sequence
  Synthetic
uaggaguagggagaggggacaaa

SEQ ID NO: 430951 - RNA, 24 nt, Artificial Sequence
  Synthetic
auaggaguagggagaggggacaaa

SEQ ID NO: 430952 - RNA, 18 nt, Artificial Sequence
  Synthetic
auguuuuugggggacaaa

SEQ ID NO: 430953 - RNA, 19 nt, Artificial Sequence
  Synthetic
aauguuuuugggggacaaa

SEQ ID NO: 430954 - RNA, 20 nt, Artificial Sequence
  Synthetic
uaauguuuuugggggacaaa

SEQ ID NO: 430955 - RNA, 21 nt, Artificial Sequence
  Synthetic
auaauguuuuugggggacaaa

SEQ ID NO: 430956 - RNA, 22 nt, Artificial Sequence
  Synthetic
aauaauguuuuugggggacaaa

SEQ ID NO: 430957 - RNA, 23 nt, Artificial Sequence
  Synthetic
aaauaauguuuuugggggacaaa

SEQ ID NO: 430958 - RNA, 24 nt, Artificial Sequence
  Synthetic
aaaauaauguuuuugggggacaaa

SEQ ID NO: 430959 - RNA, 18 nt, Artificial Sequence
  Synthetic
gucuugguucuggacaaa

SEQ ID NO: 430960 - RNA, 19 nt, Artificial Sequence
  Synthetic
agucuugguucuggacaaa

SEQ ID NO: 430961 - RNA, 20 nt, Artificial Sequence
  Synthetic
uagucuugguucuggacaaa

SEQ ID NO: 430962 - RNA, 21 nt, Artificial Sequence
  Synthetic
cuagucuugguucuggacaaa

SEQ ID NO: 430963 - RNA, 22 nt, Artificial Sequence
  Synthetic
ucuagucuugguucuggacaaa

SEQ ID NO: 430964 - RNA, 23 nt, Artificial Sequence
  Synthetic
aucuagucuugguucuggacaaa

SEQ ID NO: 430965 - RNA, 24 nt, Artificial Sequence
  Synthetic
caucuagucuugguucuggacaaa

SEQ ID NO: 430966 - RNA, 18 nt, Artificial Sequence
  Synthetic
aauaaguucaaugacaaa

SEQ ID NO: 430967 - RNA, 19 nt, Artificial Sequence
  Synthetic
aaauaaguucaaugacaaa

SEQ ID NO: 430968 - RNA, 20 nt, Artificial Sequence
  Synthetic
aaaauaaguucaaugacaaa

SEQ ID NO: 430969 - RNA, 21 nt, Artificial Sequence
  Synthetic
uaaaauaaguucaaugacaaa

SEQ ID NO: 430970 - RNA, 22 nt, Artificial Sequence
  Synthetic
uuaaaauaaguucaaugacaaa

SEQ ID NO: 430971 - RNA, 23 nt, Artificial Sequence
  Synthetic
auuaaaauaaguucaaugacaaa

SEQ ID NO: 430972 - RNA, 24 nt, Artificial Sequence
  Synthetic
aauuaaaauaaguucaaugacaaa

SEQ ID NO: 430973 - RNA, 18 nt, Artificial Sequence
  Synthetic
ugcagccuggaugacaaa

SEQ ID NO: 430974 - RNA, 19 nt, Artificial Sequence
  Synthetic
cugcagccuggaugacaaa

SEQ ID NO: 430975 - RNA, 20 nt, Artificial Sequence
  Synthetic
acugcagccuggaugacaaa

SEQ ID NO: 430976 - RNA, 21 nt, Artificial Sequence
  Synthetic
cacugcagccuggaugacaaa

SEQ ID NO: 430977 - RNA, 22 nt, Artificial Sequence
  Synthetic
gcacugcagccuggaugacaaa

SEQ ID NO: 430978 - RNA, 23 nt, Artificial Sequence
  Synthetic
ugcacugcagccuggaugacaaa

SEQ ID NO: 430979 - RNA, 24 nt, Artificial Sequence
  Synthetic
cugcacugcagccuggaugacaaa

SEQ ID NO: 430980 - RNA, 18 nt, Artificial Sequence
  Synthetic
agaguaauaucugacaaa

SEQ ID NO: 430981 - RNA, 19 nt, Artificial Sequence
  Synthetic
gagaguaauaucugacaaa

SEQ ID NO: 430982 - RNA, 20 nt, Artificial Sequence
  Synthetic
ggagaguaauaucugacaaa

SEQ ID NO: 430983 - RNA, 21 nt, Artificial Sequence
  Synthetic
gggagaguaauaucugacaaa

SEQ ID NO: 430984 - RNA, 22 nt, Artificial Sequence
  Synthetic
ggggagaguaauaucugacaaa

SEQ ID NO: 430985 - RNA, 23 nt, Artificial Sequence
  Synthetic
aggggagaguaauaucugacaaa

SEQ ID NO: 430986 - RNA, 24 nt, Artificial Sequence
  Synthetic
uaggggagaguaauaucugacaaa

SEQ ID NO: 430987 - RNA, 18 nt, Artificial Sequence
  Synthetic
uuaauuauaugugacaaa

SEQ ID NO: 430988 - RNA, 19 nt, Artificial Sequence
  Synthetic
uuuaauuauaugugacaaa

SEQ ID NO: 430989 - RNA, 20 nt, Artificial Sequence
  Synthetic
uuuuaauuauaugugacaaa

SEQ ID NO: 430990 - RNA, 21 nt, Artificial Sequence
  Synthetic
auuuuaauuauaugugacaaa

SEQ ID NO: 430991 - RNA, 22 nt, Artificial Sequence
  Synthetic
aauuuuaauuauaugugacaaa

SEQ ID NO: 430992 - RNA, 23 nt, Artificial Sequence
  Synthetic
aaauuuuaauuauaugugacaaa

SEQ ID NO: 430993 - RNA, 24 nt, Artificial Sequence
  Synthetic
aaaauuuuaauuauaugugacaaa

SEQ ID NO: 430994 - RNA, 18 nt, Artificial Sequence
  Synthetic
cuaaggaacugugacaaa

SEQ ID NO: 430995 - RNA, 19 nt, Artificial Sequence
  Synthetic
ccuaaggaacugugacaaa

SEQ ID NO: 430996 - RNA, 20 nt, Artificial Sequence
  Synthetic
uccuaaggaacugugacaaa

SEQ ID NO: 430997 - RNA, 21 nt, Artificial Sequence
  Synthetic
uuccuaaggaacugugacaaa

SEQ ID NO: 430998 - RNA, 22 nt, Artificial Sequence
  Synthetic
cuuccuaaggaacugugacaaa

SEQ ID NO: 430999 - RNA, 23 nt, Artificial Sequence
  Synthetic
ucuuccuaaggaacugugacaaa

SEQ ID NO: 431000 - RNA, 24 nt, Artificial Sequence
  Synthetic
aucuuccuaaggaacugugacaaa

SEQ ID NO: 431001 - RNA, 18 nt, Artificial Sequence
  Synthetic
auauggcauugugacaaa

SEQ ID NO: 431002 - RNA, 19 nt, Artificial Sequence
  Synthetic
cauauggcauugugacaaa

SEQ ID NO: 431003 - RNA, 20 nt, Artificial Sequence
  Synthetic
acauauggcauugugacaaa

SEQ ID NO: 431004 - RNA, 21 nt, Artificial Sequence
  Synthetic
uacauauggcauugugacaaa

SEQ ID NO: 431005 - RNA, 22 nt, Artificial Sequence
  Synthetic
cuacauauggcauugugacaaa

SEQ ID NO: 431006 - RNA, 23 nt, Artificial Sequence
  Synthetic
acuacauauggcauugugacaaa

SEQ ID NO: 431007 - RNA, 24 nt, Artificial Sequence
  Synthetic
aacuacauauggcauugugacaaa

SEQ ID NO: 431008 - RNA, 18 nt, Artificial Sequence
  Synthetic
ugagguaugauugacaaa

SEQ ID NO: 431009 - RNA, 19 nt, Artificial Sequence
  Synthetic
uugagguaugauugacaaa

SEQ ID NO: 431010 - RNA, 20 nt, Artificial Sequence
  Synthetic
auugagguaugauugacaaa

SEQ ID NO: 431011 - RNA, 21 nt, Artificial Sequence
  Synthetic
uauugagguaugauugacaaa

SEQ ID NO: 431012 - RNA, 22 nt, Artificial Sequence
  Synthetic
uuauugagguaugauugacaaa

SEQ ID NO: 431013 - RNA, 23 nt, Artificial Sequence
  Synthetic
uuuauugagguaugauugacaaa

SEQ ID NO: 431014 - RNA, 24 nt, Artificial Sequence
  Synthetic
cuuuauugagguaugauugacaaa

SEQ ID NO: 431015 - RNA, 18 nt, Artificial Sequence
  Synthetic
ucucaggcccuugacaaa

SEQ ID NO: 431016 - RNA, 19 nt, Artificial Sequence
  Synthetic
uucucaggcccuugacaaa

SEQ ID NO: 431017 - RNA, 20 nt, Artificial Sequence
  Synthetic
uuucucaggcccuugacaaa

SEQ ID NO: 431018 - RNA, 21 nt, Artificial Sequence
  Synthetic
auuucucaggcccuugacaaa

SEQ ID NO: 431019 - RNA, 22 nt, Artificial Sequence
  Synthetic
uauuucucaggcccuugacaaa

SEQ ID NO: 431020 - RNA, 23 nt, Artificial Sequence
  Synthetic
uuauuucucaggcccuugacaaa

SEQ ID NO: 431021 - RNA, 24 nt, Artificial Sequence
  Synthetic
uuuauuucucaggcccuugacaaa

SEQ ID NO: 431022 - RNA, 18 nt, Artificial Sequence
  Synthetic
auuguucccuuugacaaa

SEQ ID NO: 431023 - RNA, 19 nt, Artificial Sequence
  Synthetic
aauuguucccuuugacaaa

SEQ ID NO: 431024 - RNA, 20 nt, Artificial Sequence
  Synthetic
aaauuguucccuuugacaaa

SEQ ID NO: 431025 - RNA, 21 nt, Artificial Sequence
  Synthetic
caaauuguucccuuugacaaa

SEQ ID NO: 431026 - RNA, 22 nt, Artificial Sequence
  Synthetic
ucaaauuguucccuuugacaaa

SEQ ID NO: 431027 - RNA, 23 nt, Artificial Sequence
  Synthetic
aucaaauuguucccuuugacaaa

SEQ ID NO: 431028 - RNA, 24 nt, Artificial Sequence
  Synthetic
caucaaauuguucccuuugacaaa

SEQ ID NO: 431029 - RNA, 18 nt, Artificial Sequence
  Synthetic
ucaaaauauuuugacaaa

SEQ ID NO: 431030 - RNA, 19 nt, Artificial Sequence
  Synthetic
aucaaaauauuuugacaaa

SEQ ID NO: 431031 - RNA, 20 nt, Artificial Sequence
  Synthetic
caucaaaauauuuugacaaa

SEQ ID NO: 431032 - RNA, 21 nt, Artificial Sequence
  Synthetic
acaucaaaauauuuugacaaa

SEQ ID NO: 431033 - RNA, 22 nt, Artificial Sequence
  Synthetic
gacaucaaaauauuuugacaaa

SEQ ID NO: 431034 - RNA, 23 nt, Artificial Sequence
  Synthetic
ggacaucaaaauauuuugacaaa

SEQ ID NO: 431035 - RNA, 24 nt, Artificial Sequence
  Synthetic
aggacaucaaaauauuuugacaaa

SEQ ID NO: 431036 - RNA, 18 nt, Artificial Sequence
  Synthetic
caaaaugauaaauacaaa

SEQ ID NO: 431037 - RNA, 19 nt, Artificial Sequence
  Synthetic
acaaaaugauaaauacaaa

SEQ ID NO: 431038 - RNA, 20 nt, Artificial Sequence
  Synthetic
uacaaaaugauaaauacaaa

SEQ ID NO: 431039 - RNA, 21 nt, Artificial Sequence
  Synthetic
auacaaaaugauaaauacaaa

SEQ ID NO: 431040 - RNA, 22 nt, Artificial Sequence
  Synthetic
gauacaaaaugauaaauacaaa

SEQ ID NO: 431041 - RNA, 23 nt, Artificial Sequence
  Synthetic
agauacaaaaugauaaauacaaa

SEQ ID NO: 431042 - RNA, 24 nt, Artificial Sequence
  Synthetic
aagauacaaaaugauaaauacaaa

SEQ ID NO: 431043 - RNA, 18 nt, Artificial Sequence
  Synthetic
augaaacgagaauacaaa

SEQ ID NO: 431044 - RNA, 19 nt, Artificial Sequence
  Synthetic
uaugaaacgagaauacaaa

SEQ ID NO: 431045 - RNA, 20 nt, Artificial Sequence
  Synthetic
auaugaaacgagaauacaaa

SEQ ID NO: 431046 - RNA, 21 nt, Artificial Sequence
  Synthetic
gauaugaaacgagaauacaaa

SEQ ID NO: 431047 - RNA, 22 nt, Artificial Sequence
  Synthetic
ggauaugaaacgagaauacaaa

SEQ ID NO: 431048 - RNA, 23 nt, Artificial Sequence
  Synthetic
gggauaugaaacgagaauacaaa

SEQ ID NO: 431049 - RNA, 24 nt, Artificial Sequence
  Synthetic
agggauaugaaacgagaauacaaa

SEQ ID NO: 431050 - RNA, 18 nt, Artificial Sequence
  Synthetic
gagccaauggaauacaaa

SEQ ID NO: 431051 - RNA, 19 nt, Artificial Sequence
  Synthetic
ugagccaauggaauacaaa

SEQ ID NO: 431052 - RNA, 20 nt, Artificial Sequence
  Synthetic
augagccaauggaauacaaa

SEQ ID NO: 431053 - RNA, 21 nt, Artificial Sequence
  Synthetic
uaugagccaauggaauacaaa

SEQ ID NO: 431054 - RNA, 22 nt, Artificial Sequence
  Synthetic
uuaugagccaauggaauacaaa

SEQ ID NO: 431055 - RNA, 23 nt, Artificial Sequence
  Synthetic
cuuaugagccaauggaauacaaa

SEQ ID NO: 431056 - RNA, 24 nt, Artificial Sequence
  Synthetic
ucuuaugagccaauggaauacaaa

SEQ ID NO: 431057 - RNA, 18 nt, Artificial Sequence
  Synthetic
gcaagggcugaauacaaa

SEQ ID NO: 431058 - RNA, 19 nt, Artificial Sequence
  Synthetic
ugcaagggcugaauacaaa

SEQ ID NO: 431059 - RNA, 20 nt, Artificial Sequence
  Synthetic
augcaagggcugaauacaaa

SEQ ID NO: 431060 - RNA, 21 nt, Artificial Sequence
  Synthetic
uaugcaagggcugaauacaaa

SEQ ID NO: 431061 - RNA, 22 nt, Artificial Sequence
  Synthetic
cuaugcaagggcugaauacaaa

SEQ ID NO: 431062 - RNA, 23 nt, Artificial Sequence
  Synthetic
acuaugcaagggcugaauacaaa

SEQ ID NO: 431063 - RNA, 24 nt, Artificial Sequence
  Synthetic
uacuaugcaagggcugaauacaaa

SEQ ID NO: 431064 - RNA, 18 nt, Artificial Sequence
  Synthetic
auuagagauuaauacaaa

SEQ ID NO: 431065 - RNA, 19 nt, Artificial Sequence
  Synthetic
gauuagagauuaauacaaa

SEQ ID NO: 431066 - RNA, 20 nt, Artificial Sequence
  Synthetic
ugauuagagauuaauacaaa

SEQ ID NO: 431067 - RNA, 21 nt, Artificial Sequence
  Synthetic
augauuagagauuaauacaaa

SEQ ID NO: 431068 - RNA, 22 nt, Artificial Sequence
  Synthetic
caugauuagagauuaauacaaa

SEQ ID NO: 431069 - RNA, 23 nt, Artificial Sequence
  Synthetic
acaugauuagagauuaauacaaa

SEQ ID NO: 431070 - RNA, 24 nt, Artificial Sequence
  Synthetic
aacaugauuagagauuaauacaaa

SEQ ID NO: 431071 - RNA, 18 nt, Artificial Sequence
  Synthetic
gaauaaguuucauacaaa

SEQ ID NO: 431072 - RNA, 19 nt, Artificial Sequence
  Synthetic
ggaauaaguuucauacaaa

SEQ ID NO: 431073 - RNA, 20 nt, Artificial Sequence
  Synthetic
uggaauaaguuucauacaaa

SEQ ID NO: 431074 - RNA, 21 nt, Artificial Sequence
  Synthetic
uuggaauaaguuucauacaaa

SEQ ID NO: 431075 - RNA, 22 nt, Artificial Sequence
  Synthetic
uuuggaauaaguuucauacaaa

SEQ ID NO: 431076 - RNA, 23 nt, Artificial Sequence
  Synthetic
cuuuggaauaaguuucauacaaa

SEQ ID NO: 431077 - RNA, 24 nt, Artificial Sequence
  Synthetic
gcuuuggaauaaguuucauacaaa

SEQ ID NO: 431078 - RNA, 18 nt, Artificial Sequence
  Synthetic
uaacauaagagauacaaa

SEQ ID NO: 431079 - RNA, 19 nt, Artificial Sequence
  Synthetic
uuaacauaagagauacaaa

SEQ ID NO: 431080 - RNA, 20 nt, Artificial Sequence
  Synthetic
cuuaacauaagagauacaaa

SEQ ID NO: 431081 - RNA, 21 nt, Artificial Sequence
  Synthetic
ccuuaacauaagagauacaaa

SEQ ID NO: 431082 - RNA, 22 nt, Artificial Sequence
  Synthetic
gccuuaacauaagagauacaaa

SEQ ID NO: 431083 - RNA, 23 nt, Artificial Sequence
  Synthetic
ggccuuaacauaagagauacaaa

SEQ ID NO: 431084 - RNA, 24 nt, Artificial Sequence
  Synthetic
uggccuuaacauaagagauacaaa

SEQ ID NO: 431085 - RNA, 18 nt, Artificial Sequence
  Synthetic
uucuaccagagauacaaa

SEQ ID NO: 431086 - RNA, 19 nt, Artificial Sequence
  Synthetic
auucuaccagagauacaaa

SEQ ID NO: 431087 - RNA, 20 nt, Artificial Sequence
  Synthetic
aauucuaccagagauacaaa

SEQ ID NO: 431088 - RNA, 21 nt, Artificial Sequence
  Synthetic
gaauucuaccagagauacaaa

SEQ ID NO: 431089 - RNA, 22 nt, Artificial Sequence
  Synthetic
ugaauucuaccagagauacaaa

SEQ ID NO: 431090 - RNA, 23 nt, Artificial Sequence
  Synthetic
cugaauucuaccagagauacaaa

SEQ ID NO: 431091 - RNA, 24 nt, Artificial Sequence
  Synthetic
gcugaauucuaccagagauacaaa

SEQ ID NO: 431092 - RNA, 18 nt, Artificial Sequence
  Synthetic
uagcaagugugauacaaa

SEQ ID NO: 431093 - RNA, 19 nt, Artificial Sequence
  Synthetic
guagcaagugugauacaaa

SEQ ID NO: 431094 - RNA, 20 nt, Artificial Sequence
  Synthetic
aguagcaagugugauacaaa

SEQ ID NO: 431095 - RNA, 21 nt, Artificial Sequence
  Synthetic
uaguagcaagugugauacaaa

SEQ ID NO: 431096 - RNA, 22 nt, Artificial Sequence
  Synthetic
auaguagcaagugugauacaaa

SEQ ID NO: 431097 - RNA, 23 nt, Artificial Sequence
  Synthetic
gauaguagcaagugugauacaaa

SEQ ID NO: 431098 - RNA, 24 nt, Artificial Sequence
  Synthetic
ggauaguagcaagugugauacaaa

SEQ ID NO: 431099 - RNA, 18 nt, Artificial Sequence
  Synthetic
accucaggaaacuacaaa

SEQ ID NO: 431100 - RNA, 19 nt, Artificial Sequence
  Synthetic
uaccucaggaaacuacaaa

SEQ ID NO: 431101 - RNA, 20 nt, Artificial Sequence
  Synthetic
auaccucaggaaacuacaaa

SEQ ID NO: 431102 - RNA, 21 nt, Artificial Sequence
  Synthetic
uauaccucaggaaacuacaaa

SEQ ID NO: 431103 - RNA, 22 nt, Artificial Sequence
  Synthetic
uuauaccucaggaaacuacaaa

SEQ ID NO: 431104 - RNA, 23 nt, Artificial Sequence
  Synthetic
auuauaccucaggaaacuacaaa

SEQ ID NO: 431105 - RNA, 24 nt, Artificial Sequence
  Synthetic
cauuauaccucaggaaacuacaaa

SEQ ID NO: 431106 - RNA, 18 nt, Artificial Sequence
  Synthetic
aagaaagaauacuacaaa

SEQ ID NO: 431107 - RNA, 19 nt, Artificial Sequence
  Synthetic
aaagaaagaauacuacaaa

SEQ ID NO: 431108 - RNA, 20 nt, Artificial Sequence
  Synthetic
aaaagaaagaauacuacaaa

SEQ ID NO: 431109 - RNA, 21 nt, Artificial Sequence
  Synthetic
gaaaagaaagaauacuacaaa

SEQ ID NO: 431110 - RNA, 22 nt, Artificial Sequence
  Synthetic
agaaaagaaagaauacuacaaa

SEQ ID NO: 431111 - RNA, 23 nt, Artificial Sequence
  Synthetic
aagaaaagaaagaauacuacaaa

SEQ ID NO: 431112 - RNA, 24 nt, Artificial Sequence
  Synthetic
uaagaaaagaaagaauacuacaaa

SEQ ID NO: 431113 - RNA, 21 nt, Artificial Sequence
  Synthetic
agugaacaggcaaccuacaaa

SEQ ID NO: 431114 - RNA, 22 nt, Artificial Sequence
  Synthetic
gagugaacaggcaaccuacaaa

SEQ ID NO: 431115 - RNA, 23 nt, Artificial Sequence
  Synthetic
agagugaacaggcaaccuacaaa

SEQ ID NO: 431116 - RNA, 24 nt, Artificial Sequence
  Synthetic
cagagugaacaggcaaccuacaaa

SEQ ID NO: 431117 - RNA, 18 nt, Artificial Sequence
  Synthetic
uaaauaaauuccuacaaa

SEQ ID NO: 431118 - RNA, 19 nt, Artificial Sequence
  Synthetic
auaaauaaauuccuacaaa

SEQ ID NO: 431119 - RNA, 20 nt, Artificial Sequence
  Synthetic
cauaaauaaauuccuacaaa

SEQ ID NO: 431120 - RNA, 21 nt, Artificial Sequence
  Synthetic
ucauaaauaaauuccuacaaa

SEQ ID NO: 431121 - RNA, 22 nt, Artificial Sequence
  Synthetic
uucauaaauaaauuccuacaaa

SEQ ID NO: 431122 - RNA, 23 nt, Artificial Sequence
  Synthetic
auucauaaauaaauuccuacaaa

SEQ ID NO: 431123 - RNA, 24 nt, Artificial Sequence
  Synthetic
cauucauaaauaaauuccuacaaa

SEQ ID NO: 431124 - RNA, 18 nt, Artificial Sequence
  Synthetic
aauucugagugcuacaaa

SEQ ID NO: 431125 - RNA, 19 nt, Artificial Sequence
  Synthetic
aaauucugagugcuacaaa

SEQ ID NO: 431126 - RNA, 20 nt, Artificial Sequence
  Synthetic
caaauucugagugcuacaaa

SEQ ID NO: 431127 - RNA, 21 nt, Artificial Sequence
  Synthetic
ccaaauucugagugcuacaaa

SEQ ID NO: 431128 - RNA, 22 nt, Artificial Sequence
  Synthetic
gccaaauucugagugcuacaaa

SEQ ID NO: 431129 - RNA, 23 nt, Artificial Sequence
  Synthetic
ugccaaauucugagugcuacaaa

SEQ ID NO: 431130 - RNA, 24 nt, Artificial Sequence
  Synthetic
uugccaaauucugagugcuacaaa

SEQ ID NO: 431131 - RNA, 18 nt, Artificial Sequence
  Synthetic
gacaauugaaucuacaaa

SEQ ID NO: 431132 - RNA, 19 nt, Artificial Sequence
  Synthetic
ugacaauugaaucuacaaa

SEQ ID NO: 431133 - RNA, 20 nt, Artificial Sequence
  Synthetic
cugacaauugaaucuacaaa

SEQ ID NO: 431134 - RNA, 21 nt, Artificial Sequence
  Synthetic
gcugacaauugaaucuacaaa

SEQ ID NO: 431135 - RNA, 22 nt, Artificial Sequence
  Synthetic
agcugacaauugaaucuacaaa

SEQ ID NO: 431136 - RNA, 23 nt, Artificial Sequence
  Synthetic
cagcugacaauugaaucuacaaa

SEQ ID NO: 431137 - RNA, 24 nt, Artificial Sequence
  Synthetic
acagcugacaauugaaucuacaaa

SEQ ID NO: 431138 - RNA, 18 nt, Artificial Sequence
  Synthetic
ucuuagaaauaguacaaa

SEQ ID NO: 431139 - RNA, 19 nt, Artificial Sequence
  Synthetic
uucuuagaaauaguacaaa

SEQ ID NO: 431140 - RNA, 20 nt, Artificial Sequence
  Synthetic
guucuuagaaauaguacaaa

SEQ ID NO: 431141 - RNA, 21 nt, Artificial Sequence
  Synthetic
uguucuuagaaauaguacaaa

SEQ ID NO: 431142 - RNA, 22 nt, Artificial Sequence
  Synthetic
guguucuuagaaauaguacaaa

SEQ ID NO: 431143 - RNA, 23 nt, Artificial Sequence
  Synthetic
gguguucuuagaaauaguacaaa

SEQ ID NO: 431144 - RNA, 24 nt, Artificial Sequence
  Synthetic
ugguguucuuagaaauaguacaaa

SEQ ID NO: 431145 - RNA, 18 nt, Artificial Sequence
  Synthetic
aggcauuguugguacaaa

SEQ ID NO: 431146 - RNA, 19 nt, Artificial Sequence
  Synthetic
aaggcauuguugguacaaa

SEQ ID NO: 431147 - RNA, 20 nt, Artificial Sequence
  Synthetic
aaaggcauuguugguacaaa

SEQ ID NO: 431148 - RNA, 21 nt, Artificial Sequence
  Synthetic
gaaaggcauuguugguacaaa

SEQ ID NO: 431149 - RNA, 22 nt, Artificial Sequence
  Synthetic
agaaaggcauuguugguacaaa

SEQ ID NO: 431150 - RNA, 23 nt, Artificial Sequence
  Synthetic
uagaaaggcauuguugguacaaa

SEQ ID NO: 431151 - RNA, 24 nt, Artificial Sequence
  Synthetic
guagaaaggcauuguugguacaaa

SEQ ID NO: 431152 - RNA, 18 nt, Artificial Sequence
  Synthetic
aauguugagaauuacaaa

SEQ ID NO: 431153 - RNA, 19 nt, Artificial Sequence
  Synthetic
aaauguugagaauuacaaa

SEQ ID NO: 431154 - RNA, 20 nt, Artificial Sequence
  Synthetic
caaauguugagaauuacaaa

SEQ ID NO: 431155 - RNA, 21 nt, Artificial Sequence
  Synthetic
ucaaauguugagaauuacaaa

SEQ ID NO: 431156 - RNA, 22 nt, Artificial Sequence
  Synthetic
uucaaauguugagaauuacaaa

SEQ ID NO: 431157 - RNA, 23 nt, Artificial Sequence
  Synthetic
guucaaauguugagaauuacaaa

SEQ ID NO: 431158 - RNA, 24 nt, Artificial Sequence
  Synthetic
uguucaaauguugagaauuacaaa

SEQ ID NO: 431159 - RNA, 18 nt, Artificial Sequence
  Synthetic
ggauaaugugauuacaaa

SEQ ID NO: 431160 - RNA, 19 nt, Artificial Sequence
  Synthetic
uggauaaugugauuacaaa

SEQ ID NO: 431161 - RNA, 20 nt, Artificial Sequence
  Synthetic
auggauaaugugauuacaaa

SEQ ID NO: 431162 - RNA, 21 nt, Artificial Sequence
  Synthetic
aauggauaaugugauuacaaa

SEQ ID NO: 431163 - RNA, 22 nt, Artificial Sequence
  Synthetic
gaauggauaaugugauuacaaa

SEQ ID NO: 431164 - RNA, 23 nt, Artificial Sequence
  Synthetic
ggaauggauaaugugauuacaaa

SEQ ID NO: 431165 - RNA, 24 nt, Artificial Sequence
  Synthetic
uggaauggauaaugugauuacaaa

SEQ ID NO: 431166 - RNA, 18 nt, Artificial Sequence
  Synthetic
gauuuuugauauuacaaa

SEQ ID NO: 431167 - RNA, 19 nt, Artificial Sequence
  Synthetic
ugauuuuugauauuacaaa

SEQ ID NO: 431168 - RNA, 20 nt, Artificial Sequence
  Synthetic
augauuuuugauauuacaaa

SEQ ID NO: 431169 - RNA, 21 nt, Artificial Sequence
  Synthetic
gaugauuuuugauauuacaaa

SEQ ID NO: 431170 - RNA, 22 nt, Artificial Sequence
  Synthetic
cgaugauuuuugauauuacaaa

SEQ ID NO: 431171 - RNA, 23 nt, Artificial Sequence
  Synthetic
acgaugauuuuugauauuacaaa

SEQ ID NO: 431172 - RNA, 24 nt, Artificial Sequence
  Synthetic
uacgaugauuuuugauauuacaaa

SEQ ID NO: 431173 - RNA, 18 nt, Artificial Sequence
  Synthetic
acugguuuuccuuacaaa

SEQ ID NO: 431174 - RNA, 19 nt, Artificial Sequence
  Synthetic
cacugguuuuccuuacaaa

SEQ ID NO: 431175 - RNA, 20 nt, Artificial Sequence
  Synthetic
gcacugguuuuccuuacaaa

SEQ ID NO: 431176 - RNA, 21 nt, Artificial Sequence
  Synthetic
agcacugguuuuccuuacaaa

SEQ ID NO: 431177 - RNA, 22 nt, Artificial Sequence
  Synthetic
aagcacugguuuuccuuacaaa

SEQ ID NO: 431178 - RNA, 23 nt, Artificial Sequence
  Synthetic
aaagcacugguuuuccuuacaaa

SEQ ID NO: 431179 - RNA, 24 nt, Artificial Sequence
  Synthetic
aaaagcacugguuuuccuuacaaa

SEQ ID NO: 431180 - RNA, 18 nt, Artificial Sequence
  Synthetic
auuuuugcugcuuacaaa

SEQ ID NO: 431181 - RNA, 19 nt, Artificial Sequence
  Synthetic
uauuuuugcugcuuacaaa

SEQ ID NO: 431182 - RNA, 20 nt, Artificial Sequence
  Synthetic
uuauuuuugcugcuuacaaa

SEQ ID NO: 431183 - RNA, 21 nt, Artificial Sequence
  Synthetic
cuuauuuuugcugcuuacaaa

SEQ ID NO: 431184 - RNA, 22 nt, Artificial Sequence
  Synthetic
acuuauuuuugcugcuuacaaa

SEQ ID NO: 431185 - RNA, 23 nt, Artificial Sequence
  Synthetic
aacuuauuuuugcugcuuacaaa

SEQ ID NO: 431186 - RNA, 24 nt, Artificial Sequence
  Synthetic
gaacuuauuuuugcugcuuacaaa

SEQ ID NO: 431187 - RNA, 18 nt, Artificial Sequence
  Synthetic
acuuggaguucuuacaaa

SEQ ID NO: 431188 - RNA, 19 nt, Artificial Sequence
  Synthetic
cacuuggaguucuuacaaa

SEQ ID NO: 431189 - RNA, 20 nt, Artificial Sequence
  Synthetic
ccacuuggaguucuuacaaa

SEQ ID NO: 431190 - RNA, 21 nt, Artificial Sequence
  Synthetic
uccacuuggaguucuuacaaa

SEQ ID NO: 431191 - RNA, 22 nt, Artificial Sequence
  Synthetic
auccacuuggaguucuuacaaa

SEQ ID NO: 431192 - RNA, 23 nt, Artificial Sequence
  Synthetic
cauccacuuggaguucuuacaaa

SEQ ID NO: 431193 - RNA, 24 nt, Artificial Sequence
  Synthetic
gcauccacuuggaguucuuacaaa

SEQ ID NO: 431194 - RNA, 18 nt, Artificial Sequence
  Synthetic
aaggacaacgguuacaaa

SEQ ID NO: 431195 - RNA, 19 nt, Artificial Sequence
  Synthetic
caaggacaacgguuacaaa

SEQ ID NO: 431196 - RNA, 20 nt, Artificial Sequence
  Synthetic
acaaggacaacgguuacaaa

SEQ ID NO: 431197 - RNA, 21 nt, Artificial Sequence
  Synthetic
gacaaggacaacgguuacaaa

SEQ ID NO: 431198 - RNA, 22 nt, Artificial Sequence
  Synthetic
ggacaaggacaacgguuacaaa

SEQ ID NO: 431199 - RNA, 23 nt, Artificial Sequence
  Synthetic
uggacaaggacaacgguuacaaa

SEQ ID NO: 431200 - RNA, 24 nt, Artificial Sequence
  Synthetic
uuggacaaggacaacgguuacaaa

SEQ ID NO: 431201 - RNA, 18 nt, Artificial Sequence
  Synthetic
caaaccucacuuuacaaa

SEQ ID NO: 431202 - RNA, 19 nt, Artificial Sequence
  Synthetic
ccaaaccucacuuuacaaa

SEQ ID NO: 431203 - RNA, 20 nt, Artificial Sequence
  Synthetic
cccaaaccucacuuuacaaa

SEQ ID NO: 431204 - RNA, 21 nt, Artificial Sequence
  Synthetic
ccccaaaccucacuuuacaaa

SEQ ID NO: 431205 - RNA, 22 nt, Artificial Sequence
  Synthetic
cccccaaaccucacuuuacaaa

SEQ ID NO: 431206 - RNA, 23 nt, Artificial Sequence
  Synthetic
ucccccaaaccucacuuuacaaa

SEQ ID NO: 431207 - RNA, 24 nt, Artificial Sequence
  Synthetic
aucccccaaaccucacuuuacaaa

SEQ ID NO: 431208 - RNA, 18 nt, Artificial Sequence
  Synthetic
cucaaccuucuuuacaaa

SEQ ID NO: 431209 - RNA, 19 nt, Artificial Sequence
  Synthetic
acucaaccuucuuuacaaa

SEQ ID NO: 431210 - RNA, 20 nt, Artificial Sequence
  Synthetic
gacucaaccuucuuuacaaa

SEQ ID NO: 431211 - RNA, 21 nt, Artificial Sequence
  Synthetic
ggacucaaccuucuuuacaaa

SEQ ID NO: 431212 - RNA, 22 nt, Artificial Sequence
  Synthetic
gggacucaaccuucuuuacaaa

SEQ ID NO: 431213 - RNA, 23 nt, Artificial Sequence
  Synthetic
ggggacucaaccuucuuuacaaa

SEQ ID NO: 431214 - RNA, 24 nt, Artificial Sequence
  Synthetic
aggggacucaaccuucuuuacaaa

SEQ ID NO: 431215 - RNA, 18 nt, Artificial Sequence
  Synthetic
uuuaacauauuuuacaaa

SEQ ID NO: 431216 - RNA, 19 nt, Artificial Sequence
  Synthetic
auuuaacauauuuuacaaa

SEQ ID NO: 431217 - RNA, 20 nt, Artificial Sequence
  Synthetic
cauuuaacauauuuuacaaa

SEQ ID NO: 431218 - RNA, 21 nt, Artificial Sequence
  Synthetic
ucauuuaacauauuuuacaaa

SEQ ID NO: 431219 - RNA, 22 nt, Artificial Sequence
  Synthetic
uucauuuaacauauuuuacaaa

SEQ ID NO: 431220 - RNA, 23 nt, Artificial Sequence
  Synthetic
uuucauuuaacauauuuuacaaa

SEQ ID NO: 431221 - RNA, 24 nt, Artificial Sequence
  Synthetic
uuuucauuuaacauauuuuacaaa

SEQ ID NO: 431222 - RNA, 18 nt, Artificial Sequence
  Synthetic
augugguuguuuuacaaa

SEQ ID NO: 431223 - RNA, 19 nt, Artificial Sequence
  Synthetic
aaugugguuguuuuacaaa

SEQ ID NO: 431224 - RNA, 20 nt, Artificial Sequence
  Synthetic
gaaugugguuguuuuacaaa

SEQ ID NO: 431225 - RNA, 21 nt, Artificial Sequence
  Synthetic
ggaaugugguuguuuuacaaa

SEQ ID NO: 431226 - RNA, 22 nt, Artificial Sequence
  Synthetic
aggaaugugguuguuuuacaaa

SEQ ID NO: 431227 - RNA, 23 nt, Artificial Sequence
  Synthetic
gaggaaugugguuguuuuacaaa

SEQ ID NO: 431228 - RNA, 24 nt, Artificial Sequence
  Synthetic
ggaggaaugugguuguuuuacaaa

SEQ ID NO: 431229 - RNA, 18 nt, Artificial Sequence
  Synthetic
uuuuuuuuuuuuuacaaa

SEQ ID NO: 431230 - RNA, 19 nt, Artificial Sequence
  Synthetic
uuuuuuuuuuuuuuacaaa

SEQ ID NO: 431231 - RNA, 20 nt, Artificial Sequence
  Synthetic
uuuuuuuuuuuuuuuacaaa

SEQ ID NO: 431232 - RNA, 21 nt, Artificial Sequence
  Synthetic
uuuuuuuuuuuuuuuuacaaa

SEQ ID NO: 431233 - RNA, 22 nt, Artificial Sequence
  Synthetic
uuuuuuuuuuuuuuuuuacaaa

SEQ ID NO: 431234 - RNA, 23 nt, Artificial Sequence
  Synthetic
uuuuuuuuuuuuuuuuuuacaaa

SEQ ID NO: 431235 - RNA, 24 nt, Artificial Sequence
  Synthetic
uuuuuuuuuuuuuuuuuuuacaaa

SEQ ID NO: 431236 - RNA, 18 nt, Artificial Sequence
  Synthetic
gcugguagaaaaaccaaa

SEQ ID NO: 431237 - RNA, 19 nt, Artificial Sequence
  Synthetic
ugcugguagaaaaaccaaa

SEQ ID NO: 431238 - RNA, 20 nt, Artificial Sequence
  Synthetic
augcugguagaaaaaccaaa

SEQ ID NO: 431239 - RNA, 21 nt, Artificial Sequence
  Synthetic
aaugcugguagaaaaaccaaa

SEQ ID NO: 431240 - RNA, 22 nt, Artificial Sequence
  Synthetic
aaaugcugguagaaaaaccaaa

SEQ ID NO: 431241 - RNA, 23 nt, Artificial Sequence
  Synthetic
aaaaugcugguagaaaaaccaaa

SEQ ID NO: 431242 - RNA, 24 nt, Artificial Sequence
  Synthetic
uaaaaugcugguagaaaaaccaaa

SEQ ID NO: 431243 - RNA, 18 nt, Artificial Sequence
  Synthetic
ugcucucagcaaaccaaa

SEQ ID NO: 431244 - RNA, 19 nt, Artificial Sequence
  Synthetic
cugcucucagcaaaccaaa

SEQ ID NO: 431245 - RNA, 20 nt, Artificial Sequence
  Synthetic
acugcucucagcaaaccaaa

SEQ ID NO: 431246 - RNA, 21 nt, Artificial Sequence
  Synthetic
uacugcucucagcaaaccaaa

SEQ ID NO: 431247 - RNA, 22 nt, Artificial Sequence
  Synthetic
cuacugcucucagcaaaccaaa

SEQ ID NO: 431248 - RNA, 23 nt, Artificial Sequence
  Synthetic
acuacugcucucagcaaaccaaa

SEQ ID NO: 431249 - RNA, 24 nt, Artificial Sequence
  Synthetic
gacuacugcucucagcaaaccaaa

SEQ ID NO: 431250 - RNA, 18 nt, Artificial Sequence
  Synthetic
uaaauuaguacaaccaaa

SEQ ID NO: 431251 - RNA, 19 nt, Artificial Sequence
  Synthetic
guaaauuaguacaaccaaa

SEQ ID NO: 431252 - RNA, 20 nt, Artificial Sequence
  Synthetic
uguaaauuaguacaaccaaa

SEQ ID NO: 431253 - RNA, 21 nt, Artificial Sequence
  Synthetic
auguaaauuaguacaaccaaa

SEQ ID NO: 431254 - RNA, 22 nt, Artificial Sequence
  Synthetic
aauguaaauuaguacaaccaaa

SEQ ID NO: 431255 - RNA, 23 nt, Artificial Sequence
  Synthetic
gaauguaaauuaguacaaccaaa

SEQ ID NO: 431256 - RNA, 24 nt, Artificial Sequence
  Synthetic
ggaauguaaauuaguacaaccaaa

SEQ ID NO: 431257 - RNA, 18 nt, Artificial Sequence
  Synthetic
agcaaaagcccaaccaaa

SEQ ID NO: 431258 - RNA, 19 nt, Artificial Sequence
  Synthetic
uagcaaaagcccaaccaaa

SEQ ID NO: 431259 - RNA, 20 nt, Artificial Sequence
  Synthetic
uuagcaaaagcccaaccaaa

SEQ ID NO: 431260 - RNA, 21 nt, Artificial Sequence
  Synthetic
uuuagcaaaagcccaaccaaa

SEQ ID NO: 431261 - RNA, 22 nt, Artificial Sequence
  Synthetic
cuuuagcaaaagcccaaccaaa

SEQ ID NO: 431262 - RNA, 23 nt, Artificial Sequence
  Synthetic
gcuuuagcaaaagcccaaccaaa

SEQ ID NO: 431263 - RNA, 24 nt, Artificial Sequence
  Synthetic
ugcuuuagcaaaagcccaaccaaa

SEQ ID NO: 431264 - RNA, 18 nt, Artificial Sequence
  Synthetic
aaauaaaaggcaaccaaa

SEQ ID NO: 431265 - RNA, 19 nt, Artificial Sequence
  Synthetic
gaaauaaaaggcaaccaaa

SEQ ID NO: 431266 - RNA, 20 nt, Artificial Sequence
  Synthetic
agaaauaaaaggcaaccaaa

SEQ ID NO: 431267 - RNA, 21 nt, Artificial Sequence
  Synthetic
aagaaauaaaaggcaaccaaa

SEQ ID NO: 431268 - RNA, 22 nt, Artificial Sequence
  Synthetic
aaagaaauaaaaggcaaccaaa

SEQ ID NO: 431269 - RNA, 23 nt, Artificial Sequence
  Synthetic
gaaagaaauaaaaggcaaccaaa

SEQ ID NO: 431270 - RNA, 24 nt, Artificial Sequence
  Synthetic
agaaagaaauaaaaggcaaccaaa

SEQ ID NO: 431271 - RNA, 18 nt, Artificial Sequence
  Synthetic
gaggacugaggaaccaaa

SEQ ID NO: 431272 - RNA, 19 nt, Artificial Sequence
  Synthetic
agaggacugaggaaccaaa

SEQ ID NO: 431273 - RNA, 20 nt, Artificial Sequence
  Synthetic
aagaggacugaggaaccaaa

SEQ ID NO: 431274 - RNA, 21 nt, Artificial Sequence
  Synthetic
gaagaggacugaggaaccaaa

SEQ ID NO: 431275 - RNA, 22 nt, Artificial Sequence
  Synthetic
agaagaggacugaggaaccaaa

SEQ ID NO: 431276 - RNA, 23 nt, Artificial Sequence
  Synthetic
gagaagaggacugaggaaccaaa

SEQ ID NO: 431277 - RNA, 24 nt, Artificial Sequence
  Synthetic
agagaagaggacugaggaaccaaa

SEQ ID NO: 431278 - RNA, 18 nt, Artificial Sequence
  Synthetic
auuuacuucaccaccaaa

SEQ ID NO: 431279 - RNA, 19 nt, Artificial Sequence
  Synthetic
cauuuacuucaccaccaaa

SEQ ID NO: 431280 - RNA, 20 nt, Artificial Sequence
  Synthetic
ucauuuacuucaccaccaaa

SEQ ID NO: 431281 - RNA, 21 nt, Artificial Sequence
  Synthetic
gucauuuacuucaccaccaaa

SEQ ID NO: 431282 - RNA, 22 nt, Artificial Sequence
  Synthetic
ggucauuuacuucaccaccaaa

SEQ ID NO: 431283 - RNA, 23 nt, Artificial Sequence
  Synthetic
uggucauuuacuucaccaccaaa

SEQ ID NO: 431284 - RNA, 24 nt, Artificial Sequence
  Synthetic
auggucauuuacuucaccaccaaa

SEQ ID NO: 431285 - RNA, 18 nt, Artificial Sequence
  Synthetic
caagggcagcucaccaaa

SEQ ID NO: 431286 - RNA, 19 nt, Artificial Sequence
  Synthetic
ucaagggcagcucaccaaa

SEQ ID NO: 431287 - RNA, 20 nt, Artificial Sequence
  Synthetic
aucaagggcagcucaccaaa

SEQ ID NO: 431288 - RNA, 21 nt, Artificial Sequence
  Synthetic
aaucaagggcagcucaccaaa

SEQ ID NO: 431289 - RNA, 22 nt, Artificial Sequence
  Synthetic
uaaucaagggcagcucaccaaa

SEQ ID NO: 431290 - RNA, 23 nt, Artificial Sequence
  Synthetic
cuaaucaagggcagcucaccaaa

SEQ ID NO: 431291 - RNA, 24 nt, Artificial Sequence
  Synthetic
acuaaucaagggcagcucaccaaa

SEQ ID NO: 431292 - RNA, 18 nt, Artificial Sequence
  Synthetic
cuuauguaagaacccaaa

SEQ ID NO: 431293 - RNA, 19 nt, Artificial Sequence
  Synthetic
gcuuauguaagaacccaaa

SEQ ID NO: 431294 - RNA, 20 nt, Artificial Sequence
  Synthetic
ugcuuauguaagaacccaaa

SEQ ID NO: 431295 - RNA, 21 nt, Artificial Sequence
  Synthetic
uugcuuauguaagaacccaaa

SEQ ID NO: 431296 - RNA, 22 nt, Artificial Sequence
  Synthetic
uuugcuuauguaagaacccaaa

SEQ ID NO: 431297 - RNA, 23 nt, Artificial Sequence
  Synthetic
auuugcuuauguaagaacccaaa

SEQ ID NO: 431298 - RNA, 24 nt, Artificial Sequence
  Synthetic
gauuugcuuauguaagaacccaaa

SEQ ID NO: 431299 - RNA, 18 nt, Artificial Sequence
  Synthetic
aaguuaguugaacccaaa

SEQ ID NO: 431300 - RNA, 19 nt, Artificial Sequence
  Synthetic
caaguuaguugaacccaaa

SEQ ID NO: 431301 - RNA, 20 nt, Artificial Sequence
  Synthetic
gcaaguuaguugaacccaaa

SEQ ID NO: 431302 - RNA, 21 nt, Artificial Sequence
  Synthetic
agcaaguuaguugaacccaaa

SEQ ID NO: 431303 - RNA, 22 nt, Artificial Sequence
  Synthetic
cagcaaguuaguugaacccaaa

SEQ ID NO: 431304 - RNA, 23 nt, Artificial Sequence
  Synthetic
ccagcaaguuaguugaacccaaa

SEQ ID NO: 431305 - RNA, 24 nt, Artificial Sequence
  Synthetic
uccagcaaguuaguugaacccaaa

SEQ ID NO: 431306 - RNA, 18 nt, Artificial Sequence
  Synthetic
gccucauggugacccaaa

SEQ ID NO: 431307 - RNA, 19 nt, Artificial Sequence
  Synthetic
agccucauggugacccaaa

SEQ ID NO: 431308 - RNA, 20 nt, Artificial Sequence
  Synthetic
aagccucauggugacccaaa

SEQ ID NO: 431309 - RNA, 21 nt, Artificial Sequence
  Synthetic
gaagccucauggugacccaaa

SEQ ID NO: 431310 - RNA, 22 nt, Artificial Sequence
  Synthetic
agaagccucauggugacccaaa

SEQ ID NO: 431311 - RNA, 23 nt, Artificial Sequence
  Synthetic
aagaagccucauggugacccaaa

SEQ ID NO: 431312 - RNA, 24 nt, Artificial Sequence
  Synthetic
gaagaagccucauggugacccaaa

SEQ ID NO: 431313 - RNA, 18 nt, Artificial Sequence
  Synthetic
uccauuaauuuacccaaa

SEQ ID NO: 431314 - RNA, 19 nt, Artificial Sequence
  Synthetic
auccauuaauuuacccaaa

SEQ ID NO: 431315 - RNA, 20 nt, Artificial Sequence
  Synthetic
uauccauuaauuuacccaaa

SEQ ID NO: 431316 - RNA, 21 nt, Artificial Sequence
  Synthetic
guauccauuaauuuacccaaa

SEQ ID NO: 431317 - RNA, 22 nt, Artificial Sequence
  Synthetic
aguauccauuaauuuacccaaa

SEQ ID NO: 431318 - RNA, 23 nt, Artificial Sequence
  Synthetic
caguauccauuaauuuacccaaa

SEQ ID NO: 431319 - RNA, 24 nt, Artificial Sequence
  Synthetic
gcaguauccauuaauuuacccaaa

SEQ ID NO: 431320 - RNA, 18 nt, Artificial Sequence
  Synthetic
guccuaauagaccccaaa

SEQ ID NO: 431321 - RNA, 19 nt, Artificial Sequence
  Synthetic
aguccuaauagaccccaaa

SEQ ID NO: 431322 - RNA, 20 nt, Artificial Sequence
  Synthetic
aaguccuaauagaccccaaa

SEQ ID NO: 431323 - RNA, 21 nt, Artificial Sequence
  Synthetic
aaaguccuaauagaccccaaa

SEQ ID NO: 431324 - RNA, 22 nt, Artificial Sequence
  Synthetic
caaaguccuaauagaccccaaa

SEQ ID NO: 431325 - RNA, 23 nt, Artificial Sequence
  Synthetic
ccaaaguccuaauagaccccaaa

SEQ ID NO: 431326 - RNA, 24 nt, Artificial Sequence
  Synthetic
uccaaaguccuaauagaccccaaa

SEQ ID NO: 431327 - RNA, 18 nt, Artificial Sequence
  Synthetic
uagaauguuucccccaaa

SEQ ID NO: 431328 - RNA, 19 nt, Artificial Sequence
  Synthetic
uuagaauguuucccccaaa

SEQ ID NO: 431329 - RNA, 20 nt, Artificial Sequence
  Synthetic
uuuagaauguuucccccaaa

SEQ ID NO: 431330 - RNA, 21 nt, Artificial Sequence
  Synthetic
auuuagaauguuucccccaaa

SEQ ID NO: 431331 - RNA, 22 nt, Artificial Sequence
  Synthetic
cauuuagaauguuucccccaaa

SEQ ID NO: 431332 - RNA, 23 nt, Artificial Sequence
  Synthetic
acauuuagaauguuucccccaaa

SEQ ID NO: 431333 - RNA, 24 nt, Artificial Sequence
  Synthetic
cacauuuagaauguuucccccaaa

SEQ ID NO: 431334 - RNA, 18 nt, Artificial Sequence
  Synthetic
guguuacagaagcccaaa

SEQ ID NO: 431335 - RNA, 19 nt, Artificial Sequence
  Synthetic
aguguuacagaagcccaaa

SEQ ID NO: 431336 - RNA, 20 nt, Artificial Sequence
  Synthetic
uaguguuacagaagcccaaa

SEQ ID NO: 431337 - RNA, 21 nt, Artificial Sequence
  Synthetic
cuaguguuacagaagcccaaa

SEQ ID NO: 431338 - RNA, 22 nt, Artificial Sequence
  Synthetic
acuaguguuacagaagcccaaa

SEQ ID NO: 431339 - RNA, 23 nt, Artificial Sequence
  Synthetic
cacuaguguuacagaagcccaaa

SEQ ID NO: 431340 - RNA, 24 nt, Artificial Sequence
  Synthetic
gcacuaguguuacagaagcccaaa

SEQ ID NO: 431341 - RNA, 18 nt, Artificial Sequence
  Synthetic
caaaugucucugcccaaa

SEQ ID NO: 431342 - RNA, 19 nt, Artificial Sequence
  Synthetic
ucaaaugucucugcccaaa

SEQ ID NO: 431343 - RNA, 20 nt, Artificial Sequence
  Synthetic
uucaaaugucucugcccaaa

SEQ ID NO: 431344 - RNA, 21 nt, Artificial Sequence
  Synthetic
uuucaaaugucucugcccaaa

SEQ ID NO: 431345 - RNA, 22 nt, Artificial Sequence
  Synthetic
uuuucaaaugucucugcccaaa

SEQ ID NO: 431346 - RNA, 23 nt, Artificial Sequence
  Synthetic
uuuuucaaaugucucugcccaaa

SEQ ID NO: 431347 - RNA, 24 nt, Artificial Sequence
  Synthetic
cuuuuucaaaugucucugcccaaa

SEQ ID NO: 431348 - RNA, 18 nt, Artificial Sequence
  Synthetic
ggaauguuuuugcccaaa

SEQ ID NO: 431349 - RNA, 19 nt, Artificial Sequence
  Synthetic
uggaauguuuuugcccaaa

SEQ ID NO: 431350 - RNA, 20 nt, Artificial Sequence
  Synthetic
cuggaauguuuuugcccaaa

SEQ ID NO: 431351 - RNA, 21 nt, Artificial Sequence
  Synthetic
ccuggaauguuuuugcccaaa

SEQ ID NO: 431352 - RNA, 22 nt, Artificial Sequence
  Synthetic
gccuggaauguuuuugcccaaa

SEQ ID NO: 431353 - RNA, 23 nt, Artificial Sequence
  Synthetic
ugccuggaauguuuuugcccaaa

SEQ ID NO: 431354 - RNA, 24 nt, Artificial Sequence
  Synthetic
cugccuggaauguuuuugcccaaa

SEQ ID NO: 431355 - RNA, 18 nt, Artificial Sequence
  Synthetic
aauagagagaaucccaaa

SEQ ID NO: 431356 - RNA, 19 nt, Artificial Sequence
  Synthetic
aaauagagagaaucccaaa

SEQ ID NO: 431357 - RNA, 20 nt, Artificial Sequence
  Synthetic
uaaauagagagaaucccaaa

SEQ ID NO: 431358 - RNA, 21 nt, Artificial Sequence
  Synthetic
uuaaauagagagaaucccaaa

SEQ ID NO: 431359 - RNA, 22 nt, Artificial Sequence
  Synthetic
uuuaaauagagagaaucccaaa

SEQ ID NO: 431360 - RNA, 23 nt, Artificial Sequence
  Synthetic
cuuuaaauagagagaaucccaaa

SEQ ID NO: 431361 - RNA, 24 nt, Artificial Sequence
  Synthetic
ucuuuaaauagagagaaucccaaa

SEQ ID NO: 431362 - RNA, 18 nt, Artificial Sequence
  Synthetic
uguuuucaucaucccaaa

SEQ ID NO: 431363 - RNA, 19 nt, Artificial Sequence
  Synthetic
auguuuucaucaucccaaa

SEQ ID NO: 431364 - RNA, 20 nt, Artificial Sequence
  Synthetic
aauguuuucaucaucccaaa

SEQ ID NO: 431365 - RNA, 21 nt, Artificial Sequence
  Synthetic
gaauguuuucaucaucccaaa

SEQ ID NO: 431366 - RNA, 22 nt, Artificial Sequence
  Synthetic
agaauguuuucaucaucccaaa

SEQ ID NO: 431367 - RNA, 23 nt, Artificial Sequence
  Synthetic
uagaauguuuucaucaucccaaa

SEQ ID NO: 431368 - RNA, 24 nt, Artificial Sequence
  Synthetic
cuagaauguuuucaucaucccaaa

SEQ ID NO: 431369 - RNA, 18 nt, Artificial Sequence
  Synthetic
guuuccucaacucccaaa

SEQ ID NO: 431370 - RNA, 19 nt, Artificial Sequence
  Synthetic
aguuuccucaacucccaaa

SEQ ID NO: 431371 - RNA, 20 nt, Artificial Sequence
  Synthetic
caguuuccucaacucccaaa

SEQ ID NO: 431372 - RNA, 21 nt, Artificial Sequence
  Synthetic
ucaguuuccucaacucccaaa

SEQ ID NO: 431373 - RNA, 22 nt, Artificial Sequence
  Synthetic
cucaguuuccucaacucccaaa

SEQ ID NO: 431374 - RNA, 23 nt, Artificial Sequence
  Synthetic
ucucaguuuccucaacucccaaa

SEQ ID NO: 431375 - RNA, 24 nt, Artificial Sequence
  Synthetic
aucucaguuuccucaacucccaaa

SEQ ID NO: 431376 - RNA, 18 nt, Artificial Sequence
  Synthetic
uccguggcuucucccaaa

SEQ ID NO: 431377 - RNA, 19 nt, Artificial Sequence
  Synthetic
cuccguggcuucucccaaa

SEQ ID NO: 431378 - RNA, 20 nt, Artificial Sequence
  Synthetic
ucuccguggcuucucccaaa

SEQ ID NO: 431379 - RNA, 21 nt, Artificial Sequence
  Synthetic
uucuccguggcuucucccaaa

SEQ ID NO: 431380 - RNA, 22 nt, Artificial Sequence
  Synthetic
uuucuccguggcuucucccaaa

SEQ ID NO: 431381 - RNA, 23 nt, Artificial Sequence
  Synthetic
guuucuccguggcuucucccaaa

SEQ ID NO: 431382 - RNA, 24 nt, Artificial Sequence
  Synthetic
cguuucuccguggcuucucccaaa

SEQ ID NO: 431383 - RNA, 18 nt, Artificial Sequence
  Synthetic
ggaauucagggucccaaa

SEQ ID NO: 431384 - RNA, 19 nt, Artificial Sequence
  Synthetic
aggaauucagggucccaaa

SEQ ID NO: 431385 - RNA, 20 nt, Artificial Sequence
  Synthetic
caggaauucagggucccaaa

SEQ ID NO: 431386 - RNA, 21 nt, Artificial Sequence
  Synthetic
acaggaauucagggucccaaa

SEQ ID NO: 431387 - RNA, 22 nt, Artificial Sequence
  Synthetic
uacaggaauucagggucccaaa

SEQ ID NO: 431388 - RNA, 23 nt, Artificial Sequence
  Synthetic
cuacaggaauucagggucccaaa

SEQ ID NO: 431389 - RNA, 24 nt, Artificial Sequence
  Synthetic
ucuacaggaauucagggucccaaa

SEQ ID NO: 431390 - RNA, 18 nt, Artificial Sequence
  Synthetic
cuacauuguauucccaaa

SEQ ID NO: 431391 - RNA, 19 nt, Artificial Sequence
  Synthetic
ccuacauuguauucccaaa

SEQ ID NO: 431392 - RNA, 20 nt, Artificial Sequence
  Synthetic
accuacauuguauucccaaa

SEQ ID NO: 431393 - RNA, 21 nt, Artificial Sequence
  Synthetic
caccuacauuguauucccaaa

SEQ ID NO: 431394 - RNA, 22 nt, Artificial Sequence
  Synthetic
acaccuacauuguauucccaaa

SEQ ID NO: 431395 - RNA, 23 nt, Artificial Sequence
  Synthetic
cacaccuacauuguauucccaaa

SEQ ID NO: 431396 - RNA, 24 nt, Artificial Sequence
  Synthetic
acacaccuacauuguauucccaaa

SEQ ID NO: 431397 - RNA, 18 nt, Artificial Sequence
  Synthetic
auggcaacaaaagccaaa

SEQ ID NO: 431398 - RNA, 19 nt, Artificial Sequence
  Synthetic
aauggcaacaaaagccaaa

SEQ ID NO: 431399 - RNA, 20 nt, Artificial Sequence
  Synthetic
caauggcaacaaaagccaaa

SEQ ID NO: 431400 - RNA, 21 nt, Artificial Sequence
  Synthetic
gcaauggcaacaaaagccaaa

SEQ ID NO: 431401 - RNA, 22 nt, Artificial Sequence
  Synthetic
agcaauggcaacaaaagccaaa

SEQ ID NO: 431402 - RNA, 23 nt, Artificial Sequence
  Synthetic
aagcaauggcaacaaaagccaaa

SEQ ID NO: 431403 - RNA, 24 nt, Artificial Sequence
  Synthetic
aaagcaauggcaacaaaagccaaa

SEQ ID NO: 431404 - RNA, 18 nt, Artificial Sequence
  Synthetic
uuuagcacaaaagccaaa

SEQ ID NO: 431405 - RNA, 19 nt, Artificial Sequence
  Synthetic
uuuuagcacaaaagccaaa

SEQ ID NO: 431406 - RNA, 20 nt, Artificial Sequence
  Synthetic
uuuuuagcacaaaagccaaa

SEQ ID NO: 431407 - RNA, 21 nt, Artificial Sequence
  Synthetic
auuuuuagcacaaaagccaaa

SEQ ID NO: 431408 - RNA, 22 nt, Artificial Sequence
  Synthetic
cauuuuuagcacaaaagccaaa

SEQ ID NO: 431409 - RNA, 23 nt, Artificial Sequence
  Synthetic
acauuuuuagcacaaaagccaaa

SEQ ID NO: 431410 - RNA, 24 nt, Artificial Sequence
  Synthetic
cacauuuuuagcacaaaagccaaa

SEQ ID NO: 431411 - RNA, 18 nt, Artificial Sequence
  Synthetic
aaacuuccagcagccaaa

SEQ ID NO: 431412 - RNA, 19 nt, Artificial Sequence
  Synthetic
aaaacuuccagcagccaaa

SEQ ID NO: 431413 - RNA, 20 nt, Artificial Sequence
  Synthetic
uaaaacuuccagcagccaaa

SEQ ID NO: 431414 - RNA, 21 nt, Artificial Sequence
  Synthetic
auaaaacuuccagcagccaaa

SEQ ID NO: 431415 - RNA, 22 nt, Artificial Sequence
  Synthetic
aauaaaacuuccagcagccaaa

SEQ ID NO: 431416 - RNA, 23 nt, Artificial Sequence
  Synthetic
aaauaaaacuuccagcagccaaa

SEQ ID NO: 431417 - RNA, 24 nt, Artificial Sequence
  Synthetic
gaaauaaaacuuccagcagccaaa

SEQ ID NO: 431418 - RNA, 18 nt, Artificial Sequence
  Synthetic
ggaagguuagaggccaaa

SEQ ID NO: 431419 - RNA, 19 nt, Artificial Sequence
  Synthetic
uggaagguuagaggccaaa

SEQ ID NO: 431420 - RNA, 20 nt, Artificial Sequence
  Synthetic
uuggaagguuagaggccaaa

SEQ ID NO: 431421 - RNA, 21 nt, Artificial Sequence
  Synthetic
uuuggaagguuagaggccaaa

SEQ ID NO: 431422 - RNA, 22 nt, Artificial Sequence
  Synthetic
uuuuggaagguuagaggccaaa

SEQ ID NO: 431423 - RNA, 23 nt, Artificial Sequence
  Synthetic
auuuuggaagguuagaggccaaa

SEQ ID NO: 431424 - RNA, 24 nt, Artificial Sequence
  Synthetic
aauuuuggaagguuagaggccaaa

SEQ ID NO: 431425 - RNA, 18 nt, Artificial Sequence
  Synthetic
gacacacccugggccaaa

SEQ ID NO: 431426 - RNA, 19 nt, Artificial Sequence
  Synthetic
agacacacccugggccaaa

SEQ ID NO: 431427 - RNA, 20 nt, Artificial Sequence
  Synthetic
uagacacacccugggccaaa

SEQ ID NO: 431428 - RNA, 21 nt, Artificial Sequence
  Synthetic
cuagacacacccugggccaaa

SEQ ID NO: 431429 - RNA, 22 nt, Artificial Sequence
  Synthetic
ucuagacacacccugggccaaa

SEQ ID NO: 431430 - RNA, 23 nt, Artificial Sequence
  Synthetic
uucuagacacacccugggccaaa

SEQ ID NO: 431431 - RNA, 24 nt, Artificial Sequence
  Synthetic
uuucuagacacacccugggccaaa

SEQ ID NO: 431432 - RNA, 18 nt, Artificial Sequence
  Synthetic
augcugcccugggccaaa

SEQ ID NO: 431433 - RNA, 19 nt, Artificial Sequence
  Synthetic
aaugcugcccugggccaaa

SEQ ID NO: 431434 - RNA, 20 nt, Artificial Sequence
  Synthetic
aaaugcugcccugggccaaa

SEQ ID NO: 431435 - RNA, 21 nt, Artificial Sequence
  Synthetic
gaaaugcugcccugggccaaa

SEQ ID NO: 431436 - RNA, 22 nt, Artificial Sequence
  Synthetic
agaaaugcugcccugggccaaa

SEQ ID NO: 431437 - RNA, 23 nt, Artificial Sequence
  Synthetic
aagaaaugcugcccugggccaaa

SEQ ID NO: 431438 - RNA, 24 nt, Artificial Sequence
  Synthetic
caagaaaugcugcccugggccaaa

SEQ ID NO: 431439 - RNA, 18 nt, Artificial Sequence
  Synthetic
cuaacauuuugggccaaa

SEQ ID NO: 431440 - RNA, 19 nt, Artificial Sequence
  Synthetic
ccuaacauuuugggccaaa

SEQ ID NO: 431441 - RNA, 20 nt, Artificial Sequence
  Synthetic
accuaacauuuugggccaaa

SEQ ID NO: 431442 - RNA, 21 nt, Artificial Sequence
  Synthetic
gaccuaacauuuugggccaaa

SEQ ID NO: 431443 - RNA, 22 nt, Artificial Sequence
  Synthetic
ugaccuaacauuuugggccaaa

SEQ ID NO: 431444 - RNA, 23 nt, Artificial Sequence
  Synthetic
augaccuaacauuuugggccaaa

SEQ ID NO: 431445 - RNA, 24 nt, Artificial Sequence
  Synthetic
uaugaccuaacauuuugggccaaa

SEQ ID NO: 431446 - RNA, 18 nt, Artificial Sequence
  Synthetic
ccaaauagaguggccaaa

SEQ ID NO: 431447 - RNA, 19 nt, Artificial Sequence
  Synthetic
uccaaauagaguggccaaa

SEQ ID NO: 431448 - RNA, 20 nt, Artificial Sequence
  Synthetic
cuccaaauagaguggccaaa

SEQ ID NO: 431449 - RNA, 21 nt, Artificial Sequence
  Synthetic
ucuccaaauagaguggccaaa

SEQ ID NO: 431450 - RNA, 22 nt, Artificial Sequence
  Synthetic
cucuccaaauagaguggccaaa

SEQ ID NO: 431451 - RNA, 23 nt, Artificial Sequence
  Synthetic
ccucuccaaauagaguggccaaa

SEQ ID NO: 431452 - RNA, 24 nt, Artificial Sequence
  Synthetic
gccucuccaaauagaguggccaaa

SEQ ID NO: 431453 - RNA, 18 nt, Artificial Sequence
  Synthetic
uuuguguuaaaugccaaa

SEQ ID NO: 431454 - RNA, 19 nt, Artificial Sequence
  Synthetic
uuuuguguuaaaugccaaa

SEQ ID NO: 431455 - RNA, 20 nt, Artificial Sequence
  Synthetic
guuuuguguuaaaugccaaa

SEQ ID NO: 431456 - RNA, 21 nt, Artificial Sequence
  Synthetic
aguuuuguguuaaaugccaaa

SEQ ID NO: 431457 - RNA, 22 nt, Artificial Sequence
  Synthetic
aaguuuuguguuaaaugccaaa

SEQ ID NO: 431458 - RNA, 23 nt, Artificial Sequence
  Synthetic
aaaguuuuguguuaaaugccaaa

SEQ ID NO: 431459 - RNA, 24 nt, Artificial Sequence
  Synthetic
uaaaguuuuguguuaaaugccaaa

SEQ ID NO: 431460 - RNA, 18 nt, Artificial Sequence
  Synthetic
cacucacuauaugccaaa

SEQ ID NO: 431461 - RNA, 19 nt, Artificial Sequence
  Synthetic
acacucacuauaugccaaa

SEQ ID NO: 431462 - RNA, 20 nt, Artificial Sequence
  Synthetic
cacacucacuauaugccaaa

SEQ ID NO: 431463 - RNA, 21 nt, Artificial Sequence
  Synthetic
acacacucacuauaugccaaa

SEQ ID NO: 431464 - RNA, 22 nt, Artificial Sequence
  Synthetic
cacacacucacuauaugccaaa

SEQ ID NO: 431465 - RNA, 23 nt, Artificial Sequence
  Synthetic
acacacacucacuauaugccaaa

SEQ ID NO: 431466 - RNA, 24 nt, Artificial Sequence
  Synthetic
uacacacacucacuauaugccaaa

SEQ ID NO: 431467 - RNA, 18 nt, Artificial Sequence
  Synthetic
gguccagauucugccaaa

SEQ ID NO: 431468 - RNA, 19 nt, Artificial Sequence
  Synthetic
ggguccagauucugccaaa

SEQ ID NO: 431469 - RNA, 20 nt, Artificial Sequence
  Synthetic
uggguccagauucugccaaa

SEQ ID NO: 431470 - RNA, 21 nt, Artificial Sequence
  Synthetic
uuggguccagauucugccaaa

SEQ ID NO: 431471 - RNA, 22 nt, Artificial Sequence
  Synthetic
guuggguccagauucugccaaa

SEQ ID NO: 431472 - RNA, 23 nt, Artificial Sequence
  Synthetic
gguuggguccagauucugccaaa

SEQ ID NO: 431473 - RNA, 24 nt, Artificial Sequence
  Synthetic
ggguuggguccagauucugccaaa

SEQ ID NO: 431474 - RNA, 18 nt, Artificial Sequence
  Synthetic
aguaucuugcuugccaaa

SEQ ID NO: 431475 - RNA, 19 nt, Artificial Sequence
  Synthetic
aaguaucuugcuugccaaa

SEQ ID NO: 431476 - RNA, 20 nt, Artificial Sequence
  Synthetic
caaguaucuugcuugccaaa

SEQ ID NO: 431477 - RNA, 21 nt, Artificial Sequence
  Synthetic
gcaaguaucuugcuugccaaa

SEQ ID NO: 431478 - RNA, 22 nt, Artificial Sequence
  Synthetic
ugcaaguaucuugcuugccaaa

SEQ ID NO: 431479 - RNA, 23 nt, Artificial Sequence
  Synthetic
uugcaaguaucuugcuugccaaa

SEQ ID NO: 431480 - RNA, 24 nt, Artificial Sequence
  Synthetic
guugcaaguaucuugcuugccaaa

SEQ ID NO: 431481 - RNA, 18 nt, Artificial Sequence
  Synthetic
uuccuuuacuuugccaaa

SEQ ID NO: 431482 - RNA, 19 nt, Artificial Sequence
  Synthetic
uuuccuuuacuuugccaaa

SEQ ID NO: 431483 - RNA, 20 nt, Artificial Sequence
  Synthetic
uuuuccuuuacuuugccaaa

SEQ ID NO: 431484 - RNA, 21 nt, Artificial Sequence
  Synthetic
cuuuuccuuuacuuugccaaa

SEQ ID NO: 431485 - RNA, 22 nt, Artificial Sequence
  Synthetic
gcuuuuccuuuacuuugccaaa

SEQ ID NO: 431486 - RNA, 23 nt, Artificial Sequence
  Synthetic
ugcuuuuccuuuacuuugccaaa

SEQ ID NO: 431487 - RNA, 24 nt, Artificial Sequence
  Synthetic
augcuuuuccuuuacuuugccaaa

SEQ ID NO: 431488 - RNA, 18 nt, Artificial Sequence
  Synthetic
uuuuacagaaaauccaaa

SEQ ID NO: 431489 - RNA, 19 nt, Artificial Sequence
  Synthetic
auuuuacagaaaauccaaa

SEQ ID NO: 431490 - RNA, 20 nt, Artificial Sequence
  Synthetic
cauuuuacagaaaauccaaa

SEQ ID NO: 431491 - RNA, 21 nt, Artificial Sequence
  Synthetic
ucauuuuacagaaaauccaaa

SEQ ID NO: 431492 - RNA, 22 nt, Artificial Sequence
  Synthetic
aucauuuuacagaaaauccaaa

SEQ ID NO: 431493 - RNA, 23 nt, Artificial Sequence
  Synthetic
aaucauuuuacagaaaauccaaa

SEQ ID NO: 431494 - RNA, 24 nt, Artificial Sequence
  Synthetic
aaaucauuuuacagaaaauccaaa

SEQ ID NO: 431495 - RNA, 18 nt, Artificial Sequence
  Synthetic
ucugguagacuauccaaa

SEQ ID NO: 431496 - RNA, 19 nt, Artificial Sequence
  Synthetic
aucugguagacuauccaaa

SEQ ID NO: 431497 - RNA, 20 nt, Artificial Sequence
  Synthetic
aaucugguagacuauccaaa

SEQ ID NO: 431498 - RNA, 21 nt, Artificial Sequence
  Synthetic
aaaucugguagacuauccaaa

SEQ ID NO: 431499 - RNA, 22 nt, Artificial Sequence
  Synthetic
uaaaucugguagacuauccaaa

SEQ ID NO: 431500 - RNA, 23 nt, Artificial Sequence
  Synthetic
auaaaucugguagacuauccaaa

SEQ ID NO: 431501 - RNA, 24 nt, Artificial Sequence
  Synthetic
gauaaaucugguagacuauccaaa

SEQ ID NO: 431502 - RNA, 18 nt, Artificial Sequence
  Synthetic
aggaaaacguuauccaaa

SEQ ID NO: 431503 - RNA, 19 nt, Artificial Sequence
  Synthetic
uaggaaaacguuauccaaa

SEQ ID NO: 431504 - RNA, 20 nt, Artificial Sequence
  Synthetic
auaggaaaacguuauccaaa

SEQ ID NO: 431505 - RNA, 21 nt, Artificial Sequence
  Synthetic
gauaggaaaacguuauccaaa

SEQ ID NO: 431506 - RNA, 22 nt, Artificial Sequence
  Synthetic
agauaggaaaacguuauccaaa

SEQ ID NO: 431507 - RNA, 23 nt, Artificial Sequence
  Synthetic
gagauaggaaaacguuauccaaa

SEQ ID NO: 431508 - RNA, 24 nt, Artificial Sequence
  Synthetic
ugagauaggaaaacguuauccaaa

SEQ ID NO: 431509 - RNA, 18 nt, Artificial Sequence
  Synthetic
cuaaaaaucaacuccaaa

SEQ ID NO: 431510 - RNA, 19 nt, Artificial Sequence
  Synthetic
acuaaaaaucaacuccaaa

SEQ ID NO: 431511 - RNA, 20 nt, Artificial Sequence
  Synthetic
aacuaaaaaucaacuccaaa

SEQ ID NO: 431512 - RNA, 21 nt, Artificial Sequence
  Synthetic
aaacuaaaaaucaacuccaaa

SEQ ID NO: 431513 - RNA, 22 nt, Artificial Sequence
  Synthetic
aaaacuaaaaaucaacuccaaa

SEQ ID NO: 431514 - RNA, 23 nt, Artificial Sequence
  Synthetic
uaaaacuaaaaaucaacuccaaa

SEQ ID NO: 431515 - RNA, 24 nt, Artificial Sequence
  Synthetic
auaaaacuaaaaaucaacuccaaa

SEQ ID NO: 431516 - RNA, 18 nt, Artificial Sequence
  Synthetic
uuaauaucagccuccaaa

SEQ ID NO: 431517 - RNA, 19 nt, Artificial Sequence
  Synthetic
auuaauaucagccuccaaa

SEQ ID NO: 431518 - RNA, 20 nt, Artificial Sequence
  Synthetic
uauuaauaucagccuccaaa

SEQ ID NO: 431519 - RNA, 21 nt, Artificial Sequence
  Synthetic
auauuaauaucagccuccaaa

SEQ ID NO: 431520 - RNA, 22 nt, Artificial Sequence
  Synthetic
aauauuaauaucagccuccaaa

SEQ ID NO: 431521 - RNA, 23 nt, Artificial Sequence
  Synthetic
aaauauuaauaucagccuccaaa

SEQ ID NO: 431522 - RNA, 24 nt, Artificial Sequence
  Synthetic
caaauauuaauaucagccuccaaa

SEQ ID NO: 431523 - RNA, 18 nt, Artificial Sequence
  Synthetic
auauauguggucuccaaa

SEQ ID NO: 431524 - RNA, 19 nt, Artificial Sequence
  Synthetic
aauauauguggucuccaaa

SEQ ID NO: 431525 - RNA, 20 nt, Artificial Sequence
  Synthetic
aaauauauguggucuccaaa

SEQ ID NO: 431526 - RNA, 21 nt, Artificial Sequence
  Synthetic
gaaauauauguggucuccaaa

SEQ ID NO: 431527 - RNA, 22 nt, Artificial Sequence
  Synthetic
agaaauauauguggucuccaaa

SEQ ID NO: 431528 - RNA, 23 nt, Artificial Sequence
  Synthetic
aagaaauauauguggucuccaaa

SEQ ID NO: 431529 - RNA, 24 nt, Artificial Sequence
  Synthetic
uaagaaauauauguggucuccaaa

SEQ ID NO: 431530 - RNA, 18 nt, Artificial Sequence
  Synthetic
gaaaauacgguguccaaa

SEQ ID NO: 431531 - RNA, 19 nt, Artificial Sequence
  Synthetic
ugaaaauacgguguccaaa

SEQ ID NO: 431532 - RNA, 20 nt, Artificial Sequence
  Synthetic
augaaaauacgguguccaaa

SEQ ID NO: 431533 - RNA, 21 nt, Artificial Sequence
  Synthetic
aaugaaaauacgguguccaaa

SEQ ID NO: 431534 - RNA, 22 nt, Artificial Sequence
  Synthetic
caaugaaaauacgguguccaaa

SEQ ID NO: 431535 - RNA, 23 nt, Artificial Sequence
  Synthetic
ucaaugaaaauacgguguccaaa

SEQ ID NO: 431536 - RNA, 24 nt, Artificial Sequence
  Synthetic
uucaaugaaaauacgguguccaaa

SEQ ID NO: 431537 - RNA, 18 nt, Artificial Sequence
  Synthetic
ucagaacuggcuuccaaa

SEQ ID NO: 431538 - RNA, 19 nt, Artificial Sequence
  Synthetic
gucagaacuggcuuccaaa

SEQ ID NO: 431539 - RNA, 20 nt, Artificial Sequence
  Synthetic
ggucagaacuggcuuccaaa

SEQ ID NO: 431540 - RNA, 21 nt, Artificial Sequence
  Synthetic
uggucagaacuggcuuccaaa

SEQ ID NO: 431541 - RNA, 22 nt, Artificial Sequence
  Synthetic
cuggucagaacuggcuuccaaa

SEQ ID NO: 431542 - RNA, 23 nt, Artificial Sequence
  Synthetic
acuggucagaacuggcuuccaaa

SEQ ID NO: 431543 - RNA, 24 nt, Artificial Sequence
  Synthetic
cacuggucagaacuggcuuccaaa

SEQ ID NO: 431544 - RNA, 18 nt, Artificial Sequence
  Synthetic
gaaagaccaauuuccaaa

SEQ ID NO: 431545 - RNA, 19 nt, Artificial Sequence
  Synthetic
agaaagaccaauuuccaaa

SEQ ID NO: 431546 - RNA, 20 nt, Artificial Sequence
  Synthetic
uagaaagaccaauuuccaaa

SEQ ID NO: 431547 - RNA, 21 nt, Artificial Sequence
  Synthetic
guagaaagaccaauuuccaaa

SEQ ID NO: 431548 - RNA, 22 nt, Artificial Sequence
  Synthetic
gguagaaagaccaauuuccaaa

SEQ ID NO: 431549 - RNA, 23 nt, Artificial Sequence
  Synthetic
agguagaaagaccaauuuccaaa

SEQ ID NO: 431550 - RNA, 24 nt, Artificial Sequence
  Synthetic
uagguagaaagaccaauuuccaaa

SEQ ID NO: 431551 - RNA, 18 nt, Artificial Sequence
  Synthetic
gauccuagacuuuccaaa

SEQ ID NO: 431552 - RNA, 19 nt, Artificial Sequence
  Synthetic
agauccuagacuuuccaaa

SEQ ID NO: 431553 - RNA, 20 nt, Artificial Sequence
  Synthetic
aagauccuagacuuuccaaa

SEQ ID NO: 431554 - RNA, 21 nt, Artificial Sequence
  Synthetic
aaagauccuagacuuuccaaa

SEQ ID NO: 431555 - RNA, 22 nt, Artificial Sequence
  Synthetic
aaaagauccuagacuuuccaaa

SEQ ID NO: 431556 - RNA, 23 nt, Artificial Sequence
  Synthetic
gaaaagauccuagacuuuccaaa

SEQ ID NO: 431557 - RNA, 24 nt, Artificial Sequence
  Synthetic
agaaaagauccuagacuuuccaaa

SEQ ID NO: 431558 - RNA, 18 nt, Artificial Sequence
  Synthetic
gaaaucuacguuuccaaa

SEQ ID NO: 431559 - RNA, 19 nt, Artificial Sequence
  Synthetic
cgaaaucuacguuuccaaa

SEQ ID NO: 431560 - RNA, 20 nt, Artificial Sequence
  Synthetic
ucgaaaucuacguuuccaaa

SEQ ID NO: 431561 - RNA, 21 nt, Artificial Sequence
  Synthetic
uucgaaaucuacguuuccaaa

SEQ ID NO: 431562 - RNA, 22 nt, Artificial Sequence
  Synthetic
uuucgaaaucuacguuuccaaa

SEQ ID NO: 431563 - RNA, 23 nt, Artificial Sequence
  Synthetic
auuucgaaaucuacguuuccaaa

SEQ ID NO: 431564 - RNA, 24 nt, Artificial Sequence
  Synthetic
aauuucgaaaucuacguuuccaaa

SEQ ID NO: 431565 - RNA, 18 nt, Artificial Sequence
  Synthetic
aaugaaauuguuuccaaa

SEQ ID NO: 431566 - RNA, 19 nt, Artificial Sequence
  Synthetic
caaugaaauuguuuccaaa

SEQ ID NO: 431567 - RNA, 20 nt, Artificial Sequence
  Synthetic
acaaugaaauuguuuccaaa

SEQ ID NO: 431568 - RNA, 21 nt, Artificial Sequence
  Synthetic
cacaaugaaauuguuuccaaa

SEQ ID NO: 431569 - RNA, 22 nt, Artificial Sequence
  Synthetic
ccacaaugaaauuguuuccaaa

SEQ ID NO: 431570 - RNA, 23 nt, Artificial Sequence
  Synthetic
accacaaugaaauuguuuccaaa

SEQ ID NO: 431571 - RNA, 24 nt, Artificial Sequence
  Synthetic
uaccacaaugaaauuguuuccaaa

SEQ ID NO: 431572 - RNA, 18 nt, Artificial Sequence
  Synthetic
gcaauagucaaaagcaaa

SEQ ID NO: 431573 - RNA, 19 nt, Artificial Sequence
  Synthetic
ugcaauagucaaaagcaaa

SEQ ID NO: 431574 - RNA, 20 nt, Artificial Sequence
  Synthetic
gugcaauagucaaaagcaaa

SEQ ID NO: 431575 - RNA, 21 nt, Artificial Sequence
  Synthetic
ugugcaauagucaaaagcaaa

SEQ ID NO: 431576 - RNA, 22 nt, Artificial Sequence
  Synthetic
gugugcaauagucaaaagcaaa

SEQ ID NO: 431577 - RNA, 23 nt, Artificial Sequence
  Synthetic
ugugugcaauagucaaaagcaaa

SEQ ID NO: 431578 - RNA, 24 nt, Artificial Sequence
  Synthetic
cugugugcaauagucaaaagcaaa

SEQ ID NO: 431579 - RNA, 18 nt, Artificial Sequence
  Synthetic
cuucuccagaaaagcaaa

SEQ ID NO: 431580 - RNA, 19 nt, Artificial Sequence
  Synthetic
gcuucuccagaaaagcaaa

SEQ ID NO: 431581 - RNA, 20 nt, Artificial Sequence
  Synthetic
ugcuucuccagaaaagcaaa

SEQ ID NO: 431582 - RNA, 21 nt, Artificial Sequence
  Synthetic
augcuucuccagaaaagcaaa

SEQ ID NO: 431583 - RNA, 22 nt, Artificial Sequence
  Synthetic
aaugcuucuccagaaaagcaaa

SEQ ID NO: 431584 - RNA, 23 nt, Artificial Sequence
  Synthetic
aaaugcuucuccagaaaagcaaa

SEQ ID NO: 431585 - RNA, 24 nt, Artificial Sequence
  Synthetic
caaaugcuucuccagaaaagcaaa

SEQ ID NO: 431586 - RNA, 18 nt, Artificial Sequence
  Synthetic
gccaaaaggaaaagcaaa

SEQ ID NO: 431587 - RNA, 19 nt, Artificial Sequence
  Synthetic
ugccaaaaggaaaagcaaa

SEQ ID NO: 431588 - RNA, 20 nt, Artificial Sequence
  Synthetic
augccaaaaggaaaagcaaa

SEQ ID NO: 431589 - RNA, 21 nt, Artificial Sequence
  Synthetic
uaugccaaaaggaaaagcaaa

SEQ ID NO: 431590 - RNA, 22 nt, Artificial Sequence
  Synthetic
auaugccaaaaggaaaagcaaa

SEQ ID NO: 431591 - RNA, 23 nt, Artificial Sequence
  Synthetic
uauaugccaaaaggaaaagcaaa

SEQ ID NO: 431592 - RNA, 24 nt, Artificial Sequence
  Synthetic
cuauaugccaaaaggaaaagcaaa

SEQ ID NO: 431593 - RNA, 18 nt, Artificial Sequence
  Synthetic
cacauuuuuaaaagcaaa

SEQ ID NO: 431594 - RNA, 19 nt, Artificial Sequence
  Synthetic
ccacauuuuuaaaagcaaa

SEQ ID NO: 431595 - RNA, 20 nt, Artificial Sequence
  Synthetic
gccacauuuuuaaaagcaaa

SEQ ID NO: 431596 - RNA, 21 nt, Artificial Sequence
  Synthetic
agccacauuuuuaaaagcaaa

SEQ ID NO: 431597 - RNA, 22 nt, Artificial Sequence
  Synthetic
uagccacauuuuuaaaagcaaa

SEQ ID NO: 431598 - RNA, 23 nt, Artificial Sequence
  Synthetic
auagccacauuuuuaaaagcaaa

SEQ ID NO: 431599 - RNA, 24 nt, Artificial Sequence
  Synthetic
cauagccacauuuuuaaaagcaaa

SEQ ID NO: 431600 - RNA, 18 nt, Artificial Sequence
  Synthetic
ggaggaaagcaaagcaaa

SEQ ID NO: 431601 - RNA, 19 nt, Artificial Sequence
  Synthetic
aggaggaaagcaaagcaaa

SEQ ID NO: 431602 - RNA, 20 nt, Artificial Sequence
  Synthetic
uaggaggaaagcaaagcaaa

SEQ ID NO: 431603 - RNA, 21 nt, Artificial Sequence
  Synthetic
uuaggaggaaagcaaagcaaa

SEQ ID NO: 431604 - RNA, 22 nt, Artificial Sequence
  Synthetic
auuaggaggaaagcaaagcaaa

SEQ ID NO: 431605 - RNA, 23 nt, Artificial Sequence
  Synthetic
gauuaggaggaaagcaaagcaaa

SEQ ID NO: 431606 - RNA, 24 nt, Artificial Sequence
  Synthetic
ggauuaggaggaaagcaaagcaaa

SEQ ID NO: 431607 - RNA, 18 nt, Artificial Sequence
  Synthetic
uguauguugacaagcaaa

SEQ ID NO: 431608 - RNA, 19 nt, Artificial Sequence
  Synthetic
uuguauguugacaagcaaa

SEQ ID NO: 431609 - RNA, 20 nt, Artificial Sequence
  Synthetic
uuuguauguugacaagcaaa

SEQ ID NO: 431610 - RNA, 21 nt, Artificial Sequence
  Synthetic
uuuuguauguugacaagcaaa

SEQ ID NO: 431611 - RNA, 22 nt, Artificial Sequence
  Synthetic
uuuuuguauguugacaagcaaa

SEQ ID NO: 431612 - RNA, 23 nt, Artificial Sequence
  Synthetic
cuuuuuguauguugacaagcaaa

SEQ ID NO: 431613 - RNA, 24 nt, Artificial Sequence
  Synthetic
ucuuuuuguauguugacaagcaaa

SEQ ID NO: 431614 - RNA, 18 nt, Artificial Sequence
  Synthetic
gaagaucuaccaagcaaa

SEQ ID NO: 431615 - RNA, 19 nt, Artificial Sequence
  Synthetic
ggaagaucuaccaagcaaa

SEQ ID NO: 431616 - RNA, 20 nt, Artificial Sequence
  Synthetic
aggaagaucuaccaagcaaa

SEQ ID NO: 431617 - RNA, 21 nt, Artificial Sequence
  Synthetic
gaggaagaucuaccaagcaaa

SEQ ID NO: 431618 - RNA, 22 nt, Artificial Sequence
  Synthetic
ggaggaagaucuaccaagcaaa

SEQ ID NO: 431619 - RNA, 23 nt, Artificial Sequence
  Synthetic
uggaggaagaucuaccaagcaaa

SEQ ID NO: 431620 - RNA, 24 nt, Artificial Sequence
  Synthetic
auggaggaagaucuaccaagcaaa

SEQ ID NO: 431621 - RNA, 18 nt, Artificial Sequence
  Synthetic
guccuuugacgaagcaaa

SEQ ID NO: 431622 - RNA, 19 nt, Artificial Sequence
  Synthetic
gguccuuugacgaagcaaa

SEQ ID NO: 431623 - RNA, 20 nt, Artificial Sequence
  Synthetic
ugguccuuugacgaagcaaa

SEQ ID NO: 431624 - RNA, 21 nt, Artificial Sequence
  Synthetic
gugguccuuugacgaagcaaa

SEQ ID NO: 431625 - RNA, 22 nt, Artificial Sequence
  Synthetic
ggugguccuuugacgaagcaaa

SEQ ID NO: 431626 - RNA, 23 nt, Artificial Sequence
  Synthetic
aggugguccuuugacgaagcaaa

SEQ ID NO: 431627 - RNA, 24 nt, Artificial Sequence
  Synthetic
caggugguccuuugacgaagcaaa

SEQ ID NO: 431628 - RNA, 18 nt, Artificial Sequence
  Synthetic
aaaguaaauggaagcaaa

SEQ ID NO: 431629 - RNA, 19 nt, Artificial Sequence
  Synthetic
gaaaguaaauggaagcaaa

SEQ ID NO: 431630 - RNA, 20 nt, Artificial Sequence
  Synthetic
ggaaaguaaauggaagcaaa

SEQ ID NO: 431631 - RNA, 21 nt, Artificial Sequence
  Synthetic
aggaaaguaaauggaagcaaa

SEQ ID NO: 431632 - RNA, 22 nt, Artificial Sequence
  Synthetic
caggaaaguaaauggaagcaaa

SEQ ID NO: 431633 - RNA, 23 nt, Artificial Sequence
  Synthetic
ucaggaaaguaaauggaagcaaa

SEQ ID NO: 431634 - RNA, 24 nt, Artificial Sequence
  Synthetic
cucaggaaaguaaauggaagcaaa

SEQ ID NO: 431635 - RNA, 18 nt, Artificial Sequence
  Synthetic
uucagcauuugaagcaaa

SEQ ID NO: 431636 - RNA, 19 nt, Artificial Sequence
  Synthetic
guucagcauuugaagcaaa

SEQ ID NO: 431637 - RNA, 20 nt, Artificial Sequence
  Synthetic
uguucagcauuugaagcaaa

SEQ ID NO: 431638 - RNA, 21 nt, Artificial Sequence
  Synthetic
uuguucagcauuugaagcaaa

SEQ ID NO: 431639 - RNA, 22 nt, Artificial Sequence
  Synthetic
guuguucagcauuugaagcaaa

SEQ ID NO: 431640 - RNA, 23 nt, Artificial Sequence
  Synthetic
aguuguucagcauuugaagcaaa

SEQ ID NO: 431641 - RNA, 24 nt, Artificial Sequence
  Synthetic
caguuguucagcauuugaagcaaa

SEQ ID NO: 431642 - RNA, 18 nt, Artificial Sequence
  Synthetic
agaaucaauauaagcaaa

SEQ ID NO: 431643 - RNA, 19 nt, Artificial Sequence
  Synthetic
aagaaucaauauaagcaaa

SEQ ID NO: 431644 - RNA, 20 nt, Artificial Sequence
  Synthetic
uaagaaucaauauaagcaaa

SEQ ID NO: 431645 - RNA, 21 nt, Artificial Sequence
  Synthetic
guaagaaucaauauaagcaaa

SEQ ID NO: 431646 - RNA, 22 nt, Artificial Sequence
  Synthetic
aguaagaaucaauauaagcaaa

SEQ ID NO: 431647 - RNA, 23 nt, Artificial Sequence
  Synthetic
aaguaagaaucaauauaagcaaa

SEQ ID NO: 431648 - RNA, 24 nt, Artificial Sequence
  Synthetic
caaguaagaaucaauauaagcaaa

SEQ ID NO: 431649 - RNA, 18 nt, Artificial Sequence
  Synthetic
cagugaaaacuaagcaaa

SEQ ID NO: 431650 - RNA, 19 nt, Artificial Sequence
  Synthetic
gcagugaaaacuaagcaaa

SEQ ID NO: 431651 - RNA, 20 nt, Artificial Sequence
  Synthetic
ugcagugaaaacuaagcaaa

SEQ ID NO: 431652 - RNA, 21 nt, Artificial Sequence
  Synthetic
cugcagugaaaacuaagcaaa

SEQ ID NO: 431653 - RNA, 22 nt, Artificial Sequence
  Synthetic
ucugcagugaaaacuaagcaaa

SEQ ID NO: 431654 - RNA, 23 nt, Artificial Sequence
  Synthetic
cucugcagugaaaacuaagcaaa

SEQ ID NO: 431655 - RNA, 24 nt, Artificial Sequence
  Synthetic
acucugcagugaaaacuaagcaaa

SEQ ID NO: 431656 - RNA, 18 nt, Artificial Sequence
  Synthetic
guacuccagggcagcaaa

SEQ ID NO: 431657 - RNA, 19 nt, Artificial Sequence
  Synthetic
gguacuccagggcagcaaa

SEQ ID NO: 431658 - RNA, 20 nt, Artificial Sequence
  Synthetic
ugguacuccagggcagcaaa

SEQ ID NO: 431659 - RNA, 21 nt, Artificial Sequence
  Synthetic
cugguacuccagggcagcaaa

SEQ ID NO: 431660 - RNA, 22 nt, Artificial Sequence
  Synthetic
acugguacuccagggcagcaaa

SEQ ID NO: 431661 - RNA, 23 nt, Artificial Sequence
  Synthetic
aacugguacuccagggcagcaaa

SEQ ID NO: 431662 - RNA, 24 nt, Artificial Sequence
  Synthetic
caacugguacuccagggcagcaaa

SEQ ID NO: 431663 - RNA, 18 nt, Artificial Sequence
  Synthetic
uguuuauugugcagcaaa

SEQ ID NO: 431664 - RNA, 19 nt, Artificial Sequence
  Synthetic
uuguuuauugugcagcaaa

SEQ ID NO: 431665 - RNA, 20 nt, Artificial Sequence
  Synthetic
guuguuuauugugcagcaaa

SEQ ID NO: 431666 - RNA, 21 nt, Artificial Sequence
  Synthetic
gguuguuuauugugcagcaaa

SEQ ID NO: 431667 - RNA, 22 nt, Artificial Sequence
  Synthetic
ugguuguuuauugugcagcaaa

SEQ ID NO: 431668 - RNA, 23 nt, Artificial Sequence
  Synthetic
uugguuguuuauugugcagcaaa

SEQ ID NO: 431669 - RNA, 24 nt, Artificial Sequence
  Synthetic
uuugguuguuuauugugcagcaaa

SEQ ID NO: 431670 - RNA, 18 nt, Artificial Sequence
  Synthetic
uguuagcagaagagcaaa

SEQ ID NO: 431671 - RNA, 19 nt, Artificial Sequence
  Synthetic
auguuagcagaagagcaaa

SEQ ID NO: 431672 - RNA, 20 nt, Artificial Sequence
  Synthetic
uauguuagcagaagagcaaa

SEQ ID NO: 431673 - RNA, 21 nt, Artificial Sequence
  Synthetic
cuauguuagcagaagagcaaa

SEQ ID NO: 431674 - RNA, 22 nt, Artificial Sequence
  Synthetic
ucuauguuagcagaagagcaaa

SEQ ID NO: 431675 - RNA, 23 nt, Artificial Sequence
  Synthetic
cucuauguuagcagaagagcaaa

SEQ ID NO: 431676 - RNA, 24 nt, Artificial Sequence
  Synthetic
ccucuauguuagcagaagagcaaa

SEQ ID NO: 431677 - RNA, 18 nt, Artificial Sequence
  Synthetic
gauuguuuacagagcaaa

SEQ ID NO: 431678 - RNA, 19 nt, Artificial Sequence
  Synthetic
ugauuguuuacagagcaaa

SEQ ID NO: 431679 - RNA, 20 nt, Artificial Sequence
  Synthetic
cugauuguuuacagagcaaa

SEQ ID NO: 431680 - RNA, 21 nt, Artificial Sequence
  Synthetic
ucugauuguuuacagagcaaa

SEQ ID NO: 431681 - RNA, 22 nt, Artificial Sequence
  Synthetic
aucugauuguuuacagagcaaa

SEQ ID NO: 431682 - RNA, 23 nt, Artificial Sequence
  Synthetic
uaucugauuguuuacagagcaaa

SEQ ID NO: 431683 - RNA, 24 nt, Artificial Sequence
  Synthetic
uuaucugauuguuuacagagcaaa

SEQ ID NO: 431684 - RNA, 18 nt, Artificial Sequence
  Synthetic
cagaacagucagagcaaa

SEQ ID NO: 431685 - RNA, 19 nt, Artificial Sequence
  Synthetic
ccagaacagucagagcaaa

SEQ ID NO: 431686 - RNA, 20 nt, Artificial Sequence
  Synthetic
accagaacagucagagcaaa

SEQ ID NO: 431687 - RNA, 21 nt, Artificial Sequence
  Synthetic
aaccagaacagucagagcaaa

SEQ ID NO: 431688 - RNA, 22 nt, Artificial Sequence
  Synthetic
aaaccagaacagucagagcaaa

SEQ ID NO: 431689 - RNA, 23 nt, Artificial Sequence
  Synthetic
aaaaccagaacagucagagcaaa

SEQ ID NO: 431690 - RNA, 24 nt, Artificial Sequence
  Synthetic
aaaaaccagaacagucagagcaaa

SEQ ID NO: 431691 - RNA, 18 nt, Artificial Sequence
  Synthetic
gauauuuuugagagcaaa

SEQ ID NO: 431692 - RNA, 19 nt, Artificial Sequence
  Synthetic
ggauauuuuugagagcaaa

SEQ ID NO: 431693 - RNA, 20 nt, Artificial Sequence
  Synthetic
aggauauuuuugagagcaaa

SEQ ID NO: 431694 - RNA, 21 nt, Artificial Sequence
  Synthetic
aaggauauuuuugagagcaaa

SEQ ID NO: 431695 - RNA, 22 nt, Artificial Sequence
  Synthetic
caaggauauuuuugagagcaaa

SEQ ID NO: 431696 - RNA, 23 nt, Artificial Sequence
  Synthetic
acaaggauauuuuugagagcaaa

SEQ ID NO: 431697 - RNA, 24 nt, Artificial Sequence
  Synthetic
aacaaggauauuuuugagagcaaa

SEQ ID NO: 431698 - RNA, 18 nt, Artificial Sequence
  Synthetic
uagacaagcaggagcaaa

SEQ ID NO: 431699 - RNA, 19 nt, Artificial Sequence
  Synthetic
cuagacaagcaggagcaaa

SEQ ID NO: 431700 - RNA, 20 nt, Artificial Sequence
  Synthetic
ccuagacaagcaggagcaaa

SEQ ID NO: 431701 - RNA, 21 nt, Artificial Sequence
  Synthetic
accuagacaagcaggagcaaa

SEQ ID NO: 431702 - RNA, 22 nt, Artificial Sequence
  Synthetic
gaccuagacaagcaggagcaaa

SEQ ID NO: 431703 - RNA, 23 nt, Artificial Sequence
  Synthetic
agaccuagacaagcaggagcaaa

SEQ ID NO: 431704 - RNA, 24 nt, Artificial Sequence
  Synthetic
aagaccuagacaagcaggagcaaa

SEQ ID NO: 431705 - RNA, 18 nt, Artificial Sequence
  Synthetic
cuaaaggggaggagcaaa

SEQ ID NO: 431706 - RNA, 19 nt, Artificial Sequence
  Synthetic
gcuaaaggggaggagcaaa

SEQ ID NO: 431707 - RNA, 20 nt, Artificial Sequence
  Synthetic
ugcuaaaggggaggagcaaa

SEQ ID NO: 431708 - RNA, 21 nt, Artificial Sequence
  Synthetic
cugcuaaaggggaggagcaaa

SEQ ID NO: 431709 - RNA, 22 nt, Artificial Sequence
  Synthetic
ccugcuaaaggggaggagcaaa

SEQ ID NO: 431710 - RNA, 23 nt, Artificial Sequence
  Synthetic
gccugcuaaaggggaggagcaaa

SEQ ID NO: 431711 - RNA, 24 nt, Artificial Sequence
  Synthetic
ggccugcuaaaggggaggagcaaa

SEQ ID NO: 431712 - RNA, 18 nt, Artificial Sequence
  Synthetic
uuaauauaaaugagcaaa

SEQ ID NO: 431713 - RNA, 19 nt, Artificial Sequence
  Synthetic
auuaauauaaaugagcaaa

SEQ ID NO: 431714 - RNA, 20 nt, Artificial Sequence
  Synthetic
aauuaauauaaaugagcaaa

SEQ ID NO: 431715 - RNA, 21 nt, Artificial Sequence
  Synthetic
caauuaauauaaaugagcaaa

SEQ ID NO: 431716 - RNA, 22 nt, Artificial Sequence
  Synthetic
gcaauuaauauaaaugagcaaa

SEQ ID NO: 431717 - RNA, 23 nt, Artificial Sequence
  Synthetic
agcaauuaauauaaaugagcaaa

SEQ ID NO: 431718 - RNA, 24 nt, Artificial Sequence
  Synthetic
aagcaauuaauauaaaugagcaaa

SEQ ID NO: 431719 - RNA, 18 nt, Artificial Sequence
  Synthetic
cauaaugauaugagcaaa

SEQ ID NO: 431720 - RNA, 19 nt, Artificial Sequence
  Synthetic
ucauaaugauaugagcaaa

SEQ ID NO: 431721 - RNA, 20 nt, Artificial Sequence
  Synthetic
uucauaaugauaugagcaaa

SEQ ID NO: 431722 - RNA, 21 nt, Artificial Sequence
  Synthetic
guucauaaugauaugagcaaa

SEQ ID NO: 431723 - RNA, 22 nt, Artificial Sequence
  Synthetic
uguucauaaugauaugagcaaa

SEQ ID NO: 431724 - RNA, 23 nt, Artificial Sequence
  Synthetic
uuguucauaaugauaugagcaaa

SEQ ID NO: 431725 - RNA, 24 nt, Artificial Sequence
  Synthetic
auuguucauaaugauaugagcaaa

SEQ ID NO: 431726 - RNA, 18 nt, Artificial Sequence
  Synthetic
cugcaauaauugagcaaa

SEQ ID NO: 431727 - RNA, 19 nt, Artificial Sequence
  Synthetic
acugcaauaauugagcaaa

SEQ ID NO: 431728 - RNA, 20 nt, Artificial Sequence
  Synthetic
uacugcaauaauugagcaaa

SEQ ID NO: 431729 - RNA, 21 nt, Artificial Sequence
  Synthetic
guacugcaauaauugagcaaa

SEQ ID NO: 431730 - RNA, 22 nt, Artificial Sequence
  Synthetic
gguacugcaauaauugagcaaa

SEQ ID NO: 431731 - RNA, 23 nt, Artificial Sequence
  Synthetic
ggguacugcaauaauugagcaaa

SEQ ID NO: 431732 - RNA, 24 nt, Artificial Sequence
  Synthetic
uggguacugcaauaauugagcaaa

SEQ ID NO: 431733 - RNA, 18 nt, Artificial Sequence
  Synthetic
cauuaaaauacuagcaaa

SEQ ID NO: 431734 - RNA, 19 nt, Artificial Sequence
  Synthetic
ucauuaaaauacuagcaaa

SEQ ID NO: 431735 - RNA, 20 nt, Artificial Sequence
  Synthetic
cucauuaaaauacuagcaaa

SEQ ID NO: 431736 - RNA, 21 nt, Artificial Sequence
  Synthetic
acucauuaaaauacuagcaaa

SEQ ID NO: 431737 - RNA, 22 nt, Artificial Sequence
  Synthetic
aacucauuaaaauacuagcaaa

SEQ ID NO: 431738 - RNA, 23 nt, Artificial Sequence
  Synthetic
uaacucauuaaaauacuagcaaa

SEQ ID NO: 431739 - RNA, 24 nt, Artificial Sequence
  Synthetic
auaacucauuaaaauacuagcaaa

SEQ ID NO: 431740 - RNA, 18 nt, Artificial Sequence
  Synthetic
aaauguauuucuagcaaa

SEQ ID NO: 431741 - RNA, 19 nt, Artificial Sequence
  Synthetic
caaauguauuucuagcaaa

SEQ ID NO: 431742 - RNA, 20 nt, Artificial Sequence
  Synthetic
acaaauguauuucuagcaaa

SEQ ID NO: 431743 - RNA, 21 nt, Artificial Sequence
  Synthetic
gacaaauguauuucuagcaaa

SEQ ID NO: 431744 - RNA, 22 nt, Artificial Sequence
  Synthetic
ugacaaauguauuucuagcaaa

SEQ ID NO: 431745 - RNA, 23 nt, Artificial Sequence
  Synthetic
augacaaauguauuucuagcaaa

SEQ ID NO: 431746 - RNA, 24 nt, Artificial Sequence
  Synthetic
uaugacaaauguauuucuagcaaa

SEQ ID NO: 431747 - RNA, 18 nt, Artificial Sequence
  Synthetic
aacacugagcguagcaaa

SEQ ID NO: 431748 - RNA, 19 nt, Artificial Sequence
  Synthetic
uaacacugagcguagcaaa

SEQ ID NO: 431749 - RNA, 20 nt, Artificial Sequence
  Synthetic
cuaacacugagcguagcaaa

SEQ ID NO: 431750 - RNA, 21 nt, Artificial Sequence
  Synthetic
ucuaacacugagcguagcaaa

SEQ ID NO: 431751 - RNA, 22 nt, Artificial Sequence
  Synthetic
cucuaacacugagcguagcaaa

SEQ ID NO: 431752 - RNA, 23 nt, Artificial Sequence
  Synthetic
ucucuaacacugagcguagcaaa

SEQ ID NO: 431753 - RNA, 24 nt, Artificial Sequence
  Synthetic
uucucuaacacugagcguagcaaa

SEQ ID NO: 431754 - RNA, 18 nt, Artificial Sequence
  Synthetic
auaaugucuauuagcaaa

SEQ ID NO: 431755 - RNA, 19 nt, Artificial Sequence
  Synthetic
cauaaugucuauuagcaaa

SEQ ID NO: 431756 - RNA, 20 nt, Artificial Sequence
  Synthetic
ucauaaugucuauuagcaaa

SEQ ID NO: 431757 - RNA, 21 nt, Artificial Sequence
  Synthetic
aucauaaugucuauuagcaaa

SEQ ID NO: 431758 - RNA, 22 nt, Artificial Sequence
  Synthetic
uaucauaaugucuauuagcaaa

SEQ ID NO: 431759 - RNA, 23 nt, Artificial Sequence
  Synthetic
guaucauaaugucuauuagcaaa

SEQ ID NO: 431760 - RNA, 24 nt, Artificial Sequence
  Synthetic
gguaucauaaugucuauuagcaaa

SEQ ID NO: 431761 - RNA, 18 nt, Artificial Sequence
  Synthetic
agagaacugcuuagcaaa

SEQ ID NO: 431762 - RNA, 19 nt, Artificial Sequence
  Synthetic
cagagaacugcuuagcaaa

SEQ ID NO: 431763 - RNA, 20 nt, Artificial Sequence
  Synthetic
acagagaacugcuuagcaaa

SEQ ID NO: 431764 - RNA, 21 nt, Artificial Sequence
  Synthetic
gacagagaacugcuuagcaaa

SEQ ID NO: 431765 - RNA, 22 nt, Artificial Sequence
  Synthetic
agacagagaacugcuuagcaaa

SEQ ID NO: 431766 - RNA, 23 nt, Artificial Sequence
  Synthetic
gagacagagaacugcuuagcaaa

SEQ ID NO: 431767 - RNA, 24 nt, Artificial Sequence
  Synthetic
agagacagagaacugcuuagcaaa

SEQ ID NO: 431768 - RNA, 18 nt, Artificial Sequence
  Synthetic
uuccauaagguuagcaaa

SEQ ID NO: 431769 - RNA, 19 nt, Artificial Sequence
  Synthetic
uuuccauaagguuagcaaa

SEQ ID NO: 431770 - RNA, 20 nt, Artificial Sequence
  Synthetic
uuuuccauaagguuagcaaa

SEQ ID NO: 431771 - RNA, 21 nt, Artificial Sequence
  Synthetic
cuuuuccauaagguuagcaaa

SEQ ID NO: 431772 - RNA, 22 nt, Artificial Sequence
  Synthetic
ucuuuuccauaagguuagcaaa

SEQ ID NO: 431773 - RNA, 23 nt, Artificial Sequence
  Synthetic
cucuuuuccauaagguuagcaaa

SEQ ID NO: 431774 - RNA, 24 nt, Artificial Sequence
  Synthetic
acucuuuuccauaagguuagcaaa

SEQ ID NO: 431775 - RNA, 18 nt, Artificial Sequence
  Synthetic
caaauaaggagacgcaaa

SEQ ID NO: 431776 - RNA, 19 nt, Artificial Sequence
  Synthetic
gcaaauaaggagacgcaaa

SEQ ID NO: 431777 - RNA, 20 nt, Artificial Sequence
  Synthetic
ggcaaauaaggagacgcaaa

SEQ ID NO: 431778 - RNA, 21 nt, Artificial Sequence
  Synthetic
uggcaaauaaggagacgcaaa

SEQ ID NO: 431779 - RNA, 22 nt, Artificial Sequence
  Synthetic
uuggcaaauaaggagacgcaaa

SEQ ID NO: 431780 - RNA, 23 nt, Artificial Sequence
  Synthetic
uuuggcaaauaaggagacgcaaa

SEQ ID NO: 431781 - RNA, 24 nt, Artificial Sequence
  Synthetic
uuuuggcaaauaaggagacgcaaa

SEQ ID NO: 431782 - RNA, 18 nt, Artificial Sequence
  Synthetic
gcuaugauacaaggcaaa

SEQ ID NO: 431783 - RNA, 19 nt, Artificial Sequence
  Synthetic
agcuaugauacaaggcaaa

SEQ ID NO: 431784 - RNA, 20 nt, Artificial Sequence
  Synthetic
cagcuaugauacaaggcaaa

SEQ ID NO: 431785 - RNA, 21 nt, Artificial Sequence
  Synthetic
gcagcuaugauacaaggcaaa

SEQ ID NO: 431786 - RNA, 22 nt, Artificial Sequence
  Synthetic
agcagcuaugauacaaggcaaa

SEQ ID NO: 431787 - RNA, 23 nt, Artificial Sequence
  Synthetic
aagcagcuaugauacaaggcaaa

SEQ ID NO: 431788 - RNA, 24 nt, Artificial Sequence
  Synthetic
caagcagcuaugauacaaggcaaa

SEQ ID NO: 431789 - RNA, 18 nt, Artificial Sequence
  Synthetic
agcaguaagcaaggcaaa

SEQ ID NO: 431790 - RNA, 19 nt, Artificial Sequence
  Synthetic
aagcaguaagcaaggcaaa

SEQ ID NO: 431791 - RNA, 20 nt, Artificial Sequence
  Synthetic
uaagcaguaagcaaggcaaa

SEQ ID NO: 431792 - RNA, 21 nt, Artificial Sequence
  Synthetic
auaagcaguaagcaaggcaaa

SEQ ID NO: 431793 - RNA, 22 nt, Artificial Sequence
  Synthetic
aauaagcaguaagcaaggcaaa

SEQ ID NO: 431794 - RNA, 23 nt, Artificial Sequence
  Synthetic
caauaagcaguaagcaaggcaaa

SEQ ID NO: 431795 - RNA, 24 nt, Artificial Sequence
  Synthetic
gcaauaagcaguaagcaaggcaaa

SEQ ID NO: 431796 - RNA, 21 nt, Artificial Sequence
  Synthetic
guaagcaguaagcaaggcaaa

SEQ ID NO: 431797 - RNA, 22 nt, Artificial Sequence
  Synthetic
aguaagcaguaagcaaggcaaa

SEQ ID NO: 431798 - RNA, 23 nt, Artificial Sequence
  Synthetic
caguaagcaguaagcaaggcaaa

SEQ ID NO: 431799 - RNA, 24 nt, Artificial Sequence
  Synthetic
gcaguaagcaguaagcaaggcaaa

SEQ ID NO: 431800 - RNA, 18 nt, Artificial Sequence
  Synthetic
accaugguggaaggcaaa

SEQ ID NO: 431801 - RNA, 19 nt, Artificial Sequence
  Synthetic
aaccaugguggaaggcaaa

SEQ ID NO: 431802 - RNA, 20 nt, Artificial Sequence
  Synthetic
caaccaugguggaaggcaaa

SEQ ID NO: 431803 - RNA, 21 nt, Artificial Sequence
  Synthetic
ccaaccaugguggaaggcaaa

SEQ ID NO: 431804 - RNA, 22 nt, Artificial Sequence
  Synthetic
accaaccaugguggaaggcaaa

SEQ ID NO: 431805 - RNA, 23 nt, Artificial Sequence
  Synthetic
aaccaaccaugguggaaggcaaa

SEQ ID NO: 431806 - RNA, 24 nt, Artificial Sequence
  Synthetic
caaccaaccaugguggaaggcaaa

SEQ ID NO: 431807 - RNA, 18 nt, Artificial Sequence
  Synthetic
ggagauaaaagaggcaaa

SEQ ID NO: 431808 - RNA, 19 nt, Artificial Sequence
  Synthetic
gggagauaaaagaggcaaa

SEQ ID NO: 431809 - RNA, 20 nt, Artificial Sequence
  Synthetic
agggagauaaaagaggcaaa

SEQ ID NO: 431810 - RNA, 21 nt, Artificial Sequence
  Synthetic
aagggagauaaaagaggcaaa

SEQ ID NO: 431811 - RNA, 22 nt, Artificial Sequence
  Synthetic
uaagggagauaaaagaggcaaa

SEQ ID NO: 431812 - RNA, 23 nt, Artificial Sequence
  Synthetic
guaagggagauaaaagaggcaaa

SEQ ID NO: 431813 - RNA, 24 nt, Artificial Sequence
  Synthetic
gguaagggagauaaaagaggcaaa

SEQ ID NO: 431814 - RNA, 18 nt, Artificial Sequence
  Synthetic
gcuauacuacgaggcaaa

SEQ ID NO: 431815 - RNA, 19 nt, Artificial Sequence
  Synthetic
agcuauacuacgaggcaaa

SEQ ID NO: 431816 - RNA, 20 nt, Artificial Sequence
  Synthetic
aagcuauacuacgaggcaaa

SEQ ID NO: 431817 - RNA, 21 nt, Artificial Sequence
  Synthetic
caagcuauacuacgaggcaaa

SEQ ID NO: 431818 - RNA, 22 nt, Artificial Sequence
  Synthetic
ccaagcuauacuacgaggcaaa

SEQ ID NO: 431819 - RNA, 23 nt, Artificial Sequence
  Synthetic
uccaagcuauacuacgaggcaaa

SEQ ID NO: 431820 - RNA, 24 nt, Artificial Sequence
  Synthetic
uuccaagcuauacuacgaggcaaa

SEQ ID NO: 431821 - RNA, 18 nt, Artificial Sequence
  Synthetic
uugcagaugggaggcaaa

SEQ ID NO: 431822 - RNA, 19 nt, Artificial Sequence
  Synthetic
auugcagaugggaggcaaa

SEQ ID NO: 431823 - RNA, 20 nt, Artificial Sequence
  Synthetic
aauugcagaugggaggcaaa

SEQ ID NO: 431824 - RNA, 21 nt, Artificial Sequence
  Synthetic
aaauugcagaugggaggcaaa

SEQ ID NO: 431825 - RNA, 22 nt, Artificial Sequence
  Synthetic
gaaauugcagaugggaggcaaa

SEQ ID NO: 431826 - RNA, 23 nt, Artificial Sequence
  Synthetic
ugaaauugcagaugggaggcaaa

SEQ ID NO: 431827 - RNA, 24 nt, Artificial Sequence
  Synthetic
uugaaauugcagaugggaggcaaa

SEQ ID NO: 431828 - RNA, 18 nt, Artificial Sequence
  Synthetic
uucugaucaugaggcaaa

SEQ ID NO: 431829 - RNA, 19 nt, Artificial Sequence
  Synthetic
auucugaucaugaggcaaa

SEQ ID NO: 431830 - RNA, 20 nt, Artificial Sequence
  Synthetic
aauucugaucaugaggcaaa

SEQ ID NO: 431831 - RNA, 21 nt, Artificial Sequence
  Synthetic
gaauucugaucaugaggcaaa

SEQ ID NO: 431832 - RNA, 22 nt, Artificial Sequence
  Synthetic
agaauucugaucaugaggcaaa

SEQ ID NO: 431833 - RNA, 23 nt, Artificial Sequence
  Synthetic
aagaauucugaucaugaggcaaa

SEQ ID NO: 431834 - RNA, 24 nt, Artificial Sequence
  Synthetic
aaagaauucugaucaugaggcaaa

SEQ ID NO: 431835 - RNA, 18 nt, Artificial Sequence
  Synthetic
uuaaccugcuuaggcaaa

SEQ ID NO: 431836 - RNA, 19 nt, Artificial Sequence
  Synthetic
guuaaccugcuuaggcaaa

SEQ ID NO: 431837 - RNA, 20 nt, Artificial Sequence
  Synthetic
aguuaaccugcuuaggcaaa

SEQ ID NO: 431838 - RNA, 21 nt, Artificial Sequence
  Synthetic
aaguuaaccugcuuaggcaaa

SEQ ID NO: 431839 - RNA, 22 nt, Artificial Sequence
  Synthetic
caaguuaaccugcuuaggcaaa

SEQ ID NO: 431840 - RNA, 23 nt, Artificial Sequence
  Synthetic
ccaaguuaaccugcuuaggcaaa

SEQ ID NO: 431841 - RNA, 24 nt, Artificial Sequence
  Synthetic
accaaguuaaccugcuuaggcaaa

SEQ ID NO: 431842 - RNA, 18 nt, Artificial Sequence
  Synthetic
acuuagguauggggcaaa

SEQ ID NO: 431843 - RNA, 19 nt, Artificial Sequence
  Synthetic
gacuuagguauggggcaaa

SEQ ID NO: 431844 - RNA, 20 nt, Artificial Sequence
  Synthetic
agacuuagguauggggcaaa

SEQ ID NO: 431845 - RNA, 21 nt, Artificial Sequence
  Synthetic
gagacuuagguauggggcaaa

SEQ ID NO: 431846 - RNA, 22 nt, Artificial Sequence
  Synthetic
agagacuuagguauggggcaaa

SEQ ID NO: 431847 - RNA, 23 nt, Artificial Sequence
  Synthetic
aagagacuuagguauggggcaaa

SEQ ID NO: 431848 - RNA, 24 nt, Artificial Sequence
  Synthetic
uaagagacuuagguauggggcaaa

SEQ ID NO: 431849 - RNA, 18 nt, Artificial Sequence
  Synthetic
caaaguuuaaugggcaaa

SEQ ID NO: 431850 - RNA, 19 nt, Artificial Sequence
  Synthetic
ucaaaguuuaaugggcaaa

SEQ ID NO: 431851 - RNA, 20 nt, Artificial Sequence
  Synthetic
aucaaaguuuaaugggcaaa

SEQ ID NO: 431852 - RNA, 21 nt, Artificial Sequence
  Synthetic
uaucaaaguuuaaugggcaaa

SEQ ID NO: 431853 - RNA, 22 nt, Artificial Sequence
  Synthetic
auaucaaaguuuaaugggcaaa

SEQ ID NO: 431854 - RNA, 23 nt, Artificial Sequence
  Synthetic
cauaucaaaguuuaaugggcaaa

SEQ ID NO: 431855 - RNA, 24 nt, Artificial Sequence
  Synthetic
acauaucaaaguuuaaugggcaaa

SEQ ID NO: 431856 - RNA, 18 nt, Artificial Sequence
  Synthetic
gcugcaagagauggcaaa

SEQ ID NO: 431857 - RNA, 19 nt, Artificial Sequence
  Synthetic
ugcugcaagagauggcaaa

SEQ ID NO: 431858 - RNA, 20 nt, Artificial Sequence
  Synthetic
uugcugcaagagauggcaaa

SEQ ID NO: 431859 - RNA, 21 nt, Artificial Sequence
  Synthetic
uuugcugcaagagauggcaaa

SEQ ID NO: 431860 - RNA, 22 nt, Artificial Sequence
  Synthetic
guuugcugcaagagauggcaaa

SEQ ID NO: 431861 - RNA, 23 nt, Artificial Sequence
  Synthetic
gguuugcugcaagagauggcaaa

SEQ ID NO: 431862 - RNA, 24 nt, Artificial Sequence
  Synthetic
agguuugcugcaagagauggcaaa

SEQ ID NO: 431863 - RNA, 18 nt, Artificial Sequence
  Synthetic
uacugagggacuggcaaa

SEQ ID NO: 431864 - RNA, 19 nt, Artificial Sequence
  Synthetic
auacugagggacuggcaaa

SEQ ID NO: 431865 - RNA, 20 nt, Artificial Sequence
  Synthetic
gauacugagggacuggcaaa

SEQ ID NO: 431866 - RNA, 21 nt, Artificial Sequence
  Synthetic
ugauacugagggacuggcaaa

SEQ ID NO: 431867 - RNA, 22 nt, Artificial Sequence
  Synthetic
augauacugagggacuggcaaa

SEQ ID NO: 431868 - RNA, 23 nt, Artificial Sequence
  Synthetic
aaugauacugagggacuggcaaa

SEQ ID NO: 431869 - RNA, 24 nt, Artificial Sequence
  Synthetic
uaaugauacugagggacuggcaaa

SEQ ID NO: 431870 - RNA, 18 nt, Artificial Sequence
  Synthetic
aaauccuucucuggcaaa

SEQ ID NO: 431871 - RNA, 19 nt, Artificial Sequence
  Synthetic
aaaauccuucucuggcaaa

SEQ ID NO: 431872 - RNA, 20 nt, Artificial Sequence
  Synthetic
aaaaauccuucucuggcaaa

SEQ ID NO: 431873 - RNA, 21 nt, Artificial Sequence
  Synthetic
aaaaaauccuucucuggcaaa

SEQ ID NO: 431874 - RNA, 22 nt, Artificial Sequence
  Synthetic
aaaaaaauccuucucuggcaaa

SEQ ID NO: 431875 - RNA, 23 nt, Artificial Sequence
  Synthetic
uaaaaaaauccuucucuggcaaa

SEQ ID NO: 431876 - RNA, 24 nt, Artificial Sequence
  Synthetic
uuaaaaaaauccuucucuggcaaa

SEQ ID NO: 431877 - RNA, 18 nt, Artificial Sequence
  Synthetic
ugaucgcuuaguggcaaa

SEQ ID NO: 431878 - RNA, 19 nt, Artificial Sequence
  Synthetic
gugaucgcuuaguggcaaa

SEQ ID NO: 431879 - RNA, 20 nt, Artificial Sequence
  Synthetic
cgugaucgcuuaguggcaaa

SEQ ID NO: 431880 - RNA, 21 nt, Artificial Sequence
  Synthetic
gcgugaucgcuuaguggcaaa

SEQ ID NO: 431881 - RNA, 22 nt, Artificial Sequence
  Synthetic
ggcgugaucgcuuaguggcaaa

SEQ ID NO: 431882 - RNA, 23 nt, Artificial Sequence
  Synthetic
uggcgugaucgcuuaguggcaaa

SEQ ID NO: 431883 - RNA, 24 nt, Artificial Sequence
  Synthetic
cuggcgugaucgcuuaguggcaaa

SEQ ID NO: 431884 - RNA, 18 nt, Artificial Sequence
  Synthetic
aaauaagcugguggcaaa

SEQ ID NO: 431885 - RNA, 19 nt, Artificial Sequence
  Synthetic
gaaauaagcugguggcaaa

SEQ ID NO: 431886 - RNA, 20 nt, Artificial Sequence
  Synthetic
agaaauaagcugguggcaaa

SEQ ID NO: 431887 - RNA, 21 nt, Artificial Sequence
  Synthetic
cagaaauaagcugguggcaaa

SEQ ID NO: 431888 - RNA, 22 nt, Artificial Sequence
  Synthetic
ccagaaauaagcugguggcaaa

SEQ ID NO: 431889 - RNA, 23 nt, Artificial Sequence
  Synthetic
gccagaaauaagcugguggcaaa

SEQ ID NO: 431890 - RNA, 24 nt, Artificial Sequence
  Synthetic
ggccagaaauaagcugguggcaaa

SEQ ID NO: 431891 - RNA, 18 nt, Artificial Sequence
  Synthetic
cuuccuuggcuuggcaaa

SEQ ID NO: 431892 - RNA, 19 nt, Artificial Sequence
  Synthetic
ucuuccuuggcuuggcaaa

SEQ ID NO: 431893 - RNA, 20 nt, Artificial Sequence
  Synthetic
cucuuccuuggcuuggcaaa

SEQ ID NO: 431894 - RNA, 21 nt, Artificial Sequence
  Synthetic
ccucuuccuuggcuuggcaaa

SEQ ID NO: 431895 - RNA, 22 nt, Artificial Sequence
  Synthetic
cccucuuccuuggcuuggcaaa

SEQ ID NO: 431896 - RNA, 23 nt, Artificial Sequence
  Synthetic
gcccucuuccuuggcuuggcaaa

SEQ ID NO: 431897 - RNA, 24 nt, Artificial Sequence
  Synthetic
agcccucuuccuuggcuuggcaaa

SEQ ID NO: 431898 - RNA, 18 nt, Artificial Sequence
  Synthetic
uagaaaaugcaaugcaaa

SEQ ID NO: 431899 - RNA, 19 nt, Artificial Sequence
  Synthetic
cuagaaaaugcaaugcaaa

SEQ ID NO: 431900 - RNA, 20 nt, Artificial Sequence
  Synthetic
gcuagaaaaugcaaugcaaa

SEQ ID NO: 431901 - RNA, 21 nt, Artificial Sequence
  Synthetic
ggcuagaaaaugcaaugcaaa

SEQ ID NO: 431902 - RNA, 22 nt, Artificial Sequence
  Synthetic
uggcuagaaaaugcaaugcaaa

SEQ ID NO: 431903 - RNA, 23 nt, Artificial Sequence
  Synthetic
uuggcuagaaaaugcaaugcaaa

SEQ ID NO: 431904 - RNA, 24 nt, Artificial Sequence
  Synthetic
uuuggcuagaaaaugcaaugcaaa

SEQ ID NO: 431905 - RNA, 18 nt, Artificial Sequence
  Synthetic
cagaauggggaaugcaaa

SEQ ID NO: 431906 - RNA, 19 nt, Artificial Sequence
  Synthetic
acagaauggggaaugcaaa

SEQ ID NO: 431907 - RNA, 20 nt, Artificial Sequence
  Synthetic
cacagaauggggaaugcaaa

SEQ ID NO: 431908 - RNA, 21 nt, Artificial Sequence
  Synthetic
acacagaauggggaaugcaaa

SEQ ID NO: 431909 - RNA, 22 nt, Artificial Sequence
  Synthetic
uacacagaauggggaaugcaaa

SEQ ID NO: 431910 - RNA, 23 nt, Artificial Sequence
  Synthetic
auacacagaauggggaaugcaaa

SEQ ID NO: 431911 - RNA, 24 nt, Artificial Sequence
  Synthetic
gauacacagaauggggaaugcaaa

SEQ ID NO: 431912 - RNA, 18 nt, Artificial Sequence
  Synthetic
aucugucgguaaugcaaa

SEQ ID NO: 431913 - RNA, 19 nt, Artificial Sequence
  Synthetic
caucugucgguaaugcaaa

SEQ ID NO: 431914 - RNA, 20 nt, Artificial Sequence
  Synthetic
gcaucugucgguaaugcaaa

SEQ ID NO: 431915 - RNA, 21 nt, Artificial Sequence
  Synthetic
ugcaucugucgguaaugcaaa

SEQ ID NO: 431916 - RNA, 22 nt, Artificial Sequence
  Synthetic
cugcaucugucgguaaugcaaa

SEQ ID NO: 431917 - RNA, 23 nt, Artificial Sequence
  Synthetic
ucugcaucugucgguaaugcaaa

SEQ ID NO: 431918 - RNA, 24 nt, Artificial Sequence
  Synthetic
uucugcaucugucgguaaugcaaa

SEQ ID NO: 431919 - RNA, 18 nt, Artificial Sequence
  Synthetic
ggaaaaggguaaugcaaa

SEQ ID NO: 431920 - RNA, 19 nt, Artificial Sequence
  Synthetic
aggaaaaggguaaugcaaa

SEQ ID NO: 431921 - RNA, 20 nt, Artificial Sequence
  Synthetic
caggaaaaggguaaugcaaa

SEQ ID NO: 431922 - RNA, 21 nt, Artificial Sequence
  Synthetic
ucaggaaaaggguaaugcaaa

SEQ ID NO: 431923 - RNA, 22 nt, Artificial Sequence
  Synthetic
gucaggaaaaggguaaugcaaa

SEQ ID NO: 431924 - RNA, 23 nt, Artificial Sequence
  Synthetic
agucaggaaaaggguaaugcaaa

SEQ ID NO: 431925 - RNA, 24 nt, Artificial Sequence
  Synthetic
uagucaggaaaaggguaaugcaaa

SEQ ID NO: 431926 - RNA, 18 nt, Artificial Sequence
  Synthetic
aucuuuuuguaaugcaaa

SEQ ID NO: 431927 - RNA, 19 nt, Artificial Sequence
  Synthetic
gaucuuuuuguaaugcaaa

SEQ ID NO: 431928 - RNA, 20 nt, Artificial Sequence
  Synthetic
ugaucuuuuuguaaugcaaa

SEQ ID NO: 431929 - RNA, 21 nt, Artificial Sequence
  Synthetic
augaucuuuuuguaaugcaaa

SEQ ID NO: 431930 - RNA, 22 nt, Artificial Sequence
  Synthetic
aaugaucuuuuuguaaugcaaa

SEQ ID NO: 431931 - RNA, 23 nt, Artificial Sequence
  Synthetic
aaaugaucuuuuuguaaugcaaa

SEQ ID NO: 431932 - RNA, 24 nt, Artificial Sequence
  Synthetic
uaaaugaucuuuuuguaaugcaaa

SEQ ID NO: 431933 - RNA, 18 nt, Artificial Sequence
  Synthetic
acuauuuguuaaugcaaa

SEQ ID NO: 431934 - RNA, 19 nt, Artificial Sequence
  Synthetic
aacuauuuguuaaugcaaa

SEQ ID NO: 431935 - RNA, 20 nt, Artificial Sequence
  Synthetic
aaacuauuuguuaaugcaaa

SEQ ID NO: 431936 - RNA, 21 nt, Artificial Sequence
  Synthetic
caaacuauuuguuaaugcaaa

SEQ ID NO: 431937 - RNA, 22 nt, Artificial Sequence
  Synthetic
ucaaacuauuuguuaaugcaaa

SEQ ID NO: 431938 - RNA, 23 nt, Artificial Sequence
  Synthetic
cucaaacuauuuguuaaugcaaa

SEQ ID NO: 431939 - RNA, 24 nt, Artificial Sequence
  Synthetic
ucucaaacuauuuguuaaugcaaa

SEQ ID NO: 431940 - RNA, 18 nt, Artificial Sequence
  Synthetic
auguuucauccaugcaaa

SEQ ID NO: 431941 - RNA, 19 nt, Artificial Sequence
  Synthetic
aauguuucauccaugcaaa

SEQ ID NO: 431942 - RNA, 20 nt, Artificial Sequence
  Synthetic
gaauguuucauccaugcaaa

SEQ ID NO: 431943 - RNA, 21 nt, Artificial Sequence
  Synthetic
ugaauguuucauccaugcaaa

SEQ ID NO: 431944 - RNA, 22 nt, Artificial Sequence
  Synthetic
augaauguuucauccaugcaaa

SEQ ID NO: 431945 - RNA, 23 nt, Artificial Sequence
  Synthetic
uaugaauguuucauccaugcaaa

SEQ ID NO: 431946 - RNA, 24 nt, Artificial Sequence
  Synthetic
uuaugaauguuucauccaugcaaa

SEQ ID NO: 431947 - RNA, 18 nt, Artificial Sequence
  Synthetic
aaagauacuccaugcaaa

SEQ ID NO: 431948 - RNA, 19 nt, Artificial Sequence
  Synthetic
aaaagauacuccaugcaaa

SEQ ID NO: 431949 - RNA, 20 nt, Artificial Sequence
  Synthetic
aaaaagauacuccaugcaaa

SEQ ID NO: 431950 - RNA, 21 nt, Artificial Sequence
  Synthetic
gaaaaagauacuccaugcaaa

SEQ ID NO: 431951 - RNA, 22 nt, Artificial Sequence
  Synthetic
ggaaaaagauacuccaugcaaa

SEQ ID NO: 431952 - RNA, 23 nt, Artificial Sequence
  Synthetic
cggaaaaagauacuccaugcaaa

SEQ ID NO: 431953 - RNA, 24 nt, Artificial Sequence
  Synthetic
acggaaaaagauacuccaugcaaa

SEQ ID NO: 431954 - RNA, 18 nt, Artificial Sequence
  Synthetic
auuuagaugucaugcaaa

SEQ ID NO: 431955 - RNA, 19 nt, Artificial Sequence
  Synthetic
gauuuagaugucaugcaaa

SEQ ID NO: 431956 - RNA, 20 nt, Artificial Sequence
  Synthetic
agauuuagaugucaugcaaa

SEQ ID NO: 431957 - RNA, 21 nt, Artificial Sequence
  Synthetic
aagauuuagaugucaugcaaa

SEQ ID NO: 431958 - RNA, 22 nt, Artificial Sequence
  Synthetic
aaagauuuagaugucaugcaaa

SEQ ID NO: 431959 - RNA, 23 nt, Artificial Sequence
  Synthetic
aaaagauuuagaugucaugcaaa

SEQ ID NO: 431960 - RNA, 24 nt, Artificial Sequence
  Synthetic
uaaaagauuuagaugucaugcaaa

SEQ ID NO: 431961 - RNA, 18 nt, Artificial Sequence
  Synthetic
gaaccaacaagaugcaaa

SEQ ID NO: 431962 - RNA, 19 nt, Artificial Sequence
  Synthetic
agaaccaacaagaugcaaa

SEQ ID NO: 431963 - RNA, 20 nt, Artificial Sequence
  Synthetic
cagaaccaacaagaugcaaa

SEQ ID NO: 431964 - RNA, 21 nt, Artificial Sequence
  Synthetic
acagaaccaacaagaugcaaa

SEQ ID NO: 431965 - RNA, 22 nt, Artificial Sequence
  Synthetic
gacagaaccaacaagaugcaaa

SEQ ID NO: 431966 - RNA, 23 nt, Artificial Sequence
  Synthetic
ugacagaaccaacaagaugcaaa

SEQ ID NO: 431967 - RNA, 24 nt, Artificial Sequence
  Synthetic
uugacagaaccaacaagaugcaaa

SEQ ID NO: 431968 - RNA, 18 nt, Artificial Sequence
  Synthetic
uauuucaccugaugcaaa

SEQ ID NO: 431969 - RNA, 19 nt, Artificial Sequence
  Synthetic
auauuucaccugaugcaaa

SEQ ID NO: 431970 - RNA, 20 nt, Artificial Sequence
  Synthetic
uauauuucaccugaugcaaa

SEQ ID NO: 431971 - RNA, 21 nt, Artificial Sequence
  Synthetic
auauauuucaccugaugcaaa

SEQ ID NO: 431972 - RNA, 22 nt, Artificial Sequence
  Synthetic
uauauauuucaccugaugcaaa

SEQ ID NO: 431973 - RNA, 23 nt, Artificial Sequence
  Synthetic
uuauauauuucaccugaugcaaa

SEQ ID NO: 431974 - RNA, 24 nt, Artificial Sequence
  Synthetic
uuuauauauuucaccugaugcaaa

SEQ ID NO: 431975 - RNA, 18 nt, Artificial Sequence
  Synthetic
gaguggcaaauaugcaaa

SEQ ID NO: 431976 - RNA, 19 nt, Artificial Sequence
  Synthetic
agaguggcaaauaugcaaa

SEQ ID NO: 431977 - RNA, 20 nt, Artificial Sequence
  Synthetic
aagaguggcaaauaugcaaa

SEQ ID NO: 431978 - RNA, 21 nt, Artificial Sequence
  Synthetic
aaagaguggcaaauaugcaaa

SEQ ID NO: 431979 - RNA, 22 nt, Artificial Sequence
  Synthetic
aaaagaguggcaaauaugcaaa

SEQ ID NO: 431980 - RNA, 23 nt, Artificial Sequence
  Synthetic
aaaaagaguggcaaauaugcaaa

SEQ ID NO: 431981 - RNA, 24 nt, Artificial Sequence
  Synthetic
gaaaaagaguggcaaauaugcaaa

SEQ ID NO: 431982 - RNA, 18 nt, Artificial Sequence
  Synthetic
ggacaguuuuuaugcaaa

SEQ ID NO: 431983 - RNA, 19 nt, Artificial Sequence
  Synthetic
uggacaguuuuuaugcaaa

SEQ ID NO: 431984 - RNA, 20 nt, Artificial Sequence
  Synthetic
auggacaguuuuuaugcaaa

SEQ ID NO: 431985 - RNA, 21 nt, Artificial Sequence
  Synthetic
cauggacaguuuuuaugcaaa

SEQ ID NO: 431986 - RNA, 22 nt, Artificial Sequence
  Synthetic
gcauggacaguuuuuaugcaaa

SEQ ID NO: 431987 - RNA, 23 nt, Artificial Sequence
  Synthetic
ggcauggacaguuuuuaugcaaa

SEQ ID NO: 431988 - RNA, 24 nt, Artificial Sequence
  Synthetic
aggcauggacaguuuuuaugcaaa

SEQ ID NO: 431989 - RNA, 18 nt, Artificial Sequence
  Synthetic
aaucucuuuuacugcaaa

SEQ ID NO: 431990 - RNA, 19 nt, Artificial Sequence
  Synthetic
caaucucuuuuacugcaaa

SEQ ID NO: 431991 - RNA, 20 nt, Artificial Sequence
  Synthetic
acaaucucuuuuacugcaaa

SEQ ID NO: 431992 - RNA, 21 nt, Artificial Sequence
  Synthetic
aacaaucucuuuuacugcaaa

SEQ ID NO: 431993 - RNA, 22 nt, Artificial Sequence
  Synthetic
aaacaaucucuuuuacugcaaa

SEQ ID NO: 431994 - RNA, 23 nt, Artificial Sequence
  Synthetic
gaaacaaucucuuuuacugcaaa

SEQ ID NO: 431995 - RNA, 24 nt, Artificial Sequence
  Synthetic
ugaaacaaucucuuuuacugcaaa

SEQ ID NO: 431996 - RNA, 18 nt, Artificial Sequence
  Synthetic
aaucaugucagcugcaaa

SEQ ID NO: 431997 - RNA, 19 nt, Artificial Sequence
  Synthetic
caaucaugucagcugcaaa

SEQ ID NO: 431998 - RNA, 20 nt, Artificial Sequence
  Synthetic
acaaucaugucagcugcaaa

SEQ ID NO: 431999 - RNA, 21 nt, Artificial Sequence
  Synthetic
uacaaucaugucagcugcaaa

SEQ ID NO: 432000 - RNA, 22 nt, Artificial Sequence
  Synthetic
auacaaucaugucagcugcaaa

SEQ ID NO: 432001 - RNA, 23 nt, Artificial Sequence
  Synthetic
uauacaaucaugucagcugcaaa

SEQ ID NO: 432002 - RNA, 24 nt, Artificial Sequence
  Synthetic
auauacaaucaugucagcugcaaa

SEQ ID NO: 432003 - RNA, 18 nt, Artificial Sequence
  Synthetic
ugggacaggugcugcaaa

SEQ ID NO: 432004 - RNA, 19 nt, Artificial Sequence
  Synthetic
gugggacaggugcugcaaa

SEQ ID NO: 432005 - RNA, 20 nt, Artificial Sequence
  Synthetic
agugggacaggugcugcaaa

SEQ ID NO: 432006 - RNA, 21 nt, Artificial Sequence
  Synthetic
aagugggacaggugcugcaaa

SEQ ID NO: 432007 - RNA, 22 nt, Artificial Sequence
  Synthetic
aaagugggacaggugcugcaaa

SEQ ID NO: 432008 - RNA, 23 nt, Artificial Sequence
  Synthetic
caaagugggacaggugcugcaaa

SEQ ID NO: 432009 - RNA, 24 nt, Artificial Sequence
  Synthetic
gcaaagugggacaggugcugcaaa

SEQ ID NO: 432010 - RNA, 18 nt, Artificial Sequence
  Synthetic
ucaaauaaacucugcaaa

SEQ ID NO: 432011 - RNA, 19 nt, Artificial Sequence
  Synthetic
cucaaauaaacucugcaaa

SEQ ID NO: 432012 - RNA, 20 nt, Artificial Sequence
  Synthetic
gcucaaauaaacucugcaaa

SEQ ID NO: 432013 - RNA, 21 nt, Artificial Sequence
  Synthetic
ugcucaaauaaacucugcaaa

SEQ ID NO: 432014 - RNA, 22 nt, Artificial Sequence
  Synthetic
uugcucaaauaaacucugcaaa

SEQ ID NO: 432015 - RNA, 23 nt, Artificial Sequence
  Synthetic
uuugcucaaauaaacucugcaaa

SEQ ID NO: 432016 - RNA, 24 nt, Artificial Sequence
  Synthetic
uuuugcucaaauaaacucugcaaa

SEQ ID NO: 432017 - RNA, 21 nt, Artificial Sequence
  Synthetic
aacaaucaugucgucugcaaa

SEQ ID NO: 432018 - RNA, 22 nt, Artificial Sequence
  Synthetic
aaacaaucaugucgucugcaaa

SEQ ID NO: 432019 - RNA, 23 nt, Artificial Sequence
  Synthetic
uaaacaaucaugucgucugcaaa

SEQ ID NO: 432020 - RNA, 24 nt, Artificial Sequence
  Synthetic
auaaacaaucaugucgucugcaaa

SEQ ID NO: 432021 - RNA, 18 nt, Artificial Sequence
  Synthetic
ggccacucuuucugcaaa

SEQ ID NO: 432022 - RNA, 19 nt, Artificial Sequence
  Synthetic
uggccacucuuucugcaaa

SEQ ID NO: 432023 - RNA, 20 nt, Artificial Sequence
  Synthetic
uuggccacucuuucugcaaa

SEQ ID NO: 432024 - RNA, 21 nt, Artificial Sequence
  Synthetic
uuuggccacucuuucugcaaa

SEQ ID NO: 432025 - RNA, 22 nt, Artificial Sequence
  Synthetic
uuuuggccacucuuucugcaaa

SEQ ID NO: 432026 - RNA, 23 nt, Artificial Sequence
  Synthetic
uuuuuggccacucuuucugcaaa

SEQ ID NO: 432027 - RNA, 24 nt, Artificial Sequence
  Synthetic
auuuuuggccacucuuucugcaaa

SEQ ID NO: 432028 - RNA, 18 nt, Artificial Sequence
  Synthetic
uucuaccagaggugcaaa

SEQ ID NO: 432029 - RNA, 19 nt, Artificial Sequence
  Synthetic
auucuaccagaggugcaaa

SEQ ID NO: 432030 - RNA, 20 nt, Artificial Sequence
  Synthetic
aauucuaccagaggugcaaa

SEQ ID NO: 432031 - RNA, 21 nt, Artificial Sequence
  Synthetic
gaauucuaccagaggugcaaa

SEQ ID NO: 432032 - RNA, 22 nt, Artificial Sequence
  Synthetic
cgaauucuaccagaggugcaaa

SEQ ID NO: 432033 - RNA, 23 nt, Artificial Sequence
  Synthetic
ccgaauucuaccagaggugcaaa

SEQ ID NO: 432034 - RNA, 24 nt, Artificial Sequence
  Synthetic
gccgaauucuaccagaggugcaaa

SEQ ID NO: 432035 - RNA, 18 nt, Artificial Sequence
  Synthetic
gguaacaguaggugcaaa

SEQ ID NO: 432036 - RNA, 19 nt, Artificial Sequence
  Synthetic
ugguaacaguaggugcaaa

SEQ ID NO: 432037 - RNA, 20 nt, Artificial Sequence
  Synthetic
gugguaacaguaggugcaaa

SEQ ID NO: 432038 - RNA, 21 nt, Artificial Sequence
  Synthetic
agugguaacaguaggugcaaa

SEQ ID NO: 432039 - RNA, 22 nt, Artificial Sequence
  Synthetic
uagugguaacaguaggugcaaa

SEQ ID NO: 432040 - RNA, 23 nt, Artificial Sequence
  Synthetic
guagugguaacaguaggugcaaa

SEQ ID NO: 432041 - RNA, 24 nt, Artificial Sequence
  Synthetic
aguagugguaacaguaggugcaaa

SEQ ID NO: 432042 - RNA, 18 nt, Artificial Sequence
  Synthetic
acagaaaguaauugcaaa

SEQ ID NO: 432043 - RNA, 19 nt, Artificial Sequence
  Synthetic
uacagaaaguaauugcaaa

SEQ ID NO: 432044 - RNA, 20 nt, Artificial Sequence
  Synthetic
guacagaaaguaauugcaaa

SEQ ID NO: 432045 - RNA, 21 nt, Artificial Sequence
  Synthetic
uguacagaaaguaauugcaaa

SEQ ID NO: 432046 - RNA, 22 nt, Artificial Sequence
  Synthetic
auguacagaaaguaauugcaaa

SEQ ID NO: 432047 - RNA, 23 nt, Artificial Sequence
  Synthetic
aauguacagaaaguaauugcaaa

SEQ ID NO: 432048 - RNA, 24 nt, Artificial Sequence
  Synthetic
aaauguacagaaaguaauugcaaa

SEQ ID NO: 432049 - RNA, 18 nt, Artificial Sequence
  Synthetic
gagacuaaugauugcaaa

SEQ ID NO: 432050 - RNA, 19 nt, Artificial Sequence
  Synthetic
ggagacuaaugauugcaaa

SEQ ID NO: 432051 - RNA, 20 nt, Artificial Sequence
  Synthetic
gggagacuaaugauugcaaa

SEQ ID NO: 432052 - RNA, 21 nt, Artificial Sequence
  Synthetic
ugggagacuaaugauugcaaa

SEQ ID NO: 432053 - RNA, 22 nt, Artificial Sequence
  Synthetic
uugggagacuaaugauugcaaa

SEQ ID NO: 432054 - RNA, 23 nt, Artificial Sequence
  Synthetic
cuugggagacuaaugauugcaaa

SEQ ID NO: 432055 - RNA, 24 nt, Artificial Sequence
  Synthetic
ucuugggagacuaaugauugcaaa

SEQ ID NO: 432056 - RNA, 18 nt, Artificial Sequence
  Synthetic
auauuguuguguugcaaa

SEQ ID NO: 432057 - RNA, 19 nt, Artificial Sequence
  Synthetic
uauauuguuguguugcaaa

SEQ ID NO: 432058 - RNA, 20 nt, Artificial Sequence
  Synthetic
uuauauuguuguguugcaaa

SEQ ID NO: 432059 - RNA, 21 nt, Artificial Sequence
  Synthetic
uuuauauuguuguguugcaaa

SEQ ID NO: 432060 - RNA, 22 nt, Artificial Sequence
  Synthetic
cuuuauauuguuguguugcaaa

SEQ ID NO: 432061 - RNA, 23 nt, Artificial Sequence
  Synthetic
acuuuauauuguuguguugcaaa

SEQ ID NO: 432062 - RNA, 24 nt, Artificial Sequence
  Synthetic
cacuuuauauuguuguguugcaaa

SEQ ID NO: 432063 - RNA, 18 nt, Artificial Sequence
  Synthetic
uggacucucauuugcaaa

SEQ ID NO: 432064 - RNA, 19 nt, Artificial Sequence
  Synthetic
cuggacucucauuugcaaa

SEQ ID NO: 432065 - RNA, 20 nt, Artificial Sequence
  Synthetic
acuggacucucauuugcaaa

SEQ ID NO: 432066 - RNA, 21 nt, Artificial Sequence
  Synthetic
cacuggacucucauuugcaaa

SEQ ID NO: 432067 - RNA, 22 nt, Artificial Sequence
  Synthetic
gcacuggacucucauuugcaaa

SEQ ID NO: 432068 - RNA, 23 nt, Artificial Sequence
  Synthetic
agcacuggacucucauuugcaaa

SEQ ID NO: 432069 - RNA, 24 nt, Artificial Sequence
  Synthetic
uagcacuggacucucauuugcaaa

SEQ ID NO: 432070 - RNA, 18 nt, Artificial Sequence
  Synthetic
ucuuaaauuguuugcaaa

SEQ ID NO: 432071 - RNA, 19 nt, Artificial Sequence
  Synthetic
cucuuaaauuguuugcaaa

SEQ ID NO: 432072 - RNA, 20 nt, Artificial Sequence
  Synthetic
gcucuuaaauuguuugcaaa

SEQ ID NO: 432073 - RNA, 21 nt, Artificial Sequence
  Synthetic
agcucuuaaauuguuugcaaa

SEQ ID NO: 432074 - RNA, 22 nt, Artificial Sequence
  Synthetic
gagcucuuaaauuguuugcaaa

SEQ ID NO: 432075 - RNA, 23 nt, Artificial Sequence
  Synthetic
agagcucuuaaauuguuugcaaa

SEQ ID NO: 432076 - RNA, 24 nt, Artificial Sequence
  Synthetic
gagagcucuuaaauuguuugcaaa

SEQ ID NO: 432077 - RNA, 18 nt, Artificial Sequence
  Synthetic
auuuuggguuuuugcaaa

SEQ ID NO: 432078 - RNA, 19 nt, Artificial Sequence
  Synthetic
uauuuuggguuuuugcaaa

SEQ ID NO: 432079 - RNA, 20 nt, Artificial Sequence
  Synthetic
auauuuuggguuuuugcaaa

SEQ ID NO: 432080 - RNA, 21 nt, Artificial Sequence
  Synthetic
aauauuuuggguuuuugcaaa

SEQ ID NO: 432081 - RNA, 22 nt, Artificial Sequence
  Synthetic
aaauauuuuggguuuuugcaaa

SEQ ID NO: 432082 - RNA, 23 nt, Artificial Sequence
  Synthetic
aaaauauuuuggguuuuugcaaa

SEQ ID NO: 432083 - RNA, 24 nt, Artificial Sequence
  Synthetic
uaaaauauuuuggguuuuugcaaa

SEQ ID NO: 432084 - RNA, 18 nt, Artificial Sequence
  Synthetic
ucaaggaaaaaaaucaaa

SEQ ID NO: 432085 - RNA, 19 nt, Artificial Sequence
  Synthetic
uucaaggaaaaaaaucaaa

SEQ ID NO: 432086 - RNA, 20 nt, Artificial Sequence
  Synthetic
cuucaaggaaaaaaaucaaa

SEQ ID NO: 432087 - RNA, 21 nt, Artificial Sequence
  Synthetic
ucuucaaggaaaaaaaucaaa

SEQ ID NO: 432088 - RNA, 22 nt, Artificial Sequence
  Synthetic
cucuucaaggaaaaaaaucaaa

SEQ ID NO: 432089 - RNA, 23 nt, Artificial Sequence
  Synthetic
gcucuucaaggaaaaaaaucaaa

SEQ ID NO: 432090 - RNA, 24 nt, Artificial Sequence
  Synthetic
ugcucuucaaggaaaaaaaucaaa

SEQ ID NO: 432091 - RNA, 18 nt, Artificial Sequence
  Synthetic
ucagaauacaaaaucaaa

SEQ ID NO: 432092 - RNA, 19 nt, Artificial Sequence
  Synthetic
cucagaauacaaaaucaaa

SEQ ID NO: 432093 - RNA, 20 nt, Artificial Sequence
  Synthetic
ucucagaauacaaaaucaaa

SEQ ID NO: 432094 - RNA, 21 nt, Artificial Sequence
  Synthetic
gucucagaauacaaaaucaaa

SEQ ID NO: 432095 - RNA, 22 nt, Artificial Sequence
  Synthetic
agucucagaauacaaaaucaaa

SEQ ID NO: 432096 - RNA, 23 nt, Artificial Sequence
  Synthetic
aagucucagaauacaaaaucaaa

SEQ ID NO: 432097 - RNA, 24 nt, Artificial Sequence
  Synthetic
caagucucagaauacaaaaucaaa

SEQ ID NO: 432098 - RNA, 18 nt, Artificial Sequence
  Synthetic
uauuuugugaaaaucaaa

SEQ ID NO: 432099 - RNA, 19 nt, Artificial Sequence
  Synthetic
uuauuuugugaaaaucaaa

SEQ ID NO: 432100 - RNA, 20 nt, Artificial Sequence
  Synthetic
uuuauuuugugaaaaucaaa

SEQ ID NO: 432101 - RNA, 21 nt, Artificial Sequence
  Synthetic
uuuuauuuugugaaaaucaaa

SEQ ID NO: 432102 - RNA, 22 nt, Artificial Sequence
  Synthetic
cuuuuauuuugugaaaaucaaa

SEQ ID NO: 432103 - RNA, 23 nt, Artificial Sequence
  Synthetic
ccuuuuauuuugugaaaaucaaa

SEQ ID NO: 432104 - RNA, 24 nt, Artificial Sequence
  Synthetic
uccuuuuauuuugugaaaaucaaa

SEQ ID NO: 432105 - RNA, 18 nt, Artificial Sequence
  Synthetic
gaaaugcaucaaaucaaa

SEQ ID NO: 432106 - RNA, 19 nt, Artificial Sequence
  Synthetic
ggaaaugcaucaaaucaaa

SEQ ID NO: 432107 - RNA, 20 nt, Artificial Sequence
  Synthetic
aggaaaugcaucaaaucaaa

SEQ ID NO: 432108 - RNA, 21 nt, Artificial Sequence
  Synthetic
aaggaaaugcaucaaaucaaa

SEQ ID NO: 432109 - RNA, 22 nt, Artificial Sequence
  Synthetic
caaggaaaugcaucaaaucaaa

SEQ ID NO: 432110 - RNA, 23 nt, Artificial Sequence
  Synthetic
acaaggaaaugcaucaaaucaaa

SEQ ID NO: 432111 - RNA, 24 nt, Artificial Sequence
  Synthetic
uacaaggaaaugcaucaaaucaaa

SEQ ID NO: 432112 - RNA, 18 nt, Artificial Sequence
  Synthetic
ucauacucucaaaucaaa

SEQ ID NO: 432113 - RNA, 19 nt, Artificial Sequence
  Synthetic
cucauacucucaaaucaaa

SEQ ID NO: 432114 - RNA, 20 nt, Artificial Sequence
  Synthetic
ccucauacucucaaaucaaa

SEQ ID NO: 432115 - RNA, 21 nt, Artificial Sequence
  Synthetic
accucauacucucaaaucaaa

SEQ ID NO: 432116 - RNA, 22 nt, Artificial Sequence
  Synthetic
uaccucauacucucaaaucaaa

SEQ ID NO: 432117 - RNA, 23 nt, Artificial Sequence
  Synthetic
guaccucauacucucaaaucaaa

SEQ ID NO: 432118 - RNA, 24 nt, Artificial Sequence
  Synthetic
aguaccucauacucucaaaucaaa

SEQ ID NO: 432119 - RNA, 18 nt, Artificial Sequence
  Synthetic
aucaaaucagaaaucaaa

SEQ ID NO: 432120 - RNA, 19 nt, Artificial Sequence
  Synthetic
aaucaaaucagaaaucaaa

SEQ ID NO: 432121 - RNA, 20 nt, Artificial Sequence
  Synthetic
aaaucaaaucagaaaucaaa

SEQ ID NO: 432122 - RNA, 21 nt, Artificial Sequence
  Synthetic
uaaaucaaaucagaaaucaaa

SEQ ID NO: 432123 - RNA, 22 nt, Artificial Sequence
  Synthetic
auaaaucaaaucagaaaucaaa

SEQ ID NO: 432124 - RNA, 23 nt, Artificial Sequence
  Synthetic
aauaaaucaaaucagaaaucaaa

SEQ ID NO: 432125 - RNA, 24 nt, Artificial Sequence
  Synthetic
aaauaaaucaaaucagaaaucaaa

SEQ ID NO: 432126 - RNA, 18 nt, Artificial Sequence
  Synthetic
cuauauaccuaaaucaaa

SEQ ID NO: 432127 - RNA, 19 nt, Artificial Sequence
  Synthetic
acuauauaccuaaaucaaa

SEQ ID NO: 432128 - RNA, 20 nt, Artificial Sequence
  Synthetic
gacuauauaccuaaaucaaa

SEQ ID NO: 432129 - RNA, 21 nt, Artificial Sequence
  Synthetic
agacuauauaccuaaaucaaa

SEQ ID NO: 432130 - RNA, 22 nt, Artificial Sequence
  Synthetic
aagacuauauaccuaaaucaaa

SEQ ID NO: 432131 - RNA, 23 nt, Artificial Sequence
  Synthetic
aaagacuauauaccuaaaucaaa

SEQ ID NO: 432132 - RNA, 24 nt, Artificial Sequence
  Synthetic
aaaagacuauauaccuaaaucaaa

SEQ ID NO: 432133 - RNA, 18 nt, Artificial Sequence
  Synthetic
aucagcaagccaaucaaa

SEQ ID NO: 432134 - RNA, 19 nt, Artificial Sequence
  Synthetic
uaucagcaagccaaucaaa

SEQ ID NO: 432135 - RNA, 20 nt, Artificial Sequence
  Synthetic
auaucagcaagccaaucaaa

SEQ ID NO: 432136 - RNA, 21 nt, Artificial Sequence
  Synthetic
aauaucagcaagccaaucaaa

SEQ ID NO: 432137 - RNA, 22 nt, Artificial Sequence
  Synthetic
uaauaucagcaagccaaucaaa

SEQ ID NO: 432138 - RNA, 23 nt, Artificial Sequence
  Synthetic
cuaauaucagcaagccaaucaaa

SEQ ID NO: 432139 - RNA, 24 nt, Artificial Sequence
  Synthetic
ucuaauaucagcaagccaaucaaa

SEQ ID NO: 432140 - RNA, 18 nt, Artificial Sequence
  Synthetic
uacaaaccuagaaucaaa

SEQ ID NO: 432141 - RNA, 19 nt, Artificial Sequence
  Synthetic
auacaaaccuagaaucaaa

SEQ ID NO: 432142 - RNA, 20 nt, Artificial Sequence
  Synthetic
aauacaaaccuagaaucaaa

SEQ ID NO: 432143 - RNA, 21 nt, Artificial Sequence
  Synthetic
aaauacaaaccuagaaucaaa

SEQ ID NO: 432144 - RNA, 22 nt, Artificial Sequence
  Synthetic
aaaauacaaaccuagaaucaaa

SEQ ID NO: 432145 - RNA, 23 nt, Artificial Sequence
  Synthetic
gaaaauacaaaccuagaaucaaa

SEQ ID NO: 432146 - RNA, 24 nt, Artificial Sequence
  Synthetic
agaaaauacaaaccuagaaucaaa

SEQ ID NO: 432147 - RNA, 18 nt, Artificial Sequence
  Synthetic
ugagagaauggaaucaaa

SEQ ID NO: 432148 - RNA, 19 nt, Artificial Sequence
  Synthetic
gugagagaauggaaucaaa

SEQ ID NO: 432149 - RNA, 20 nt, Artificial Sequence
  Synthetic
ugugagagaauggaaucaaa

SEQ ID NO: 432150 - RNA, 21 nt, Artificial Sequence
  Synthetic
augugagagaauggaaucaaa

SEQ ID NO: 432151 - RNA, 22 nt, Artificial Sequence
  Synthetic
caugugagagaauggaaucaaa

SEQ ID NO: 432152 - RNA, 23 nt, Artificial Sequence
  Synthetic
ccaugugagagaauggaaucaaa

SEQ ID NO: 432153 - RNA, 24 nt, Artificial Sequence
  Synthetic
accaugugagagaauggaaucaaa

SEQ ID NO: 432154 - RNA, 18 nt, Artificial Sequence
  Synthetic
aaaagcacuggaaucaaa

SEQ ID NO: 432155 - RNA, 19 nt, Artificial Sequence
  Synthetic
aaaaagcacuggaaucaaa

SEQ ID NO: 432156 - RNA, 20 nt, Artificial Sequence
  Synthetic
aaaaaagcacuggaaucaaa

SEQ ID NO: 432157 - RNA, 21 nt, Artificial Sequence
  Synthetic
aaaaaaagcacuggaaucaaa

SEQ ID NO: 432158 - RNA, 22 nt, Artificial Sequence
  Synthetic
aaaaaaaagcacuggaaucaaa

SEQ ID NO: 432159 - RNA, 23 nt, Artificial Sequence
  Synthetic
aaaaaaaaagcacuggaaucaaa

SEQ ID NO: 432160 - RNA, 24 nt, Artificial Sequence
  Synthetic
uaaaaaaaaagcacuggaaucaaa

SEQ ID NO: 432161 - RNA, 18 nt, Artificial Sequence
  Synthetic
uuugggcuuggaaucaaa

SEQ ID NO: 432162 - RNA, 19 nt, Artificial Sequence
  Synthetic
guuugggcuuggaaucaaa

SEQ ID NO: 432163 - RNA, 20 nt, Artificial Sequence
  Synthetic
uguuugggcuuggaaucaaa

SEQ ID NO: 432164 - RNA, 21 nt, Artificial Sequence
  Synthetic
uuguuugggcuuggaaucaaa

SEQ ID NO: 432165 - RNA, 22 nt, Artificial Sequence
  Synthetic
uuuguuugggcuuggaaucaaa

SEQ ID NO: 432166 - RNA, 23 nt, Artificial Sequence
  Synthetic
auuuguuugggcuuggaaucaaa

SEQ ID NO: 432167 - RNA, 24 nt, Artificial Sequence
  Synthetic
gauuuguuugggcuuggaaucaaa

SEQ ID NO: 432168 - RNA, 18 nt, Artificial Sequence
  Synthetic
aguacagauuuaaucaaa

SEQ ID NO: 432169 - RNA, 19 nt, Artificial Sequence
  Synthetic
aaguacagauuuaaucaaa

SEQ ID NO: 432170 - RNA, 20 nt, Artificial Sequence
  Synthetic
aaaguacagauuuaaucaaa

SEQ ID NO: 432171 - RNA, 21 nt, Artificial Sequence
  Synthetic
uaaaguacagauuuaaucaaa

SEQ ID NO: 432172 - RNA, 22 nt, Artificial Sequence
  Synthetic
uuaaaguacagauuuaaucaaa

SEQ ID NO: 432173 - RNA, 23 nt, Artificial Sequence
  Synthetic
guuaaaguacagauuuaaucaaa

SEQ ID NO: 432174 - RNA, 24 nt, Artificial Sequence
  Synthetic
uguuaaaguacagauuuaaucaaa

SEQ ID NO: 432175 - RNA, 18 nt, Artificial Sequence
  Synthetic
accugaauguccaucaaa

SEQ ID NO: 432176 - RNA, 19 nt, Artificial Sequence
  Synthetic
caccugaauguccaucaaa

SEQ ID NO: 432177 - RNA, 20 nt, Artificial Sequence
  Synthetic
ccaccugaauguccaucaaa

SEQ ID NO: 432178 - RNA, 21 nt, Artificial Sequence
  Synthetic
accaccugaauguccaucaaa

SEQ ID NO: 432179 - RNA, 22 nt, Artificial Sequence
  Synthetic
aaccaccugaauguccaucaaa

SEQ ID NO: 432180 - RNA, 23 nt, Artificial Sequence
  Synthetic
aaaccaccugaauguccaucaaa

SEQ ID NO: 432181 - RNA, 24 nt, Artificial Sequence
  Synthetic
aaaaccaccugaauguccaucaaa

SEQ ID NO: 432182 - RNA, 18 nt, Artificial Sequence
  Synthetic
acuuuuaaaagcaucaaa

SEQ ID NO: 432183 - RNA, 19 nt, Artificial Sequence
  Synthetic
aacuuuuaaaagcaucaaa

SEQ ID NO: 432184 - RNA, 20 nt, Artificial Sequence
  Synthetic
aaacuuuuaaaagcaucaaa

SEQ ID NO: 432185 - RNA, 21 nt, Artificial Sequence
  Synthetic
gaaacuuuuaaaagcaucaaa

SEQ ID NO: 432186 - RNA, 22 nt, Artificial Sequence
  Synthetic
ggaaacuuuuaaaagcaucaaa

SEQ ID NO: 432187 - RNA, 23 nt, Artificial Sequence
  Synthetic
aggaaacuuuuaaaagcaucaaa

SEQ ID NO: 432188 - RNA, 24 nt, Artificial Sequence
  Synthetic
gaggaaacuuuuaaaagcaucaaa

SEQ ID NO: 432189 - RNA, 18 nt, Artificial Sequence
  Synthetic
ccaaaucuauauaucaaa

SEQ ID NO: 432190 - RNA, 19 nt, Artificial Sequence
  Synthetic
gccaaaucuauauaucaaa

SEQ ID NO: 432191 - RNA, 20 nt, Artificial Sequence
  Synthetic
cgccaaaucuauauaucaaa

SEQ ID NO: 432192 - RNA, 21 nt, Artificial Sequence
  Synthetic
ccgccaaaucuauauaucaaa

SEQ ID NO: 432193 - RNA, 22 nt, Artificial Sequence
  Synthetic
uccgccaaaucuauauaucaaa

SEQ ID NO: 432194 - RNA, 23 nt, Artificial Sequence
  Synthetic
auccgccaaaucuauauaucaaa

SEQ ID NO: 432195 - RNA, 24 nt, Artificial Sequence
  Synthetic
aauccgccaaaucuauauaucaaa

SEQ ID NO: 432196 - RNA, 18 nt, Artificial Sequence
  Synthetic
auugauuagucuaucaaa

SEQ ID NO: 432197 - RNA, 19 nt, Artificial Sequence
  Synthetic
uauugauuagucuaucaaa

SEQ ID NO: 432198 - RNA, 20 nt, Artificial Sequence
  Synthetic
cuauugauuagucuaucaaa

SEQ ID NO: 432199 - RNA, 21 nt, Artificial Sequence
  Synthetic
ucuauugauuagucuaucaaa

SEQ ID NO: 432200 - RNA, 22 nt, Artificial Sequence
  Synthetic
uucuauugauuagucuaucaaa

SEQ ID NO: 432201 - RNA, 23 nt, Artificial Sequence
  Synthetic
cuucuauugauuagucuaucaaa

SEQ ID NO: 432202 - RNA, 24 nt, Artificial Sequence
  Synthetic
gcuucuauugauuagucuaucaaa

SEQ ID NO: 432203 - RNA, 18 nt, Artificial Sequence
  Synthetic
aauaguagaaaacucaaa

SEQ ID NO: 432204 - RNA, 19 nt, Artificial Sequence
  Synthetic
uaauaguagaaaacucaaa

SEQ ID NO: 432205 - RNA, 20 nt, Artificial Sequence
  Synthetic
auaauaguagaaaacucaaa

SEQ ID NO: 432206 - RNA, 21 nt, Artificial Sequence
  Synthetic
aauaauaguagaaaacucaaa

SEQ ID NO: 432207 - RNA, 22 nt, Artificial Sequence
  Synthetic
uaauaauaguagaaaacucaaa

SEQ ID NO: 432208 - RNA, 23 nt, Artificial Sequence
  Synthetic
auaauaauaguagaaaacucaaa

SEQ ID NO: 432209 - RNA, 24 nt, Artificial Sequence
  Synthetic
uauaauaauaguagaaaacucaaa

SEQ ID NO: 432210 - RNA, 18 nt, Artificial Sequence
  Synthetic
cauaaaaaucaacucaaa

SEQ ID NO: 432211 - RNA, 19 nt, Artificial Sequence
  Synthetic
acauaaaaaucaacucaaa

SEQ ID NO: 432212 - RNA, 20 nt, Artificial Sequence
  Synthetic
uacauaaaaaucaacucaaa

SEQ ID NO: 432213 - RNA, 21 nt, Artificial Sequence
  Synthetic
auacauaaaaaucaacucaaa

SEQ ID NO: 432214 - RNA, 22 nt, Artificial Sequence
  Synthetic
uauacauaaaaaucaacucaaa

SEQ ID NO: 432215 - RNA, 23 nt, Artificial Sequence
  Synthetic
cuauacauaaaaaucaacucaaa

SEQ ID NO: 432216 - RNA, 24 nt, Artificial Sequence
  Synthetic
acuauacauaaaaaucaacucaaa

SEQ ID NO: 432217 - RNA, 18 nt, Artificial Sequence
  Synthetic
caugaaauugaacucaaa

SEQ ID NO: 432218 - RNA, 19 nt, Artificial Sequence
  Synthetic
gcaugaaauugaacucaaa

SEQ ID NO: 432219 - RNA, 20 nt, Artificial Sequence
  Synthetic
ugcaugaaauugaacucaaa

SEQ ID NO: 432220 - RNA, 21 nt, Artificial Sequence
  Synthetic
gugcaugaaauugaacucaaa

SEQ ID NO: 432221 - RNA, 22 nt, Artificial Sequence
  Synthetic
agugcaugaaauugaacucaaa

SEQ ID NO: 432222 - RNA, 23 nt, Artificial Sequence
  Synthetic
cagugcaugaaauugaacucaaa

SEQ ID NO: 432223 - RNA, 24 nt, Artificial Sequence
  Synthetic
acagugcaugaaauugaacucaaa

SEQ ID NO: 432224 - RNA, 18 nt, Artificial Sequence
  Synthetic
augaaaaugacacucaaa

SEQ ID NO: 432225 - RNA, 19 nt, Artificial Sequence
  Synthetic
aaugaaaaugacacucaaa

SEQ ID NO: 432226 - RNA, 20 nt, Artificial Sequence
  Synthetic
aaaugaaaaugacacucaaa

SEQ ID NO: 432227 - RNA, 21 nt, Artificial Sequence
  Synthetic
uaaaugaaaaugacacucaaa

SEQ ID NO: 432228 - RNA, 22 nt, Artificial Sequence
  Synthetic
auaaaugaaaaugacacucaaa

SEQ ID NO: 432229 - RNA, 23 nt, Artificial Sequence
  Synthetic
cauaaaugaaaaugacacucaaa

SEQ ID NO: 432230 - RNA, 24 nt, Artificial Sequence
  Synthetic
acauaaaugaaaaugacacucaaa

SEQ ID NO: 432231 - RNA, 18 nt, Artificial Sequence
  Synthetic
cagggccugagacucaaa

SEQ ID NO: 432232 - RNA, 19 nt, Artificial Sequence
  Synthetic
ccagggccugagacucaaa

SEQ ID NO: 432233 - RNA, 20 nt, Artificial Sequence
  Synthetic
gccagggccugagacucaaa

SEQ ID NO: 432234 - RNA, 21 nt, Artificial Sequence
  Synthetic
ggccagggccugagacucaaa

SEQ ID NO: 432235 - RNA, 22 nt, Artificial Sequence
  Synthetic
aggccagggccugagacucaaa

SEQ ID NO: 432236 - RNA, 23 nt, Artificial Sequence
  Synthetic
aaggccagggccugagacucaaa

SEQ ID NO: 432237 - RNA, 24 nt, Artificial Sequence
  Synthetic
caaggccagggccugagacucaaa

SEQ ID NO: 432238 - RNA, 18 nt, Artificial Sequence
  Synthetic
gugcacaagauacucaaa

SEQ ID NO: 432239 - RNA, 19 nt, Artificial Sequence
  Synthetic
agugcacaagauacucaaa

SEQ ID NO: 432240 - RNA, 20 nt, Artificial Sequence
  Synthetic
uagugcacaagauacucaaa

SEQ ID NO: 432241 - RNA, 21 nt, Artificial Sequence
  Synthetic
auagugcacaagauacucaaa

SEQ ID NO: 432242 - RNA, 22 nt, Artificial Sequence
  Synthetic
uauagugcacaagauacucaaa

SEQ ID NO: 432243 - RNA, 23 nt, Artificial Sequence
  Synthetic
guauagugcacaagauacucaaa

SEQ ID NO: 432244 - RNA, 24 nt, Artificial Sequence
  Synthetic
cguauagugcacaagauacucaaa

SEQ ID NO: 432245 - RNA, 18 nt, Artificial Sequence
  Synthetic
gccuguggcaaccucaaa

SEQ ID NO: 432246 - RNA, 19 nt, Artificial Sequence
  Synthetic
agccuguggcaaccucaaa

SEQ ID NO: 432247 - RNA, 20 nt, Artificial Sequence
  Synthetic
cagccuguggcaaccucaaa

SEQ ID NO: 432248 - RNA, 21 nt, Artificial Sequence
  Synthetic
ucagccuguggcaaccucaaa

SEQ ID NO: 432249 - RNA, 22 nt, Artificial Sequence
  Synthetic
gucagccuguggcaaccucaaa

SEQ ID NO: 432250 - RNA, 23 nt, Artificial Sequence
  Synthetic
agucagccuguggcaaccucaaa

SEQ ID NO: 432251 - RNA, 24 nt, Artificial Sequence
  Synthetic
uagucagccuguggcaaccucaaa

SEQ ID NO: 432252 - RNA, 18 nt, Artificial Sequence
  Synthetic
ugugggaggaaccucaaa

SEQ ID NO: 432253 - RNA, 19 nt, Artificial Sequence
  Synthetic
augugggaggaaccucaaa

SEQ ID NO: 432254 - RNA, 20 nt, Artificial Sequence
  Synthetic
gaugugggaggaaccucaaa

SEQ ID NO: 432255 - RNA, 21 nt, Artificial Sequence
  Synthetic
ggaugugggaggaaccucaaa

SEQ ID NO: 432256 - RNA, 22 nt, Artificial Sequence
  Synthetic
uggaugugggaggaaccucaaa

SEQ ID NO: 432257 - RNA, 23 nt, Artificial Sequence
  Synthetic
guggaugugggaggaaccucaaa

SEQ ID NO: 432258 - RNA, 24 nt, Artificial Sequence
  Synthetic
uguggaugugggaggaaccucaaa

SEQ ID NO: 432259 - RNA, 18 nt, Artificial Sequence
  Synthetic
uugaaaaaaaagcucaaa

SEQ ID NO: 432260 - RNA, 19 nt, Artificial Sequence
  Synthetic
cuugaaaaaaaagcucaaa

SEQ ID NO: 432261 - RNA, 20 nt, Artificial Sequence
  Synthetic
ccuugaaaaaaaagcucaaa

SEQ ID NO: 432262 - RNA, 21 nt, Artificial Sequence
  Synthetic
accuugaaaaaaaagcucaaa

SEQ ID NO: 432263 - RNA, 22 nt, Artificial Sequence
  Synthetic
gaccuugaaaaaaaagcucaaa

SEQ ID NO: 432264 - RNA, 23 nt, Artificial Sequence
  Synthetic
ugaccuugaaaaaaaagcucaaa

SEQ ID NO: 432265 - RNA, 24 nt, Artificial Sequence
  Synthetic
cugaccuugaaaaaaaagcucaaa

SEQ ID NO: 432266 - RNA, 18 nt, Artificial Sequence
  Synthetic
ccggagcaaaagcucaaa

SEQ ID NO: 432267 - RNA, 19 nt, Artificial Sequence
  Synthetic
accggagcaaaagcucaaa

SEQ ID NO: 432268 - RNA, 20 nt, Artificial Sequence
  Synthetic
aaccggagcaaaagcucaaa

SEQ ID NO: 432269 - RNA, 21 nt, Artificial Sequence
  Synthetic
gaaccggagcaaaagcucaaa

SEQ ID NO: 432270 - RNA, 22 nt, Artificial Sequence
  Synthetic
ugaaccggagcaaaagcucaaa

SEQ ID NO: 432271 - RNA, 23 nt, Artificial Sequence
  Synthetic
augaaccggagcaaaagcucaaa

SEQ ID NO: 432272 - RNA, 24 nt, Artificial Sequence
  Synthetic
caugaaccggagcaaaagcucaaa

SEQ ID NO: 432273 - RNA, 18 nt, Artificial Sequence
  Synthetic
acuauuacaaagcucaaa

SEQ ID NO: 432274 - RNA, 19 nt, Artificial Sequence
  Synthetic
uacuauuacaaagcucaaa

SEQ ID NO: 432275 - RNA, 20 nt, Artificial Sequence
  Synthetic
auacuauuacaaagcucaaa

SEQ ID NO: 432276 - RNA, 21 nt, Artificial Sequence
  Synthetic
gauacuauuacaaagcucaaa

SEQ ID NO: 432277 - RNA, 22 nt, Artificial Sequence
  Synthetic
ggauacuauuacaaagcucaaa

SEQ ID NO: 432278 - RNA, 23 nt, Artificial Sequence
  Synthetic
uggauacuauuacaaagcucaaa

SEQ ID NO: 432279 - RNA, 24 nt, Artificial Sequence
  Synthetic
guggauacuauuacaaagcucaaa

SEQ ID NO: 432280 - RNA, 18 nt, Artificial Sequence
  Synthetic
uucauuuaaaggcucaaa

SEQ ID NO: 432281 - RNA, 19 nt, Artificial Sequence
  Synthetic
cuucauuuaaaggcucaaa

SEQ ID NO: 432282 - RNA, 20 nt, Artificial Sequence
  Synthetic
ucuucauuuaaaggcucaaa

SEQ ID NO: 432283 - RNA, 21 nt, Artificial Sequence
  Synthetic
uucuucauuuaaaggcucaaa

SEQ ID NO: 432284 - RNA, 22 nt, Artificial Sequence
  Synthetic
uuucuucauuuaaaggcucaaa

SEQ ID NO: 432285 - RNA, 23 nt, Artificial Sequence
  Synthetic
uuuucuucauuuaaaggcucaaa

SEQ ID NO: 432286 - RNA, 24 nt, Artificial Sequence
  Synthetic
auuuucuucauuuaaaggcucaaa

SEQ ID NO: 432287 - RNA, 18 nt, Artificial Sequence
  Synthetic
ccagaaaaugggcucaaa

SEQ ID NO: 432288 - RNA, 19 nt, Artificial Sequence
  Synthetic
gccagaaaaugggcucaaa

SEQ ID NO: 432289 - RNA, 20 nt, Artificial Sequence
  Synthetic
ugccagaaaaugggcucaaa

SEQ ID NO: 432290 - RNA, 21 nt, Artificial Sequence
  Synthetic
augccagaaaaugggcucaaa

SEQ ID NO: 432291 - RNA, 22 nt, Artificial Sequence
  Synthetic
gaugccagaaaaugggcucaaa

SEQ ID NO: 432292 - RNA, 23 nt, Artificial Sequence
  Synthetic
agaugccagaaaaugggcucaaa

SEQ ID NO: 432293 - RNA, 24 nt, Artificial Sequence
  Synthetic
gagaugccagaaaaugggcucaaa

SEQ ID NO: 432294 - RNA, 18 nt, Artificial Sequence
  Synthetic
cauccaggccaucucaaa

SEQ ID NO: 432295 - RNA, 19 nt, Artificial Sequence
  Synthetic
ccauccaggccaucucaaa

SEQ ID NO: 432296 - RNA, 20 nt, Artificial Sequence
  Synthetic
accauccaggccaucucaaa

SEQ ID NO: 432297 - RNA, 21 nt, Artificial Sequence
  Synthetic
caccauccaggccaucucaaa

SEQ ID NO: 432298 - RNA, 22 nt, Artificial Sequence
  Synthetic
ucaccauccaggccaucucaaa

SEQ ID NO: 432299 - RNA, 23 nt, Artificial Sequence
  Synthetic
aucaccauccaggccaucucaaa

SEQ ID NO: 432300 - RNA, 24 nt, Artificial Sequence
  Synthetic
caucaccauccaggccaucucaaa

SEQ ID NO: 432301 - RNA, 18 nt, Artificial Sequence
  Synthetic
acugugucuucucucaaa

SEQ ID NO: 432302 - RNA, 19 nt, Artificial Sequence
  Synthetic
aacugugucuucucucaaa

SEQ ID NO: 432303 - RNA, 20 nt, Artificial Sequence
  Synthetic
aaacugugucuucucucaaa

SEQ ID NO: 432304 - RNA, 21 nt, Artificial Sequence
  Synthetic
aaaacugugucuucucucaaa

SEQ ID NO: 432305 - RNA, 22 nt, Artificial Sequence
  Synthetic
gaaaacugugucuucucucaaa

SEQ ID NO: 432306 - RNA, 23 nt, Artificial Sequence
  Synthetic
agaaaacugugucuucucucaaa

SEQ ID NO: 432307 - RNA, 24 nt, Artificial Sequence
  Synthetic
uagaaaacugugucuucucucaaa

SEQ ID NO: 432308 - RNA, 18 nt, Artificial Sequence
  Synthetic
aaaaaacagcuucucaaa

SEQ ID NO: 432309 - RNA, 19 nt, Artificial Sequence
  Synthetic
aaaaaaacagcuucucaaa

SEQ ID NO: 432310 - RNA, 20 nt, Artificial Sequence
  Synthetic
aaaaaaaacagcuucucaaa

SEQ ID NO: 432311 - RNA, 21 nt, Artificial Sequence
  Synthetic
uaaaaaaaacagcuucucaaa

SEQ ID NO: 432312 - RNA, 22 nt, Artificial Sequence
  Synthetic
uuaaaaaaaacagcuucucaaa

SEQ ID NO: 432313 - RNA, 23 nt, Artificial Sequence
  Synthetic
auuaaaaaaaacagcuucucaaa

SEQ ID NO: 432314 - RNA, 24 nt, Artificial Sequence
  Synthetic
gauuaaaaaaaacagcuucucaaa

SEQ ID NO: 432315 - RNA, 18 nt, Artificial Sequence
  Synthetic
cagcaucuaguucucaaa

SEQ ID NO: 432316 - RNA, 19 nt, Artificial Sequence
  Synthetic
acagcaucuaguucucaaa

SEQ ID NO: 432317 - RNA, 20 nt, Artificial Sequence
  Synthetic
cacagcaucuaguucucaaa

SEQ ID NO: 432318 - RNA, 21 nt, Artificial Sequence
  Synthetic
acacagcaucuaguucucaaa

SEQ ID NO: 432319 - RNA, 22 nt, Artificial Sequence
  Synthetic
aacacagcaucuaguucucaaa

SEQ ID NO: 432320 - RNA, 23 nt, Artificial Sequence
  Synthetic
aaacacagcaucuaguucucaaa

SEQ ID NO: 432321 - RNA, 24 nt, Artificial Sequence
  Synthetic
aaaacacagcaucuaguucucaaa

SEQ ID NO: 432322 - RNA, 18 nt, Artificial Sequence
  Synthetic
ugucacuugguucucaaa

SEQ ID NO: 432323 - RNA, 19 nt, Artificial Sequence
  Synthetic
uugucacuugguucucaaa

SEQ ID NO: 432324 - RNA, 20 nt, Artificial Sequence
  Synthetic
cuugucacuugguucucaaa

SEQ ID NO: 432325 - RNA, 21 nt, Artificial Sequence
  Synthetic
acuugucacuugguucucaaa

SEQ ID NO: 432326 - RNA, 22 nt, Artificial Sequence
  Synthetic
cacuugucacuugguucucaaa

SEQ ID NO: 432327 - RNA, 23 nt, Artificial Sequence
  Synthetic
ucacuugucacuugguucucaaa

SEQ ID NO: 432328 - RNA, 24 nt, Artificial Sequence
  Synthetic
uucacuugucacuugguucucaaa

SEQ ID NO: 432329 - RNA, 18 nt, Artificial Sequence
  Synthetic
auaauuccuguucucaaa

SEQ ID NO: 432330 - RNA, 19 nt, Artificial Sequence
  Synthetic
aauaauuccuguucucaaa

SEQ ID NO: 432331 - RNA, 20 nt, Artificial Sequence
  Synthetic
aaauaauuccuguucucaaa

SEQ ID NO: 432332 - RNA, 21 nt, Artificial Sequence
  Synthetic
aaaauaauuccuguucucaaa

SEQ ID NO: 432333 - RNA, 22 nt, Artificial Sequence
  Synthetic
gaaaauaauuccuguucucaaa

SEQ ID NO: 432334 - RNA, 23 nt, Artificial Sequence
  Synthetic
agaaaauaauuccuguucucaaa

SEQ ID NO: 432335 - RNA, 24 nt, Artificial Sequence
  Synthetic
gagaaaauaauuccuguucucaaa

SEQ ID NO: 432336 - RNA, 18 nt, Artificial Sequence
  Synthetic
cucagauaguuucucaaa

SEQ ID NO: 432337 - RNA, 19 nt, Artificial Sequence
  Synthetic
ucucagauaguuucucaaa

SEQ ID NO: 432338 - RNA, 20 nt, Artificial Sequence
  Synthetic
aucucagauaguuucucaaa

SEQ ID NO: 432339 - RNA, 21 nt, Artificial Sequence
  Synthetic
aaucucagauaguuucucaaa

SEQ ID NO: 432340 - RNA, 22 nt, Artificial Sequence
  Synthetic
uaaucucagauaguuucucaaa

SEQ ID NO: 432341 - RNA, 23 nt, Artificial Sequence
  Synthetic
guaaucucagauaguuucucaaa

SEQ ID NO: 432342 - RNA, 24 nt, Artificial Sequence
  Synthetic
aguaaucucagauaguuucucaaa

SEQ ID NO: 432343 - RNA, 18 nt, Artificial Sequence
  Synthetic
aaaugcacaaaagucaaa

SEQ ID NO: 432344 - RNA, 19 nt, Artificial Sequence
  Synthetic
aaaaugcacaaaagucaaa

SEQ ID NO: 432345 - RNA, 20 nt, Artificial Sequence
  Synthetic
aaaaaugcacaaaagucaaa

SEQ ID NO: 432346 - RNA, 21 nt, Artificial Sequence
  Synthetic
caaaaaugcacaaaagucaaa

SEQ ID NO: 432347 - RNA, 22 nt, Artificial Sequence
  Synthetic
ccaaaaaugcacaaaagucaaa

SEQ ID NO: 432348 - RNA, 23 nt, Artificial Sequence
  Synthetic
gccaaaaaugcacaaaagucaaa

SEQ ID NO: 432349 - RNA, 24 nt, Artificial Sequence
  Synthetic
agccaaaaaugcacaaaagucaaa

SEQ ID NO: 432350 - RNA, 18 nt, Artificial Sequence
  Synthetic
uucgauaagccagucaaa

SEQ ID NO: 432351 - RNA, 19 nt, Artificial Sequence
  Synthetic
uuucgauaagccagucaaa

SEQ ID NO: 432352 - RNA, 20 nt, Artificial Sequence
  Synthetic
uuuucgauaagccagucaaa

SEQ ID NO: 432353 - RNA, 21 nt, Artificial Sequence
  Synthetic
guuuucgauaagccagucaaa

SEQ ID NO: 432354 - RNA, 22 nt, Artificial Sequence
  Synthetic
cguuuucgauaagccagucaaa

SEQ ID NO: 432355 - RNA, 23 nt, Artificial Sequence
  Synthetic
ccguuuucgauaagccagucaaa

SEQ ID NO: 432356 - RNA, 24 nt, Artificial Sequence
  Synthetic
uccguuuucgauaagccagucaaa

SEQ ID NO: 432357 - RNA, 18 nt, Artificial Sequence
  Synthetic
agaaggauuagagucaaa

SEQ ID NO: 432358 - RNA, 19 nt, Artificial Sequence
  Synthetic
uagaaggauuagagucaaa

SEQ ID NO: 432359 - RNA, 20 nt, Artificial Sequence
  Synthetic
uuagaaggauuagagucaaa

SEQ ID NO: 432360 - RNA, 21 nt, Artificial Sequence
  Synthetic
uuuagaaggauuagagucaaa

SEQ ID NO: 432361 - RNA, 22 nt, Artificial Sequence
  Synthetic
cuuuagaaggauuagagucaaa

SEQ ID NO: 432362 - RNA, 23 nt, Artificial Sequence
  Synthetic
acuuuagaaggauuagagucaaa

SEQ ID NO: 432363 - RNA, 24 nt, Artificial Sequence
  Synthetic
gacuuuagaaggauuagagucaaa

SEQ ID NO: 432364 - RNA, 18 nt, Artificial Sequence
  Synthetic
ggaugggggggagucaaa

SEQ ID NO: 432365 - RNA, 19 nt, Artificial Sequence
  Synthetic
uggaugggggggagucaaa

SEQ ID NO: 432366 - RNA, 20 nt, Artificial Sequence
  Synthetic
cuggaugggggggagucaaa

SEQ ID NO: 432367 - RNA, 21 nt, Artificial Sequence
  Synthetic
ucuggaugggggggagucaaa

SEQ ID NO: 432368 - RNA, 22 nt, Artificial Sequence
  Synthetic
cucuggaugggggggagucaaa

SEQ ID NO: 432369 - RNA, 23 nt, Artificial Sequence
  Synthetic
ucucuggaugggggggagucaaa

SEQ ID NO: 432370 - RNA, 24 nt, Artificial Sequence
  Synthetic
cucucuggaugggggggagucaaa

SEQ ID NO: 432371 - RNA, 18 nt, Artificial Sequence
  Synthetic
cuauccaugcgggucaaa

SEQ ID NO: 432372 - RNA, 19 nt, Artificial Sequence
  Synthetic
ccuauccaugcgggucaaa

SEQ ID NO: 432373 - RNA, 20 nt, Artificial Sequence
  Synthetic
uccuauccaugcgggucaaa

SEQ ID NO: 432374 - RNA, 21 nt, Artificial Sequence
  Synthetic
uuccuauccaugcgggucaaa

SEQ ID NO: 432375 - RNA, 22 nt, Artificial Sequence
  Synthetic
auuccuauccaugcgggucaaa

SEQ ID NO: 432376 - RNA, 23 nt, Artificial Sequence
  Synthetic
uauuccuauccaugcgggucaaa

SEQ ID NO: 432377 - RNA, 24 nt, Artificial Sequence
  Synthetic
guauuccuauccaugcgggucaaa

SEQ ID NO: 432378 - RNA, 18 nt, Artificial Sequence
  Synthetic
ugcuuguggcuggucaaa

SEQ ID NO: 432379 - RNA, 19 nt, Artificial Sequence
  Synthetic
augcuuguggcuggucaaa

SEQ ID NO: 432380 - RNA, 20 nt, Artificial Sequence
  Synthetic
caugcuuguggcuggucaaa

SEQ ID NO: 432381 - RNA, 21 nt, Artificial Sequence
  Synthetic
acaugcuuguggcuggucaaa

SEQ ID NO: 432382 - RNA, 22 nt, Artificial Sequence
  Synthetic
uacaugcuuguggcuggucaaa

SEQ ID NO: 432383 - RNA, 23 nt, Artificial Sequence
  Synthetic
uuacaugcuuguggcuggucaaa

SEQ ID NO: 432384 - RNA, 24 nt, Artificial Sequence
  Synthetic
auuacaugcuuguggcuggucaaa

SEQ ID NO: 432385 - RNA, 18 nt, Artificial Sequence
  Synthetic
ccuucaagucuggucaaa

SEQ ID NO: 432386 - RNA, 19 nt, Artificial Sequence
  Synthetic
uccuucaagucuggucaaa

SEQ ID NO: 432387 - RNA, 20 nt, Artificial Sequence
  Synthetic
guccuucaagucuggucaaa

SEQ ID NO: 432388 - RNA, 21 nt, Artificial Sequence
  Synthetic
aguccuucaagucuggucaaa

SEQ ID NO: 432389 - RNA, 22 nt, Artificial Sequence
  Synthetic
aaguccuucaagucuggucaaa

SEQ ID NO: 432390 - RNA, 23 nt, Artificial Sequence
  Synthetic
uaaguccuucaagucuggucaaa

SEQ ID NO: 432391 - RNA, 24 nt, Artificial Sequence
  Synthetic
cuaaguccuucaagucuggucaaa

SEQ ID NO: 432392 - RNA, 18 nt, Artificial Sequence
  Synthetic
accuccagaagugucaaa

SEQ ID NO: 432393 - RNA, 19 nt, Artificial Sequence
  Synthetic
aaccuccagaagugucaaa

SEQ ID NO: 432394 - RNA, 20 nt, Artificial Sequence
  Synthetic
gaaccuccagaagugucaaa

SEQ ID NO: 432395 - RNA, 21 nt, Artificial Sequence
  Synthetic
cgaaccuccagaagugucaaa

SEQ ID NO: 432396 - RNA, 22 nt, Artificial Sequence
  Synthetic
acgaaccuccagaagugucaaa

SEQ ID NO: 432397 - RNA, 23 nt, Artificial Sequence
  Synthetic
uacgaaccuccagaagugucaaa

SEQ ID NO: 432398 - RNA, 24 nt, Artificial Sequence
  Synthetic
uuacgaaccuccagaagugucaaa

SEQ ID NO: 432399 - RNA, 18 nt, Artificial Sequence
  Synthetic
uucucccaaugugucaaa

SEQ ID NO: 432400 - RNA, 19 nt, Artificial Sequence
  Synthetic
cuucucccaaugugucaaa

SEQ ID NO: 432401 - RNA, 20 nt, Artificial Sequence
  Synthetic
gcuucucccaaugugucaaa

SEQ ID NO: 432402 - RNA, 21 nt, Artificial Sequence
  Synthetic
agcuucucccaaugugucaaa

SEQ ID NO: 432403 - RNA, 22 nt, Artificial Sequence
  Synthetic
cagcuucucccaaugugucaaa

SEQ ID NO: 432404 - RNA, 23 nt, Artificial Sequence
  Synthetic
ucagcuucucccaaugugucaaa

SEQ ID NO: 432405 - RNA, 24 nt, Artificial Sequence
  Synthetic
uucagcuucucccaaugugucaaa

SEQ ID NO: 432406 - RNA, 18 nt, Artificial Sequence
  Synthetic
uguuuuucccuugucaaa

SEQ ID NO: 432407 - RNA, 19 nt, Artificial Sequence
  Synthetic
uuguuuuucccuugucaaa

SEQ ID NO: 432408 - RNA, 20 nt, Artificial Sequence
  Synthetic
auuguuuuucccuugucaaa

SEQ ID NO: 432409 - RNA, 21 nt, Artificial Sequence
  Synthetic
aauuguuuuucccuugucaaa

SEQ ID NO: 432410 - RNA, 22 nt, Artificial Sequence
  Synthetic
uaauuguuuuucccuugucaaa

SEQ ID NO: 432411 - RNA, 23 nt, Artificial Sequence
  Synthetic
cuaauuguuuuucccuugucaaa

SEQ ID NO: 432412 - RNA, 24 nt, Artificial Sequence
  Synthetic
ccuaauuguuuuucccuugucaaa

SEQ ID NO: 432413 - RNA, 18 nt, Artificial Sequence
  Synthetic
ucacuaggaaaauucaaa

SEQ ID NO: 432414 - RNA, 19 nt, Artificial Sequence
  Synthetic
uucacuaggaaaauucaaa

SEQ ID NO: 432415 - RNA, 20 nt, Artificial Sequence
  Synthetic
cuucacuaggaaaauucaaa

SEQ ID NO: 432416 - RNA, 21 nt, Artificial Sequence
  Synthetic
acuucacuaggaaaauucaaa

SEQ ID NO: 432417 - RNA, 22 nt, Artificial Sequence
  Synthetic
gacuucacuaggaaaauucaaa

SEQ ID NO: 432418 - RNA, 23 nt, Artificial Sequence
  Synthetic
ugacuucacuaggaaaauucaaa

SEQ ID NO: 432419 - RNA, 24 nt, Artificial Sequence
  Synthetic
uugacuucacuaggaaaauucaaa

SEQ ID NO: 432420 - RNA, 18 nt, Artificial Sequence
  Synthetic
uggggauuacaauucaaa

SEQ ID NO: 432421 - RNA, 19 nt, Artificial Sequence
  Synthetic
guggggauuacaauucaaa

SEQ ID NO: 432422 - RNA, 20 nt, Artificial Sequence
  Synthetic
uguggggauuacaauucaaa

SEQ ID NO: 432423 - RNA, 21 nt, Artificial Sequence
  Synthetic
uuguggggauuacaauucaaa

SEQ ID NO: 432424 - RNA, 22 nt, Artificial Sequence
  Synthetic
auuguggggauuacaauucaaa

SEQ ID NO: 432425 - RNA, 23 nt, Artificial Sequence
  Synthetic
gauuguggggauuacaauucaaa

SEQ ID NO: 432426 - RNA, 24 nt, Artificial Sequence
  Synthetic
ggauuguggggauuacaauucaaa

SEQ ID NO: 432427 - RNA, 18 nt, Artificial Sequence
  Synthetic
gaauauucagaauucaaa

SEQ ID NO: 432428 - RNA, 19 nt, Artificial Sequence
  Synthetic
ggaauauucagaauucaaa

SEQ ID NO: 432429 - RNA, 20 nt, Artificial Sequence
  Synthetic
aggaauauucagaauucaaa

SEQ ID NO: 432430 - RNA, 21 nt, Artificial Sequence
  Synthetic
uaggaauauucagaauucaaa

SEQ ID NO: 432431 - RNA, 22 nt, Artificial Sequence
  Synthetic
uuaggaauauucagaauucaaa

SEQ ID NO: 432432 - RNA, 23 nt, Artificial Sequence
  Synthetic
uuuaggaauauucagaauucaaa

SEQ ID NO: 432433 - RNA, 24 nt, Artificial Sequence
  Synthetic
auuuaggaauauucagaauucaaa

SEQ ID NO: 432434 - RNA, 18 nt, Artificial Sequence
  Synthetic
cggggauuauaauucaaa

SEQ ID NO: 432435 - RNA, 19 nt, Artificial Sequence
  Synthetic
acggggauuauaauucaaa

SEQ ID NO: 432436 - RNA, 20 nt, Artificial Sequence
  Synthetic
cacggggauuauaauucaaa

SEQ ID NO: 432437 - RNA, 21 nt, Artificial Sequence
  Synthetic
acacggggauuauaauucaaa

SEQ ID NO: 432438 - RNA, 22 nt, Artificial Sequence
  Synthetic
cacacggggauuauaauucaaa

SEQ ID NO: 432439 - RNA, 23 nt, Artificial Sequence
  Synthetic
acacacggggauuauaauucaaa

SEQ ID NO: 432440 - RNA, 24 nt, Artificial Sequence
  Synthetic
gacacacggggauuauaauucaaa

SEQ ID NO: 432441 - RNA, 18 nt, Artificial Sequence
  Synthetic
auaaauaguucauucaaa

SEQ ID NO: 432442 - RNA, 19 nt, Artificial Sequence
  Synthetic
aauaaauaguucauucaaa

SEQ ID NO: 432443 - RNA, 20 nt, Artificial Sequence
  Synthetic
caauaaauaguucauucaaa

SEQ ID NO: 432444 - RNA, 21 nt, Artificial Sequence
  Synthetic
gcaauaaauaguucauucaaa

SEQ ID NO: 432445 - RNA, 22 nt, Artificial Sequence
  Synthetic
ugcaauaaauaguucauucaaa

SEQ ID NO: 432446 - RNA, 23 nt, Artificial Sequence
  Synthetic
uugcaauaaauaguucauucaaa

SEQ ID NO: 432447 - RNA, 24 nt, Artificial Sequence
  Synthetic
cuugcaauaaauaguucauucaaa

SEQ ID NO: 432448 - RNA, 18 nt, Artificial Sequence
  Synthetic
cuaugaagaagauucaaa

SEQ ID NO: 432449 - RNA, 19 nt, Artificial Sequence
  Synthetic
acuaugaagaagauucaaa

SEQ ID NO: 432450 - RNA, 20 nt, Artificial Sequence
  Synthetic
aacuaugaagaagauucaaa

SEQ ID NO: 432451 - RNA, 21 nt, Artificial Sequence
  Synthetic
uaacuaugaagaagauucaaa

SEQ ID NO: 432452 - RNA, 22 nt, Artificial Sequence
  Synthetic
cuaacuaugaagaagauucaaa

SEQ ID NO: 432453 - RNA, 23 nt, Artificial Sequence
  Synthetic
acuaacuaugaagaagauucaaa

SEQ ID NO: 432454 - RNA, 24 nt, Artificial Sequence
  Synthetic
gacuaacuaugaagaagauucaaa

SEQ ID NO: 432455 - RNA, 18 nt, Artificial Sequence
  Synthetic
gaaagaaagauauucaaa

SEQ ID NO: 432456 - RNA, 19 nt, Artificial Sequence
  Synthetic
agaaagaaagauauucaaa

SEQ ID NO: 432457 - RNA, 20 nt, Artificial Sequence
  Synthetic
aagaaagaaagauauucaaa

SEQ ID NO: 432458 - RNA, 21 nt, Artificial Sequence
  Synthetic
aaagaaagaaagauauucaaa

SEQ ID NO: 432459 - RNA, 22 nt, Artificial Sequence
  Synthetic
gaaagaaagaaagauauucaaa

SEQ ID NO: 432460 - RNA, 23 nt, Artificial Sequence
  Synthetic
agaaagaaagaaagauauucaaa

SEQ ID NO: 432461 - RNA, 24 nt, Artificial Sequence
  Synthetic
gagaaagaaagaaagauauucaaa

SEQ ID NO: 432462 - RNA, 18 nt, Artificial Sequence
  Synthetic
ucaugaacaaacuucaaa

SEQ ID NO: 432463 - RNA, 19 nt, Artificial Sequence
  Synthetic
cucaugaacaaacuucaaa

SEQ ID NO: 432464 - RNA, 20 nt, Artificial Sequence
  Synthetic
ccucaugaacaaacuucaaa

SEQ ID NO: 432465 - RNA, 21 nt, Artificial Sequence
  Synthetic
gccucaugaacaaacuucaaa

SEQ ID NO: 432466 - RNA, 22 nt, Artificial Sequence
  Synthetic
ugccucaugaacaaacuucaaa

SEQ ID NO: 432467 - RNA, 23 nt, Artificial Sequence
  Synthetic
gugccucaugaacaaacuucaaa

SEQ ID NO: 432468 - RNA, 24 nt, Artificial Sequence
  Synthetic
ggugccucaugaacaaacuucaaa

SEQ ID NO: 432469 - RNA, 18 nt, Artificial Sequence
  Synthetic
uaucacauugccuucaaa

SEQ ID NO: 432470 - RNA, 19 nt, Artificial Sequence
  Synthetic
auaucacauugccuucaaa

SEQ ID NO: 432471 - RNA, 20 nt, Artificial Sequence
  Synthetic
aauaucacauugccuucaaa

SEQ ID NO: 432472 - RNA, 21 nt, Artificial Sequence
  Synthetic
aaauaucacauugccuucaaa

SEQ ID NO: 432473 - RNA, 22 nt, Artificial Sequence
  Synthetic
uaaauaucacauugccuucaaa

SEQ ID NO: 432474 - RNA, 23 nt, Artificial Sequence
  Synthetic
uuaaauaucacauugccuucaaa

SEQ ID NO: 432475 - RNA, 24 nt, Artificial Sequence
  Synthetic
auuaaauaucacauugccuucaaa

SEQ ID NO: 432476 - RNA, 18 nt, Artificial Sequence
  Synthetic
ugaaugagaggcuucaaa

SEQ ID NO: 432477 - RNA, 19 nt, Artificial Sequence
  Synthetic
gugaaugagaggcuucaaa

SEQ ID NO: 432478 - RNA, 20 nt, Artificial Sequence
  Synthetic
agugaaugagaggcuucaaa

SEQ ID NO: 432479 - RNA, 21 nt, Artificial Sequence
  Synthetic
uagugaaugagaggcuucaaa

SEQ ID NO: 432480 - RNA, 22 nt, Artificial Sequence
  Synthetic
cuagugaaugagaggcuucaaa

SEQ ID NO: 432481 - RNA, 23 nt, Artificial Sequence
  Synthetic
ccuagugaaugagaggcuucaaa

SEQ ID NO: 432482 - RNA, 24 nt, Artificial Sequence
  Synthetic
accuagugaaugagaggcuucaaa

SEQ ID NO: 432483 - RNA, 18 nt, Artificial Sequence
  Synthetic
cuggagaguugcuucaaa

SEQ ID NO: 432484 - RNA, 19 nt, Artificial Sequence
  Synthetic
ucuggagaguugcuucaaa

SEQ ID NO: 432485 - RNA, 20 nt, Artificial Sequence
  Synthetic
cucuggagaguugcuucaaa

SEQ ID NO: 432486 - RNA, 21 nt, Artificial Sequence
  Synthetic
acucuggagaguugcuucaaa

SEQ ID NO: 432487 - RNA, 22 nt, Artificial Sequence
  Synthetic
uacucuggagaguugcuucaaa

SEQ ID NO: 432488 - RNA, 23 nt, Artificial Sequence
  Synthetic
auacucuggagaguugcuucaaa

SEQ ID NO: 432489 - RNA, 24 nt, Artificial Sequence
  Synthetic
aauacucuggagaguugcuucaaa

SEQ ID NO: 432490 - RNA, 18 nt, Artificial Sequence
  Synthetic
cauaaaucaaaguucaaa

SEQ ID NO: 432491 - RNA, 19 nt, Artificial Sequence
  Synthetic
ccauaaaucaaaguucaaa

SEQ ID NO: 432492 - RNA, 20 nt, Artificial Sequence
  Synthetic
accauaaaucaaaguucaaa

SEQ ID NO: 432493 - RNA, 21 nt, Artificial Sequence
  Synthetic
aaccauaaaucaaaguucaaa

SEQ ID NO: 432494 - RNA, 22 nt, Artificial Sequence
  Synthetic
aaaccauaaaucaaaguucaaa

SEQ ID NO: 432495 - RNA, 23 nt, Artificial Sequence
  Synthetic
aaaaccauaaaucaaaguucaaa

SEQ ID NO: 432496 - RNA, 24 nt, Artificial Sequence
  Synthetic
caaaaccauaaaucaaaguucaaa

SEQ ID NO: 432497 - RNA, 18 nt, Artificial Sequence
  Synthetic
aagacaaaagauuucaaa

SEQ ID NO: 432498 - RNA, 19 nt, Artificial Sequence
  Synthetic
aaagacaaaagauuucaaa

SEQ ID NO: 432499 - RNA, 20 nt, Artificial Sequence
  Synthetic
aaaagacaaaagauuucaaa

SEQ ID NO: 432500 - RNA, 21 nt, Artificial Sequence
  Synthetic
uaaaagacaaaagauuucaaa

SEQ ID NO: 432501 - RNA, 22 nt, Artificial Sequence
  Synthetic
guaaaagacaaaagauuucaaa

SEQ ID NO: 432502 - RNA, 23 nt, Artificial Sequence
  Synthetic
gguaaaagacaaaagauuucaaa

SEQ ID NO: 432503 - RNA, 24 nt, Artificial Sequence
  Synthetic
ugguaaaagacaaaagauuucaaa

SEQ ID NO: 432504 - RNA, 18 nt, Artificial Sequence
  Synthetic
cauuuuauagauuucaaa

SEQ ID NO: 432505 - RNA, 19 nt, Artificial Sequence
  Synthetic
ccauuuuauagauuucaaa

SEQ ID NO: 432506 - RNA, 20 nt, Artificial Sequence
  Synthetic
cccauuuuauagauuucaaa

SEQ ID NO: 432507 - RNA, 21 nt, Artificial Sequence
  Synthetic
ucccauuuuauagauuucaaa

SEQ ID NO: 432508 - RNA, 22 nt, Artificial Sequence
  Synthetic
aucccauuuuauagauuucaaa

SEQ ID NO: 432509 - RNA, 23 nt, Artificial Sequence
  Synthetic
caucccauuuuauagauuucaaa

SEQ ID NO: 432510 - RNA, 24 nt, Artificial Sequence
  Synthetic
ccaucccauuuuauagauuucaaa

SEQ ID NO: 432511 - RNA, 18 nt, Artificial Sequence
  Synthetic
aauuauuuuuauuucaaa

SEQ ID NO: 432512 - RNA, 19 nt, Artificial Sequence
  Synthetic
aaauuauuuuuauuucaaa

SEQ ID NO: 432513 - RNA, 20 nt, Artificial Sequence
  Synthetic
aaaauuauuuuuauuucaaa

SEQ ID NO: 432514 - RNA, 21 nt, Artificial Sequence
  Synthetic
aaaaauuauuuuuauuucaaa

SEQ ID NO: 432515 - RNA, 22 nt, Artificial Sequence
  Synthetic
uaaaaauuauuuuuauuucaaa

SEQ ID NO: 432516 - RNA, 23 nt, Artificial Sequence
  Synthetic
guaaaaauuauuuuuauuucaaa

SEQ ID NO: 432517 - RNA, 24 nt, Artificial Sequence
  Synthetic
aguaaaaauuauuuuuauuucaaa

SEQ ID NO: 432518 - RNA, 18 nt, Artificial Sequence
  Synthetic
auaauguacacuuucaaa

SEQ ID NO: 432519 - RNA, 19 nt, Artificial Sequence
  Synthetic
aauaauguacacuuucaaa

SEQ ID NO: 432520 - RNA, 20 nt, Artificial Sequence
  Synthetic
aaauaauguacacuuucaaa

SEQ ID NO: 432521 - RNA, 21 nt, Artificial Sequence
  Synthetic
aaaauaauguacacuuucaaa

SEQ ID NO: 432522 - RNA, 22 nt, Artificial Sequence
  Synthetic
aaaaauaauguacacuuucaaa

SEQ ID NO: 432523 - RNA, 23 nt, Artificial Sequence
  Synthetic
gaaaaauaauguacacuuucaaa

SEQ ID NO: 432524 - RNA, 24 nt, Artificial Sequence
  Synthetic
agaaaaauaauguacacuuucaaa

SEQ ID NO: 432525 - RNA, 18 nt, Artificial Sequence
  Synthetic
uuuuugccuacuuucaaa

SEQ ID NO: 432526 - RNA, 19 nt, Artificial Sequence
  Synthetic
uuuuuugccuacuuucaaa

SEQ ID NO: 432527 - RNA, 20 nt, Artificial Sequence
  Synthetic
uuuuuuugccuacuuucaaa

SEQ ID NO: 432528 - RNA, 21 nt, Artificial Sequence
  Synthetic
auuuuuuugccuacuuucaaa

SEQ ID NO: 432529 - RNA, 22 nt, Artificial Sequence
  Synthetic
gauuuuuuugccuacuuucaaa

SEQ ID NO: 432530 - RNA, 23 nt, Artificial Sequence
  Synthetic
ugauuuuuuugccuacuuucaaa

SEQ ID NO: 432531 - RNA, 24 nt, Artificial Sequence
  Synthetic
gugauuuuuuugccuacuuucaaa

SEQ ID NO: 432532 - RNA, 18 nt, Artificial Sequence
  Synthetic
acuauaauuucuuucaaa

SEQ ID NO: 432533 - RNA, 19 nt, Artificial Sequence
  Synthetic
aacuauaauuucuuucaaa

SEQ ID NO: 432534 - RNA, 20 nt, Artificial Sequence
  Synthetic
uaacuauaauuucuuucaaa

SEQ ID NO: 432535 - RNA, 21 nt, Artificial Sequence
  Synthetic
auaacuauaauuucuuucaaa

SEQ ID NO: 432536 - RNA, 22 nt, Artificial Sequence
  Synthetic
aauaacuauaauuucuuucaaa

SEQ ID NO: 432537 - RNA, 23 nt, Artificial Sequence
  Synthetic
uaauaacuauaauuucuuucaaa

SEQ ID NO: 432538 - RNA, 24 nt, Artificial Sequence
  Synthetic
auaauaacuauaauuucuuucaaa

SEQ ID NO: 432539 - RNA, 18 nt, Artificial Sequence
  Synthetic
uacugauuuuuuuucaaa

SEQ ID NO: 432540 - RNA, 19 nt, Artificial Sequence
  Synthetic
uuacugauuuuuuuucaaa

SEQ ID NO: 432541 - RNA, 20 nt, Artificial Sequence
  Synthetic
auuacugauuuuuuuucaaa

SEQ ID NO: 432542 - RNA, 21 nt, Artificial Sequence
  Synthetic
aauuacugauuuuuuuucaaa

SEQ ID NO: 432543 - RNA, 22 nt, Artificial Sequence
  Synthetic
caauuacugauuuuuuuucaaa

SEQ ID NO: 432544 - RNA, 23 nt, Artificial Sequence
  Synthetic
acaauuacugauuuuuuuucaaa

SEQ ID NO: 432545 - RNA, 24 nt, Artificial Sequence
  Synthetic
cacaauuacugauuuuuuuucaaa

SEQ ID NO: 432546 - RNA, 18 nt, Artificial Sequence
  Synthetic
uuuuuuuuuuuuuucaaa

SEQ ID NO: 432547 - RNA, 19 nt, Artificial Sequence
  Synthetic
uuuuuuuuuuuuuuucaaa

SEQ ID NO: 432548 - RNA, 20 nt, Artificial Sequence
  Synthetic
uuuuuuuuuuuuuuuucaaa

SEQ ID NO: 432549 - RNA, 21 nt, Artificial Sequence
  Synthetic
uuuuuuuuuuuuuuuuucaaa

SEQ ID NO: 432550 - RNA, 22 nt, Artificial Sequence
  Synthetic
uuuuuuuuuuuuuuuuuucaaa

SEQ ID NO: 432551 - RNA, 23 nt, Artificial Sequence
  Synthetic
cuuuuuuuuuuuuuuuuuucaaa

SEQ ID NO: 432552 - RNA, 24 nt, Artificial Sequence
  Synthetic
ccuuuuuuuuuuuuuuuuuucaaa

SEQ ID NO: 432553 - RNA, 18 nt, Artificial Sequence
  Synthetic
aaaaagaaaaaaaagaaa

SEQ ID NO: 432554 - RNA, 19 nt, Artificial Sequence
  Synthetic
gaaaaagaaaaaaaagaaa

SEQ ID NO: 432555 - RNA, 20 nt, Artificial Sequence
  Synthetic
agaaaaagaaaaaaaagaaa

SEQ ID NO: 432556 - RNA, 21 nt, Artificial Sequence
  Synthetic
aagaaaaagaaaaaaaagaaa

SEQ ID NO: 432557 - RNA, 22 nt, Artificial Sequence
  Synthetic
aaagaaaaagaaaaaaaagaaa

SEQ ID NO: 432558 - RNA, 23 nt, Artificial Sequence
  Synthetic
aaaagaaaaagaaaaaaaagaaa

SEQ ID NO: 432559 - RNA, 24 nt, Artificial Sequence
  Synthetic
aaaaagaaaaagaaaaaaaagaaa

SEQ ID NO: 432560 - RNA, 18 nt, Artificial Sequence
  Synthetic
gauacacuaaaaaagaaa

SEQ ID NO: 432561 - RNA, 19 nt, Artificial Sequence
  Synthetic
agauacacuaaaaaagaaa

SEQ ID NO: 432562 - RNA, 20 nt, Artificial Sequence
  Synthetic
gagauacacuaaaaaagaaa

SEQ ID NO: 432563 - RNA, 21 nt, Artificial Sequence
  Synthetic
agagauacacuaaaaaagaaa

SEQ ID NO: 432564 - RNA, 22 nt, Artificial Sequence
  Synthetic
aagagauacacuaaaaaagaaa

SEQ ID NO: 432565 - RNA, 23 nt, Artificial Sequence
  Synthetic
aaagagauacacuaaaaaagaaa

SEQ ID NO: 432566 - RNA, 24 nt, Artificial Sequence
  Synthetic
gaaagagauacacuaaaaaagaaa

SEQ ID NO: 432567 - RNA, 18 nt, Artificial Sequence
  Synthetic
aguugcuucaaaaagaaa

SEQ ID NO: 432568 - RNA, 19 nt, Artificial Sequence
  Synthetic
gaguugcuucaaaaagaaa

SEQ ID NO: 432569 - RNA, 20 nt, Artificial Sequence
  Synthetic
agaguugcuucaaaaagaaa

SEQ ID NO: 432570 - RNA, 21 nt, Artificial Sequence
  Synthetic
gagaguugcuucaaaaagaaa

SEQ ID NO: 432571 - RNA, 22 nt, Artificial Sequence
  Synthetic
ggagaguugcuucaaaaagaaa

SEQ ID NO: 432572 - RNA, 23 nt, Artificial Sequence
  Synthetic
uggagaguugcuucaaaaagaaa

SEQ ID NO: 432573 - RNA, 24 nt, Artificial Sequence
  Synthetic
cuggagaguugcuucaaaaagaaa

SEQ ID NO: 432574 - RNA, 18 nt, Artificial Sequence
  Synthetic
cuugaaaagaaaaagaaa

SEQ ID NO: 432575 - RNA, 19 nt, Artificial Sequence
  Synthetic
acuugaaaagaaaaagaaa

SEQ ID NO: 432576 - RNA, 20 nt, Artificial Sequence
  Synthetic
cacuugaaaagaaaaagaaa

SEQ ID NO: 432577 - RNA, 21 nt, Artificial Sequence
  Synthetic
ucacuugaaaagaaaaagaaa

SEQ ID NO: 432578 - RNA, 22 nt, Artificial Sequence
  Synthetic
gucacuugaaaagaaaaagaaa

SEQ ID NO: 432579 - RNA, 23 nt, Artificial Sequence
  Synthetic
agucacuugaaaagaaaaagaaa

SEQ ID NO: 432580 - RNA, 24 nt, Artificial Sequence
  Synthetic
aagucacuugaaaagaaaaagaaa

SEQ ID NO: 432581 - RNA, 18 nt, Artificial Sequence
  Synthetic
aaaagaaagaaaaagaaa

SEQ ID NO: 432582 - RNA, 19 nt, Artificial Sequence
  Synthetic
gaaaagaaagaaaaagaaa

SEQ ID NO: 432583 - RNA, 20 nt, Artificial Sequence
  Synthetic
agaaaagaaagaaaaagaaa

SEQ ID NO: 432584 - RNA, 21 nt, Artificial Sequence
  Synthetic
aagaaaagaaagaaaaagaaa

SEQ ID NO: 432585 - RNA, 22 nt, Artificial Sequence
  Synthetic
aaagaaaagaaagaaaaagaaa

SEQ ID NO: 432586 - RNA, 23 nt, Artificial Sequence
  Synthetic
gaaagaaaagaaagaaaaagaaa

SEQ ID NO: 432587 - RNA, 24 nt, Artificial Sequence
  Synthetic
agaaagaaaagaaagaaaaagaaa

SEQ ID NO: 432588 - RNA, 18 nt, Artificial Sequence
  Synthetic
agaaagaagaaaaagaaa

SEQ ID NO: 432589 - RNA, 19 nt, Artificial Sequence
  Synthetic
aagaaagaagaaaaagaaa

SEQ ID NO: 432590 - RNA, 20 nt, Artificial Sequence
  Synthetic
aaagaaagaagaaaaagaaa

SEQ ID NO: 432591 - RNA, 21 nt, Artificial Sequence
  Synthetic
gaaagaaagaagaaaaagaaa

SEQ ID NO: 432592 - RNA, 22 nt, Artificial Sequence
  Synthetic
agaaagaaagaagaaaaagaaa

SEQ ID NO: 432593 - RNA, 23 nt, Artificial Sequence
  Synthetic
aagaaagaaagaagaaaaagaaa

SEQ ID NO: 432594 - RNA, 24 nt, Artificial Sequence
  Synthetic
aaagaaagaaagaagaaaaagaaa

SEQ ID NO: 432595 - RNA, 18 nt, Artificial Sequence
  Synthetic
caggaagagaaaaagaaa

SEQ ID NO: 432596 - RNA, 19 nt, Artificial Sequence
  Synthetic
acaggaagagaaaaagaaa

SEQ ID NO: 432597 - RNA, 20 nt, Artificial Sequence
  Synthetic
gacaggaagagaaaaagaaa

SEQ ID NO: 432598 - RNA, 21 nt, Artificial Sequence
  Synthetic
agacaggaagagaaaaagaaa

SEQ ID NO: 432599 - RNA, 22 nt, Artificial Sequence
  Synthetic
aagacaggaagagaaaaagaaa

SEQ ID NO: 432600 - RNA, 23 nt, Artificial Sequence
  Synthetic
caagacaggaagagaaaaagaaa

SEQ ID NO: 432601 - RNA, 24 nt, Artificial Sequence
  Synthetic
gcaagacaggaagagaaaaagaaa

SEQ ID NO: 432602 - RNA, 18 nt, Artificial Sequence
  Synthetic
cagaugcugaaaaagaaa

SEQ ID NO: 432603 - RNA, 19 nt, Artificial Sequence
  Synthetic
ucagaugcugaaaaagaaa

SEQ ID NO: 432604 - RNA, 20 nt, Artificial Sequence
  Synthetic
gucagaugcugaaaaagaaa

SEQ ID NO: 432605 - RNA, 21 nt, Artificial Sequence
  Synthetic
ugucagaugcugaaaaagaaa

SEQ ID NO: 432606 - RNA, 22 nt, Artificial Sequence
  Synthetic
gugucagaugcugaaaaagaaa

SEQ ID NO: 432607 - RNA, 23 nt, Artificial Sequence
  Synthetic
ugugucagaugcugaaaaagaaa

SEQ ID NO: 432608 - RNA, 24 nt, Artificial Sequence
  Synthetic
cugugucagaugcugaaaaagaaa

SEQ ID NO: 432609 - RNA, 18 nt, Artificial Sequence
  Synthetic
ggugcuccuaaaaagaaa

SEQ ID NO: 432610 - RNA, 19 nt, Artificial Sequence
  Synthetic
uggugcuccuaaaaagaaa

SEQ ID NO: 432611 - RNA, 20 nt, Artificial Sequence
  Synthetic
auggugcuccuaaaaagaaa

SEQ ID NO: 432612 - RNA, 21 nt, Artificial Sequence
  Synthetic
aauggugcuccuaaaaagaaa

SEQ ID NO: 432613 - RNA, 22 nt, Artificial Sequence
  Synthetic
gaauggugcuccuaaaaagaaa

SEQ ID NO: 432614 - RNA, 23 nt, Artificial Sequence
  Synthetic
agaauggugcuccuaaaaagaaa

SEQ ID NO: 432615 - RNA, 24 nt, Artificial Sequence
  Synthetic
gagaauggugcuccuaaaaagaaa

SEQ ID NO: 432616 - RNA, 18 nt, Artificial Sequence
  Synthetic
guacauacucaaaagaaa

SEQ ID NO: 432617 - RNA, 19 nt, Artificial Sequence
  Synthetic
gguacauacucaaaagaaa

SEQ ID NO: 432618 - RNA, 20 nt, Artificial Sequence
  Synthetic
ggguacauacucaaaagaaa

SEQ ID NO: 432619 - RNA, 21 nt, Artificial Sequence
  Synthetic
uggguacauacucaaaagaaa

SEQ ID NO: 432620 - RNA, 22 nt, Artificial Sequence
  Synthetic
cuggguacauacucaaaagaaa

SEQ ID NO: 432621 - RNA, 23 nt, Artificial Sequence
  Synthetic
ucuggguacauacucaaaagaaa

SEQ ID NO: 432622 - RNA, 24 nt, Artificial Sequence
  Synthetic
uucuggguacauacucaaaagaaa

SEQ ID NO: 432623 - RNA, 18 nt, Artificial Sequence
  Synthetic
uggugcagagaaaagaaa

SEQ ID NO: 432624 - RNA, 19 nt, Artificial Sequence
  Synthetic
uuggugcagagaaaagaaa

SEQ ID NO: 432625 - RNA, 20 nt, Artificial Sequence
  Synthetic
uuuggugcagagaaaagaaa

SEQ ID NO: 432626 - RNA, 21 nt, Artificial Sequence
  Synthetic
uuuuggugcagagaaaagaaa

SEQ ID NO: 432627 - RNA, 22 nt, Artificial Sequence
  Synthetic
cuuuuggugcagagaaaagaaa

SEQ ID NO: 432628 - RNA, 23 nt, Artificial Sequence
  Synthetic
gcuuuuggugcagagaaaagaaa

SEQ ID NO: 432629 - RNA, 24 nt, Artificial Sequence
  Synthetic
agcuuuuggugcagagaaaagaaa

SEQ ID NO: 432630 - RNA, 18 nt, Artificial Sequence
  Synthetic
ugcaaaacggaaaagaaa

SEQ ID NO: 432631 - RNA, 19 nt, Artificial Sequence
  Synthetic
augcaaaacggaaaagaaa

SEQ ID NO: 432632 - RNA, 20 nt, Artificial Sequence
  Synthetic
caugcaaaacggaaaagaaa

SEQ ID NO: 432633 - RNA, 21 nt, Artificial Sequence
  Synthetic
ucaugcaaaacggaaaagaaa

SEQ ID NO: 432634 - RNA, 22 nt, Artificial Sequence
  Synthetic
gucaugcaaaacggaaaagaaa

SEQ ID NO: 432635 - RNA, 23 nt, Artificial Sequence
  Synthetic
ugucaugcaaaacggaaaagaaa

SEQ ID NO: 432636 - RNA, 24 nt, Artificial Sequence
  Synthetic
augucaugcaaaacggaaaagaaa

SEQ ID NO: 432637 - RNA, 18 nt, Artificial Sequence
  Synthetic
aagucacuugaaaagaaa

SEQ ID NO: 432638 - RNA, 19 nt, Artificial Sequence
  Synthetic
aaagucacuugaaaagaaa

SEQ ID NO: 432639 - RNA, 20 nt, Artificial Sequence
  Synthetic
gaaagucacuugaaaagaaa

SEQ ID NO: 432640 - RNA, 21 nt, Artificial Sequence
  Synthetic
ugaaagucacuugaaaagaaa

SEQ ID NO: 432641 - RNA, 22 nt, Artificial Sequence
  Synthetic
uugaaagucacuugaaaagaaa

SEQ ID NO: 432642 - RNA, 23 nt, Artificial Sequence
  Synthetic
guugaaagucacuugaaaagaaa

SEQ ID NO: 432643 - RNA, 24 nt, Artificial Sequence
  Synthetic
aguugaaagucacuugaaaagaaa

SEQ ID NO: 432644 - RNA, 18 nt, Artificial Sequence
  Synthetic
guucccuuguaaaagaaa

SEQ ID NO: 432645 - RNA, 19 nt, Artificial Sequence
  Synthetic
gguucccuuguaaaagaaa

SEQ ID NO: 432646 - RNA, 20 nt, Artificial Sequence
  Synthetic
ggguucccuuguaaaagaaa

SEQ ID NO: 432647 - RNA, 21 nt, Artificial Sequence
  Synthetic
aggguucccuuguaaaagaaa

SEQ ID NO: 432648 - RNA, 22 nt, Artificial Sequence
  Synthetic
aaggguucccuuguaaaagaaa

SEQ ID NO: 432649 - RNA, 23 nt, Artificial Sequence
  Synthetic
uaaggguucccuuguaaaagaaa

SEQ ID NO: 432650 - RNA, 24 nt, Artificial Sequence
  Synthetic
uuaaggguucccuuguaaaagaaa

SEQ ID NO: 432651 - RNA, 18 nt, Artificial Sequence
  Synthetic
auuauacuaacaaagaaa

SEQ ID NO: 432652 - RNA, 19 nt, Artificial Sequence
  Synthetic
aauuauacuaacaaagaaa

SEQ ID NO: 432653 - RNA, 20 nt, Artificial Sequence
  Synthetic
aaauuauacuaacaaagaaa

SEQ ID NO: 432654 - RNA, 21 nt, Artificial Sequence
  Synthetic
gaaauuauacuaacaaagaaa

SEQ ID NO: 432655 - RNA, 22 nt, Artificial Sequence
  Synthetic
ggaaauuauacuaacaaagaaa

SEQ ID NO: 432656 - RNA, 23 nt, Artificial Sequence
  Synthetic
aggaaauuauacuaacaaagaaa

SEQ ID NO: 432657 - RNA, 24 nt, Artificial Sequence
  Synthetic
aaggaaauuauacuaacaaagaaa

SEQ ID NO: 432658 - RNA, 18 nt, Artificial Sequence
  Synthetic
acugcggauacaaagaaa

SEQ ID NO: 432659 - RNA, 19 nt, Artificial Sequence
  Synthetic
cacugcggauacaaagaaa

SEQ ID NO: 432660 - RNA, 20 nt, Artificial Sequence
  Synthetic
ucacugcggauacaaagaaa

SEQ ID NO: 432661 - RNA, 21 nt, Artificial Sequence
  Synthetic
uucacugcggauacaaagaaa

SEQ ID NO: 432662 - RNA, 22 nt, Artificial Sequence
  Synthetic
cuucacugcggauacaaagaaa

SEQ ID NO: 432663 - RNA, 23 nt, Artificial Sequence
  Synthetic
ucuucacugcggauacaaagaaa

SEQ ID NO: 432664 - RNA, 24 nt, Artificial Sequence
  Synthetic
aucuucacugcggauacaaagaaa

SEQ ID NO: 432665 - RNA, 18 nt, Artificial Sequence
  Synthetic
agaaagaaaagaaagaaa

SEQ ID NO: 432666 - RNA, 19 nt, Artificial Sequence
  Synthetic
aagaaagaaaagaaagaaa

SEQ ID NO: 432667 - RNA, 20 nt, Artificial Sequence
  Synthetic
aaagaaagaaaagaaagaaa

SEQ ID NO: 432668 - RNA, 21 nt, Artificial Sequence
  Synthetic
aaaagaaagaaaagaaagaaa

SEQ ID NO: 432669 - RNA, 22 nt, Artificial Sequence
  Synthetic
aaaaagaaagaaaagaaagaaa

SEQ ID NO: 432670 - RNA, 23 nt, Artificial Sequence
  Synthetic
gaaaaagaaagaaaagaaagaaa

SEQ ID NO: 432671 - RNA, 24 nt, Artificial Sequence
  Synthetic
agaaaaagaaagaaaagaaagaaa

SEQ ID NO: 432672 - RNA, 18 nt, Artificial Sequence
  Synthetic
aggaaggaaagaaagaaa

SEQ ID NO: 432673 - RNA, 19 nt, Artificial Sequence
  Synthetic
aaggaaggaaagaaagaaa

SEQ ID NO: 432674 - RNA, 20 nt, Artificial Sequence
  Synthetic
aaaggaaggaaagaaagaaa

SEQ ID NO: 432675 - RNA, 21 nt, Artificial Sequence
  Synthetic
gaaaggaaggaaagaaagaaa

SEQ ID NO: 432676 - RNA, 22 nt, Artificial Sequence
  Synthetic
agaaaggaaggaaagaaagaaa

SEQ ID NO: 432677 - RNA, 23 nt, Artificial Sequence
  Synthetic
aagaaaggaaggaaagaaagaaa

SEQ ID NO: 432678 - RNA, 24 nt, Artificial Sequence
  Synthetic
aaagaaaggaaggaaagaaagaaa

SEQ ID NO: 432679 - RNA, 18 nt, Artificial Sequence
  Synthetic
ucccuuccaagaaagaaa

SEQ ID NO: 432680 - RNA, 19 nt, Artificial Sequence
  Synthetic
gucccuuccaagaaagaaa

SEQ ID NO: 432681 - RNA, 20 nt, Artificial Sequence
  Synthetic
ugucccuuccaagaaagaaa

SEQ ID NO: 432682 - RNA, 21 nt, Artificial Sequence
  Synthetic
augucccuuccaagaaagaaa

SEQ ID NO: 432683 - RNA, 22 nt, Artificial Sequence
  Synthetic
aaugucccuuccaagaaagaaa

SEQ ID NO: 432684 - RNA, 23 nt, Artificial Sequence
  Synthetic
caaugucccuuccaagaaagaaa

SEQ ID NO: 432685 - RNA, 24 nt, Artificial Sequence
  Synthetic
ccaaugucccuuccaagaaagaaa

SEQ ID NO: 432686 - RNA, 18 nt, Artificial Sequence
  Synthetic
aaaaaaagaagaaagaaa

SEQ ID NO: 432687 - RNA, 19 nt, Artificial Sequence
  Synthetic
aaaaaaaagaagaaagaaa

SEQ ID NO: 432688 - RNA, 20 nt, Artificial Sequence
  Synthetic
aaaaaaaaagaagaaagaaa

SEQ ID NO: 432689 - RNA, 21 nt, Artificial Sequence
  Synthetic
aaaaaaaaaagaagaaagaaa

SEQ ID NO: 432690 - RNA, 22 nt, Artificial Sequence
  Synthetic
aaaaaaaaaaagaagaaagaaa

SEQ ID NO: 432691 - RNA, 23 nt, Artificial Sequence
  Synthetic
aaaaaaaaaaaagaagaaagaaa

SEQ ID NO: 432692 - RNA, 24 nt, Artificial Sequence
  Synthetic
aaaaaaaaaaaaagaagaaagaaa

SEQ ID NO: 432693 - RNA, 18 nt, Artificial Sequence
  Synthetic
aaaaugagaagaaagaaa

SEQ ID NO: 432694 - RNA, 19 nt, Artificial Sequence
  Synthetic
caaaaugagaagaaagaaa

SEQ ID NO: 432695 - RNA, 20 nt, Artificial Sequence
  Synthetic
acaaaaugagaagaaagaaa

SEQ ID NO: 432696 - RNA, 21 nt, Artificial Sequence
  Synthetic
aacaaaaugagaagaaagaaa

SEQ ID NO: 432697 - RNA, 22 nt, Artificial Sequence
  Synthetic
uaacaaaaugagaagaaagaaa

SEQ ID NO: 432698 - RNA, 23 nt, Artificial Sequence
  Synthetic
guaacaaaaugagaagaaagaaa

SEQ ID NO: 432699 - RNA, 24 nt, Artificial Sequence
  Synthetic
uguaacaaaaugagaagaaagaaa

SEQ ID NO: 432700 - RNA, 18 nt, Artificial Sequence
  Synthetic
ccgaaaggcagaaagaaa

SEQ ID NO: 432701 - RNA, 19 nt, Artificial Sequence
  Synthetic
uccgaaaggcagaaagaaa

SEQ ID NO: 432702 - RNA, 20 nt, Artificial Sequence
  Synthetic
cuccgaaaggcagaaagaaa

SEQ ID NO: 432703 - RNA, 21 nt, Artificial Sequence
  Synthetic
acuccgaaaggcagaaagaaa

SEQ ID NO: 432704 - RNA, 22 nt, Artificial Sequence
  Synthetic
gacuccgaaaggcagaaagaaa

SEQ ID NO: 432705 - RNA, 23 nt, Artificial Sequence
  Synthetic
agacuccgaaaggcagaaagaaa

SEQ ID NO: 432706 - RNA, 24 nt, Artificial Sequence
  Synthetic
aagacuccgaaaggcagaaagaaa

SEQ ID NO: 432707 - RNA, 18 nt, Artificial Sequence
  Synthetic
uaaacaugcagaaagaaa

SEQ ID NO: 432708 - RNA, 19 nt, Artificial Sequence
  Synthetic
uuaaacaugcagaaagaaa

SEQ ID NO: 432709 - RNA, 20 nt, Artificial Sequence
  Synthetic
cuuaaacaugcagaaagaaa

SEQ ID NO: 432710 - RNA, 21 nt, Artificial Sequence
  Synthetic
acuuaaacaugcagaaagaaa

SEQ ID NO: 432711 - RNA, 22 nt, Artificial Sequence
  Synthetic
cacuuaaacaugcagaaagaaa

SEQ ID NO: 432712 - RNA, 23 nt, Artificial Sequence
  Synthetic
gcacuuaaacaugcagaaagaaa

SEQ ID NO: 432713 - RNA, 24 nt, Artificial Sequence
  Synthetic
agcacuuaaacaugcagaaagaaa

SEQ ID NO: 432714 - RNA, 18 nt, Artificial Sequence
  Synthetic
uaggugaguagaaagaaa

SEQ ID NO: 432715 - RNA, 19 nt, Artificial Sequence
  Synthetic
auaggugaguagaaagaaa

SEQ ID NO: 432716 - RNA, 20 nt, Artificial Sequence
  Synthetic
aauaggugaguagaaagaaa

SEQ ID NO: 432717 - RNA, 21 nt, Artificial Sequence
  Synthetic
aaauaggugaguagaaagaaa

SEQ ID NO: 432718 - RNA, 22 nt, Artificial Sequence
  Synthetic
caaauaggugaguagaaagaaa

SEQ ID NO: 432719 - RNA, 23 nt, Artificial Sequence
  Synthetic
ucaaauaggugaguagaaagaaa

SEQ ID NO: 432720 - RNA, 24 nt, Artificial Sequence
  Synthetic
uucaaauaggugaguagaaagaaa

SEQ ID NO: 432721 - RNA, 18 nt, Artificial Sequence
  Synthetic
agacacugacgaaagaaa

SEQ ID NO: 432722 - RNA, 19 nt, Artificial Sequence
  Synthetic
aagacacugacgaaagaaa

SEQ ID NO: 432723 - RNA, 20 nt, Artificial Sequence
  Synthetic
uaagacacugacgaaagaaa

SEQ ID NO: 432724 - RNA, 21 nt, Artificial Sequence
  Synthetic
auaagacacugacgaaagaaa

SEQ ID NO: 432725 - RNA, 22 nt, Artificial Sequence
  Synthetic
uauaagacacugacgaaagaaa

SEQ ID NO: 432726 - RNA, 23 nt, Artificial Sequence
  Synthetic
cuauaagacacugacgaaagaaa

SEQ ID NO: 432727 - RNA, 24 nt, Artificial Sequence
  Synthetic
acuauaagacacugacgaaagaaa

SEQ ID NO: 432728 - RNA, 18 nt, Artificial Sequence
  Synthetic
aagugaacgcgaaagaaa

SEQ ID NO: 432729 - RNA, 19 nt, Artificial Sequence
  Synthetic
aaagugaacgcgaaagaaa

SEQ ID NO: 432730 - RNA, 20 nt, Artificial Sequence
  Synthetic
caaagugaacgcgaaagaaa

SEQ ID NO: 432731 - RNA, 21 nt, Artificial Sequence
  Synthetic
ucaaagugaacgcgaaagaaa

SEQ ID NO: 432732 - RNA, 22 nt, Artificial Sequence
  Synthetic
cucaaagugaacgcgaaagaaa

SEQ ID NO: 432733 - RNA, 23 nt, Artificial Sequence
  Synthetic
ucucaaagugaacgcgaaagaaa

SEQ ID NO: 432734 - RNA, 24 nt, Artificial Sequence
  Synthetic
uucucaaagugaacgcgaaagaaa

SEQ ID NO: 432735 - RNA, 18 nt, Artificial Sequence
  Synthetic
gauaaagcaggaaagaaa

SEQ ID NO: 432736 - RNA, 19 nt, Artificial Sequence
  Synthetic
ggauaaagcaggaaagaaa

SEQ ID NO: 432737 - RNA, 20 nt, Artificial Sequence
  Synthetic
aggauaaagcaggaaagaaa

SEQ ID NO: 432738 - RNA, 21 nt, Artificial Sequence
  Synthetic
aaggauaaagcaggaaagaaa

SEQ ID NO: 432739 - RNA, 22 nt, Artificial Sequence
  Synthetic
aaaggauaaagcaggaaagaaa

SEQ ID NO: 432740 - RNA, 23 nt, Artificial Sequence
  Synthetic
aaaaggauaaagcaggaaagaaa

SEQ ID NO: 432741 - RNA, 24 nt, Artificial Sequence
  Synthetic
uaaaaggauaaagcaggaaagaaa

SEQ ID NO: 432742 - RNA, 18 nt, Artificial Sequence
  Synthetic
gaagaaagaggaaagaaa

SEQ ID NO: 432743 - RNA, 19 nt, Artificial Sequence
  Synthetic
agaagaaagaggaaagaaa

SEQ ID NO: 432744 - RNA, 20 nt, Artificial Sequence
  Synthetic
aagaagaaagaggaaagaaa

SEQ ID NO: 432745 - RNA, 21 nt, Artificial Sequence
  Synthetic
aaagaagaaagaggaaagaaa

SEQ ID NO: 432746 - RNA, 22 nt, Artificial Sequence
  Synthetic
gaaagaagaaagaggaaagaaa

SEQ ID NO: 432747 - RNA, 23 nt, Artificial Sequence
  Synthetic
ggaaagaagaaagaggaaagaaa

SEQ ID NO: 432748 - RNA, 24 nt, Artificial Sequence
  Synthetic
aggaaagaagaaagaggaaagaaa

SEQ ID NO: 432749 - RNA, 18 nt, Artificial Sequence
  Synthetic
agagauaggggaaagaaa

SEQ ID NO: 432750 - RNA, 19 nt, Artificial Sequence
  Synthetic
gagagauaggggaaagaaa

SEQ ID NO: 432751 - RNA, 20 nt, Artificial Sequence
  Synthetic
ugagagauaggggaaagaaa

SEQ ID NO: 432752 - RNA, 21 nt, Artificial Sequence
  Synthetic
cugagagauaggggaaagaaa

SEQ ID NO: 432753 - RNA, 22 nt, Artificial Sequence
  Synthetic
acugagagauaggggaaagaaa

SEQ ID NO: 432754 - RNA, 23 nt, Artificial Sequence
  Synthetic
uacugagagauaggggaaagaaa

SEQ ID NO: 432755 - RNA, 24 nt, Artificial Sequence
  Synthetic
uuacugagagauaggggaaagaaa

SEQ ID NO: 432756 - RNA, 18 nt, Artificial Sequence
  Synthetic
uucagggggggaaagaaa

SEQ ID NO: 432757 - RNA, 19 nt, Artificial Sequence
  Synthetic
uuucagggggggaaagaaa

SEQ ID NO: 432758 - RNA, 20 nt, Artificial Sequence
  Synthetic
auuucagggggggaaagaaa

SEQ ID NO: 432759 - RNA, 21 nt, Artificial Sequence
  Synthetic
gauuucagggggggaaagaaa

SEQ ID NO: 432760 - RNA, 22 nt, Artificial Sequence
  Synthetic
ggauuucagggggggaaagaaa

SEQ ID NO: 432761 - RNA, 23 nt, Artificial Sequence
  Synthetic
uggauuucagggggggaaagaaa

SEQ ID NO: 432762 - RNA, 24 nt, Artificial Sequence
  Synthetic
auggauuucagggggggaaagaaa

SEQ ID NO: 432763 - RNA, 18 nt, Artificial Sequence
  Synthetic
caugaacauggaaagaaa

SEQ ID NO: 432764 - RNA, 19 nt, Artificial Sequence
  Synthetic
acaugaacauggaaagaaa

SEQ ID NO: 432765 - RNA, 20 nt, Artificial Sequence
  Synthetic
aacaugaacauggaaagaaa

SEQ ID NO: 432766 - RNA, 21 nt, Artificial Sequence
  Synthetic
uaacaugaacauggaaagaaa

SEQ ID NO: 432767 - RNA, 22 nt, Artificial Sequence
  Synthetic
auaacaugaacauggaaagaaa

SEQ ID NO: 432768 - RNA, 23 nt, Artificial Sequence
  Synthetic
aauaacaugaacauggaaagaaa

SEQ ID NO: 432769 - RNA, 24 nt, Artificial Sequence
  Synthetic
gaauaacaugaacauggaaagaaa

SEQ ID NO: 432770 - RNA, 18 nt, Artificial Sequence
  Synthetic
uaaagaagcugaaagaaa

SEQ ID NO: 432771 - RNA, 19 nt, Artificial Sequence
  Synthetic
auaaagaagcugaaagaaa

SEQ ID NO: 432772 - RNA, 20 nt, Artificial Sequence
  Synthetic
uauaaagaagcugaaagaaa

SEQ ID NO: 432773 - RNA, 21 nt, Artificial Sequence
  Synthetic
auauaaagaagcugaaagaaa

SEQ ID NO: 432774 - RNA, 22 nt, Artificial Sequence
  Synthetic
gauauaaagaagcugaaagaaa

SEQ ID NO: 432775 - RNA, 23 nt, Artificial Sequence
  Synthetic
ggauauaaagaagcugaaagaaa

SEQ ID NO: 432776 - RNA, 24 nt, Artificial Sequence
  Synthetic
uggauauaaagaagcugaaagaaa

SEQ ID NO: 432777 - RNA, 18 nt, Artificial Sequence
  Synthetic
aaauauuguugaaagaaa

SEQ ID NO: 432778 - RNA, 19 nt, Artificial Sequence
  Synthetic
gaaauauuguugaaagaaa

SEQ ID NO: 432779 - RNA, 20 nt, Artificial Sequence
  Synthetic
ugaaauauuguugaaagaaa

SEQ ID NO: 432780 - RNA, 21 nt, Artificial Sequence
  Synthetic
augaaauauuguugaaagaaa

SEQ ID NO: 432781 - RNA, 22 nt, Artificial Sequence
  Synthetic
uaugaaauauuguugaaagaaa

SEQ ID NO: 432782 - RNA, 23 nt, Artificial Sequence
  Synthetic
cuaugaaauauuguugaaagaaa

SEQ ID NO: 432783 - RNA, 24 nt, Artificial Sequence
  Synthetic
gcuaugaaauauuguugaaagaaa

SEQ ID NO: 432784 - RNA, 18 nt, Artificial Sequence
  Synthetic
cauuauucucuaaagaaa

SEQ ID NO: 432785 - RNA, 19 nt, Artificial Sequence
  Synthetic
ucauuauucucuaaagaaa

SEQ ID NO: 432786 - RNA, 20 nt, Artificial Sequence
  Synthetic
uucauuauucucuaaagaaa

SEQ ID NO: 432787 - RNA, 21 nt, Artificial Sequence
  Synthetic
cuucauuauucucuaaagaaa

SEQ ID NO: 432788 - RNA, 22 nt, Artificial Sequence
  Synthetic
acuucauuauucucuaaagaaa

SEQ ID NO: 432789 - RNA, 23 nt, Artificial Sequence
  Synthetic
uacuucauuauucucuaaagaaa

SEQ ID NO: 432790 - RNA, 24 nt, Artificial Sequence
  Synthetic
uuacuucauuauucucuaaagaaa

SEQ ID NO: 432791 - RNA, 18 nt, Artificial Sequence
  Synthetic
cugacaaaaaacaagaaa

SEQ ID NO: 432792 - RNA, 19 nt, Artificial Sequence
  Synthetic
ccugacaaaaaacaagaaa

SEQ ID NO: 432793 - RNA, 20 nt, Artificial Sequence
  Synthetic
accugacaaaaaacaagaaa

SEQ ID NO: 432794 - RNA, 21 nt, Artificial Sequence
  Synthetic
aaccugacaaaaaacaagaaa

SEQ ID NO: 432795 - RNA, 22 nt, Artificial Sequence
  Synthetic
aaaccugacaaaaaacaagaaa

SEQ ID NO: 432796 - RNA, 23 nt, Artificial Sequence
  Synthetic
caaaccugacaaaaaacaagaaa

SEQ ID NO: 432797 - RNA, 24 nt, Artificial Sequence
  Synthetic
acaaaccugacaaaaaacaagaaa

SEQ ID NO: 432798 - RNA, 18 nt, Artificial Sequence
  Synthetic
ccugacaaaaacaagaaa

SEQ ID NO: 432799 - RNA, 19 nt, Artificial Sequence
  Synthetic
accugacaaaaacaagaaa

SEQ ID NO: 432800 - RNA, 20 nt, Artificial Sequence
  Synthetic
aaccugacaaaaacaagaaa

SEQ ID NO: 432801 - RNA, 21 nt, Artificial Sequence
  Synthetic
aaaccugacaaaaacaagaaa

SEQ ID NO: 432802 - RNA, 22 nt, Artificial Sequence
  Synthetic
caaaccugacaaaaacaagaaa

SEQ ID NO: 432803 - RNA, 23 nt, Artificial Sequence
  Synthetic
acaaaccugacaaaaacaagaaa

SEQ ID NO: 432804 - RNA, 24 nt, Artificial Sequence
  Synthetic
gacaaaccugacaaaaacaagaaa

SEQ ID NO: 432805 - RNA, 18 nt, Artificial Sequence
  Synthetic
ccaucagccaacaagaaa

SEQ ID NO: 432806 - RNA, 19 nt, Artificial Sequence
  Synthetic
gccaucagccaacaagaaa

SEQ ID NO: 432807 - RNA, 20 nt, Artificial Sequence
  Synthetic
ggccaucagccaacaagaaa

SEQ ID NO: 432808 - RNA, 21 nt, Artificial Sequence
  Synthetic
uggccaucagccaacaagaaa

SEQ ID NO: 432809 - RNA, 22 nt, Artificial Sequence
  Synthetic
guggccaucagccaacaagaaa

SEQ ID NO: 432810 - RNA, 23 nt, Artificial Sequence
  Synthetic
cguggccaucagccaacaagaaa

SEQ ID NO: 432811 - RNA, 24 nt, Artificial Sequence
  Synthetic
acguggccaucagccaacaagaaa

SEQ ID NO: 432812 - RNA, 18 nt, Artificial Sequence
  Synthetic
gggaauaauaacaagaaa

SEQ ID NO: 432813 - RNA, 19 nt, Artificial Sequence
  Synthetic
ugggaauaauaacaagaaa

SEQ ID NO: 432814 - RNA, 20 nt, Artificial Sequence
  Synthetic
augggaauaauaacaagaaa

SEQ ID NO: 432815 - RNA, 21 nt, Artificial Sequence
  Synthetic
aaugggaauaauaacaagaaa

SEQ ID NO: 432816 - RNA, 22 nt, Artificial Sequence
  Synthetic
aaaugggaauaauaacaagaaa

SEQ ID NO: 432817 - RNA, 23 nt, Artificial Sequence
  Synthetic
caaaugggaauaauaacaagaaa

SEQ ID NO: 432818 - RNA, 24 nt, Artificial Sequence
  Synthetic
ucaaaugggaauaauaacaagaaa

SEQ ID NO: 432819 - RNA, 18 nt, Artificial Sequence
  Synthetic
uuauuuuuauacaagaaa

SEQ ID NO: 432820 - RNA, 19 nt, Artificial Sequence
  Synthetic
uuuauuuuuauacaagaaa

SEQ ID NO: 432821 - RNA, 20 nt, Artificial Sequence
  Synthetic
cuuuauuuuuauacaagaaa

SEQ ID NO: 432822 - RNA, 21 nt, Artificial Sequence
  Synthetic
ucuuuauuuuuauacaagaaa

SEQ ID NO: 432823 - RNA, 22 nt, Artificial Sequence
  Synthetic
uucuuuauuuuuauacaagaaa

SEQ ID NO: 432824 - RNA, 23 nt, Artificial Sequence
  Synthetic
uuucuuuauuuuuauacaagaaa

SEQ ID NO: 432825 - RNA, 24 nt, Artificial Sequence
  Synthetic
uuuucuuuauuuuuauacaagaaa

SEQ ID NO: 432826 - RNA, 18 nt, Artificial Sequence
  Synthetic
gugaauuuaaccaagaaa

SEQ ID NO: 432827 - RNA, 19 nt, Artificial Sequence
  Synthetic
agugaauuuaaccaagaaa

SEQ ID NO: 432828 - RNA, 20 nt, Artificial Sequence
  Synthetic
gagugaauuuaaccaagaaa

SEQ ID NO: 432829 - RNA, 21 nt, Artificial Sequence
  Synthetic
ggagugaauuuaaccaagaaa

SEQ ID NO: 432830 - RNA, 22 nt, Artificial Sequence
  Synthetic
uggagugaauuuaaccaagaaa

SEQ ID NO: 432831 - RNA, 23 nt, Artificial Sequence
  Synthetic
uuggagugaauuuaaccaagaaa

SEQ ID NO: 432832 - RNA, 24 nt, Artificial Sequence
  Synthetic
uuuggagugaauuuaaccaagaaa

SEQ ID NO: 432833 - RNA, 18 nt, Artificial Sequence
  Synthetic
caauuauauaccaagaaa

SEQ ID NO: 432834 - RNA, 19 nt, Artificial Sequence
  Synthetic
acaauuauauaccaagaaa

SEQ ID NO: 432835 - RNA, 20 nt, Artificial Sequence
  Synthetic
aacaauuauauaccaagaaa

SEQ ID NO: 432836 - RNA, 21 nt, Artificial Sequence
  Synthetic
gaacaauuauauaccaagaaa

SEQ ID NO: 432837 - RNA, 22 nt, Artificial Sequence
  Synthetic
ugaacaauuauauaccaagaaa

SEQ ID NO: 432838 - RNA, 23 nt, Artificial Sequence
  Synthetic
augaacaauuauauaccaagaaa

SEQ ID NO: 432839 - RNA, 24 nt, Artificial Sequence
  Synthetic
gaugaacaauuauauaccaagaaa

SEQ ID NO: 432840 - RNA, 18 nt, Artificial Sequence
  Synthetic
acuuugaguagcaagaaa

SEQ ID NO: 432841 - RNA, 19 nt, Artificial Sequence
  Synthetic
cacuuugaguagcaagaaa

SEQ ID NO: 432842 - RNA, 20 nt, Artificial Sequence
  Synthetic
acacuuugaguagcaagaaa

SEQ ID NO: 432843 - RNA, 21 nt, Artificial Sequence
  Synthetic
cacacuuugaguagcaagaaa

SEQ ID NO: 432844 - RNA, 22 nt, Artificial Sequence
  Synthetic
ccacacuuugaguagcaagaaa

SEQ ID NO: 432845 - RNA, 23 nt, Artificial Sequence
  Synthetic
accacacuuugaguagcaagaaa

SEQ ID NO: 432846 - RNA, 24 nt, Artificial Sequence
  Synthetic
gaccacacuuugaguagcaagaaa

SEQ ID NO: 432847 - RNA, 18 nt, Artificial Sequence
  Synthetic
guuucugaaaucaagaaa

SEQ ID NO: 432848 - RNA, 19 nt, Artificial Sequence
  Synthetic
gguuucugaaaucaagaaa

SEQ ID NO: 432849 - RNA, 20 nt, Artificial Sequence
  Synthetic
ggguuucugaaaucaagaaa

SEQ ID NO: 432850 - RNA, 21 nt, Artificial Sequence
  Synthetic
uggguuucugaaaucaagaaa

SEQ ID NO: 432851 - RNA, 22 nt, Artificial Sequence
  Synthetic
auggguuucugaaaucaagaaa

SEQ ID NO: 432852 - RNA, 23 nt, Artificial Sequence
  Synthetic
uauggguuucugaaaucaagaaa

SEQ ID NO: 432853 - RNA, 24 nt, Artificial Sequence
  Synthetic
auauggguuucugaaaucaagaaa

SEQ ID NO: 432854 - RNA, 18 nt, Artificial Sequence
  Synthetic
aguguuaaacucaagaaa

SEQ ID NO: 432855 - RNA, 19 nt, Artificial Sequence
  Synthetic
caguguuaaacucaagaaa

SEQ ID NO: 432856 - RNA, 20 nt, Artificial Sequence
  Synthetic
gcaguguuaaacucaagaaa

SEQ ID NO: 432857 - RNA, 21 nt, Artificial Sequence
  Synthetic
ugcaguguuaaacucaagaaa

SEQ ID NO: 432858 - RNA, 22 nt, Artificial Sequence
  Synthetic
augcaguguuaaacucaagaaa

SEQ ID NO: 432859 - RNA, 23 nt, Artificial Sequence
  Synthetic
caugcaguguuaaacucaagaaa

SEQ ID NO: 432860 - RNA, 24 nt, Artificial Sequence
  Synthetic
ccaugcaguguuaaacucaagaaa

SEQ ID NO: 432861 - RNA, 18 nt, Artificial Sequence
  Synthetic
aaaggaaaaaagaagaaa

SEQ ID NO: 432862 - RNA, 19 nt, Artificial Sequence
  Synthetic
aaaaggaaaaaagaagaaa

SEQ ID NO: 432863 - RNA, 20 nt, Artificial Sequence
  Synthetic
aaaaaggaaaaaagaagaaa

SEQ ID NO: 432864 - RNA, 21 nt, Artificial Sequence
  Synthetic
caaaaaggaaaaaagaagaaa

SEQ ID NO: 432865 - RNA, 22 nt, Artificial Sequence
  Synthetic
gcaaaaaggaaaaaagaagaaa

SEQ ID NO: 432866 - RNA, 23 nt, Artificial Sequence
  Synthetic
ugcaaaaaggaaaaaagaagaaa

SEQ ID NO: 432867 - RNA, 24 nt, Artificial Sequence
  Synthetic
uugcaaaaaggaaaaaagaagaaa

SEQ ID NO: 432868 - RNA, 18 nt, Artificial Sequence
  Synthetic
aaagaaagaaagaagaaa

SEQ ID NO: 432869 - RNA, 19 nt, Artificial Sequence
  Synthetic
gaaagaaagaaagaagaaa

SEQ ID NO: 432870 - RNA, 20 nt, Artificial Sequence
  Synthetic
agaaagaaagaaagaagaaa

SEQ ID NO: 432871 - RNA, 21 nt, Artificial Sequence
  Synthetic
gagaaagaaagaaagaagaaa

SEQ ID NO: 432872 - RNA, 22 nt, Artificial Sequence
  Synthetic
agagaaagaaagaaagaagaaa

SEQ ID NO: 432873 - RNA, 23 nt, Artificial Sequence
  Synthetic
aagagaaagaaagaaagaagaaa

SEQ ID NO: 432874 - RNA, 24 nt, Artificial Sequence
  Synthetic
aaagagaaagaaagaaagaagaaa

SEQ ID NO: 432875 - RNA, 18 nt, Artificial Sequence
  Synthetic
agugaaggaaagaagaaa

SEQ ID NO: 432876 - RNA, 19 nt, Artificial Sequence
  Synthetic
aagugaaggaaagaagaaa

SEQ ID NO: 432877 - RNA, 20 nt, Artificial Sequence
  Synthetic
gaagugaaggaaagaagaaa

SEQ ID NO: 432878 - RNA, 21 nt, Artificial Sequence
  Synthetic
cgaagugaaggaaagaagaaa

SEQ ID NO: 432879 - RNA, 22 nt, Artificial Sequence
  Synthetic
acgaagugaaggaaagaagaaa

SEQ ID NO: 432880 - RNA, 23 nt, Artificial Sequence
  Synthetic
gacgaagugaaggaaagaagaaa

SEQ ID NO: 432881 - RNA, 24 nt, Artificial Sequence
  Synthetic
ugacgaagugaaggaaagaagaaa

SEQ ID NO: 432882 - RNA, 18 nt, Artificial Sequence
  Synthetic
guuuaaaucaagaagaaa

SEQ ID NO: 432883 - RNA, 19 nt, Artificial Sequence
  Synthetic
aguuuaaaucaagaagaaa

SEQ ID NO: 432884 - RNA, 20 nt, Artificial Sequence
  Synthetic
uaguuuaaaucaagaagaaa

SEQ ID NO: 432885 - RNA, 21 nt, Artificial Sequence
  Synthetic
cuaguuuaaaucaagaagaaa

SEQ ID NO: 432886 - RNA, 22 nt, Artificial Sequence
  Synthetic
ccuaguuuaaaucaagaagaaa

SEQ ID NO: 432887 - RNA, 23 nt, Artificial Sequence
  Synthetic
uccuaguuuaaaucaagaagaaa

SEQ ID NO: 432888 - RNA, 24 nt, Artificial Sequence
  Synthetic
cuccuaguuuaaaucaagaagaaa

SEQ ID NO: 432889 - RNA, 18 nt, Artificial Sequence
  Synthetic
aaacuuauagagaagaaa

SEQ ID NO: 432890 - RNA, 19 nt, Artificial Sequence
  Synthetic
gaaacuuauagagaagaaa

SEQ ID NO: 432891 - RNA, 20 nt, Artificial Sequence
  Synthetic
cgaaacuuauagagaagaaa

SEQ ID NO: 432892 - RNA, 21 nt, Artificial Sequence
  Synthetic
ccgaaacuuauagagaagaaa

SEQ ID NO: 432893 - RNA, 22 nt, Artificial Sequence
  Synthetic
uccgaaacuuauagagaagaaa

SEQ ID NO: 432894 - RNA, 23 nt, Artificial Sequence
  Synthetic
auccgaaacuuauagagaagaaa

SEQ ID NO: 432895 - RNA, 24 nt, Artificial Sequence
  Synthetic
uauccgaaacuuauagagaagaaa

SEQ ID NO: 432896 - RNA, 18 nt, Artificial Sequence
  Synthetic
uaagagagggagaagaaa

SEQ ID NO: 432897 - RNA, 19 nt, Artificial Sequence
  Synthetic
uuaagagagggagaagaaa

SEQ ID NO: 432898 - RNA, 20 nt, Artificial Sequence
  Synthetic
guuaagagagggagaagaaa

SEQ ID NO: 432899 - RNA, 21 nt, Artificial Sequence
  Synthetic
gguuaagagagggagaagaaa

SEQ ID NO: 432900 - RNA, 22 nt, Artificial Sequence
  Synthetic
agguuaagagagggagaagaaa

SEQ ID NO: 432901 - RNA, 23 nt, Artificial Sequence
  Synthetic
aagguuaagagagggagaagaaa

SEQ ID NO: 432902 - RNA, 24 nt, Artificial Sequence
  Synthetic
aaagguuaagagagggagaagaaa

SEQ ID NO: 432903 - RNA, 18 nt, Artificial Sequence
  Synthetic
ucagagugugagaagaaa

SEQ ID NO: 432904 - RNA, 19 nt, Artificial Sequence
  Synthetic
uucagagugugagaagaaa

SEQ ID NO: 432905 - RNA, 20 nt, Artificial Sequence
  Synthetic
uuucagagugugagaagaaa

SEQ ID NO: 432906 - RNA, 21 nt, Artificial Sequence
  Synthetic
cuuucagagugugagaagaaa

SEQ ID NO: 432907 - RNA, 22 nt, Artificial Sequence
  Synthetic
acuuucagagugugagaagaaa

SEQ ID NO: 432908 - RNA, 23 nt, Artificial Sequence
  Synthetic
gacuuucagagugugagaagaaa

SEQ ID NO: 432909 - RNA, 24 nt, Artificial Sequence
  Synthetic
agacuuucagagugugagaagaaa

SEQ ID NO: 432910 - RNA, 18 nt, Artificial Sequence
  Synthetic
cacacauuuuagaagaaa

SEQ ID NO: 432911 - RNA, 19 nt, Artificial Sequence
  Synthetic
acacacauuuuagaagaaa

SEQ ID NO: 432912 - RNA, 20 nt, Artificial Sequence
  Synthetic
uacacacauuuuagaagaaa

SEQ ID NO: 432913 - RNA, 21 nt, Artificial Sequence
  Synthetic
cuacacacauuuuagaagaaa

SEQ ID NO: 432914 - RNA, 22 nt, Artificial Sequence
  Synthetic
ccuacacacauuuuagaagaaa

SEQ ID NO: 432915 - RNA, 23 nt, Artificial Sequence
  Synthetic
uccuacacacauuuuagaagaaa

SEQ ID NO: 432916 - RNA, 24 nt, Artificial Sequence
  Synthetic
cuccuacacacauuuuagaagaaa

SEQ ID NO: 432917 - RNA, 18 nt, Artificial Sequence
  Synthetic
aaaagucuuccgaagaaa

SEQ ID NO: 432918 - RNA, 19 nt, Artificial Sequence
  Synthetic
aaaaagucuuccgaagaaa

SEQ ID NO: 432919 - RNA, 20 nt, Artificial Sequence
  Synthetic
aaaaaagucuuccgaagaaa

SEQ ID NO: 432920 - RNA, 21 nt, Artificial Sequence
  Synthetic
aaaaaaagucuuccgaagaaa

SEQ ID NO: 432921 - RNA, 22 nt, Artificial Sequence
  Synthetic
caaaaaaagucuuccgaagaaa

SEQ ID NO: 432922 - RNA, 23 nt, Artificial Sequence
  Synthetic
acaaaaaaagucuuccgaagaaa

SEQ ID NO: 432923 - RNA, 24 nt, Artificial Sequence
  Synthetic
aacaaaaaaagucuuccgaagaaa

SEQ ID NO: 432924 - RNA, 18 nt, Artificial Sequence
  Synthetic
aagucaauaaggaagaaa

SEQ ID NO: 432925 - RNA, 19 nt, Artificial Sequence
  Synthetic
uaagucaauaaggaagaaa

SEQ ID NO: 432926 - RNA, 20 nt, Artificial Sequence
  Synthetic
guaagucaauaaggaagaaa

SEQ ID NO: 432927 - RNA, 21 nt, Artificial Sequence
  Synthetic
aguaagucaauaaggaagaaa

SEQ ID NO: 432928 - RNA, 22 nt, Artificial Sequence
  Synthetic
aaguaagucaauaaggaagaaa

SEQ ID NO: 432929 - RNA, 23 nt, Artificial Sequence
  Synthetic
caaguaagucaauaaggaagaaa

SEQ ID NO: 432930 - RNA, 24 nt, Artificial Sequence
  Synthetic
acaaguaagucaauaaggaagaaa

SEQ ID NO: 432931 - RNA, 18 nt, Artificial Sequence
  Synthetic
aaucaucugaggaagaaa

SEQ ID NO: 432932 - RNA, 19 nt, Artificial Sequence
  Synthetic
gaaucaucugaggaagaaa

SEQ ID NO: 432933 - RNA, 20 nt, Artificial Sequence
  Synthetic
ugaaucaucugaggaagaaa

SEQ ID NO: 432934 - RNA, 21 nt, Artificial Sequence
  Synthetic
gugaaucaucugaggaagaaa

SEQ ID NO: 432935 - RNA, 22 nt, Artificial Sequence
  Synthetic
ggugaaucaucugaggaagaaa

SEQ ID NO: 432936 - RNA, 23 nt, Artificial Sequence
  Synthetic
uggugaaucaucugaggaagaaa

SEQ ID NO: 432937 - RNA, 24 nt, Artificial Sequence
  Synthetic
guggugaaucaucugaggaagaaa

SEQ ID NO: 432938 - RNA, 18 nt, Artificial Sequence
  Synthetic
agaauccauaggaagaaa

SEQ ID NO: 432939 - RNA, 19 nt, Artificial Sequence
  Synthetic
aagaauccauaggaagaaa

SEQ ID NO: 432940 - RNA, 20 nt, Artificial Sequence
  Synthetic
gaagaauccauaggaagaaa

SEQ ID NO: 432941 - RNA, 21 nt, Artificial Sequence
  Synthetic
agaagaauccauaggaagaaa

SEQ ID NO: 432942 - RNA, 22 nt, Artificial Sequence
  Synthetic
gagaagaauccauaggaagaaa

SEQ ID NO: 432943 - RNA, 23 nt, Artificial Sequence
  Synthetic
cgagaagaauccauaggaagaaa

SEQ ID NO: 432944 - RNA, 24 nt, Artificial Sequence
  Synthetic
ucgagaagaauccauaggaagaaa

SEQ ID NO: 432945 - RNA, 18 nt, Artificial Sequence
  Synthetic
ggaaauagagggaagaaa

SEQ ID NO: 432946 - RNA, 19 nt, Artificial Sequence
  Synthetic
gggaaauagagggaagaaa

SEQ ID NO: 432947 - RNA, 20 nt, Artificial Sequence
  Synthetic
agggaaauagagggaagaaa

SEQ ID NO: 432948 - RNA, 21 nt, Artificial Sequence
  Synthetic
cagggaaauagagggaagaaa

SEQ ID NO: 432949 - RNA, 22 nt, Artificial Sequence
  Synthetic
acagggaaauagagggaagaaa

SEQ ID NO: 432950 - RNA, 23 nt, Artificial Sequence
  Synthetic
uacagggaaauagagggaagaaa

SEQ ID NO: 432951 - RNA, 24 nt, Artificial Sequence
  Synthetic
auacagggaaauagagggaagaaa

SEQ ID NO: 432952 - RNA, 18 nt, Artificial Sequence
  Synthetic
aacacgaaauggaagaaa

SEQ ID NO: 432953 - RNA, 19 nt, Artificial Sequence
  Synthetic
gaacacgaaauggaagaaa

SEQ ID NO: 432954 - RNA, 20 nt, Artificial Sequence
  Synthetic
ugaacacgaaauggaagaaa

SEQ ID NO: 432955 - RNA, 21 nt, Artificial Sequence
  Synthetic
cugaacacgaaauggaagaaa

SEQ ID NO: 432956 - RNA, 22 nt, Artificial Sequence
  Synthetic
gcugaacacgaaauggaagaaa

SEQ ID NO: 432957 - RNA, 23 nt, Artificial Sequence
  Synthetic
agcugaacacgaaauggaagaaa

SEQ ID NO: 432958 - RNA, 24 nt, Artificial Sequence
  Synthetic
gagcugaacacgaaauggaagaaa

SEQ ID NO: 432959 - RNA, 18 nt, Artificial Sequence
  Synthetic
caaggagaguggaagaaa

SEQ ID NO: 432960 - RNA, 19 nt, Artificial Sequence
  Synthetic
ucaaggagaguggaagaaa

SEQ ID NO: 432961 - RNA, 20 nt, Artificial Sequence
  Synthetic
cucaaggagaguggaagaaa

SEQ ID NO: 432962 - RNA, 21 nt, Artificial Sequence
  Synthetic
acucaaggagaguggaagaaa

SEQ ID NO: 432963 - RNA, 22 nt, Artificial Sequence
  Synthetic
cacucaaggagaguggaagaaa

SEQ ID NO: 432964 - RNA, 23 nt, Artificial Sequence
  Synthetic
ucacucaaggagaguggaagaaa

SEQ ID NO: 432965 - RNA, 24 nt, Artificial Sequence
  Synthetic
aucacucaaggagaguggaagaaa

SEQ ID NO: 432966 - RNA, 18 nt, Artificial Sequence
  Synthetic
augcuuucaaugaagaaa

SEQ ID NO: 432967 - RNA, 19 nt, Artificial Sequence
  Synthetic
uaugcuuucaaugaagaaa

SEQ ID NO: 432968 - RNA, 20 nt, Artificial Sequence
  Synthetic
auaugcuuucaaugaagaaa

SEQ ID NO: 432969 - RNA, 21 nt, Artificial Sequence
  Synthetic
uauaugcuuucaaugaagaaa

SEQ ID NO: 432970 - RNA, 22 nt, Artificial Sequence
  Synthetic
uuauaugcuuucaaugaagaaa

SEQ ID NO: 432971 - RNA, 23 nt, Artificial Sequence
  Synthetic
uuuauaugcuuucaaugaagaaa

SEQ ID NO: 432972 - RNA, 24 nt, Artificial Sequence
  Synthetic
uuuuauaugcuuucaaugaagaaa

SEQ ID NO: 432973 - RNA, 18 nt, Artificial Sequence
  Synthetic
uggugacuucugaagaaa

SEQ ID NO: 432974 - RNA, 19 nt, Artificial Sequence
  Synthetic
guggugacuucugaagaaa

SEQ ID NO: 432975 - RNA, 20 nt, Artificial Sequence
  Synthetic
uguggugacuucugaagaaa

SEQ ID NO: 432976 - RNA, 21 nt, Artificial Sequence
  Synthetic
uuguggugacuucugaagaaa

SEQ ID NO: 432977 - RNA, 22 nt, Artificial Sequence
  Synthetic
uuuguggugacuucugaagaaa

SEQ ID NO: 432978 - RNA, 23 nt, Artificial Sequence
  Synthetic
cuuuguggugacuucugaagaaa

SEQ ID NO: 432979 - RNA, 24 nt, Artificial Sequence
  Synthetic
acuuuguggugacuucugaagaaa

SEQ ID NO: 432980 - RNA, 18 nt, Artificial Sequence
  Synthetic
gcucuguuucugaagaaa

SEQ ID NO: 432981 - RNA, 19 nt, Artificial Sequence
  Synthetic
ugcucuguuucugaagaaa

SEQ ID NO: 432982 - RNA, 20 nt, Artificial Sequence
  Synthetic
gugcucuguuucugaagaaa

SEQ ID NO: 432983 - RNA, 21 nt, Artificial Sequence
  Synthetic
ggugcucuguuucugaagaaa

SEQ ID NO: 432984 - RNA, 22 nt, Artificial Sequence
  Synthetic
aggugcucuguuucugaagaaa

SEQ ID NO: 432985 - RNA, 23 nt, Artificial Sequence
  Synthetic
aaggugcucuguuucugaagaaa

SEQ ID NO: 432986 - RNA, 24 nt, Artificial Sequence
  Synthetic
aaaggugcucuguuucugaagaaa

SEQ ID NO: 432987 - RNA, 18 nt, Artificial Sequence
  Synthetic
uagagagaagugaagaaa

SEQ ID NO: 432988 - RNA, 19 nt, Artificial Sequence
  Synthetic
guagagagaagugaagaaa

SEQ ID NO: 432989 - RNA, 20 nt, Artificial Sequence
  Synthetic
gguagagagaagugaagaaa

SEQ ID NO: 432990 - RNA, 21 nt, Artificial Sequence
  Synthetic
agguagagagaagugaagaaa

SEQ ID NO: 432991 - RNA, 22 nt, Artificial Sequence
  Synthetic
aagguagagagaagugaagaaa

SEQ ID NO: 432992 - RNA, 23 nt, Artificial Sequence
  Synthetic
gaagguagagagaagugaagaaa

SEQ ID NO: 432993 - RNA, 24 nt, Artificial Sequence
  Synthetic
ggaagguagagagaagugaagaaa

SEQ ID NO: 432994 - RNA, 18 nt, Artificial Sequence
  Synthetic
gacaaguaugugaagaaa

SEQ ID NO: 432995 - RNA, 19 nt, Artificial Sequence
  Synthetic
ugacaaguaugugaagaaa

SEQ ID NO: 432996 - RNA, 20 nt, Artificial Sequence
  Synthetic
uugacaaguaugugaagaaa

SEQ ID NO: 432997 - RNA, 21 nt, Artificial Sequence
  Synthetic
guugacaaguaugugaagaaa

SEQ ID NO: 432998 - RNA, 22 nt, Artificial Sequence
  Synthetic
uguugacaaguaugugaagaaa

SEQ ID NO: 432999 - RNA, 23 nt, Artificial Sequence
  Synthetic
auguugacaaguaugugaagaaa

SEQ ID NO: 433000 - RNA, 24 nt, Artificial Sequence
  Synthetic
aauguugacaaguaugugaagaaa

SEQ ID NO: 433001 - RNA, 18 nt, Artificial Sequence
  Synthetic
ggagagagugugaagaaa

SEQ ID NO: 433002 - RNA, 19 nt, Artificial Sequence
  Synthetic
uggagagagugugaagaaa

SEQ ID NO: 433003 - RNA, 20 nt, Artificial Sequence
  Synthetic
cuggagagagugugaagaaa

SEQ ID NO: 433004 - RNA, 21 nt, Artificial Sequence
  Synthetic
gcuggagagagugugaagaaa

SEQ ID NO: 433005 - RNA, 22 nt, Artificial Sequence
  Synthetic
ugcuggagagagugugaagaaa

SEQ ID NO: 433006 - RNA, 23 nt, Artificial Sequence
  Synthetic
augcuggagagagugugaagaaa

SEQ ID NO: 433007 - RNA, 24 nt, Artificial Sequence
  Synthetic
aaugcuggagagagugugaagaaa

SEQ ID NO: 433008 - RNA, 18 nt, Artificial Sequence
  Synthetic
ggugagguugugaagaaa

SEQ ID NO: 433009 - RNA, 19 nt, Artificial Sequence
  Synthetic
uggugagguugugaagaaa

SEQ ID NO: 433010 - RNA, 20 nt, Artificial Sequence
  Synthetic
cuggugagguugugaagaaa

SEQ ID NO: 433011 - RNA, 21 nt, Artificial Sequence
  Synthetic
gcuggugagguugugaagaaa

SEQ ID NO: 433012 - RNA, 22 nt, Artificial Sequence
  Synthetic
ugcuggugagguugugaagaaa

SEQ ID NO: 433013 - RNA, 23 nt, Artificial Sequence
  Synthetic
augcuggugagguugugaagaaa

SEQ ID NO: 433014 - RNA, 24 nt, Artificial Sequence
  Synthetic
gaugcuggugagguugugaagaaa

SEQ ID NO: 433015 - RNA, 18 nt, Artificial Sequence
  Synthetic
uauugaaucuugaagaaa

SEQ ID NO: 433016 - RNA, 19 nt, Artificial Sequence
  Synthetic
auauugaaucuugaagaaa

SEQ ID NO: 433017 - RNA, 20 nt, Artificial Sequence
  Synthetic
aauauugaaucuugaagaaa

SEQ ID NO: 433018 - RNA, 21 nt, Artificial Sequence
  Synthetic
caauauugaaucuugaagaaa

SEQ ID NO: 433019 - RNA, 22 nt, Artificial Sequence
  Synthetic
ccaauauugaaucuugaagaaa

SEQ ID NO: 433020 - RNA, 23 nt, Artificial Sequence
  Synthetic
accaauauugaaucuugaagaaa

SEQ ID NO: 433021 - RNA, 24 nt, Artificial Sequence
  Synthetic
uaccaauauugaaucuugaagaaa

SEQ ID NO: 433022 - RNA, 18 nt, Artificial Sequence
  Synthetic
uuuuaacauuugaagaaa

SEQ ID NO: 433023 - RNA, 19 nt, Artificial Sequence
  Synthetic
guuuuaacauuugaagaaa

SEQ ID NO: 433024 - RNA, 20 nt, Artificial Sequence
  Synthetic
uguuuuaacauuugaagaaa

SEQ ID NO: 433025 - RNA, 21 nt, Artificial Sequence
  Synthetic
uuguuuuaacauuugaagaaa

SEQ ID NO: 433026 - RNA, 22 nt, Artificial Sequence
  Synthetic
auuguuuuaacauuugaagaaa

SEQ ID NO: 433027 - RNA, 23 nt, Artificial Sequence
  Synthetic
aauuguuuuaacauuugaagaaa

SEQ ID NO: 433028 - RNA, 24 nt, Artificial Sequence
  Synthetic
caauuguuuuaacauuugaagaaa

SEQ ID NO: 433029 - RNA, 18 nt, Artificial Sequence
  Synthetic
uguuagauaaauaagaaa

SEQ ID NO: 433030 - RNA, 19 nt, Artificial Sequence
  Synthetic
uuguuagauaaauaagaaa

SEQ ID NO: 433031 - RNA, 20 nt, Artificial Sequence
  Synthetic
auuguuagauaaauaagaaa

SEQ ID NO: 433032 - RNA, 21 nt, Artificial Sequence
  Synthetic
uauuguuagauaaauaagaaa

SEQ ID NO: 433033 - RNA, 22 nt, Artificial Sequence
  Synthetic
guauuguuagauaaauaagaaa

SEQ ID NO: 433034 - RNA, 23 nt, Artificial Sequence
  Synthetic
uguauuguuagauaaauaagaaa

SEQ ID NO: 433035 - RNA, 24 nt, Artificial Sequence
  Synthetic
auguauuguuagauaaauaagaaa

SEQ ID NO: 433036 - RNA, 18 nt, Artificial Sequence
  Synthetic
caucaugguaauaagaaa

SEQ ID NO: 433037 - RNA, 19 nt, Artificial Sequence
  Synthetic
acaucaugguaauaagaaa

SEQ ID NO: 433038 - RNA, 20 nt, Artificial Sequence
  Synthetic
aacaucaugguaauaagaaa

SEQ ID NO: 433039 - RNA, 21 nt, Artificial Sequence
  Synthetic
aaacaucaugguaauaagaaa

SEQ ID NO: 433040 - RNA, 22 nt, Artificial Sequence
  Synthetic
aaaacaucaugguaauaagaaa

SEQ ID NO: 433041 - RNA, 23 nt, Artificial Sequence
  Synthetic
aaaaacaucaugguaauaagaaa

SEQ ID NO: 433042 - RNA, 24 nt, Artificial Sequence
  Synthetic
aaaaaacaucaugguaauaagaaa

SEQ ID NO: 433043 - RNA, 18 nt, Artificial Sequence
  Synthetic
uaucaauaacauaagaaa

SEQ ID NO: 433044 - RNA, 19 nt, Artificial Sequence
  Synthetic
guaucaauaacauaagaaa

SEQ ID NO: 433045 - RNA, 20 nt, Artificial Sequence
  Synthetic
uguaucaauaacauaagaaa

SEQ ID NO: 433046 - RNA, 21 nt, Artificial Sequence
  Synthetic
cuguaucaauaacauaagaaa

SEQ ID NO: 433047 - RNA, 22 nt, Artificial Sequence
  Synthetic
ccuguaucaauaacauaagaaa

SEQ ID NO: 433048 - RNA, 23 nt, Artificial Sequence
  Synthetic
accuguaucaauaacauaagaaa

SEQ ID NO: 433049 - RNA, 24 nt, Artificial Sequence
  Synthetic
gaccuguaucaauaacauaagaaa

SEQ ID NO: 433050 - RNA, 18 nt, Artificial Sequence
  Synthetic
ccccucccucauaagaaa

SEQ ID NO: 433051 - RNA, 19 nt, Artificial Sequence
  Synthetic
uccccucccucauaagaaa

SEQ ID NO: 433052 - RNA, 20 nt, Artificial Sequence
  Synthetic
cuccccucccucauaagaaa

SEQ ID NO: 433053 - RNA, 21 nt, Artificial Sequence
  Synthetic
ucuccccucccucauaagaaa

SEQ ID NO: 433054 - RNA, 22 nt, Artificial Sequence
  Synthetic
uucuccccucccucauaagaaa

SEQ ID NO: 433055 - RNA, 23 nt, Artificial Sequence
  Synthetic
cuucuccccucccucauaagaaa

SEQ ID NO: 433056 - RNA, 24 nt, Artificial Sequence
  Synthetic
ucuucuccccucccucauaagaaa

SEQ ID NO: 433057 - RNA, 18 nt, Artificial Sequence
  Synthetic
cacuuuacagauaagaaa

SEQ ID NO: 433058 - RNA, 19 nt, Artificial Sequence
  Synthetic
ccacuuuacagauaagaaa

SEQ ID NO: 433059 - RNA, 20 nt, Artificial Sequence
  Synthetic
gccacuuuacagauaagaaa

SEQ ID NO: 433060 - RNA, 21 nt, Artificial Sequence
  Synthetic
ugccacuuuacagauaagaaa

SEQ ID NO: 433061 - RNA, 22 nt, Artificial Sequence
  Synthetic
uugccacuuuacagauaagaaa

SEQ ID NO: 433062 - RNA, 23 nt, Artificial Sequence
  Synthetic
auugccacuuuacagauaagaaa

SEQ ID NO: 433063 - RNA, 24 nt, Artificial Sequence
  Synthetic
gauugccacuuuacagauaagaaa

SEQ ID NO: 433064 - RNA, 18 nt, Artificial Sequence
  Synthetic
gaacaauuagauaagaaa

SEQ ID NO: 433065 - RNA, 19 nt, Artificial Sequence
  Synthetic
agaacaauuagauaagaaa

SEQ ID NO: 433066 - RNA, 20 nt, Artificial Sequence
  Synthetic
cagaacaauuagauaagaaa

SEQ ID NO: 433067 - RNA, 21 nt, Artificial Sequence
  Synthetic
ccagaacaauuagauaagaaa

SEQ ID NO: 433068 - RNA, 22 nt, Artificial Sequence
  Synthetic
gccagaacaauuagauaagaaa

SEQ ID NO: 433069 - RNA, 23 nt, Artificial Sequence
  Synthetic
agccagaacaauuagauaagaaa

SEQ ID NO: 433070 - RNA, 24 nt, Artificial Sequence
  Synthetic
uagccagaacaauuagauaagaaa

SEQ ID NO: 433071 - RNA, 18 nt, Artificial Sequence
  Synthetic
agggaaggauauaagaaa

SEQ ID NO: 433072 - RNA, 19 nt, Artificial Sequence
  Synthetic
cagggaaggauauaagaaa

SEQ ID NO: 433073 - RNA, 20 nt, Artificial Sequence
  Synthetic
acagggaaggauauaagaaa

SEQ ID NO: 433074 - RNA, 21 nt, Artificial Sequence
  Synthetic
uacagggaaggauauaagaaa

SEQ ID NO: 433075 - RNA, 22 nt, Artificial Sequence
  Synthetic
auacagggaaggauauaagaaa

SEQ ID NO: 433076 - RNA, 23 nt, Artificial Sequence
  Synthetic
uauacagggaaggauauaagaaa

SEQ ID NO: 433077 - RNA, 24 nt, Artificial Sequence
  Synthetic
uuauacagggaaggauauaagaaa

SEQ ID NO: 433078 - RNA, 18 nt, Artificial Sequence
  Synthetic
ccauguuuauauaagaaa

SEQ ID NO: 433079 - RNA, 19 nt, Artificial Sequence
  Synthetic
uccauguuuauauaagaaa

SEQ ID NO: 433080 - RNA, 20 nt, Artificial Sequence
  Synthetic
uuccauguuuauauaagaaa

SEQ ID NO: 433081 - RNA, 21 nt, Artificial Sequence
  Synthetic
uuuccauguuuauauaagaaa

SEQ ID NO: 433082 - RNA, 22 nt, Artificial Sequence
  Synthetic
auuuccauguuuauauaagaaa

SEQ ID NO: 433083 - RNA, 23 nt, Artificial Sequence
  Synthetic
aauuuccauguuuauauaagaaa

SEQ ID NO: 433084 - RNA, 24 nt, Artificial Sequence
  Synthetic
aaauuuccauguuuauauaagaaa

SEQ ID NO: 433085 - RNA, 18 nt, Artificial Sequence
  Synthetic
uuuagucacccuaagaaa

SEQ ID NO: 433086 - RNA, 19 nt, Artificial Sequence
  Synthetic
cuuuagucacccuaagaaa

SEQ ID NO: 433087 - RNA, 20 nt, Artificial Sequence
  Synthetic
ccuuuagucacccuaagaaa

SEQ ID NO: 433088 - RNA, 21 nt, Artificial Sequence
  Synthetic
cccuuuagucacccuaagaaa

SEQ ID NO: 433089 - RNA, 22 nt, Artificial Sequence
  Synthetic
gcccuuuagucacccuaagaaa

SEQ ID NO: 433090 - RNA, 23 nt, Artificial Sequence
  Synthetic
agcccuuuagucacccuaagaaa

SEQ ID NO: 433091 - RNA, 24 nt, Artificial Sequence
  Synthetic
aagcccuuuagucacccuaagaaa

SEQ ID NO: 433092 - RNA, 18 nt, Artificial Sequence
  Synthetic
uuccacuaugcuaagaaa

SEQ ID NO: 433093 - RNA, 19 nt, Artificial Sequence
  Synthetic
uuuccacuaugcuaagaaa

SEQ ID NO: 433094 - RNA, 20 nt, Artificial Sequence
  Synthetic
auuuccacuaugcuaagaaa

SEQ ID NO: 433095 - RNA, 21 nt, Artificial Sequence
  Synthetic
cauuuccacuaugcuaagaaa

SEQ ID NO: 433096 - RNA, 22 nt, Artificial Sequence
  Synthetic
ucauuuccacuaugcuaagaaa

SEQ ID NO: 433097 - RNA, 23 nt, Artificial Sequence
  Synthetic
aucauuuccacuaugcuaagaaa

SEQ ID NO: 433098 - RNA, 24 nt, Artificial Sequence
  Synthetic
aaucauuuccacuaugcuaagaaa

SEQ ID NO: 433099 - RNA, 18 nt, Artificial Sequence
  Synthetic
ccuauuaguaguaagaaa

SEQ ID NO: 433100 - RNA, 19 nt, Artificial Sequence
  Synthetic
gccuauuaguaguaagaaa

SEQ ID NO: 433101 - RNA, 20 nt, Artificial Sequence
  Synthetic
ugccuauuaguaguaagaaa

SEQ ID NO: 433102 - RNA, 21 nt, Artificial Sequence
  Synthetic
augccuauuaguaguaagaaa

SEQ ID NO: 433103 - RNA, 22 nt, Artificial Sequence
  Synthetic
aaugccuauuaguaguaagaaa

SEQ ID NO: 433104 - RNA, 23 nt, Artificial Sequence
  Synthetic
caaugccuauuaguaguaagaaa

SEQ ID NO: 433105 - RNA, 24 nt, Artificial Sequence
  Synthetic
gcaaugccuauuaguaguaagaaa

SEQ ID NO: 433106 - RNA, 18 nt, Artificial Sequence
  Synthetic
cugagugcucuuaagaaa

SEQ ID NO: 433107 - RNA, 19 nt, Artificial Sequence
  Synthetic
ucugagugcucuuaagaaa

SEQ ID NO: 433108 - RNA, 20 nt, Artificial Sequence
  Synthetic
gucugagugcucuuaagaaa

SEQ ID NO: 433109 - RNA, 21 nt, Artificial Sequence
  Synthetic
agucugagugcucuuaagaaa

SEQ ID NO: 433110 - RNA, 22 nt, Artificial Sequence
  Synthetic
gagucugagugcucuuaagaaa

SEQ ID NO: 433111 - RNA, 23 nt, Artificial Sequence
  Synthetic
agagucugagugcucuuaagaaa

SEQ ID NO: 433112 - RNA, 24 nt, Artificial Sequence
  Synthetic
cagagucugagugcucuuaagaaa

SEQ ID NO: 433113 - RNA, 18 nt, Artificial Sequence
  Synthetic
gcugcuaaauuuaagaaa

SEQ ID NO: 433114 - RNA, 19 nt, Artificial Sequence
  Synthetic
ugcugcuaaauuuaagaaa

SEQ ID NO: 433115 - RNA, 20 nt, Artificial Sequence
  Synthetic
cugcugcuaaauuuaagaaa

SEQ ID NO: 433116 - RNA, 21 nt, Artificial Sequence
  Synthetic
ccugcugcuaaauuuaagaaa

SEQ ID NO: 433117 - RNA, 22 nt, Artificial Sequence
  Synthetic
accugcugcuaaauuuaagaaa

SEQ ID NO: 433118 - RNA, 23 nt, Artificial Sequence
  Synthetic
aaccugcugcuaaauuuaagaaa

SEQ ID NO: 433119 - RNA, 24 nt, Artificial Sequence
  Synthetic
uaaccugcugcuaaauuuaagaaa

SEQ ID NO: 433120 - RNA, 18 nt, Artificial Sequence
  Synthetic
auaguuaaauuuaagaaa

SEQ ID NO: 433121 - RNA, 19 nt, Artificial Sequence
  Synthetic
gauaguuaaauuuaagaaa

SEQ ID NO: 433122 - RNA, 20 nt, Artificial Sequence
  Synthetic
agauaguuaaauuuaagaaa

SEQ ID NO: 433123 - RNA, 21 nt, Artificial Sequence
  Synthetic
cagauaguuaaauuuaagaaa

SEQ ID NO: 433124 - RNA, 22 nt, Artificial Sequence
  Synthetic
ccagauaguuaaauuuaagaaa

SEQ ID NO: 433125 - RNA, 23 nt, Artificial Sequence
  Synthetic
accagauaguuaaauuuaagaaa

SEQ ID NO: 433126 - RNA, 24 nt, Artificial Sequence
  Synthetic
aaccagauaguuaaauuuaagaaa

SEQ ID NO: 433127 - RNA, 18 nt, Artificial Sequence
  Synthetic
uaaaaaugauuuaagaaa

SEQ ID NO: 433128 - RNA, 19 nt, Artificial Sequence
  Synthetic
guaaaaaugauuuaagaaa

SEQ ID NO: 433129 - RNA, 20 nt, Artificial Sequence
  Synthetic
gguaaaaaugauuuaagaaa

SEQ ID NO: 433130 - RNA, 21 nt, Artificial Sequence
  Synthetic
agguaaaaaugauuuaagaaa

SEQ ID NO: 433131 - RNA, 22 nt, Artificial Sequence
  Synthetic
aagguaaaaaugauuuaagaaa

SEQ ID NO: 433132 - RNA, 23 nt, Artificial Sequence
  Synthetic
caagguaaaaaugauuuaagaaa

SEQ ID NO: 433133 - RNA, 24 nt, Artificial Sequence
  Synthetic
gcaagguaaaaaugauuuaagaaa

SEQ ID NO: 433134 - RNA, 18 nt, Artificial Sequence
  Synthetic
ugaugcucuuuuaagaaa

SEQ ID NO: 433135 - RNA, 19 nt, Artificial Sequence
  Synthetic
gugaugcucuuuuaagaaa

SEQ ID NO: 433136 - RNA, 20 nt, Artificial Sequence
  Synthetic
ggugaugcucuuuuaagaaa

SEQ ID NO: 433137 - RNA, 21 nt, Artificial Sequence
  Synthetic
aggugaugcucuuuuaagaaa

SEQ ID NO: 433138 - RNA, 22 nt, Artificial Sequence
  Synthetic
aaggugaugcucuuuuaagaaa

SEQ ID NO: 433139 - RNA, 23 nt, Artificial Sequence
  Synthetic
caaggugaugcucuuuuaagaaa

SEQ ID NO: 433140 - RNA, 24 nt, Artificial Sequence
  Synthetic
gcaaggugaugcucuuuuaagaaa

SEQ ID NO: 433141 - RNA, 18 nt, Artificial Sequence
  Synthetic
uggagcaaacaacagaaa

SEQ ID NO: 433142 - RNA, 19 nt, Artificial Sequence
  Synthetic
auggagcaaacaacagaaa

SEQ ID NO: 433143 - RNA, 20 nt, Artificial Sequence
  Synthetic
aauggagcaaacaacagaaa

SEQ ID NO: 433144 - RNA, 21 nt, Artificial Sequence
  Synthetic
caauggagcaaacaacagaaa

SEQ ID NO: 433145 - RNA, 22 nt, Artificial Sequence
  Synthetic
gcaauggagcaaacaacagaaa

SEQ ID NO: 433146 - RNA, 23 nt, Artificial Sequence
  Synthetic
ggcaauggagcaaacaacagaaa

SEQ ID NO: 433147 - RNA, 24 nt, Artificial Sequence
  Synthetic
aggcaauggagcaaacaacagaaa

SEQ ID NO: 433148 - RNA, 18 nt, Artificial Sequence
  Synthetic
agagacaaccaacagaaa

SEQ ID NO: 433149 - RNA, 19 nt, Artificial Sequence
  Synthetic
aagagacaaccaacagaaa

SEQ ID NO: 433150 - RNA, 20 nt, Artificial Sequence
  Synthetic
gaagagacaaccaacagaaa

SEQ ID NO: 433151 - RNA, 21 nt, Artificial Sequence
  Synthetic
ugaagagacaaccaacagaaa

SEQ ID NO: 433152 - RNA, 22 nt, Artificial Sequence
  Synthetic
gugaagagacaaccaacagaaa

SEQ ID NO: 433153 - RNA, 23 nt, Artificial Sequence
  Synthetic
agugaagagacaaccaacagaaa

SEQ ID NO: 433154 - RNA, 24 nt, Artificial Sequence
  Synthetic
aagugaagagacaaccaacagaaa

SEQ ID NO: 433155 - RNA, 18 nt, Artificial Sequence
  Synthetic
aagacauaagaacagaaa

SEQ ID NO: 433156 - RNA, 19 nt, Artificial Sequence
  Synthetic
gaagacauaagaacagaaa

SEQ ID NO: 433157 - RNA, 20 nt, Artificial Sequence
  Synthetic
ugaagacauaagaacagaaa

SEQ ID NO: 433158 - RNA, 21 nt, Artificial Sequence
  Synthetic
augaagacauaagaacagaaa

SEQ ID NO: 433159 - RNA, 22 nt, Artificial Sequence
  Synthetic
uaugaagacauaagaacagaaa

SEQ ID NO: 433160 - RNA, 23 nt, Artificial Sequence
  Synthetic
uuaugaagacauaagaacagaaa

SEQ ID NO: 433161 - RNA, 24 nt, Artificial Sequence
  Synthetic
auuaugaagacauaagaacagaaa

SEQ ID NO: 433162 - RNA, 18 nt, Artificial Sequence
  Synthetic
cuaacacaggaacagaaa

SEQ ID NO: 433163 - RNA, 19 nt, Artificial Sequence
  Synthetic
acuaacacaggaacagaaa

SEQ ID NO: 433164 - RNA, 20 nt, Artificial Sequence
  Synthetic
aacuaacacaggaacagaaa

SEQ ID NO: 433165 - RNA, 21 nt, Artificial Sequence
  Synthetic
aaacuaacacaggaacagaaa

SEQ ID NO: 433166 - RNA, 22 nt, Artificial Sequence
  Synthetic
caaacuaacacaggaacagaaa

SEQ ID NO: 433167 - RNA, 23 nt, Artificial Sequence
  Synthetic
gcaaacuaacacaggaacagaaa

SEQ ID NO: 433168 - RNA, 24 nt, Artificial Sequence
  Synthetic
agcaaacuaacacaggaacagaaa

SEQ ID NO: 433169 - RNA, 18 nt, Artificial Sequence
  Synthetic
uuuuggggauaacagaaa

SEQ ID NO: 433170 - RNA, 19 nt, Artificial Sequence
  Synthetic
guuuuggggauaacagaaa

SEQ ID NO: 433171 - RNA, 20 nt, Artificial Sequence
  Synthetic
uguuuuggggauaacagaaa

SEQ ID NO: 433172 - RNA, 21 nt, Artificial Sequence
  Synthetic
guguuuuggggauaacagaaa

SEQ ID NO: 433173 - RNA, 22 nt, Artificial Sequence
  Synthetic
gguguuuuggggauaacagaaa

SEQ ID NO: 433174 - RNA, 23 nt, Artificial Sequence
  Synthetic
agguguuuuggggauaacagaaa

SEQ ID NO: 433175 - RNA, 24 nt, Artificial Sequence
  Synthetic
aagguguuuuggggauaacagaaa

SEQ ID NO: 433176 - RNA, 18 nt, Artificial Sequence
  Synthetic
uguaagaaguaacagaaa

SEQ ID NO: 433177 - RNA, 19 nt, Artificial Sequence
  Synthetic
uuguaagaaguaacagaaa

SEQ ID NO: 433178 - RNA, 20 nt, Artificial Sequence
  Synthetic
uuuguaagaaguaacagaaa

SEQ ID NO: 433179 - RNA, 21 nt, Artificial Sequence
  Synthetic
uuuuguaagaaguaacagaaa

SEQ ID NO: 433180 - RNA, 22 nt, Artificial Sequence
  Synthetic
auuuuguaagaaguaacagaaa

SEQ ID NO: 433181 - RNA, 23 nt, Artificial Sequence
  Synthetic
uauuuuguaagaaguaacagaaa

SEQ ID NO: 433182 - RNA, 24 nt, Artificial Sequence
  Synthetic
uuauuuuguaagaaguaacagaaa

SEQ ID NO: 433183 - RNA, 18 nt, Artificial Sequence
  Synthetic
cacacacacacacagaaa

SEQ ID NO: 433184 - RNA, 19 nt, Artificial Sequence
  Synthetic
acacacacacacacagaaa

SEQ ID NO: 433185 - RNA, 20 nt, Artificial Sequence
  Synthetic
aacacacacacacacagaaa

SEQ ID NO: 433186 - RNA, 21 nt, Artificial Sequence
  Synthetic
aaacacacacacacacagaaa

SEQ ID NO: 433187 - RNA, 22 nt, Artificial Sequence
  Synthetic
aaaacacacacacacacagaaa

SEQ ID NO: 433188 - RNA, 23 nt, Artificial Sequence
  Synthetic
aaaaacacacacacacacagaaa

SEQ ID NO: 433189 - RNA, 24 nt, Artificial Sequence
  Synthetic
uaaaaacacacacacacacagaaa

SEQ ID NO: 433190 - RNA, 18 nt, Artificial Sequence
  Synthetic
auguaagacacacagaaa

SEQ ID NO: 433191 - RNA, 19 nt, Artificial Sequence
  Synthetic
aauguaagacacacagaaa

SEQ ID NO: 433192 - RNA, 20 nt, Artificial Sequence
  Synthetic
gaauguaagacacacagaaa

SEQ ID NO: 433193 - RNA, 21 nt, Artificial Sequence
  Synthetic
agaauguaagacacacagaaa

SEQ ID NO: 433194 - RNA, 22 nt, Artificial Sequence
  Synthetic
cagaauguaagacacacagaaa

SEQ ID NO: 433195 - RNA, 23 nt, Artificial Sequence
  Synthetic
ccagaauguaagacacacagaaa

SEQ ID NO: 433196 - RNA, 24 nt, Artificial Sequence
  Synthetic
accagaauguaagacacacagaaa

SEQ ID NO: 433197 - RNA, 18 nt, Artificial Sequence
  Synthetic
caauauauugcacagaaa

SEQ ID NO: 433198 - RNA, 19 nt, Artificial Sequence
  Synthetic
acaauauauugcacagaaa

SEQ ID NO: 433199 - RNA, 20 nt, Artificial Sequence
  Synthetic
uacaauauauugcacagaaa

SEQ ID NO: 433200 - RNA, 21 nt, Artificial Sequence
  Synthetic
auacaauauauugcacagaaa

SEQ ID NO: 433201 - RNA, 22 nt, Artificial Sequence
  Synthetic
uauacaauauauugcacagaaa

SEQ ID NO: 433202 - RNA, 23 nt, Artificial Sequence
  Synthetic
auauacaauauauugcacagaaa

SEQ ID NO: 433203 - RNA, 24 nt, Artificial Sequence
  Synthetic
aauauacaauauauugcacagaaa

SEQ ID NO: 433204 - RNA, 18 nt, Artificial Sequence
  Synthetic
aaaaauugaucacagaaa

SEQ ID NO: 433205 - RNA, 19 nt, Artificial Sequence
  Synthetic
uaaaaauugaucacagaaa

SEQ ID NO: 433206 - RNA, 20 nt, Artificial Sequence
  Synthetic
uuaaaaauugaucacagaaa

SEQ ID NO: 433207 - RNA, 21 nt, Artificial Sequence
  Synthetic
auuaaaaauugaucacagaaa

SEQ ID NO: 433208 - RNA, 22 nt, Artificial Sequence
  Synthetic
uauuaaaaauugaucacagaaa

SEQ ID NO: 433209 - RNA, 23 nt, Artificial Sequence
  Synthetic
auauuaaaaauugaucacagaaa

SEQ ID NO: 433210 - RNA, 24 nt, Artificial Sequence
  Synthetic
aauauuaaaaauugaucacagaaa

SEQ ID NO: 433211 - RNA, 18 nt, Artificial Sequence
  Synthetic
ggguaaacgagacagaaa

SEQ ID NO: 433212 - RNA, 19 nt, Artificial Sequence
  Synthetic
gggguaaacgagacagaaa

SEQ ID NO: 433213 - RNA, 20 nt, Artificial Sequence
  Synthetic
agggguaaacgagacagaaa

SEQ ID NO: 433214 - RNA, 21 nt, Artificial Sequence
  Synthetic
cagggguaaacgagacagaaa

SEQ ID NO: 433215 - RNA, 22 nt, Artificial Sequence
  Synthetic
ucagggguaaacgagacagaaa

SEQ ID NO: 433216 - RNA, 23 nt, Artificial Sequence
  Synthetic
uucagggguaaacgagacagaaa

SEQ ID NO: 433217 - RNA, 24 nt, Artificial Sequence
  Synthetic
uuucagggguaaacgagacagaaa

SEQ ID NO: 433218 - RNA, 18 nt, Artificial Sequence
  Synthetic
acucugauaggacagaaa

SEQ ID NO: 433219 - RNA, 19 nt, Artificial Sequence
  Synthetic
cacucugauaggacagaaa

SEQ ID NO: 433220 - RNA, 20 nt, Artificial Sequence
  Synthetic
gcacucugauaggacagaaa

SEQ ID NO: 433221 - RNA, 21 nt, Artificial Sequence
  Synthetic
ggcacucugauaggacagaaa

SEQ ID NO: 433222 - RNA, 22 nt, Artificial Sequence
  Synthetic
gggcacucugauaggacagaaa

SEQ ID NO: 433223 - RNA, 23 nt, Artificial Sequence
  Synthetic
agggcacucugauaggacagaaa

SEQ ID NO: 433224 - RNA, 24 nt, Artificial Sequence
  Synthetic
aagggcacucugauaggacagaaa

SEQ ID NO: 433225 - RNA, 18 nt, Artificial Sequence
  Synthetic
uaauaccaaaaccagaaa

SEQ ID NO: 433226 - RNA, 19 nt, Artificial Sequence
  Synthetic
cuaauaccaaaaccagaaa

SEQ ID NO: 433227 - RNA, 20 nt, Artificial Sequence
  Synthetic
ccuaauaccaaaaccagaaa

SEQ ID NO: 433228 - RNA, 21 nt, Artificial Sequence
  Synthetic
cccuaauaccaaaaccagaaa

SEQ ID NO: 433229 - RNA, 22 nt, Artificial Sequence
  Synthetic
acccuaauaccaaaaccagaaa

SEQ ID NO: 433230 - RNA, 23 nt, Artificial Sequence
  Synthetic
cacccuaauaccaaaaccagaaa

SEQ ID NO: 433231 - RNA, 24 nt, Artificial Sequence
  Synthetic
ucacccuaauaccaaaaccagaaa

SEQ ID NO: 433232 - RNA, 18 nt, Artificial Sequence
  Synthetic
ccugagaaaacccagaaa

SEQ ID NO: 433233 - RNA, 19 nt, Artificial Sequence
  Synthetic
uccugagaaaacccagaaa

SEQ ID NO: 433234 - RNA, 20 nt, Artificial Sequence
  Synthetic
auccugagaaaacccagaaa

SEQ ID NO: 433235 - RNA, 21 nt, Artificial Sequence
  Synthetic
aauccugagaaaacccagaaa

SEQ ID NO: 433236 - RNA, 22 nt, Artificial Sequence
  Synthetic
caauccugagaaaacccagaaa

SEQ ID NO: 433237 - RNA, 23 nt, Artificial Sequence
  Synthetic
gcaauccugagaaaacccagaaa

SEQ ID NO: 433238 - RNA, 24 nt, Artificial Sequence
  Synthetic
agcaauccugagaaaacccagaaa

SEQ ID NO: 433239 - RNA, 18 nt, Artificial Sequence
  Synthetic
ggaacuuuuacccagaaa

SEQ ID NO: 433240 - RNA, 19 nt, Artificial Sequence
  Synthetic
aggaacuuuuacccagaaa

SEQ ID NO: 433241 - RNA, 20 nt, Artificial Sequence
  Synthetic
uaggaacuuuuacccagaaa

SEQ ID NO: 433242 - RNA, 21 nt, Artificial Sequence
  Synthetic
guaggaacuuuuacccagaaa

SEQ ID NO: 433243 - RNA, 22 nt, Artificial Sequence
  Synthetic
uguaggaacuuuuacccagaaa

SEQ ID NO: 433244 - RNA, 23 nt, Artificial Sequence
  Synthetic
guguaggaacuuuuacccagaaa

SEQ ID NO: 433245 - RNA, 24 nt, Artificial Sequence
  Synthetic
gguguaggaacuuuuacccagaaa

SEQ ID NO: 433246 - RNA, 18 nt, Artificial Sequence
  Synthetic
gacugaaguccccagaaa

SEQ ID NO: 433247 - RNA, 19 nt, Artificial Sequence
  Synthetic
agacugaaguccccagaaa

SEQ ID NO: 433248 - RNA, 20 nt, Artificial Sequence
  Synthetic
aagacugaaguccccagaaa

SEQ ID NO: 433249 - RNA, 21 nt, Artificial Sequence
  Synthetic
aaagacugaaguccccagaaa

SEQ ID NO: 433250 - RNA, 22 nt, Artificial Sequence
  Synthetic
aaaagacugaaguccccagaaa

SEQ ID NO: 433251 - RNA, 23 nt, Artificial Sequence
  Synthetic
gaaaagacugaaguccccagaaa

SEQ ID NO: 433252 - RNA, 24 nt, Artificial Sequence
  Synthetic
agaaaagacugaaguccccagaaa

SEQ ID NO: 433253 - RNA, 18 nt, Artificial Sequence
  Synthetic
auaggggaaagccagaaa

SEQ ID NO: 433254 - RNA, 19 nt, Artificial Sequence
  Synthetic
uauaggggaaagccagaaa

SEQ ID NO: 433255 - RNA, 20 nt, Artificial Sequence
  Synthetic
auauaggggaaagccagaaa

SEQ ID NO: 433256 - RNA, 21 nt, Artificial Sequence
  Synthetic
uauauaggggaaagccagaaa

SEQ ID NO: 433257 - RNA, 22 nt, Artificial Sequence
  Synthetic
auauauaggggaaagccagaaa

SEQ ID NO: 433258 - RNA, 23 nt, Artificial Sequence
  Synthetic
gauauauaggggaaagccagaaa

SEQ ID NO: 433259 - RNA, 24 nt, Artificial Sequence
  Synthetic
ugauauauaggggaaagccagaaa

SEQ ID NO: 433260 - RNA, 18 nt, Artificial Sequence
  Synthetic
agggagagaugccagaaa

SEQ ID NO: 433261 - RNA, 19 nt, Artificial Sequence
  Synthetic
aagggagagaugccagaaa

SEQ ID NO: 433262 - RNA, 20 nt, Artificial Sequence
  Synthetic
aaagggagagaugccagaaa

SEQ ID NO: 433263 - RNA, 21 nt, Artificial Sequence
  Synthetic
uaaagggagagaugccagaaa

SEQ ID NO: 433264 - RNA, 22 nt, Artificial Sequence
  Synthetic
uuaaagggagagaugccagaaa

SEQ ID NO: 433265 - RNA, 23 nt, Artificial Sequence
  Synthetic
auuaaagggagagaugccagaaa

SEQ ID NO: 433266 - RNA, 24 nt, Artificial Sequence
  Synthetic
uauuaaagggagagaugccagaaa

SEQ ID NO: 433267 - RNA, 18 nt, Artificial Sequence
  Synthetic
gcucuaaaaauccagaaa

SEQ ID NO: 433268 - RNA, 19 nt, Artificial Sequence
  Synthetic
ugcucuaaaaauccagaaa

SEQ ID NO: 433269 - RNA, 20 nt, Artificial Sequence
  Synthetic
cugcucuaaaaauccagaaa

SEQ ID NO: 433270 - RNA, 21 nt, Artificial Sequence
  Synthetic
ucugcucuaaaaauccagaaa

SEQ ID NO: 433271 - RNA, 22 nt, Artificial Sequence
  Synthetic
aucugcucuaaaaauccagaaa

SEQ ID NO: 433272 - RNA, 23 nt, Artificial Sequence
  Synthetic
aaucugcucuaaaaauccagaaa

SEQ ID NO: 433273 - RNA, 24 nt, Artificial Sequence
  Synthetic
aaaucugcucuaaaaauccagaaa

SEQ ID NO: 433274 - RNA, 18 nt, Artificial Sequence
  Synthetic
ggauucagaauccagaaa

SEQ ID NO: 433275 - RNA, 19 nt, Artificial Sequence
  Synthetic
aggauucagaauccagaaa

SEQ ID NO: 433276 - RNA, 20 nt, Artificial Sequence
  Synthetic
gaggauucagaauccagaaa

SEQ ID NO: 433277 - RNA, 21 nt, Artificial Sequence
  Synthetic
ugaggauucagaauccagaaa

SEQ ID NO: 433278 - RNA, 22 nt, Artificial Sequence
  Synthetic
augaggauucagaauccagaaa

SEQ ID NO: 433279 - RNA, 23 nt, Artificial Sequence
  Synthetic
aaugaggauucagaauccagaaa

SEQ ID NO: 433280 - RNA, 24 nt, Artificial Sequence
  Synthetic
uaaugaggauucagaauccagaaa

SEQ ID NO: 433281 - RNA, 18 nt, Artificial Sequence
  Synthetic
caaggaaauauccagaaa

SEQ ID NO: 433282 - RNA, 19 nt, Artificial Sequence
  Synthetic
gcaaggaaauauccagaaa

SEQ ID NO: 433283 - RNA, 20 nt, Artificial Sequence
  Synthetic
agcaaggaaauauccagaaa

SEQ ID NO: 433284 - RNA, 21 nt, Artificial Sequence
  Synthetic
cagcaaggaaauauccagaaa

SEQ ID NO: 433285 - RNA, 22 nt, Artificial Sequence
  Synthetic
ccagcaaggaaauauccagaaa

SEQ ID NO: 433286 - RNA, 23 nt, Artificial Sequence
  Synthetic
accagcaaggaaauauccagaaa

SEQ ID NO: 433287 - RNA, 24 nt, Artificial Sequence
  Synthetic
gaccagcaaggaaauauccagaaa

SEQ ID NO: 433288 - RNA, 18 nt, Artificial Sequence
  Synthetic
cuuaaguaguuccagaaa

SEQ ID NO: 433289 - RNA, 19 nt, Artificial Sequence
  Synthetic
ccuuaaguaguuccagaaa

SEQ ID NO: 433290 - RNA, 20 nt, Artificial Sequence
  Synthetic
uccuuaaguaguuccagaaa

SEQ ID NO: 433291 - RNA, 21 nt, Artificial Sequence
  Synthetic
guccuuaaguaguuccagaaa

SEQ ID NO: 433292 - RNA, 22 nt, Artificial Sequence
  Synthetic
aguccuuaaguaguuccagaaa

SEQ ID NO: 433293 - RNA, 23 nt, Artificial Sequence
  Synthetic
caguccuuaaguaguuccagaaa

SEQ ID NO: 433294 - RNA, 24 nt, Artificial Sequence
  Synthetic
acaguccuuaaguaguuccagaaa

SEQ ID NO: 433295 - RNA, 18 nt, Artificial Sequence
  Synthetic
gcuuuaguaaagcagaaa

SEQ ID NO: 433296 - RNA, 19 nt, Artificial Sequence
  Synthetic
ugcuuuaguaaagcagaaa

SEQ ID NO: 433297 - RNA, 20 nt, Artificial Sequence
  Synthetic
cugcuuuaguaaagcagaaa

SEQ ID NO: 433298 - RNA, 21 nt, Artificial Sequence
  Synthetic
acugcuuuaguaaagcagaaa

SEQ ID NO: 433299 - RNA, 22 nt, Artificial Sequence
  Synthetic
gacugcuuuaguaaagcagaaa

SEQ ID NO: 433300 - RNA, 23 nt, Artificial Sequence
  Synthetic
ugacugcuuuaguaaagcagaaa

SEQ ID NO: 433301 - RNA, 24 nt, Artificial Sequence
  Synthetic
augacugcuuuaguaaagcagaaa

SEQ ID NO: 433302 - RNA, 18 nt, Artificial Sequence
  Synthetic
uuugaacagaagcagaaa

SEQ ID NO: 433303 - RNA, 19 nt, Artificial Sequence
  Synthetic
uuuugaacagaagcagaaa

SEQ ID NO: 433304 - RNA, 20 nt, Artificial Sequence
  Synthetic
guuuugaacagaagcagaaa

SEQ ID NO: 433305 - RNA, 21 nt, Artificial Sequence
  Synthetic
gguuuugaacagaagcagaaa

SEQ ID NO: 433306 - RNA, 22 nt, Artificial Sequence
  Synthetic
ggguuuugaacagaagcagaaa

SEQ ID NO: 433307 - RNA, 23 nt, Artificial Sequence
  Synthetic
gggguuuugaacagaagcagaaa

SEQ ID NO: 433308 - RNA, 24 nt, Artificial Sequence
  Synthetic
ggggguuuugaacagaagcagaaa

SEQ ID NO: 433309 - RNA, 18 nt, Artificial Sequence
  Synthetic
accauauuccagcagaaa

SEQ ID NO: 433310 - RNA, 19 nt, Artificial Sequence
  Synthetic
gaccauauuccagcagaaa

SEQ ID NO: 433311 - RNA, 20 nt, Artificial Sequence
  Synthetic
agaccauauuccagcagaaa

SEQ ID NO: 433312 - RNA, 21 nt, Artificial Sequence
  Synthetic
gagaccauauuccagcagaaa

SEQ ID NO: 433313 - RNA, 22 nt, Artificial Sequence
  Synthetic
agagaccauauuccagcagaaa

SEQ ID NO: 433314 - RNA, 23 nt, Artificial Sequence
  Synthetic
gagagaccauauuccagcagaaa

SEQ ID NO: 433315 - RNA, 24 nt, Artificial Sequence
  Synthetic
agagagaccauauuccagcagaaa

SEQ ID NO: 433316 - RNA, 18 nt, Artificial Sequence
  Synthetic
guuguacagcagcagaaa

SEQ ID NO: 433317 - RNA, 19 nt, Artificial Sequence
  Synthetic
gguuguacagcagcagaaa

SEQ ID NO: 433318 - RNA, 20 nt, Artificial Sequence
  Synthetic
ugguuguacagcagcagaaa

SEQ ID NO: 433319 - RNA, 21 nt, Artificial Sequence
  Synthetic
augguuguacagcagcagaaa

SEQ ID NO: 433320 - RNA, 22 nt, Artificial Sequence
  Synthetic
aaugguuguacagcagcagaaa

SEQ ID NO: 433321 - RNA, 23 nt, Artificial Sequence
  Synthetic
gaaugguuguacagcagcagaaa

SEQ ID NO: 433322 - RNA, 24 nt, Artificial Sequence
  Synthetic
ugaaugguuguacagcagcagaaa

SEQ ID NO: 433323 - RNA, 18 nt, Artificial Sequence
  Synthetic
aggaacuggaggcagaaa

SEQ ID NO: 433324 - RNA, 19 nt, Artificial Sequence
  Synthetic
aaggaacuggaggcagaaa

SEQ ID NO: 433325 - RNA, 20 nt, Artificial Sequence
  Synthetic
aaaggaacuggaggcagaaa

SEQ ID NO: 433326 - RNA, 21 nt, Artificial Sequence
  Synthetic
gaaaggaacuggaggcagaaa

SEQ ID NO: 433327 - RNA, 22 nt, Artificial Sequence
  Synthetic
agaaaggaacuggaggcagaaa

SEQ ID NO: 433328 - RNA, 23 nt, Artificial Sequence
  Synthetic
gagaaaggaacuggaggcagaaa

SEQ ID NO: 433329 - RNA, 24 nt, Artificial Sequence
  Synthetic
ugagaaaggaacuggaggcagaaa

SEQ ID NO: 433330 - RNA, 18 nt, Artificial Sequence
  Synthetic
aaggcuuuuaggcagaaa

SEQ ID NO: 433331 - RNA, 19 nt, Artificial Sequence
  Synthetic
gaaggcuuuuaggcagaaa

SEQ ID NO: 433332 - RNA, 20 nt, Artificial Sequence
  Synthetic
ugaaggcuuuuaggcagaaa

SEQ ID NO: 433333 - RNA, 21 nt, Artificial Sequence
  Synthetic
cugaaggcuuuuaggcagaaa

SEQ ID NO: 433334 - RNA, 22 nt, Artificial Sequence
  Synthetic
acugaaggcuuuuaggcagaaa

SEQ ID NO: 433335 - RNA, 23 nt, Artificial Sequence
  Synthetic
uacugaaggcuuuuaggcagaaa

SEQ ID NO: 433336 - RNA, 24 nt, Artificial Sequence
  Synthetic
uuacugaaggcuuuuaggcagaaa

SEQ ID NO: 433337 - RNA, 18 nt, Artificial Sequence
  Synthetic
aggagucaguggcagaaa

SEQ ID NO: 433338 - RNA, 19 nt, Artificial Sequence
  Synthetic
gaggagucaguggcagaaa

SEQ ID NO: 433339 - RNA, 20 nt, Artificial Sequence
  Synthetic
ggaggagucaguggcagaaa

SEQ ID NO: 433340 - RNA, 21 nt, Artificial Sequence
  Synthetic
aggaggagucaguggcagaaa

SEQ ID NO: 433341 - RNA, 22 nt, Artificial Sequence
  Synthetic
gaggaggagucaguggcagaaa

SEQ ID NO: 433342 - RNA, 23 nt, Artificial Sequence
  Synthetic
ugaggaggagucaguggcagaaa

SEQ ID NO: 433343 - RNA, 24 nt, Artificial Sequence
  Synthetic
uugaggaggagucaguggcagaaa

SEQ ID NO: 433344 - RNA, 18 nt, Artificial Sequence
  Synthetic
gcuggccauaugcagaaa

SEQ ID NO: 433345 - RNA, 19 nt, Artificial Sequence
  Synthetic
ggcuggccauaugcagaaa

SEQ ID NO: 433346 - RNA, 20 nt, Artificial Sequence
  Synthetic
uggcuggccauaugcagaaa

SEQ ID NO: 433347 - RNA, 21 nt, Artificial Sequence
  Synthetic
cuggcuggccauaugcagaaa

SEQ ID NO: 433348 - RNA, 22 nt, Artificial Sequence
  Synthetic
acuggcuggccauaugcagaaa

SEQ ID NO: 433349 - RNA, 23 nt, Artificial Sequence
  Synthetic
aacuggcuggccauaugcagaaa

SEQ ID NO: 433350 - RNA, 24 nt, Artificial Sequence
  Synthetic
aaacuggcuggccauaugcagaaa

SEQ ID NO: 433351 - RNA, 18 nt, Artificial Sequence
  Synthetic
gcuagucauaugcagaaa

SEQ ID NO: 433352 - RNA, 19 nt, Artificial Sequence
  Synthetic
ggcuagucauaugcagaaa

SEQ ID NO: 433353 - RNA, 20 nt, Artificial Sequence
  Synthetic
uggcuagucauaugcagaaa

SEQ ID NO: 433354 - RNA, 21 nt, Artificial Sequence
  Synthetic
cuggcuagucauaugcagaaa

SEQ ID NO: 433355 - RNA, 22 nt, Artificial Sequence
  Synthetic
acuggcuagucauaugcagaaa

SEQ ID NO: 433356 - RNA, 23 nt, Artificial Sequence
  Synthetic
aacuggcuagucauaugcagaaa

SEQ ID NO: 433357 - RNA, 24 nt, Artificial Sequence
  Synthetic
aaacuggcuagucauaugcagaaa

SEQ ID NO: 433358 - RNA, 18 nt, Artificial Sequence
  Synthetic
acuugaugagugcagaaa

SEQ ID NO: 433359 - RNA, 19 nt, Artificial Sequence
  Synthetic
uacuugaugagugcagaaa

SEQ ID NO: 433360 - RNA, 20 nt, Artificial Sequence
  Synthetic
uuacuugaugagugcagaaa

SEQ ID NO: 433361 - RNA, 21 nt, Artificial Sequence
  Synthetic
uuuacuugaugagugcagaaa

SEQ ID NO: 433362 - RNA, 22 nt, Artificial Sequence
  Synthetic
uuuuacuugaugagugcagaaa

SEQ ID NO: 433363 - RNA, 23 nt, Artificial Sequence
  Synthetic
cuuuuacuugaugagugcagaaa

SEQ ID NO: 433364 - RNA, 24 nt, Artificial Sequence
  Synthetic
acuuuuacuugaugagugcagaaa

SEQ ID NO: 433365 - RNA, 18 nt, Artificial Sequence
  Synthetic
aaaagaauugugcagaaa

SEQ ID NO: 433366 - RNA, 19 nt, Artificial Sequence
  Synthetic
caaaagaauugugcagaaa

SEQ ID NO: 433367 - RNA, 20 nt, Artificial Sequence
  Synthetic
acaaaagaauugugcagaaa

SEQ ID NO: 433368 - RNA, 21 nt, Artificial Sequence
  Synthetic
gacaaaagaauugugcagaaa

SEQ ID NO: 433369 - RNA, 22 nt, Artificial Sequence
  Synthetic
cgacaaaagaauugugcagaaa

SEQ ID NO: 433370 - RNA, 23 nt, Artificial Sequence
  Synthetic
acgacaaaagaauugugcagaaa

SEQ ID NO: 433371 - RNA, 24 nt, Artificial Sequence
  Synthetic
gacgacaaaagaauugugcagaaa

SEQ ID NO: 433372 - RNA, 18 nt, Artificial Sequence
  Synthetic
gguguaugacaucagaaa

SEQ ID NO: 433373 - RNA, 19 nt, Artificial Sequence
  Synthetic
agguguaugacaucagaaa

SEQ ID NO: 433374 - RNA, 20 nt, Artificial Sequence
  Synthetic
gagguguaugacaucagaaa

SEQ ID NO: 433375 - RNA, 21 nt, Artificial Sequence
  Synthetic
agagguguaugacaucagaaa

SEQ ID NO: 433376 - RNA, 22 nt, Artificial Sequence
  Synthetic
cagagguguaugacaucagaaa

SEQ ID NO: 433377 - RNA, 23 nt, Artificial Sequence
  Synthetic
ccagagguguaugacaucagaaa

SEQ ID NO: 433378 - RNA, 24 nt, Artificial Sequence
  Synthetic
uccagagguguaugacaucagaaa

SEQ ID NO: 433379 - RNA, 18 nt, Artificial Sequence
  Synthetic
aaaaaaacccaucagaaa

SEQ ID NO: 433380 - RNA, 19 nt, Artificial Sequence
  Synthetic
aaaaaaaacccaucagaaa

SEQ ID NO: 433381 - RNA, 20 nt, Artificial Sequence
  Synthetic
aaaaaaaaacccaucagaaa

SEQ ID NO: 433382 - RNA, 21 nt, Artificial Sequence
  Synthetic
aaaaaaaaaacccaucagaaa

SEQ ID NO: 433383 - RNA, 22 nt, Artificial Sequence
  Synthetic
aaaaaaaaaaacccaucagaaa

SEQ ID NO: 433384 - RNA, 23 nt, Artificial Sequence
  Synthetic
gaaaaaaaaaaacccaucagaaa

SEQ ID NO: 433385 - RNA, 24 nt, Artificial Sequence
  Synthetic
agaaaaaaaaaaacccaucagaaa

SEQ ID NO: 433386 - RNA, 18 nt, Artificial Sequence
  Synthetic
aaaagaccccaucagaaa

SEQ ID NO: 433387 - RNA, 19 nt, Artificial Sequence
  Synthetic
aaaaagaccccaucagaaa

SEQ ID NO: 433388 - RNA, 20 nt, Artificial Sequence
  Synthetic
aaaaaagaccccaucagaaa

SEQ ID NO: 433389 - RNA, 21 nt, Artificial Sequence
  Synthetic
aaaaaaagaccccaucagaaa

SEQ ID NO: 433390 - RNA, 22 nt, Artificial Sequence
  Synthetic
aaaaaaaagaccccaucagaaa

SEQ ID NO: 433391 - RNA, 23 nt, Artificial Sequence
  Synthetic
gaaaaaaaagaccccaucagaaa

SEQ ID NO: 433392 - RNA, 24 nt, Artificial Sequence
  Synthetic
agaaaaaaaagaccccaucagaaa

SEQ ID NO: 433393 - RNA, 18 nt, Artificial Sequence
  Synthetic
guuaccagagaucagaaa

SEQ ID NO: 433394 - RNA, 19 nt, Artificial Sequence
  Synthetic
gguuaccagagaucagaaa

SEQ ID NO: 433395 - RNA, 20 nt, Artificial Sequence
  Synthetic
ugguuaccagagaucagaaa

SEQ ID NO: 433396 - RNA, 21 nt, Artificial Sequence
  Synthetic
gugguuaccagagaucagaaa

SEQ ID NO: 433397 - RNA, 22 nt, Artificial Sequence
  Synthetic
ggugguuaccagagaucagaaa

SEQ ID NO: 433398 - RNA, 23 nt, Artificial Sequence
  Synthetic
uggugguuaccagagaucagaaa

SEQ ID NO: 433399 - RNA, 24 nt, Artificial Sequence
  Synthetic
uuggugguuaccagagaucagaaa

SEQ ID NO: 433400 - RNA, 18 nt, Artificial Sequence
  Synthetic
cuaucucucuaucagaaa

SEQ ID NO: 433401 - RNA, 19 nt, Artificial Sequence
  Synthetic
ccuaucucucuaucagaaa

SEQ ID NO: 433402 - RNA, 20 nt, Artificial Sequence
  Synthetic
accuaucucucuaucagaaa

SEQ ID NO: 433403 - RNA, 21 nt, Artificial Sequence
  Synthetic
aaccuaucucucuaucagaaa

SEQ ID NO: 433404 - RNA, 22 nt, Artificial Sequence
  Synthetic
aaaccuaucucucuaucagaaa

SEQ ID NO: 433405 - RNA, 23 nt, Artificial Sequence
  Synthetic
aaaaccuaucucucuaucagaaa

SEQ ID NO: 433406 - RNA, 24 nt, Artificial Sequence
  Synthetic
gaaaaccuaucucucuaucagaaa

SEQ ID NO: 433407 - RNA, 18 nt, Artificial Sequence
  Synthetic
agcuaaguuccucagaaa

SEQ ID NO: 433408 - RNA, 19 nt, Artificial Sequence
  Synthetic
cagcuaaguuccucagaaa

SEQ ID NO: 433409 - RNA, 20 nt, Artificial Sequence
  Synthetic
gcagcuaaguuccucagaaa

SEQ ID NO: 433410 - RNA, 21 nt, Artificial Sequence
  Synthetic
ugcagcuaaguuccucagaaa

SEQ ID NO: 433411 - RNA, 22 nt, Artificial Sequence
  Synthetic
uugcagcuaaguuccucagaaa

SEQ ID NO: 433412 - RNA, 23 nt, Artificial Sequence
  Synthetic
auugcagcuaaguuccucagaaa

SEQ ID NO: 433413 - RNA, 24 nt, Artificial Sequence
  Synthetic
aauugcagcuaaguuccucagaaa

SEQ ID NO: 433414 - RNA, 18 nt, Artificial Sequence
  Synthetic
auaaauaauauucagaaa

SEQ ID NO: 433415 - RNA, 19 nt, Artificial Sequence
  Synthetic
aauaaauaauauucagaaa

SEQ ID NO: 433416 - RNA, 20 nt, Artificial Sequence
  Synthetic
aaauaaauaauauucagaaa

SEQ ID NO: 433417 - RNA, 21 nt, Artificial Sequence
  Synthetic
uaaauaaauaauauucagaaa

SEQ ID NO: 433418 - RNA, 22 nt, Artificial Sequence
  Synthetic
uuaaauaaauaauauucagaaa

SEQ ID NO: 433419 - RNA, 23 nt, Artificial Sequence
  Synthetic
uuuaaauaaauaauauucagaaa

SEQ ID NO: 433420 - RNA, 24 nt, Artificial Sequence
  Synthetic
auuuaaauaaauaauauucagaaa

SEQ ID NO: 433421 - RNA, 18 nt, Artificial Sequence
  Synthetic
uagcuacacaaagagaaa

SEQ ID NO: 433422 - RNA, 19 nt, Artificial Sequence
  Synthetic
cuagcuacacaaagagaaa

SEQ ID NO: 433423 - RNA, 20 nt, Artificial Sequence
  Synthetic
ccuagcuacacaaagagaaa

SEQ ID NO: 433424 - RNA, 21 nt, Artificial Sequence
  Synthetic
accuagcuacacaaagagaaa

SEQ ID NO: 433425 - RNA, 22 nt, Artificial Sequence
  Synthetic
caccuagcuacacaaagagaaa

SEQ ID NO: 433426 - RNA, 23 nt, Artificial Sequence
  Synthetic
gcaccuagcuacacaaagagaaa

SEQ ID NO: 433427 - RNA, 24 nt, Artificial Sequence
  Synthetic
agcaccuagcuacacaaagagaaa

SEQ ID NO: 433428 - RNA, 18 nt, Artificial Sequence
  Synthetic
uacacuuucaaagagaaa

SEQ ID NO: 433429 - RNA, 19 nt, Artificial Sequence
  Synthetic
guacacuuucaaagagaaa

SEQ ID NO: 433430 - RNA, 20 nt, Artificial Sequence
  Synthetic
uguacacuuucaaagagaaa

SEQ ID NO: 433431 - RNA, 21 nt, Artificial Sequence
  Synthetic
auguacacuuucaaagagaaa

SEQ ID NO: 433432 - RNA, 22 nt, Artificial Sequence
  Synthetic
aauguacacuuucaaagagaaa

SEQ ID NO: 433433 - RNA, 23 nt, Artificial Sequence
  Synthetic
uaauguacacuuucaaagagaaa

SEQ ID NO: 433434 - RNA, 24 nt, Artificial Sequence
  Synthetic
auaauguacacuuucaaagagaaa

SEQ ID NO: 433435 - RNA, 18 nt, Artificial Sequence
  Synthetic
ugagcucauaaagagaaa

SEQ ID NO: 433436 - RNA, 19 nt, Artificial Sequence
  Synthetic
gugagcucauaaagagaaa

SEQ ID NO: 433437 - RNA, 20 nt, Artificial Sequence
  Synthetic
ugugagcucauaaagagaaa

SEQ ID NO: 433438 - RNA, 21 nt, Artificial Sequence
  Synthetic
cugugagcucauaaagagaaa

SEQ ID NO: 433439 - RNA, 22 nt, Artificial Sequence
  Synthetic
acugugagcucauaaagagaaa

SEQ ID NO: 433440 - RNA, 23 nt, Artificial Sequence
  Synthetic
gacugugagcucauaaagagaaa

SEQ ID NO: 433441 - RNA, 24 nt, Artificial Sequence
  Synthetic
agacugugagcucauaaagagaaa

SEQ ID NO: 433442 - RNA, 18 nt, Artificial Sequence
  Synthetic
ugcagauuacaagagaaa

SEQ ID NO: 433443 - RNA, 19 nt, Artificial Sequence
  Synthetic
augcagauuacaagagaaa

SEQ ID NO: 433444 - RNA, 20 nt, Artificial Sequence
  Synthetic
aaugcagauuacaagagaaa

SEQ ID NO: 433445 - RNA, 21 nt, Artificial Sequence
  Synthetic
caaugcagauuacaagagaaa

SEQ ID NO: 433446 - RNA, 22 nt, Artificial Sequence
  Synthetic
ucaaugcagauuacaagagaaa

SEQ ID NO: 433447 - RNA, 23 nt, Artificial Sequence
  Synthetic
aucaaugcagauuacaagagaaa

SEQ ID NO: 433448 - RNA, 24 nt, Artificial Sequence
  Synthetic
aaucaaugcagauuacaagagaaa

SEQ ID NO: 433449 - RNA, 18 nt, Artificial Sequence
  Synthetic
uuuauccuagaagagaaa

SEQ ID NO: 433450 - RNA, 19 nt, Artificial Sequence
  Synthetic
uuuuauccuagaagagaaa

SEQ ID NO: 433451 - RNA, 20 nt, Artificial Sequence
  Synthetic
cuuuuauccuagaagagaaa

SEQ ID NO: 433452 - RNA, 21 nt, Artificial Sequence
  Synthetic
gcuuuuauccuagaagagaaa

SEQ ID NO: 433453 - RNA, 22 nt, Artificial Sequence
  Synthetic
agcuuuuauccuagaagagaaa

SEQ ID NO: 433454 - RNA, 23 nt, Artificial Sequence
  Synthetic
uagcuuuuauccuagaagagaaa

SEQ ID NO: 433455 - RNA, 24 nt, Artificial Sequence
  Synthetic
uuagcuuuuauccuagaagagaaa

SEQ ID NO: 433456 - RNA, 18 nt, Artificial Sequence
  Synthetic
gcaagacaggaagagaaa

SEQ ID NO: 433457 - RNA, 19 nt, Artificial Sequence
  Synthetic
agcaagacaggaagagaaa

SEQ ID NO: 433458 - RNA, 20 nt, Artificial Sequence
  Synthetic
aagcaagacaggaagagaaa

SEQ ID NO: 433459 - RNA, 21 nt, Artificial Sequence
  Synthetic
aaagcaagacaggaagagaaa

SEQ ID NO: 433460 - RNA, 22 nt, Artificial Sequence
  Synthetic
gaaagcaagacaggaagagaaa

SEQ ID NO: 433461 - RNA, 23 nt, Artificial Sequence
  Synthetic
ggaaagcaagacaggaagagaaa

SEQ ID NO: 433462 - RNA, 24 nt, Artificial Sequence
  Synthetic
gggaaagcaagacaggaagagaaa

SEQ ID NO: 433463 - RNA, 18 nt, Artificial Sequence
  Synthetic
aagaauuuuuaagagaaa

SEQ ID NO: 433464 - RNA, 19 nt, Artificial Sequence
  Synthetic
aaagaauuuuuaagagaaa

SEQ ID NO: 433465 - RNA, 20 nt, Artificial Sequence
  Synthetic
uaaagaauuuuuaagagaaa

SEQ ID NO: 433466 - RNA, 21 nt, Artificial Sequence
  Synthetic
cuaaagaauuuuuaagagaaa

SEQ ID NO: 433467 - RNA, 22 nt, Artificial Sequence
  Synthetic
ucuaaagaauuuuuaagagaaa

SEQ ID NO: 433468 - RNA, 23 nt, Artificial Sequence
  Synthetic
uucuaaagaauuuuuaagagaaa

SEQ ID NO: 433469 - RNA, 24 nt, Artificial Sequence
  Synthetic
guucuaaagaauuuuuaagagaaa

SEQ ID NO: 433470 - RNA, 18 nt, Artificial Sequence
  Synthetic
accaggcagacagagaaa

SEQ ID NO: 433471 - RNA, 19 nt, Artificial Sequence
  Synthetic
uaccaggcagacagagaaa

SEQ ID NO: 433472 - RNA, 20 nt, Artificial Sequence
  Synthetic
uuaccaggcagacagagaaa

SEQ ID NO: 433473 - RNA, 21 nt, Artificial Sequence
  Synthetic
cuuaccaggcagacagagaaa

SEQ ID NO: 433474 - RNA, 22 nt, Artificial Sequence
  Synthetic
ucuuaccaggcagacagagaaa

SEQ ID NO: 433475 - RNA, 23 nt, Artificial Sequence
  Synthetic
uucuuaccaggcagacagagaaa

SEQ ID NO: 433476 - RNA, 24 nt, Artificial Sequence
  Synthetic
cuucuuaccaggcagacagagaaa

SEQ ID NO: 433477 - RNA, 18 nt, Artificial Sequence
  Synthetic
aaauagaugacagagaaa

SEQ ID NO: 433478 - RNA, 19 nt, Artificial Sequence
  Synthetic
uaaauagaugacagagaaa

SEQ ID NO: 433479 - RNA, 20 nt, Artificial Sequence
  Synthetic
auaaauagaugacagagaaa

SEQ ID NO: 433480 - RNA, 21 nt, Artificial Sequence
  Synthetic
gauaaauagaugacagagaaa

SEQ ID NO: 433481 - RNA, 22 nt, Artificial Sequence
  Synthetic
ugauaaauagaugacagagaaa

SEQ ID NO: 433482 - RNA, 23 nt, Artificial Sequence
  Synthetic
augauaaauagaugacagagaaa

SEQ ID NO: 433483 - RNA, 24 nt, Artificial Sequence
  Synthetic
gaugauaaauagaugacagagaaa

SEQ ID NO: 433484 - RNA, 18 nt, Artificial Sequence
  Synthetic
augucaaacucagagaaa

SEQ ID NO: 433485 - RNA, 19 nt, Artificial Sequence
  Synthetic
aaugucaaacucagagaaa

SEQ ID NO: 433486 - RNA, 20 nt, Artificial Sequence
  Synthetic
aaaugucaaacucagagaaa

SEQ ID NO: 433487 - RNA, 21 nt, Artificial Sequence
  Synthetic
aaaaugucaaacucagagaaa

SEQ ID NO: 433488 - RNA, 22 nt, Artificial Sequence
  Synthetic
aaaaaugucaaacucagagaaa

SEQ ID NO: 433489 - RNA, 23 nt, Artificial Sequence
  Synthetic
uaaaaaugucaaacucagagaaa

SEQ ID NO: 433490 - RNA, 24 nt, Artificial Sequence
  Synthetic
cuaaaaaugucaaacucagagaaa

SEQ ID NO: 433491 - RNA, 18 nt, Artificial Sequence
  Synthetic
cuggagagaagagagaaa

SEQ ID NO: 433492 - RNA, 19 nt, Artificial Sequence
  Synthetic
gcuggagagaagagagaaa

SEQ ID NO: 433493 - RNA, 20 nt, Artificial Sequence
  Synthetic
ugcuggagagaagagagaaa

SEQ ID NO: 433494 - RNA, 21 nt, Artificial Sequence
  Synthetic
augcuggagagaagagagaaa

SEQ ID NO: 433495 - RNA, 22 nt, Artificial Sequence
  Synthetic
gaugcuggagagaagagagaaa

SEQ ID NO: 433496 - RNA, 23 nt, Artificial Sequence
  Synthetic
agaugcuggagagaagagagaaa

SEQ ID NO: 433497 - RNA, 24 nt, Artificial Sequence
  Synthetic
uagaugcuggagagaagagagaaa

SEQ ID NO: 433498 - RNA, 18 nt, Artificial Sequence
  Synthetic
gaugggaagagagagaaa

SEQ ID NO: 433499 - RNA, 19 nt, Artificial Sequence
  Synthetic
ggaugggaagagagagaaa

SEQ ID NO: 433500 - RNA, 20 nt, Artificial Sequence
  Synthetic
cggaugggaagagagagaaa

SEQ ID NO: 433501 - RNA, 21 nt, Artificial Sequence
  Synthetic
gcggaugggaagagagagaaa

SEQ ID NO: 433502 - RNA, 22 nt, Artificial Sequence
  Synthetic
agcggaugggaagagagagaaa

SEQ ID NO: 433503 - RNA, 23 nt, Artificial Sequence
  Synthetic
uagcggaugggaagagagagaaa

SEQ ID NO: 433504 - RNA, 24 nt, Artificial Sequence
  Synthetic
cuagcggaugggaagagagagaaa

SEQ ID NO: 433505 - RNA, 18 nt, Artificial Sequence
  Synthetic
caaaaagugagagagaaa

SEQ ID NO: 433506 - RNA, 19 nt, Artificial Sequence
  Synthetic
ucaaaaagugagagagaaa

SEQ ID NO: 433507 - RNA, 20 nt, Artificial Sequence
  Synthetic
uucaaaaagugagagagaaa

SEQ ID NO: 433508 - RNA, 21 nt, Artificial Sequence
  Synthetic
auucaaaaagugagagagaaa

SEQ ID NO: 433509 - RNA, 22 nt, Artificial Sequence
  Synthetic
aauucaaaaagugagagagaaa

SEQ ID NO: 433510 - RNA, 23 nt, Artificial Sequence
  Synthetic
uaauucaaaaagugagagagaaa

SEQ ID NO: 433511 - RNA, 24 nt, Artificial Sequence
  Synthetic
auaauucaaaaagugagagagaaa

SEQ ID NO: 433512 - RNA, 18 nt, Artificial Sequence
  Synthetic
ugcugagauagagagaaa

SEQ ID NO: 433513 - RNA, 19 nt, Artificial Sequence
  Synthetic
gugcugagauagagagaaa

SEQ ID NO: 433514 - RNA, 20 nt, Artificial Sequence
  Synthetic
ugugcugagauagagagaaa

SEQ ID NO: 433515 - RNA, 21 nt, Artificial Sequence
  Synthetic
augugcugagauagagagaaa

SEQ ID NO: 433516 - RNA, 22 nt, Artificial Sequence
  Synthetic
uaugugcugagauagagagaaa

SEQ ID NO: 433517 - RNA, 23 nt, Artificial Sequence
  Synthetic
auaugugcugagauagagagaaa

SEQ ID NO: 433518 - RNA, 24 nt, Artificial Sequence
  Synthetic
uauaugugcugagauagagagaaa

SEQ ID NO: 433519 - RNA, 18 nt, Artificial Sequence
  Synthetic
cauaggcauggagagaaa

SEQ ID NO: 433520 - RNA, 19 nt, Artificial Sequence
  Synthetic
acauaggcauggagagaaa

SEQ ID NO: 433521 - RNA, 20 nt, Artificial Sequence
  Synthetic
cacauaggcauggagagaaa

SEQ ID NO: 433522 - RNA, 21 nt, Artificial Sequence
  Synthetic
acacauaggcauggagagaaa

SEQ ID NO: 433523 - RNA, 22 nt, Artificial Sequence
  Synthetic
aacacauaggcauggagagaaa

SEQ ID NO: 433524 - RNA, 23 nt, Artificial Sequence
  Synthetic
caacacauaggcauggagagaaa

SEQ ID NO: 433525 - RNA, 24 nt, Artificial Sequence
  Synthetic
acaacacauaggcauggagagaaa

SEQ ID NO: 433526 - RNA, 18 nt, Artificial Sequence
  Synthetic
uacaauucaauagagaaa

SEQ ID NO: 433527 - RNA, 19 nt, Artificial Sequence
  Synthetic
uuacaauucaauagagaaa

SEQ ID NO: 433528 - RNA, 20 nt, Artificial Sequence
  Synthetic
uuuacaauucaauagagaaa

SEQ ID NO: 433529 - RNA, 21 nt, Artificial Sequence
  Synthetic
auuuacaauucaauagagaaa

SEQ ID NO: 433530 - RNA, 22 nt, Artificial Sequence
  Synthetic
uauuuacaauucaauagagaaa

SEQ ID NO: 433531 - RNA, 23 nt, Artificial Sequence
  Synthetic
cuauuuacaauucaauagagaaa

SEQ ID NO: 433532 - RNA, 24 nt, Artificial Sequence
  Synthetic
gcuauuuacaauucaauagagaaa

SEQ ID NO: 433533 - RNA, 18 nt, Artificial Sequence
  Synthetic
agaaagaggguagagaaa

SEQ ID NO: 433534 - RNA, 19 nt, Artificial Sequence
  Synthetic
cagaaagaggguagagaaa

SEQ ID NO: 433535 - RNA, 20 nt, Artificial Sequence
  Synthetic
acagaaagaggguagagaaa

SEQ ID NO: 433536 - RNA, 21 nt, Artificial Sequence
  Synthetic
uacagaaagaggguagagaaa

SEQ ID NO: 433537 - RNA, 22 nt, Artificial Sequence
  Synthetic
auacagaaagaggguagagaaa

SEQ ID NO: 433538 - RNA, 23 nt, Artificial Sequence
  Synthetic
gauacagaaagaggguagagaaa

SEQ ID NO: 433539 - RNA, 24 nt, Artificial Sequence
  Synthetic
agauacagaaagaggguagagaaa

SEQ ID NO: 433540 - RNA, 18 nt, Artificial Sequence
  Synthetic
gggcugcuccccgagaaa

SEQ ID NO: 433541 - RNA, 19 nt, Artificial Sequence
  Synthetic
ggggcugcuccccgagaaa

SEQ ID NO: 433542 - RNA, 20 nt, Artificial Sequence
  Synthetic
uggggcugcuccccgagaaa

SEQ ID NO: 433543 - RNA, 21 nt, Artificial Sequence
  Synthetic
auggggcugcuccccgagaaa

SEQ ID NO: 433544 - RNA, 22 nt, Artificial Sequence
  Synthetic
cauggggcugcuccccgagaaa

SEQ ID NO: 433545 - RNA, 23 nt, Artificial Sequence
  Synthetic
gcauggggcugcuccccgagaaa

SEQ ID NO: 433546 - RNA, 24 nt, Artificial Sequence
  Synthetic
agcauggggcugcuccccgagaaa

SEQ ID NO: 433547 - RNA, 18 nt, Artificial Sequence
  Synthetic
cgcauuuuggaggagaaa

SEQ ID NO: 433548 - RNA, 19 nt, Artificial Sequence
  Synthetic
acgcauuuuggaggagaaa

SEQ ID NO: 433549 - RNA, 20 nt, Artificial Sequence
  Synthetic
cacgcauuuuggaggagaaa

SEQ ID NO: 433550 - RNA, 21 nt, Artificial Sequence
  Synthetic
acacgcauuuuggaggagaaa

SEQ ID NO: 433551 - RNA, 22 nt, Artificial Sequence
  Synthetic
aacacgcauuuuggaggagaaa

SEQ ID NO: 433552 - RNA, 23 nt, Artificial Sequence
  Synthetic
caacacgcauuuuggaggagaaa

SEQ ID NO: 433553 - RNA, 24 nt, Artificial Sequence
  Synthetic
ucaacacgcauuuuggaggagaaa

SEQ ID NO: 433554 - RNA, 18 nt, Artificial Sequence
  Synthetic
ccaaauccaagggagaaa

SEQ ID NO: 433555 - RNA, 19 nt, Artificial Sequence
  Synthetic
uccaaauccaagggagaaa

SEQ ID NO: 433556 - RNA, 20 nt, Artificial Sequence
  Synthetic
cuccaaauccaagggagaaa

SEQ ID NO: 433557 - RNA, 21 nt, Artificial Sequence
  Synthetic
ucuccaaauccaagggagaaa

SEQ ID NO: 433558 - RNA, 22 nt, Artificial Sequence
  Synthetic
uucuccaaauccaagggagaaa

SEQ ID NO: 433559 - RNA, 23 nt, Artificial Sequence
  Synthetic
uuucuccaaauccaagggagaaa

SEQ ID NO: 433560 - RNA, 24 nt, Artificial Sequence
  Synthetic
uuuucuccaaauccaagggagaaa

SEQ ID NO: 433561 - RNA, 18 nt, Artificial Sequence
  Synthetic
ggguggccaggggagaaa

SEQ ID NO: 433562 - RNA, 19 nt, Artificial Sequence
  Synthetic
aggguggccaggggagaaa

SEQ ID NO: 433563 - RNA, 20 nt, Artificial Sequence
  Synthetic
uaggguggccaggggagaaa

SEQ ID NO: 433564 - RNA, 21 nt, Artificial Sequence
  Synthetic
uuaggguggccaggggagaaa

SEQ ID NO: 433565 - RNA, 22 nt, Artificial Sequence
  Synthetic
auuaggguggccaggggagaaa

SEQ ID NO: 433566 - RNA, 23 nt, Artificial Sequence
  Synthetic
uauuaggguggccaggggagaaa

SEQ ID NO: 433567 - RNA, 24 nt, Artificial Sequence
  Synthetic
cuauuaggguggccaggggagaaa

SEQ ID NO: 433568 - RNA, 18 nt, Artificial Sequence
  Synthetic
agagaauggggggagaaa

SEQ ID NO: 433569 - RNA, 19 nt, Artificial Sequence
  Synthetic
aagagaauggggggagaaa

SEQ ID NO: 433570 - RNA, 20 nt, Artificial Sequence
  Synthetic
uaagagaauggggggagaaa

SEQ ID NO: 433571 - RNA, 21 nt, Artificial Sequence
  Synthetic
guaagagaauggggggagaaa

SEQ ID NO: 433572 - RNA, 22 nt, Artificial Sequence
  Synthetic
gguaagagaauggggggagaaa

SEQ ID NO: 433573 - RNA, 23 nt, Artificial Sequence
  Synthetic
agguaagagaauggggggagaaa

SEQ ID NO: 433574 - RNA, 24 nt, Artificial Sequence
  Synthetic
gagguaagagaauggggggagaaa

SEQ ID NO: 433575 - RNA, 18 nt, Artificial Sequence
  Synthetic
aagagccacauggagaaa

SEQ ID NO: 433576 - RNA, 19 nt, Artificial Sequence
  Synthetic
aaagagccacauggagaaa

SEQ ID NO: 433577 - RNA, 20 nt, Artificial Sequence
  Synthetic
aaaagagccacauggagaaa

SEQ ID NO: 433578 - RNA, 21 nt, Artificial Sequence
  Synthetic
gaaaagagccacauggagaaa

SEQ ID NO: 433579 - RNA, 22 nt, Artificial Sequence
  Synthetic
cgaaaagagccacauggagaaa

SEQ ID NO: 433580 - RNA, 23 nt, Artificial Sequence
  Synthetic
acgaaaagagccacauggagaaa

SEQ ID NO: 433581 - RNA, 24 nt, Artificial Sequence
  Synthetic
aacgaaaagagccacauggagaaa

SEQ ID NO: 433582 - RNA, 18 nt, Artificial Sequence
  Synthetic
ggcaagaauauggagaaa

SEQ ID NO: 433583 - RNA, 19 nt, Artificial Sequence
  Synthetic
uggcaagaauauggagaaa

SEQ ID NO: 433584 - RNA, 20 nt, Artificial Sequence
  Synthetic
uuggcaagaauauggagaaa

SEQ ID NO: 433585 - RNA, 21 nt, Artificial Sequence
  Synthetic
guuggcaagaauauggagaaa

SEQ ID NO: 433586 - RNA, 22 nt, Artificial Sequence
  Synthetic
uguuggcaagaauauggagaaa

SEQ ID NO: 433587 - RNA, 23 nt, Artificial Sequence
  Synthetic
guguuggcaagaauauggagaaa

SEQ ID NO: 433588 - RNA, 24 nt, Artificial Sequence
  Synthetic
aguguuggcaagaauauggagaaa

SEQ ID NO: 433589 - RNA, 18 nt, Artificial Sequence
  Synthetic
uuugagaauauggagaaa

SEQ ID NO: 433590 - RNA, 19 nt, Artificial Sequence
  Synthetic
cuuugagaauauggagaaa

SEQ ID NO: 433591 - RNA, 20 nt, Artificial Sequence
  Synthetic
acuuugagaauauggagaaa

SEQ ID NO: 433592 - RNA, 21 nt, Artificial Sequence
  Synthetic
uacuuugagaauauggagaaa

SEQ ID NO: 433593 - RNA, 22 nt, Artificial Sequence
  Synthetic
uuacuuugagaauauggagaaa

SEQ ID NO: 433594 - RNA, 23 nt, Artificial Sequence
  Synthetic
auuacuuugagaauauggagaaa

SEQ ID NO: 433595 - RNA, 24 nt, Artificial Sequence
  Synthetic
aauuacuuugagaauauggagaaa

SEQ ID NO: 433596 - RNA, 18 nt, Artificial Sequence
  Synthetic
ggagagaauguggagaaa

SEQ ID NO: 433597 - RNA, 19 nt, Artificial Sequence
  Synthetic
uggagagaauguggagaaa

SEQ ID NO: 433598 - RNA, 20 nt, Artificial Sequence
  Synthetic
cuggagagaauguggagaaa

SEQ ID NO: 433599 - RNA, 21 nt, Artificial Sequence
  Synthetic
gcuggagagaauguggagaaa

SEQ ID NO: 433600 - RNA, 22 nt, Artificial Sequence
  Synthetic
ggcuggagagaauguggagaaa

SEQ ID NO: 433601 - RNA, 23 nt, Artificial Sequence
  Synthetic
gggcuggagagaauguggagaaa

SEQ ID NO: 433602 - RNA, 24 nt, Artificial Sequence
  Synthetic
ugggcuggagagaauguggagaaa

SEQ ID NO: 433603 - RNA, 18 nt, Artificial Sequence
  Synthetic
ggagaagauguggagaaa

SEQ ID NO: 433604 - RNA, 19 nt, Artificial Sequence
  Synthetic
uggagaagauguggagaaa

SEQ ID NO: 433605 - RNA, 20 nt, Artificial Sequence
  Synthetic
cuggagaagauguggagaaa

SEQ ID NO: 433606 - RNA, 21 nt, Artificial Sequence
  Synthetic
gcuggagaagauguggagaaa

SEQ ID NO: 433607 - RNA, 22 nt, Artificial Sequence
  Synthetic
ugcuggagaagauguggagaaa

SEQ ID NO: 433608 - RNA, 23 nt, Artificial Sequence
  Synthetic
augcuggagaagauguggagaaa

SEQ ID NO: 433609 - RNA, 24 nt, Artificial Sequence
  Synthetic
gaugcuggagaagauguggagaaa

SEQ ID NO: 433610 - RNA, 18 nt, Artificial Sequence
  Synthetic
ggcaaggauguggagaaa

SEQ ID NO: 433611 - RNA, 19 nt, Artificial Sequence
  Synthetic
uggcaaggauguggagaaa

SEQ ID NO: 433612 - RNA, 20 nt, Artificial Sequence
  Synthetic
cuggcaaggauguggagaaa

SEQ ID NO: 433613 - RNA, 21 nt, Artificial Sequence
  Synthetic
gcuggcaaggauguggagaaa

SEQ ID NO: 433614 - RNA, 22 nt, Artificial Sequence
  Synthetic
ugcuggcaaggauguggagaaa

SEQ ID NO: 433615 - RNA, 23 nt, Artificial Sequence
  Synthetic
gugcuggcaaggauguggagaaa

SEQ ID NO: 433616 - RNA, 24 nt, Artificial Sequence
  Synthetic
ugugcuggcaaggauguggagaaa

SEQ ID NO: 433617 - RNA, 18 nt, Artificial Sequence
  Synthetic
uagacacaggaugagaaa

SEQ ID NO: 433618 - RNA, 19 nt, Artificial Sequence
  Synthetic
auagacacaggaugagaaa

SEQ ID NO: 433619 - RNA, 20 nt, Artificial Sequence
  Synthetic
aauagacacaggaugagaaa

SEQ ID NO: 433620 - RNA, 21 nt, Artificial Sequence
  Synthetic
uaauagacacaggaugagaaa

SEQ ID NO: 433621 - RNA, 22 nt, Artificial Sequence
  Synthetic
guaauagacacaggaugagaaa

SEQ ID NO: 433622 - RNA, 23 nt, Artificial Sequence
  Synthetic
gguaauagacacaggaugagaaa

SEQ ID NO: 433623 - RNA, 24 nt, Artificial Sequence
  Synthetic
agguaauagacacaggaugagaaa

SEQ ID NO: 433624 - RNA, 18 nt, Artificial Sequence
  Synthetic
gucuugcucuaugagaaa

SEQ ID NO: 433625 - RNA, 19 nt, Artificial Sequence
  Synthetic
agucuugcucuaugagaaa

SEQ ID NO: 433626 - RNA, 20 nt, Artificial Sequence
  Synthetic
aagucuugcucuaugagaaa

SEQ ID NO: 433627 - RNA, 21 nt, Artificial Sequence
  Synthetic
gaagucuugcucuaugagaaa

SEQ ID NO: 433628 - RNA, 22 nt, Artificial Sequence
  Synthetic
ggaagucuugcucuaugagaaa

SEQ ID NO: 433629 - RNA, 23 nt, Artificial Sequence
  Synthetic
uggaagucuugcucuaugagaaa

SEQ ID NO: 433630 - RNA, 24 nt, Artificial Sequence
  Synthetic
cuggaagucuugcucuaugagaaa

SEQ ID NO: 433631 - RNA, 18 nt, Artificial Sequence
  Synthetic
auuuccuuugcugagaaa

SEQ ID NO: 433632 - RNA, 19 nt, Artificial Sequence
  Synthetic
cauuuccuuugcugagaaa

SEQ ID NO: 433633 - RNA, 20 nt, Artificial Sequence
  Synthetic
gcauuuccuuugcugagaaa

SEQ ID NO: 433634 - RNA, 21 nt, Artificial Sequence
  Synthetic
ugcauuuccuuugcugagaaa

SEQ ID NO: 433635 - RNA, 22 nt, Artificial Sequence
  Synthetic
cugcauuuccuuugcugagaaa

SEQ ID NO: 433636 - RNA, 23 nt, Artificial Sequence
  Synthetic
ucugcauuuccuuugcugagaaa

SEQ ID NO: 433637 - RNA, 24 nt, Artificial Sequence
  Synthetic
gucugcauuuccuuugcugagaaa

SEQ ID NO: 433638 - RNA, 18 nt, Artificial Sequence
  Synthetic
cuuccauccucugagaaa

SEQ ID NO: 433639 - RNA, 19 nt, Artificial Sequence
  Synthetic
ccuuccauccucugagaaa

SEQ ID NO: 433640 - RNA, 20 nt, Artificial Sequence
  Synthetic
cccuuccauccucugagaaa

SEQ ID NO: 433641 - RNA, 21 nt, Artificial Sequence
  Synthetic
gcccuuccauccucugagaaa

SEQ ID NO: 433642 - RNA, 22 nt, Artificial Sequence
  Synthetic
ggcccuuccauccucugagaaa

SEQ ID NO: 433643 - RNA, 23 nt, Artificial Sequence
  Synthetic
cggcccuuccauccucugagaaa

SEQ ID NO: 433644 - RNA, 24 nt, Artificial Sequence
  Synthetic
acggcccuuccauccucugagaaa

SEQ ID NO: 433645 - RNA, 18 nt, Artificial Sequence
  Synthetic
ugaggucagagugagaaa

SEQ ID NO: 433646 - RNA, 19 nt, Artificial Sequence
  Synthetic
gugaggucagagugagaaa

SEQ ID NO: 433647 - RNA, 20 nt, Artificial Sequence
  Synthetic
ggugaggucagagugagaaa

SEQ ID NO: 433648 - RNA, 21 nt, Artificial Sequence
  Synthetic
aggugaggucagagugagaaa

SEQ ID NO: 433649 - RNA, 22 nt, Artificial Sequence
  Synthetic
aaggugaggucagagugagaaa

SEQ ID NO: 433650 - RNA, 23 nt, Artificial Sequence
  Synthetic
aaaggugaggucagagugagaaa

SEQ ID NO: 433651 - RNA, 24 nt, Artificial Sequence
  Synthetic
caaaggugaggucagagugagaaa

SEQ ID NO: 433652 - RNA, 18 nt, Artificial Sequence
  Synthetic
uugggacauggugagaaa

SEQ ID NO: 433653 - RNA, 19 nt, Artificial Sequence
  Synthetic
auugggacauggugagaaa

SEQ ID NO: 433654 - RNA, 20 nt, Artificial Sequence
  Synthetic
gauugggacauggugagaaa

SEQ ID NO: 433655 - RNA, 21 nt, Artificial Sequence
  Synthetic
agauugggacauggugagaaa

SEQ ID NO: 433656 - RNA, 22 nt, Artificial Sequence
  Synthetic
uagauugggacauggugagaaa

SEQ ID NO: 433657 - RNA, 23 nt, Artificial Sequence
  Synthetic
guagauugggacauggugagaaa

SEQ ID NO: 433658 - RNA, 24 nt, Artificial Sequence
  Synthetic
aguagauugggacauggugagaaa

SEQ ID NO: 433659 - RNA, 18 nt, Artificial Sequence
  Synthetic
aacaacuguggugagaaa

SEQ ID NO: 433660 - RNA, 19 nt, Artificial Sequence
  Synthetic
gaacaacuguggugagaaa

SEQ ID NO: 433661 - RNA, 20 nt, Artificial Sequence
  Synthetic
ugaacaacuguggugagaaa

SEQ ID NO: 433662 - RNA, 21 nt, Artificial Sequence
  Synthetic
augaacaacuguggugagaaa

SEQ ID NO: 433663 - RNA, 22 nt, Artificial Sequence
  Synthetic
gaugaacaacuguggugagaaa

SEQ ID NO: 433664 - RNA, 23 nt, Artificial Sequence
  Synthetic
ugaugaacaacuguggugagaaa

SEQ ID NO: 433665 - RNA, 24 nt, Artificial Sequence
  Synthetic
gugaugaacaacuguggugagaaa

SEQ ID NO: 433666 - RNA, 18 nt, Artificial Sequence
  Synthetic
ucuuuuugccuugagaaa

SEQ ID NO: 433667 - RNA, 19 nt, Artificial Sequence
  Synthetic
uucuuuuugccuugagaaa

SEQ ID NO: 433668 - RNA, 20 nt, Artificial Sequence
  Synthetic
auucuuuuugccuugagaaa

SEQ ID NO: 433669 - RNA, 21 nt, Artificial Sequence
  Synthetic
aauucuuuuugccuugagaaa

SEQ ID NO: 433670 - RNA, 22 nt, Artificial Sequence
  Synthetic
gaauucuuuuugccuugagaaa

SEQ ID NO: 433671 - RNA, 23 nt, Artificial Sequence
  Synthetic
ggaauucuuuuugccuugagaaa

SEQ ID NO: 433672 - RNA, 24 nt, Artificial Sequence
  Synthetic
uggaauucuuuuugccuugagaaa

SEQ ID NO: 433673 - RNA, 18 nt, Artificial Sequence
  Synthetic
gugaacuuucuugagaaa

SEQ ID NO: 433674 - RNA, 19 nt, Artificial Sequence
  Synthetic
ugugaacuuucuugagaaa

SEQ ID NO: 433675 - RNA, 20 nt, Artificial Sequence
  Synthetic
cugugaacuuucuugagaaa

SEQ ID NO: 433676 - RNA, 21 nt, Artificial Sequence
  Synthetic
ccugugaacuuucuugagaaa

SEQ ID NO: 433677 - RNA, 22 nt, Artificial Sequence
  Synthetic
uccugugaacuuucuugagaaa

SEQ ID NO: 433678 - RNA, 23 nt, Artificial Sequence
  Synthetic
auccugugaacuuucuugagaaa

SEQ ID NO: 433679 - RNA, 24 nt, Artificial Sequence
  Synthetic
gauccugugaacuuucuugagaaa

SEQ ID NO: 433680 - RNA, 18 nt, Artificial Sequence
  Synthetic
cauuucacauuugagaaa

SEQ ID NO: 433681 - RNA, 19 nt, Artificial Sequence
  Synthetic
acauuucacauuugagaaa

SEQ ID NO: 433682 - RNA, 20 nt, Artificial Sequence
  Synthetic
gacauuucacauuugagaaa

SEQ ID NO: 433683 - RNA, 21 nt, Artificial Sequence
  Synthetic
ggacauuucacauuugagaaa

SEQ ID NO: 433684 - RNA, 22 nt, Artificial Sequence
  Synthetic
uggacauuucacauuugagaaa

SEQ ID NO: 433685 - RNA, 23 nt, Artificial Sequence
  Synthetic
cuggacauuucacauuugagaaa

SEQ ID NO: 433686 - RNA, 24 nt, Artificial Sequence
  Synthetic
ucuggacauuucacauuugagaaa

SEQ ID NO: 433687 - RNA, 18 nt, Artificial Sequence
  Synthetic
gugaauggaaaauagaaa

SEQ ID NO: 433688 - RNA, 19 nt, Artificial Sequence
  Synthetic
ggugaauggaaaauagaaa

SEQ ID NO: 433689 - RNA, 20 nt, Artificial Sequence
  Synthetic
uggugaauggaaaauagaaa

SEQ ID NO: 433690 - RNA, 21 nt, Artificial Sequence
  Synthetic
uuggugaauggaaaauagaaa

SEQ ID NO: 433691 - RNA, 22 nt, Artificial Sequence
  Synthetic
auuggugaauggaaaauagaaa

SEQ ID NO: 433692 - RNA, 23 nt, Artificial Sequence
  Synthetic
uauuggugaauggaaaauagaaa

SEQ ID NO: 433693 - RNA, 24 nt, Artificial Sequence
  Synthetic
auauuggugaauggaaaauagaaa

SEQ ID NO: 433694 - RNA, 18 nt, Artificial Sequence
  Synthetic
uuuagaaacaaauagaaa

SEQ ID NO: 433695 - RNA, 19 nt, Artificial Sequence
  Synthetic
uuuuagaaacaaauagaaa

SEQ ID NO: 433696 - RNA, 20 nt, Artificial Sequence
  Synthetic
uuuuuagaaacaaauagaaa

SEQ ID NO: 433697 - RNA, 21 nt, Artificial Sequence
  Synthetic
auuuuuagaaacaaauagaaa

SEQ ID NO: 433698 - RNA, 22 nt, Artificial Sequence
  Synthetic
uauuuuuagaaacaaauagaaa

SEQ ID NO: 433699 - RNA, 23 nt, Artificial Sequence
  Synthetic
uuauuuuuagaaacaaauagaaa

SEQ ID NO: 433700 - RNA, 24 nt, Artificial Sequence
  Synthetic
auuauuuuuagaaacaaauagaaa

SEQ ID NO: 433701 - RNA, 18 nt, Artificial Sequence
  Synthetic
ugauggcaacaauagaaa

SEQ ID NO: 433702 - RNA, 19 nt, Artificial Sequence
  Synthetic
augauggcaacaauagaaa

SEQ ID NO: 433703 - RNA, 20 nt, Artificial Sequence
  Synthetic
aaugauggcaacaauagaaa

SEQ ID NO: 433704 - RNA, 21 nt, Artificial Sequence
  Synthetic
uaaugauggcaacaauagaaa

SEQ ID NO: 433705 - RNA, 22 nt, Artificial Sequence
  Synthetic
auaaugauggcaacaauagaaa

SEQ ID NO: 433706 - RNA, 23 nt, Artificial Sequence
  Synthetic
cauaaugauggcaacaauagaaa

SEQ ID NO: 433707 - RNA, 24 nt, Artificial Sequence
  Synthetic
acauaaugauggcaacaauagaaa

SEQ ID NO: 433708 - RNA, 23 nt, Artificial Sequence
  Synthetic
aaaacuauuccaaucaauagaaa

SEQ ID NO: 433709 - RNA, 24 nt, Artificial Sequence
  Synthetic
uaaaacuauuccaaucaauagaaa

SEQ ID NO: 433710 - RNA, 18 nt, Artificial Sequence
  Synthetic
cccuguguugaauagaaa

SEQ ID NO: 433711 - RNA, 19 nt, Artificial Sequence
  Synthetic
ucccuguguugaauagaaa

SEQ ID NO: 433712 - RNA, 20 nt, Artificial Sequence
  Synthetic
cucccuguguugaauagaaa

SEQ ID NO: 433713 - RNA, 21 nt, Artificial Sequence
  Synthetic
ucucccuguguugaauagaaa

SEQ ID NO: 433714 - RNA, 22 nt, Artificial Sequence
  Synthetic
cucucccuguguugaauagaaa

SEQ ID NO: 433715 - RNA, 23 nt, Artificial Sequence
  Synthetic
acucucccuguguugaauagaaa

SEQ ID NO: 433716 - RNA, 24 nt, Artificial Sequence
  Synthetic
gacucucccuguguugaauagaaa

SEQ ID NO: 433717 - RNA, 18 nt, Artificial Sequence
  Synthetic
gcaaacagugcauagaaa

SEQ ID NO: 433718 - RNA, 19 nt, Artificial Sequence
  Synthetic
agcaaacagugcauagaaa

SEQ ID NO: 433719 - RNA, 20 nt, Artificial Sequence
  Synthetic
uagcaaacagugcauagaaa

SEQ ID NO: 433720 - RNA, 21 nt, Artificial Sequence
  Synthetic
guagcaaacagugcauagaaa

SEQ ID NO: 433721 - RNA, 22 nt, Artificial Sequence
  Synthetic
aguagcaaacagugcauagaaa

SEQ ID NO: 433722 - RNA, 23 nt, Artificial Sequence
  Synthetic
aaguagcaaacagugcauagaaa

SEQ ID NO: 433723 - RNA, 24 nt, Artificial Sequence
  Synthetic
aaaguagcaaacagugcauagaaa

SEQ ID NO: 433724 - RNA, 18 nt, Artificial Sequence
  Synthetic
aaguugaacucauagaaa

SEQ ID NO: 433725 - RNA, 19 nt, Artificial Sequence
  Synthetic
aaaguugaacucauagaaa

SEQ ID NO: 433726 - RNA, 20 nt, Artificial Sequence
  Synthetic
aaaaguugaacucauagaaa

SEQ ID NO: 433727 - RNA, 21 nt, Artificial Sequence
  Synthetic
aaaaaguugaacucauagaaa

SEQ ID NO: 433728 - RNA, 22 nt, Artificial Sequence
  Synthetic
aaaaaaguugaacucauagaaa

SEQ ID NO: 433729 - RNA, 23 nt, Artificial Sequence
  Synthetic
aaaaaaaguugaacucauagaaa

SEQ ID NO: 433730 - RNA, 24 nt, Artificial Sequence
  Synthetic
uaaaaaaaguugaacucauagaaa

SEQ ID NO: 433731 - RNA, 18 nt, Artificial Sequence
  Synthetic
gcuaguuggucauagaaa

SEQ ID NO: 433732 - RNA, 19 nt, Artificial Sequence
  Synthetic
ugcuaguuggucauagaaa

SEQ ID NO: 433733 - RNA, 20 nt, Artificial Sequence
  Synthetic
augcuaguuggucauagaaa

SEQ ID NO: 433734 - RNA, 21 nt, Artificial Sequence
  Synthetic
aaugcuaguuggucauagaaa

SEQ ID NO: 433735 - RNA, 22 nt, Artificial Sequence
  Synthetic
aaaugcuaguuggucauagaaa

SEQ ID NO: 433736 - RNA, 23 nt, Artificial Sequence
  Synthetic
gaaaugcuaguuggucauagaaa

SEQ ID NO: 433737 - RNA, 24 nt, Artificial Sequence
  Synthetic
ugaaaugcuaguuggucauagaaa

SEQ ID NO: 433738 - RNA, 18 nt, Artificial Sequence
  Synthetic
uagccaaauucauagaaa

SEQ ID NO: 433739 - RNA, 19 nt, Artificial Sequence
  Synthetic
auagccaaauucauagaaa

SEQ ID NO: 433740 - RNA, 20 nt, Artificial Sequence
  Synthetic
aauagccaaauucauagaaa

SEQ ID NO: 433741 - RNA, 21 nt, Artificial Sequence
  Synthetic
gaauagccaaauucauagaaa

SEQ ID NO: 433742 - RNA, 22 nt, Artificial Sequence
  Synthetic
agaauagccaaauucauagaaa

SEQ ID NO: 433743 - RNA, 23 nt, Artificial Sequence
  Synthetic
uagaauagccaaauucauagaaa

SEQ ID NO: 433744 - RNA, 24 nt, Artificial Sequence
  Synthetic
cuagaauagccaaauucauagaaa

SEQ ID NO: 433745 - RNA, 18 nt, Artificial Sequence
  Synthetic
gaaagagaaagauagaaa

SEQ ID NO: 433746 - RNA, 19 nt, Artificial Sequence
  Synthetic
agaaagagaaagauagaaa

SEQ ID NO: 433747 - RNA, 20 nt, Artificial Sequence
  Synthetic
gagaaagagaaagauagaaa

SEQ ID NO: 433748 - RNA, 21 nt, Artificial Sequence
  Synthetic
agagaaagagaaagauagaaa

SEQ ID NO: 433749 - RNA, 22 nt, Artificial Sequence
  Synthetic
cagagaaagagaaagauagaaa

SEQ ID NO: 433750 - RNA, 23 nt, Artificial Sequence
  Synthetic
acagagaaagagaaagauagaaa

SEQ ID NO: 433751 - RNA, 24 nt, Artificial Sequence
  Synthetic
gacagagaaagagaaagauagaaa

SEQ ID NO: 433752 - RNA, 18 nt, Artificial Sequence
  Synthetic
ucucuugagagauagaaa

SEQ ID NO: 433753 - RNA, 19 nt, Artificial Sequence
  Synthetic
aucucuugagagauagaaa

SEQ ID NO: 433754 - RNA, 20 nt, Artificial Sequence
  Synthetic
gaucucuugagagauagaaa

SEQ ID NO: 433755 - RNA, 21 nt, Artificial Sequence
  Synthetic
ggaucucuugagagauagaaa

SEQ ID NO: 433756 - RNA, 22 nt, Artificial Sequence
  Synthetic
aggaucucuugagagauagaaa

SEQ ID NO: 433757 - RNA, 23 nt, Artificial Sequence
  Synthetic
caggaucucuugagagauagaaa

SEQ ID NO: 433758 - RNA, 24 nt, Artificial Sequence
  Synthetic
acaggaucucuugagagauagaaa

SEQ ID NO: 433759 - RNA, 18 nt, Artificial Sequence
  Synthetic
uaggccucuggauagaaa

SEQ ID NO: 433760 - RNA, 19 nt, Artificial Sequence
  Synthetic
cuaggccucuggauagaaa

SEQ ID NO: 433761 - RNA, 20 nt, Artificial Sequence
  Synthetic
ucuaggccucuggauagaaa

SEQ ID NO: 433762 - RNA, 21 nt, Artificial Sequence
  Synthetic
cucuaggccucuggauagaaa

SEQ ID NO: 433763 - RNA, 22 nt, Artificial Sequence
  Synthetic
gcucuaggccucuggauagaaa

SEQ ID NO: 433764 - RNA, 23 nt, Artificial Sequence
  Synthetic
agcucuaggccucuggauagaaa

SEQ ID NO: 433765 - RNA, 24 nt, Artificial Sequence
  Synthetic
gagcucuaggccucuggauagaaa

SEQ ID NO: 433766 - RNA, 18 nt, Artificial Sequence
  Synthetic
uucacuuagauauagaaa

SEQ ID NO: 433767 - RNA, 19 nt, Artificial Sequence
  Synthetic
uuucacuuagauauagaaa

SEQ ID NO: 433768 - RNA, 20 nt, Artificial Sequence
  Synthetic
uuuucacuuagauauagaaa

SEQ ID NO: 433769 - RNA, 21 nt, Artificial Sequence
  Synthetic
uuuuucacuuagauauagaaa

SEQ ID NO: 433770 - RNA, 22 nt, Artificial Sequence
  Synthetic
uuuuuucacuuagauauagaaa

SEQ ID NO: 433771 - RNA, 23 nt, Artificial Sequence
  Synthetic
uuuuuuucacuuagauauagaaa

SEQ ID NO: 433772 - RNA, 24 nt, Artificial Sequence
  Synthetic
uuuuuuuucacuuagauauagaaa

SEQ ID NO: 433773 - RNA, 18 nt, Artificial Sequence
  Synthetic
auuagcugucuauagaaa

SEQ ID NO: 433774 - RNA, 19 nt, Artificial Sequence
  Synthetic
aauuagcugucuauagaaa

SEQ ID NO: 433775 - RNA, 20 nt, Artificial Sequence
  Synthetic
gaauuagcugucuauagaaa

SEQ ID NO: 433776 - RNA, 21 nt, Artificial Sequence
  Synthetic
ugaauuagcugucuauagaaa

SEQ ID NO: 433777 - RNA, 22 nt, Artificial Sequence
  Synthetic
augaauuagcugucuauagaaa

SEQ ID NO: 433778 - RNA, 23 nt, Artificial Sequence
  Synthetic
aaugaauuagcugucuauagaaa

SEQ ID NO: 433779 - RNA, 24 nt, Artificial Sequence
  Synthetic
aaaugaauuagcugucuauagaaa

SEQ ID NO: 433780 - RNA, 18 nt, Artificial Sequence
  Synthetic
uucucaguucuauagaaa

SEQ ID NO: 433781 - RNA, 19 nt, Artificial Sequence
  Synthetic
auucucaguucuauagaaa

SEQ ID NO: 433782 - RNA, 20 nt, Artificial Sequence
  Synthetic
uauucucaguucuauagaaa

SEQ ID NO: 433783 - RNA, 21 nt, Artificial Sequence
  Synthetic
uuauucucaguucuauagaaa

SEQ ID NO: 433784 - RNA, 22 nt, Artificial Sequence
  Synthetic
uuuauucucaguucuauagaaa

SEQ ID NO: 433785 - RNA, 23 nt, Artificial Sequence
  Synthetic
auuuauucucaguucuauagaaa

SEQ ID NO: 433786 - RNA, 24 nt, Artificial Sequence
  Synthetic
gauuuauucucaguucuauagaaa

SEQ ID NO: 433787 - RNA, 18 nt, Artificial Sequence
  Synthetic
uuuagcugaguauagaaa

SEQ ID NO: 433788 - RNA, 19 nt, Artificial Sequence
  Synthetic
uuuuagcugaguauagaaa

SEQ ID NO: 433789 - RNA, 20 nt, Artificial Sequence
  Synthetic
auuuuagcugaguauagaaa

SEQ ID NO: 433790 - RNA, 21 nt, Artificial Sequence
  Synthetic
cauuuuagcugaguauagaaa

SEQ ID NO: 433791 - RNA, 22 nt, Artificial Sequence
  Synthetic
acauuuuagcugaguauagaaa

SEQ ID NO: 433792 - RNA, 23 nt, Artificial Sequence
  Synthetic
gacauuuuagcugaguauagaaa

SEQ ID NO: 433793 - RNA, 24 nt, Artificial Sequence
  Synthetic
ugacauuuuagcugaguauagaaa

SEQ ID NO: 433794 - RNA, 18 nt, Artificial Sequence
  Synthetic
uagucaaaauuauagaaa

SEQ ID NO: 433795 - RNA, 19 nt, Artificial Sequence
  Synthetic
guagucaaaauuauagaaa

SEQ ID NO: 433796 - RNA, 20 nt, Artificial Sequence
  Synthetic
aguagucaaaauuauagaaa

SEQ ID NO: 433797 - RNA, 21 nt, Artificial Sequence
  Synthetic
aaguagucaaaauuauagaaa

SEQ ID NO: 433798 - RNA, 22 nt, Artificial Sequence
  Synthetic
aaaguagucaaaauuauagaaa

SEQ ID NO: 433799 - RNA, 23 nt, Artificial Sequence
  Synthetic
uaaaguagucaaaauuauagaaa

SEQ ID NO: 433800 - RNA, 24 nt, Artificial Sequence
  Synthetic
cuaaaguagucaaaauuauagaaa

SEQ ID NO: 433801 - RNA, 18 nt, Artificial Sequence
  Synthetic
cauccugauuuauagaaa

SEQ ID NO: 433802 - RNA, 19 nt, Artificial Sequence
  Synthetic
acauccugauuuauagaaa

SEQ ID NO: 433803 - RNA, 20 nt, Artificial Sequence
  Synthetic
aacauccugauuuauagaaa

SEQ ID NO: 433804 - RNA, 21 nt, Artificial Sequence
  Synthetic
aaacauccugauuuauagaaa

SEQ ID NO: 433805 - RNA, 22 nt, Artificial Sequence
  Synthetic
uaaacauccugauuuauagaaa

SEQ ID NO: 433806 - RNA, 23 nt, Artificial Sequence
  Synthetic
guaaacauccugauuuauagaaa

SEQ ID NO: 433807 - RNA, 24 nt, Artificial Sequence
  Synthetic
uguaaacauccugauuuauagaaa

SEQ ID NO: 433808 - RNA, 18 nt, Artificial Sequence
  Synthetic
aaguuacugaacuagaaa

SEQ ID NO: 433809 - RNA, 19 nt, Artificial Sequence
  Synthetic
uaaguuacugaacuagaaa

SEQ ID NO: 433810 - RNA, 20 nt, Artificial Sequence
  Synthetic
uuaaguuacugaacuagaaa

SEQ ID NO: 433811 - RNA, 21 nt, Artificial Sequence
  Synthetic
uuuaaguuacugaacuagaaa

SEQ ID NO: 433812 - RNA, 22 nt, Artificial Sequence
  Synthetic
uuuuaaguuacugaacuagaaa

SEQ ID NO: 433813 - RNA, 23 nt, Artificial Sequence
  Synthetic
guuuuaaguuacugaacuagaaa

SEQ ID NO: 433814 - RNA, 24 nt, Artificial Sequence
  Synthetic
gguuuuaaguuacugaacuagaaa

SEQ ID NO: 433815 - RNA, 18 nt, Artificial Sequence
  Synthetic
aaagaggcauccuagaaa

SEQ ID NO: 433816 - RNA, 19 nt, Artificial Sequence
  Synthetic
aaaagaggcauccuagaaa

SEQ ID NO: 433817 - RNA, 20 nt, Artificial Sequence
  Synthetic
aaaaagaggcauccuagaaa

SEQ ID NO: 433818 - RNA, 21 nt, Artificial Sequence
  Synthetic
aaaaaagaggcauccuagaaa

SEQ ID NO: 433819 - RNA, 22 nt, Artificial Sequence
  Synthetic
aaaaaaagaggcauccuagaaa

SEQ ID NO: 433820 - RNA, 23 nt, Artificial Sequence
  Synthetic
aaaaaaaagaggcauccuagaaa

SEQ ID NO: 433821 - RNA, 24 nt, Artificial Sequence
  Synthetic
caaaaaaaagaggcauccuagaaa

SEQ ID NO: 433822 - RNA, 18 nt, Artificial Sequence
  Synthetic
aggauaaacaaguagaaa

SEQ ID NO: 433823 - RNA, 19 nt, Artificial Sequence
  Synthetic
uaggauaaacaaguagaaa

SEQ ID NO: 433824 - RNA, 20 nt, Artificial Sequence
  Synthetic
auaggauaaacaaguagaaa

SEQ ID NO: 433825 - RNA, 21 nt, Artificial Sequence
  Synthetic
cauaggauaaacaaguagaaa

SEQ ID NO: 433826 - RNA, 22 nt, Artificial Sequence
  Synthetic
acauaggauaaacaaguagaaa

SEQ ID NO: 433827 - RNA, 23 nt, Artificial Sequence
  Synthetic
uacauaggauaaacaaguagaaa

SEQ ID NO: 433828 - RNA, 24 nt, Artificial Sequence
  Synthetic
uuacauaggauaaacaaguagaaa

SEQ ID NO: 433829 - RNA, 18 nt, Artificial Sequence
  Synthetic
gaaguaauggaguagaaa

SEQ ID NO: 433830 - RNA, 19 nt, Artificial Sequence
  Synthetic
ggaaguaauggaguagaaa

SEQ ID NO: 433831 - RNA, 20 nt, Artificial Sequence
  Synthetic
gggaaguaauggaguagaaa

SEQ ID NO: 433832 - RNA, 21 nt, Artificial Sequence
  Synthetic
ugggaaguaauggaguagaaa

SEQ ID NO: 433833 - RNA, 22 nt, Artificial Sequence
  Synthetic
augggaaguaauggaguagaaa

SEQ ID NO: 433834 - RNA, 23 nt, Artificial Sequence
  Synthetic
aaugggaaguaauggaguagaaa

SEQ ID NO: 433835 - RNA, 24 nt, Artificial Sequence
  Synthetic
gaaugggaaguaauggaguagaaa

SEQ ID NO: 433836 - RNA, 18 nt, Artificial Sequence
  Synthetic
auauagcugccguagaaa

SEQ ID NO: 433837 - RNA, 19 nt, Artificial Sequence
  Synthetic
aauauagcugccguagaaa

SEQ ID NO: 433838 - RNA, 20 nt, Artificial Sequence
  Synthetic
aaauauagcugccguagaaa

SEQ ID NO: 433839 - RNA, 21 nt, Artificial Sequence
  Synthetic
uaaauauagcugccguagaaa

SEQ ID NO: 433840 - RNA, 22 nt, Artificial Sequence
  Synthetic
guaaauauagcugccguagaaa

SEQ ID NO: 433841 - RNA, 23 nt, Artificial Sequence
  Synthetic
aguaaauauagcugccguagaaa

SEQ ID NO: 433842 - RNA, 24 nt, Artificial Sequence
  Synthetic
aaguaaauauagcugccguagaaa

SEQ ID NO: 433843 - RNA, 18 nt, Artificial Sequence
  Synthetic
agcaauacaugguagaaa

SEQ ID NO: 433844 - RNA, 19 nt, Artificial Sequence
  Synthetic
uagcaauacaugguagaaa

SEQ ID NO: 433845 - RNA, 20 nt, Artificial Sequence
  Synthetic
uuagcaauacaugguagaaa

SEQ ID NO: 433846 - RNA, 21 nt, Artificial Sequence
  Synthetic
uuuagcaauacaugguagaaa

SEQ ID NO: 433847 - RNA, 22 nt, Artificial Sequence
  Synthetic
guuuagcaauacaugguagaaa

SEQ ID NO: 433848 - RNA, 23 nt, Artificial Sequence
  Synthetic
uguuuagcaauacaugguagaaa

SEQ ID NO: 433849 - RNA, 24 nt, Artificial Sequence
  Synthetic
uuguuuagcaauacaugguagaaa

SEQ ID NO: 433850 - RNA, 18 nt, Artificial Sequence
  Synthetic
gcaguuuauauguagaaa

SEQ ID NO: 433851 - RNA, 19 nt, Artificial Sequence
  Synthetic
ggcaguuuauauguagaaa

SEQ ID NO: 433852 - RNA, 20 nt, Artificial Sequence
  Synthetic
gggcaguuuauauguagaaa

SEQ ID NO: 433853 - RNA, 21 nt, Artificial Sequence
  Synthetic
ugggcaguuuauauguagaaa

SEQ ID NO: 433854 - RNA, 22 nt, Artificial Sequence
  Synthetic
uugggcaguuuauauguagaaa

SEQ ID NO: 433855 - RNA, 23 nt, Artificial Sequence
  Synthetic
auugggcaguuuauauguagaaa

SEQ ID NO: 433856 - RNA, 24 nt, Artificial Sequence
  Synthetic
aauugggcaguuuauauguagaaa

SEQ ID NO: 433857 - RNA, 18 nt, Artificial Sequence
  Synthetic
guuucuugagauuagaaa

SEQ ID NO: 433858 - RNA, 19 nt, Artificial Sequence
  Synthetic
aguuucuugagauuagaaa

SEQ ID NO: 433859 - RNA, 20 nt, Artificial Sequence
  Synthetic
caguuucuugagauuagaaa

SEQ ID NO: 433860 - RNA, 21 nt, Artificial Sequence
  Synthetic
gcaguuucuugagauuagaaa

SEQ ID NO: 433861 - RNA, 22 nt, Artificial Sequence
  Synthetic
ugcaguuucuugagauuagaaa

SEQ ID NO: 433862 - RNA, 23 nt, Artificial Sequence
  Synthetic
uugcaguuucuugagauuagaaa

SEQ ID NO: 433863 - RNA, 24 nt, Artificial Sequence
  Synthetic
cuugcaguuucuugagauuagaaa

SEQ ID NO: 433864 - RNA, 18 nt, Artificial Sequence
  Synthetic
caauucgaauauuagaaa

SEQ ID NO: 433865 - RNA, 19 nt, Artificial Sequence
  Synthetic
gcaauucgaauauuagaaa

SEQ ID NO: 433866 - RNA, 20 nt, Artificial Sequence
  Synthetic
agcaauucgaauauuagaaa

SEQ ID NO: 433867 - RNA, 21 nt, Artificial Sequence
  Synthetic
gagcaauucgaauauuagaaa

SEQ ID NO: 433868 - RNA, 22 nt, Artificial Sequence
  Synthetic
ugagcaauucgaauauuagaaa

SEQ ID NO: 433869 - RNA, 23 nt, Artificial Sequence
  Synthetic
augagcaauucgaauauuagaaa

SEQ ID NO: 433870 - RNA, 24 nt, Artificial Sequence
  Synthetic
aaugagcaauucgaauauuagaaa

SEQ ID NO: 433871 - RNA, 18 nt, Artificial Sequence
  Synthetic
ucuucucacacuuagaaa

SEQ ID NO: 433872 - RNA, 19 nt, Artificial Sequence
  Synthetic
aucuucucacacuuagaaa

SEQ ID NO: 433873 - RNA, 20 nt, Artificial Sequence
  Synthetic
caucuucucacacuuagaaa

SEQ ID NO: 433874 - RNA, 21 nt, Artificial Sequence
  Synthetic
ucaucuucucacacuuagaaa

SEQ ID NO: 433875 - RNA, 22 nt, Artificial Sequence
  Synthetic
aucaucuucucacacuuagaaa

SEQ ID NO: 433876 - RNA, 23 nt, Artificial Sequence
  Synthetic
caucaucuucucacacuuagaaa

SEQ ID NO: 433877 - RNA, 24 nt, Artificial Sequence
  Synthetic
gcaucaucuucucacacuuagaaa

SEQ ID NO: 433878 - RNA, 18 nt, Artificial Sequence
  Synthetic
uccucaaagacuuagaaa

SEQ ID NO: 433879 - RNA, 19 nt, Artificial Sequence
  Synthetic
uuccucaaagacuuagaaa

SEQ ID NO: 433880 - RNA, 20 nt, Artificial Sequence
  Synthetic
cuuccucaaagacuuagaaa

SEQ ID NO: 433881 - RNA, 21 nt, Artificial Sequence
  Synthetic
ucuuccucaaagacuuagaaa

SEQ ID NO: 433882 - RNA, 22 nt, Artificial Sequence
  Synthetic
uucuuccucaaagacuuagaaa

SEQ ID NO: 433883 - RNA, 23 nt, Artificial Sequence
  Synthetic
uuucuuccucaaagacuuagaaa

SEQ ID NO: 433884 - RNA, 24 nt, Artificial Sequence
  Synthetic
uuuucuuccucaaagacuuagaaa

SEQ ID NO: 433885 - RNA, 18 nt, Artificial Sequence
  Synthetic
aaauacgaaccuuagaaa

SEQ ID NO: 433886 - RNA, 19 nt, Artificial Sequence
  Synthetic
uaaauacgaaccuuagaaa

SEQ ID NO: 433887 - RNA, 20 nt, Artificial Sequence
  Synthetic
cuaaauacgaaccuuagaaa

SEQ ID NO: 433888 - RNA, 21 nt, Artificial Sequence
  Synthetic
acuaaauacgaaccuuagaaa

SEQ ID NO: 433889 - RNA, 22 nt, Artificial Sequence
  Synthetic
aacuaaauacgaaccuuagaaa

SEQ ID NO: 433890 - RNA, 23 nt, Artificial Sequence
  Synthetic
uaacuaaauacgaaccuuagaaa

SEQ ID NO: 433891 - RNA, 24 nt, Artificial Sequence
  Synthetic
uuaacuaaauacgaaccuuagaaa

SEQ ID NO: 433892 - RNA, 18 nt, Artificial Sequence
  Synthetic
uggaaauguauuuagaaa

SEQ ID NO: 433893 - RNA, 19 nt, Artificial Sequence
  Synthetic
guggaaauguauuuagaaa

SEQ ID NO: 433894 - RNA, 20 nt, Artificial Sequence
  Synthetic
aguggaaauguauuuagaaa

SEQ ID NO: 433895 - RNA, 21 nt, Artificial Sequence
  Synthetic
aaguggaaauguauuuagaaa

SEQ ID NO: 433896 - RNA, 22 nt, Artificial Sequence
  Synthetic
caaguggaaauguauuuagaaa

SEQ ID NO: 433897 - RNA, 23 nt, Artificial Sequence
  Synthetic
ucaaguggaaauguauuuagaaa

SEQ ID NO: 433898 - RNA, 24 nt, Artificial Sequence
  Synthetic
cucaaguggaaauguauuuagaaa

SEQ ID NO: 433899 - RNA, 18 nt, Artificial Sequence
  Synthetic
acauagaaacuuuagaaa

SEQ ID NO: 433900 - RNA, 19 nt, Artificial Sequence
  Synthetic
aacauagaaacuuuagaaa

SEQ ID NO: 433901 - RNA, 20 nt, Artificial Sequence
  Synthetic
uaacauagaaacuuuagaaa

SEQ ID NO: 433902 - RNA, 21 nt, Artificial Sequence
  Synthetic
uuaacauagaaacuuuagaaa

SEQ ID NO: 433903 - RNA, 22 nt, Artificial Sequence
  Synthetic
uuuaacauagaaacuuuagaaa

SEQ ID NO: 433904 - RNA, 23 nt, Artificial Sequence
  Synthetic
cuuuaacauagaaacuuuagaaa

SEQ ID NO: 433905 - RNA, 24 nt, Artificial Sequence
  Synthetic
ccuuuaacauagaaacuuuagaaa

SEQ ID NO: 433906 - RNA, 18 nt, Artificial Sequence
  Synthetic
auucuguaccuuuagaaa

SEQ ID NO: 433907 - RNA, 19 nt, Artificial Sequence
  Synthetic
aauucuguaccuuuagaaa

SEQ ID NO: 433908 - RNA, 20 nt, Artificial Sequence
  Synthetic
aaauucuguaccuuuagaaa

SEQ ID NO: 433909 - RNA, 21 nt, Artificial Sequence
  Synthetic
aaaauucuguaccuuuagaaa

SEQ ID NO: 433910 - RNA, 22 nt, Artificial Sequence
  Synthetic
gaaaauucuguaccuuuagaaa

SEQ ID NO: 433911 - RNA, 23 nt, Artificial Sequence
  Synthetic
ugaaaauucuguaccuuuagaaa

SEQ ID NO: 433912 - RNA, 24 nt, Artificial Sequence
  Synthetic
gugaaaauucuguaccuuuagaaa

SEQ ID NO: 433913 - RNA, 18 nt, Artificial Sequence
  Synthetic
aaaguuaaauuuuagaaa

SEQ ID NO: 433914 - RNA, 19 nt, Artificial Sequence
  Synthetic
caaaguuaaauuuuagaaa

SEQ ID NO: 433915 - RNA, 20 nt, Artificial Sequence
  Synthetic
ucaaaguuaaauuuuagaaa

SEQ ID NO: 433916 - RNA, 21 nt, Artificial Sequence
  Synthetic
gucaaaguuaaauuuuagaaa

SEQ ID NO: 433917 - RNA, 22 nt, Artificial Sequence
  Synthetic
ggucaaaguuaaauuuuagaaa

SEQ ID NO: 433918 - RNA, 23 nt, Artificial Sequence
  Synthetic
aggucaaaguuaaauuuuagaaa

SEQ ID NO: 433919 - RNA, 24 nt, Artificial Sequence
  Synthetic
aaggucaaaguuaaauuuuagaaa

SEQ ID NO: 433920 - RNA, 18 nt, Artificial Sequence
  Synthetic
ccugagauguuuuagaaa

SEQ ID NO: 433921 - RNA, 19 nt, Artificial Sequence
  Synthetic
cccugagauguuuuagaaa

SEQ ID NO: 433922 - RNA, 20 nt, Artificial Sequence
  Synthetic
gcccugagauguuuuagaaa

SEQ ID NO: 433923 - RNA, 21 nt, Artificial Sequence
  Synthetic
ggcccugagauguuuuagaaa

SEQ ID NO: 433924 - RNA, 22 nt, Artificial Sequence
  Synthetic
aggcccugagauguuuuagaaa

SEQ ID NO: 433925 - RNA, 23 nt, Artificial Sequence
  Synthetic
aaggcccugagauguuuuagaaa

SEQ ID NO: 433926 - RNA, 24 nt, Artificial Sequence
  Synthetic
aaaggcccugagauguuuuagaaa

SEQ ID NO: 433927 - RNA, 18 nt, Artificial Sequence
  Synthetic
caugagcugaacacgaaa

SEQ ID NO: 433928 - RNA, 19 nt, Artificial Sequence
  Synthetic
ucaugagcugaacacgaaa

SEQ ID NO: 433929 - RNA, 20 nt, Artificial Sequence
  Synthetic
aucaugagcugaacacgaaa

SEQ ID NO: 433930 - RNA, 21 nt, Artificial Sequence
  Synthetic
aaucaugagcugaacacgaaa

SEQ ID NO: 433931 - RNA, 22 nt, Artificial Sequence
  Synthetic
uaaucaugagcugaacacgaaa

SEQ ID NO: 433932 - RNA, 23 nt, Artificial Sequence
  Synthetic
auaaucaugagcugaacacgaaa

SEQ ID NO: 433933 - RNA, 24 nt, Artificial Sequence
  Synthetic
cauaaucaugagcugaacacgaaa

SEQ ID NO: 433934 - RNA, 18 nt, Artificial Sequence
  Synthetic
auuuuacaguugacgaaa

SEQ ID NO: 433935 - RNA, 19 nt, Artificial Sequence
  Synthetic
cauuuuacaguugacgaaa

SEQ ID NO: 433936 - RNA, 20 nt, Artificial Sequence
  Synthetic
ccauuuuacaguugacgaaa

SEQ ID NO: 433937 - RNA, 21 nt, Artificial Sequence
  Synthetic
cccauuuuacaguugacgaaa

SEQ ID NO: 433938 - RNA, 22 nt, Artificial Sequence
  Synthetic
ccccauuuuacaguugacgaaa

SEQ ID NO: 433939 - RNA, 23 nt, Artificial Sequence
  Synthetic
cccccauuuuacaguugacgaaa

SEQ ID NO: 433940 - RNA, 24 nt, Artificial Sequence
  Synthetic
ucccccauuuuacaguugacgaaa

SEQ ID NO: 433941 - RNA, 18 nt, Artificial Sequence
  Synthetic
ggauauuaugcaccgaaa

SEQ ID NO: 433942 - RNA, 19 nt, Artificial Sequence
  Synthetic
aggauauuaugcaccgaaa

SEQ ID NO: 433943 - RNA, 20 nt, Artificial Sequence
  Synthetic
uaggauauuaugcaccgaaa

SEQ ID NO: 433944 - RNA, 21 nt, Artificial Sequence
  Synthetic
auaggauauuaugcaccgaaa

SEQ ID NO: 433945 - RNA, 22 nt, Artificial Sequence
  Synthetic
cauaggauauuaugcaccgaaa

SEQ ID NO: 433946 - RNA, 23 nt, Artificial Sequence
  Synthetic
gcauaggauauuaugcaccgaaa

SEQ ID NO: 433947 - RNA, 24 nt, Artificial Sequence
  Synthetic
ugcauaggauauuaugcaccgaaa

SEQ ID NO: 433948 - RNA, 18 nt, Artificial Sequence
  Synthetic
gcuggggauagggcgaaa

SEQ ID NO: 433949 - RNA, 19 nt, Artificial Sequence
  Synthetic
ggcuggggauagggcgaaa

SEQ ID NO: 433950 - RNA, 20 nt, Artificial Sequence
  Synthetic
gggcuggggauagggcgaaa

SEQ ID NO: 433951 - RNA, 21 nt, Artificial Sequence
  Synthetic
ggggcuggggauagggcgaaa

SEQ ID NO: 433952 - RNA, 22 nt, Artificial Sequence
  Synthetic
aggggcuggggauagggcgaaa

SEQ ID NO: 433953 - RNA, 23 nt, Artificial Sequence
  Synthetic
caggggcuggggauagggcgaaa

SEQ ID NO: 433954 - RNA, 24 nt, Artificial Sequence
  Synthetic
ccaggggcuggggauagggcgaaa

SEQ ID NO: 433955 - RNA, 18 nt, Artificial Sequence
  Synthetic
gagaggcauguggcgaaa

SEQ ID NO: 433956 - RNA, 19 nt, Artificial Sequence
  Synthetic
agagaggcauguggcgaaa

SEQ ID NO: 433957 - RNA, 20 nt, Artificial Sequence
  Synthetic
gagagaggcauguggcgaaa

SEQ ID NO: 433958 - RNA, 21 nt, Artificial Sequence
  Synthetic
agagagaggcauguggcgaaa

SEQ ID NO: 433959 - RNA, 22 nt, Artificial Sequence
  Synthetic
gagagagaggcauguggcgaaa

SEQ ID NO: 433960 - RNA, 23 nt, Artificial Sequence
  Synthetic
agagagagaggcauguggcgaaa

SEQ ID NO: 433961 - RNA, 24 nt, Artificial Sequence
  Synthetic
aagagagagaggcauguggcgaaa

SEQ ID NO: 433962 - RNA, 18 nt, Artificial Sequence
  Synthetic
ggggggggagcugcgaaa

SEQ ID NO: 433963 - RNA, 19 nt, Artificial Sequence
  Synthetic
uggggggggagcugcgaaa

SEQ ID NO: 433964 - RNA, 20 nt, Artificial Sequence
  Synthetic
guggggggggagcugcgaaa

SEQ ID NO: 433965 - RNA, 21 nt, Artificial Sequence
  Synthetic
gguggggggggagcugcgaaa

SEQ ID NO: 433966 - RNA, 22 nt, Artificial Sequence
  Synthetic
ugguggggggggagcugcgaaa

SEQ ID NO: 433967 - RNA, 23 nt, Artificial Sequence
  Synthetic
uugguggggggggagcugcgaaa

SEQ ID NO: 433968 - RNA, 24 nt, Artificial Sequence
  Synthetic
guugguggggggggagcugcgaaa

SEQ ID NO: 433969 - RNA, 18 nt, Artificial Sequence
  Synthetic
caggagaaucacucgaaa

SEQ ID NO: 433970 - RNA, 19 nt, Artificial Sequence
  Synthetic
gcaggagaaucacucgaaa

SEQ ID NO: 433971 - RNA, 20 nt, Artificial Sequence
  Synthetic
ggcaggagaaucacucgaaa

SEQ ID NO: 433972 - RNA, 21 nt, Artificial Sequence
  Synthetic
aggcaggagaaucacucgaaa

SEQ ID NO: 433973 - RNA, 22 nt, Artificial Sequence
  Synthetic
gaggcaggagaaucacucgaaa

SEQ ID NO: 433974 - RNA, 23 nt, Artificial Sequence
  Synthetic
ugaggcaggagaaucacucgaaa

SEQ ID NO: 433975 - RNA, 24 nt, Artificial Sequence
  Synthetic
cugaggcaggagaaucacucgaaa

SEQ ID NO: 433976 - RNA, 18 nt, Artificial Sequence
  Synthetic
aaaguugagucuucgaaa

SEQ ID NO: 433977 - RNA, 19 nt, Artificial Sequence
  Synthetic
caaaguugagucuucgaaa

SEQ ID NO: 433978 - RNA, 20 nt, Artificial Sequence
  Synthetic
gcaaaguugagucuucgaaa

SEQ ID NO: 433979 - RNA, 21 nt, Artificial Sequence
  Synthetic
ugcaaaguugagucuucgaaa

SEQ ID NO: 433980 - RNA, 22 nt, Artificial Sequence
  Synthetic
gugcaaaguugagucuucgaaa

SEQ ID NO: 433981 - RNA, 23 nt, Artificial Sequence
  Synthetic
ugugcaaaguugagucuucgaaa

SEQ ID NO: 433982 - RNA, 24 nt, Artificial Sequence
  Synthetic
uugugcaaaguugagucuucgaaa

SEQ ID NO: 433983 - RNA, 18 nt, Artificial Sequence
  Synthetic
aauaaguguguuucgaaa

SEQ ID NO: 433984 - RNA, 19 nt, Artificial Sequence
  Synthetic
aaauaaguguguuucgaaa

SEQ ID NO: 433985 - RNA, 20 nt, Artificial Sequence
  Synthetic
aaaauaaguguguuucgaaa

SEQ ID NO: 433986 - RNA, 21 nt, Artificial Sequence
  Synthetic
aaaaauaaguguguuucgaaa

SEQ ID NO: 433987 - RNA, 22 nt, Artificial Sequence
  Synthetic
uaaaaauaaguguguuucgaaa

SEQ ID NO: 433988 - RNA, 23 nt, Artificial Sequence
  Synthetic
cuaaaaauaaguguguuucgaaa

SEQ ID NO: 433989 - RNA, 24 nt, Artificial Sequence
  Synthetic
ucuaaaaauaaguguguuucgaaa

SEQ ID NO: 433990 - RNA, 18 nt, Artificial Sequence
  Synthetic
auaugagcaaaaaggaaa

SEQ ID NO: 433991 - RNA, 19 nt, Artificial Sequence
  Synthetic
gauaugagcaaaaaggaaa

SEQ ID NO: 433992 - RNA, 20 nt, Artificial Sequence
  Synthetic
ugauaugagcaaaaaggaaa

SEQ ID NO: 433993 - RNA, 21 nt, Artificial Sequence
  Synthetic
augauaugagcaaaaaggaaa

SEQ ID NO: 433994 - RNA, 22 nt, Artificial Sequence
  Synthetic
aaugauaugagcaaaaaggaaa

SEQ ID NO: 433995 - RNA, 23 nt, Artificial Sequence
  Synthetic
uaaugauaugagcaaaaaggaaa

SEQ ID NO: 433996 - RNA, 24 nt, Artificial Sequence
  Synthetic
auaaugauaugagcaaaaaggaaa

SEQ ID NO: 433997 - RNA, 18 nt, Artificial Sequence
  Synthetic
uaauacauaaaaaggaaa

SEQ ID NO: 433998 - RNA, 19 nt, Artificial Sequence
  Synthetic
auaauacauaaaaaggaaa

SEQ ID NO: 433999 - RNA, 20 nt, Artificial Sequence
  Synthetic
cauaauacauaaaaaggaaa

SEQ ID NO: 434000 - RNA, 21 nt, Artificial Sequence
  Synthetic
acauaauacauaaaaaggaaa

SEQ ID NO: 434001 - RNA, 22 nt, Artificial Sequence
  Synthetic
aacauaauacauaaaaaggaaa

SEQ ID NO: 434002 - RNA, 23 nt, Artificial Sequence
  Synthetic
caacauaauacauaaaaaggaaa

SEQ ID NO: 434003 - RNA, 24 nt, Artificial Sequence
  Synthetic
ccaacauaauacauaaaaaggaaa

SEQ ID NO: 434004 - RNA, 18 nt, Artificial Sequence
  Synthetic
ggaaagauaaaaaggaaa

SEQ ID NO: 434005 - RNA, 19 nt, Artificial Sequence
  Synthetic
aggaaagauaaaaaggaaa

SEQ ID NO: 434006 - RNA, 20 nt, Artificial Sequence
  Synthetic
uaggaaagauaaaaaggaaa

SEQ ID NO: 434007 - RNA, 21 nt, Artificial Sequence
  Synthetic
guaggaaagauaaaaaggaaa

SEQ ID NO: 434008 - RNA, 22 nt, Artificial Sequence
  Synthetic
gguaggaaagauaaaaaggaaa

SEQ ID NO: 434009 - RNA, 23 nt, Artificial Sequence
  Synthetic
ugguaggaaagauaaaaaggaaa

SEQ ID NO: 434010 - RNA, 24 nt, Artificial Sequence
  Synthetic
augguaggaaagauaaaaaggaaa

SEQ ID NO: 434011 - RNA, 18 nt, Artificial Sequence
  Synthetic
aggaaaaggaaaaggaaa

SEQ ID NO: 434012 - RNA, 19 nt, Artificial Sequence
  Synthetic
aaggaaaaggaaaaggaaa

SEQ ID NO: 434013 - RNA, 20 nt, Artificial Sequence
  Synthetic
aaaggaaaaggaaaaggaaa

SEQ ID NO: 434014 - RNA, 21 nt, Artificial Sequence
  Synthetic
caaaggaaaaggaaaaggaaa

SEQ ID NO: 434015 - RNA, 22 nt, Artificial Sequence
  Synthetic
gcaaaggaaaaggaaaaggaaa

SEQ ID NO: 434016 - RNA, 23 nt, Artificial Sequence
  Synthetic
cgcaaaggaaaaggaaaaggaaa

SEQ ID NO: 434017 - RNA, 24 nt, Artificial Sequence
  Synthetic
acgcaaaggaaaaggaaaaggaaa

SEQ ID NO: 434018 - RNA, 18 nt, Artificial Sequence
  Synthetic
acgcaaaggaaaaggaaa

SEQ ID NO: 434019 - RNA, 19 nt, Artificial Sequence
  Synthetic
aacgcaaaggaaaaggaaa

SEQ ID NO: 434020 - RNA, 20 nt, Artificial Sequence
  Synthetic
gaacgcaaaggaaaaggaaa

SEQ ID NO: 434021 - RNA, 21 nt, Artificial Sequence
  Synthetic
ggaacgcaaaggaaaaggaaa

SEQ ID NO: 434022 - RNA, 22 nt, Artificial Sequence
  Synthetic
aggaacgcaaaggaaaaggaaa

SEQ ID NO: 434023 - RNA, 23 nt, Artificial Sequence
  Synthetic
aaggaacgcaaaggaaaaggaaa

SEQ ID NO: 434024 - RNA, 24 nt, Artificial Sequence
  Synthetic
aaaggaacgcaaaggaaaaggaaa

SEQ ID NO: 434025 - RNA, 18 nt, Artificial Sequence
  Synthetic
guuaaaagccaaaggaaa

SEQ ID NO: 434026 - RNA, 19 nt, Artificial Sequence
  Synthetic
uguuaaaagccaaaggaaa

SEQ ID NO: 434027 - RNA, 20 nt, Artificial Sequence
  Synthetic
guguuaaaagccaaaggaaa

SEQ ID NO: 434028 - RNA, 21 nt, Artificial Sequence
  Synthetic
aguguuaaaagccaaaggaaa

SEQ ID NO: 434029 - RNA, 22 nt, Artificial Sequence
  Synthetic
uaguguuaaaagccaaaggaaa

SEQ ID NO: 434030 - RNA, 23 nt, Artificial Sequence
  Synthetic
auaguguuaaaagccaaaggaaa

SEQ ID NO: 434031 - RNA, 24 nt, Artificial Sequence
  Synthetic
uauaguguuaaaagccaaaggaaa

SEQ ID NO: 434032 - RNA, 18 nt, Artificial Sequence
  Synthetic
aggggcaagcaaaggaaa

SEQ ID NO: 434033 - RNA, 19 nt, Artificial Sequence
  Synthetic
aaggggcaagcaaaggaaa

SEQ ID NO: 434034 - RNA, 20 nt, Artificial Sequence
  Synthetic
aaaggggcaagcaaaggaaa

SEQ ID NO: 434035 - RNA, 21 nt, Artificial Sequence
  Synthetic
caaaggggcaagcaaaggaaa

SEQ ID NO: 434036 - RNA, 22 nt, Artificial Sequence
  Synthetic
ucaaaggggcaagcaaaggaaa

SEQ ID NO: 434037 - RNA, 23 nt, Artificial Sequence
  Synthetic
cucaaaggggcaagcaaaggaaa

SEQ ID NO: 434038 - RNA, 24 nt, Artificial Sequence
  Synthetic
ucucaaaggggcaagcaaaggaaa

SEQ ID NO: 434039 - RNA, 18 nt, Artificial Sequence
  Synthetic
aaaggaacgcaaaggaaa

SEQ ID NO: 434040 - RNA, 19 nt, Artificial Sequence
  Synthetic
caaaggaacgcaaaggaaa

SEQ ID NO: 434041 - RNA, 20 nt, Artificial Sequence
  Synthetic
gcaaaggaacgcaaaggaaa

SEQ ID NO: 434042 - RNA, 21 nt, Artificial Sequence
  Synthetic
agcaaaggaacgcaaaggaaa

SEQ ID NO: 434043 - RNA, 22 nt, Artificial Sequence
  Synthetic
aagcaaaggaacgcaaaggaaa

SEQ ID NO: 434044 - RNA, 23 nt, Artificial Sequence
  Synthetic
aaagcaaaggaacgcaaaggaaa

SEQ ID NO: 434045 - RNA, 24 nt, Artificial Sequence
  Synthetic
gaaagcaaaggaacgcaaaggaaa

SEQ ID NO: 434046 - RNA, 18 nt, Artificial Sequence
  Synthetic
uaguacgugcaaaggaaa

SEQ ID NO: 434047 - RNA, 19 nt, Artificial Sequence
  Synthetic
auaguacgugcaaaggaaa

SEQ ID NO: 434048 - RNA, 20 nt, Artificial Sequence
  Synthetic
aauaguacgugcaaaggaaa

SEQ ID NO: 434049 - RNA, 21 nt, Artificial Sequence
  Synthetic
gaauaguacgugcaaaggaaa

SEQ ID NO: 434050 - RNA, 22 nt, Artificial Sequence
  Synthetic
ggaauaguacgugcaaaggaaa

SEQ ID NO: 434051 - RNA, 23 nt, Artificial Sequence
  Synthetic
cggaauaguacgugcaaaggaaa

SEQ ID NO: 434052 - RNA, 24 nt, Artificial Sequence
  Synthetic
acggaauaguacgugcaaaggaaa

SEQ ID NO: 434053 - RNA, 18 nt, Artificial Sequence
  Synthetic
uuuuucugcuaaaggaaa

SEQ ID NO: 434054 - RNA, 19 nt, Artificial Sequence
  Synthetic
uuuuuucugcuaaaggaaa

SEQ ID NO: 434055 - RNA, 20 nt, Artificial Sequence
  Synthetic
cuuuuuucugcuaaaggaaa

SEQ ID NO: 434056 - RNA, 21 nt, Artificial Sequence
  Synthetic
acuuuuuucugcuaaaggaaa

SEQ ID NO: 434057 - RNA, 22 nt, Artificial Sequence
  Synthetic
uacuuuuuucugcuaaaggaaa

SEQ ID NO: 434058 - RNA, 23 nt, Artificial Sequence
  Synthetic
uuacuuuuuucugcuaaaggaaa

SEQ ID NO: 434059 - RNA, 24 nt, Artificial Sequence
  Synthetic
cuuacuuuuuucugcuaaaggaaa

SEQ ID NO: 434060 - RNA, 18 nt, Artificial Sequence
  Synthetic
cuuuuauagacaaggaaa

SEQ ID NO: 434061 - RNA, 19 nt, Artificial Sequence
  Synthetic
ccuuuuauagacaaggaaa

SEQ ID NO: 434062 - RNA, 20 nt, Artificial Sequence
  Synthetic
cccuuuuauagacaaggaaa

SEQ ID NO: 434063 - RNA, 21 nt, Artificial Sequence
  Synthetic
acccuuuuauagacaaggaaa

SEQ ID NO: 434064 - RNA, 22 nt, Artificial Sequence
  Synthetic
cacccuuuuauagacaaggaaa

SEQ ID NO: 434065 - RNA, 23 nt, Artificial Sequence
  Synthetic
acacccuuuuauagacaaggaaa

SEQ ID NO: 434066 - RNA, 24 nt, Artificial Sequence
  Synthetic
uacacccuuuuauagacaaggaaa

SEQ ID NO: 434067 - RNA, 18 nt, Artificial Sequence
  Synthetic
aguucuugaagaaggaaa

SEQ ID NO: 434068 - RNA, 19 nt, Artificial Sequence
  Synthetic
caguucuugaagaaggaaa

SEQ ID NO: 434069 - RNA, 20 nt, Artificial Sequence
  Synthetic
ucaguucuugaagaaggaaa

SEQ ID NO: 434070 - RNA, 21 nt, Artificial Sequence
  Synthetic
aucaguucuugaagaaggaaa

SEQ ID NO: 434071 - RNA, 22 nt, Artificial Sequence
  Synthetic
aaucaguucuugaagaaggaaa

SEQ ID NO: 434072 - RNA, 23 nt, Artificial Sequence
  Synthetic
uaaucaguucuugaagaaggaaa

SEQ ID NO: 434073 - RNA, 24 nt, Artificial Sequence
  Synthetic
cuaaucaguucuugaagaaggaaa

SEQ ID NO: 434074 - RNA, 18 nt, Artificial Sequence
  Synthetic
aagaaauuaagaaggaaa

SEQ ID NO: 434075 - RNA, 19 nt, Artificial Sequence
  Synthetic
gaagaaauuaagaaggaaa

SEQ ID NO: 434076 - RNA, 20 nt, Artificial Sequence
  Synthetic
ugaagaaauuaagaaggaaa

SEQ ID NO: 434077 - RNA, 21 nt, Artificial Sequence
  Synthetic
augaagaaauuaagaaggaaa

SEQ ID NO: 434078 - RNA, 22 nt, Artificial Sequence
  Synthetic
uaugaagaaauuaagaaggaaa

SEQ ID NO: 434079 - RNA, 23 nt, Artificial Sequence
  Synthetic
cuaugaagaaauuaagaaggaaa

SEQ ID NO: 434080 - RNA, 24 nt, Artificial Sequence
  Synthetic
ucuaugaagaaauuaagaaggaaa

SEQ ID NO: 434081 - RNA, 18 nt, Artificial Sequence
  Synthetic
guaaucaagggaaggaaa

SEQ ID NO: 434082 - RNA, 19 nt, Artificial Sequence
  Synthetic
gguaaucaagggaaggaaa

SEQ ID NO: 434083 - RNA, 20 nt, Artificial Sequence
  Synthetic
ggguaaucaagggaaggaaa

SEQ ID NO: 434084 - RNA, 21 nt, Artificial Sequence
  Synthetic
aggguaaucaagggaaggaaa

SEQ ID NO: 434085 - RNA, 22 nt, Artificial Sequence
  Synthetic
caggguaaucaagggaaggaaa

SEQ ID NO: 434086 - RNA, 23 nt, Artificial Sequence
  Synthetic
gcaggguaaucaagggaaggaaa

SEQ ID NO: 434087 - RNA, 24 nt, Artificial Sequence
  Synthetic
ggcaggguaaucaagggaaggaaa

SEQ ID NO: 434088 - RNA, 18 nt, Artificial Sequence
  Synthetic
caaauugggggaaggaaa

SEQ ID NO: 434089 - RNA, 19 nt, Artificial Sequence
  Synthetic
ucaaauugggggaaggaaa

SEQ ID NO: 434090 - RNA, 20 nt, Artificial Sequence
  Synthetic
gucaaauugggggaaggaaa

SEQ ID NO: 434091 - RNA, 21 nt, Artificial Sequence
  Synthetic
ggucaaauugggggaaggaaa

SEQ ID NO: 434092 - RNA, 22 nt, Artificial Sequence
  Synthetic
uggucaaauugggggaaggaaa

SEQ ID NO: 434093 - RNA, 23 nt, Artificial Sequence
  Synthetic
cuggucaaauugggggaaggaaa

SEQ ID NO: 434094 - RNA, 24 nt, Artificial Sequence
  Synthetic
ucuggucaaauugggggaaggaaa

SEQ ID NO: 434095 - RNA, 18 nt, Artificial Sequence
  Synthetic
aaaaaacugggaaggaaa

SEQ ID NO: 434096 - RNA, 19 nt, Artificial Sequence
  Synthetic
aaaaaaacugggaaggaaa

SEQ ID NO: 434097 - RNA, 20 nt, Artificial Sequence
  Synthetic
uaaaaaaacugggaaggaaa

SEQ ID NO: 434098 - RNA, 21 nt, Artificial Sequence
  Synthetic
uuaaaaaaacugggaaggaaa

SEQ ID NO: 434099 - RNA, 22 nt, Artificial Sequence
  Synthetic
cuuaaaaaaacugggaaggaaa

SEQ ID NO: 434100 - RNA, 23 nt, Artificial Sequence
  Synthetic
acuuaaaaaaacugggaaggaaa

SEQ ID NO: 434101 - RNA, 24 nt, Artificial Sequence
  Synthetic
uacuuaaaaaaacugggaaggaaa

SEQ ID NO: 434102 - RNA, 18 nt, Artificial Sequence
  Synthetic
agcaugcugggaaggaaa

SEQ ID NO: 434103 - RNA, 19 nt, Artificial Sequence
  Synthetic
cagcaugcugggaaggaaa

SEQ ID NO: 434104 - RNA, 20 nt, Artificial Sequence
  Synthetic
ccagcaugcugggaaggaaa

SEQ ID NO: 434105 - RNA, 21 nt, Artificial Sequence
  Synthetic
accagcaugcugggaaggaaa

SEQ ID NO: 434106 - RNA, 22 nt, Artificial Sequence
  Synthetic
uaccagcaugcugggaaggaaa

SEQ ID NO: 434107 - RNA, 23 nt, Artificial Sequence
  Synthetic
guaccagcaugcugggaaggaaa

SEQ ID NO: 434108 - RNA, 24 nt, Artificial Sequence
  Synthetic
uguaccagcaugcugggaaggaaa

SEQ ID NO: 434109 - RNA, 18 nt, Artificial Sequence
  Synthetic
guccaucugggaaggaaa

SEQ ID NO: 434110 - RNA, 19 nt, Artificial Sequence
  Synthetic
aguccaucugggaaggaaa

SEQ ID NO: 434111 - RNA, 20 nt, Artificial Sequence
  Synthetic
aaguccaucugggaaggaaa

SEQ ID NO: 434112 - RNA, 21 nt, Artificial Sequence
  Synthetic
uaaguccaucugggaaggaaa

SEQ ID NO: 434113 - RNA, 22 nt, Artificial Sequence
  Synthetic
uuaaguccaucugggaaggaaa

SEQ ID NO: 434114 - RNA, 23 nt, Artificial Sequence
  Synthetic
cuuaaguccaucugggaaggaaa

SEQ ID NO: 434115 - RNA, 24 nt, Artificial Sequence
  Synthetic
acuuaaguccaucugggaaggaaa

SEQ ID NO: 434116 - RNA, 18 nt, Artificial Sequence
  Synthetic
cggguugugggaaggaaa

SEQ ID NO: 434117 - RNA, 19 nt, Artificial Sequence
  Synthetic
ucggguugugggaaggaaa

SEQ ID NO: 434118 - RNA, 20 nt, Artificial Sequence
  Synthetic
uucggguugugggaaggaaa

SEQ ID NO: 434119 - RNA, 21 nt, Artificial Sequence
  Synthetic
cuucggguugugggaaggaaa

SEQ ID NO: 434120 - RNA, 22 nt, Artificial Sequence
  Synthetic
ucuucggguugugggaaggaaa

SEQ ID NO: 434121 - RNA, 23 nt, Artificial Sequence
  Synthetic
uucuucggguugugggaaggaaa

SEQ ID NO: 434122 - RNA, 24 nt, Artificial Sequence
  Synthetic
auucuucggguugugggaaggaaa

SEQ ID NO: 434123 - RNA, 18 nt, Artificial Sequence
  Synthetic
auuuuauauggaaggaaa

SEQ ID NO: 434124 - RNA, 19 nt, Artificial Sequence
  Synthetic
cauuuuauauggaaggaaa

SEQ ID NO: 434125 - RNA, 20 nt, Artificial Sequence
  Synthetic
ucauuuuauauggaaggaaa

SEQ ID NO: 434126 - RNA, 21 nt, Artificial Sequence
  Synthetic
uucauuuuauauggaaggaaa

SEQ ID NO: 434127 - RNA, 22 nt, Artificial Sequence
  Synthetic
cuucauuuuauauggaaggaaa

SEQ ID NO: 434128 - RNA, 23 nt, Artificial Sequence
  Synthetic
ucuucauuuuauauggaaggaaa

SEQ ID NO: 434129 - RNA, 24 nt, Artificial Sequence
  Synthetic
aucuucauuuuauauggaaggaaa

SEQ ID NO: 434130 - RNA, 18 nt, Artificial Sequence
  Synthetic
gagcagaacugaaggaaa

SEQ ID NO: 434131 - RNA, 19 nt, Artificial Sequence
  Synthetic
agagcagaacugaaggaaa

SEQ ID NO: 434132 - RNA, 20 nt, Artificial Sequence
  Synthetic
cagagcagaacugaaggaaa

SEQ ID NO: 434133 - RNA, 21 nt, Artificial Sequence
  Synthetic
ucagagcagaacugaaggaaa

SEQ ID NO: 434134 - RNA, 22 nt, Artificial Sequence
  Synthetic
aucagagcagaacugaaggaaa

SEQ ID NO: 434135 - RNA, 23 nt, Artificial Sequence
  Synthetic
aaucagagcagaacugaaggaaa

SEQ ID NO: 434136 - RNA, 24 nt, Artificial Sequence
  Synthetic
aaaucagagcagaacugaaggaaa

SEQ ID NO: 434137 - RNA, 18 nt, Artificial Sequence
  Synthetic
agccaaaucauaaggaaa

SEQ ID NO: 434138 - RNA, 19 nt, Artificial Sequence
  Synthetic
uagccaaaucauaaggaaa

SEQ ID NO: 434139 - RNA, 20 nt, Artificial Sequence
  Synthetic
uuagccaaaucauaaggaaa

SEQ ID NO: 434140 - RNA, 21 nt, Artificial Sequence
  Synthetic
cuuagccaaaucauaaggaaa

SEQ ID NO: 434141 - RNA, 22 nt, Artificial Sequence
  Synthetic
gcuuagccaaaucauaaggaaa

SEQ ID NO: 434142 - RNA, 23 nt, Artificial Sequence
  Synthetic
agcuuagccaaaucauaaggaaa

SEQ ID NO: 434143 - RNA, 24 nt, Artificial Sequence
  Synthetic
uagcuuagccaaaucauaaggaaa

SEQ ID NO: 434144 - RNA, 18 nt, Artificial Sequence
  Synthetic
uuuagguugcuaaggaaa

SEQ ID NO: 434145 - RNA, 19 nt, Artificial Sequence
  Synthetic
cuuuagguugcuaaggaaa

SEQ ID NO: 434146 - RNA, 20 nt, Artificial Sequence
  Synthetic
gcuuuagguugcuaaggaaa

SEQ ID NO: 434147 - RNA, 21 nt, Artificial Sequence
  Synthetic
ugcuuuagguugcuaaggaaa

SEQ ID NO: 434148 - RNA, 22 nt, Artificial Sequence
  Synthetic
augcuuuagguugcuaaggaaa

SEQ ID NO: 434149 - RNA, 23 nt, Artificial Sequence
  Synthetic
caugcuuuagguugcuaaggaaa

SEQ ID NO: 434150 - RNA, 24 nt, Artificial Sequence
  Synthetic
ucaugcuuuagguugcuaaggaaa

SEQ ID NO: 434151 - RNA, 18 nt, Artificial Sequence
  Synthetic
ugucuagggguaaggaaa

SEQ ID NO: 434152 - RNA, 19 nt, Artificial Sequence
  Synthetic
gugucuagggguaaggaaa

SEQ ID NO: 434153 - RNA, 20 nt, Artificial Sequence
  Synthetic
agugucuagggguaaggaaa

SEQ ID NO: 434154 - RNA, 21 nt, Artificial Sequence
  Synthetic
gagugucuagggguaaggaaa

SEQ ID NO: 434155 - RNA, 22 nt, Artificial Sequence
  Synthetic
agagugucuagggguaaggaaa

SEQ ID NO: 434156 - RNA, 23 nt, Artificial Sequence
  Synthetic
uagagugucuagggguaaggaaa

SEQ ID NO: 434157 - RNA, 24 nt, Artificial Sequence
  Synthetic
auagagugucuagggguaaggaaa

SEQ ID NO: 434158 - RNA, 18 nt, Artificial Sequence
  Synthetic
guguuuuuguuaaggaaa

SEQ ID NO: 434159 - RNA, 19 nt, Artificial Sequence
  Synthetic
uguguuuuuguuaaggaaa

SEQ ID NO: 434160 - RNA, 20 nt, Artificial Sequence
  Synthetic
auguguuuuuguuaaggaaa

SEQ ID NO: 434161 - RNA, 21 nt, Artificial Sequence
  Synthetic
gauguguuuuuguuaaggaaa

SEQ ID NO: 434162 - RNA, 22 nt, Artificial Sequence
  Synthetic
ggauguguuuuuguuaaggaaa

SEQ ID NO: 434163 - RNA, 23 nt, Artificial Sequence
  Synthetic
uggauguguuuuuguuaaggaaa

SEQ ID NO: 434164 - RNA, 24 nt, Artificial Sequence
  Synthetic
uuggauguguuuuuguuaaggaaa

SEQ ID NO: 434165 - RNA, 18 nt, Artificial Sequence
  Synthetic
ggaaggcuacccaggaaa

SEQ ID NO: 434166 - RNA, 19 nt, Artificial Sequence
  Synthetic
uggaaggcuacccaggaaa

SEQ ID NO: 434167 - RNA, 20 nt, Artificial Sequence
  Synthetic
uuggaaggcuacccaggaaa

SEQ ID NO: 434168 - RNA, 21 nt, Artificial Sequence
  Synthetic
cuuggaaggcuacccaggaaa

SEQ ID NO: 434169 - RNA, 22 nt, Artificial Sequence
  Synthetic
ucuuggaaggcuacccaggaaa

SEQ ID NO: 434170 - RNA, 23 nt, Artificial Sequence
  Synthetic
uucuuggaaggcuacccaggaaa

SEQ ID NO: 434171 - RNA, 24 nt, Artificial Sequence
  Synthetic
auucuuggaaggcuacccaggaaa

SEQ ID NO: 434172 - RNA, 18 nt, Artificial Sequence
  Synthetic
caaaaacaaggcaggaaa

SEQ ID NO: 434173 - RNA, 19 nt, Artificial Sequence
  Synthetic
acaaaaacaaggcaggaaa

SEQ ID NO: 434174 - RNA, 20 nt, Artificial Sequence
  Synthetic
gacaaaaacaaggcaggaaa

SEQ ID NO: 434175 - RNA, 21 nt, Artificial Sequence
  Synthetic
agacaaaaacaaggcaggaaa

SEQ ID NO: 434176 - RNA, 22 nt, Artificial Sequence
  Synthetic
cagacaaaaacaaggcaggaaa

SEQ ID NO: 434177 - RNA, 23 nt, Artificial Sequence
  Synthetic
ucagacaaaaacaaggcaggaaa

SEQ ID NO: 434178 - RNA, 24 nt, Artificial Sequence
  Synthetic
cucagacaaaaacaaggcaggaaa

SEQ ID NO: 434179 - RNA, 18 nt, Artificial Sequence
  Synthetic
gggcgaucaggcaggaaa

SEQ ID NO: 434180 - RNA, 19 nt, Artificial Sequence
  Synthetic
agggcgaucaggcaggaaa

SEQ ID NO: 434181 - RNA, 20 nt, Artificial Sequence
  Synthetic
cagggcgaucaggcaggaaa

SEQ ID NO: 434182 - RNA, 21 nt, Artificial Sequence
  Synthetic
ccagggcgaucaggcaggaaa

SEQ ID NO: 434183 - RNA, 22 nt, Artificial Sequence
  Synthetic
gccagggcgaucaggcaggaaa

SEQ ID NO: 434184 - RNA, 23 nt, Artificial Sequence
  Synthetic
ggccagggcgaucaggcaggaaa

SEQ ID NO: 434185 - RNA, 24 nt, Artificial Sequence
  Synthetic
uggccagggcgaucaggcaggaaa

SEQ ID NO: 434186 - RNA, 18 nt, Artificial Sequence
  Synthetic
uuuguugggaucaggaaa

SEQ ID NO: 434187 - RNA, 19 nt, Artificial Sequence
  Synthetic
auuuguugggaucaggaaa

SEQ ID NO: 434188 - RNA, 20 nt, Artificial Sequence
  Synthetic
uauuuguugggaucaggaaa

SEQ ID NO: 434189 - RNA, 21 nt, Artificial Sequence
  Synthetic
cuauuuguugggaucaggaaa

SEQ ID NO: 434190 - RNA, 22 nt, Artificial Sequence
  Synthetic
acuauuuguugggaucaggaaa

SEQ ID NO: 434191 - RNA, 23 nt, Artificial Sequence
  Synthetic
aacuauuuguugggaucaggaaa

SEQ ID NO: 434192 - RNA, 24 nt, Artificial Sequence
  Synthetic
aaacuauuuguugggaucaggaaa

SEQ ID NO: 434193 - RNA, 18 nt, Artificial Sequence
  Synthetic
uuggacagucucaggaaa

SEQ ID NO: 434194 - RNA, 19 nt, Artificial Sequence
  Synthetic
auuggacagucucaggaaa

SEQ ID NO: 434195 - RNA, 20 nt, Artificial Sequence
  Synthetic
aauuggacagucucaggaaa

SEQ ID NO: 434196 - RNA, 21 nt, Artificial Sequence
  Synthetic
aaauuggacagucucaggaaa

SEQ ID NO: 434197 - RNA, 22 nt, Artificial Sequence
  Synthetic
aaaauuggacagucucaggaaa

SEQ ID NO: 434198 - RNA, 23 nt, Artificial Sequence
  Synthetic
gaaaauuggacagucucaggaaa

SEQ ID NO: 434199 - RNA, 24 nt, Artificial Sequence
  Synthetic
ggaaaauuggacagucucaggaaa

SEQ ID NO: 434200 - RNA, 18 nt, Artificial Sequence
  Synthetic
gaugggauguucaggaaa

SEQ ID NO: 434201 - RNA, 19 nt, Artificial Sequence
  Synthetic
ugaugggauguucaggaaa

SEQ ID NO: 434202 - RNA, 20 nt, Artificial Sequence
  Synthetic
gugaugggauguucaggaaa

SEQ ID NO: 434203 - RNA, 21 nt, Artificial Sequence
  Synthetic
agugaugggauguucaggaaa

SEQ ID NO: 434204 - RNA, 22 nt, Artificial Sequence
  Synthetic
aagugaugggauguucaggaaa

SEQ ID NO: 434205 - RNA, 23 nt, Artificial Sequence
  Synthetic
gaagugaugggauguucaggaaa

SEQ ID NO: 434206 - RNA, 24 nt, Artificial Sequence
  Synthetic
ugaagugaugggauguucaggaaa

SEQ ID NO: 434207 - RNA, 18 nt, Artificial Sequence
  Synthetic
aaauagaaacagaggaaa

SEQ ID NO: 434208 - RNA, 19 nt, Artificial Sequence
  Synthetic
caaauagaaacagaggaaa

SEQ ID NO: 434209 - RNA, 20 nt, Artificial Sequence
  Synthetic
acaaauagaaacagaggaaa

SEQ ID NO: 434210 - RNA, 21 nt, Artificial Sequence
  Synthetic
aacaaauagaaacagaggaaa

SEQ ID NO: 434211 - RNA, 22 nt, Artificial Sequence
  Synthetic
aaacaaauagaaacagaggaaa

SEQ ID NO: 434212 - RNA, 23 nt, Artificial Sequence
  Synthetic
gaaacaaauagaaacagaggaaa

SEQ ID NO: 434213 - RNA, 24 nt, Artificial Sequence
  Synthetic
agaaacaaauagaaacagaggaaa

SEQ ID NO: 434214 - RNA, 18 nt, Artificial Sequence
  Synthetic
aggaaauuucagaggaaa

SEQ ID NO: 434215 - RNA, 19 nt, Artificial Sequence
  Synthetic
gaggaaauuucagaggaaa

SEQ ID NO: 434216 - RNA, 20 nt, Artificial Sequence
  Synthetic
ugaggaaauuucagaggaaa

SEQ ID NO: 434217 - RNA, 21 nt, Artificial Sequence
  Synthetic
uugaggaaauuucagaggaaa

SEQ ID NO: 434218 - RNA, 22 nt, Artificial Sequence
  Synthetic
uuugaggaaauuucagaggaaa

SEQ ID NO: 434219 - RNA, 23 nt, Artificial Sequence
  Synthetic
auuugaggaaauuucagaggaaa

SEQ ID NO: 434220 - RNA, 24 nt, Artificial Sequence
  Synthetic
uauuugaggaaauuucagaggaaa

SEQ ID NO: 434221 - RNA, 18 nt, Artificial Sequence
  Synthetic
ggaaaggaggagaggaaa

SEQ ID NO: 434222 - RNA, 19 nt, Artificial Sequence
  Synthetic
aggaaaggaggagaggaaa

SEQ ID NO: 434223 - RNA, 20 nt, Artificial Sequence
  Synthetic
caggaaaggaggagaggaaa

SEQ ID NO: 434224 - RNA, 21 nt, Artificial Sequence
  Synthetic
acaggaaaggaggagaggaaa

SEQ ID NO: 434225 - RNA, 22 nt, Artificial Sequence
  Synthetic
aacaggaaaggaggagaggaaa

SEQ ID NO: 434226 - RNA, 23 nt, Artificial Sequence
  Synthetic
gaacaggaaaggaggagaggaaa

SEQ ID NO: 434227 - RNA, 24 nt, Artificial Sequence
  Synthetic
ggaacaggaaaggaggagaggaaa

SEQ ID NO: 434228 - RNA, 18 nt, Artificial Sequence
  Synthetic
cuagauaccuagaggaaa

SEQ ID NO: 434229 - RNA, 19 nt, Artificial Sequence
  Synthetic
ucuagauaccuagaggaaa

SEQ ID NO: 434230 - RNA, 20 nt, Artificial Sequence
  Synthetic
cucuagauaccuagaggaaa

SEQ ID NO: 434231 - RNA, 21 nt, Artificial Sequence
  Synthetic
gcucuagauaccuagaggaaa

SEQ ID NO: 434232 - RNA, 22 nt, Artificial Sequence
  Synthetic
ugcucuagauaccuagaggaaa

SEQ ID NO: 434233 - RNA, 23 nt, Artificial Sequence
  Synthetic
uugcucuagauaccuagaggaaa

SEQ ID NO: 434234 - RNA, 24 nt, Artificial Sequence
  Synthetic
uuugcucuagauaccuagaggaaa

SEQ ID NO: 434235 - RNA, 18 nt, Artificial Sequence
  Synthetic
cugaaggaaaggaggaaa

SEQ ID NO: 434236 - RNA, 19 nt, Artificial Sequence
  Synthetic
acugaaggaaaggaggaaa

SEQ ID NO: 434237 - RNA, 20 nt, Artificial Sequence
  Synthetic
aacugaaggaaaggaggaaa

SEQ ID NO: 434238 - RNA, 21 nt, Artificial Sequence
  Synthetic
gaacugaaggaaaggaggaaa

SEQ ID NO: 434239 - RNA, 22 nt, Artificial Sequence
  Synthetic
ugaacugaaggaaaggaggaaa

SEQ ID NO: 434240 - RNA, 23 nt, Artificial Sequence
  Synthetic
gugaacugaaggaaaggaggaaa

SEQ ID NO: 434241 - RNA, 24 nt, Artificial Sequence
  Synthetic
agugaacugaaggaaaggaggaaa

SEQ ID NO: 434242 - RNA, 18 nt, Artificial Sequence
  Synthetic
agagguagcaggaggaaa

SEQ ID NO: 434243 - RNA, 19 nt, Artificial Sequence
  Synthetic
gagagguagcaggaggaaa

SEQ ID NO: 434244 - RNA, 20 nt, Artificial Sequence
  Synthetic
agagagguagcaggaggaaa

SEQ ID NO: 434245 - RNA, 21 nt, Artificial Sequence
  Synthetic
uagagagguagcaggaggaaa

SEQ ID NO: 434246 - RNA, 22 nt, Artificial Sequence
  Synthetic
guagagagguagcaggaggaaa

SEQ ID NO: 434247 - RNA, 23 nt, Artificial Sequence
  Synthetic
gguagagagguagcaggaggaaa

SEQ ID NO: 434248 - RNA, 24 nt, Artificial Sequence
  Synthetic
ggguagagagguagcaggaggaaa

SEQ ID NO: 434249 - RNA, 18 nt, Artificial Sequence
  Synthetic
caaugaagaaugaggaaa

SEQ ID NO: 434250 - RNA, 19 nt, Artificial Sequence
  Synthetic
gcaaugaagaaugaggaaa

SEQ ID NO: 434251 - RNA, 20 nt, Artificial Sequence
  Synthetic
agcaaugaagaaugaggaaa

SEQ ID NO: 434252 - RNA, 21 nt, Artificial Sequence
  Synthetic
gagcaaugaagaaugaggaaa

SEQ ID NO: 434253 - RNA, 22 nt, Artificial Sequence
  Synthetic
agagcaaugaagaaugaggaaa

SEQ ID NO: 434254 - RNA, 23 nt, Artificial Sequence
  Synthetic
aagagcaaugaagaaugaggaaa

SEQ ID NO: 434255 - RNA, 24 nt, Artificial Sequence
  Synthetic
aaagagcaaugaagaaugaggaaa

SEQ ID NO: 434256 - RNA, 18 nt, Artificial Sequence
  Synthetic
auuuugaugaugaggaaa

SEQ ID NO: 434257 - RNA, 19 nt, Artificial Sequence
  Synthetic
gauuuugaugaugaggaaa

SEQ ID NO: 434258 - RNA, 20 nt, Artificial Sequence
  Synthetic
ugauuuugaugaugaggaaa

SEQ ID NO: 434259 - RNA, 21 nt, Artificial Sequence
  Synthetic
augauuuugaugaugaggaaa

SEQ ID NO: 434260 - RNA, 22 nt, Artificial Sequence
  Synthetic
gaugauuuugaugaugaggaaa

SEQ ID NO: 434261 - RNA, 23 nt, Artificial Sequence
  Synthetic
ugaugauuuugaugaugaggaaa

SEQ ID NO: 434262 - RNA, 24 nt, Artificial Sequence
  Synthetic
augaugauuuugaugaugaggaaa

SEQ ID NO: 434263 - RNA, 18 nt, Artificial Sequence
  Synthetic
uguuaauguaugaggaaa

SEQ ID NO: 434264 - RNA, 19 nt, Artificial Sequence
  Synthetic
uuguuaauguaugaggaaa

SEQ ID NO: 434265 - RNA, 20 nt, Artificial Sequence
  Synthetic
uuuguuaauguaugaggaaa

SEQ ID NO: 434266 - RNA, 21 nt, Artificial Sequence
  Synthetic
uuuuguuaauguaugaggaaa

SEQ ID NO: 434267 - RNA, 22 nt, Artificial Sequence
  Synthetic
cuuuuguuaauguaugaggaaa

SEQ ID NO: 434268 - RNA, 23 nt, Artificial Sequence
  Synthetic
ucuuuuguuaauguaugaggaaa

SEQ ID NO: 434269 - RNA, 24 nt, Artificial Sequence
  Synthetic
cucuuuuguuaauguaugaggaaa

SEQ ID NO: 434270 - RNA, 18 nt, Artificial Sequence
  Synthetic
gaaaacuuuaugaggaaa

SEQ ID NO: 434271 - RNA, 19 nt, Artificial Sequence
  Synthetic
agaaaacuuuaugaggaaa

SEQ ID NO: 434272 - RNA, 20 nt, Artificial Sequence
  Synthetic
cagaaaacuuuaugaggaaa

SEQ ID NO: 434273 - RNA, 21 nt, Artificial Sequence
  Synthetic
acagaaaacuuuaugaggaaa

SEQ ID NO: 434274 - RNA, 22 nt, Artificial Sequence
  Synthetic
aacagaaaacuuuaugaggaaa

SEQ ID NO: 434275 - RNA, 23 nt, Artificial Sequence
  Synthetic
aaacagaaaacuuuaugaggaaa

SEQ ID NO: 434276 - RNA, 24 nt, Artificial Sequence
  Synthetic
gaaacagaaaacuuuaugaggaaa

SEQ ID NO: 434277 - RNA, 18 nt, Artificial Sequence
  Synthetic
gggggguggcugaggaaa

SEQ ID NO: 434278 - RNA, 19 nt, Artificial Sequence
  Synthetic
agggggguggcugaggaaa

SEQ ID NO: 434279 - RNA, 20 nt, Artificial Sequence
  Synthetic
gagggggguggcugaggaaa

SEQ ID NO: 434280 - RNA, 21 nt, Artificial Sequence
  Synthetic
ugagggggguggcugaggaaa

SEQ ID NO: 434281 - RNA, 22 nt, Artificial Sequence
  Synthetic
uugagggggguggcugaggaaa

SEQ ID NO: 434282 - RNA, 23 nt, Artificial Sequence
  Synthetic
guugagggggguggcugaggaaa

SEQ ID NO: 434283 - RNA, 24 nt, Artificial Sequence
  Synthetic
aguugagggggguggcugaggaaa

SEQ ID NO: 434284 - RNA, 18 nt, Artificial Sequence
  Synthetic
caaccuuauuugaggaaa

SEQ ID NO: 434285 - RNA, 19 nt, Artificial Sequence
  Synthetic
acaaccuuauuugaggaaa

SEQ ID NO: 434286 - RNA, 20 nt, Artificial Sequence
  Synthetic
cacaaccuuauuugaggaaa

SEQ ID NO: 434287 - RNA, 21 nt, Artificial Sequence
  Synthetic
ucacaaccuuauuugaggaaa

SEQ ID NO: 434288 - RNA, 22 nt, Artificial Sequence
  Synthetic
cucacaaccuuauuugaggaaa

SEQ ID NO: 434289 - RNA, 23 nt, Artificial Sequence
  Synthetic
acucacaaccuuauuugaggaaa

SEQ ID NO: 434290 - RNA, 24 nt, Artificial Sequence
  Synthetic
gacucacaaccuuauuugaggaaa

SEQ ID NO: 434291 - RNA, 18 nt, Artificial Sequence
  Synthetic
auuaacugaaauaggaaa

SEQ ID NO: 434292 - RNA, 19 nt, Artificial Sequence
  Synthetic
cauuaacugaaauaggaaa

SEQ ID NO: 434293 - RNA, 20 nt, Artificial Sequence
  Synthetic
ucauuaacugaaauaggaaa

SEQ ID NO: 434294 - RNA, 21 nt, Artificial Sequence
  Synthetic
uucauuaacugaaauaggaaa

SEQ ID NO: 434295 - RNA, 22 nt, Artificial Sequence
  Synthetic
auucauuaacugaaauaggaaa

SEQ ID NO: 434296 - RNA, 23 nt, Artificial Sequence
  Synthetic
gauucauuaacugaaauaggaaa

SEQ ID NO: 434297 - RNA, 24 nt, Artificial Sequence
  Synthetic
ugauucauuaacugaaauaggaaa

SEQ ID NO: 434298 - RNA, 18 nt, Artificial Sequence
  Synthetic
ggaagagcaucuaggaaa

SEQ ID NO: 434299 - RNA, 19 nt, Artificial Sequence
  Synthetic
gggaagagcaucuaggaaa

SEQ ID NO: 434300 - RNA, 20 nt, Artificial Sequence
  Synthetic
agggaagagcaucuaggaaa

SEQ ID NO: 434301 - RNA, 21 nt, Artificial Sequence
  Synthetic
aagggaagagcaucuaggaaa

SEQ ID NO: 434302 - RNA, 22 nt, Artificial Sequence
  Synthetic
caagggaagagcaucuaggaaa

SEQ ID NO: 434303 - RNA, 23 nt, Artificial Sequence
  Synthetic
gcaagggaagagcaucuaggaaa

SEQ ID NO: 434304 - RNA, 24 nt, Artificial Sequence
  Synthetic
agcaagggaagagcaucuaggaaa

SEQ ID NO: 434305 - RNA, 18 nt, Artificial Sequence
  Synthetic
cuucauagcaguaggaaa

SEQ ID NO: 434306 - RNA, 19 nt, Artificial Sequence
  Synthetic
ucuucauagcaguaggaaa

SEQ ID NO: 434307 - RNA, 20 nt, Artificial Sequence
  Synthetic
uucuucauagcaguaggaaa

SEQ ID NO: 434308 - RNA, 21 nt, Artificial Sequence
  Synthetic
uuucuucauagcaguaggaaa

SEQ ID NO: 434309 - RNA, 22 nt, Artificial Sequence
  Synthetic
auuucuucauagcaguaggaaa

SEQ ID NO: 434310 - RNA, 23 nt, Artificial Sequence
  Synthetic
uauuucuucauagcaguaggaaa

SEQ ID NO: 434311 - RNA, 24 nt, Artificial Sequence
  Synthetic
guauuucuucauagcaguaggaaa

SEQ ID NO: 434312 - RNA, 18 nt, Artificial Sequence
  Synthetic
ucauuaaugauuaggaaa

SEQ ID NO: 434313 - RNA, 19 nt, Artificial Sequence
  Synthetic
aucauuaaugauuaggaaa

SEQ ID NO: 434314 - RNA, 20 nt, Artificial Sequence
  Synthetic
gaucauuaaugauuaggaaa

SEQ ID NO: 434315 - RNA, 21 nt, Artificial Sequence
  Synthetic
ugaucauuaaugauuaggaaa

SEQ ID NO: 434316 - RNA, 22 nt, Artificial Sequence
  Synthetic
uugaucauuaaugauuaggaaa

SEQ ID NO: 434317 - RNA, 23 nt, Artificial Sequence
  Synthetic
guugaucauuaaugauuaggaaa

SEQ ID NO: 434318 - RNA, 24 nt, Artificial Sequence
  Synthetic
aguugaucauuaaugauuaggaaa

SEQ ID NO: 434319 - RNA, 18 nt, Artificial Sequence
  Synthetic
aaucuagcaguuaggaaa

SEQ ID NO: 434320 - RNA, 19 nt, Artificial Sequence
  Synthetic
aaaucuagcaguuaggaaa

SEQ ID NO: 434321 - RNA, 20 nt, Artificial Sequence
  Synthetic
gaaaucuagcaguuaggaaa

SEQ ID NO: 434322 - RNA, 21 nt, Artificial Sequence
  Synthetic
ggaaaucuagcaguuaggaaa

SEQ ID NO: 434323 - RNA, 22 nt, Artificial Sequence
  Synthetic
gggaaaucuagcaguuaggaaa

SEQ ID NO: 434324 - RNA, 23 nt, Artificial Sequence
  Synthetic
ggggaaaucuagcaguuaggaaa

SEQ ID NO: 434325 - RNA, 24 nt, Artificial Sequence
  Synthetic
uggggaaaucuagcaguuaggaaa

SEQ ID NO: 434326 - RNA, 18 nt, Artificial Sequence
  Synthetic
auaugcagaaaacggaaa

SEQ ID NO: 434327 - RNA, 19 nt, Artificial Sequence
  Synthetic
cauaugcagaaaacggaaa

SEQ ID NO: 434328 - RNA, 20 nt, Artificial Sequence
  Synthetic
ucauaugcagaaaacggaaa

SEQ ID NO: 434329 - RNA, 21 nt, Artificial Sequence
  Synthetic
gucauaugcagaaaacggaaa

SEQ ID NO: 434330 - RNA, 22 nt, Artificial Sequence
  Synthetic
agucauaugcagaaaacggaaa

SEQ ID NO: 434331 - RNA, 23 nt, Artificial Sequence
  Synthetic
uagucauaugcagaaaacggaaa

SEQ ID NO: 434332 - RNA, 24 nt, Artificial Sequence
  Synthetic
cuagucauaugcagaaaacggaaa

SEQ ID NO: 434333 - RNA, 18 nt, Artificial Sequence
  Synthetic
ugggaaggaaaagggaaa

SEQ ID NO: 434334 - RNA, 19 nt, Artificial Sequence
  Synthetic
cugggaaggaaaagggaaa

SEQ ID NO: 434335 - RNA, 20 nt, Artificial Sequence
  Synthetic
ucugggaaggaaaagggaaa

SEQ ID NO: 434336 - RNA, 21 nt, Artificial Sequence
  Synthetic
aucugggaaggaaaagggaaa

SEQ ID NO: 434337 - RNA, 22 nt, Artificial Sequence
  Synthetic
caucugggaaggaaaagggaaa

SEQ ID NO: 434338 - RNA, 23 nt, Artificial Sequence
  Synthetic
ccaucugggaaggaaaagggaaa

SEQ ID NO: 434339 - RNA, 24 nt, Artificial Sequence
  Synthetic
uccaucugggaaggaaaagggaaa

SEQ ID NO: 434340 - RNA, 18 nt, Artificial Sequence
  Synthetic
aaacacugguaagggaaa

SEQ ID NO: 434341 - RNA, 19 nt, Artificial Sequence
  Synthetic
gaaacacugguaagggaaa

SEQ ID NO: 434342 - RNA, 20 nt, Artificial Sequence
  Synthetic
agaaacacugguaagggaaa

SEQ ID NO: 434343 - RNA, 21 nt, Artificial Sequence
  Synthetic
aagaaacacugguaagggaaa

SEQ ID NO: 434344 - RNA, 22 nt, Artificial Sequence
  Synthetic
caagaaacacugguaagggaaa

SEQ ID NO: 434345 - RNA, 23 nt, Artificial Sequence
  Synthetic
ucaagaaacacugguaagggaaa

SEQ ID NO: 434346 - RNA, 24 nt, Artificial Sequence
  Synthetic
uucaagaaacacugguaagggaaa

SEQ ID NO: 434347 - RNA, 18 nt, Artificial Sequence
  Synthetic
aagauaaauacagggaaa

SEQ ID NO: 434348 - RNA, 19 nt, Artificial Sequence
  Synthetic
aaagauaaauacagggaaa

SEQ ID NO: 434349 - RNA, 20 nt, Artificial Sequence
  Synthetic
aaaagauaaauacagggaaa

SEQ ID NO: 434350 - RNA, 21 nt, Artificial Sequence
  Synthetic
gaaaagauaaauacagggaaa

SEQ ID NO: 434351 - RNA, 22 nt, Artificial Sequence
  Synthetic
agaaaagauaaauacagggaaa

SEQ ID NO: 434352 - RNA, 23 nt, Artificial Sequence
  Synthetic
aagaaaagauaaauacagggaaa

SEQ ID NO: 434353 - RNA, 24 nt, Artificial Sequence
  Synthetic
gaagaaaagauaaauacagggaaa

SEQ ID NO: 434354 - RNA, 18 nt, Artificial Sequence
  Synthetic
gauagccaggcagggaaa

SEQ ID NO: 434355 - RNA, 19 nt, Artificial Sequence
  Synthetic
agauagccaggcagggaaa

SEQ ID NO: 434356 - RNA, 20 nt, Artificial Sequence
  Synthetic
uagauagccaggcagggaaa

SEQ ID NO: 434357 - RNA, 21 nt, Artificial Sequence
  Synthetic
auagauagccaggcagggaaa

SEQ ID NO: 434358 - RNA, 22 nt, Artificial Sequence
  Synthetic
gauagauagccaggcagggaaa

SEQ ID NO: 434359 - RNA, 23 nt, Artificial Sequence
  Synthetic
agauagauagccaggcagggaaa

SEQ ID NO: 434360 - RNA, 24 nt, Artificial Sequence
  Synthetic
cagauagauagccaggcagggaaa

SEQ ID NO: 434361 - RNA, 18 nt, Artificial Sequence
  Synthetic
cuugggggcucagggaaa

SEQ ID NO: 434362 - RNA, 19 nt, Artificial Sequence
  Synthetic
gcuugggggcucagggaaa

SEQ ID NO: 434363 - RNA, 20 nt, Artificial Sequence
  Synthetic
agcuugggggcucagggaaa

SEQ ID NO: 434364 - RNA, 21 nt, Artificial Sequence
  Synthetic
cagcuugggggcucagggaaa

SEQ ID NO: 434365 - RNA, 22 nt, Artificial Sequence
  Synthetic
ccagcuugggggcucagggaaa

SEQ ID NO: 434366 - RNA, 23 nt, Artificial Sequence
  Synthetic
uccagcuugggggcucagggaaa

SEQ ID NO: 434367 - RNA, 24 nt, Artificial Sequence
  Synthetic
uuccagcuugggggcucagggaaa

SEQ ID NO: 434368 - RNA, 18 nt, Artificial Sequence
  Synthetic
caugaauaaagagggaaa

SEQ ID NO: 434369 - RNA, 19 nt, Artificial Sequence
  Synthetic
acaugaauaaagagggaaa

SEQ ID NO: 434370 - RNA, 20 nt, Artificial Sequence
  Synthetic
aacaugaauaaagagggaaa

SEQ ID NO: 434371 - RNA, 21 nt, Artificial Sequence
  Synthetic
uaacaugaauaaagagggaaa

SEQ ID NO: 434372 - RNA, 22 nt, Artificial Sequence
  Synthetic
guaacaugaauaaagagggaaa

SEQ ID NO: 434373 - RNA, 23 nt, Artificial Sequence
  Synthetic
uguaacaugaauaaagagggaaa

SEQ ID NO: 434374 - RNA, 24 nt, Artificial Sequence
  Synthetic
auguaacaugaauaaagagggaaa

SEQ ID NO: 434375 - RNA, 18 nt, Artificial Sequence
  Synthetic
cacaaucagagagggaaa

SEQ ID NO: 434376 - RNA, 19 nt, Artificial Sequence
  Synthetic
ucacaaucagagagggaaa

SEQ ID NO: 434377 - RNA, 20 nt, Artificial Sequence
  Synthetic
uucacaaucagagagggaaa

SEQ ID NO: 434378 - RNA, 21 nt, Artificial Sequence
  Synthetic
cuucacaaucagagagggaaa

SEQ ID NO: 434379 - RNA, 22 nt, Artificial Sequence
  Synthetic
acuucacaaucagagagggaaa

SEQ ID NO: 434380 - RNA, 23 nt, Artificial Sequence
  Synthetic
aacuucacaaucagagagggaaa

SEQ ID NO: 434381 - RNA, 24 nt, Artificial Sequence
  Synthetic
aaacuucacaaucagagagggaaa

SEQ ID NO: 434382 - RNA, 18 nt, Artificial Sequence
  Synthetic
gggagagggagagggaaa

SEQ ID NO: 434383 - RNA, 19 nt, Artificial Sequence
  Synthetic
agggagagggagagggaaa

SEQ ID NO: 434384 - RNA, 20 nt, Artificial Sequence
  Synthetic
cagggagagggagagggaaa

SEQ ID NO: 434385 - RNA, 21 nt, Artificial Sequence
  Synthetic
acagggagagggagagggaaa

SEQ ID NO: 434386 - RNA, 22 nt, Artificial Sequence
  Synthetic
gacagggagagggagagggaaa

SEQ ID NO: 434387 - RNA, 23 nt, Artificial Sequence
  Synthetic
agacagggagagggagagggaaa

SEQ ID NO: 434388 - RNA, 24 nt, Artificial Sequence
  Synthetic
gagacagggagagggagagggaaa

SEQ ID NO: 434389 - RNA, 18 nt, Artificial Sequence
  Synthetic
gagagggagggagggaaa

SEQ ID NO: 434390 - RNA, 19 nt, Artificial Sequence
  Synthetic
ggagagggagggagggaaa

SEQ ID NO: 434391 - RNA, 20 nt, Artificial Sequence
  Synthetic
uggagagggagggagggaaa

SEQ ID NO: 434392 - RNA, 21 nt, Artificial Sequence
  Synthetic
guggagagggagggagggaaa

SEQ ID NO: 434393 - RNA, 22 nt, Artificial Sequence
  Synthetic
aguggagagggagggagggaaa

SEQ ID NO: 434394 - RNA, 23 nt, Artificial Sequence
  Synthetic
gaguggagagggagggagggaaa

SEQ ID NO: 434395 - RNA, 24 nt, Artificial Sequence
  Synthetic
agaguggagagggagggagggaaa

SEQ ID NO: 434396 - RNA, 18 nt, Artificial Sequence
  Synthetic
ugagagaaaauagggaaa

SEQ ID NO: 434397 - RNA, 19 nt, Artificial Sequence
  Synthetic
uugagagaaaauagggaaa

SEQ ID NO: 434398 - RNA, 20 nt, Artificial Sequence
  Synthetic
auugagagaaaauagggaaa

SEQ ID NO: 434399 - RNA, 21 nt, Artificial Sequence
  Synthetic
aauugagagaaaauagggaaa

SEQ ID NO: 434400 - RNA, 22 nt, Artificial Sequence
  Synthetic
aaauugagagaaaauagggaaa

SEQ ID NO: 434401 - RNA, 23 nt, Artificial Sequence
  Synthetic
caaauugagagaaaauagggaaa

SEQ ID NO: 434402 - RNA, 24 nt, Artificial Sequence
  Synthetic
ucaaauugagagaaaauagggaaa

SEQ ID NO: 434403 - RNA, 18 nt, Artificial Sequence
  Synthetic
agcaaaaggcuagggaaa

SEQ ID NO: 434404 - RNA, 19 nt, Artificial Sequence
  Synthetic
aagcaaaaggcuagggaaa

SEQ ID NO: 434405 - RNA, 20 nt, Artificial Sequence
  Synthetic
uaagcaaaaggcuagggaaa

SEQ ID NO: 434406 - RNA, 21 nt, Artificial Sequence
  Synthetic
uuaagcaaaaggcuagggaaa

SEQ ID NO: 434407 - RNA, 22 nt, Artificial Sequence
  Synthetic
cuuaagcaaaaggcuagggaaa

SEQ ID NO: 434408 - RNA, 23 nt, Artificial Sequence
  Synthetic
acuuaagcaaaaggcuagggaaa

SEQ ID NO: 434409 - RNA, 24 nt, Artificial Sequence
  Synthetic
cacuuaagcaaaaggcuagggaaa

SEQ ID NO: 434410 - RNA, 18 nt, Artificial Sequence
  Synthetic
guccagcaucuagggaaa

SEQ ID NO: 434411 - RNA, 19 nt, Artificial Sequence
  Synthetic
uguccagcaucuagggaaa

SEQ ID NO: 434412 - RNA, 20 nt, Artificial Sequence
  Synthetic
uuguccagcaucuagggaaa

SEQ ID NO: 434413 - RNA, 21 nt, Artificial Sequence
  Synthetic
cuuguccagcaucuagggaaa

SEQ ID NO: 434414 - RNA, 22 nt, Artificial Sequence
  Synthetic
ucuuguccagcaucuagggaaa

SEQ ID NO: 434415 - RNA, 23 nt, Artificial Sequence
  Synthetic
cucuuguccagcaucuagggaaa

SEQ ID NO: 434416 - RNA, 24 nt, Artificial Sequence
  Synthetic
gcucuuguccagcaucuagggaaa

SEQ ID NO: 434417 - RNA, 18 nt, Artificial Sequence
  Synthetic
gggacagaaguagggaaa

SEQ ID NO: 434418 - RNA, 19 nt, Artificial Sequence
  Synthetic
ggggacagaaguagggaaa

SEQ ID NO: 434419 - RNA, 20 nt, Artificial Sequence
  Synthetic
aggggacagaaguagggaaa

SEQ ID NO: 434420 - RNA, 21 nt, Artificial Sequence
  Synthetic
gaggggacagaaguagggaaa

SEQ ID NO: 434421 - RNA, 22 nt, Artificial Sequence
  Synthetic
agaggggacagaaguagggaaa

SEQ ID NO: 434422 - RNA, 23 nt, Artificial Sequence
  Synthetic
aagaggggacagaaguagggaaa

SEQ ID NO: 434423 - RNA, 24 nt, Artificial Sequence
  Synthetic
uaagaggggacagaaguagggaaa

SEQ ID NO: 434424 - RNA, 18 nt, Artificial Sequence
  Synthetic
acacaaaaaaaggggaaa

SEQ ID NO: 434425 - RNA, 19 nt, Artificial Sequence
  Synthetic
cacacaaaaaaaggggaaa

SEQ ID NO: 434426 - RNA, 20 nt, Artificial Sequence
  Synthetic
ucacacaaaaaaaggggaaa

SEQ ID NO: 434427 - RNA, 21 nt, Artificial Sequence
  Synthetic
gucacacaaaaaaaggggaaa

SEQ ID NO: 434428 - RNA, 22 nt, Artificial Sequence
  Synthetic
ugucacacaaaaaaaggggaaa

SEQ ID NO: 434429 - RNA, 23 nt, Artificial Sequence
  Synthetic
cugucacacaaaaaaaggggaaa

SEQ ID NO: 434430 - RNA, 24 nt, Artificial Sequence
  Synthetic
acugucacacaaaaaaaggggaaa

SEQ ID NO: 434431 - RNA, 18 nt, Artificial Sequence
  Synthetic
uugccaaaggaggggaaa

SEQ ID NO: 434432 - RNA, 19 nt, Artificial Sequence
  Synthetic
guugccaaaggaggggaaa

SEQ ID NO: 434433 - RNA, 20 nt, Artificial Sequence
  Synthetic
gguugccaaaggaggggaaa

SEQ ID NO: 434434 - RNA, 21 nt, Artificial Sequence
  Synthetic
ugguugccaaaggaggggaaa

SEQ ID NO: 434435 - RNA, 22 nt, Artificial Sequence
  Synthetic
uugguugccaaaggaggggaaa

SEQ ID NO: 434436 - RNA, 23 nt, Artificial Sequence
  Synthetic
cuugguugccaaaggaggggaaa

SEQ ID NO: 434437 - RNA, 24 nt, Artificial Sequence
  Synthetic
ucuugguugccaaaggaggggaaa

SEQ ID NO: 434438 - RNA, 18 nt, Artificial Sequence
  Synthetic
guuugcaccucggggaaa

SEQ ID NO: 434439 - RNA, 19 nt, Artificial Sequence
  Synthetic
aguuugcaccucggggaaa

SEQ ID NO: 434440 - RNA, 20 nt, Artificial Sequence
  Synthetic
caguuugcaccucggggaaa

SEQ ID NO: 434441 - RNA, 21 nt, Artificial Sequence
  Synthetic
gcaguuugcaccucggggaaa

SEQ ID NO: 434442 - RNA, 22 nt, Artificial Sequence
  Synthetic
agcaguuugcaccucggggaaa

SEQ ID NO: 434443 - RNA, 23 nt, Artificial Sequence
  Synthetic
gagcaguuugcaccucggggaaa

SEQ ID NO: 434444 - RNA, 24 nt, Artificial Sequence
  Synthetic
ggagcaguuugcaccucggggaaa

SEQ ID NO: 434445 - RNA, 18 nt, Artificial Sequence
  Synthetic
gguagugguagggggaaa

SEQ ID NO: 434446 - RNA, 19 nt, Artificial Sequence
  Synthetic
ggguagugguagggggaaa

SEQ ID NO: 434447 - RNA, 20 nt, Artificial Sequence
  Synthetic
aggguagugguagggggaaa

SEQ ID NO: 434448 - RNA, 21 nt, Artificial Sequence
  Synthetic
aaggguagugguagggggaaa

SEQ ID NO: 434449 - RNA, 22 nt, Artificial Sequence
  Synthetic
gaaggguagugguagggggaaa

SEQ ID NO: 434450 - RNA, 23 nt, Artificial Sequence
  Synthetic
ggaaggguagugguagggggaaa

SEQ ID NO: 434451 - RNA, 24 nt, Artificial Sequence
  Synthetic
gggaaggguagugguagggggaaa

SEQ ID NO: 434452 - RNA, 18 nt, Artificial Sequence
  Synthetic
ucccuuuuuagggggaaa

SEQ ID NO: 434453 - RNA, 19 nt, Artificial Sequence
  Synthetic
aucccuuuuuagggggaaa

SEQ ID NO: 434454 - RNA, 20 nt, Artificial Sequence
  Synthetic
caucccuuuuuagggggaaa

SEQ ID NO: 434455 - RNA, 21 nt, Artificial Sequence
  Synthetic
acaucccuuuuuagggggaaa

SEQ ID NO: 434456 - RNA, 22 nt, Artificial Sequence
  Synthetic
gacaucccuuuuuagggggaaa

SEQ ID NO: 434457 - RNA, 23 nt, Artificial Sequence
  Synthetic
ugacaucccuuuuuagggggaaa

SEQ ID NO: 434458 - RNA, 24 nt, Artificial Sequence
  Synthetic
augacaucccuuuuuagggggaaa

SEQ ID NO: 434459 - RNA, 18 nt, Artificial Sequence
  Synthetic
agugaaaggauggggaaa

SEQ ID NO: 434460 - RNA, 19 nt, Artificial Sequence
  Synthetic
gagugaaaggauggggaaa

SEQ ID NO: 434461 - RNA, 20 nt, Artificial Sequence
  Synthetic
ugagugaaaggauggggaaa

SEQ ID NO: 434462 - RNA, 21 nt, Artificial Sequence
  Synthetic
gugagugaaaggauggggaaa

SEQ ID NO: 434463 - RNA, 22 nt, Artificial Sequence
  Synthetic
agugagugaaaggauggggaaa

SEQ ID NO: 434464 - RNA, 23 nt, Artificial Sequence
  Synthetic
aagugagugaaaggauggggaaa

SEQ ID NO: 434465 - RNA, 24 nt, Artificial Sequence
  Synthetic
aaagugagugaaaggauggggaaa

SEQ ID NO: 434466 - RNA, 18 nt, Artificial Sequence
  Synthetic
caggacuugauggggaaa

SEQ ID NO: 434467 - RNA, 19 nt, Artificial Sequence
  Synthetic
gcaggacuugauggggaaa

SEQ ID NO: 434468 - RNA, 20 nt, Artificial Sequence
  Synthetic
ggcaggacuugauggggaaa

SEQ ID NO: 434469 - RNA, 21 nt, Artificial Sequence
  Synthetic
uggcaggacuugauggggaaa

SEQ ID NO: 434470 - RNA, 22 nt, Artificial Sequence
  Synthetic
cuggcaggacuugauggggaaa

SEQ ID NO: 434471 - RNA, 23 nt, Artificial Sequence
  Synthetic
acuggcaggacuugauggggaaa

SEQ ID NO: 434472 - RNA, 24 nt, Artificial Sequence
  Synthetic
gacuggcaggacuugauggggaaa

SEQ ID NO: 434473 - RNA, 18 nt, Artificial Sequence
  Synthetic
acaagaauuuuggggaaa

SEQ ID NO: 434474 - RNA, 19 nt, Artificial Sequence
  Synthetic
aacaagaauuuuggggaaa

SEQ ID NO: 434475 - RNA, 20 nt, Artificial Sequence
  Synthetic
gaacaagaauuuuggggaaa

SEQ ID NO: 434476 - RNA, 21 nt, Artificial Sequence
  Synthetic
agaacaagaauuuuggggaaa

SEQ ID NO: 434477 - RNA, 22 nt, Artificial Sequence
  Synthetic
aagaacaagaauuuuggggaaa

SEQ ID NO: 434478 - RNA, 23 nt, Artificial Sequence
  Synthetic
gaagaacaagaauuuuggggaaa

SEQ ID NO: 434479 - RNA, 24 nt, Artificial Sequence
  Synthetic
agaagaacaagaauuuuggggaaa

SEQ ID NO: 434480 - RNA, 18 nt, Artificial Sequence
  Synthetic
cuauuuagauaugggaaa

SEQ ID NO: 434481 - RNA, 19 nt, Artificial Sequence
  Synthetic
ccuauuuagauaugggaaa

SEQ ID NO: 434482 - RNA, 20 nt, Artificial Sequence
  Synthetic
uccuauuuagauaugggaaa

SEQ ID NO: 434483 - RNA, 21 nt, Artificial Sequence
  Synthetic
guccuauuuagauaugggaaa

SEQ ID NO: 434484 - RNA, 22 nt, Artificial Sequence
  Synthetic
uguccuauuuagauaugggaaa

SEQ ID NO: 434485 - RNA, 23 nt, Artificial Sequence
  Synthetic
cuguccuauuuagauaugggaaa

SEQ ID NO: 434486 - RNA, 24 nt, Artificial Sequence
  Synthetic
gcuguccuauuuagauaugggaaa

SEQ ID NO: 434487 - RNA, 18 nt, Artificial Sequence
  Synthetic
aagaagaguccugggaaa

SEQ ID NO: 434488 - RNA, 19 nt, Artificial Sequence
  Synthetic
aaagaagaguccugggaaa

SEQ ID NO: 434489 - RNA, 20 nt, Artificial Sequence
  Synthetic
uaaagaagaguccugggaaa

SEQ ID NO: 434490 - RNA, 21 nt, Artificial Sequence
  Synthetic
auaaagaagaguccugggaaa

SEQ ID NO: 434491 - RNA, 22 nt, Artificial Sequence
  Synthetic
aauaaagaagaguccugggaaa

SEQ ID NO: 434492 - RNA, 23 nt, Artificial Sequence
  Synthetic
gaauaaagaagaguccugggaaa

SEQ ID NO: 434493 - RNA, 24 nt, Artificial Sequence
  Synthetic
agaauaaagaagaguccugggaaa

SEQ ID NO: 434494 - RNA, 18 nt, Artificial Sequence
  Synthetic
cuguacacugcugggaaa

SEQ ID NO: 434495 - RNA, 19 nt, Artificial Sequence
  Synthetic
ucuguacacugcugggaaa

SEQ ID NO: 434496 - RNA, 20 nt, Artificial Sequence
  Synthetic
aucuguacacugcugggaaa

SEQ ID NO: 434497 - RNA, 21 nt, Artificial Sequence
  Synthetic
uaucuguacacugcugggaaa

SEQ ID NO: 434498 - RNA, 22 nt, Artificial Sequence
  Synthetic
cuaucuguacacugcugggaaa

SEQ ID NO: 434499 - RNA, 23 nt, Artificial Sequence
  Synthetic
ucuaucuguacacugcugggaaa

SEQ ID NO: 434500 - RNA, 24 nt, Artificial Sequence
  Synthetic
aucuaucuguacacugcugggaaa

SEQ ID NO: 434501 - RNA, 18 nt, Artificial Sequence
  Synthetic
gaacaugugggugggaaa

SEQ ID NO: 434502 - RNA, 19 nt, Artificial Sequence
  Synthetic
ugaacaugugggugggaaa

SEQ ID NO: 434503 - RNA, 20 nt, Artificial Sequence
  Synthetic
uugaacaugugggugggaaa

SEQ ID NO: 434504 - RNA, 21 nt, Artificial Sequence
  Synthetic
cuugaacaugugggugggaaa

SEQ ID NO: 434505 - RNA, 22 nt, Artificial Sequence
  Synthetic
acuugaacaugugggugggaaa

SEQ ID NO: 434506 - RNA, 23 nt, Artificial Sequence
  Synthetic
aacuugaacaugugggugggaaa

SEQ ID NO: 434507 - RNA, 24 nt, Artificial Sequence
  Synthetic
aaacuugaacaugugggugggaaa

SEQ ID NO: 434508 - RNA, 18 nt, Artificial Sequence
  Synthetic
ucucuucucauugggaaa

SEQ ID NO: 434509 - RNA, 19 nt, Artificial Sequence
  Synthetic
uucucuucucauugggaaa

SEQ ID NO: 434510 - RNA, 20 nt, Artificial Sequence
  Synthetic
uuucucuucucauugggaaa

SEQ ID NO: 434511 - RNA, 21 nt, Artificial Sequence
  Synthetic
uuuucucuucucauugggaaa

SEQ ID NO: 434512 - RNA, 22 nt, Artificial Sequence
  Synthetic
uuuuucucuucucauugggaaa

SEQ ID NO: 434513 - RNA, 23 nt, Artificial Sequence
  Synthetic
uuuuuucucuucucauugggaaa

SEQ ID NO: 434514 - RNA, 24 nt, Artificial Sequence
  Synthetic
auuuuuucucuucucauugggaaa

SEQ ID NO: 434515 - RNA, 18 nt, Artificial Sequence
  Synthetic
ugucaguagauugggaaa

SEQ ID NO: 434516 - RNA, 19 nt, Artificial Sequence
  Synthetic
gugucaguagauugggaaa

SEQ ID NO: 434517 - RNA, 20 nt, Artificial Sequence
  Synthetic
ugugucaguagauugggaaa

SEQ ID NO: 434518 - RNA, 21 nt, Artificial Sequence
  Synthetic
augugucaguagauugggaaa

SEQ ID NO: 434519 - RNA, 22 nt, Artificial Sequence
  Synthetic
caugugucaguagauugggaaa

SEQ ID NO: 434520 - RNA, 23 nt, Artificial Sequence
  Synthetic
acaugugucaguagauugggaaa

SEQ ID NO: 434521 - RNA, 24 nt, Artificial Sequence
  Synthetic
uacaugugucaguagauugggaaa

SEQ ID NO: 434522 - RNA, 18 nt, Artificial Sequence
  Synthetic
auguauacgauugggaaa

SEQ ID NO: 434523 - RNA, 19 nt, Artificial Sequence
  Synthetic
gauguauacgauugggaaa

SEQ ID NO: 434524 - RNA, 20 nt, Artificial Sequence
  Synthetic
ggauguauacgauugggaaa

SEQ ID NO: 434525 - RNA, 21 nt, Artificial Sequence
  Synthetic
gggauguauacgauugggaaa

SEQ ID NO: 434526 - RNA, 22 nt, Artificial Sequence
  Synthetic
agggauguauacgauugggaaa

SEQ ID NO: 434527 - RNA, 23 nt, Artificial Sequence
  Synthetic
gagggauguauacgauugggaaa

SEQ ID NO: 434528 - RNA, 24 nt, Artificial Sequence
  Synthetic
ugagggauguauacgauugggaaa

SEQ ID NO: 434529 - RNA, 18 nt, Artificial Sequence
  Synthetic
agaauugggguugggaaa

SEQ ID NO: 434530 - RNA, 19 nt, Artificial Sequence
  Synthetic
aagaauugggguugggaaa

SEQ ID NO: 434531 - RNA, 20 nt, Artificial Sequence
  Synthetic
aaagaauugggguugggaaa

SEQ ID NO: 434532 - RNA, 21 nt, Artificial Sequence
  Synthetic
gaaagaauugggguugggaaa

SEQ ID NO: 434533 - RNA, 22 nt, Artificial Sequence
  Synthetic
agaaagaauugggguugggaaa

SEQ ID NO: 434534 - RNA, 23 nt, Artificial Sequence
  Synthetic
aagaaagaauugggguugggaaa

SEQ ID NO: 434535 - RNA, 24 nt, Artificial Sequence
  Synthetic
aaagaaagaauugggguugggaaa

SEQ ID NO: 434536 - RNA, 18 nt, Artificial Sequence
  Synthetic
aaaauaaauguugggaaa

SEQ ID NO: 434537 - RNA, 19 nt, Artificial Sequence
  Synthetic
uaaaauaaauguugggaaa

SEQ ID NO: 434538 - RNA, 20 nt, Artificial Sequence
  Synthetic
auaaaauaaauguugggaaa

SEQ ID NO: 434539 - RNA, 21 nt, Artificial Sequence
  Synthetic
aauaaaauaaauguugggaaa

SEQ ID NO: 434540 - RNA, 22 nt, Artificial Sequence
  Synthetic
uaauaaaauaaauguugggaaa

SEQ ID NO: 434541 - RNA, 23 nt, Artificial Sequence
  Synthetic
auaauaaaauaaauguugggaaa

SEQ ID NO: 434542 - RNA, 24 nt, Artificial Sequence
  Synthetic
aauaauaaaauaaauguugggaaa

SEQ ID NO: 434543 - RNA, 18 nt, Artificial Sequence
  Synthetic
accuuucauguugggaaa

SEQ ID NO: 434544 - RNA, 19 nt, Artificial Sequence
  Synthetic
gaccuuucauguugggaaa

SEQ ID NO: 434545 - RNA, 20 nt, Artificial Sequence
  Synthetic
agaccuuucauguugggaaa

SEQ ID NO: 434546 - RNA, 21 nt, Artificial Sequence
  Synthetic
aagaccuuucauguugggaaa

SEQ ID NO: 434547 - RNA, 22 nt, Artificial Sequence
  Synthetic
aaagaccuuucauguugggaaa

SEQ ID NO: 434548 - RNA, 23 nt, Artificial Sequence
  Synthetic
aaaagaccuuucauguugggaaa

SEQ ID NO: 434549 - RNA, 24 nt, Artificial Sequence
  Synthetic
uaaaagaccuuucauguugggaaa

SEQ ID NO: 434550 - RNA, 18 nt, Artificial Sequence
  Synthetic
cucaggauguuugggaaa

SEQ ID NO: 434551 - RNA, 19 nt, Artificial Sequence
  Synthetic
acucaggauguuugggaaa

SEQ ID NO: 434552 - RNA, 20 nt, Artificial Sequence
  Synthetic
uacucaggauguuugggaaa

SEQ ID NO: 434553 - RNA, 21 nt, Artificial Sequence
  Synthetic
uuacucaggauguuugggaaa

SEQ ID NO: 434554 - RNA, 22 nt, Artificial Sequence
  Synthetic
guuacucaggauguuugggaaa

SEQ ID NO: 434555 - RNA, 23 nt, Artificial Sequence
  Synthetic
uguuacucaggauguuugggaaa

SEQ ID NO: 434556 - RNA, 24 nt, Artificial Sequence
  Synthetic
guguuacucaggauguuugggaaa

SEQ ID NO: 434557 - RNA, 18 nt, Artificial Sequence
  Synthetic
ucuaucuuaaaauggaaa

SEQ ID NO: 434558 - RNA, 19 nt, Artificial Sequence
  Synthetic
aucuaucuuaaaauggaaa

SEQ ID NO: 434559 - RNA, 20 nt, Artificial Sequence
  Synthetic
gaucuaucuuaaaauggaaa

SEQ ID NO: 434560 - RNA, 21 nt, Artificial Sequence
  Synthetic
agaucuaucuuaaaauggaaa

SEQ ID NO: 434561 - RNA, 22 nt, Artificial Sequence
  Synthetic
uagaucuaucuuaaaauggaaa

SEQ ID NO: 434562 - RNA, 23 nt, Artificial Sequence
  Synthetic
guagaucuaucuuaaaauggaaa

SEQ ID NO: 434563 - RNA, 24 nt, Artificial Sequence
  Synthetic
aguagaucuaucuuaaaauggaaa

SEQ ID NO: 434564 - RNA, 18 nt, Artificial Sequence
  Synthetic
acaagaaaacaauggaaa

SEQ ID NO: 434565 - RNA, 19 nt, Artificial Sequence
  Synthetic
aacaagaaaacaauggaaa

SEQ ID NO: 434566 - RNA, 20 nt, Artificial Sequence
  Synthetic
aaacaagaaaacaauggaaa

SEQ ID NO: 434567 - RNA, 21 nt, Artificial Sequence
  Synthetic
gaaacaagaaaacaauggaaa

SEQ ID NO: 434568 - RNA, 22 nt, Artificial Sequence
  Synthetic
ugaaacaagaaaacaauggaaa

SEQ ID NO: 434569 - RNA, 23 nt, Artificial Sequence
  Synthetic
uugaaacaagaaaacaauggaaa

SEQ ID NO: 434570 - RNA, 24 nt, Artificial Sequence
  Synthetic
guugaaacaagaaaacaauggaaa

SEQ ID NO: 434571 - RNA, 18 nt, Artificial Sequence
  Synthetic
uuauauccacaauggaaa

SEQ ID NO: 434572 - RNA, 19 nt, Artificial Sequence
  Synthetic
uuuauauccacaauggaaa

SEQ ID NO: 434573 - RNA, 20 nt, Artificial Sequence
  Synthetic
guuuauauccacaauggaaa

SEQ ID NO: 434574 - RNA, 21 nt, Artificial Sequence
  Synthetic
uguuuauauccacaauggaaa

SEQ ID NO: 434575 - RNA, 22 nt, Artificial Sequence
  Synthetic
guguuuauauccacaauggaaa

SEQ ID NO: 434576 - RNA, 23 nt, Artificial Sequence
  Synthetic
gguguuuauauccacaauggaaa

SEQ ID NO: 434577 - RNA, 24 nt, Artificial Sequence
  Synthetic
ggguguuuauauccacaauggaaa

SEQ ID NO: 434578 - RNA, 18 nt, Artificial Sequence
  Synthetic
uucuuuguugaauggaaa

SEQ ID NO: 434579 - RNA, 19 nt, Artificial Sequence
  Synthetic
uuucuuuguugaauggaaa

SEQ ID NO: 434580 - RNA, 20 nt, Artificial Sequence
  Synthetic
uuuucuuuguugaauggaaa

SEQ ID NO: 434581 - RNA, 21 nt, Artificial Sequence
  Synthetic
uuuuucuuuguugaauggaaa

SEQ ID NO: 434582 - RNA, 22 nt, Artificial Sequence
  Synthetic
auuuuucuuuguugaauggaaa

SEQ ID NO: 434583 - RNA, 23 nt, Artificial Sequence
  Synthetic
uauuuuucuuuguugaauggaaa

SEQ ID NO: 434584 - RNA, 24 nt, Artificial Sequence
  Synthetic
cuauuuuucuuuguugaauggaaa

SEQ ID NO: 434585 - RNA, 18 nt, Artificial Sequence
  Synthetic
cgcucaacuacauggaaa

SEQ ID NO: 434586 - RNA, 19 nt, Artificial Sequence
  Synthetic
ccgcucaacuacauggaaa

SEQ ID NO: 434587 - RNA, 20 nt, Artificial Sequence
  Synthetic
gccgcucaacuacauggaaa

SEQ ID NO: 434588 - RNA, 21 nt, Artificial Sequence
  Synthetic
agccgcucaacuacauggaaa

SEQ ID NO: 434589 - RNA, 22 nt, Artificial Sequence
  Synthetic
aagccgcucaacuacauggaaa

SEQ ID NO: 434590 - RNA, 23 nt, Artificial Sequence
  Synthetic
aaagccgcucaacuacauggaaa

SEQ ID NO: 434591 - RNA, 24 nt, Artificial Sequence
  Synthetic
caaagccgcucaacuacauggaaa

SEQ ID NO: 434592 - RNA, 18 nt, Artificial Sequence
  Synthetic
agagauguggcauggaaa

SEQ ID NO: 434593 - RNA, 19 nt, Artificial Sequence
  Synthetic
aagagauguggcauggaaa

SEQ ID NO: 434594 - RNA, 20 nt, Artificial Sequence
  Synthetic
gaagagauguggcauggaaa

SEQ ID NO: 434595 - RNA, 21 nt, Artificial Sequence
  Synthetic
agaagagauguggcauggaaa

SEQ ID NO: 434596 - RNA, 22 nt, Artificial Sequence
  Synthetic
cagaagagauguggcauggaaa

SEQ ID NO: 434597 - RNA, 23 nt, Artificial Sequence
  Synthetic
acagaagagauguggcauggaaa

SEQ ID NO: 434598 - RNA, 24 nt, Artificial Sequence
  Synthetic
cacagaagagauguggcauggaaa

SEQ ID NO: 434599 - RNA, 18 nt, Artificial Sequence
  Synthetic
auuucaugcucauggaaa

SEQ ID NO: 434600 - RNA, 19 nt, Artificial Sequence
  Synthetic
aauuucaugcucauggaaa

SEQ ID NO: 434601 - RNA, 20 nt, Artificial Sequence
  Synthetic
aaauuucaugcucauggaaa

SEQ ID NO: 434602 - RNA, 21 nt, Artificial Sequence
  Synthetic
gaaauuucaugcucauggaaa

SEQ ID NO: 434603 - RNA, 22 nt, Artificial Sequence
  Synthetic
agaaauuucaugcucauggaaa

SEQ ID NO: 434604 - RNA, 23 nt, Artificial Sequence
  Synthetic
aagaaauuucaugcucauggaaa

SEQ ID NO: 434605 - RNA, 24 nt, Artificial Sequence
  Synthetic
aaagaaauuucaugcucauggaaa

SEQ ID NO: 434606 - RNA, 18 nt, Artificial Sequence
  Synthetic
gaguucuugagauggaaa

SEQ ID NO: 434607 - RNA, 19 nt, Artificial Sequence
  Synthetic
ugaguucuugagauggaaa

SEQ ID NO: 434608 - RNA, 20 nt, Artificial Sequence
  Synthetic
augaguucuugagauggaaa

SEQ ID NO: 434609 - RNA, 21 nt, Artificial Sequence
  Synthetic
uaugaguucuugagauggaaa

SEQ ID NO: 434610 - RNA, 22 nt, Artificial Sequence
  Synthetic
guaugaguucuugagauggaaa

SEQ ID NO: 434611 - RNA, 23 nt, Artificial Sequence
  Synthetic
gguaugaguucuugagauggaaa

SEQ ID NO: 434612 - RNA, 24 nt, Artificial Sequence
  Synthetic
ugguaugaguucuugagauggaaa

SEQ ID NO: 434613 - RNA, 18 nt, Artificial Sequence
  Synthetic
caacaacauggauggaaa

SEQ ID NO: 434614 - RNA, 19 nt, Artificial Sequence
  Synthetic
gcaacaacauggauggaaa

SEQ ID NO: 434615 - RNA, 20 nt, Artificial Sequence
  Synthetic
ugcaacaacauggauggaaa

SEQ ID NO: 434616 - RNA, 21 nt, Artificial Sequence
  Synthetic
uugcaacaacauggauggaaa

SEQ ID NO: 434617 - RNA, 22 nt, Artificial Sequence
  Synthetic
uuugcaacaacauggauggaaa

SEQ ID NO: 434618 - RNA, 23 nt, Artificial Sequence
  Synthetic
auuugcaacaacauggauggaaa

SEQ ID NO: 434619 - RNA, 24 nt, Artificial Sequence
  Synthetic
cauuugcaacaacauggauggaaa

SEQ ID NO: 434620 - RNA, 18 nt, Artificial Sequence
  Synthetic
aauacacuaugauggaaa

SEQ ID NO: 434621 - RNA, 19 nt, Artificial Sequence
  Synthetic
gaauacacuaugauggaaa

SEQ ID NO: 434622 - RNA, 20 nt, Artificial Sequence
  Synthetic
ugaauacacuaugauggaaa

SEQ ID NO: 434623 - RNA, 21 nt, Artificial Sequence
  Synthetic
uugaauacacuaugauggaaa

SEQ ID NO: 434624 - RNA, 22 nt, Artificial Sequence
  Synthetic
auugaauacacuaugauggaaa

SEQ ID NO: 434625 - RNA, 23 nt, Artificial Sequence
  Synthetic
uauugaauacacuaugauggaaa

SEQ ID NO: 434626 - RNA, 24 nt, Artificial Sequence
  Synthetic
uuauugaauacacuaugauggaaa

SEQ ID NO: 434627 - RNA, 18 nt, Artificial Sequence
  Synthetic
agguacuaccuauggaaa

SEQ ID NO: 434628 - RNA, 19 nt, Artificial Sequence
  Synthetic
uagguacuaccuauggaaa

SEQ ID NO: 434629 - RNA, 20 nt, Artificial Sequence
  Synthetic
guagguacuaccuauggaaa

SEQ ID NO: 434630 - RNA, 21 nt, Artificial Sequence
  Synthetic
aguagguacuaccuauggaaa

SEQ ID NO: 434631 - RNA, 22 nt, Artificial Sequence
  Synthetic
aaguagguacuaccuauggaaa

SEQ ID NO: 434632 - RNA, 23 nt, Artificial Sequence
  Synthetic
gaaguagguacuaccuauggaaa

SEQ ID NO: 434633 - RNA, 24 nt, Artificial Sequence
  Synthetic
agaaguagguacuaccuauggaaa

SEQ ID NO: 434634 - RNA, 18 nt, Artificial Sequence
  Synthetic
ccaaucaggguauggaaa

SEQ ID NO: 434635 - RNA, 19 nt, Artificial Sequence
  Synthetic
accaaucaggguauggaaa

SEQ ID NO: 434636 - RNA, 20 nt, Artificial Sequence
  Synthetic
uaccaaucaggguauggaaa

SEQ ID NO: 434637 - RNA, 21 nt, Artificial Sequence
  Synthetic
uuaccaaucaggguauggaaa

SEQ ID NO: 434638 - RNA, 22 nt, Artificial Sequence
  Synthetic
uuuaccaaucaggguauggaaa

SEQ ID NO: 434639 - RNA, 23 nt, Artificial Sequence
  Synthetic
uuuuaccaaucaggguauggaaa

SEQ ID NO: 434640 - RNA, 24 nt, Artificial Sequence
  Synthetic
guuuuaccaaucaggguauggaaa

SEQ ID NO: 434641 - RNA, 18 nt, Artificial Sequence
  Synthetic
aaaguauacuuauggaaa

SEQ ID NO: 434642 - RNA, 19 nt, Artificial Sequence
  Synthetic
uaaaguauacuuauggaaa

SEQ ID NO: 434643 - RNA, 20 nt, Artificial Sequence
  Synthetic
uuaaaguauacuuauggaaa

SEQ ID NO: 434644 - RNA, 21 nt, Artificial Sequence
  Synthetic
auuaaaguauacuuauggaaa

SEQ ID NO: 434645 - RNA, 22 nt, Artificial Sequence
  Synthetic
aauuaaaguauacuuauggaaa

SEQ ID NO: 434646 - RNA, 23 nt, Artificial Sequence
  Synthetic
uaauuaaaguauacuuauggaaa

SEQ ID NO: 434647 - RNA, 24 nt, Artificial Sequence
  Synthetic
uuaauuaaaguauacuuauggaaa

SEQ ID NO: 434648 - RNA, 18 nt, Artificial Sequence
  Synthetic
agcuucuuugccuggaaa

SEQ ID NO: 434649 - RNA, 19 nt, Artificial Sequence
  Synthetic
cagcuucuuugccuggaaa

SEQ ID NO: 434650 - RNA, 20 nt, Artificial Sequence
  Synthetic
ccagcuucuuugccuggaaa

SEQ ID NO: 434651 - RNA, 21 nt, Artificial Sequence
  Synthetic
uccagcuucuuugccuggaaa

SEQ ID NO: 434652 - RNA, 22 nt, Artificial Sequence
  Synthetic
cuccagcuucuuugccuggaaa

SEQ ID NO: 434653 - RNA, 23 nt, Artificial Sequence
  Synthetic
gcuccagcuucuuugccuggaaa

SEQ ID NO: 434654 - RNA, 24 nt, Artificial Sequence
  Synthetic
ugcuccagcuucuuugccuggaaa

SEQ ID NO: 434655 - RNA, 18 nt, Artificial Sequence
  Synthetic
gugauugaauccuggaaa

SEQ ID NO: 434656 - RNA, 19 nt, Artificial Sequence
  Synthetic
ugugauugaauccuggaaa

SEQ ID NO: 434657 - RNA, 20 nt, Artificial Sequence
  Synthetic
uugugauugaauccuggaaa

SEQ ID NO: 434658 - RNA, 21 nt, Artificial Sequence
  Synthetic
auugugauugaauccuggaaa

SEQ ID NO: 434659 - RNA, 22 nt, Artificial Sequence
  Synthetic
aauugugauugaauccuggaaa

SEQ ID NO: 434660 - RNA, 23 nt, Artificial Sequence
  Synthetic
caauugugauugaauccuggaaa

SEQ ID NO: 434661 - RNA, 24 nt, Artificial Sequence
  Synthetic
gcaauugugauugaauccuggaaa

SEQ ID NO: 434662 - RNA, 18 nt, Artificial Sequence
  Synthetic
uaauuuuaauccuggaaa

SEQ ID NO: 434663 - RNA, 19 nt, Artificial Sequence
  Synthetic
auaauuuuaauccuggaaa

SEQ ID NO: 434664 - RNA, 20 nt, Artificial Sequence
  Synthetic
gauaauuuuaauccuggaaa

SEQ ID NO: 434665 - RNA, 21 nt, Artificial Sequence
  Synthetic
agauaauuuuaauccuggaaa

SEQ ID NO: 434666 - RNA, 22 nt, Artificial Sequence
  Synthetic
aagauaauuuuaauccuggaaa

SEQ ID NO: 434667 - RNA, 23 nt, Artificial Sequence
  Synthetic
gaagauaauuuuaauccuggaaa

SEQ ID NO: 434668 - RNA, 24 nt, Artificial Sequence
  Synthetic
ggaagauaauuuuaauccuggaaa

SEQ ID NO: 434669 - RNA, 18 nt, Artificial Sequence
  Synthetic
uugugagagaucuggaaa

SEQ ID NO: 434670 - RNA, 19 nt, Artificial Sequence
  Synthetic
cuugugagagaucuggaaa

SEQ ID NO: 434671 - RNA, 20 nt, Artificial Sequence
  Synthetic
acuugugagagaucuggaaa

SEQ ID NO: 434672 - RNA, 21 nt, Artificial Sequence
  Synthetic
uacuugugagagaucuggaaa

SEQ ID NO: 434673 - RNA, 22 nt, Artificial Sequence
  Synthetic
auacuugugagagaucuggaaa

SEQ ID NO: 434674 - RNA, 23 nt, Artificial Sequence
  Synthetic
uauacuugugagagaucuggaaa

SEQ ID NO: 434675 - RNA, 24 nt, Artificial Sequence
  Synthetic
guauacuugugagagaucuggaaa

SEQ ID NO: 434676 - RNA, 18 nt, Artificial Sequence
  Synthetic
aaucaccuauaguggaaa

SEQ ID NO: 434677 - RNA, 19 nt, Artificial Sequence
  Synthetic
aaaucaccuauaguggaaa

SEQ ID NO: 434678 - RNA, 20 nt, Artificial Sequence
  Synthetic
caaaucaccuauaguggaaa

SEQ ID NO: 434679 - RNA, 21 nt, Artificial Sequence
  Synthetic
acaaaucaccuauaguggaaa

SEQ ID NO: 434680 - RNA, 22 nt, Artificial Sequence
  Synthetic
uacaaaucaccuauaguggaaa

SEQ ID NO: 434681 - RNA, 23 nt, Artificial Sequence
  Synthetic
auacaaaucaccuauaguggaaa

SEQ ID NO: 434682 - RNA, 24 nt, Artificial Sequence
  Synthetic
cauacaaaucaccuauaguggaaa

SEQ ID NO: 434683 - RNA, 18 nt, Artificial Sequence
  Synthetic
ucaagcgccagguggaaa

SEQ ID NO: 434684 - RNA, 19 nt, Artificial Sequence
  Synthetic
uucaagcgccagguggaaa

SEQ ID NO: 434685 - RNA, 20 nt, Artificial Sequence
  Synthetic
auucaagcgccagguggaaa

SEQ ID NO: 434686 - RNA, 21 nt, Artificial Sequence
  Synthetic
cauucaagcgccagguggaaa

SEQ ID NO: 434687 - RNA, 22 nt, Artificial Sequence
  Synthetic
ccauucaagcgccagguggaaa

SEQ ID NO: 434688 - RNA, 23 nt, Artificial Sequence
  Synthetic
gccauucaagcgccagguggaaa

SEQ ID NO: 434689 - RNA, 24 nt, Artificial Sequence
  Synthetic
ggccauucaagcgccagguggaaa

SEQ ID NO: 434690 - RNA, 18 nt, Artificial Sequence
  Synthetic
uuugaauugagguggaaa

SEQ ID NO: 434691 - RNA, 19 nt, Artificial Sequence
  Synthetic
auuugaauugagguggaaa

SEQ ID NO: 434692 - RNA, 20 nt, Artificial Sequence
  Synthetic
cauuugaauugagguggaaa

SEQ ID NO: 434693 - RNA, 21 nt, Artificial Sequence
  Synthetic
ccauuugaauugagguggaaa

SEQ ID NO: 434694 - RNA, 22 nt, Artificial Sequence
  Synthetic
accauuugaauugagguggaaa

SEQ ID NO: 434695 - RNA, 23 nt, Artificial Sequence
  Synthetic
gaccauuugaauugagguggaaa

SEQ ID NO: 434696 - RNA, 24 nt, Artificial Sequence
  Synthetic
agaccauuugaauugagguggaaa

SEQ ID NO: 434697 - RNA, 18 nt, Artificial Sequence
  Synthetic
auuuacccaaauuggaaa

SEQ ID NO: 434698 - RNA, 19 nt, Artificial Sequence
  Synthetic
aauuuacccaaauuggaaa

SEQ ID NO: 434699 - RNA, 20 nt, Artificial Sequence
  Synthetic
uaauuuacccaaauuggaaa

SEQ ID NO: 434700 - RNA, 21 nt, Artificial Sequence
  Synthetic
uuaauuuacccaaauuggaaa

SEQ ID NO: 434701 - RNA, 22 nt, Artificial Sequence
  Synthetic
auuaauuuacccaaauuggaaa

SEQ ID NO: 434702 - RNA, 23 nt, Artificial Sequence
  Synthetic
cauuaauuuacccaaauuggaaa

SEQ ID NO: 434703 - RNA, 24 nt, Artificial Sequence
  Synthetic
ccauuaauuuacccaaauuggaaa

SEQ ID NO: 434704 - RNA, 18 nt, Artificial Sequence
  Synthetic
acaaaaaggaauuggaaa

SEQ ID NO: 434705 - RNA, 19 nt, Artificial Sequence
  Synthetic
aacaaaaaggaauuggaaa

SEQ ID NO: 434706 - RNA, 20 nt, Artificial Sequence
  Synthetic
aaacaaaaaggaauuggaaa

SEQ ID NO: 434707 - RNA, 21 nt, Artificial Sequence
  Synthetic
aaaacaaaaaggaauuggaaa

SEQ ID NO: 434708 - RNA, 22 nt, Artificial Sequence
  Synthetic
uaaaacaaaaaggaauuggaaa

SEQ ID NO: 434709 - RNA, 23 nt, Artificial Sequence
  Synthetic
auaaaacaaaaaggaauuggaaa

SEQ ID NO: 434710 - RNA, 24 nt, Artificial Sequence
  Synthetic
aauaaaacaaaaaggaauuggaaa

SEQ ID NO: 434711 - RNA, 18 nt, Artificial Sequence
  Synthetic
uugugugauccuuggaaa

SEQ ID NO: 434712 - RNA, 19 nt, Artificial Sequence
  Synthetic
guugugugauccuuggaaa

SEQ ID NO: 434713 - RNA, 20 nt, Artificial Sequence
  Synthetic
gguugugugauccuuggaaa

SEQ ID NO: 434714 - RNA, 21 nt, Artificial Sequence
  Synthetic
ugguugugugauccuuggaaa

SEQ ID NO: 434715 - RNA, 22 nt, Artificial Sequence
  Synthetic
cugguugugugauccuuggaaa

SEQ ID NO: 434716 - RNA, 23 nt, Artificial Sequence
  Synthetic
acugguugugugauccuuggaaa

SEQ ID NO: 434717 - RNA, 24 nt, Artificial Sequence
  Synthetic
uacugguugugugauccuuggaaa

SEQ ID NO: 434718 - RNA, 18 nt, Artificial Sequence
  Synthetic
caacaacauuguuggaaa

SEQ ID NO: 434719 - RNA, 19 nt, Artificial Sequence
  Synthetic
gcaacaacauuguuggaaa

SEQ ID NO: 434720 - RNA, 20 nt, Artificial Sequence
  Synthetic
ugcaacaacauuguuggaaa

SEQ ID NO: 434721 - RNA, 21 nt, Artificial Sequence
  Synthetic
cugcaacaacauuguuggaaa

SEQ ID NO: 434722 - RNA, 22 nt, Artificial Sequence
  Synthetic
ucugcaacaacauuguuggaaa

SEQ ID NO: 434723 - RNA, 23 nt, Artificial Sequence
  Synthetic
aucugcaacaacauuguuggaaa

SEQ ID NO: 434724 - RNA, 24 nt, Artificial Sequence
  Synthetic
caucugcaacaacauuguuggaaa

SEQ ID NO: 434725 - RNA, 18 nt, Artificial Sequence
  Synthetic
accugacuaauuuggaaa

SEQ ID NO: 434726 - RNA, 19 nt, Artificial Sequence
  Synthetic
aaccugacuaauuuggaaa

SEQ ID NO: 434727 - RNA, 20 nt, Artificial Sequence
  Synthetic
uaaccugacuaauuuggaaa

SEQ ID NO: 434728 - RNA, 21 nt, Artificial Sequence
  Synthetic
cuaaccugacuaauuuggaaa

SEQ ID NO: 434729 - RNA, 22 nt, Artificial Sequence
  Synthetic
ccuaaccugacuaauuuggaaa

SEQ ID NO: 434730 - RNA, 23 nt, Artificial Sequence
  Synthetic
gccuaaccugacuaauuuggaaa

SEQ ID NO: 434731 - RNA, 24 nt, Artificial Sequence
  Synthetic
agccuaaccugacuaauuuggaaa

SEQ ID NO: 434732 - RNA, 18 nt, Artificial Sequence
  Synthetic
caaaaccccauuuggaaa

SEQ ID NO: 434733 - RNA, 19 nt, Artificial Sequence
  Synthetic
ccaaaaccccauuuggaaa

SEQ ID NO: 434734 - RNA, 20 nt, Artificial Sequence
  Synthetic
gccaaaaccccauuuggaaa

SEQ ID NO: 434735 - RNA, 21 nt, Artificial Sequence
  Synthetic
ugccaaaaccccauuuggaaa

SEQ ID NO: 434736 - RNA, 22 nt, Artificial Sequence
  Synthetic
cugccaaaaccccauuuggaaa

SEQ ID NO: 434737 - RNA, 23 nt, Artificial Sequence
  Synthetic
ucugccaaaaccccauuuggaaa

SEQ ID NO: 434738 - RNA, 24 nt, Artificial Sequence
  Synthetic
uucugccaaaaccccauuuggaaa

SEQ ID NO: 434739 - RNA, 18 nt, Artificial Sequence
  Synthetic
cauuuccuuauuuggaaa

SEQ ID NO: 434740 - RNA, 19 nt, Artificial Sequence
  Synthetic
ucauuuccuuauuuggaaa

SEQ ID NO: 434741 - RNA, 20 nt, Artificial Sequence
  Synthetic
uucauuuccuuauuuggaaa

SEQ ID NO: 434742 - RNA, 21 nt, Artificial Sequence
  Synthetic
auucauuuccuuauuuggaaa

SEQ ID NO: 434743 - RNA, 22 nt, Artificial Sequence
  Synthetic
cauucauuuccuuauuuggaaa

SEQ ID NO: 434744 - RNA, 23 nt, Artificial Sequence
  Synthetic
acauucauuuccuuauuuggaaa

SEQ ID NO: 434745 - RNA, 24 nt, Artificial Sequence
  Synthetic
cacauucauuuccuuauuuggaaa

SEQ ID NO: 434746 - RNA, 18 nt, Artificial Sequence
  Synthetic
uaguggacuguuuggaaa

SEQ ID NO: 434747 - RNA, 19 nt, Artificial Sequence
  Synthetic
uuaguggacuguuuggaaa

SEQ ID NO: 434748 - RNA, 20 nt, Artificial Sequence
  Synthetic
auuaguggacuguuuggaaa

SEQ ID NO: 434749 - RNA, 21 nt, Artificial Sequence
  Synthetic
gauuaguggacuguuuggaaa

SEQ ID NO: 434750 - RNA, 22 nt, Artificial Sequence
  Synthetic
agauuaguggacuguuuggaaa

SEQ ID NO: 434751 - RNA, 23 nt, Artificial Sequence
  Synthetic
gagauuaguggacuguuuggaaa

SEQ ID NO: 434752 - RNA, 24 nt, Artificial Sequence
  Synthetic
ggagauuaguggacuguuuggaaa

SEQ ID NO: 434753 - RNA, 18 nt, Artificial Sequence
  Synthetic
aauuucccuuuuuggaaa

SEQ ID NO: 434754 - RNA, 19 nt, Artificial Sequence
  Synthetic
uaauuucccuuuuuggaaa

SEQ ID NO: 434755 - RNA, 20 nt, Artificial Sequence
  Synthetic
cuaauuucccuuuuuggaaa

SEQ ID NO: 434756 - RNA, 21 nt, Artificial Sequence
  Synthetic
ucuaauuucccuuuuuggaaa

SEQ ID NO: 434757 - RNA, 22 nt, Artificial Sequence
  Synthetic
aucuaauuucccuuuuuggaaa

SEQ ID NO: 434758 - RNA, 23 nt, Artificial Sequence
  Synthetic
aaucuaauuucccuuuuuggaaa

SEQ ID NO: 434759 - RNA, 24 nt, Artificial Sequence
  Synthetic
aaaucuaauuucccuuuuuggaaa

SEQ ID NO: 434760 - RNA, 18 nt, Artificial Sequence
  Synthetic
auugugguaaaaaugaaa

SEQ ID NO: 434761 - RNA, 19 nt, Artificial Sequence
  Synthetic
gauugugguaaaaaugaaa

SEQ ID NO: 434762 - RNA, 20 nt, Artificial Sequence
  Synthetic
ugauugugguaaaaaugaaa

SEQ ID NO: 434763 - RNA, 21 nt, Artificial Sequence
  Synthetic
gugauugugguaaaaaugaaa

SEQ ID NO: 434764 - RNA, 22 nt, Artificial Sequence
  Synthetic
agugauugugguaaaaaugaaa

SEQ ID NO: 434765 - RNA, 23 nt, Artificial Sequence
  Synthetic
gagugauugugguaaaaaugaaa

SEQ ID NO: 434766 - RNA, 24 nt, Artificial Sequence
  Synthetic
ugagugauugugguaaaaaugaaa

SEQ ID NO: 434767 - RNA, 18 nt, Artificial Sequence
  Synthetic
aauuccuacaaaaugaaa

SEQ ID NO: 434768 - RNA, 19 nt, Artificial Sequence
  Synthetic
aaauuccuacaaaaugaaa

SEQ ID NO: 434769 - RNA, 20 nt, Artificial Sequence
  Synthetic
uaaauuccuacaaaaugaaa

SEQ ID NO: 434770 - RNA, 21 nt, Artificial Sequence
  Synthetic
auaaauuccuacaaaaugaaa

SEQ ID NO: 434771 - RNA, 22 nt, Artificial Sequence
  Synthetic
aauaaauuccuacaaaaugaaa

SEQ ID NO: 434772 - RNA, 23 nt, Artificial Sequence
  Synthetic
aaauaaauuccuacaaaaugaaa

SEQ ID NO: 434773 - RNA, 24 nt, Artificial Sequence
  Synthetic
uaaauaaauuccuacaaaaugaaa

SEQ ID NO: 434774 - RNA, 18 nt, Artificial Sequence
  Synthetic
gauuuauagaaaaugaaa

SEQ ID NO: 434775 - RNA, 19 nt, Artificial Sequence
  Synthetic
ugauuuauagaaaaugaaa

SEQ ID NO: 434776 - RNA, 20 nt, Artificial Sequence
  Synthetic
cugauuuauagaaaaugaaa

SEQ ID NO: 434777 - RNA, 21 nt, Artificial Sequence
  Synthetic
ccugauuuauagaaaaugaaa

SEQ ID NO: 434778 - RNA, 22 nt, Artificial Sequence
  Synthetic
uccugauuuauagaaaaugaaa

SEQ ID NO: 434779 - RNA, 23 nt, Artificial Sequence
  Synthetic
auccugauuuauagaaaaugaaa

SEQ ID NO: 434780 - RNA, 24 nt, Artificial Sequence
  Synthetic
cauccugauuuauagaaaaugaaa

SEQ ID NO: 434781 - RNA, 18 nt, Artificial Sequence
  Synthetic
ccuuuuuggaaaaugaaa

SEQ ID NO: 434782 - RNA, 19 nt, Artificial Sequence
  Synthetic
cccuuuuuggaaaaugaaa

SEQ ID NO: 434783 - RNA, 20 nt, Artificial Sequence
  Synthetic
ucccuuuuuggaaaaugaaa

SEQ ID NO: 434784 - RNA, 21 nt, Artificial Sequence
  Synthetic
uucccuuuuuggaaaaugaaa

SEQ ID NO: 434785 - RNA, 22 nt, Artificial Sequence
  Synthetic
uuucccuuuuuggaaaaugaaa

SEQ ID NO: 434786 - RNA, 23 nt, Artificial Sequence
  Synthetic
auuucccuuuuuggaaaaugaaa

SEQ ID NO: 434787 - RNA, 24 nt, Artificial Sequence
  Synthetic
aauuucccuuuuuggaaaaugaaa

SEQ ID NO: 434788 - RNA, 18 nt, Artificial Sequence
  Synthetic
uauucuucucaaaugaaa

SEQ ID NO: 434789 - RNA, 19 nt, Artificial Sequence
  Synthetic
uuauucuucucaaaugaaa

SEQ ID NO: 434790 - RNA, 20 nt, Artificial Sequence
  Synthetic
uuuauucuucucaaaugaaa

SEQ ID NO: 434791 - RNA, 21 nt, Artificial Sequence
  Synthetic
uuuuauucuucucaaaugaaa

SEQ ID NO: 434792 - RNA, 22 nt, Artificial Sequence
  Synthetic
auuuuauucuucucaaaugaaa

SEQ ID NO: 434793 - RNA, 23 nt, Artificial Sequence
  Synthetic
aauuuuauucuucucaaaugaaa

SEQ ID NO: 434794 - RNA, 24 nt, Artificial Sequence
  Synthetic
caauuuuauucuucucaaaugaaa

SEQ ID NO: 434795 - RNA, 18 nt, Artificial Sequence
  Synthetic
gcugggguucaaaugaaa

SEQ ID NO: 434796 - RNA, 19 nt, Artificial Sequence
  Synthetic
agcugggguucaaaugaaa

SEQ ID NO: 434797 - RNA, 20 nt, Artificial Sequence
  Synthetic
cagcugggguucaaaugaaa

SEQ ID NO: 434798 - RNA, 21 nt, Artificial Sequence
  Synthetic
acagcugggguucaaaugaaa

SEQ ID NO: 434799 - RNA, 22 nt, Artificial Sequence
  Synthetic
gacagcugggguucaaaugaaa

SEQ ID NO: 434800 - RNA, 23 nt, Artificial Sequence
  Synthetic
agacagcugggguucaaaugaaa

SEQ ID NO: 434801 - RNA, 24 nt, Artificial Sequence
  Synthetic
aagacagcugggguucaaaugaaa

SEQ ID NO: 434802 - RNA, 18 nt, Artificial Sequence
  Synthetic
guaaaaucagaaaugaaa

SEQ ID NO: 434803 - RNA, 19 nt, Artificial Sequence
  Synthetic
aguaaaaucagaaaugaaa

SEQ ID NO: 434804 - RNA, 20 nt, Artificial Sequence
  Synthetic
aaguaaaaucagaaaugaaa

SEQ ID NO: 434805 - RNA, 21 nt, Artificial Sequence
  Synthetic
uaaguaaaaucagaaaugaaa

SEQ ID NO: 434806 - RNA, 22 nt, Artificial Sequence
  Synthetic
auaaguaaaaucagaaaugaaa

SEQ ID NO: 434807 - RNA, 23 nt, Artificial Sequence
  Synthetic
aauaaguaaaaucagaaaugaaa

SEQ ID NO: 434808 - RNA, 24 nt, Artificial Sequence
  Synthetic
aaauaaguaaaaucagaaaugaaa

SEQ ID NO: 434809 - RNA, 18 nt, Artificial Sequence
  Synthetic
gcucaaguagaaaugaaa

SEQ ID NO: 434810 - RNA, 19 nt, Artificial Sequence
  Synthetic
agcucaaguagaaaugaaa

SEQ ID NO: 434811 - RNA, 20 nt, Artificial Sequence
  Synthetic
aagcucaaguagaaaugaaa

SEQ ID NO: 434812 - RNA, 21 nt, Artificial Sequence
  Synthetic
uaagcucaaguagaaaugaaa

SEQ ID NO: 434813 - RNA, 22 nt, Artificial Sequence
  Synthetic
auaagcucaaguagaaaugaaa

SEQ ID NO: 434814 - RNA, 23 nt, Artificial Sequence
  Synthetic
aauaagcucaaguagaaaugaaa

SEQ ID NO: 434815 - RNA, 24 nt, Artificial Sequence
  Synthetic
aaauaagcucaaguagaaaugaaa

SEQ ID NO: 434816 - RNA, 18 nt, Artificial Sequence
  Synthetic
ugguaaugggaaaugaaa

SEQ ID NO: 434817 - RNA, 19 nt, Artificial Sequence
  Synthetic
uugguaaugggaaaugaaa

SEQ ID NO: 434818 - RNA, 20 nt, Artificial Sequence
  Synthetic
uuugguaaugggaaaugaaa

SEQ ID NO: 434819 - RNA, 21 nt, Artificial Sequence
  Synthetic
uuuugguaaugggaaaugaaa

SEQ ID NO: 434820 - RNA, 22 nt, Artificial Sequence
  Synthetic
auuuugguaaugggaaaugaaa

SEQ ID NO: 434821 - RNA, 23 nt, Artificial Sequence
  Synthetic
aauuuugguaaugggaaaugaaa

SEQ ID NO: 434822 - RNA, 24 nt, Artificial Sequence
  Synthetic
gaauuuugguaaugggaaaugaaa

SEQ ID NO: 434823 - RNA, 18 nt, Artificial Sequence
  Synthetic
gagcagaaauaaaugaaa

SEQ ID NO: 434824 - RNA, 19 nt, Artificial Sequence
  Synthetic
agagcagaaauaaaugaaa

SEQ ID NO: 434825 - RNA, 20 nt, Artificial Sequence
  Synthetic
cagagcagaaauaaaugaaa

SEQ ID NO: 434826 - RNA, 21 nt, Artificial Sequence
  Synthetic
ucagagcagaaauaaaugaaa

SEQ ID NO: 434827 - RNA, 22 nt, Artificial Sequence
  Synthetic
aucagagcagaaauaaaugaaa

SEQ ID NO: 434828 - RNA, 23 nt, Artificial Sequence
  Synthetic
gaucagagcagaaauaaaugaaa

SEQ ID NO: 434829 - RNA, 24 nt, Artificial Sequence
  Synthetic
agaucagagcagaaauaaaugaaa

SEQ ID NO: 434830 - RNA, 18 nt, Artificial Sequence
  Synthetic
agauggauauaaaugaaa

SEQ ID NO: 434831 - RNA, 19 nt, Artificial Sequence
  Synthetic
gagauggauauaaaugaaa

SEQ ID NO: 434832 - RNA, 20 nt, Artificial Sequence
  Synthetic
agagauggauauaaaugaaa

SEQ ID NO: 434833 - RNA, 21 nt, Artificial Sequence
  Synthetic
aagagauggauauaaaugaaa

SEQ ID NO: 434834 - RNA, 22 nt, Artificial Sequence
  Synthetic
gaagagauggauauaaaugaaa

SEQ ID NO: 434835 - RNA, 23 nt, Artificial Sequence
  Synthetic
agaagagauggauauaaaugaaa

SEQ ID NO: 434836 - RNA, 24 nt, Artificial Sequence
  Synthetic
gagaagagauggauauaaaugaaa

SEQ ID NO: 434837 - RNA, 18 nt, Artificial Sequence
  Synthetic
gagcagaacuaaaugaaa

SEQ ID NO: 434838 - RNA, 19 nt, Artificial Sequence
  Synthetic
agagcagaacuaaaugaaa

SEQ ID NO: 434839 - RNA, 20 nt, Artificial Sequence
  Synthetic
cagagcagaacuaaaugaaa

SEQ ID NO: 434840 - RNA, 21 nt, Artificial Sequence
  Synthetic
ucagagcagaacuaaaugaaa

SEQ ID NO: 434841 - RNA, 22 nt, Artificial Sequence
  Synthetic
aucagagcagaacuaaaugaaa

SEQ ID NO: 434842 - RNA, 23 nt, Artificial Sequence
  Synthetic
gaucagagcagaacuaaaugaaa

SEQ ID NO: 434843 - RNA, 24 nt, Artificial Sequence
  Synthetic
agaucagagcagaacuaaaugaaa

SEQ ID NO: 434844 - RNA, 18 nt, Artificial Sequence
  Synthetic
uaaggcaaaacaaugaaa

SEQ ID NO: 434845 - RNA, 19 nt, Artificial Sequence
  Synthetic
uuaaggcaaaacaaugaaa

SEQ ID NO: 434846 - RNA, 20 nt, Artificial Sequence
  Synthetic
auuaaggcaaaacaaugaaa

SEQ ID NO: 434847 - RNA, 21 nt, Artificial Sequence
  Synthetic
uauuaaggcaaaacaaugaaa

SEQ ID NO: 434848 - RNA, 22 nt, Artificial Sequence
  Synthetic
auauuaaggcaaaacaaugaaa

SEQ ID NO: 434849 - RNA, 23 nt, Artificial Sequence
  Synthetic
aauauuaaggcaaaacaaugaaa

SEQ ID NO: 434850 - RNA, 24 nt, Artificial Sequence
  Synthetic
caauauuaaggcaaaacaaugaaa

SEQ ID NO: 434851 - RNA, 18 nt, Artificial Sequence
  Synthetic
uugggguuaacaaugaaa

SEQ ID NO: 434852 - RNA, 19 nt, Artificial Sequence
  Synthetic
uuugggguuaacaaugaaa

SEQ ID NO: 434853 - RNA, 20 nt, Artificial Sequence
  Synthetic
uuuugggguuaacaaugaaa

SEQ ID NO: 434854 - RNA, 21 nt, Artificial Sequence
  Synthetic
auuuugggguuaacaaugaaa

SEQ ID NO: 434855 - RNA, 22 nt, Artificial Sequence
  Synthetic
gauuuugggguuaacaaugaaa

SEQ ID NO: 434856 - RNA, 23 nt, Artificial Sequence
  Synthetic
ugauuuugggguuaacaaugaaa

SEQ ID NO: 434857 - RNA, 24 nt, Artificial Sequence
  Synthetic
augauuuugggguuaacaaugaaa

SEQ ID NO: 434858 - RNA, 18 nt, Artificial Sequence
  Synthetic
auacuuaugacaaugaaa

SEQ ID NO: 434859 - RNA, 19 nt, Artificial Sequence
  Synthetic
aauacuuaugacaaugaaa

SEQ ID NO: 434860 - RNA, 20 nt, Artificial Sequence
  Synthetic
gaauacuuaugacaaugaaa

SEQ ID NO: 434861 - RNA, 21 nt, Artificial Sequence
  Synthetic
ggaauacuuaugacaaugaaa

SEQ ID NO: 434862 - RNA, 22 nt, Artificial Sequence
  Synthetic
uggaauacuuaugacaaugaaa

SEQ ID NO: 434863 - RNA, 23 nt, Artificial Sequence
  Synthetic
guggaauacuuaugacaaugaaa

SEQ ID NO: 434864 - RNA, 24 nt, Artificial Sequence
  Synthetic
aguggaauacuuaugacaaugaaa

SEQ ID NO: 434865 - RNA, 18 nt, Artificial Sequence
  Synthetic
auuuuaggaccaaugaaa

SEQ ID NO: 434866 - RNA, 19 nt, Artificial Sequence
  Synthetic
aauuuuaggaccaaugaaa

SEQ ID NO: 434867 - RNA, 20 nt, Artificial Sequence
  Synthetic
caauuuuaggaccaaugaaa

SEQ ID NO: 434868 - RNA, 21 nt, Artificial Sequence
  Synthetic
gcaauuuuaggaccaaugaaa

SEQ ID NO: 434869 - RNA, 22 nt, Artificial Sequence
  Synthetic
ugcaauuuuaggaccaaugaaa

SEQ ID NO: 434870 - RNA, 23 nt, Artificial Sequence
  Synthetic
gugcaauuuuaggaccaaugaaa

SEQ ID NO: 434871 - RNA, 24 nt, Artificial Sequence
  Synthetic
agugcaauuuuaggaccaaugaaa

SEQ ID NO: 434872 - RNA, 18 nt, Artificial Sequence
  Synthetic
uaauauuugucaaugaaa

SEQ ID NO: 434873 - RNA, 19 nt, Artificial Sequence
  Synthetic
auaauauuugucaaugaaa

SEQ ID NO: 434874 - RNA, 20 nt, Artificial Sequence
  Synthetic
uauaauauuugucaaugaaa

SEQ ID NO: 434875 - RNA, 21 nt, Artificial Sequence
  Synthetic
uuauaauauuugucaaugaaa

SEQ ID NO: 434876 - RNA, 22 nt, Artificial Sequence
  Synthetic
uuuauaauauuugucaaugaaa

SEQ ID NO: 434877 - RNA, 23 nt, Artificial Sequence
  Synthetic
cuuuauaauauuugucaaugaaa

SEQ ID NO: 434878 - RNA, 24 nt, Artificial Sequence
  Synthetic
ucuuuauaauauuugucaaugaaa

SEQ ID NO: 434879 - RNA, 18 nt, Artificial Sequence
  Synthetic
auguccaggagaaugaaa

SEQ ID NO: 434880 - RNA, 19 nt, Artificial Sequence
  Synthetic
gauguccaggagaaugaaa

SEQ ID NO: 434881 - RNA, 20 nt, Artificial Sequence
  Synthetic
ugauguccaggagaaugaaa

SEQ ID NO: 434882 - RNA, 21 nt, Artificial Sequence
  Synthetic
uugauguccaggagaaugaaa

SEQ ID NO: 434883 - RNA, 22 nt, Artificial Sequence
  Synthetic
auugauguccaggagaaugaaa

SEQ ID NO: 434884 - RNA, 23 nt, Artificial Sequence
  Synthetic
gauugauguccaggagaaugaaa

SEQ ID NO: 434885 - RNA, 24 nt, Artificial Sequence
  Synthetic
cgauugauguccaggagaaugaaa

SEQ ID NO: 434886 - RNA, 18 nt, Artificial Sequence
  Synthetic
uuuacucuuagaaugaaa

SEQ ID NO: 434887 - RNA, 19 nt, Artificial Sequence
  Synthetic
guuuacucuuagaaugaaa

SEQ ID NO: 434888 - RNA, 20 nt, Artificial Sequence
  Synthetic
gguuuacucuuagaaugaaa

SEQ ID NO: 434889 - RNA, 21 nt, Artificial Sequence
  Synthetic
ugguuuacucuuagaaugaaa

SEQ ID NO: 434890 - RNA, 22 nt, Artificial Sequence
  Synthetic
gugguuuacucuuagaaugaaa

SEQ ID NO: 434891 - RNA, 23 nt, Artificial Sequence
  Synthetic
ugugguuuacucuuagaaugaaa

SEQ ID NO: 434892 - RNA, 24 nt, Artificial Sequence
  Synthetic
augugguuuacucuuagaaugaaa

SEQ ID NO: 434893 - RNA, 18 nt, Artificial Sequence
  Synthetic
uaaagaaaaugaaugaaa

SEQ ID NO: 434894 - RNA, 19 nt, Artificial Sequence
  Synthetic
guaaagaaaaugaaugaaa

SEQ ID NO: 434895 - RNA, 20 nt, Artificial Sequence
  Synthetic
aguaaagaaaaugaaugaaa

SEQ ID NO: 434896 - RNA, 21 nt, Artificial Sequence
  Synthetic
uaguaaagaaaaugaaugaaa

SEQ ID NO: 434897 - RNA, 22 nt, Artificial Sequence
  Synthetic
cuaguaaagaaaaugaaugaaa

SEQ ID NO: 434898 - RNA, 23 nt, Artificial Sequence
  Synthetic
acuaguaaagaaaaugaaugaaa

SEQ ID NO: 434899 - RNA, 24 nt, Artificial Sequence
  Synthetic
uacuaguaaagaaaaugaaugaaa

SEQ ID NO: 434900 - RNA, 18 nt, Artificial Sequence
  Synthetic
agguggauaauaaugaaa

SEQ ID NO: 434901 - RNA, 19 nt, Artificial Sequence
  Synthetic
aagguggauaauaaugaaa

SEQ ID NO: 434902 - RNA, 20 nt, Artificial Sequence
  Synthetic
uaagguggauaauaaugaaa

SEQ ID NO: 434903 - RNA, 21 nt, Artificial Sequence
  Synthetic
uuaagguggauaauaaugaaa

SEQ ID NO: 434904 - RNA, 22 nt, Artificial Sequence
  Synthetic
uuuaagguggauaauaaugaaa

SEQ ID NO: 434905 - RNA, 23 nt, Artificial Sequence
  Synthetic
cuuuaagguggauaauaaugaaa

SEQ ID NO: 434906 - RNA, 24 nt, Artificial Sequence
  Synthetic
acuuuaagguggauaauaaugaaa

SEQ ID NO: 434907 - RNA, 18 nt, Artificial Sequence
  Synthetic
aggcaaagcauaaugaaa

SEQ ID NO: 434908 - RNA, 19 nt, Artificial Sequence
  Synthetic
aaggcaaagcauaaugaaa

SEQ ID NO: 434909 - RNA, 20 nt, Artificial Sequence
  Synthetic
aaaggcaaagcauaaugaaa

SEQ ID NO: 434910 - RNA, 21 nt, Artificial Sequence
  Synthetic
aaaaggcaaagcauaaugaaa

SEQ ID NO: 434911 - RNA, 22 nt, Artificial Sequence
  Synthetic
uaaaaggcaaagcauaaugaaa

SEQ ID NO: 434912 - RNA, 23 nt, Artificial Sequence
  Synthetic
uuaaaaggcaaagcauaaugaaa

SEQ ID NO: 434913 - RNA, 24 nt, Artificial Sequence
  Synthetic
cuuaaaaggcaaagcauaaugaaa

SEQ ID NO: 434914 - RNA, 18 nt, Artificial Sequence
  Synthetic
uuuauauuagccaugaaa

SEQ ID NO: 434915 - RNA, 19 nt, Artificial Sequence
  Synthetic
uuuuauauuagccaugaaa

SEQ ID NO: 434916 - RNA, 20 nt, Artificial Sequence
  Synthetic
auuuuauauuagccaugaaa

SEQ ID NO: 434917 - RNA, 21 nt, Artificial Sequence
  Synthetic
aauuuuauauuagccaugaaa

SEQ ID NO: 434918 - RNA, 22 nt, Artificial Sequence
  Synthetic
aaauuuuauauuagccaugaaa

SEQ ID NO: 434919 - RNA, 23 nt, Artificial Sequence
  Synthetic
caaauuuuauauuagccaugaaa

SEQ ID NO: 434920 - RNA, 24 nt, Artificial Sequence
  Synthetic
ucaaauuuuauauuagccaugaaa

SEQ ID NO: 434921 - RNA, 18 nt, Artificial Sequence
  Synthetic
aaacuuaauagcaugaaa

SEQ ID NO: 434922 - RNA, 19 nt, Artificial Sequence
  Synthetic
gaaacuuaauagcaugaaa

SEQ ID NO: 434923 - RNA, 20 nt, Artificial Sequence
  Synthetic
agaaacuuaauagcaugaaa

SEQ ID NO: 434924 - RNA, 21 nt, Artificial Sequence
  Synthetic
gagaaacuuaauagcaugaaa

SEQ ID NO: 434925 - RNA, 22 nt, Artificial Sequence
  Synthetic
agagaaacuuaauagcaugaaa

SEQ ID NO: 434926 - RNA, 23 nt, Artificial Sequence
  Synthetic
aagagaaacuuaauagcaugaaa

SEQ ID NO: 434927 - RNA, 24 nt, Artificial Sequence
  Synthetic
uaagagaaacuuaauagcaugaaa

SEQ ID NO: 434928 - RNA, 18 nt, Artificial Sequence
  Synthetic
ggaagauggggcaugaaa

SEQ ID NO: 434929 - RNA, 19 nt, Artificial Sequence
  Synthetic
gggaagauggggcaugaaa

SEQ ID NO: 434930 - RNA, 20 nt, Artificial Sequence
  Synthetic
ggggaagauggggcaugaaa

SEQ ID NO: 434931 - RNA, 21 nt, Artificial Sequence
  Synthetic
aggggaagauggggcaugaaa

SEQ ID NO: 434932 - RNA, 22 nt, Artificial Sequence
  Synthetic
uaggggaagauggggcaugaaa

SEQ ID NO: 434933 - RNA, 23 nt, Artificial Sequence
  Synthetic
uuaggggaagauggggcaugaaa

SEQ ID NO: 434934 - RNA, 24 nt, Artificial Sequence
  Synthetic
cuuaggggaagauggggcaugaaa

SEQ ID NO: 434935 - RNA, 18 nt, Artificial Sequence
  Synthetic
cagaucaaaugcaugaaa

SEQ ID NO: 434936 - RNA, 19 nt, Artificial Sequence
  Synthetic
gcagaucaaaugcaugaaa

SEQ ID NO: 434937 - RNA, 20 nt, Artificial Sequence
  Synthetic
ggcagaucaaaugcaugaaa

SEQ ID NO: 434938 - RNA, 21 nt, Artificial Sequence
  Synthetic
aggcagaucaaaugcaugaaa

SEQ ID NO: 434939 - RNA, 22 nt, Artificial Sequence
  Synthetic
gaggcagaucaaaugcaugaaa

SEQ ID NO: 434940 - RNA, 23 nt, Artificial Sequence
  Synthetic
agaggcagaucaaaugcaugaaa

SEQ ID NO: 434941 - RNA, 24 nt, Artificial Sequence
  Synthetic
aagaggcagaucaaaugcaugaaa

SEQ ID NO: 434942 - RNA, 18 nt, Artificial Sequence
  Synthetic
aagcaacagugcaugaaa

SEQ ID NO: 434943 - RNA, 19 nt, Artificial Sequence
  Synthetic
aaagcaacagugcaugaaa

SEQ ID NO: 434944 - RNA, 20 nt, Artificial Sequence
  Synthetic
caaagcaacagugcaugaaa

SEQ ID NO: 434945 - RNA, 21 nt, Artificial Sequence
  Synthetic
ccaaagcaacagugcaugaaa

SEQ ID NO: 434946 - RNA, 22 nt, Artificial Sequence
  Synthetic
accaaagcaacagugcaugaaa

SEQ ID NO: 434947 - RNA, 23 nt, Artificial Sequence
  Synthetic
gaccaaagcaacagugcaugaaa

SEQ ID NO: 434948 - RNA, 24 nt, Artificial Sequence
  Synthetic
agaccaaagcaacagugcaugaaa

SEQ ID NO: 434949 - RNA, 18 nt, Artificial Sequence
  Synthetic
acaaauacaaucaugaaa

SEQ ID NO: 434950 - RNA, 19 nt, Artificial Sequence
  Synthetic
cacaaauacaaucaugaaa

SEQ ID NO: 434951 - RNA, 20 nt, Artificial Sequence
  Synthetic
acacaaauacaaucaugaaa

SEQ ID NO: 434952 - RNA, 21 nt, Artificial Sequence
  Synthetic
aacacaaauacaaucaugaaa

SEQ ID NO: 434953 - RNA, 22 nt, Artificial Sequence
  Synthetic
caacacaaauacaaucaugaaa

SEQ ID NO: 434954 - RNA, 23 nt, Artificial Sequence
  Synthetic
ucaacacaaauacaaucaugaaa

SEQ ID NO: 434955 - RNA, 24 nt, Artificial Sequence
  Synthetic
aucaacacaaauacaaucaugaaa

SEQ ID NO: 434956 - RNA, 18 nt, Artificial Sequence
  Synthetic
gcaagcagcuucaugaaa

SEQ ID NO: 434957 - RNA, 19 nt, Artificial Sequence
  Synthetic
ggcaagcagcuucaugaaa

SEQ ID NO: 434958 - RNA, 20 nt, Artificial Sequence
  Synthetic
uggcaagcagcuucaugaaa

SEQ ID NO: 434959 - RNA, 21 nt, Artificial Sequence
  Synthetic
cuggcaagcagcuucaugaaa

SEQ ID NO: 434960 - RNA, 22 nt, Artificial Sequence
  Synthetic
gcuggcaagcagcuucaugaaa

SEQ ID NO: 434961 - RNA, 23 nt, Artificial Sequence
  Synthetic
agcuggcaagcagcuucaugaaa

SEQ ID NO: 434962 - RNA, 24 nt, Artificial Sequence
  Synthetic
uagcuggcaagcagcuucaugaaa

SEQ ID NO: 434963 - RNA, 18 nt, Artificial Sequence
  Synthetic
aaguuuucucagaugaaa

SEQ ID NO: 434964 - RNA, 19 nt, Artificial Sequence
  Synthetic
uaaguuuucucagaugaaa

SEQ ID NO: 434965 - RNA, 20 nt, Artificial Sequence
  Synthetic
cuaaguuuucucagaugaaa

SEQ ID NO: 434966 - RNA, 21 nt, Artificial Sequence
  Synthetic
ccuaaguuuucucagaugaaa

SEQ ID NO: 434967 - RNA, 22 nt, Artificial Sequence
  Synthetic
gccuaaguuuucucagaugaaa

SEQ ID NO: 434968 - RNA, 23 nt, Artificial Sequence
  Synthetic
agccuaaguuuucucagaugaaa

SEQ ID NO: 434969 - RNA, 24 nt, Artificial Sequence
  Synthetic
gagccuaaguuuucucagaugaaa

SEQ ID NO: 434970 - RNA, 18 nt, Artificial Sequence
  Synthetic
gacaugaaagagaugaaa

SEQ ID NO: 434971 - RNA, 19 nt, Artificial Sequence
  Synthetic
agacaugaaagagaugaaa

SEQ ID NO: 434972 - RNA, 20 nt, Artificial Sequence
  Synthetic
aagacaugaaagagaugaaa

SEQ ID NO: 434973 - RNA, 21 nt, Artificial Sequence
  Synthetic
aaagacaugaaagagaugaaa

SEQ ID NO: 434974 - RNA, 22 nt, Artificial Sequence
  Synthetic
aaaagacaugaaagagaugaaa

SEQ ID NO: 434975 - RNA, 23 nt, Artificial Sequence
  Synthetic
aaaaagacaugaaagagaugaaa

SEQ ID NO: 434976 - RNA, 24 nt, Artificial Sequence
  Synthetic
uaaaaagacaugaaagagaugaaa

SEQ ID NO: 434977 - RNA, 18 nt, Artificial Sequence
  Synthetic
ugacucagagagaugaaa

SEQ ID NO: 434978 - RNA, 19 nt, Artificial Sequence
  Synthetic
cugacucagagagaugaaa

SEQ ID NO: 434979 - RNA, 20 nt, Artificial Sequence
  Synthetic
ucugacucagagagaugaaa

SEQ ID NO: 434980 - RNA, 21 nt, Artificial Sequence
  Synthetic
uucugacucagagagaugaaa

SEQ ID NO: 434981 - RNA, 22 nt, Artificial Sequence
  Synthetic
cuucugacucagagagaugaaa

SEQ ID NO: 434982 - RNA, 23 nt, Artificial Sequence
  Synthetic
acuucugacucagagagaugaaa

SEQ ID NO: 434983 - RNA, 24 nt, Artificial Sequence
  Synthetic
uacuucugacucagagagaugaaa

SEQ ID NO: 434984 - RNA, 18 nt, Artificial Sequence
  Synthetic
aagaguuaggagaugaaa

SEQ ID NO: 434985 - RNA, 19 nt, Artificial Sequence
  Synthetic
caagaguuaggagaugaaa

SEQ ID NO: 434986 - RNA, 20 nt, Artificial Sequence
  Synthetic
gcaagaguuaggagaugaaa

SEQ ID NO: 434987 - RNA, 21 nt, Artificial Sequence
  Synthetic
ugcaagaguuaggagaugaaa

SEQ ID NO: 434988 - RNA, 22 nt, Artificial Sequence
  Synthetic
augcaagaguuaggagaugaaa

SEQ ID NO: 434989 - RNA, 23 nt, Artificial Sequence
  Synthetic
gaugcaagaguuaggagaugaaa

SEQ ID NO: 434990 - RNA, 24 nt, Artificial Sequence
  Synthetic
ggaugcaagaguuaggagaugaaa

SEQ ID NO: 434991 - RNA, 18 nt, Artificial Sequence
  Synthetic
gauuguugaucgaugaaa

SEQ ID NO: 434992 - RNA, 19 nt, Artificial Sequence
  Synthetic
ggauuguugaucgaugaaa

SEQ ID NO: 434993 - RNA, 20 nt, Artificial Sequence
  Synthetic
uggauuguugaucgaugaaa

SEQ ID NO: 434994 - RNA, 21 nt, Artificial Sequence
  Synthetic
cuggauuguugaucgaugaaa

SEQ ID NO: 434995 - RNA, 22 nt, Artificial Sequence
  Synthetic
gcuggauuguugaucgaugaaa

SEQ ID NO: 434996 - RNA, 23 nt, Artificial Sequence
  Synthetic
ggcuggauuguugaucgaugaaa

SEQ ID NO: 434997 - RNA, 24 nt, Artificial Sequence
  Synthetic
gggcuggauuguugaucgaugaaa

SEQ ID NO: 434998 - RNA, 18 nt, Artificial Sequence
  Synthetic
uaggguagggggaugaaa

SEQ ID NO: 434999 - RNA, 19 nt, Artificial Sequence
  Synthetic
guaggguagggggaugaaa

SEQ ID NO: 435000 - RNA, 20 nt, Artificial Sequence
  Synthetic
gguaggguagggggaugaaa

SEQ ID NO: 435001 - RNA, 21 nt, Artificial Sequence
  Synthetic
ggguaggguagggggaugaaa

SEQ ID NO: 435002 - RNA, 22 nt, Artificial Sequence
  Synthetic
gggguaggguagggggaugaaa

SEQ ID NO: 435003 - RNA, 23 nt, Artificial Sequence
  Synthetic
ggggguaggguagggggaugaaa

SEQ ID NO: 435004 - RNA, 24 nt, Artificial Sequence
  Synthetic
uggggguaggguagggggaugaaa

SEQ ID NO: 435005 - RNA, 18 nt, Artificial Sequence
  Synthetic
guagagacauggaugaaa

SEQ ID NO: 435006 - RNA, 19 nt, Artificial Sequence
  Synthetic
uguagagacauggaugaaa

SEQ ID NO: 435007 - RNA, 20 nt, Artificial Sequence
  Synthetic
uuguagagacauggaugaaa

SEQ ID NO: 435008 - RNA, 21 nt, Artificial Sequence
  Synthetic
uuuguagagacauggaugaaa

SEQ ID NO: 435009 - RNA, 22 nt, Artificial Sequence
  Synthetic
cuuuguagagacauggaugaaa

SEQ ID NO: 435010 - RNA, 23 nt, Artificial Sequence
  Synthetic
ucuuuguagagacauggaugaaa

SEQ ID NO: 435011 - RNA, 24 nt, Artificial Sequence
  Synthetic
uucuuuguagagacauggaugaaa

SEQ ID NO: 435012 - RNA, 21 nt, Artificial Sequence
  Synthetic
uuuguagggacauggaugaaa

SEQ ID NO: 435013 - RNA, 22 nt, Artificial Sequence
  Synthetic
cuuuguagggacauggaugaaa

SEQ ID NO: 435014 - RNA, 23 nt, Artificial Sequence
  Synthetic
ccuuuguagggacauggaugaaa

SEQ ID NO: 435015 - RNA, 24 nt, Artificial Sequence
  Synthetic
uccuuuguagggacauggaugaaa

SEQ ID NO: 435016 - RNA, 18 nt, Artificial Sequence
  Synthetic
gguauaaggaugaugaaa

SEQ ID NO: 435017 - RNA, 19 nt, Artificial Sequence
  Synthetic
ugguauaaggaugaugaaa

SEQ ID NO: 435018 - RNA, 20 nt, Artificial Sequence
  Synthetic
cugguauaaggaugaugaaa

SEQ ID NO: 435019 - RNA, 21 nt, Artificial Sequence
  Synthetic
ucugguauaaggaugaugaaa

SEQ ID NO: 435020 - RNA, 22 nt, Artificial Sequence
  Synthetic
aucugguauaaggaugaugaaa

SEQ ID NO: 435021 - RNA, 23 nt, Artificial Sequence
  Synthetic
uaucugguauaaggaugaugaaa

SEQ ID NO: 435022 - RNA, 24 nt, Artificial Sequence
  Synthetic
guaucugguauaaggaugaugaaa

SEQ ID NO: 435023 - RNA, 18 nt, Artificial Sequence
  Synthetic
ucuaaauggaugaugaaa

SEQ ID NO: 435024 - RNA, 19 nt, Artificial Sequence
  Synthetic
aucuaaauggaugaugaaa

SEQ ID NO: 435025 - RNA, 20 nt, Artificial Sequence
  Synthetic
aaucuaaauggaugaugaaa

SEQ ID NO: 435026 - RNA, 21 nt, Artificial Sequence
  Synthetic
uaaucuaaauggaugaugaaa

SEQ ID NO: 435027 - RNA, 22 nt, Artificial Sequence
  Synthetic
uuaaucuaaauggaugaugaaa

SEQ ID NO: 435028 - RNA, 23 nt, Artificial Sequence
  Synthetic
uuuaaucuaaauggaugaugaaa

SEQ ID NO: 435029 - RNA, 24 nt, Artificial Sequence
  Synthetic
cuuuaaucuaaauggaugaugaaa

SEQ ID NO: 435030 - RNA, 18 nt, Artificial Sequence
  Synthetic
uauguuuaugugaugaaa

SEQ ID NO: 435031 - RNA, 19 nt, Artificial Sequence
  Synthetic
uuauguuuaugugaugaaa

SEQ ID NO: 435032 - RNA, 20 nt, Artificial Sequence
  Synthetic
cuuauguuuaugugaugaaa

SEQ ID NO: 435033 - RNA, 21 nt, Artificial Sequence
  Synthetic
acuuauguuuaugugaugaaa

SEQ ID NO: 435034 - RNA, 22 nt, Artificial Sequence
  Synthetic
uacuuauguuuaugugaugaaa

SEQ ID NO: 435035 - RNA, 23 nt, Artificial Sequence
  Synthetic
uuacuuauguuuaugugaugaaa

SEQ ID NO: 435036 - RNA, 24 nt, Artificial Sequence
  Synthetic
uuuacuuauguuuaugugaugaaa

SEQ ID NO: 435037 - RNA, 18 nt, Artificial Sequence
  Synthetic
gaacucuauacuaugaaa

SEQ ID NO: 435038 - RNA, 19 nt, Artificial Sequence
  Synthetic
agaacucuauacuaugaaa

SEQ ID NO: 435039 - RNA, 20 nt, Artificial Sequence
  Synthetic
aagaacucuauacuaugaaa

SEQ ID NO: 435040 - RNA, 21 nt, Artificial Sequence
  Synthetic
caagaacucuauacuaugaaa

SEQ ID NO: 435041 - RNA, 22 nt, Artificial Sequence
  Synthetic
gcaagaacucuauacuaugaaa

SEQ ID NO: 435042 - RNA, 23 nt, Artificial Sequence
  Synthetic
agcaagaacucuauacuaugaaa

SEQ ID NO: 435043 - RNA, 24 nt, Artificial Sequence
  Synthetic
uagcaagaacucuauacuaugaaa

SEQ ID NO: 435044 - RNA, 18 nt, Artificial Sequence
  Synthetic
aauagcaacccuaugaaa

SEQ ID NO: 435045 - RNA, 19 nt, Artificial Sequence
  Synthetic
aaauagcaacccuaugaaa

SEQ ID NO: 435046 - RNA, 20 nt, Artificial Sequence
  Synthetic
uaaauagcaacccuaugaaa

SEQ ID NO: 435047 - RNA, 21 nt, Artificial Sequence
  Synthetic
auaaauagcaacccuaugaaa

SEQ ID NO: 435048 - RNA, 22 nt, Artificial Sequence
  Synthetic
uauaaauagcaacccuaugaaa

SEQ ID NO: 435049 - RNA, 23 nt, Artificial Sequence
  Synthetic
uuauaaauagcaacccuaugaaa

SEQ ID NO: 435050 - RNA, 24 nt, Artificial Sequence
  Synthetic
guuauaaauagcaacccuaugaaa

SEQ ID NO: 435051 - RNA, 18 nt, Artificial Sequence
  Synthetic
cuuucuagcgguaugaaa

SEQ ID NO: 435052 - RNA, 19 nt, Artificial Sequence
  Synthetic
ucuuucuagcgguaugaaa

SEQ ID NO: 435053 - RNA, 20 nt, Artificial Sequence
  Synthetic
uucuuucuagcgguaugaaa

SEQ ID NO: 435054 - RNA, 21 nt, Artificial Sequence
  Synthetic
guucuuucuagcgguaugaaa

SEQ ID NO: 435055 - RNA, 22 nt, Artificial Sequence
  Synthetic
aguucuuucuagcgguaugaaa

SEQ ID NO: 435056 - RNA, 23 nt, Artificial Sequence
  Synthetic
caguucuuucuagcgguaugaaa

SEQ ID NO: 435057 - RNA, 24 nt, Artificial Sequence
  Synthetic
gcaguucuuucuagcgguaugaaa

SEQ ID NO: 435058 - RNA, 18 nt, Artificial Sequence
  Synthetic
caugguuccuguaugaaa

SEQ ID NO: 435059 - RNA, 19 nt, Artificial Sequence
  Synthetic
ccaugguuccuguaugaaa

SEQ ID NO: 435060 - RNA, 20 nt, Artificial Sequence
  Synthetic
uccaugguuccuguaugaaa

SEQ ID NO: 435061 - RNA, 21 nt, Artificial Sequence
  Synthetic
uuccaugguuccuguaugaaa

SEQ ID NO: 435062 - RNA, 22 nt, Artificial Sequence
  Synthetic
guuccaugguuccuguaugaaa

SEQ ID NO: 435063 - RNA, 23 nt, Artificial Sequence
  Synthetic
aguuccaugguuccuguaugaaa

SEQ ID NO: 435064 - RNA, 24 nt, Artificial Sequence
  Synthetic
caguuccaugguuccuguaugaaa

SEQ ID NO: 435065 - RNA, 18 nt, Artificial Sequence
  Synthetic
guacugaauauuaugaaa

SEQ ID NO: 435066 - RNA, 19 nt, Artificial Sequence
  Synthetic
gguacugaauauuaugaaa

SEQ ID NO: 435067 - RNA, 20 nt, Artificial Sequence
  Synthetic
cgguacugaauauuaugaaa

SEQ ID NO: 435068 - RNA, 21 nt, Artificial Sequence
  Synthetic
ccgguacugaauauuaugaaa

SEQ ID NO: 435069 - RNA, 22 nt, Artificial Sequence
  Synthetic
gccgguacugaauauuaugaaa

SEQ ID NO: 435070 - RNA, 23 nt, Artificial Sequence
  Synthetic
ugccgguacugaauauuaugaaa

SEQ ID NO: 435071 - RNA, 24 nt, Artificial Sequence
  Synthetic
uugccgguacugaauauuaugaaa

SEQ ID NO: 435072 - RNA, 18 nt, Artificial Sequence
  Synthetic
ugucgugguuuuaugaaa

SEQ ID NO: 435073 - RNA, 19 nt, Artificial Sequence
  Synthetic
gugucgugguuuuaugaaa

SEQ ID NO: 435074 - RNA, 20 nt, Artificial Sequence
  Synthetic
ggugucgugguuuuaugaaa

SEQ ID NO: 435075 - RNA, 21 nt, Artificial Sequence
  Synthetic
uggugucgugguuuuaugaaa

SEQ ID NO: 435076 - RNA, 22 nt, Artificial Sequence
  Synthetic
uuggugucgugguuuuaugaaa

SEQ ID NO: 435077 - RNA, 23 nt, Artificial Sequence
  Synthetic
uuuggugucgugguuuuaugaaa

SEQ ID NO: 435078 - RNA, 24 nt, Artificial Sequence
  Synthetic
uuuuggugucgugguuuuaugaaa

SEQ ID NO: 435079 - RNA, 18 nt, Artificial Sequence
  Synthetic
aagaaagcaaaacugaaa

SEQ ID NO: 435080 - RNA, 19 nt, Artificial Sequence
  Synthetic
uaagaaagcaaaacugaaa

SEQ ID NO: 435081 - RNA, 20 nt, Artificial Sequence
  Synthetic
uuaagaaagcaaaacugaaa

SEQ ID NO: 435082 - RNA, 21 nt, Artificial Sequence
  Synthetic
uuuaagaaagcaaaacugaaa

SEQ ID NO: 435083 - RNA, 22 nt, Artificial Sequence
  Synthetic
guuuaagaaagcaaaacugaaa

SEQ ID NO: 435084 - RNA, 23 nt, Artificial Sequence
  Synthetic
uguuuaagaaagcaaaacugaaa

SEQ ID NO: 435085 - RNA, 24 nt, Artificial Sequence
  Synthetic
auguuuaagaaagcaaaacugaaa

SEQ ID NO: 435086 - RNA, 18 nt, Artificial Sequence
  Synthetic
aucauaaggaaacugaaa

SEQ ID NO: 435087 - RNA, 19 nt, Artificial Sequence
  Synthetic
aaucauaaggaaacugaaa

SEQ ID NO: 435088 - RNA, 20 nt, Artificial Sequence
  Synthetic
aaaucauaaggaaacugaaa

SEQ ID NO: 435089 - RNA, 21 nt, Artificial Sequence
  Synthetic
caaaucauaaggaaacugaaa

SEQ ID NO: 435090 - RNA, 22 nt, Artificial Sequence
  Synthetic
ccaaaucauaaggaaacugaaa

SEQ ID NO: 435091 - RNA, 23 nt, Artificial Sequence
  Synthetic
gccaaaucauaaggaaacugaaa

SEQ ID NO: 435092 - RNA, 24 nt, Artificial Sequence
  Synthetic
agccaaaucauaaggaaacugaaa

SEQ ID NO: 435093 - RNA, 18 nt, Artificial Sequence
  Synthetic
guucaaaugaaacugaaa

SEQ ID NO: 435094 - RNA, 19 nt, Artificial Sequence
  Synthetic
gguucaaaugaaacugaaa

SEQ ID NO: 435095 - RNA, 20 nt, Artificial Sequence
  Synthetic
ggguucaaaugaaacugaaa

SEQ ID NO: 435096 - RNA, 21 nt, Artificial Sequence
  Synthetic
gggguucaaaugaaacugaaa

SEQ ID NO: 435097 - RNA, 22 nt, Artificial Sequence
  Synthetic
ugggguucaaaugaaacugaaa

SEQ ID NO: 435098 - RNA, 23 nt, Artificial Sequence
  Synthetic
cugggguucaaaugaaacugaaa

SEQ ID NO: 435099 - RNA, 24 nt, Artificial Sequence
  Synthetic
gcugggguucaaaugaaacugaaa

SEQ ID NO: 435100 - RNA, 18 nt, Artificial Sequence
  Synthetic
ggugaagguaaacugaaa

SEQ ID NO: 435101 - RNA, 19 nt, Artificial Sequence
  Synthetic
aggugaagguaaacugaaa

SEQ ID NO: 435102 - RNA, 20 nt, Artificial Sequence
  Synthetic
aaggugaagguaaacugaaa

SEQ ID NO: 435103 - RNA, 21 nt, Artificial Sequence
  Synthetic
uaaggugaagguaaacugaaa

SEQ ID NO: 435104 - RNA, 22 nt, Artificial Sequence
  Synthetic
cuaaggugaagguaaacugaaa

SEQ ID NO: 435105 - RNA, 23 nt, Artificial Sequence
  Synthetic
ucuaaggugaagguaaacugaaa

SEQ ID NO: 435106 - RNA, 24 nt, Artificial Sequence
  Synthetic
gucuaaggugaagguaaacugaaa

SEQ ID NO: 435107 - RNA, 18 nt, Artificial Sequence
  Synthetic
aacugauaucaacugaaa

SEQ ID NO: 435108 - RNA, 19 nt, Artificial Sequence
  Synthetic
caacugauaucaacugaaa

SEQ ID NO: 435109 - RNA, 20 nt, Artificial Sequence
  Synthetic
ccaacugauaucaacugaaa

SEQ ID NO: 435110 - RNA, 21 nt, Artificial Sequence
  Synthetic
cccaacugauaucaacugaaa

SEQ ID NO: 435111 - RNA, 22 nt, Artificial Sequence
  Synthetic
ccccaacugauaucaacugaaa

SEQ ID NO: 435112 - RNA, 23 nt, Artificial Sequence
  Synthetic
accccaacugauaucaacugaaa

SEQ ID NO: 435113 - RNA, 24 nt, Artificial Sequence
  Synthetic
uaccccaacugauaucaacugaaa

SEQ ID NO: 435114 - RNA, 18 nt, Artificial Sequence
  Synthetic
augauucauuaacugaaa

SEQ ID NO: 435115 - RNA, 19 nt, Artificial Sequence
  Synthetic
gaugauucauuaacugaaa

SEQ ID NO: 435116 - RNA, 20 nt, Artificial Sequence
  Synthetic
ugaugauucauuaacugaaa

SEQ ID NO: 435117 - RNA, 21 nt, Artificial Sequence
  Synthetic
augaugauucauuaacugaaa

SEQ ID NO: 435118 - RNA, 22 nt, Artificial Sequence
  Synthetic
gaugaugauucauuaacugaaa

SEQ ID NO: 435119 - RNA, 23 nt, Artificial Sequence
  Synthetic
ggaugaugauucauuaacugaaa

SEQ ID NO: 435120 - RNA, 24 nt, Artificial Sequence
  Synthetic
uggaugaugauucauuaacugaaa

SEQ ID NO: 435121 - RNA, 18 nt, Artificial Sequence
  Synthetic
gaccaugggucacugaaa

SEQ ID NO: 435122 - RNA, 19 nt, Artificial Sequence
  Synthetic
ugaccaugggucacugaaa

SEQ ID NO: 435123 - RNA, 20 nt, Artificial Sequence
  Synthetic
uugaccaugggucacugaaa

SEQ ID NO: 435124 - RNA, 21 nt, Artificial Sequence
  Synthetic
guugaccaugggucacugaaa

SEQ ID NO: 435125 - RNA, 22 nt, Artificial Sequence
  Synthetic
aguugaccaugggucacugaaa

SEQ ID NO: 435126 - RNA, 23 nt, Artificial Sequence
  Synthetic
caguugaccaugggucacugaaa

SEQ ID NO: 435127 - RNA, 24 nt, Artificial Sequence
  Synthetic
gcaguugaccaugggucacugaaa

SEQ ID NO: 435128 - RNA, 18 nt, Artificial Sequence
  Synthetic
agcacggagagacugaaa

SEQ ID NO: 435129 - RNA, 19 nt, Artificial Sequence
  Synthetic
uagcacggagagacugaaa

SEQ ID NO: 435130 - RNA, 20 nt, Artificial Sequence
  Synthetic
guagcacggagagacugaaa

SEQ ID NO: 435131 - RNA, 21 nt, Artificial Sequence
  Synthetic
gguagcacggagagacugaaa

SEQ ID NO: 435132 - RNA, 22 nt, Artificial Sequence
  Synthetic
ggguagcacggagagacugaaa

SEQ ID NO: 435133 - RNA, 23 nt, Artificial Sequence
  Synthetic
gggguagcacggagagacugaaa

SEQ ID NO: 435134 - RNA, 24 nt, Artificial Sequence
  Synthetic
ggggguagcacggagagacugaaa

SEQ ID NO: 435135 - RNA, 18 nt, Artificial Sequence
  Synthetic
guccuuuggugacugaaa

SEQ ID NO: 435136 - RNA, 19 nt, Artificial Sequence
  Synthetic
uguccuuuggugacugaaa

SEQ ID NO: 435137 - RNA, 20 nt, Artificial Sequence
  Synthetic
uuguccuuuggugacugaaa

SEQ ID NO: 435138 - RNA, 21 nt, Artificial Sequence
  Synthetic
auuguccuuuggugacugaaa

SEQ ID NO: 435139 - RNA, 22 nt, Artificial Sequence
  Synthetic
gauuguccuuuggugacugaaa

SEQ ID NO: 435140 - RNA, 23 nt, Artificial Sequence
  Synthetic
ggauuguccuuuggugacugaaa

SEQ ID NO: 435141 - RNA, 24 nt, Artificial Sequence
  Synthetic
aggauuguccuuuggugacugaaa

SEQ ID NO: 435142 - RNA, 18 nt, Artificial Sequence
  Synthetic
caucagugacuacugaaa

SEQ ID NO: 435143 - RNA, 19 nt, Artificial Sequence
  Synthetic
gcaucagugacuacugaaa

SEQ ID NO: 435144 - RNA, 20 nt, Artificial Sequence
  Synthetic
agcaucagugacuacugaaa

SEQ ID NO: 435145 - RNA, 21 nt, Artificial Sequence
  Synthetic
aagcaucagugacuacugaaa

SEQ ID NO: 435146 - RNA, 22 nt, Artificial Sequence
  Synthetic
caagcaucagugacuacugaaa

SEQ ID NO: 435147 - RNA, 23 nt, Artificial Sequence
  Synthetic
gcaagcaucagugacuacugaaa

SEQ ID NO: 435148 - RNA, 24 nt, Artificial Sequence
  Synthetic
ugcaagcaucagugacuacugaaa

SEQ ID NO: 435149 - RNA, 18 nt, Artificial Sequence
  Synthetic
gagaugaaguuacugaaa

SEQ ID NO: 435150 - RNA, 19 nt, Artificial Sequence
  Synthetic
ggagaugaaguuacugaaa

SEQ ID NO: 435151 - RNA, 20 nt, Artificial Sequence
  Synthetic
uggagaugaaguuacugaaa

SEQ ID NO: 435152 - RNA, 21 nt, Artificial Sequence
  Synthetic
uuggagaugaaguuacugaaa

SEQ ID NO: 435153 - RNA, 22 nt, Artificial Sequence
  Synthetic
uuuggagaugaaguuacugaaa

SEQ ID NO: 435154 - RNA, 23 nt, Artificial Sequence
  Synthetic
cuuuggagaugaaguuacugaaa

SEQ ID NO: 435155 - RNA, 24 nt, Artificial Sequence
  Synthetic
gcuuuggagaugaaguuacugaaa

SEQ ID NO: 435156 - RNA, 18 nt, Artificial Sequence
  Synthetic
uuuauucauuuacugaaa

SEQ ID NO: 435157 - RNA, 19 nt, Artificial Sequence
  Synthetic
auuuauucauuuacugaaa

SEQ ID NO: 435158 - RNA, 20 nt, Artificial Sequence
  Synthetic
uauuuauucauuuacugaaa

SEQ ID NO: 435159 - RNA, 21 nt, Artificial Sequence
  Synthetic
auauuuauucauuuacugaaa

SEQ ID NO: 435160 - RNA, 22 nt, Artificial Sequence
  Synthetic
aauauuuauucauuuacugaaa

SEQ ID NO: 435161 - RNA, 23 nt, Artificial Sequence
  Synthetic
aaauauuuauucauuuacugaaa

SEQ ID NO: 435162 - RNA, 24 nt, Artificial Sequence
  Synthetic
uaaauauuuauucauuuacugaaa

SEQ ID NO: 435163 - RNA, 18 nt, Artificial Sequence
  Synthetic
uccaaaugggaccugaaa

SEQ ID NO: 435164 - RNA, 19 nt, Artificial Sequence
  Synthetic
uuccaaaugggaccugaaa

SEQ ID NO: 435165 - RNA, 20 nt, Artificial Sequence
  Synthetic
cuuccaaaugggaccugaaa

SEQ ID NO: 435166 - RNA, 21 nt, Artificial Sequence
  Synthetic
gcuuccaaaugggaccugaaa

SEQ ID NO: 435167 - RNA, 22 nt, Artificial Sequence
  Synthetic
ggcuuccaaaugggaccugaaa

SEQ ID NO: 435168 - RNA, 23 nt, Artificial Sequence
  Synthetic
uggcuuccaaaugggaccugaaa

SEQ ID NO: 435169 - RNA, 24 nt, Artificial Sequence
  Synthetic
cuggcuuccaaaugggaccugaaa

SEQ ID NO: 435170 - RNA, 18 nt, Artificial Sequence
  Synthetic
cagugguuguaccugaaa

SEQ ID NO: 435171 - RNA, 19 nt, Artificial Sequence
  Synthetic
ucagugguuguaccugaaa

SEQ ID NO: 435172 - RNA, 20 nt, Artificial Sequence
  Synthetic
gucagugguuguaccugaaa

SEQ ID NO: 435173 - RNA, 21 nt, Artificial Sequence
  Synthetic
ugucagugguuguaccugaaa

SEQ ID NO: 435174 - RNA, 22 nt, Artificial Sequence
  Synthetic
gugucagugguuguaccugaaa

SEQ ID NO: 435175 - RNA, 23 nt, Artificial Sequence
  Synthetic
ugugucagugguuguaccugaaa

SEQ ID NO: 435176 - RNA, 24 nt, Artificial Sequence
  Synthetic
augugucagugguuguaccugaaa

SEQ ID NO: 435177 - RNA, 18 nt, Artificial Sequence
  Synthetic
auuaggaagacccugaaa

SEQ ID NO: 435178 - RNA, 19 nt, Artificial Sequence
  Synthetic
uauuaggaagacccugaaa

SEQ ID NO: 435179 - RNA, 20 nt, Artificial Sequence
  Synthetic
guauuaggaagacccugaaa

SEQ ID NO: 435180 - RNA, 21 nt, Artificial Sequence
  Synthetic
aguauuaggaagacccugaaa

SEQ ID NO: 435181 - RNA, 22 nt, Artificial Sequence
  Synthetic
uaguauuaggaagacccugaaa

SEQ ID NO: 435182 - RNA, 23 nt, Artificial Sequence
  Synthetic
uuaguauuaggaagacccugaaa

SEQ ID NO: 435183 - RNA, 24 nt, Artificial Sequence
  Synthetic
uuuaguauuaggaagacccugaaa

SEQ ID NO: 435184 - RNA, 18 nt, Artificial Sequence
  Synthetic
gggcaugguagccugaaa

SEQ ID NO: 435185 - RNA, 19 nt, Artificial Sequence
  Synthetic
ugggcaugguagccugaaa

SEQ ID NO: 435186 - RNA, 20 nt, Artificial Sequence
  Synthetic
augggcaugguagccugaaa

SEQ ID NO: 435187 - RNA, 21 nt, Artificial Sequence
  Synthetic
caugggcaugguagccugaaa

SEQ ID NO: 435188 - RNA, 22 nt, Artificial Sequence
  Synthetic
ucaugggcaugguagccugaaa

SEQ ID NO: 435189 - RNA, 23 nt, Artificial Sequence
  Synthetic
cucaugggcaugguagccugaaa

SEQ ID NO: 435190 - RNA, 24 nt, Artificial Sequence
  Synthetic
acucaugggcaugguagccugaaa

SEQ ID NO: 435191 - RNA, 18 nt, Artificial Sequence
  Synthetic
guuaauuccauccugaaa

SEQ ID NO: 435192 - RNA, 19 nt, Artificial Sequence
  Synthetic
uguuaauuccauccugaaa

SEQ ID NO: 435193 - RNA, 20 nt, Artificial Sequence
  Synthetic
uuguuaauuccauccugaaa

SEQ ID NO: 435194 - RNA, 21 nt, Artificial Sequence
  Synthetic
uuuguuaauuccauccugaaa

SEQ ID NO: 435195 - RNA, 22 nt, Artificial Sequence
  Synthetic
auuuguuaauuccauccugaaa

SEQ ID NO: 435196 - RNA, 23 nt, Artificial Sequence
  Synthetic
aauuuguuaauuccauccugaaa

SEQ ID NO: 435197 - RNA, 24 nt, Artificial Sequence
  Synthetic
aaauuuguuaauuccauccugaaa

SEQ ID NO: 435198 - RNA, 18 nt, Artificial Sequence
  Synthetic
ugggaaggggagcugaaa

SEQ ID NO: 435199 - RNA, 19 nt, Artificial Sequence
  Synthetic
gugggaaggggagcugaaa

SEQ ID NO: 435200 - RNA, 20 nt, Artificial Sequence
  Synthetic
agugggaaggggagcugaaa

SEQ ID NO: 435201 - RNA, 21 nt, Artificial Sequence
  Synthetic
cagugggaaggggagcugaaa

SEQ ID NO: 435202 - RNA, 22 nt, Artificial Sequence
  Synthetic
ucagugggaaggggagcugaaa

SEQ ID NO: 435203 - RNA, 23 nt, Artificial Sequence
  Synthetic
cucagugggaaggggagcugaaa

SEQ ID NO: 435204 - RNA, 24 nt, Artificial Sequence
  Synthetic
ucucagugggaaggggagcugaaa

SEQ ID NO: 435205 - RNA, 18 nt, Artificial Sequence
  Synthetic
uuccccuuugggcugaaa

SEQ ID NO: 435206 - RNA, 19 nt, Artificial Sequence
  Synthetic
cuuccccuuugggcugaaa

SEQ ID NO: 435207 - RNA, 20 nt, Artificial Sequence
  Synthetic
ccuuccccuuugggcugaaa

SEQ ID NO: 435208 - RNA, 21 nt, Artificial Sequence
  Synthetic
uccuuccccuuugggcugaaa

SEQ ID NO: 435209 - RNA, 22 nt, Artificial Sequence
  Synthetic
uuccuuccccuuugggcugaaa

SEQ ID NO: 435210 - RNA, 23 nt, Artificial Sequence
  Synthetic
cuuccuuccccuuugggcugaaa

SEQ ID NO: 435211 - RNA, 24 nt, Artificial Sequence
  Synthetic
acuuccuuccccuuugggcugaaa

SEQ ID NO: 435212 - RNA, 18 nt, Artificial Sequence
  Synthetic
cugugucagaugcugaaa

SEQ ID NO: 435213 - RNA, 19 nt, Artificial Sequence
  Synthetic
acugugucagaugcugaaa

SEQ ID NO: 435214 - RNA, 20 nt, Artificial Sequence
  Synthetic
uacugugucagaugcugaaa

SEQ ID NO: 435215 - RNA, 21 nt, Artificial Sequence
  Synthetic
guacugugucagaugcugaaa

SEQ ID NO: 435216 - RNA, 22 nt, Artificial Sequence
  Synthetic
gguacugugucagaugcugaaa

SEQ ID NO: 435217 - RNA, 23 nt, Artificial Sequence
  Synthetic
ugguacugugucagaugcugaaa

SEQ ID NO: 435218 - RNA, 24 nt, Artificial Sequence
  Synthetic
augguacugugucagaugcugaaa

SEQ ID NO: 435219 - RNA, 18 nt, Artificial Sequence
  Synthetic
uuaugauacuugcugaaa

SEQ ID NO: 435220 - RNA, 19 nt, Artificial Sequence
  Synthetic
auuaugauacuugcugaaa

SEQ ID NO: 435221 - RNA, 20 nt, Artificial Sequence
  Synthetic
uauuaugauacuugcugaaa

SEQ ID NO: 435222 - RNA, 21 nt, Artificial Sequence
  Synthetic
auauuaugauacuugcugaaa

SEQ ID NO: 435223 - RNA, 22 nt, Artificial Sequence
  Synthetic
aauauuaugauacuugcugaaa

SEQ ID NO: 435224 - RNA, 23 nt, Artificial Sequence
  Synthetic
aaauauuaugauacuugcugaaa

SEQ ID NO: 435225 - RNA, 24 nt, Artificial Sequence
  Synthetic
aaaauauuaugauacuugcugaaa

SEQ ID NO: 435226 - RNA, 18 nt, Artificial Sequence
  Synthetic
ugacuucaaccucugaaa

SEQ ID NO: 435227 - RNA, 19 nt, Artificial Sequence
  Synthetic
augacuucaaccucugaaa

SEQ ID NO: 435228 - RNA, 20 nt, Artificial Sequence
  Synthetic
uaugacuucaaccucugaaa

SEQ ID NO: 435229 - RNA, 21 nt, Artificial Sequence
  Synthetic
uuaugacuucaaccucugaaa

SEQ ID NO: 435230 - RNA, 22 nt, Artificial Sequence
  Synthetic
cuuaugacuucaaccucugaaa

SEQ ID NO: 435231 - RNA, 23 nt, Artificial Sequence
  Synthetic
acuuaugacuucaaccucugaaa

SEQ ID NO: 435232 - RNA, 24 nt, Artificial Sequence
  Synthetic
aacuuaugacuucaaccucugaaa

SEQ ID NO: 435233 - RNA, 18 nt, Artificial Sequence
  Synthetic
aguuuuugcccucugaaa

SEQ ID NO: 435234 - RNA, 19 nt, Artificial Sequence
  Synthetic
aaguuuuugcccucugaaa

SEQ ID NO: 435235 - RNA, 20 nt, Artificial Sequence
  Synthetic
uaaguuuuugcccucugaaa

SEQ ID NO: 435236 - RNA, 21 nt, Artificial Sequence
  Synthetic
uuaaguuuuugcccucugaaa

SEQ ID NO: 435237 - RNA, 22 nt, Artificial Sequence
  Synthetic
guuaaguuuuugcccucugaaa

SEQ ID NO: 435238 - RNA, 23 nt, Artificial Sequence
  Synthetic
uguuaaguuuuugcccucugaaa

SEQ ID NO: 435239 - RNA, 24 nt, Artificial Sequence
  Synthetic
auguuaaguuuuugcccucugaaa

SEQ ID NO: 435240 - RNA, 18 nt, Artificial Sequence
  Synthetic
caauaacaggcucugaaa

SEQ ID NO: 435241 - RNA, 19 nt, Artificial Sequence
  Synthetic
ccaauaacaggcucugaaa

SEQ ID NO: 435242 - RNA, 20 nt, Artificial Sequence
  Synthetic
accaauaacaggcucugaaa

SEQ ID NO: 435243 - RNA, 21 nt, Artificial Sequence
  Synthetic
gaccaauaacaggcucugaaa

SEQ ID NO: 435244 - RNA, 22 nt, Artificial Sequence
  Synthetic
agaccaauaacaggcucugaaa

SEQ ID NO: 435245 - RNA, 23 nt, Artificial Sequence
  Synthetic
uagaccaauaacaggcucugaaa

SEQ ID NO: 435246 - RNA, 24 nt, Artificial Sequence
  Synthetic
auagaccaauaacaggcucugaaa

SEQ ID NO: 435247 - RNA, 18 nt, Artificial Sequence
  Synthetic
agguuagcugcucugaaa

SEQ ID NO: 435248 - RNA, 19 nt, Artificial Sequence
  Synthetic
cagguuagcugcucugaaa

SEQ ID NO: 435249 - RNA, 20 nt, Artificial Sequence
  Synthetic
acagguuagcugcucugaaa

SEQ ID NO: 435250 - RNA, 21 nt, Artificial Sequence
  Synthetic
aacagguuagcugcucugaaa

SEQ ID NO: 435251 - RNA, 22 nt, Artificial Sequence
  Synthetic
caacagguuagcugcucugaaa

SEQ ID NO: 435252 - RNA, 23 nt, Artificial Sequence
  Synthetic
ucaacagguuagcugcucugaaa

SEQ ID NO: 435253 - RNA, 24 nt, Artificial Sequence
  Synthetic
uucaacagguuagcugcucugaaa

SEQ ID NO: 435254 - RNA, 18 nt, Artificial Sequence
  Synthetic
uaaaaacaaauucugaaa

SEQ ID NO: 435255 - RNA, 19 nt, Artificial Sequence
  Synthetic
cuaaaaacaaauucugaaa

SEQ ID NO: 435256 - RNA, 20 nt, Artificial Sequence
  Synthetic
ucuaaaaacaaauucugaaa

SEQ ID NO: 435257 - RNA, 21 nt, Artificial Sequence
  Synthetic
cucuaaaaacaaauucugaaa

SEQ ID NO: 435258 - RNA, 22 nt, Artificial Sequence
  Synthetic
gcucuaaaaacaaauucugaaa

SEQ ID NO: 435259 - RNA, 23 nt, Artificial Sequence
  Synthetic
ggcucuaaaaacaaauucugaaa

SEQ ID NO: 435260 - RNA, 24 nt, Artificial Sequence
  Synthetic
aggcucuaaaaacaaauucugaaa

SEQ ID NO: 435261 - RNA, 18 nt, Artificial Sequence
  Synthetic
cuugaggguauucugaaa

SEQ ID NO: 435262 - RNA, 19 nt, Artificial Sequence
  Synthetic
ucuugaggguauucugaaa

SEQ ID NO: 435263 - RNA, 20 nt, Artificial Sequence
  Synthetic
cucuugaggguauucugaaa

SEQ ID NO: 435264 - RNA, 21 nt, Artificial Sequence
  Synthetic
ucucuugaggguauucugaaa

SEQ ID NO: 435265 - RNA, 22 nt, Artificial Sequence
  Synthetic
uucucuugaggguauucugaaa

SEQ ID NO: 435266 - RNA, 23 nt, Artificial Sequence
  Synthetic
uuucucuugaggguauucugaaa

SEQ ID NO: 435267 - RNA, 24 nt, Artificial Sequence
  Synthetic
uuuucucuugaggguauucugaaa

SEQ ID NO: 435268 - RNA, 18 nt, Artificial Sequence
  Synthetic
uggugccaucuucugaaa

SEQ ID NO: 435269 - RNA, 19 nt, Artificial Sequence
  Synthetic
guggugccaucuucugaaa

SEQ ID NO: 435270 - RNA, 20 nt, Artificial Sequence
  Synthetic
gguggugccaucuucugaaa

SEQ ID NO: 435271 - RNA, 21 nt, Artificial Sequence
  Synthetic
ugguggugccaucuucugaaa

SEQ ID NO: 435272 - RNA, 22 nt, Artificial Sequence
  Synthetic
augguggugccaucuucugaaa

SEQ ID NO: 435273 - RNA, 23 nt, Artificial Sequence
  Synthetic
gaugguggugccaucuucugaaa

SEQ ID NO: 435274 - RNA, 24 nt, Artificial Sequence
  Synthetic
agaugguggugccaucuucugaaa

SEQ ID NO: 435275 - RNA, 18 nt, Artificial Sequence
  Synthetic
caauaacaaguucugaaa

SEQ ID NO: 435276 - RNA, 19 nt, Artificial Sequence
  Synthetic
ccaauaacaaguucugaaa

SEQ ID NO: 435277 - RNA, 20 nt, Artificial Sequence
  Synthetic
accaauaacaaguucugaaa

SEQ ID NO: 435278 - RNA, 21 nt, Artificial Sequence
  Synthetic
gaccaauaacaaguucugaaa

SEQ ID NO: 435279 - RNA, 22 nt, Artificial Sequence
  Synthetic
agaccaauaacaaguucugaaa

SEQ ID NO: 435280 - RNA, 23 nt, Artificial Sequence
  Synthetic
uagaccaauaacaaguucugaaa

SEQ ID NO: 435281 - RNA, 24 nt, Artificial Sequence
  Synthetic
auagaccaauaacaaguucugaaa

SEQ ID NO: 435282 - RNA, 18 nt, Artificial Sequence
  Synthetic
uagaaaaugaaagugaaa

SEQ ID NO: 435283 - RNA, 19 nt, Artificial Sequence
  Synthetic
auagaaaaugaaagugaaa

SEQ ID NO: 435284 - RNA, 20 nt, Artificial Sequence
  Synthetic
uauagaaaaugaaagugaaa

SEQ ID NO: 435285 - RNA, 21 nt, Artificial Sequence
  Synthetic
uuauagaaaaugaaagugaaa

SEQ ID NO: 435286 - RNA, 22 nt, Artificial Sequence
  Synthetic
uuuauagaaaaugaaagugaaa

SEQ ID NO: 435287 - RNA, 23 nt, Artificial Sequence
  Synthetic
auuuauagaaaaugaaagugaaa

SEQ ID NO: 435288 - RNA, 24 nt, Artificial Sequence
  Synthetic
gauuuauagaaaaugaaagugaaa

SEQ ID NO: 435289 - RNA, 18 nt, Artificial Sequence
  Synthetic
accaaagguaaagugaaa

SEQ ID NO: 435290 - RNA, 19 nt, Artificial Sequence
  Synthetic
caccaaagguaaagugaaa

SEQ ID NO: 435291 - RNA, 20 nt, Artificial Sequence
  Synthetic
ccaccaaagguaaagugaaa

SEQ ID NO: 435292 - RNA, 21 nt, Artificial Sequence
  Synthetic
accaccaaagguaaagugaaa

SEQ ID NO: 435293 - RNA, 22 nt, Artificial Sequence
  Synthetic
caccaccaaagguaaagugaaa

SEQ ID NO: 435294 - RNA, 23 nt, Artificial Sequence
  Synthetic
acaccaccaaagguaaagugaaa

SEQ ID NO: 435295 - RNA, 24 nt, Artificial Sequence
  Synthetic
aacaccaccaaagguaaagugaaa

SEQ ID NO: 435296 - RNA, 18 nt, Artificial Sequence
  Synthetic
gggugagaagaagugaaa

SEQ ID NO: 435297 - RNA, 19 nt, Artificial Sequence
  Synthetic
agggugagaagaagugaaa

SEQ ID NO: 435298 - RNA, 20 nt, Artificial Sequence
  Synthetic
cagggugagaagaagugaaa

SEQ ID NO: 435299 - RNA, 21 nt, Artificial Sequence
  Synthetic
acagggugagaagaagugaaa

SEQ ID NO: 435300 - RNA, 22 nt, Artificial Sequence
  Synthetic
aacagggugagaagaagugaaa

SEQ ID NO: 435301 - RNA, 23 nt, Artificial Sequence
  Synthetic
caacagggugagaagaagugaaa

SEQ ID NO: 435302 - RNA, 24 nt, Artificial Sequence
  Synthetic
ucaacagggugagaagaagugaaa

SEQ ID NO: 435303 - RNA, 18 nt, Artificial Sequence
  Synthetic
guaaagagagaagugaaa

SEQ ID NO: 435304 - RNA, 19 nt, Artificial Sequence
  Synthetic
uguaaagagagaagugaaa

SEQ ID NO: 435305 - RNA, 20 nt, Artificial Sequence
  Synthetic
guguaaagagagaagugaaa

SEQ ID NO: 435306 - RNA, 21 nt, Artificial Sequence
  Synthetic
uguguaaagagagaagugaaa

SEQ ID NO: 435307 - RNA, 22 nt, Artificial Sequence
  Synthetic
guguguaaagagagaagugaaa

SEQ ID NO: 435308 - RNA, 23 nt, Artificial Sequence
  Synthetic
uguguguaaagagagaagugaaa

SEQ ID NO: 435309 - RNA, 24 nt, Artificial Sequence
  Synthetic
guguguguaaagagagaagugaaa

SEQ ID NO: 435310 - RNA, 18 nt, Artificial Sequence
  Synthetic
uugcccaaagcagugaaa

SEQ ID NO: 435311 - RNA, 19 nt, Artificial Sequence
  Synthetic
guugcccaaagcagugaaa

SEQ ID NO: 435312 - RNA, 20 nt, Artificial Sequence
  Synthetic
uguugcccaaagcagugaaa

SEQ ID NO: 435313 - RNA, 21 nt, Artificial Sequence
  Synthetic
cuguugcccaaagcagugaaa

SEQ ID NO: 435314 - RNA, 22 nt, Artificial Sequence
  Synthetic
gcuguugcccaaagcagugaaa

SEQ ID NO: 435315 - RNA, 23 nt, Artificial Sequence
  Synthetic
agcuguugcccaaagcagugaaa

SEQ ID NO: 435316 - RNA, 24 nt, Artificial Sequence
  Synthetic
cagcuguugcccaaagcagugaaa

SEQ ID NO: 435317 - RNA, 18 nt, Artificial Sequence
  Synthetic
auguuuugaagagugaaa

SEQ ID NO: 435318 - RNA, 19 nt, Artificial Sequence
  Synthetic
aauguuuugaagagugaaa

SEQ ID NO: 435319 - RNA, 20 nt, Artificial Sequence
  Synthetic
aaauguuuugaagagugaaa

SEQ ID NO: 435320 - RNA, 21 nt, Artificial Sequence
  Synthetic
caaauguuuugaagagugaaa

SEQ ID NO: 435321 - RNA, 22 nt, Artificial Sequence
  Synthetic
ucaaauguuuugaagagugaaa

SEQ ID NO: 435322 - RNA, 23 nt, Artificial Sequence
  Synthetic
aucaaauguuuugaagagugaaa

SEQ ID NO: 435323 - RNA, 24 nt, Artificial Sequence
  Synthetic
gaucaaauguuuugaagagugaaa

SEQ ID NO: 435324 - RNA, 18 nt, Artificial Sequence
  Synthetic
caacagccuagagugaaa

SEQ ID NO: 435325 - RNA, 19 nt, Artificial Sequence
  Synthetic
acaacagccuagagugaaa

SEQ ID NO: 435326 - RNA, 20 nt, Artificial Sequence
  Synthetic
uacaacagccuagagugaaa

SEQ ID NO: 435327 - RNA, 21 nt, Artificial Sequence
  Synthetic
auacaacagccuagagugaaa

SEQ ID NO: 435328 - RNA, 22 nt, Artificial Sequence
  Synthetic
cauacaacagccuagagugaaa

SEQ ID NO: 435329 - RNA, 23 nt, Artificial Sequence
  Synthetic
acauacaacagccuagagugaaa

SEQ ID NO: 435330 - RNA, 24 nt, Artificial Sequence
  Synthetic
uacauacaacagccuagagugaaa

SEQ ID NO: 435331 - RNA, 18 nt, Artificial Sequence
  Synthetic
uuuauaaaacuagugaaa

SEQ ID NO: 435332 - RNA, 19 nt, Artificial Sequence
  Synthetic
guuuauaaaacuagugaaa

SEQ ID NO: 435333 - RNA, 20 nt, Artificial Sequence
  Synthetic
aguuuauaaaacuagugaaa

SEQ ID NO: 435334 - RNA, 21 nt, Artificial Sequence
  Synthetic
caguuuauaaaacuagugaaa

SEQ ID NO: 435335 - RNA, 22 nt, Artificial Sequence
  Synthetic
ucaguuuauaaaacuagugaaa

SEQ ID NO: 435336 - RNA, 23 nt, Artificial Sequence
  Synthetic
aucaguuuauaaaacuagugaaa

SEQ ID NO: 435337 - RNA, 24 nt, Artificial Sequence
  Synthetic
caucaguuuauaaaacuagugaaa

SEQ ID NO: 435338 - RNA, 18 nt, Artificial Sequence
  Synthetic
uaaaaaagaguagugaaa

SEQ ID NO: 435339 - RNA, 19 nt, Artificial Sequence
  Synthetic
uuaaaaaagaguagugaaa

SEQ ID NO: 435340 - RNA, 20 nt, Artificial Sequence
  Synthetic
guuaaaaaagaguagugaaa

SEQ ID NO: 435341 - RNA, 21 nt, Artificial Sequence
  Synthetic
uguuaaaaaagaguagugaaa

SEQ ID NO: 435342 - RNA, 22 nt, Artificial Sequence
  Synthetic
auguuaaaaaagaguagugaaa

SEQ ID NO: 435343 - RNA, 23 nt, Artificial Sequence
  Synthetic
uauguuaaaaaagaguagugaaa

SEQ ID NO: 435344 - RNA, 24 nt, Artificial Sequence
  Synthetic
cuauguuaaaaaagaguagugaaa

SEQ ID NO: 435345 - RNA, 18 nt, Artificial Sequence
  Synthetic
uggauacgagaggugaaa

SEQ ID NO: 435346 - RNA, 19 nt, Artificial Sequence
  Synthetic
guggauacgagaggugaaa

SEQ ID NO: 435347 - RNA, 20 nt, Artificial Sequence
  Synthetic
cguggauacgagaggugaaa

SEQ ID NO: 435348 - RNA, 21 nt, Artificial Sequence
  Synthetic
ucguggauacgagaggugaaa

SEQ ID NO: 435349 - RNA, 22 nt, Artificial Sequence
  Synthetic
aucguggauacgagaggugaaa

SEQ ID NO: 435350 - RNA, 23 nt, Artificial Sequence
  Synthetic
gaucguggauacgagaggugaaa

SEQ ID NO: 435351 - RNA, 24 nt, Artificial Sequence
  Synthetic
ugaucguggauacgagaggugaaa

SEQ ID NO: 435352 - RNA, 18 nt, Artificial Sequence
  Synthetic
uuauuuccuagggugaaa

SEQ ID NO: 435353 - RNA, 19 nt, Artificial Sequence
  Synthetic
uuuauuuccuagggugaaa

SEQ ID NO: 435354 - RNA, 20 nt, Artificial Sequence
  Synthetic
uuuuauuuccuagggugaaa

SEQ ID NO: 435355 - RNA, 21 nt, Artificial Sequence
  Synthetic
cuuuuauuuccuagggugaaa

SEQ ID NO: 435356 - RNA, 22 nt, Artificial Sequence
  Synthetic
acuuuuauuuccuagggugaaa

SEQ ID NO: 435357 - RNA, 23 nt, Artificial Sequence
  Synthetic
uacuuuuauuuccuagggugaaa

SEQ ID NO: 435358 - RNA, 24 nt, Artificial Sequence
  Synthetic
auacuuuuauuuccuagggugaaa

SEQ ID NO: 435359 - RNA, 18 nt, Artificial Sequence
  Synthetic
uuucccuacggggugaaa

SEQ ID NO: 435360 - RNA, 19 nt, Artificial Sequence
  Synthetic
guuucccuacggggugaaa

SEQ ID NO: 435361 - RNA, 20 nt, Artificial Sequence
  Synthetic
gguuucccuacggggugaaa

SEQ ID NO: 435362 - RNA, 21 nt, Artificial Sequence
  Synthetic
agguuucccuacggggugaaa

SEQ ID NO: 435363 - RNA, 22 nt, Artificial Sequence
  Synthetic
cagguuucccuacggggugaaa

SEQ ID NO: 435364 - RNA, 23 nt, Artificial Sequence
  Synthetic
ucagguuucccuacggggugaaa

SEQ ID NO: 435365 - RNA, 24 nt, Artificial Sequence
  Synthetic
aucagguuucccuacggggugaaa

SEQ ID NO: 435366 - RNA, 18 nt, Artificial Sequence
  Synthetic
ccaaaaguuauggugaaa

SEQ ID NO: 435367 - RNA, 19 nt, Artificial Sequence
  Synthetic
accaaaaguuauggugaaa

SEQ ID NO: 435368 - RNA, 20 nt, Artificial Sequence
  Synthetic
gaccaaaaguuauggugaaa

SEQ ID NO: 435369 - RNA, 21 nt, Artificial Sequence
  Synthetic
ggaccaaaaguuauggugaaa

SEQ ID NO: 435370 - RNA, 22 nt, Artificial Sequence
  Synthetic
aggaccaaaaguuauggugaaa

SEQ ID NO: 435371 - RNA, 23 nt, Artificial Sequence
  Synthetic
aaggaccaaaaguuauggugaaa

SEQ ID NO: 435372 - RNA, 24 nt, Artificial Sequence
  Synthetic
uaaggaccaaaaguuauggugaaa

SEQ ID NO: 435373 - RNA, 18 nt, Artificial Sequence
  Synthetic
uauauacugcuggugaaa

SEQ ID NO: 435374 - RNA, 19 nt, Artificial Sequence
  Synthetic
uuauauacugcuggugaaa

SEQ ID NO: 435375 - RNA, 20 nt, Artificial Sequence
  Synthetic
cuuauauacugcuggugaaa

SEQ ID NO: 435376 - RNA, 21 nt, Artificial Sequence
  Synthetic
ucuuauauacugcuggugaaa

SEQ ID NO: 435377 - RNA, 22 nt, Artificial Sequence
  Synthetic
gucuuauauacugcuggugaaa

SEQ ID NO: 435378 - RNA, 23 nt, Artificial Sequence
  Synthetic
agucuuauauacugcuggugaaa

SEQ ID NO: 435379 - RNA, 24 nt, Artificial Sequence
  Synthetic
aagucuuauauacugcuggugaaa

SEQ ID NO: 435380 - RNA, 18 nt, Artificial Sequence
  Synthetic
uugaaacaaguggugaaa

SEQ ID NO: 435381 - RNA, 19 nt, Artificial Sequence
  Synthetic
uuugaaacaaguggugaaa

SEQ ID NO: 435382 - RNA, 20 nt, Artificial Sequence
  Synthetic
guuugaaacaaguggugaaa

SEQ ID NO: 435383 - RNA, 21 nt, Artificial Sequence
  Synthetic
aguuugaaacaaguggugaaa

SEQ ID NO: 435384 - RNA, 22 nt, Artificial Sequence
  Synthetic
gaguuugaaacaaguggugaaa

SEQ ID NO: 435385 - RNA, 23 nt, Artificial Sequence
  Synthetic
ggaguuugaaacaaguggugaaa

SEQ ID NO: 435386 - RNA, 24 nt, Artificial Sequence
  Synthetic
uggaguuugaaacaaguggugaaa

SEQ ID NO: 435387 - RNA, 18 nt, Artificial Sequence
  Synthetic
ggggcaugccaugugaaa

SEQ ID NO: 435388 - RNA, 19 nt, Artificial Sequence
  Synthetic
gggggcaugccaugugaaa

SEQ ID NO: 435389 - RNA, 20 nt, Artificial Sequence
  Synthetic
agggggcaugccaugugaaa

SEQ ID NO: 435390 - RNA, 21 nt, Artificial Sequence
  Synthetic
cagggggcaugccaugugaaa

SEQ ID NO: 435391 - RNA, 22 nt, Artificial Sequence
  Synthetic
acagggggcaugccaugugaaa

SEQ ID NO: 435392 - RNA, 23 nt, Artificial Sequence
  Synthetic
cacagggggcaugccaugugaaa

SEQ ID NO: 435393 - RNA, 24 nt, Artificial Sequence
  Synthetic
acacagggggcaugccaugugaaa

SEQ ID NO: 435394 - RNA, 18 nt, Artificial Sequence
  Synthetic
auuuccagcacugugaaa

SEQ ID NO: 435395 - RNA, 19 nt, Artificial Sequence
  Synthetic
cauuuccagcacugugaaa

SEQ ID NO: 435396 - RNA, 20 nt, Artificial Sequence
  Synthetic
ucauuuccagcacugugaaa

SEQ ID NO: 435397 - RNA, 21 nt, Artificial Sequence
  Synthetic
aucauuuccagcacugugaaa

SEQ ID NO: 435398 - RNA, 22 nt, Artificial Sequence
  Synthetic
uaucauuuccagcacugugaaa

SEQ ID NO: 435399 - RNA, 23 nt, Artificial Sequence
  Synthetic
guaucauuuccagcacugugaaa

SEQ ID NO: 435400 - RNA, 24 nt, Artificial Sequence
  Synthetic
uguaucauuuccagcacugugaaa

SEQ ID NO: 435401 - RNA, 18 nt, Artificial Sequence
  Synthetic
auuaaaaugacugugaaa

SEQ ID NO: 435402 - RNA, 19 nt, Artificial Sequence
  Synthetic
aauuaaaaugacugugaaa

SEQ ID NO: 435403 - RNA, 20 nt, Artificial Sequence
  Synthetic
aaauuaaaaugacugugaaa

SEQ ID NO: 435404 - RNA, 21 nt, Artificial Sequence
  Synthetic
uaaauuaaaaugacugugaaa

SEQ ID NO: 435405 - RNA, 22 nt, Artificial Sequence
  Synthetic
cuaaauuaaaaugacugugaaa

SEQ ID NO: 435406 - RNA, 23 nt, Artificial Sequence
  Synthetic
ccuaaauuaaaaugacugugaaa

SEQ ID NO: 435407 - RNA, 24 nt, Artificial Sequence
  Synthetic
uccuaaauuaaaaugacugugaaa

SEQ ID NO: 435408 - RNA, 21 nt, Artificial Sequence
  Synthetic
cuuuuugagauuacugugaaa

SEQ ID NO: 435409 - RNA, 22 nt, Artificial Sequence
  Synthetic
gcuuuuugagauuacugugaaa

SEQ ID NO: 435410 - RNA, 23 nt, Artificial Sequence
  Synthetic
agcuuuuugagauuacugugaaa

SEQ ID NO: 435411 - RNA, 24 nt, Artificial Sequence
  Synthetic
aagcuuuuugagauuacugugaaa

SEQ ID NO: 435412 - RNA, 18 nt, Artificial Sequence
  Synthetic
cuuuccuucucugugaaa

SEQ ID NO: 435413 - RNA, 19 nt, Artificial Sequence
  Synthetic
ucuuuccuucucugugaaa

SEQ ID NO: 435414 - RNA, 20 nt, Artificial Sequence
  Synthetic
cucuuuccuucucugugaaa

SEQ ID NO: 435415 - RNA, 21 nt, Artificial Sequence
  Synthetic
ucucuuuccuucucugugaaa

SEQ ID NO: 435416 - RNA, 22 nt, Artificial Sequence
  Synthetic
aucucuuuccuucucugugaaa

SEQ ID NO: 435417 - RNA, 23 nt, Artificial Sequence
  Synthetic
uaucucuuuccuucucugugaaa

SEQ ID NO: 435418 - RNA, 24 nt, Artificial Sequence
  Synthetic
guaucucuuuccuucucugugaaa

SEQ ID NO: 435419 - RNA, 18 nt, Artificial Sequence
  Synthetic
uuacaaauaagugugaaa

SEQ ID NO: 435420 - RNA, 19 nt, Artificial Sequence
  Synthetic
uuuacaaauaagugugaaa

SEQ ID NO: 435421 - RNA, 20 nt, Artificial Sequence
  Synthetic
uuuuacaaauaagugugaaa

SEQ ID NO: 435422 - RNA, 21 nt, Artificial Sequence
  Synthetic
guuuuacaaauaagugugaaa

SEQ ID NO: 435423 - RNA, 22 nt, Artificial Sequence
  Synthetic
aguuuuacaaauaagugugaaa

SEQ ID NO: 435424 - RNA, 23 nt, Artificial Sequence
  Synthetic
gaguuuuacaaauaagugugaaa

SEQ ID NO: 435425 - RNA, 24 nt, Artificial Sequence
  Synthetic
ugaguuuuacaaauaagugugaaa

SEQ ID NO: 435426 - RNA, 18 nt, Artificial Sequence
  Synthetic
gaacagagcagugugaaa

SEQ ID NO: 435427 - RNA, 19 nt, Artificial Sequence
  Synthetic
ugaacagagcagugugaaa

SEQ ID NO: 435428 - RNA, 20 nt, Artificial Sequence
  Synthetic
uugaacagagcagugugaaa

SEQ ID NO: 435429 - RNA, 21 nt, Artificial Sequence
  Synthetic
cuugaacagagcagugugaaa

SEQ ID NO: 435430 - RNA, 22 nt, Artificial Sequence
  Synthetic
acuugaacagagcagugugaaa

SEQ ID NO: 435431 - RNA, 23 nt, Artificial Sequence
  Synthetic
cacuugaacagagcagugugaaa

SEQ ID NO: 435432 - RNA, 24 nt, Artificial Sequence
  Synthetic
acacuugaacagagcagugugaaa

SEQ ID NO: 435433 - RNA, 18 nt, Artificial Sequence
  Synthetic
uuuauccgcagugugaaa

SEQ ID NO: 435434 - RNA, 19 nt, Artificial Sequence
  Synthetic
cuuuauccgcagugugaaa

SEQ ID NO: 435435 - RNA, 20 nt, Artificial Sequence
  Synthetic
ucuuuauccgcagugugaaa

SEQ ID NO: 435436 - RNA, 21 nt, Artificial Sequence
  Synthetic
gucuuuauccgcagugugaaa

SEQ ID NO: 435437 - RNA, 22 nt, Artificial Sequence
  Synthetic
ugucuuuauccgcagugugaaa

SEQ ID NO: 435438 - RNA, 23 nt, Artificial Sequence
  Synthetic
augucuuuauccgcagugugaaa

SEQ ID NO: 435439 - RNA, 24 nt, Artificial Sequence
  Synthetic
uaugucuuuauccgcagugugaaa

SEQ ID NO: 435440 - RNA, 18 nt, Artificial Sequence
  Synthetic
cuguauuagcuugugaaa

SEQ ID NO: 435441 - RNA, 19 nt, Artificial Sequence
  Synthetic
acuguauuagcuugugaaa

SEQ ID NO: 435442 - RNA, 20 nt, Artificial Sequence
  Synthetic
cacuguauuagcuugugaaa

SEQ ID NO: 435443 - RNA, 21 nt, Artificial Sequence
  Synthetic
acacuguauuagcuugugaaa

SEQ ID NO: 435444 - RNA, 22 nt, Artificial Sequence
  Synthetic
aacacuguauuagcuugugaaa

SEQ ID NO: 435445 - RNA, 23 nt, Artificial Sequence
  Synthetic
aaacacuguauuagcuugugaaa

SEQ ID NO: 435446 - RNA, 24 nt, Artificial Sequence
  Synthetic
uaaacacuguauuagcuugugaaa

SEQ ID NO: 435447 - RNA, 18 nt, Artificial Sequence
  Synthetic
guuuuaaggguugugaaa

SEQ ID NO: 435448 - RNA, 19 nt, Artificial Sequence
  Synthetic
gguuuuaaggguugugaaa

SEQ ID NO: 435449 - RNA, 20 nt, Artificial Sequence
  Synthetic
ugguuuuaaggguugugaaa

SEQ ID NO: 435450 - RNA, 21 nt, Artificial Sequence
  Synthetic
augguuuuaaggguugugaaa

SEQ ID NO: 435451 - RNA, 22 nt, Artificial Sequence
  Synthetic
aaugguuuuaaggguugugaaa

SEQ ID NO: 435452 - RNA, 23 nt, Artificial Sequence
  Synthetic
aaaugguuuuaaggguugugaaa

SEQ ID NO: 435453 - RNA, 24 nt, Artificial Sequence
  Synthetic
aaaaugguuuuaaggguugugaaa

SEQ ID NO: 435454 - RNA, 18 nt, Artificial Sequence
  Synthetic
aacuucuguguugugaaa

SEQ ID NO: 435455 - RNA, 19 nt, Artificial Sequence
  Synthetic
aaacuucuguguugugaaa

SEQ ID NO: 435456 - RNA, 20 nt, Artificial Sequence
  Synthetic
aaaacuucuguguugugaaa

SEQ ID NO: 435457 - RNA, 21 nt, Artificial Sequence
  Synthetic
gaaaacuucuguguugugaaa

SEQ ID NO: 435458 - RNA, 22 nt, Artificial Sequence
  Synthetic
agaaaacuucuguguugugaaa

SEQ ID NO: 435459 - RNA, 23 nt, Artificial Sequence
  Synthetic
aagaaaacuucuguguugugaaa

SEQ ID NO: 435460 - RNA, 24 nt, Artificial Sequence
  Synthetic
aaagaaaacuucuguguugugaaa

SEQ ID NO: 435461 - RNA, 18 nt, Artificial Sequence
  Synthetic
aaaaagccaaaauugaaa

SEQ ID NO: 435462 - RNA, 19 nt, Artificial Sequence
  Synthetic
aaaaaagccaaaauugaaa

SEQ ID NO: 435463 - RNA, 20 nt, Artificial Sequence
  Synthetic
gaaaaaagccaaaauugaaa

SEQ ID NO: 435464 - RNA, 21 nt, Artificial Sequence
  Synthetic
agaaaaaagccaaaauugaaa

SEQ ID NO: 435465 - RNA, 22 nt, Artificial Sequence
  Synthetic
cagaaaaaagccaaaauugaaa

SEQ ID NO: 435466 - RNA, 23 nt, Artificial Sequence
  Synthetic
ucagaaaaaagccaaaauugaaa

SEQ ID NO: 435467 - RNA, 24 nt, Artificial Sequence
  Synthetic
aucagaaaaaagccaaaauugaaa

SEQ ID NO: 435468 - RNA, 18 nt, Artificial Sequence
  Synthetic
aaaauagcucaauugaaa

SEQ ID NO: 435469 - RNA, 19 nt, Artificial Sequence
  Synthetic
aaaaauagcucaauugaaa

SEQ ID NO: 435470 - RNA, 20 nt, Artificial Sequence
  Synthetic
gaaaaauagcucaauugaaa

SEQ ID NO: 435471 - RNA, 21 nt, Artificial Sequence
  Synthetic
agaaaaauagcucaauugaaa

SEQ ID NO: 435472 - RNA, 22 nt, Artificial Sequence
  Synthetic
cagaaaaauagcucaauugaaa

SEQ ID NO: 435473 - RNA, 23 nt, Artificial Sequence
  Synthetic
ucagaaaaauagcucaauugaaa

SEQ ID NO: 435474 - RNA, 24 nt, Artificial Sequence
  Synthetic
aucagaaaaauagcucaauugaaa

SEQ ID NO: 435475 - RNA, 18 nt, Artificial Sequence
  Synthetic
gaguaaguaacauugaaa

SEQ ID NO: 435476 - RNA, 19 nt, Artificial Sequence
  Synthetic
ugaguaaguaacauugaaa

SEQ ID NO: 435477 - RNA, 20 nt, Artificial Sequence
  Synthetic
cugaguaaguaacauugaaa

SEQ ID NO: 435478 - RNA, 21 nt, Artificial Sequence
  Synthetic
ucugaguaaguaacauugaaa

SEQ ID NO: 435479 - RNA, 22 nt, Artificial Sequence
  Synthetic
cucugaguaaguaacauugaaa

SEQ ID NO: 435480 - RNA, 23 nt, Artificial Sequence
  Synthetic
ccucugaguaaguaacauugaaa

SEQ ID NO: 435481 - RNA, 24 nt, Artificial Sequence
  Synthetic
cccucugaguaaguaacauugaaa

SEQ ID NO: 435482 - RNA, 18 nt, Artificial Sequence
  Synthetic
uaaauauagcgauugaaa

SEQ ID NO: 435483 - RNA, 19 nt, Artificial Sequence
  Synthetic
auaaauauagcgauugaaa

SEQ ID NO: 435484 - RNA, 20 nt, Artificial Sequence
  Synthetic
aauaaauauagcgauugaaa

SEQ ID NO: 435485 - RNA, 21 nt, Artificial Sequence
  Synthetic
aaauaaauauagcgauugaaa

SEQ ID NO: 435486 - RNA, 22 nt, Artificial Sequence
  Synthetic
gaaauaaauauagcgauugaaa

SEQ ID NO: 435487 - RNA, 23 nt, Artificial Sequence
  Synthetic
ugaaauaaauauagcgauugaaa

SEQ ID NO: 435488 - RNA, 24 nt, Artificial Sequence
  Synthetic
cugaaauaaauauagcgauugaaa

SEQ ID NO: 435489 - RNA, 18 nt, Artificial Sequence
  Synthetic
uuuggugucugauugaaa

SEQ ID NO: 435490 - RNA, 19 nt, Artificial Sequence
  Synthetic
cuuuggugucugauugaaa

SEQ ID NO: 435491 - RNA, 20 nt, Artificial Sequence
  Synthetic
acuuuggugucugauugaaa

SEQ ID NO: 435492 - RNA, 21 nt, Artificial Sequence
  Synthetic
aacuuuggugucugauugaaa

SEQ ID NO: 435493 - RNA, 22 nt, Artificial Sequence
  Synthetic
caacuuuggugucugauugaaa

SEQ ID NO: 435494 - RNA, 23 nt, Artificial Sequence
  Synthetic
ucaacuuuggugucugauugaaa

SEQ ID NO: 435495 - RNA, 24 nt, Artificial Sequence
  Synthetic
cucaacuuuggugucugauugaaa

SEQ ID NO: 435496 - RNA, 18 nt, Artificial Sequence
  Synthetic
uuuaaaguauuauugaaa

SEQ ID NO: 435497 - RNA, 19 nt, Artificial Sequence
  Synthetic
auuuaaaguauuauugaaa

SEQ ID NO: 435498 - RNA, 20 nt, Artificial Sequence
  Synthetic
uauuuaaaguauuauugaaa

SEQ ID NO: 435499 - RNA, 21 nt, Artificial Sequence
  Synthetic
auauuuaaaguauuauugaaa

SEQ ID NO: 435500 - RNA, 22 nt, Artificial Sequence
  Synthetic
gauauuuaaaguauuauugaaa

SEQ ID NO: 435501 - RNA, 23 nt, Artificial Sequence
  Synthetic
agauauuuaaaguauuauugaaa

SEQ ID NO: 435502 - RNA, 24 nt, Artificial Sequence
  Synthetic
uagauauuuaaaguauuauugaaa

SEQ ID NO: 435503 - RNA, 18 nt, Artificial Sequence
  Synthetic
aauauaguauuauugaaa

SEQ ID NO: 435504 - RNA, 19 nt, Artificial Sequence
  Synthetic
aaauauaguauuauugaaa

SEQ ID NO: 435505 - RNA, 20 nt, Artificial Sequence
  Synthetic
caaauauaguauuauugaaa

SEQ ID NO: 435506 - RNA, 21 nt, Artificial Sequence
  Synthetic
acaaauauaguauuauugaaa

SEQ ID NO: 435507 - RNA, 22 nt, Artificial Sequence
  Synthetic
cacaaauauaguauuauugaaa

SEQ ID NO: 435508 - RNA, 23 nt, Artificial Sequence
  Synthetic
acacaaauauaguauuauugaaa

SEQ ID NO: 435509 - RNA, 24 nt, Artificial Sequence
  Synthetic
cacacaaauauaguauuauugaaa

SEQ ID NO: 435510 - RNA, 18 nt, Artificial Sequence
  Synthetic
gcaucagaaaacuugaaa

SEQ ID NO: 435511 - RNA, 19 nt, Artificial Sequence
  Synthetic
ugcaucagaaaacuugaaa

SEQ ID NO: 435512 - RNA, 20 nt, Artificial Sequence
  Synthetic
augcaucagaaaacuugaaa

SEQ ID NO: 435513 - RNA, 21 nt, Artificial Sequence
  Synthetic
uaugcaucagaaaacuugaaa

SEQ ID NO: 435514 - RNA, 22 nt, Artificial Sequence
  Synthetic
uuaugcaucagaaaacuugaaa

SEQ ID NO: 435515 - RNA, 23 nt, Artificial Sequence
  Synthetic
uuuaugcaucagaaaacuugaaa

SEQ ID NO: 435516 - RNA, 24 nt, Artificial Sequence
  Synthetic
uuuuaugcaucagaaaacuugaaa

SEQ ID NO: 435517 - RNA, 18 nt, Artificial Sequence
  Synthetic
uuaaaaaugaacuugaaa

SEQ ID NO: 435518 - RNA, 19 nt, Artificial Sequence
  Synthetic
cuuaaaaaugaacuugaaa

SEQ ID NO: 435519 - RNA, 20 nt, Artificial Sequence
  Synthetic
ccuuaaaaaugaacuugaaa

SEQ ID NO: 435520 - RNA, 21 nt, Artificial Sequence
  Synthetic
accuuaaaaaugaacuugaaa

SEQ ID NO: 435521 - RNA, 22 nt, Artificial Sequence
  Synthetic
gaccuuaaaaaugaacuugaaa

SEQ ID NO: 435522 - RNA, 23 nt, Artificial Sequence
  Synthetic
agaccuuaaaaaugaacuugaaa

SEQ ID NO: 435523 - RNA, 24 nt, Artificial Sequence
  Synthetic
cagaccuuaaaaaugaacuugaaa

SEQ ID NO: 435524 - RNA, 18 nt, Artificial Sequence
  Synthetic
caggagaauuacuugaaa

SEQ ID NO: 435525 - RNA, 19 nt, Artificial Sequence
  Synthetic
gcaggagaauuacuugaaa

SEQ ID NO: 435526 - RNA, 20 nt, Artificial Sequence
  Synthetic
ggcaggagaauuacuugaaa

SEQ ID NO: 435527 - RNA, 21 nt, Artificial Sequence
  Synthetic
aggcaggagaauuacuugaaa

SEQ ID NO: 435528 - RNA, 22 nt, Artificial Sequence
  Synthetic
gaggcaggagaauuacuugaaa

SEQ ID NO: 435529 - RNA, 23 nt, Artificial Sequence
  Synthetic
ugaggcaggagaauuacuugaaa

SEQ ID NO: 435530 - RNA, 24 nt, Artificial Sequence
  Synthetic
cugaggcaggagaauuacuugaaa

SEQ ID NO: 435531 - RNA, 18 nt, Artificial Sequence
  Synthetic
ggaauagauuccuugaaa

SEQ ID NO: 435532 - RNA, 19 nt, Artificial Sequence
  Synthetic
uggaauagauuccuugaaa

SEQ ID NO: 435533 - RNA, 20 nt, Artificial Sequence
  Synthetic
uuggaauagauuccuugaaa

SEQ ID NO: 435534 - RNA, 21 nt, Artificial Sequence
  Synthetic
uuuggaauagauuccuugaaa

SEQ ID NO: 435535 - RNA, 22 nt, Artificial Sequence
  Synthetic
cuuuggaauagauuccuugaaa

SEQ ID NO: 435536 - RNA, 23 nt, Artificial Sequence
  Synthetic
ucuuuggaauagauuccuugaaa

SEQ ID NO: 435537 - RNA, 24 nt, Artificial Sequence
  Synthetic
aucuuuggaauagauuccuugaaa

SEQ ID NO: 435538 - RNA, 18 nt, Artificial Sequence
  Synthetic
auaacuaccugcuugaaa

SEQ ID NO: 435539 - RNA, 19 nt, Artificial Sequence
  Synthetic
aauaacuaccugcuugaaa

SEQ ID NO: 435540 - RNA, 20 nt, Artificial Sequence
  Synthetic
aaauaacuaccugcuugaaa

SEQ ID NO: 435541 - RNA, 21 nt, Artificial Sequence
  Synthetic
caaauaacuaccugcuugaaa

SEQ ID NO: 435542 - RNA, 22 nt, Artificial Sequence
  Synthetic
ucaaauaacuaccugcuugaaa

SEQ ID NO: 435543 - RNA, 23 nt, Artificial Sequence
  Synthetic
uucaaauaacuaccugcuugaaa

SEQ ID NO: 435544 - RNA, 24 nt, Artificial Sequence
  Synthetic
uuucaaauaacuaccugcuugaaa

SEQ ID NO: 435545 - RNA, 18 nt, Artificial Sequence
  Synthetic
uuaauucugguguugaaa

SEQ ID NO: 435546 - RNA, 19 nt, Artificial Sequence
  Synthetic
uuuaauucugguguugaaa

SEQ ID NO: 435547 - RNA, 20 nt, Artificial Sequence
  Synthetic
uuuuaauucugguguugaaa

SEQ ID NO: 435548 - RNA, 21 nt, Artificial Sequence
  Synthetic
cuuuuaauucugguguugaaa

SEQ ID NO: 435549 - RNA, 22 nt, Artificial Sequence
  Synthetic
ccuuuuaauucugguguugaaa

SEQ ID NO: 435550 - RNA, 23 nt, Artificial Sequence
  Synthetic
gccuuuuaauucugguguugaaa

SEQ ID NO: 435551 - RNA, 24 nt, Artificial Sequence
  Synthetic
ugccuuuuaauucugguguugaaa

SEQ ID NO: 435552 - RNA, 18 nt, Artificial Sequence
  Synthetic
auggauauaaauuugaaa

SEQ ID NO: 435553 - RNA, 19 nt, Artificial Sequence
  Synthetic
uauggauauaaauuugaaa

SEQ ID NO: 435554 - RNA, 20 nt, Artificial Sequence
  Synthetic
auauggauauaaauuugaaa

SEQ ID NO: 435555 - RNA, 21 nt, Artificial Sequence
  Synthetic
aauauggauauaaauuugaaa

SEQ ID NO: 435556 - RNA, 22 nt, Artificial Sequence
  Synthetic
gaauauggauauaaauuugaaa

SEQ ID NO: 435557 - RNA, 23 nt, Artificial Sequence
  Synthetic
agaauauggauauaaauuugaaa

SEQ ID NO: 435558 - RNA, 24 nt, Artificial Sequence
  Synthetic
gagaauauggauauaaauuugaaa

SEQ ID NO: 435559 - RNA, 18 nt, Artificial Sequence
  Synthetic
aguuuucauaauuugaaa

SEQ ID NO: 435560 - RNA, 19 nt, Artificial Sequence
  Synthetic
aaguuuucauaauuugaaa

SEQ ID NO: 435561 - RNA, 20 nt, Artificial Sequence
  Synthetic
caaguuuucauaauuugaaa

SEQ ID NO: 435562 - RNA, 21 nt, Artificial Sequence
  Synthetic
ucaaguuuucauaauuugaaa

SEQ ID NO: 435563 - RNA, 22 nt, Artificial Sequence
  Synthetic
uucaaguuuucauaauuugaaa

SEQ ID NO: 435564 - RNA, 23 nt, Artificial Sequence
  Synthetic
uuucaaguuuucauaauuugaaa

SEQ ID NO: 435565 - RNA, 24 nt, Artificial Sequence
  Synthetic
auuucaaguuuucauaauuugaaa

SEQ ID NO: 435566 - RNA, 18 nt, Artificial Sequence
  Synthetic
agcuuggaguauuugaaa

SEQ ID NO: 435567 - RNA, 19 nt, Artificial Sequence
  Synthetic
aagcuuggaguauuugaaa

SEQ ID NO: 435568 - RNA, 20 nt, Artificial Sequence
  Synthetic
aaagcuuggaguauuugaaa

SEQ ID NO: 435569 - RNA, 21 nt, Artificial Sequence
  Synthetic
caaagcuuggaguauuugaaa

SEQ ID NO: 435570 - RNA, 22 nt, Artificial Sequence
  Synthetic
ucaaagcuuggaguauuugaaa

SEQ ID NO: 435571 - RNA, 23 nt, Artificial Sequence
  Synthetic
aucaaagcuuggaguauuugaaa

SEQ ID NO: 435572 - RNA, 24 nt, Artificial Sequence
  Synthetic
aaucaaagcuuggaguauuugaaa

SEQ ID NO: 435573 - RNA, 18 nt, Artificial Sequence
  Synthetic
gucccaaggaguuugaaa

SEQ ID NO: 435574 - RNA, 19 nt, Artificial Sequence
  Synthetic
agucccaaggaguuugaaa

SEQ ID NO: 435575 - RNA, 20 nt, Artificial Sequence
  Synthetic
cagucccaaggaguuugaaa

SEQ ID NO: 435576 - RNA, 21 nt, Artificial Sequence
  Synthetic
acagucccaaggaguuugaaa

SEQ ID NO: 435577 - RNA, 22 nt, Artificial Sequence
  Synthetic
aacagucccaaggaguuugaaa

SEQ ID NO: 435578 - RNA, 23 nt, Artificial Sequence
  Synthetic
aaacagucccaaggaguuugaaa

SEQ ID NO: 435579 - RNA, 24 nt, Artificial Sequence
  Synthetic
aaaacagucccaaggaguuugaaa

SEQ ID NO: 435580 - RNA, 18 nt, Artificial Sequence
  Synthetic
aaacuaccuuguuugaaa

SEQ ID NO: 435581 - RNA, 19 nt, Artificial Sequence
  Synthetic
uaaacuaccuuguuugaaa

SEQ ID NO: 435582 - RNA, 20 nt, Artificial Sequence
  Synthetic
auaaacuaccuuguuugaaa

SEQ ID NO: 435583 - RNA, 21 nt, Artificial Sequence
  Synthetic
cauaaacuaccuuguuugaaa

SEQ ID NO: 435584 - RNA, 22 nt, Artificial Sequence
  Synthetic
ucauaaacuaccuuguuugaaa

SEQ ID NO: 435585 - RNA, 23 nt, Artificial Sequence
  Synthetic
uucauaaacuaccuuguuugaaa

SEQ ID NO: 435586 - RNA, 24 nt, Artificial Sequence
  Synthetic
uuucauaaacuaccuuguuugaaa

SEQ ID NO: 435587 - RNA, 18 nt, Artificial Sequence
  Synthetic
aucuggaagauuuugaaa

SEQ ID NO: 435588 - RNA, 19 nt, Artificial Sequence
  Synthetic
caucuggaagauuuugaaa

SEQ ID NO: 435589 - RNA, 20 nt, Artificial Sequence
  Synthetic
gcaucuggaagauuuugaaa

SEQ ID NO: 435590 - RNA, 21 nt, Artificial Sequence
  Synthetic
ugcaucuggaagauuuugaaa

SEQ ID NO: 435591 - RNA, 22 nt, Artificial Sequence
  Synthetic
cugcaucuggaagauuuugaaa

SEQ ID NO: 435592 - RNA, 23 nt, Artificial Sequence
  Synthetic
ucugcaucuggaagauuuugaaa

SEQ ID NO: 435593 - RNA, 24 nt, Artificial Sequence
  Synthetic
uucugcaucuggaagauuuugaaa

SEQ ID NO: 435594 - RNA, 18 nt, Artificial Sequence
  Synthetic
uuccaacugcuuuugaaa

SEQ ID NO: 435595 - RNA, 19 nt, Artificial Sequence
  Synthetic
uuuccaacugcuuuugaaa

SEQ ID NO: 435596 - RNA, 20 nt, Artificial Sequence
  Synthetic
auuuccaacugcuuuugaaa

SEQ ID NO: 435597 - RNA, 21 nt, Artificial Sequence
  Synthetic
aauuuccaacugcuuuugaaa

SEQ ID NO: 435598 - RNA, 22 nt, Artificial Sequence
  Synthetic
uaauuuccaacugcuuuugaaa

SEQ ID NO: 435599 - RNA, 23 nt, Artificial Sequence
  Synthetic
auaauuuccaacugcuuuugaaa

SEQ ID NO: 435600 - RNA, 24 nt, Artificial Sequence
  Synthetic
cauaauuuccaacugcuuuugaaa

SEQ ID NO: 435601 - RNA, 18 nt, Artificial Sequence
  Synthetic
gaugugaguguuuugaaa

SEQ ID NO: 435602 - RNA, 19 nt, Artificial Sequence
  Synthetic
ugaugugaguguuuugaaa

SEQ ID NO: 435603 - RNA, 20 nt, Artificial Sequence
  Synthetic
augaugugaguguuuugaaa

SEQ ID NO: 435604 - RNA, 21 nt, Artificial Sequence
  Synthetic
aaugaugugaguguuuugaaa

SEQ ID NO: 435605 - RNA, 22 nt, Artificial Sequence
  Synthetic
caaugaugugaguguuuugaaa

SEQ ID NO: 435606 - RNA, 23 nt, Artificial Sequence
  Synthetic
acaaugaugugaguguuuugaaa

SEQ ID NO: 435607 - RNA, 24 nt, Artificial Sequence
  Synthetic
aacaaugaugugaguguuuugaaa

SEQ ID NO: 435608 - RNA, 18 nt, Artificial Sequence
  Synthetic
uuguaguaguuuuugaaa

SEQ ID NO: 435609 - RNA, 19 nt, Artificial Sequence
  Synthetic
uuuguaguaguuuuugaaa

SEQ ID NO: 435610 - RNA, 20 nt, Artificial Sequence
  Synthetic
cuuuguaguaguuuuugaaa

SEQ ID NO: 435611 - RNA, 21 nt, Artificial Sequence
  Synthetic
gcuuuguaguaguuuuugaaa

SEQ ID NO: 435612 - RNA, 22 nt, Artificial Sequence
  Synthetic
agcuuuguaguaguuuuugaaa

SEQ ID NO: 435613 - RNA, 23 nt, Artificial Sequence
  Synthetic
uagcuuuguaguaguuuuugaaa

SEQ ID NO: 435614 - RNA, 24 nt, Artificial Sequence
  Synthetic
guagcuuuguaguaguuuuugaaa

SEQ ID NO: 435615 - RNA, 18 nt, Artificial Sequence
  Synthetic
aagaagugguuuuugaaa

SEQ ID NO: 435616 - RNA, 19 nt, Artificial Sequence
  Synthetic
uaagaagugguuuuugaaa

SEQ ID NO: 435617 - RNA, 20 nt, Artificial Sequence
  Synthetic
auaagaagugguuuuugaaa

SEQ ID NO: 435618 - RNA, 21 nt, Artificial Sequence
  Synthetic
gauaagaagugguuuuugaaa

SEQ ID NO: 435619 - RNA, 22 nt, Artificial Sequence
  Synthetic
agauaagaagugguuuuugaaa

SEQ ID NO: 435620 - RNA, 23 nt, Artificial Sequence
  Synthetic
gagauaagaagugguuuuugaaa

SEQ ID NO: 435621 - RNA, 24 nt, Artificial Sequence
  Synthetic
agagauaagaagugguuuuugaaa

SEQ ID NO: 435622 - RNA, 18 nt, Artificial Sequence
  Synthetic
gaaauccuaaaaaauaaa

SEQ ID NO: 435623 - RNA, 19 nt, Artificial Sequence
  Synthetic
ugaaauccuaaaaaauaaa

SEQ ID NO: 435624 - RNA, 20 nt, Artificial Sequence
  Synthetic
uugaaauccuaaaaaauaaa

SEQ ID NO: 435625 - RNA, 21 nt, Artificial Sequence
  Synthetic
guugaaauccuaaaaaauaaa

SEQ ID NO: 435626 - RNA, 22 nt, Artificial Sequence
  Synthetic
uguugaaauccuaaaaaauaaa

SEQ ID NO: 435627 - RNA, 23 nt, Artificial Sequence
  Synthetic
auguugaaauccuaaaaaauaaa

SEQ ID NO: 435628 - RNA, 24 nt, Artificial Sequence
  Synthetic
uauguugaaauccuaaaaaauaaa

SEQ ID NO: 435629 - RNA, 18 nt, Artificial Sequence
  Synthetic
gaagaugacaaaaauaaa

SEQ ID NO: 435630 - RNA, 19 nt, Artificial Sequence
  Synthetic
ugaagaugacaaaaauaaa

SEQ ID NO: 435631 - RNA, 20 nt, Artificial Sequence
  Synthetic
uugaagaugacaaaaauaaa

SEQ ID NO: 435632 - RNA, 21 nt, Artificial Sequence
  Synthetic
auugaagaugacaaaaauaaa

SEQ ID NO: 435633 - RNA, 22 nt, Artificial Sequence
  Synthetic
aauugaagaugacaaaaauaaa

SEQ ID NO: 435634 - RNA, 23 nt, Artificial Sequence
  Synthetic
aaauugaagaugacaaaaauaaa

SEQ ID NO: 435635 - RNA, 24 nt, Artificial Sequence
  Synthetic
gaaauugaagaugacaaaaauaaa

SEQ ID NO: 435636 - RNA, 18 nt, Artificial Sequence
  Synthetic
uggcagaagaaaaauaaa

SEQ ID NO: 435637 - RNA, 19 nt, Artificial Sequence
  Synthetic
auggcagaagaaaaauaaa

SEQ ID NO: 435638 - RNA, 20 nt, Artificial Sequence
  Synthetic
uauggcagaagaaaaauaaa

SEQ ID NO: 435639 - RNA, 21 nt, Artificial Sequence
  Synthetic
guauggcagaagaaaaauaaa

SEQ ID NO: 435640 - RNA, 22 nt, Artificial Sequence
  Synthetic
uguauggcagaagaaaaauaaa

SEQ ID NO: 435641 - RNA, 23 nt, Artificial Sequence
  Synthetic
auguauggcagaagaaaaauaaa

SEQ ID NO: 435642 - RNA, 24 nt, Artificial Sequence
  Synthetic
gauguauggcagaagaaaaauaaa

SEQ ID NO: 435643 - RNA, 18 nt, Artificial Sequence
  Synthetic
ugucgggggaaaaauaaa

SEQ ID NO: 435644 - RNA, 19 nt, Artificial Sequence
  Synthetic
augucgggggaaaaauaaa

SEQ ID NO: 435645 - RNA, 20 nt, Artificial Sequence
  Synthetic
uaugucgggggaaaaauaaa

SEQ ID NO: 435646 - RNA, 21 nt, Artificial Sequence
  Synthetic
cuaugucgggggaaaaauaaa

SEQ ID NO: 435647 - RNA, 22 nt, Artificial Sequence
  Synthetic
acuaugucgggggaaaaauaaa

SEQ ID NO: 435648 - RNA, 23 nt, Artificial Sequence
  Synthetic
aacuaugucgggggaaaaauaaa

SEQ ID NO: 435649 - RNA, 24 nt, Artificial Sequence
  Synthetic
caacuaugucgggggaaaaauaaa

SEQ ID NO: 435650 - RNA, 18 nt, Artificial Sequence
  Synthetic
uuaagaaauaaaaauaaa

SEQ ID NO: 435651 - RNA, 19 nt, Artificial Sequence
  Synthetic
guuaagaaauaaaaauaaa

SEQ ID NO: 435652 - RNA, 20 nt, Artificial Sequence
  Synthetic
aguuaagaaauaaaaauaaa

SEQ ID NO: 435653 - RNA, 21 nt, Artificial Sequence
  Synthetic
aaguuaagaaauaaaaauaaa

SEQ ID NO: 435654 - RNA, 22 nt, Artificial Sequence
  Synthetic
caaguuaagaaauaaaaauaaa

SEQ ID NO: 435655 - RNA, 23 nt, Artificial Sequence
  Synthetic
ucaaguuaagaaauaaaaauaaa

SEQ ID NO: 435656 - RNA, 24 nt, Artificial Sequence
  Synthetic
uucaaguuaagaaauaaaaauaaa

SEQ ID NO: 435657 - RNA, 18 nt, Artificial Sequence
  Synthetic
uugaucauacaaaauaaa

SEQ ID NO: 435658 - RNA, 19 nt, Artificial Sequence
  Synthetic
cuugaucauacaaaauaaa

SEQ ID NO: 435659 - RNA, 20 nt, Artificial Sequence
  Synthetic
ucuugaucauacaaaauaaa

SEQ ID NO: 435660 - RNA, 21 nt, Artificial Sequence
  Synthetic
aucuugaucauacaaaauaaa

SEQ ID NO: 435661 - RNA, 22 nt, Artificial Sequence
  Synthetic
aaucuugaucauacaaaauaaa

SEQ ID NO: 435662 - RNA, 23 nt, Artificial Sequence
  Synthetic
uaaucuugaucauacaaaauaaa

SEQ ID NO: 435663 - RNA, 24 nt, Artificial Sequence
  Synthetic
auaaucuugaucauacaaaauaaa

SEQ ID NO: 435664 - RNA, 18 nt, Artificial Sequence
  Synthetic
ugcacaaaucaaaauaaa

SEQ ID NO: 435665 - RNA, 19 nt, Artificial Sequence
  Synthetic
cugcacaaaucaaaauaaa

SEQ ID NO: 435666 - RNA, 20 nt, Artificial Sequence
  Synthetic
acugcacaaaucaaaauaaa

SEQ ID NO: 435667 - RNA, 21 nt, Artificial Sequence
  Synthetic
aacugcacaaaucaaaauaaa

SEQ ID NO: 435668 - RNA, 22 nt, Artificial Sequence
  Synthetic
aaacugcacaaaucaaaauaaa

SEQ ID NO: 435669 - RNA, 23 nt, Artificial Sequence
  Synthetic
uaaacugcacaaaucaaaauaaa

SEQ ID NO: 435670 - RNA, 24 nt, Artificial Sequence
  Synthetic
auaaacugcacaaaucaaaauaaa

SEQ ID NO: 435671 - RNA, 18 nt, Artificial Sequence
  Synthetic
ucauuauaucaaaauaaa

SEQ ID NO: 435672 - RNA, 19 nt, Artificial Sequence
  Synthetic
uucauuauaucaaaauaaa

SEQ ID NO: 435673 - RNA, 20 nt, Artificial Sequence
  Synthetic
auucauuauaucaaaauaaa

SEQ ID NO: 435674 - RNA, 21 nt, Artificial Sequence
  Synthetic
aauucauuauaucaaaauaaa

SEQ ID NO: 435675 - RNA, 22 nt, Artificial Sequence
  Synthetic
aaauucauuauaucaaaauaaa

SEQ ID NO: 435676 - RNA, 23 nt, Artificial Sequence
  Synthetic
aaaauucauuauaucaaaauaaa

SEQ ID NO: 435677 - RNA, 24 nt, Artificial Sequence
  Synthetic
gaaaauucauuauaucaaaauaaa

SEQ ID NO: 435678 - RNA, 18 nt, Artificial Sequence
  Synthetic
aaaauaaaauaaaauaaa

SEQ ID NO: 435679 - RNA, 19 nt, Artificial Sequence
  Synthetic
caaaauaaaauaaaauaaa

SEQ ID NO: 435680 - RNA, 20 nt, Artificial Sequence
  Synthetic
acaaaauaaaauaaaauaaa

SEQ ID NO: 435681 - RNA, 21 nt, Artificial Sequence
  Synthetic
aacaaaauaaaauaaaauaaa

SEQ ID NO: 435682 - RNA, 22 nt, Artificial Sequence
  Synthetic
caacaaaauaaaauaaaauaaa

SEQ ID NO: 435683 - RNA, 23 nt, Artificial Sequence
  Synthetic
ucaacaaaauaaaauaaaauaaa

SEQ ID NO: 435684 - RNA, 24 nt, Artificial Sequence
  Synthetic
cucaacaaaauaaaauaaaauaaa

SEQ ID NO: 435685 - RNA, 18 nt, Artificial Sequence
  Synthetic
aaaucaugguaaaauaaa

SEQ ID NO: 435686 - RNA, 19 nt, Artificial Sequence
  Synthetic
aaaaucaugguaaaauaaa

SEQ ID NO: 435687 - RNA, 20 nt, Artificial Sequence
  Synthetic
uaaaaucaugguaaaauaaa

SEQ ID NO: 435688 - RNA, 21 nt, Artificial Sequence
  Synthetic
uuaaaaucaugguaaaauaaa

SEQ ID NO: 435689 - RNA, 22 nt, Artificial Sequence
  Synthetic
uuuaaaaucaugguaaaauaaa

SEQ ID NO: 435690 - RNA, 23 nt, Artificial Sequence
  Synthetic
auuuaaaaucaugguaaaauaaa

SEQ ID NO: 435691 - RNA, 24 nt, Artificial Sequence
  Synthetic
cauuuaaaaucaugguaaaauaaa

SEQ ID NO: 435692 - RNA, 18 nt, Artificial Sequence
  Synthetic
uuaucacauuaaaauaaa

SEQ ID NO: 435693 - RNA, 19 nt, Artificial Sequence
  Synthetic
uuuaucacauuaaaauaaa

SEQ ID NO: 435694 - RNA, 20 nt, Artificial Sequence
  Synthetic
uuuuaucacauuaaaauaaa

SEQ ID NO: 435695 - RNA, 21 nt, Artificial Sequence
  Synthetic
auuuuaucacauuaaaauaaa

SEQ ID NO: 435696 - RNA, 22 nt, Artificial Sequence
  Synthetic
cauuuuaucacauuaaaauaaa

SEQ ID NO: 435697 - RNA, 23 nt, Artificial Sequence
  Synthetic
acauuuuaucacauuaaaauaaa

SEQ ID NO: 435698 - RNA, 24 nt, Artificial Sequence
  Synthetic
uacauuuuaucacauuaaaauaaa

SEQ ID NO: 435699 - RNA, 18 nt, Artificial Sequence
  Synthetic
uucaaauauuaaaauaaa

SEQ ID NO: 435700 - RNA, 19 nt, Artificial Sequence
  Synthetic
uuucaaauauuaaaauaaa

SEQ ID NO: 435701 - RNA, 20 nt, Artificial Sequence
  Synthetic
uuuucaaauauuaaaauaaa

SEQ ID NO: 435702 - RNA, 21 nt, Artificial Sequence
  Synthetic
cuuuucaaauauuaaaauaaa

SEQ ID NO: 435703 - RNA, 22 nt, Artificial Sequence
  Synthetic
ucuuuucaaauauuaaaauaaa

SEQ ID NO: 435704 - RNA, 23 nt, Artificial Sequence
  Synthetic
uucuuuucaaauauuaaaauaaa

SEQ ID NO: 435705 - RNA, 24 nt, Artificial Sequence
  Synthetic
guucuuuucaaauauuaaaauaaa

SEQ ID NO: 435706 - RNA, 18 nt, Artificial Sequence
  Synthetic
gaagaugacacaaauaaa

SEQ ID NO: 435707 - RNA, 19 nt, Artificial Sequence
  Synthetic
ugaagaugacacaaauaaa

SEQ ID NO: 435708 - RNA, 20 nt, Artificial Sequence
  Synthetic
uugaagaugacacaaauaaa

SEQ ID NO: 435709 - RNA, 21 nt, Artificial Sequence
  Synthetic
auugaagaugacacaaauaaa

SEQ ID NO: 435710 - RNA, 22 nt, Artificial Sequence
  Synthetic
aauugaagaugacacaaauaaa

SEQ ID NO: 435711 - RNA, 23 nt, Artificial Sequence
  Synthetic
aaauugaagaugacacaaauaaa

SEQ ID NO: 435712 - RNA, 24 nt, Artificial Sequence
  Synthetic
gaaauugaagaugacacaaauaaa

SEQ ID NO: 435713 - RNA, 18 nt, Artificial Sequence
  Synthetic
uagggugccccaaauaaa

SEQ ID NO: 435714 - RNA, 19 nt, Artificial Sequence
  Synthetic
cuagggugccccaaauaaa

SEQ ID NO: 435715 - RNA, 20 nt, Artificial Sequence
  Synthetic
ccuagggugccccaaauaaa

SEQ ID NO: 435716 - RNA, 21 nt, Artificial Sequence
  Synthetic
cccuagggugccccaaauaaa

SEQ ID NO: 435717 - RNA, 22 nt, Artificial Sequence
  Synthetic
ucccuagggugccccaaauaaa

SEQ ID NO: 435718 - RNA, 23 nt, Artificial Sequence
  Synthetic
uucccuagggugccccaaauaaa

SEQ ID NO: 435719 - RNA, 24 nt, Artificial Sequence
  Synthetic
uuucccuagggugccccaaauaaa

SEQ ID NO: 435720 - RNA, 18 nt, Artificial Sequence
  Synthetic
ccucccacuccaaauaaa

SEQ ID NO: 435721 - RNA, 19 nt, Artificial Sequence
  Synthetic
uccucccacuccaaauaaa

SEQ ID NO: 435722 - RNA, 20 nt, Artificial Sequence
  Synthetic
uuccucccacuccaaauaaa

SEQ ID NO: 435723 - RNA, 21 nt, Artificial Sequence
  Synthetic
uuuccucccacuccaaauaaa

SEQ ID NO: 435724 - RNA, 22 nt, Artificial Sequence
  Synthetic
auuuccucccacuccaaauaaa

SEQ ID NO: 435725 - RNA, 23 nt, Artificial Sequence
  Synthetic
cauuuccucccacuccaaauaaa

SEQ ID NO: 435726 - RNA, 24 nt, Artificial Sequence
  Synthetic
gcauuuccucccacuccaaauaaa

SEQ ID NO: 435727 - RNA, 18 nt, Artificial Sequence
  Synthetic
ugauagcaagcaaauaaa

SEQ ID NO: 435728 - RNA, 19 nt, Artificial Sequence
  Synthetic
cugauagcaagcaaauaaa

SEQ ID NO: 435729 - RNA, 20 nt, Artificial Sequence
  Synthetic
acugauagcaagcaaauaaa

SEQ ID NO: 435730 - RNA, 21 nt, Artificial Sequence
  Synthetic
uacugauagcaagcaaauaaa

SEQ ID NO: 435731 - RNA, 22 nt, Artificial Sequence
  Synthetic
uuacugauagcaagcaaauaaa

SEQ ID NO: 435732 - RNA, 23 nt, Artificial Sequence
  Synthetic
auuacugauagcaagcaaauaaa

SEQ ID NO: 435733 - RNA, 24 nt, Artificial Sequence
  Synthetic
cauuacugauagcaagcaaauaaa

SEQ ID NO: 435734 - RNA, 18 nt, Artificial Sequence
  Synthetic
gggaaaaaaucaaauaaa

SEQ ID NO: 435735 - RNA, 19 nt, Artificial Sequence
  Synthetic
ugggaaaaaaucaaauaaa

SEQ ID NO: 435736 - RNA, 20 nt, Artificial Sequence
  Synthetic
augggaaaaaaucaaauaaa

SEQ ID NO: 435737 - RNA, 21 nt, Artificial Sequence
  Synthetic
uaugggaaaaaaucaaauaaa

SEQ ID NO: 435738 - RNA, 22 nt, Artificial Sequence
  Synthetic
uuaugggaaaaaaucaaauaaa

SEQ ID NO: 435739 - RNA, 23 nt, Artificial Sequence
  Synthetic
cuuaugggaaaaaaucaaauaaa

SEQ ID NO: 435740 - RNA, 24 nt, Artificial Sequence
  Synthetic
acuuaugggaaaaaaucaaauaaa

SEQ ID NO: 435741 - RNA, 18 nt, Artificial Sequence
  Synthetic
gauacagauagaaauaaa

SEQ ID NO: 435742 - RNA, 19 nt, Artificial Sequence
  Synthetic
ugauacagauagaaauaaa

SEQ ID NO: 435743 - RNA, 20 nt, Artificial Sequence
  Synthetic
augauacagauagaaauaaa

SEQ ID NO: 435744 - RNA, 21 nt, Artificial Sequence
  Synthetic
aaugauacagauagaaauaaa

SEQ ID NO: 435745 - RNA, 22 nt, Artificial Sequence
  Synthetic
gaaugauacagauagaaauaaa

SEQ ID NO: 435746 - RNA, 23 nt, Artificial Sequence
  Synthetic
agaaugauacagauagaaauaaa

SEQ ID NO: 435747 - RNA, 24 nt, Artificial Sequence
  Synthetic
gagaaugauacagauagaaauaaa

SEQ ID NO: 435748 - RNA, 18 nt, Artificial Sequence
  Synthetic
aaaauuacuagaaauaaa

SEQ ID NO: 435749 - RNA, 19 nt, Artificial Sequence
  Synthetic
aaaaauuacuagaaauaaa

SEQ ID NO: 435750 - RNA, 20 nt, Artificial Sequence
  Synthetic
uaaaaauuacuagaaauaaa

SEQ ID NO: 435751 - RNA, 21 nt, Artificial Sequence
  Synthetic
guaaaaauuacuagaaauaaa

SEQ ID NO: 435752 - RNA, 22 nt, Artificial Sequence
  Synthetic
gguaaaaauuacuagaaauaaa

SEQ ID NO: 435753 - RNA, 23 nt, Artificial Sequence
  Synthetic
agguaaaaauuacuagaaauaaa

SEQ ID NO: 435754 - RNA, 24 nt, Artificial Sequence
  Synthetic
aagguaaaaauuacuagaaauaaa

SEQ ID NO: 435755 - RNA, 18 nt, Artificial Sequence
  Synthetic
ucccuuucuagaaauaaa

SEQ ID NO: 435756 - RNA, 19 nt, Artificial Sequence
  Synthetic
uucccuuucuagaaauaaa

SEQ ID NO: 435757 - RNA, 20 nt, Artificial Sequence
  Synthetic
auucccuuucuagaaauaaa

SEQ ID NO: 435758 - RNA, 21 nt, Artificial Sequence
  Synthetic
gauucccuuucuagaaauaaa

SEQ ID NO: 435759 - RNA, 22 nt, Artificial Sequence
  Synthetic
ugauucccuuucuagaaauaaa

SEQ ID NO: 435760 - RNA, 23 nt, Artificial Sequence
  Synthetic
uugauucccuuucuagaaauaaa

SEQ ID NO: 435761 - RNA, 24 nt, Artificial Sequence
  Synthetic
uuugauucccuuucuagaaauaaa

SEQ ID NO: 435762 - RNA, 18 nt, Artificial Sequence
  Synthetic
ugcuuaauuagaaauaaa

SEQ ID NO: 435763 - RNA, 19 nt, Artificial Sequence
  Synthetic
augcuuaauuagaaauaaa

SEQ ID NO: 435764 - RNA, 20 nt, Artificial Sequence
  Synthetic
gaugcuuaauuagaaauaaa

SEQ ID NO: 435765 - RNA, 21 nt, Artificial Sequence
  Synthetic
agaugcuuaauuagaaauaaa

SEQ ID NO: 435766 - RNA, 22 nt, Artificial Sequence
  Synthetic
aagaugcuuaauuagaaauaaa

SEQ ID NO: 435767 - RNA, 23 nt, Artificial Sequence
  Synthetic
aaagaugcuuaauuagaaauaaa

SEQ ID NO: 435768 - RNA, 24 nt, Artificial Sequence
  Synthetic
aaaagaugcuuaauuagaaauaaa

SEQ ID NO: 435769 - RNA, 18 nt, Artificial Sequence
  Synthetic
uuuagauaaggaaauaaa

SEQ ID NO: 435770 - RNA, 19 nt, Artificial Sequence
  Synthetic
uuuuagauaaggaaauaaa

SEQ ID NO: 435771 - RNA, 20 nt, Artificial Sequence
  Synthetic
auuuuagauaaggaaauaaa

SEQ ID NO: 435772 - RNA, 21 nt, Artificial Sequence
  Synthetic
gauuuuagauaaggaaauaaa

SEQ ID NO: 435773 - RNA, 22 nt, Artificial Sequence
  Synthetic
agauuuuagauaaggaaauaaa

SEQ ID NO: 435774 - RNA, 23 nt, Artificial Sequence
  Synthetic
aagauuuuagauaaggaaauaaa

SEQ ID NO: 435775 - RNA, 24 nt, Artificial Sequence
  Synthetic
uaagauuuuagauaaggaaauaaa

SEQ ID NO: 435776 - RNA, 18 nt, Artificial Sequence
  Synthetic
aaacacaggggaaauaaa

SEQ ID NO: 435777 - RNA, 19 nt, Artificial Sequence
  Synthetic
caaacacaggggaaauaaa

SEQ ID NO: 435778 - RNA, 20 nt, Artificial Sequence
  Synthetic
gcaaacacaggggaaauaaa

SEQ ID NO: 435779 - RNA, 21 nt, Artificial Sequence
  Synthetic
agcaaacacaggggaaauaaa

SEQ ID NO: 435780 - RNA, 22 nt, Artificial Sequence
  Synthetic
cagcaaacacaggggaaauaaa

SEQ ID NO: 435781 - RNA, 23 nt, Artificial Sequence
  Synthetic
ucagcaaacacaggggaaauaaa

SEQ ID NO: 435782 - RNA, 24 nt, Artificial Sequence
  Synthetic
uucagcaaacacaggggaaauaaa

SEQ ID NO: 435783 - RNA, 18 nt, Artificial Sequence
  Synthetic
uguuuaacuggaaauaaa

SEQ ID NO: 435784 - RNA, 19 nt, Artificial Sequence
  Synthetic
auguuuaacuggaaauaaa

SEQ ID NO: 435785 - RNA, 20 nt, Artificial Sequence
  Synthetic
aauguuuaacuggaaauaaa

SEQ ID NO: 435786 - RNA, 21 nt, Artificial Sequence
  Synthetic
gaauguuuaacuggaaauaaa

SEQ ID NO: 435787 - RNA, 22 nt, Artificial Sequence
  Synthetic
agaauguuuaacuggaaauaaa

SEQ ID NO: 435788 - RNA, 23 nt, Artificial Sequence
  Synthetic
aagaauguuuaacuggaaauaaa

SEQ ID NO: 435789 - RNA, 24 nt, Artificial Sequence
  Synthetic
gaagaauguuuaacuggaaauaaa

SEQ ID NO: 435790 - RNA, 18 nt, Artificial Sequence
  Synthetic
aaagaaaaaauaaauaaa

SEQ ID NO: 435791 - RNA, 19 nt, Artificial Sequence
  Synthetic
uaaagaaaaaauaaauaaa

SEQ ID NO: 435792 - RNA, 20 nt, Artificial Sequence
  Synthetic
uuaaagaaaaaauaaauaaa

SEQ ID NO: 435793 - RNA, 21 nt, Artificial Sequence
  Synthetic
auuaaagaaaaaauaaauaaa

SEQ ID NO: 435794 - RNA, 22 nt, Artificial Sequence
  Synthetic
aauuaaagaaaaaauaaauaaa

SEQ ID NO: 435795 - RNA, 23 nt, Artificial Sequence
  Synthetic
aaauuaaagaaaaaauaaauaaa

SEQ ID NO: 435796 - RNA, 24 nt, Artificial Sequence
  Synthetic
aaaauuaaagaaaaaauaaauaaa

SEQ ID NO: 435797 - RNA, 18 nt, Artificial Sequence
  Synthetic
uucaaauugauaaauaaa

SEQ ID NO: 435798 - RNA, 19 nt, Artificial Sequence
  Synthetic
cuucaaauugauaaauaaa

SEQ ID NO: 435799 - RNA, 20 nt, Artificial Sequence
  Synthetic
ucuucaaauugauaaauaaa

SEQ ID NO: 435800 - RNA, 21 nt, Artificial Sequence
  Synthetic
cucuucaaauugauaaauaaa

SEQ ID NO: 435801 - RNA, 22 nt, Artificial Sequence
  Synthetic
ccucuucaaauugauaaauaaa

SEQ ID NO: 435802 - RNA, 23 nt, Artificial Sequence
  Synthetic
accucuucaaauugauaaauaaa

SEQ ID NO: 435803 - RNA, 24 nt, Artificial Sequence
  Synthetic
aaccucuucaaauugauaaauaaa

SEQ ID NO: 435804 - RNA, 18 nt, Artificial Sequence
  Synthetic
cauaacuagcuaaauaaa

SEQ ID NO: 435805 - RNA, 19 nt, Artificial Sequence
  Synthetic
ccauaacuagcuaaauaaa

SEQ ID NO: 435806 - RNA, 20 nt, Artificial Sequence
  Synthetic
gccauaacuagcuaaauaaa

SEQ ID NO: 435807 - RNA, 21 nt, Artificial Sequence
  Synthetic
ugccauaacuagcuaaauaaa

SEQ ID NO: 435808 - RNA, 22 nt, Artificial Sequence
  Synthetic
uugccauaacuagcuaaauaaa

SEQ ID NO: 435809 - RNA, 23 nt, Artificial Sequence
  Synthetic
uuugccauaacuagcuaaauaaa

SEQ ID NO: 435810 - RNA, 24 nt, Artificial Sequence
  Synthetic
uuuugccauaacuagcuaaauaaa

SEQ ID NO: 435811 - RNA, 18 nt, Artificial Sequence
  Synthetic
ucuuuuuuucuaaauaaa

SEQ ID NO: 435812 - RNA, 19 nt, Artificial Sequence
  Synthetic
uucuuuuuuucuaaauaaa

SEQ ID NO: 435813 - RNA, 20 nt, Artificial Sequence
  Synthetic
auucuuuuuuucuaaauaaa

SEQ ID NO: 435814 - RNA, 21 nt, Artificial Sequence
  Synthetic
cauucuuuuuuucuaaauaaa

SEQ ID NO: 435815 - RNA, 22 nt, Artificial Sequence
  Synthetic
ccauucuuuuuuucuaaauaaa

SEQ ID NO: 435816 - RNA, 23 nt, Artificial Sequence
  Synthetic
accauucuuuuuuucuaaauaaa

SEQ ID NO: 435817 - RNA, 24 nt, Artificial Sequence
  Synthetic
caccauucuuuuuuucuaaauaaa

SEQ ID NO: 435818 - RNA, 18 nt, Artificial Sequence
  Synthetic
uuuuauaccuuaaauaaa

SEQ ID NO: 435819 - RNA, 19 nt, Artificial Sequence
  Synthetic
guuuuauaccuuaaauaaa

SEQ ID NO: 435820 - RNA, 20 nt, Artificial Sequence
  Synthetic
uguuuuauaccuuaaauaaa

SEQ ID NO: 435821 - RNA, 21 nt, Artificial Sequence
  Synthetic
uuguuuuauaccuuaaauaaa

SEQ ID NO: 435822 - RNA, 22 nt, Artificial Sequence
  Synthetic
uuuguuuuauaccuuaaauaaa

SEQ ID NO: 435823 - RNA, 23 nt, Artificial Sequence
  Synthetic
auuuguuuuauaccuuaaauaaa

SEQ ID NO: 435824 - RNA, 24 nt, Artificial Sequence
  Synthetic
uauuuguuuuauaccuuaaauaaa

SEQ ID NO: 435825 - RNA, 18 nt, Artificial Sequence
  Synthetic
aaauaugauuuaaauaaa

SEQ ID NO: 435826 - RNA, 19 nt, Artificial Sequence
  Synthetic
aaaauaugauuuaaauaaa

SEQ ID NO: 435827 - RNA, 20 nt, Artificial Sequence
  Synthetic
aaaaauaugauuuaaauaaa

SEQ ID NO: 435828 - RNA, 21 nt, Artificial Sequence
  Synthetic
gaaaaauaugauuuaaauaaa

SEQ ID NO: 435829 - RNA, 22 nt, Artificial Sequence
  Synthetic
ugaaaaauaugauuuaaauaaa

SEQ ID NO: 435830 - RNA, 23 nt, Artificial Sequence
  Synthetic
uugaaaaauaugauuuaaauaaa

SEQ ID NO: 435831 - RNA, 24 nt, Artificial Sequence
  Synthetic
guugaaaaauaugauuuaaauaaa

SEQ ID NO: 435832 - RNA, 18 nt, Artificial Sequence
  Synthetic
aguaaauaucacaauaaa

SEQ ID NO: 435833 - RNA, 19 nt, Artificial Sequence
  Synthetic
aaguaaauaucacaauaaa

SEQ ID NO: 435834 - RNA, 20 nt, Artificial Sequence
  Synthetic
aaaguaaauaucacaauaaa

SEQ ID NO: 435835 - RNA, 21 nt, Artificial Sequence
  Synthetic
uaaaguaaauaucacaauaaa

SEQ ID NO: 435836 - RNA, 22 nt, Artificial Sequence
  Synthetic
auaaaguaaauaucacaauaaa

SEQ ID NO: 435837 - RNA, 23 nt, Artificial Sequence
  Synthetic
aauaaaguaaauaucacaauaaa

SEQ ID NO: 435838 - RNA, 24 nt, Artificial Sequence
  Synthetic
caauaaaguaaauaucacaauaaa

SEQ ID NO: 435839 - RNA, 18 nt, Artificial Sequence
  Synthetic
aaagugaaacccaauaaa

SEQ ID NO: 435840 - RNA, 19 nt, Artificial Sequence
  Synthetic
uaaagugaaacccaauaaa

SEQ ID NO: 435841 - RNA, 20 nt, Artificial Sequence
  Synthetic
auaaagugaaacccaauaaa

SEQ ID NO: 435842 - RNA, 21 nt, Artificial Sequence
  Synthetic
aauaaagugaaacccaauaaa

SEQ ID NO: 435843 - RNA, 22 nt, Artificial Sequence
  Synthetic
caauaaagugaaacccaauaaa

SEQ ID NO: 435844 - RNA, 23 nt, Artificial Sequence
  Synthetic
gcaauaaagugaaacccaauaaa

SEQ ID NO: 435845 - RNA, 24 nt, Artificial Sequence
  Synthetic
ugcaauaaagugaaacccaauaaa

SEQ ID NO: 435846 - RNA, 18 nt, Artificial Sequence
  Synthetic
acaaagcaaggcaauaaa

SEQ ID NO: 435847 - RNA, 19 nt, Artificial Sequence
  Synthetic
gacaaagcaaggcaauaaa

SEQ ID NO: 435848 - RNA, 20 nt, Artificial Sequence
  Synthetic
agacaaagcaaggcaauaaa

SEQ ID NO: 435849 - RNA, 21 nt, Artificial Sequence
  Synthetic
gagacaaagcaaggcaauaaa

SEQ ID NO: 435850 - RNA, 22 nt, Artificial Sequence
  Synthetic
agagacaaagcaaggcaauaaa

SEQ ID NO: 435851 - RNA, 23 nt, Artificial Sequence
  Synthetic
aagagacaaagcaaggcaauaaa

SEQ ID NO: 435852 - RNA, 24 nt, Artificial Sequence
  Synthetic
uaagagacaaagcaaggcaauaaa

SEQ ID NO: 435853 - RNA, 18 nt, Artificial Sequence
  Synthetic
aaguuucauggcaauaaa

SEQ ID NO: 435854 - RNA, 19 nt, Artificial Sequence
  Synthetic
gaaguuucauggcaauaaa

SEQ ID NO: 435855 - RNA, 20 nt, Artificial Sequence
  Synthetic
agaaguuucauggcaauaaa

SEQ ID NO: 435856 - RNA, 21 nt, Artificial Sequence
  Synthetic
uagaaguuucauggcaauaaa

SEQ ID NO: 435857 - RNA, 22 nt, Artificial Sequence
  Synthetic
cuagaaguuucauggcaauaaa

SEQ ID NO: 435858 - RNA, 23 nt, Artificial Sequence
  Synthetic
ucuagaaguuucauggcaauaaa

SEQ ID NO: 435859 - RNA, 24 nt, Artificial Sequence
  Synthetic
uucuagaaguuucauggcaauaaa

SEQ ID NO: 435860 - RNA, 18 nt, Artificial Sequence
  Synthetic
caauuaauuggcaauaaa

SEQ ID NO: 435861 - RNA, 19 nt, Artificial Sequence
  Synthetic
gcaauuaauuggcaauaaa

SEQ ID NO: 435862 - RNA, 20 nt, Artificial Sequence
  Synthetic
agcaauuaauuggcaauaaa

SEQ ID NO: 435863 - RNA, 21 nt, Artificial Sequence
  Synthetic
uagcaauuaauuggcaauaaa

SEQ ID NO: 435864 - RNA, 22 nt, Artificial Sequence
  Synthetic
guagcaauuaauuggcaauaaa

SEQ ID NO: 435865 - RNA, 23 nt, Artificial Sequence
  Synthetic
aguagcaauuaauuggcaauaaa

SEQ ID NO: 435866 - RNA, 24 nt, Artificial Sequence
  Synthetic
uaguagcaauuaauuggcaauaaa

SEQ ID NO: 435867 - RNA, 18 nt, Artificial Sequence
  Synthetic
ucugcaaagugcaauaaa

SEQ ID NO: 435868 - RNA, 19 nt, Artificial Sequence
  Synthetic
aucugcaaagugcaauaaa

SEQ ID NO: 435869 - RNA, 20 nt, Artificial Sequence
  Synthetic
uaucugcaaagugcaauaaa

SEQ ID NO: 435870 - RNA, 21 nt, Artificial Sequence
  Synthetic
auaucugcaaagugcaauaaa

SEQ ID NO: 435871 - RNA, 22 nt, Artificial Sequence
  Synthetic
aauaucugcaaagugcaauaaa

SEQ ID NO: 435872 - RNA, 23 nt, Artificial Sequence
  Synthetic
aaauaucugcaaagugcaauaaa

SEQ ID NO: 435873 - RNA, 24 nt, Artificial Sequence
  Synthetic
gaaauaucugcaaagugcaauaaa

SEQ ID NO: 435874 - RNA, 18 nt, Artificial Sequence
  Synthetic
agugaaacaaucaauaaa

SEQ ID NO: 435875 - RNA, 19 nt, Artificial Sequence
  Synthetic
cagugaaacaaucaauaaa

SEQ ID NO: 435876 - RNA, 20 nt, Artificial Sequence
  Synthetic
gcagugaaacaaucaauaaa

SEQ ID NO: 435877 - RNA, 21 nt, Artificial Sequence
  Synthetic
cgcagugaaacaaucaauaaa

SEQ ID NO: 435878 - RNA, 22 nt, Artificial Sequence
  Synthetic
ccgcagugaaacaaucaauaaa

SEQ ID NO: 435879 - RNA, 23 nt, Artificial Sequence
  Synthetic
uccgcagugaaacaaucaauaaa

SEQ ID NO: 435880 - RNA, 24 nt, Artificial Sequence
  Synthetic
cuccgcagugaaacaaucaauaaa

SEQ ID NO: 435881 - RNA, 18 nt, Artificial Sequence
  Synthetic
acggcagccaucaauaaa

SEQ ID NO: 435882 - RNA, 19 nt, Artificial Sequence
  Synthetic
aacggcagccaucaauaaa

SEQ ID NO: 435883 - RNA, 20 nt, Artificial Sequence
  Synthetic
uaacggcagccaucaauaaa

SEQ ID NO: 435884 - RNA, 21 nt, Artificial Sequence
  Synthetic
cuaacggcagccaucaauaaa

SEQ ID NO: 435885 - RNA, 22 nt, Artificial Sequence
  Synthetic
ucuaacggcagccaucaauaaa

SEQ ID NO: 435886 - RNA, 23 nt, Artificial Sequence
  Synthetic
uucuaacggcagccaucaauaaa

SEQ ID NO: 435887 - RNA, 24 nt, Artificial Sequence
  Synthetic
uuucuaacggcagccaucaauaaa

SEQ ID NO: 435888 - RNA, 18 nt, Artificial Sequence
  Synthetic
cucgaggcgcucaauaaa

SEQ ID NO: 435889 - RNA, 19 nt, Artificial Sequence
  Synthetic
acucgaggcgcucaauaaa

SEQ ID NO: 435890 - RNA, 20 nt, Artificial Sequence
  Synthetic
cacucgaggcgcucaauaaa

SEQ ID NO: 435891 - RNA, 21 nt, Artificial Sequence
  Synthetic
gcacucgaggcgcucaauaaa

SEQ ID NO: 435892 - RNA, 22 nt, Artificial Sequence
  Synthetic
cgcacucgaggcgcucaauaaa

SEQ ID NO: 435893 - RNA, 23 nt, Artificial Sequence
  Synthetic
gcgcacucgaggcgcucaauaaa

SEQ ID NO: 435894 - RNA, 24 nt, Artificial Sequence
  Synthetic
agcgcacucgaggcgcucaauaaa

SEQ ID NO: 435895 - RNA, 18 nt, Artificial Sequence
  Synthetic
ccuauagcagucaauaaa

SEQ ID NO: 435896 - RNA, 19 nt, Artificial Sequence
  Synthetic
accuauagcagucaauaaa

SEQ ID NO: 435897 - RNA, 20 nt, Artificial Sequence
  Synthetic
aaccuauagcagucaauaaa

SEQ ID NO: 435898 - RNA, 21 nt, Artificial Sequence
  Synthetic
gaaccuauagcagucaauaaa

SEQ ID NO: 435899 - RNA, 22 nt, Artificial Sequence
  Synthetic
ugaaccuauagcagucaauaaa

SEQ ID NO: 435900 - RNA, 23 nt, Artificial Sequence
  Synthetic
augaaccuauagcagucaauaaa

SEQ ID NO: 435901 - RNA, 24 nt, Artificial Sequence
  Synthetic
gaugaaccuauagcagucaauaaa

SEQ ID NO: 435902 - RNA, 18 nt, Artificial Sequence
  Synthetic
acacuaaauuucaauaaa

SEQ ID NO: 435903 - RNA, 19 nt, Artificial Sequence
  Synthetic
cacacuaaauuucaauaaa

SEQ ID NO: 435904 - RNA, 20 nt, Artificial Sequence
  Synthetic
ucacacuaaauuucaauaaa

SEQ ID NO: 435905 - RNA, 21 nt, Artificial Sequence
  Synthetic
gucacacuaaauuucaauaaa

SEQ ID NO: 435906 - RNA, 22 nt, Artificial Sequence
  Synthetic
ugucacacuaaauuucaauaaa

SEQ ID NO: 435907 - RNA, 23 nt, Artificial Sequence
  Synthetic
augucacacuaaauuucaauaaa

SEQ ID NO: 435908 - RNA, 24 nt, Artificial Sequence
  Synthetic
caugucacacuaaauuucaauaaa

SEQ ID NO: 435909 - RNA, 18 nt, Artificial Sequence
  Synthetic
uagagaaaaaagaauaaa

SEQ ID NO: 435910 - RNA, 19 nt, Artificial Sequence
  Synthetic
uuagagaaaaaagaauaaa

SEQ ID NO: 435911 - RNA, 20 nt, Artificial Sequence
  Synthetic
uuuagagaaaaaagaauaaa

SEQ ID NO: 435912 - RNA, 21 nt, Artificial Sequence
  Synthetic
guuuagagaaaaaagaauaaa

SEQ ID NO: 435913 - RNA, 22 nt, Artificial Sequence
  Synthetic
aguuuagagaaaaaagaauaaa

SEQ ID NO: 435914 - RNA, 23 nt, Artificial Sequence
  Synthetic
aaguuuagagaaaaaagaauaaa

SEQ ID NO: 435915 - RNA, 24 nt, Artificial Sequence
  Synthetic
gaaguuuagagaaaaaagaauaaa

SEQ ID NO: 435916 - RNA, 18 nt, Artificial Sequence
  Synthetic
uugaggaagaagaauaaa

SEQ ID NO: 435917 - RNA, 19 nt, Artificial Sequence
  Synthetic
cuugaggaagaagaauaaa

SEQ ID NO: 435918 - RNA, 20 nt, Artificial Sequence
  Synthetic
ucuugaggaagaagaauaaa

SEQ ID NO: 435919 - RNA, 21 nt, Artificial Sequence
  Synthetic
gucuugaggaagaagaauaaa

SEQ ID NO: 435920 - RNA, 22 nt, Artificial Sequence
  Synthetic
agucuugaggaagaagaauaaa

SEQ ID NO: 435921 - RNA, 23 nt, Artificial Sequence
  Synthetic
cagucuugaggaagaagaauaaa

SEQ ID NO: 435922 - RNA, 24 nt, Artificial Sequence
  Synthetic
acagucuugaggaagaagaauaaa

SEQ ID NO: 435923 - RNA, 18 nt, Artificial Sequence
  Synthetic
ugaagaguagagaauaaa

SEQ ID NO: 435924 - RNA, 19 nt, Artificial Sequence
  Synthetic
augaagaguagagaauaaa

SEQ ID NO: 435925 - RNA, 20 nt, Artificial Sequence
  Synthetic
uaugaagaguagagaauaaa

SEQ ID NO: 435926 - RNA, 21 nt, Artificial Sequence
  Synthetic
cuaugaagaguagagaauaaa

SEQ ID NO: 435927 - RNA, 22 nt, Artificial Sequence
  Synthetic
acuaugaagaguagagaauaaa

SEQ ID NO: 435928 - RNA, 23 nt, Artificial Sequence
  Synthetic
cacuaugaagaguagagaauaaa

SEQ ID NO: 435929 - RNA, 24 nt, Artificial Sequence
  Synthetic
ucacuaugaagaguagagaauaaa

SEQ ID NO: 435930 - RNA, 18 nt, Artificial Sequence
  Synthetic
uaucaauaugagaauaaa

SEQ ID NO: 435931 - RNA, 19 nt, Artificial Sequence
  Synthetic
guaucaauaugagaauaaa

SEQ ID NO: 435932 - RNA, 20 nt, Artificial Sequence
  Synthetic
aguaucaauaugagaauaaa

SEQ ID NO: 435933 - RNA, 21 nt, Artificial Sequence
  Synthetic
uaguaucaauaugagaauaaa

SEQ ID NO: 435934 - RNA, 22 nt, Artificial Sequence
  Synthetic
auaguaucaauaugagaauaaa

SEQ ID NO: 435935 - RNA, 23 nt, Artificial Sequence
  Synthetic
uauaguaucaauaugagaauaaa

SEQ ID NO: 435936 - RNA, 24 nt, Artificial Sequence
  Synthetic
uuauaguaucaauaugagaauaaa

SEQ ID NO: 435937 - RNA, 18 nt, Artificial Sequence
  Synthetic
ucuuucaacuagaauaaa

SEQ ID NO: 435938 - RNA, 19 nt, Artificial Sequence
  Synthetic
uucuuucaacuagaauaaa

SEQ ID NO: 435939 - RNA, 20 nt, Artificial Sequence
  Synthetic
auucuuucaacuagaauaaa

SEQ ID NO: 435940 - RNA, 21 nt, Artificial Sequence
  Synthetic
aauucuuucaacuagaauaaa

SEQ ID NO: 435941 - RNA, 22 nt, Artificial Sequence
  Synthetic
gaauucuuucaacuagaauaaa

SEQ ID NO: 435942 - RNA, 23 nt, Artificial Sequence
  Synthetic
ugaauucuuucaacuagaauaaa

SEQ ID NO: 435943 - RNA, 24 nt, Artificial Sequence
  Synthetic
cugaauucuuucaacuagaauaaa

SEQ ID NO: 435944 - RNA, 18 nt, Artificial Sequence
  Synthetic
caagagaacuagaauaaa

SEQ ID NO: 435945 - RNA, 19 nt, Artificial Sequence
  Synthetic
gcaagagaacuagaauaaa

SEQ ID NO: 435946 - RNA, 20 nt, Artificial Sequence
  Synthetic
ugcaagagaacuagaauaaa

SEQ ID NO: 435947 - RNA, 21 nt, Artificial Sequence
  Synthetic
uugcaagagaacuagaauaaa

SEQ ID NO: 435948 - RNA, 22 nt, Artificial Sequence
  Synthetic
auugcaagagaacuagaauaaa

SEQ ID NO: 435949 - RNA, 23 nt, Artificial Sequence
  Synthetic
aauugcaagagaacuagaauaaa

SEQ ID NO: 435950 - RNA, 24 nt, Artificial Sequence
  Synthetic
aaauugcaagagaacuagaauaaa

SEQ ID NO: 435951 - RNA, 18 nt, Artificial Sequence
  Synthetic
aaaggauuuuagaauaaa

SEQ ID NO: 435952 - RNA, 19 nt, Artificial Sequence
  Synthetic
aaaaggauuuuagaauaaa

SEQ ID NO: 435953 - RNA, 20 nt, Artificial Sequence
  Synthetic
aaaaaggauuuuagaauaaa

SEQ ID NO: 435954 - RNA, 21 nt, Artificial Sequence
  Synthetic
uaaaaaggauuuuagaauaaa

SEQ ID NO: 435955 - RNA, 22 nt, Artificial Sequence
  Synthetic
guaaaaaggauuuuagaauaaa

SEQ ID NO: 435956 - RNA, 23 nt, Artificial Sequence
  Synthetic
aguaaaaaggauuuuagaauaaa

SEQ ID NO: 435957 - RNA, 24 nt, Artificial Sequence
  Synthetic
aaguaaaaaggauuuuagaauaaa

SEQ ID NO: 435958 - RNA, 18 nt, Artificial Sequence
  Synthetic
uuguuauuggcgaauaaa

SEQ ID NO: 435959 - RNA, 19 nt, Artificial Sequence
  Synthetic
auuguuauuggcgaauaaa

SEQ ID NO: 435960 - RNA, 20 nt, Artificial Sequence
  Synthetic
aauuguuauuggcgaauaaa

SEQ ID NO: 435961 - RNA, 21 nt, Artificial Sequence
  Synthetic
aaauuguuauuggcgaauaaa

SEQ ID NO: 435962 - RNA, 22 nt, Artificial Sequence
  Synthetic
aaaauuguuauuggcgaauaaa

SEQ ID NO: 435963 - RNA, 23 nt, Artificial Sequence
  Synthetic
uaaaauuguuauuggcgaauaaa

SEQ ID NO: 435964 - RNA, 24 nt, Artificial Sequence
  Synthetic
auaaaauuguuauuggcgaauaaa

SEQ ID NO: 435965 - RNA, 18 nt, Artificial Sequence
  Synthetic
gaaauaaauaggaauaaa

SEQ ID NO: 435966 - RNA, 19 nt, Artificial Sequence
  Synthetic
ggaaauaaauaggaauaaa

SEQ ID NO: 435967 - RNA, 20 nt, Artificial Sequence
  Synthetic
aggaaauaaauaggaauaaa

SEQ ID NO: 435968 - RNA, 21 nt, Artificial Sequence
  Synthetic
aaggaaauaaauaggaauaaa

SEQ ID NO: 435969 - RNA, 22 nt, Artificial Sequence
  Synthetic
uaaggaaauaaauaggaauaaa

SEQ ID NO: 435970 - RNA, 23 nt, Artificial Sequence
  Synthetic
auaaggaaauaaauaggaauaaa

SEQ ID NO: 435971 - RNA, 24 nt, Artificial Sequence
  Synthetic
gauaaggaaauaaauaggaauaaa

SEQ ID NO: 435972 - RNA, 18 nt, Artificial Sequence
  Synthetic
uaauguaacaugaauaaa

SEQ ID NO: 435973 - RNA, 19 nt, Artificial Sequence
  Synthetic
auaauguaacaugaauaaa

SEQ ID NO: 435974 - RNA, 20 nt, Artificial Sequence
  Synthetic
aauaauguaacaugaauaaa

SEQ ID NO: 435975 - RNA, 21 nt, Artificial Sequence
  Synthetic
gaauaauguaacaugaauaaa

SEQ ID NO: 435976 - RNA, 22 nt, Artificial Sequence
  Synthetic
ugaauaauguaacaugaauaaa

SEQ ID NO: 435977 - RNA, 23 nt, Artificial Sequence
  Synthetic
cugaauaauguaacaugaauaaa

SEQ ID NO: 435978 - RNA, 24 nt, Artificial Sequence
  Synthetic
ucugaauaauguaacaugaauaaa

SEQ ID NO: 435979 - RNA, 18 nt, Artificial Sequence
  Synthetic
auaagucagaugaauaaa

SEQ ID NO: 435980 - RNA, 19 nt, Artificial Sequence
  Synthetic
uauaagucagaugaauaaa

SEQ ID NO: 435981 - RNA, 20 nt, Artificial Sequence
  Synthetic
guauaagucagaugaauaaa

SEQ ID NO: 435982 - RNA, 21 nt, Artificial Sequence
  Synthetic
uguauaagucagaugaauaaa

SEQ ID NO: 435983 - RNA, 22 nt, Artificial Sequence
  Synthetic
uuguauaagucagaugaauaaa

SEQ ID NO: 435984 - RNA, 23 nt, Artificial Sequence
  Synthetic
cuuguauaagucagaugaauaaa

SEQ ID NO: 435985 - RNA, 24 nt, Artificial Sequence
  Synthetic
acuuguauaagucagaugaauaaa

SEQ ID NO: 435986 - RNA, 18 nt, Artificial Sequence
  Synthetic
caaccguuugugaauaaa

SEQ ID NO: 435987 - RNA, 19 nt, Artificial Sequence
  Synthetic
ucaaccguuugugaauaaa

SEQ ID NO: 435988 - RNA, 20 nt, Artificial Sequence
  Synthetic
uucaaccguuugugaauaaa

SEQ ID NO: 435989 - RNA, 21 nt, Artificial Sequence
  Synthetic
cuucaaccguuugugaauaaa

SEQ ID NO: 435990 - RNA, 22 nt, Artificial Sequence
  Synthetic
gcuucaaccguuugugaauaaa

SEQ ID NO: 435991 - RNA, 23 nt, Artificial Sequence
  Synthetic
agcuucaaccguuugugaauaaa

SEQ ID NO: 435992 - RNA, 24 nt, Artificial Sequence
  Synthetic
cagcuucaaccguuugugaauaaa

SEQ ID NO: 435993 - RNA, 18 nt, Artificial Sequence
  Synthetic
guuucucaaaauaauaaa

SEQ ID NO: 435994 - RNA, 19 nt, Artificial Sequence
  Synthetic
uguuucucaaaauaauaaa

SEQ ID NO: 435995 - RNA, 20 nt, Artificial Sequence
  Synthetic
auguuucucaaaauaauaaa

SEQ ID NO: 435996 - RNA, 21 nt, Artificial Sequence
  Synthetic
aauguuucucaaaauaauaaa

SEQ ID NO: 435997 - RNA, 22 nt, Artificial Sequence
  Synthetic
gaauguuucucaaaauaauaaa

SEQ ID NO: 435998 - RNA, 23 nt, Artificial Sequence
  Synthetic
ugaauguuucucaaaauaauaaa

SEQ ID NO: 435999 - RNA, 24 nt, Artificial Sequence
  Synthetic
augaauguuucucaaaauaauaaa

SEQ ID NO: 436000 - RNA, 18 nt, Artificial Sequence
  Synthetic
auaaaauaaaauaauaaa

SEQ ID NO: 436001 - RNA, 19 nt, Artificial Sequence
  Synthetic
aauaaaauaaaauaauaaa

SEQ ID NO: 436002 - RNA, 20 nt, Artificial Sequence
  Synthetic
aaauaaaauaaaauaauaaa

SEQ ID NO: 436003 - RNA, 21 nt, Artificial Sequence
  Synthetic
aaaauaaaauaaaauaauaaa

SEQ ID NO: 436004 - RNA, 22 nt, Artificial Sequence
  Synthetic
uaaaauaaaauaaaauaauaaa

SEQ ID NO: 436005 - RNA, 23 nt, Artificial Sequence
  Synthetic
auaaaauaaaauaaaauaauaaa

SEQ ID NO: 436006 - RNA, 24 nt, Artificial Sequence
  Synthetic
aauaaaauaaaauaaaauaauaaa

SEQ ID NO: 436007 - RNA, 18 nt, Artificial Sequence
  Synthetic
uuuaaauaacauaauaaa

SEQ ID NO: 436008 - RNA, 19 nt, Artificial Sequence
  Synthetic
auuuaaauaacauaauaaa

SEQ ID NO: 436009 - RNA, 20 nt, Artificial Sequence
  Synthetic
gauuuaaauaacauaauaaa

SEQ ID NO: 436010 - RNA, 21 nt, Artificial Sequence
  Synthetic
ggauuuaaauaacauaauaaa

SEQ ID NO: 436011 - RNA, 22 nt, Artificial Sequence
  Synthetic
gggauuuaaauaacauaauaaa

SEQ ID NO: 436012 - RNA, 23 nt, Artificial Sequence
  Synthetic
ggggauuuaaauaacauaauaaa

SEQ ID NO: 436013 - RNA, 24 nt, Artificial Sequence
  Synthetic
aggggauuuaaauaacauaauaaa

SEQ ID NO: 436014 - RNA, 18 nt, Artificial Sequence
  Synthetic
aggcuugaugauaauaaa

SEQ ID NO: 436015 - RNA, 19 nt, Artificial Sequence
  Synthetic
uaggcuugaugauaauaaa

SEQ ID NO: 436016 - RNA, 20 nt, Artificial Sequence
  Synthetic
auaggcuugaugauaauaaa

SEQ ID NO: 436017 - RNA, 21 nt, Artificial Sequence
  Synthetic
uauaggcuugaugauaauaaa

SEQ ID NO: 436018 - RNA, 22 nt, Artificial Sequence
  Synthetic
cuauaggcuugaugauaauaaa

SEQ ID NO: 436019 - RNA, 23 nt, Artificial Sequence
  Synthetic
gcuauaggcuugaugauaauaaa

SEQ ID NO: 436020 - RNA, 24 nt, Artificial Sequence
  Synthetic
agcuauaggcuugaugauaauaaa

SEQ ID NO: 436021 - RNA, 18 nt, Artificial Sequence
  Synthetic
gcuauaagcuauaauaaa

SEQ ID NO: 436022 - RNA, 19 nt, Artificial Sequence
  Synthetic
ugcuauaagcuauaauaaa

SEQ ID NO: 436023 - RNA, 20 nt, Artificial Sequence
  Synthetic
augcuauaagcuauaauaaa

SEQ ID NO: 436024 - RNA, 21 nt, Artificial Sequence
  Synthetic
aaugcuauaagcuauaauaaa

SEQ ID NO: 436025 - RNA, 22 nt, Artificial Sequence
  Synthetic
caaugcuauaagcuauaauaaa

SEQ ID NO: 436026 - RNA, 23 nt, Artificial Sequence
  Synthetic
acaaugcuauaagcuauaauaaa

SEQ ID NO: 436027 - RNA, 24 nt, Artificial Sequence
  Synthetic
uacaaugcuauaagcuauaauaaa

SEQ ID NO: 436028 - RNA, 18 nt, Artificial Sequence
  Synthetic
uauucacauacuaauaaa

SEQ ID NO: 436029 - RNA, 19 nt, Artificial Sequence
  Synthetic
uuauucacauacuaauaaa

SEQ ID NO: 436030 - RNA, 20 nt, Artificial Sequence
  Synthetic
auuauucacauacuaauaaa

SEQ ID NO: 436031 - RNA, 21 nt, Artificial Sequence
  Synthetic
uauuauucacauacuaauaaa

SEQ ID NO: 436032 - RNA, 22 nt, Artificial Sequence
  Synthetic
auauuauucacauacuaauaaa

SEQ ID NO: 436033 - RNA, 23 nt, Artificial Sequence
  Synthetic
aauauuauucacauacuaauaaa

SEQ ID NO: 436034 - RNA, 24 nt, Artificial Sequence
  Synthetic
aaauauuauucacauacuaauaaa

SEQ ID NO: 436035 - RNA, 18 nt, Artificial Sequence
  Synthetic
auauuuuaaaguaauaaa

SEQ ID NO: 436036 - RNA, 19 nt, Artificial Sequence
  Synthetic
aauauuuuaaaguaauaaa

SEQ ID NO: 436037 - RNA, 20 nt, Artificial Sequence
  Synthetic
uaauauuuuaaaguaauaaa

SEQ ID NO: 436038 - RNA, 21 nt, Artificial Sequence
  Synthetic
auaauauuuuaaaguaauaaa

SEQ ID NO: 436039 - RNA, 22 nt, Artificial Sequence
  Synthetic
uauaauauuuuaaaguaauaaa

SEQ ID NO: 436040 - RNA, 23 nt, Artificial Sequence
  Synthetic
cuauaauauuuuaaaguaauaaa

SEQ ID NO: 436041 - RNA, 24 nt, Artificial Sequence
  Synthetic
ucuauaauauuuuaaaguaauaaa

SEQ ID NO: 436042 - RNA, 18 nt, Artificial Sequence
  Synthetic
cguggaguggguaauaaa

SEQ ID NO: 436043 - RNA, 19 nt, Artificial Sequence
  Synthetic
ucguggaguggguaauaaa

SEQ ID NO: 436044 - RNA, 20 nt, Artificial Sequence
  Synthetic
uucguggaguggguaauaaa

SEQ ID NO: 436045 - RNA, 21 nt, Artificial Sequence
  Synthetic
uuucguggaguggguaauaaa

SEQ ID NO: 436046 - RNA, 22 nt, Artificial Sequence
  Synthetic
uuuucguggaguggguaauaaa

SEQ ID NO: 436047 - RNA, 23 nt, Artificial Sequence
  Synthetic
uuuuucguggaguggguaauaaa

SEQ ID NO: 436048 - RNA, 24 nt, Artificial Sequence
  Synthetic
uuuuuucguggaguggguaauaaa

SEQ ID NO: 436049 - RNA, 18 nt, Artificial Sequence
  Synthetic
uagauguuggguaauaaa

SEQ ID NO: 436050 - RNA, 19 nt, Artificial Sequence
  Synthetic
auagauguuggguaauaaa

SEQ ID NO: 436051 - RNA, 20 nt, Artificial Sequence
  Synthetic
aauagauguuggguaauaaa

SEQ ID NO: 436052 - RNA, 21 nt, Artificial Sequence
  Synthetic
aaauagauguuggguaauaaa

SEQ ID NO: 436053 - RNA, 22 nt, Artificial Sequence
  Synthetic
uaaauagauguuggguaauaaa

SEQ ID NO: 436054 - RNA, 23 nt, Artificial Sequence
  Synthetic
guaaauagauguuggguaauaaa

SEQ ID NO: 436055 - RNA, 24 nt, Artificial Sequence
  Synthetic
aguaaauagauguuggguaauaaa

SEQ ID NO: 436056 - RNA, 18 nt, Artificial Sequence
  Synthetic
gagaaaagauguaauaaa

SEQ ID NO: 436057 - RNA, 19 nt, Artificial Sequence
  Synthetic
agagaaaagauguaauaaa

SEQ ID NO: 436058 - RNA, 20 nt, Artificial Sequence
  Synthetic
aagagaaaagauguaauaaa

SEQ ID NO: 436059 - RNA, 21 nt, Artificial Sequence
  Synthetic
caagagaaaagauguaauaaa

SEQ ID NO: 436060 - RNA, 22 nt, Artificial Sequence
  Synthetic
ucaagagaaaagauguaauaaa

SEQ ID NO: 436061 - RNA, 23 nt, Artificial Sequence
  Synthetic
gucaagagaaaagauguaauaaa

SEQ ID NO: 436062 - RNA, 24 nt, Artificial Sequence
  Synthetic
ggucaagagaaaagauguaauaaa

SEQ ID NO: 436063 - RNA, 18 nt, Artificial Sequence
  Synthetic
gguucucuuauuaauaaa

SEQ ID NO: 436064 - RNA, 19 nt, Artificial Sequence
  Synthetic
agguucucuuauuaauaaa

SEQ ID NO: 436065 - RNA, 20 nt, Artificial Sequence
  Synthetic
cagguucucuuauuaauaaa

SEQ ID NO: 436066 - RNA, 21 nt, Artificial Sequence
  Synthetic
acagguucucuuauuaauaaa

SEQ ID NO: 436067 - RNA, 22 nt, Artificial Sequence
  Synthetic
aacagguucucuuauuaauaaa

SEQ ID NO: 436068 - RNA, 23 nt, Artificial Sequence
  Synthetic
gaacagguucucuuauuaauaaa

SEQ ID NO: 436069 - RNA, 24 nt, Artificial Sequence
  Synthetic
agaacagguucucuuauuaauaaa

SEQ ID NO: 436070 - RNA, 18 nt, Artificial Sequence
  Synthetic
uaacauaaaguuaauaaa

SEQ ID NO: 436071 - RNA, 19 nt, Artificial Sequence
  Synthetic
guaacauaaaguuaauaaa

SEQ ID NO: 436072 - RNA, 20 nt, Artificial Sequence
  Synthetic
aguaacauaaaguuaauaaa

SEQ ID NO: 436073 - RNA, 21 nt, Artificial Sequence
  Synthetic
gaguaacauaaaguuaauaaa

SEQ ID NO: 436074 - RNA, 22 nt, Artificial Sequence
  Synthetic
ugaguaacauaaaguuaauaaa

SEQ ID NO: 436075 - RNA, 23 nt, Artificial Sequence
  Synthetic
augaguaacauaaaguuaauaaa

SEQ ID NO: 436076 - RNA, 24 nt, Artificial Sequence
  Synthetic
caugaguaacauaaaguuaauaaa

SEQ ID NO: 436077 - RNA, 18 nt, Artificial Sequence
  Synthetic
cuuuuaacuguuaauaaa

SEQ ID NO: 436078 - RNA, 19 nt, Artificial Sequence
  Synthetic
gcuuuuaacuguuaauaaa

SEQ ID NO: 436079 - RNA, 20 nt, Artificial Sequence
  Synthetic
ugcuuuuaacuguuaauaaa

SEQ ID NO: 436080 - RNA, 21 nt, Artificial Sequence
  Synthetic
augcuuuuaacuguuaauaaa

SEQ ID NO: 436081 - RNA, 22 nt, Artificial Sequence
  Synthetic
aaugcuuuuaacuguuaauaaa

SEQ ID NO: 436082 - RNA, 23 nt, Artificial Sequence
  Synthetic
aaaugcuuuuaacuguuaauaaa

SEQ ID NO: 436083 - RNA, 24 nt, Artificial Sequence
  Synthetic
aaaaugcuuuuaacuguuaauaaa

SEQ ID NO: 436084 - RNA, 18 nt, Artificial Sequence
  Synthetic
caaaauauuuuuaauaaa

SEQ ID NO: 436085 - RNA, 19 nt, Artificial Sequence
  Synthetic
acaaaauauuuuuaauaaa

SEQ ID NO: 436086 - RNA, 20 nt, Artificial Sequence
  Synthetic
cacaaaauauuuuuaauaaa

SEQ ID NO: 436087 - RNA, 21 nt, Artificial Sequence
  Synthetic
gcacaaaauauuuuuaauaaa

SEQ ID NO: 436088 - RNA, 22 nt, Artificial Sequence
  Synthetic
agcacaaaauauuuuuaauaaa

SEQ ID NO: 436089 - RNA, 23 nt, Artificial Sequence
  Synthetic
aagcacaaaauauuuuuaauaaa

SEQ ID NO: 436090 - RNA, 24 nt, Artificial Sequence
  Synthetic
aaagcacaaaauauuuuuaauaaa

SEQ ID NO: 436091 - RNA, 18 nt, Artificial Sequence
  Synthetic
cggggaaaaaaacauaaa

SEQ ID NO: 436092 - RNA, 19 nt, Artificial Sequence
  Synthetic
acggggaaaaaaacauaaa

SEQ ID NO: 436093 - RNA, 20 nt, Artificial Sequence
  Synthetic
uacggggaaaaaaacauaaa

SEQ ID NO: 436094 - RNA, 21 nt, Artificial Sequence
  Synthetic
auacggggaaaaaaacauaaa

SEQ ID NO: 436095 - RNA, 22 nt, Artificial Sequence
  Synthetic
aauacggggaaaaaaacauaaa

SEQ ID NO: 436096 - RNA, 23 nt, Artificial Sequence
  Synthetic
uaauacggggaaaaaaacauaaa

SEQ ID NO: 436097 - RNA, 24 nt, Artificial Sequence
  Synthetic
cuaauacggggaaaaaaacauaaa

SEQ ID NO: 436098 - RNA, 18 nt, Artificial Sequence
  Synthetic
cuggauaaagaacauaaa

SEQ ID NO: 436099 - RNA, 19 nt, Artificial Sequence
  Synthetic
acuggauaaagaacauaaa

SEQ ID NO: 436100 - RNA, 20 nt, Artificial Sequence
  Synthetic
aacuggauaaagaacauaaa

SEQ ID NO: 436101 - RNA, 21 nt, Artificial Sequence
  Synthetic
aaacuggauaaagaacauaaa

SEQ ID NO: 436102 - RNA, 22 nt, Artificial Sequence
  Synthetic
aaaacuggauaaagaacauaaa

SEQ ID NO: 436103 - RNA, 23 nt, Artificial Sequence
  Synthetic
gaaaacuggauaaagaacauaaa

SEQ ID NO: 436104 - RNA, 24 nt, Artificial Sequence
  Synthetic
ggaaaacuggauaaagaacauaaa

SEQ ID NO: 436105 - RNA, 18 nt, Artificial Sequence
  Synthetic
aaugguagagaacauaaa

SEQ ID NO: 436106 - RNA, 19 nt, Artificial Sequence
  Synthetic
aaaugguagagaacauaaa

SEQ ID NO: 436107 - RNA, 20 nt, Artificial Sequence
  Synthetic
aaaaugguagagaacauaaa

SEQ ID NO: 436108 - RNA, 21 nt, Artificial Sequence
  Synthetic
aaaaaugguagagaacauaaa

SEQ ID NO: 436109 - RNA, 22 nt, Artificial Sequence
  Synthetic
aaaaaaugguagagaacauaaa

SEQ ID NO: 436110 - RNA, 23 nt, Artificial Sequence
  Synthetic
aaaaaaaugguagagaacauaaa

SEQ ID NO: 436111 - RNA, 24 nt, Artificial Sequence
  Synthetic
aaaaaaaaugguagagaacauaaa

SEQ ID NO: 436112 - RNA, 18 nt, Artificial Sequence
  Synthetic
ugaaaaguggaacauaaa

SEQ ID NO: 436113 - RNA, 19 nt, Artificial Sequence
  Synthetic
uugaaaaguggaacauaaa

SEQ ID NO: 436114 - RNA, 20 nt, Artificial Sequence
  Synthetic
uuugaaaaguggaacauaaa

SEQ ID NO: 436115 - RNA, 21 nt, Artificial Sequence
  Synthetic
uuuugaaaaguggaacauaaa

SEQ ID NO: 436116 - RNA, 22 nt, Artificial Sequence
  Synthetic
auuuugaaaaguggaacauaaa

SEQ ID NO: 436117 - RNA, 23 nt, Artificial Sequence
  Synthetic
aauuuugaaaaguggaacauaaa

SEQ ID NO: 436118 - RNA, 24 nt, Artificial Sequence
  Synthetic
aaauuuugaaaaguggaacauaaa

SEQ ID NO: 436119 - RNA, 18 nt, Artificial Sequence
  Synthetic
gccugagcauaacauaaa

SEQ ID NO: 436120 - RNA, 19 nt, Artificial Sequence
  Synthetic
ggccugagcauaacauaaa

SEQ ID NO: 436121 - RNA, 20 nt, Artificial Sequence
  Synthetic
gggccugagcauaacauaaa

SEQ ID NO: 436122 - RNA, 21 nt, Artificial Sequence
  Synthetic
cgggccugagcauaacauaaa

SEQ ID NO: 436123 - RNA, 22 nt, Artificial Sequence
  Synthetic
acgggccugagcauaacauaaa

SEQ ID NO: 436124 - RNA, 23 nt, Artificial Sequence
  Synthetic
gacgggccugagcauaacauaaa

SEQ ID NO: 436125 - RNA, 24 nt, Artificial Sequence
  Synthetic
ugacgggccugagcauaacauaaa

SEQ ID NO: 436126 - RNA, 18 nt, Artificial Sequence
  Synthetic
uugugauucuaacauaaa

SEQ ID NO: 436127 - RNA, 19 nt, Artificial Sequence
  Synthetic
uuugugauucuaacauaaa

SEQ ID NO: 436128 - RNA, 20 nt, Artificial Sequence
  Synthetic
auuugugauucuaacauaaa

SEQ ID NO: 436129 - RNA, 21 nt, Artificial Sequence
  Synthetic
gauuugugauucuaacauaaa

SEQ ID NO: 436130 - RNA, 22 nt, Artificial Sequence
  Synthetic
ugauuugugauucuaacauaaa

SEQ ID NO: 436131 - RNA, 23 nt, Artificial Sequence
  Synthetic
augauuugugauucuaacauaaa

SEQ ID NO: 436132 - RNA, 24 nt, Artificial Sequence
  Synthetic
uaugauuugugauucuaacauaaa

SEQ ID NO: 436133 - RNA, 18 nt, Artificial Sequence
  Synthetic
uguaacccaucacauaaa

SEQ ID NO: 436134 - RNA, 19 nt, Artificial Sequence
  Synthetic
auguaacccaucacauaaa

SEQ ID NO: 436135 - RNA, 20 nt, Artificial Sequence
  Synthetic
aauguaacccaucacauaaa

SEQ ID NO: 436136 - RNA, 21 nt, Artificial Sequence
  Synthetic
aaauguaacccaucacauaaa

SEQ ID NO: 436137 - RNA, 22 nt, Artificial Sequence
  Synthetic
uaaauguaacccaucacauaaa

SEQ ID NO: 436138 - RNA, 23 nt, Artificial Sequence
  Synthetic
auaaauguaacccaucacauaaa

SEQ ID NO: 436139 - RNA, 24 nt, Artificial Sequence
  Synthetic
aauaaauguaacccaucacauaaa

SEQ ID NO: 436140 - RNA, 18 nt, Artificial Sequence
  Synthetic
caaagcuucagacauaaa

SEQ ID NO: 436141 - RNA, 19 nt, Artificial Sequence
  Synthetic
ucaaagcuucagacauaaa

SEQ ID NO: 436142 - RNA, 20 nt, Artificial Sequence
  Synthetic
uucaaagcuucagacauaaa

SEQ ID NO: 436143 - RNA, 21 nt, Artificial Sequence
  Synthetic
auucaaagcuucagacauaaa

SEQ ID NO: 436144 - RNA, 22 nt, Artificial Sequence
  Synthetic
cauucaaagcuucagacauaaa

SEQ ID NO: 436145 - RNA, 23 nt, Artificial Sequence
  Synthetic
ucauucaaagcuucagacauaaa

SEQ ID NO: 436146 - RNA, 24 nt, Artificial Sequence
  Synthetic
gucauucaaagcuucagacauaaa

SEQ ID NO: 436147 - RNA, 18 nt, Artificial Sequence
  Synthetic
gaaaggagaugacauaaa

SEQ ID NO: 436148 - RNA, 19 nt, Artificial Sequence
  Synthetic
ugaaaggagaugacauaaa

SEQ ID NO: 436149 - RNA, 20 nt, Artificial Sequence
  Synthetic
uugaaaggagaugacauaaa

SEQ ID NO: 436150 - RNA, 21 nt, Artificial Sequence
  Synthetic
cuugaaaggagaugacauaaa

SEQ ID NO: 436151 - RNA, 22 nt, Artificial Sequence
  Synthetic
acuugaaaggagaugacauaaa

SEQ ID NO: 436152 - RNA, 23 nt, Artificial Sequence
  Synthetic
uacuugaaaggagaugacauaaa

SEQ ID NO: 436153 - RNA, 24 nt, Artificial Sequence
  Synthetic
uuacuugaaaggagaugacauaaa

SEQ ID NO: 436154 - RNA, 18 nt, Artificial Sequence
  Synthetic
gccaacauaauacauaaa

SEQ ID NO: 436155 - RNA, 19 nt, Artificial Sequence
  Synthetic
ggccaacauaauacauaaa

SEQ ID NO: 436156 - RNA, 20 nt, Artificial Sequence
  Synthetic
uggccaacauaauacauaaa

SEQ ID NO: 436157 - RNA, 21 nt, Artificial Sequence
  Synthetic
auggccaacauaauacauaaa

SEQ ID NO: 436158 - RNA, 22 nt, Artificial Sequence
  Synthetic
uauggccaacauaauacauaaa

SEQ ID NO: 436159 - RNA, 23 nt, Artificial Sequence
  Synthetic
uuauggccaacauaauacauaaa

SEQ ID NO: 436160 - RNA, 24 nt, Artificial Sequence
  Synthetic
cuuauggccaacauaauacauaaa

SEQ ID NO: 436161 - RNA, 18 nt, Artificial Sequence
  Synthetic
gaggucccaacccauaaa

SEQ ID NO: 436162 - RNA, 19 nt, Artificial Sequence
  Synthetic
ugaggucccaacccauaaa

SEQ ID NO: 436163 - RNA, 20 nt, Artificial Sequence
  Synthetic
augaggucccaacccauaaa

SEQ ID NO: 436164 - RNA, 21 nt, Artificial Sequence
  Synthetic
caugaggucccaacccauaaa

SEQ ID NO: 436165 - RNA, 22 nt, Artificial Sequence
  Synthetic
ccaugaggucccaacccauaaa

SEQ ID NO: 436166 - RNA, 23 nt, Artificial Sequence
  Synthetic
uccaugaggucccaacccauaaa

SEQ ID NO: 436167 - RNA, 24 nt, Artificial Sequence
  Synthetic
auccaugaggucccaacccauaaa

SEQ ID NO: 436168 - RNA, 18 nt, Artificial Sequence
  Synthetic
auacucugcagccauaaa

SEQ ID NO: 436169 - RNA, 19 nt, Artificial Sequence
  Synthetic
aauacucugcagccauaaa

SEQ ID NO: 436170 - RNA, 20 nt, Artificial Sequence
  Synthetic
gaauacucugcagccauaaa

SEQ ID NO: 436171 - RNA, 21 nt, Artificial Sequence
  Synthetic
ggaauacucugcagccauaaa

SEQ ID NO: 436172 - RNA, 22 nt, Artificial Sequence
  Synthetic
uggaauacucugcagccauaaa

SEQ ID NO: 436173 - RNA, 23 nt, Artificial Sequence
  Synthetic
guggaauacucugcagccauaaa

SEQ ID NO: 436174 - RNA, 24 nt, Artificial Sequence
  Synthetic
uguggaauacucugcagccauaaa

SEQ ID NO: 436175 - RNA, 18 nt, Artificial Sequence
  Synthetic
auacuacucagccauaaa

SEQ ID NO: 436176 - RNA, 19 nt, Artificial Sequence
  Synthetic
aauacuacucagccauaaa

SEQ ID NO: 436177 - RNA, 20 nt, Artificial Sequence
  Synthetic
gaauacuacucagccauaaa

SEQ ID NO: 436178 - RNA, 21 nt, Artificial Sequence
  Synthetic
ugaauacuacucagccauaaa

SEQ ID NO: 436179 - RNA, 22 nt, Artificial Sequence
  Synthetic
augaauacuacucagccauaaa

SEQ ID NO: 436180 - RNA, 23 nt, Artificial Sequence
  Synthetic
uaugaauacuacucagccauaaa

SEQ ID NO: 436181 - RNA, 24 nt, Artificial Sequence
  Synthetic
auaugaauacuacucagccauaaa

SEQ ID NO: 436182 - RNA, 18 nt, Artificial Sequence
  Synthetic
uuagacuuaggccauaaa

SEQ ID NO: 436183 - RNA, 19 nt, Artificial Sequence
  Synthetic
auuagacuuaggccauaaa

SEQ ID NO: 436184 - RNA, 20 nt, Artificial Sequence
  Synthetic
uauuagacuuaggccauaaa

SEQ ID NO: 436185 - RNA, 21 nt, Artificial Sequence
  Synthetic
auauuagacuuaggccauaaa

SEQ ID NO: 436186 - RNA, 22 nt, Artificial Sequence
  Synthetic
aauauuagacuuaggccauaaa

SEQ ID NO: 436187 - RNA, 23 nt, Artificial Sequence
  Synthetic
aaauauuagacuuaggccauaaa

SEQ ID NO: 436188 - RNA, 24 nt, Artificial Sequence
  Synthetic
caaauauuagacuuaggccauaaa

SEQ ID NO: 436189 - RNA, 18 nt, Artificial Sequence
  Synthetic
ucuaaauaaugccauaaa

SEQ ID NO: 436190 - RNA, 19 nt, Artificial Sequence
  Synthetic
aucuaaauaaugccauaaa

SEQ ID NO: 436191 - RNA, 20 nt, Artificial Sequence
  Synthetic
uaucuaaauaaugccauaaa

SEQ ID NO: 436192 - RNA, 21 nt, Artificial Sequence
  Synthetic
auaucuaaauaaugccauaaa

SEQ ID NO: 436193 - RNA, 22 nt, Artificial Sequence
  Synthetic
aauaucuaaauaaugccauaaa

SEQ ID NO: 436194 - RNA, 23 nt, Artificial Sequence
  Synthetic
aaauaucuaaauaaugccauaaa

SEQ ID NO: 436195 - RNA, 24 nt, Artificial Sequence
  Synthetic
aaaauaucuaaauaaugccauaaa

SEQ ID NO: 436196 - RNA, 18 nt, Artificial Sequence
  Synthetic
ccuagugaacuccauaaa

SEQ ID NO: 436197 - RNA, 19 nt, Artificial Sequence
  Synthetic
accuagugaacuccauaaa

SEQ ID NO: 436198 - RNA, 20 nt, Artificial Sequence
  Synthetic
caccuagugaacuccauaaa

SEQ ID NO: 436199 - RNA, 21 nt, Artificial Sequence
  Synthetic
gcaccuagugaacuccauaaa

SEQ ID NO: 436200 - RNA, 22 nt, Artificial Sequence
  Synthetic
ugcaccuagugaacuccauaaa

SEQ ID NO: 436201 - RNA, 23 nt, Artificial Sequence
  Synthetic
gugcaccuagugaacuccauaaa

SEQ ID NO: 436202 - RNA, 24 nt, Artificial Sequence
  Synthetic
ggugcaccuagugaacuccauaaa

SEQ ID NO: 436203 - RNA, 18 nt, Artificial Sequence
  Synthetic
ugcugcuuaguccauaaa

SEQ ID NO: 436204 - RNA, 19 nt, Artificial Sequence
  Synthetic
cugcugcuuaguccauaaa

SEQ ID NO: 436205 - RNA, 20 nt, Artificial Sequence
  Synthetic
acugcugcuuaguccauaaa

SEQ ID NO: 436206 - RNA, 21 nt, Artificial Sequence
  Synthetic
aacugcugcuuaguccauaaa

SEQ ID NO: 436207 - RNA, 22 nt, Artificial Sequence
  Synthetic
caacugcugcuuaguccauaaa

SEQ ID NO: 436208 - RNA, 23 nt, Artificial Sequence
  Synthetic
ucaacugcugcuuaguccauaaa

SEQ ID NO: 436209 - RNA, 24 nt, Artificial Sequence
  Synthetic
cucaacugcugcuuaguccauaaa

SEQ ID NO: 436210 - RNA, 18 nt, Artificial Sequence
  Synthetic
gucauaacaaagcauaaa

SEQ ID NO: 436211 - RNA, 19 nt, Artificial Sequence
  Synthetic
ggucauaacaaagcauaaa

SEQ ID NO: 436212 - RNA, 20 nt, Artificial Sequence
  Synthetic
uggucauaacaaagcauaaa

SEQ ID NO: 436213 - RNA, 21 nt, Artificial Sequence
  Synthetic
cuggucauaacaaagcauaaa

SEQ ID NO: 436214 - RNA, 22 nt, Artificial Sequence
  Synthetic
ucuggucauaacaaagcauaaa

SEQ ID NO: 436215 - RNA, 23 nt, Artificial Sequence
  Synthetic
uucuggucauaacaaagcauaaa

SEQ ID NO: 436216 - RNA, 24 nt, Artificial Sequence
  Synthetic
guucuggucauaacaaagcauaaa

SEQ ID NO: 436217 - RNA, 18 nt, Artificial Sequence
  Synthetic
cuccaaaauaagcauaaa

SEQ ID NO: 436218 - RNA, 19 nt, Artificial Sequence
  Synthetic
ccuccaaaauaagcauaaa

SEQ ID NO: 436219 - RNA, 20 nt, Artificial Sequence
  Synthetic
gccuccaaaauaagcauaaa

SEQ ID NO: 436220 - RNA, 21 nt, Artificial Sequence
  Synthetic
agccuccaaaauaagcauaaa

SEQ ID NO: 436221 - RNA, 22 nt, Artificial Sequence
  Synthetic
aagccuccaaaauaagcauaaa

SEQ ID NO: 436222 - RNA, 23 nt, Artificial Sequence
  Synthetic
caagccuccaaaauaagcauaaa

SEQ ID NO: 436223 - RNA, 24 nt, Artificial Sequence
  Synthetic
acaagccuccaaaauaagcauaaa

SEQ ID NO: 436224 - RNA, 18 nt, Artificial Sequence
  Synthetic
aguugaaaacaucauaaa

SEQ ID NO: 436225 - RNA, 19 nt, Artificial Sequence
  Synthetic
aaguugaaaacaucauaaa

SEQ ID NO: 436226 - RNA, 20 nt, Artificial Sequence
  Synthetic
uaaguugaaaacaucauaaa

SEQ ID NO: 436227 - RNA, 21 nt, Artificial Sequence
  Synthetic
auaaguugaaaacaucauaaa

SEQ ID NO: 436228 - RNA, 22 nt, Artificial Sequence
  Synthetic
cauaaguugaaaacaucauaaa

SEQ ID NO: 436229 - RNA, 23 nt, Artificial Sequence
  Synthetic
ucauaaguugaaaacaucauaaa

SEQ ID NO: 436230 - RNA, 24 nt, Artificial Sequence
  Synthetic
aucauaaguugaaaacaucauaaa

SEQ ID NO: 436231 - RNA, 18 nt, Artificial Sequence
  Synthetic
cguugaaaacaucauaaa

SEQ ID NO: 436232 - RNA, 19 nt, Artificial Sequence
  Synthetic
acguugaaaacaucauaaa

SEQ ID NO: 436233 - RNA, 20 nt, Artificial Sequence
  Synthetic
uacguugaaaacaucauaaa

SEQ ID NO: 436234 - RNA, 21 nt, Artificial Sequence
  Synthetic
auacguugaaaacaucauaaa

SEQ ID NO: 436235 - RNA, 22 nt, Artificial Sequence
  Synthetic
cauacguugaaaacaucauaaa

SEQ ID NO: 436236 - RNA, 23 nt, Artificial Sequence
  Synthetic
ucauacguugaaaacaucauaaa

SEQ ID NO: 436237 - RNA, 24 nt, Artificial Sequence
  Synthetic
aucauacguugaaaacaucauaaa

SEQ ID NO: 436238 - RNA, 18 nt, Artificial Sequence
  Synthetic
gaugaccacgaucauaaa

SEQ ID NO: 436239 - RNA, 19 nt, Artificial Sequence
  Synthetic
ggaugaccacgaucauaaa

SEQ ID NO: 436240 - RNA, 20 nt, Artificial Sequence
  Synthetic
aggaugaccacgaucauaaa

SEQ ID NO: 436241 - RNA, 21 nt, Artificial Sequence
  Synthetic
gaggaugaccacgaucauaaa

SEQ ID NO: 436242 - RNA, 22 nt, Artificial Sequence
  Synthetic
ugaggaugaccacgaucauaaa

SEQ ID NO: 436243 - RNA, 23 nt, Artificial Sequence
  Synthetic
augaggaugaccacgaucauaaa

SEQ ID NO: 436244 - RNA, 24 nt, Artificial Sequence
  Synthetic
caugaggaugaccacgaucauaaa

SEQ ID NO: 436245 - RNA, 18 nt, Artificial Sequence
  Synthetic
gucuaauguccucauaaa

SEQ ID NO: 436246 - RNA, 19 nt, Artificial Sequence
  Synthetic
agucuaauguccucauaaa

SEQ ID NO: 436247 - RNA, 20 nt, Artificial Sequence
  Synthetic
aagucuaauguccucauaaa

SEQ ID NO: 436248 - RNA, 21 nt, Artificial Sequence
  Synthetic
uaagucuaauguccucauaaa

SEQ ID NO: 436249 - RNA, 22 nt, Artificial Sequence
  Synthetic
auaagucuaauguccucauaaa

SEQ ID NO: 436250 - RNA, 23 nt, Artificial Sequence
  Synthetic
aauaagucuaauguccucauaaa

SEQ ID NO: 436251 - RNA, 24 nt, Artificial Sequence
  Synthetic
caauaagucuaauguccucauaaa

SEQ ID NO: 436252 - RNA, 18 nt, Artificial Sequence
  Synthetic
agacugugagcucauaaa

SEQ ID NO: 436253 - RNA, 19 nt, Artificial Sequence
  Synthetic
gagacugugagcucauaaa

SEQ ID NO: 436254 - RNA, 20 nt, Artificial Sequence
  Synthetic
ugagacugugagcucauaaa

SEQ ID NO: 436255 - RNA, 21 nt, Artificial Sequence
  Synthetic
augagacugugagcucauaaa

SEQ ID NO: 436256 - RNA, 22 nt, Artificial Sequence
  Synthetic
caugagacugugagcucauaaa

SEQ ID NO: 436257 - RNA, 23 nt, Artificial Sequence
  Synthetic
ucaugagacugugagcucauaaa

SEQ ID NO: 436258 - RNA, 24 nt, Artificial Sequence
  Synthetic
cucaugagacugugagcucauaaa

SEQ ID NO: 436259 - RNA, 18 nt, Artificial Sequence
  Synthetic
auauuauucagucauaaa

SEQ ID NO: 436260 - RNA, 19 nt, Artificial Sequence
  Synthetic
aauauuauucagucauaaa

SEQ ID NO: 436261 - RNA, 20 nt, Artificial Sequence
  Synthetic
gaauauuauucagucauaaa

SEQ ID NO: 436262 - RNA, 21 nt, Artificial Sequence
  Synthetic
ggaauauuauucagucauaaa

SEQ ID NO: 436263 - RNA, 22 nt, Artificial Sequence
  Synthetic
uggaauauuauucagucauaaa

SEQ ID NO: 436264 - RNA, 23 nt, Artificial Sequence
  Synthetic
auggaauauuauucagucauaaa

SEQ ID NO: 436265 - RNA, 24 nt, Artificial Sequence
  Synthetic
aauggaauauuauucagucauaaa

SEQ ID NO: 436266 - RNA, 18 nt, Artificial Sequence
  Synthetic
cuagcuguaggucauaaa

SEQ ID NO: 436267 - RNA, 19 nt, Artificial Sequence
  Synthetic
ucuagcuguaggucauaaa

SEQ ID NO: 436268 - RNA, 20 nt, Artificial Sequence
  Synthetic
aucuagcuguaggucauaaa

SEQ ID NO: 436269 - RNA, 21 nt, Artificial Sequence
  Synthetic
caucuagcuguaggucauaaa

SEQ ID NO: 436270 - RNA, 22 nt, Artificial Sequence
  Synthetic
ccaucuagcuguaggucauaaa

SEQ ID NO: 436271 - RNA, 23 nt, Artificial Sequence
  Synthetic
accaucuagcuguaggucauaaa

SEQ ID NO: 436272 - RNA, 24 nt, Artificial Sequence
  Synthetic
uaccaucuagcuguaggucauaaa

SEQ ID NO: 436273 - RNA, 18 nt, Artificial Sequence
  Synthetic
guacccaguguucauaaa

SEQ ID NO: 436274 - RNA, 19 nt, Artificial Sequence
  Synthetic
gguacccaguguucauaaa

SEQ ID NO: 436275 - RNA, 20 nt, Artificial Sequence
  Synthetic
ugguacccaguguucauaaa

SEQ ID NO: 436276 - RNA, 21 nt, Artificial Sequence
  Synthetic
augguacccaguguucauaaa

SEQ ID NO: 436277 - RNA, 22 nt, Artificial Sequence
  Synthetic
uaugguacccaguguucauaaa

SEQ ID NO: 436278 - RNA, 23 nt, Artificial Sequence
  Synthetic
uuaugguacccaguguucauaaa

SEQ ID NO: 436279 - RNA, 24 nt, Artificial Sequence
  Synthetic
auuaugguacccaguguucauaaa

SEQ ID NO: 436280 - RNA, 18 nt, Artificial Sequence
  Synthetic
gauuucuguguucauaaa

SEQ ID NO: 436281 - RNA, 19 nt, Artificial Sequence
  Synthetic
agauuucuguguucauaaa

SEQ ID NO: 436282 - RNA, 20 nt, Artificial Sequence
  Synthetic
aagauuucuguguucauaaa

SEQ ID NO: 436283 - RNA, 21 nt, Artificial Sequence
  Synthetic
aaagauuucuguguucauaaa

SEQ ID NO: 436284 - RNA, 22 nt, Artificial Sequence
  Synthetic
gaaagauuucuguguucauaaa

SEQ ID NO: 436285 - RNA, 23 nt, Artificial Sequence
  Synthetic
ggaaagauuucuguguucauaaa

SEQ ID NO: 436286 - RNA, 24 nt, Artificial Sequence
  Synthetic
uggaaagauuucuguguucauaaa

SEQ ID NO: 436287 - RNA, 18 nt, Artificial Sequence
  Synthetic
cuucuaauauuucauaaa

SEQ ID NO: 436288 - RNA, 19 nt, Artificial Sequence
  Synthetic
ucuucuaauauuucauaaa

SEQ ID NO: 436289 - RNA, 20 nt, Artificial Sequence
  Synthetic
uucuucuaauauuucauaaa

SEQ ID NO: 436290 - RNA, 21 nt, Artificial Sequence
  Synthetic
uuucuucuaauauuucauaaa

SEQ ID NO: 436291 - RNA, 22 nt, Artificial Sequence
  Synthetic
uuuucuucuaauauuucauaaa

SEQ ID NO: 436292 - RNA, 23 nt, Artificial Sequence
  Synthetic
uuuuucuucuaauauuucauaaa

SEQ ID NO: 436293 - RNA, 24 nt, Artificial Sequence
  Synthetic
auuuuucuucuaauauuucauaaa

SEQ ID NO: 436294 - RNA, 18 nt, Artificial Sequence
  Synthetic
ccaauuaauuuucauaaa

SEQ ID NO: 436295 - RNA, 19 nt, Artificial Sequence
  Synthetic
accaauuaauuuucauaaa

SEQ ID NO: 436296 - RNA, 20 nt, Artificial Sequence
  Synthetic
caccaauuaauuuucauaaa

SEQ ID NO: 436297 - RNA, 21 nt, Artificial Sequence
  Synthetic
ucaccaauuaauuuucauaaa

SEQ ID NO: 436298 - RNA, 22 nt, Artificial Sequence
  Synthetic
uucaccaauuaauuuucauaaa

SEQ ID NO: 436299 - RNA, 23 nt, Artificial Sequence
  Synthetic
uuucaccaauuaauuuucauaaa

SEQ ID NO: 436300 - RNA, 24 nt, Artificial Sequence
  Synthetic
uuuucaccaauuaauuuucauaaa

SEQ ID NO: 436301 - RNA, 18 nt, Artificial Sequence
  Synthetic
acuauuucaaaagauaaa

SEQ ID NO: 436302 - RNA, 19 nt, Artificial Sequence
  Synthetic
aacuauuucaaaagauaaa

SEQ ID NO: 436303 - RNA, 20 nt, Artificial Sequence
  Synthetic
aaacuauuucaaaagauaaa

SEQ ID NO: 436304 - RNA, 21 nt, Artificial Sequence
  Synthetic
gaaacuauuucaaaagauaaa

SEQ ID NO: 436305 - RNA, 22 nt, Artificial Sequence
  Synthetic
ugaaacuauuucaaaagauaaa

SEQ ID NO: 436306 - RNA, 23 nt, Artificial Sequence
  Synthetic
augaaacuauuucaaaagauaaa

SEQ ID NO: 436307 - RNA, 24 nt, Artificial Sequence
  Synthetic
aaugaaacuauuucaaaagauaaa

SEQ ID NO: 436308 - RNA, 18 nt, Artificial Sequence
  Synthetic
auaaucuagaaagauaaa

SEQ ID NO: 436309 - RNA, 19 nt, Artificial Sequence
  Synthetic
aauaaucuagaaagauaaa

SEQ ID NO: 436310 - RNA, 20 nt, Artificial Sequence
  Synthetic
uaauaaucuagaaagauaaa

SEQ ID NO: 436311 - RNA, 21 nt, Artificial Sequence
  Synthetic
uuaauaaucuagaaagauaaa

SEQ ID NO: 436312 - RNA, 22 nt, Artificial Sequence
  Synthetic
auuaauaaucuagaaagauaaa

SEQ ID NO: 436313 - RNA, 23 nt, Artificial Sequence
  Synthetic
aauuaauaaucuagaaagauaaa

SEQ ID NO: 436314 - RNA, 24 nt, Artificial Sequence
  Synthetic
aaauuaauaaucuagaaagauaaa

SEQ ID NO: 436315 - RNA, 18 nt, Artificial Sequence
  Synthetic
gaugguaggaaagauaaa

SEQ ID NO: 436316 - RNA, 19 nt, Artificial Sequence
  Synthetic
agaugguaggaaagauaaa

SEQ ID NO: 436317 - RNA, 20 nt, Artificial Sequence
  Synthetic
cagaugguaggaaagauaaa

SEQ ID NO: 436318 - RNA, 21 nt, Artificial Sequence
  Synthetic
acagaugguaggaaagauaaa

SEQ ID NO: 436319 - RNA, 22 nt, Artificial Sequence
  Synthetic
aacagaugguaggaaagauaaa

SEQ ID NO: 436320 - RNA, 23 nt, Artificial Sequence
  Synthetic
uaacagaugguaggaaagauaaa

SEQ ID NO: 436321 - RNA, 24 nt, Artificial Sequence
  Synthetic
auaacagaugguaggaaagauaaa

SEQ ID NO: 436322 - RNA, 18 nt, Artificial Sequence
  Synthetic
uauuucaauuaagauaaa

SEQ ID NO: 436323 - RNA, 19 nt, Artificial Sequence
  Synthetic
auauuucaauuaagauaaa

SEQ ID NO: 436324 - RNA, 20 nt, Artificial Sequence
  Synthetic
aauauuucaauuaagauaaa

SEQ ID NO: 436325 - RNA, 21 nt, Artificial Sequence
  Synthetic
aaauauuucaauuaagauaaa

SEQ ID NO: 436326 - RNA, 22 nt, Artificial Sequence
  Synthetic
uaaauauuucaauuaagauaaa

SEQ ID NO: 436327 - RNA, 23 nt, Artificial Sequence
  Synthetic
cuaaauauuucaauuaagauaaa

SEQ ID NO: 436328 - RNA, 24 nt, Artificial Sequence
  Synthetic
gcuaaauauuucaauuaagauaaa

SEQ ID NO: 436329 - RNA, 18 nt, Artificial Sequence
  Synthetic
uaaucuggagcagauaaa

SEQ ID NO: 436330 - RNA, 19 nt, Artificial Sequence
  Synthetic
guaaucuggagcagauaaa

SEQ ID NO: 436331 - RNA, 20 nt, Artificial Sequence
  Synthetic
uguaaucuggagcagauaaa

SEQ ID NO: 436332 - RNA, 21 nt, Artificial Sequence
  Synthetic
guguaaucuggagcagauaaa

SEQ ID NO: 436333 - RNA, 22 nt, Artificial Sequence
  Synthetic
gguguaaucuggagcagauaaa

SEQ ID NO: 436334 - RNA, 23 nt, Artificial Sequence
  Synthetic
ggguguaaucuggagcagauaaa

SEQ ID NO: 436335 - RNA, 24 nt, Artificial Sequence
  Synthetic
uggguguaaucuggagcagauaaa

SEQ ID NO: 436336 - RNA, 18 nt, Artificial Sequence
  Synthetic
uucaaagggagagauaaa

SEQ ID NO: 436337 - RNA, 19 nt, Artificial Sequence
  Synthetic
uuucaaagggagagauaaa

SEQ ID NO: 436338 - RNA, 20 nt, Artificial Sequence
  Synthetic
auuucaaagggagagauaaa

SEQ ID NO: 436339 - RNA, 21 nt, Artificial Sequence
  Synthetic
gauuucaaagggagagauaaa

SEQ ID NO: 436340 - RNA, 22 nt, Artificial Sequence
  Synthetic
agauuucaaagggagagauaaa

SEQ ID NO: 436341 - RNA, 23 nt, Artificial Sequence
  Synthetic
uagauuucaaagggagagauaaa

SEQ ID NO: 436342 - RNA, 24 nt, Artificial Sequence
  Synthetic
auagauuucaaagggagagauaaa

SEQ ID NO: 436343 - RNA, 18 nt, Artificial Sequence
  Synthetic
ggcagagguagagauaaa

SEQ ID NO: 436344 - RNA, 19 nt, Artificial Sequence
  Synthetic
aggcagagguagagauaaa

SEQ ID NO: 436345 - RNA, 20 nt, Artificial Sequence
  Synthetic
gaggcagagguagagauaaa

SEQ ID NO: 436346 - RNA, 21 nt, Artificial Sequence
  Synthetic
ugaggcagagguagagauaaa

SEQ ID NO: 436347 - RNA, 22 nt, Artificial Sequence
  Synthetic
uugaggcagagguagagauaaa

SEQ ID NO: 436348 - RNA, 23 nt, Artificial Sequence
  Synthetic
auugaggcagagguagagauaaa

SEQ ID NO: 436349 - RNA, 24 nt, Artificial Sequence
  Synthetic
cauugaggcagagguagagauaaa

SEQ ID NO: 436350 - RNA, 18 nt, Artificial Sequence
  Synthetic
gaagaaauuggagauaaa

SEQ ID NO: 436351 - RNA, 19 nt, Artificial Sequence
  Synthetic
ggaagaaauuggagauaaa

SEQ ID NO: 436352 - RNA, 20 nt, Artificial Sequence
  Synthetic
aggaagaaauuggagauaaa

SEQ ID NO: 436353 - RNA, 21 nt, Artificial Sequence
  Synthetic
gaggaagaaauuggagauaaa

SEQ ID NO: 436354 - RNA, 22 nt, Artificial Sequence
  Synthetic
ugaggaagaaauuggagauaaa

SEQ ID NO: 436355 - RNA, 23 nt, Artificial Sequence
  Synthetic
cugaggaagaaauuggagauaaa

SEQ ID NO: 436356 - RNA, 24 nt, Artificial Sequence
  Synthetic
ucugaggaagaaauuggagauaaa

SEQ ID NO: 436357 - RNA, 18 nt, Artificial Sequence
  Synthetic
gaagaguggugagauaaa

SEQ ID NO: 436358 - RNA, 19 nt, Artificial Sequence
  Synthetic
agaagaguggugagauaaa

SEQ ID NO: 436359 - RNA, 20 nt, Artificial Sequence
  Synthetic
uagaagaguggugagauaaa

SEQ ID NO: 436360 - RNA, 21 nt, Artificial Sequence
  Synthetic
uuagaagaguggugagauaaa

SEQ ID NO: 436361 - RNA, 22 nt, Artificial Sequence
  Synthetic
auuagaagaguggugagauaaa

SEQ ID NO: 436362 - RNA, 23 nt, Artificial Sequence
  Synthetic
aauuagaagaguggugagauaaa

SEQ ID NO: 436363 - RNA, 24 nt, Artificial Sequence
  Synthetic
aaauuagaagaguggugagauaaa

SEQ ID NO: 436364 - RNA, 18 nt, Artificial Sequence
  Synthetic
gccuagaaauacgauaaa

SEQ ID NO: 436365 - RNA, 19 nt, Artificial Sequence
  Synthetic
ggccuagaaauacgauaaa

SEQ ID NO: 436366 - RNA, 20 nt, Artificial Sequence
  Synthetic
aggccuagaaauacgauaaa

SEQ ID NO: 436367 - RNA, 21 nt, Artificial Sequence
  Synthetic
aaggccuagaaauacgauaaa

SEQ ID NO: 436368 - RNA, 22 nt, Artificial Sequence
  Synthetic
gaaggccuagaaauacgauaaa

SEQ ID NO: 436369 - RNA, 23 nt, Artificial Sequence
  Synthetic
ggaaggccuagaaauacgauaaa

SEQ ID NO: 436370 - RNA, 24 nt, Artificial Sequence
  Synthetic
gggaaggccuagaaauacgauaaa

SEQ ID NO: 436371 - RNA, 18 nt, Artificial Sequence
  Synthetic
ccuacucuaaaggauaaa

SEQ ID NO: 436372 - RNA, 19 nt, Artificial Sequence
  Synthetic
uccuacucuaaaggauaaa

SEQ ID NO: 436373 - RNA, 20 nt, Artificial Sequence
  Synthetic
uuccuacucuaaaggauaaa

SEQ ID NO: 436374 - RNA, 21 nt, Artificial Sequence
  Synthetic
auuccuacucuaaaggauaaa

SEQ ID NO: 436375 - RNA, 22 nt, Artificial Sequence
  Synthetic
cauuccuacucuaaaggauaaa

SEQ ID NO: 436376 - RNA, 23 nt, Artificial Sequence
  Synthetic
acauuccuacucuaaaggauaaa

SEQ ID NO: 436377 - RNA, 24 nt, Artificial Sequence
  Synthetic
uacauuccuacucuaaaggauaaa

SEQ ID NO: 436378 - RNA, 18 nt, Artificial Sequence
  Synthetic
gaagaaaugaaggauaaa

SEQ ID NO: 436379 - RNA, 19 nt, Artificial Sequence
  Synthetic
ggaagaaaugaaggauaaa

SEQ ID NO: 436380 - RNA, 20 nt, Artificial Sequence
  Synthetic
aggaagaaaugaaggauaaa

SEQ ID NO: 436381 - RNA, 21 nt, Artificial Sequence
  Synthetic
aaggaagaaaugaaggauaaa

SEQ ID NO: 436382 - RNA, 22 nt, Artificial Sequence
  Synthetic
gaaggaagaaaugaaggauaaa

SEQ ID NO: 436383 - RNA, 23 nt, Artificial Sequence
  Synthetic
ggaaggaagaaaugaaggauaaa

SEQ ID NO: 436384 - RNA, 24 nt, Artificial Sequence
  Synthetic
gggaaggaagaaaugaaggauaaa

SEQ ID NO: 436385 - RNA, 18 nt, Artificial Sequence
  Synthetic
ugucuuuaacaggauaaa

SEQ ID NO: 436386 - RNA, 19 nt, Artificial Sequence
  Synthetic
gugucuuuaacaggauaaa

SEQ ID NO: 436387 - RNA, 20 nt, Artificial Sequence
  Synthetic
ugugucuuuaacaggauaaa

SEQ ID NO: 436388 - RNA, 21 nt, Artificial Sequence
  Synthetic
augugucuuuaacaggauaaa

SEQ ID NO: 436389 - RNA, 22 nt, Artificial Sequence
  Synthetic
uaugugucuuuaacaggauaaa

SEQ ID NO: 436390 - RNA, 23 nt, Artificial Sequence
  Synthetic
guaugugucuuuaacaggauaaa

SEQ ID NO: 436391 - RNA, 24 nt, Artificial Sequence
  Synthetic
aguaugugucuuuaacaggauaaa

SEQ ID NO: 436392 - RNA, 18 nt, Artificial Sequence
  Synthetic
ccucagaaugaggauaaa

SEQ ID NO: 436393 - RNA, 19 nt, Artificial Sequence
  Synthetic
cccucagaaugaggauaaa

SEQ ID NO: 436394 - RNA, 20 nt, Artificial Sequence
  Synthetic
ccccucagaaugaggauaaa

SEQ ID NO: 436395 - RNA, 21 nt, Artificial Sequence
  Synthetic
gccccucagaaugaggauaaa

SEQ ID NO: 436396 - RNA, 22 nt, Artificial Sequence
  Synthetic
ugccccucagaaugaggauaaa

SEQ ID NO: 436397 - RNA, 23 nt, Artificial Sequence
  Synthetic
uugccccucagaaugaggauaaa

SEQ ID NO: 436398 - RNA, 24 nt, Artificial Sequence
  Synthetic
auugccccucagaaugaggauaaa

SEQ ID NO: 436399 - RNA, 18 nt, Artificial Sequence
  Synthetic
aagaauaacagggauaaa

SEQ ID NO: 436400 - RNA, 19 nt, Artificial Sequence
  Synthetic
caagaauaacagggauaaa

SEQ ID NO: 436401 - RNA, 20 nt, Artificial Sequence
  Synthetic
acaagaauaacagggauaaa

SEQ ID NO: 436402 - RNA, 21 nt, Artificial Sequence
  Synthetic
cacaagaauaacagggauaaa

SEQ ID NO: 436403 - RNA, 22 nt, Artificial Sequence
  Synthetic
acacaagaauaacagggauaaa

SEQ ID NO: 436404 - RNA, 23 nt, Artificial Sequence
  Synthetic
aacacaagaauaacagggauaaa

SEQ ID NO: 436405 - RNA, 24 nt, Artificial Sequence
  Synthetic
uaacacaagaauaacagggauaaa

SEQ ID NO: 436406 - RNA, 18 nt, Artificial Sequence
  Synthetic
ggugacaauagggauaaa

SEQ ID NO: 436407 - RNA, 19 nt, Artificial Sequence
  Synthetic
aggugacaauagggauaaa

SEQ ID NO: 436408 - RNA, 20 nt, Artificial Sequence
  Synthetic
gaggugacaauagggauaaa

SEQ ID NO: 436409 - RNA, 21 nt, Artificial Sequence
  Synthetic
ugaggugacaauagggauaaa

SEQ ID NO: 436410 - RNA, 22 nt, Artificial Sequence
  Synthetic
augaggugacaauagggauaaa

SEQ ID NO: 436411 - RNA, 23 nt, Artificial Sequence
  Synthetic
gaugaggugacaauagggauaaa

SEQ ID NO: 436412 - RNA, 24 nt, Artificial Sequence
  Synthetic
ggaugaggugacaauagggauaaa

SEQ ID NO: 436413 - RNA, 18 nt, Artificial Sequence
  Synthetic
auuucugcaggggauaaa

SEQ ID NO: 436414 - RNA, 19 nt, Artificial Sequence
  Synthetic
aauuucugcaggggauaaa

SEQ ID NO: 436415 - RNA, 20 nt, Artificial Sequence
  Synthetic
caauuucugcaggggauaaa

SEQ ID NO: 436416 - RNA, 21 nt, Artificial Sequence
  Synthetic
ucaauuucugcaggggauaaa

SEQ ID NO: 436417 - RNA, 22 nt, Artificial Sequence
  Synthetic
cucaauuucugcaggggauaaa

SEQ ID NO: 436418 - RNA, 23 nt, Artificial Sequence
  Synthetic
ccucaauuucugcaggggauaaa

SEQ ID NO: 436419 - RNA, 24 nt, Artificial Sequence
  Synthetic
gccucaauuucugcaggggauaaa

SEQ ID NO: 436420 - RNA, 18 nt, Artificial Sequence
  Synthetic
acuccagccauggauaaa

SEQ ID NO: 436421 - RNA, 19 nt, Artificial Sequence
  Synthetic
cacuccagccauggauaaa

SEQ ID NO: 436422 - RNA, 20 nt, Artificial Sequence
  Synthetic
ccacuccagccauggauaaa

SEQ ID NO: 436423 - RNA, 21 nt, Artificial Sequence
  Synthetic
gccacuccagccauggauaaa

SEQ ID NO: 436424 - RNA, 22 nt, Artificial Sequence
  Synthetic
agccacuccagccauggauaaa

SEQ ID NO: 436425 - RNA, 23 nt, Artificial Sequence
  Synthetic
cagccacuccagccauggauaaa

SEQ ID NO: 436426 - RNA, 24 nt, Artificial Sequence
  Synthetic
ccagccacuccagccauggauaaa

SEQ ID NO: 436427 - RNA, 18 nt, Artificial Sequence
  Synthetic
accuuuuuuuuggauaaa

SEQ ID NO: 436428 - RNA, 19 nt, Artificial Sequence
  Synthetic
aaccuuuuuuuuggauaaa

SEQ ID NO: 436429 - RNA, 20 nt, Artificial Sequence
  Synthetic
aaaccuuuuuuuuggauaaa

SEQ ID NO: 436430 - RNA, 21 nt, Artificial Sequence
  Synthetic
aaaaccuuuuuuuuggauaaa

SEQ ID NO: 436431 - RNA, 22 nt, Artificial Sequence
  Synthetic
aaaaaccuuuuuuuuggauaaa

SEQ ID NO: 436432 - RNA, 23 nt, Artificial Sequence
  Synthetic
aaaaaaccuuuuuuuuggauaaa

SEQ ID NO: 436433 - RNA, 24 nt, Artificial Sequence
  Synthetic
aaaaaaaccuuuuuuuuggauaaa

SEQ ID NO: 436434 - RNA, 18 nt, Artificial Sequence
  Synthetic
aauaaacagaaugauaaa

SEQ ID NO: 436435 - RNA, 19 nt, Artificial Sequence
  Synthetic
aaauaaacagaaugauaaa

SEQ ID NO: 436436 - RNA, 20 nt, Artificial Sequence
  Synthetic
gaaauaaacagaaugauaaa

SEQ ID NO: 436437 - RNA, 21 nt, Artificial Sequence
  Synthetic
ugaaauaaacagaaugauaaa

SEQ ID NO: 436438 - RNA, 22 nt, Artificial Sequence
  Synthetic
gugaaauaaacagaaugauaaa

SEQ ID NO: 436439 - RNA, 23 nt, Artificial Sequence
  Synthetic
ugugaaauaaacagaaugauaaa

SEQ ID NO: 436440 - RNA, 24 nt, Artificial Sequence
  Synthetic
uugugaaauaaacagaaugauaaa

SEQ ID NO: 436441 - RNA, 18 nt, Artificial Sequence
  Synthetic
augcauuuuuaugauaaa

SEQ ID NO: 436442 - RNA, 19 nt, Artificial Sequence
  Synthetic
aaugcauuuuuaugauaaa

SEQ ID NO: 436443 - RNA, 20 nt, Artificial Sequence
  Synthetic
aaaugcauuuuuaugauaaa

SEQ ID NO: 436444 - RNA, 21 nt, Artificial Sequence
  Synthetic
aaaaugcauuuuuaugauaaa

SEQ ID NO: 436445 - RNA, 22 nt, Artificial Sequence
  Synthetic
caaaaugcauuuuuaugauaaa

SEQ ID NO: 436446 - RNA, 23 nt, Artificial Sequence
  Synthetic
acaaaaugcauuuuuaugauaaa

SEQ ID NO: 436447 - RNA, 24 nt, Artificial Sequence
  Synthetic
aacaaaaugcauuuuuaugauaaa

SEQ ID NO: 436448 - RNA, 18 nt, Artificial Sequence
  Synthetic
guacaugaaacugauaaa

SEQ ID NO: 436449 - RNA, 19 nt, Artificial Sequence
  Synthetic
gguacaugaaacugauaaa

SEQ ID NO: 436450 - RNA, 20 nt, Artificial Sequence
  Synthetic
agguacaugaaacugauaaa

SEQ ID NO: 436451 - RNA, 21 nt, Artificial Sequence
  Synthetic
uagguacaugaaacugauaaa

SEQ ID NO: 436452 - RNA, 22 nt, Artificial Sequence
  Synthetic
guagguacaugaaacugauaaa

SEQ ID NO: 436453 - RNA, 23 nt, Artificial Sequence
  Synthetic
aguagguacaugaaacugauaaa

SEQ ID NO: 436454 - RNA, 24 nt, Artificial Sequence
  Synthetic
aaguagguacaugaaacugauaaa

SEQ ID NO: 436455 - RNA, 18 nt, Artificial Sequence
  Synthetic
gaaauauuuguugauaaa

SEQ ID NO: 436456 - RNA, 19 nt, Artificial Sequence
  Synthetic
agaaauauuuguugauaaa

SEQ ID NO: 436457 - RNA, 20 nt, Artificial Sequence
  Synthetic
aagaaauauuuguugauaaa

SEQ ID NO: 436458 - RNA, 21 nt, Artificial Sequence
  Synthetic
uaagaaauauuuguugauaaa

SEQ ID NO: 436459 - RNA, 22 nt, Artificial Sequence
  Synthetic
uuaagaaauauuuguugauaaa

SEQ ID NO: 436460 - RNA, 23 nt, Artificial Sequence
  Synthetic
cuuaagaaauauuuguugauaaa

SEQ ID NO: 436461 - RNA, 24 nt, Artificial Sequence
  Synthetic
gcuuaagaaauauuuguugauaaa

SEQ ID NO: 436462 - RNA, 18 nt, Artificial Sequence
  Synthetic
caagccaaaaaauauaaa

SEQ ID NO: 436463 - RNA, 19 nt, Artificial Sequence
  Synthetic
ccaagccaaaaaauauaaa

SEQ ID NO: 436464 - RNA, 20 nt, Artificial Sequence
  Synthetic
accaagccaaaaaauauaaa

SEQ ID NO: 436465 - RNA, 21 nt, Artificial Sequence
  Synthetic
aaccaagccaaaaaauauaaa

SEQ ID NO: 436466 - RNA, 22 nt, Artificial Sequence
  Synthetic
gaaccaagccaaaaaauauaaa

SEQ ID NO: 436467 - RNA, 23 nt, Artificial Sequence
  Synthetic
ggaaccaagccaaaaaauauaaa

SEQ ID NO: 436468 - RNA, 24 nt, Artificial Sequence
  Synthetic
uggaaccaagccaaaaaauauaaa

SEQ ID NO: 436469 - RNA, 18 nt, Artificial Sequence
  Synthetic
uugauaauaaaauauaaa

SEQ ID NO: 436470 - RNA, 19 nt, Artificial Sequence
  Synthetic
uuugauaauaaaauauaaa

SEQ ID NO: 436471 - RNA, 20 nt, Artificial Sequence
  Synthetic
auuugauaauaaaauauaaa

SEQ ID NO: 436472 - RNA, 21 nt, Artificial Sequence
  Synthetic
aauuugauaauaaaauauaaa

SEQ ID NO: 436473 - RNA, 22 nt, Artificial Sequence
  Synthetic
uaauuugauaauaaaauauaaa

SEQ ID NO: 436474 - RNA, 23 nt, Artificial Sequence
  Synthetic
cuaauuugauaauaaaauauaaa

SEQ ID NO: 436475 - RNA, 24 nt, Artificial Sequence
  Synthetic
acuaauuugauaauaaaauauaaa

SEQ ID NO: 436476 - RNA, 18 nt, Artificial Sequence
  Synthetic
cauucuuuuaaauauaaa

SEQ ID NO: 436477 - RNA, 19 nt, Artificial Sequence
  Synthetic
acauucuuuuaaauauaaa

SEQ ID NO: 436478 - RNA, 20 nt, Artificial Sequence
  Synthetic
cacauucuuuuaaauauaaa

SEQ ID NO: 436479 - RNA, 21 nt, Artificial Sequence
  Synthetic
gcacauucuuuuaaauauaaa

SEQ ID NO: 436480 - RNA, 22 nt, Artificial Sequence
  Synthetic
agcacauucuuuuaaauauaaa

SEQ ID NO: 436481 - RNA, 23 nt, Artificial Sequence
  Synthetic
gagcacauucuuuuaaauauaaa

SEQ ID NO: 436482 - RNA, 24 nt, Artificial Sequence
  Synthetic
agagcacauucuuuuaaauauaaa

SEQ ID NO: 436483 - RNA, 18 nt, Artificial Sequence
  Synthetic
guuaggauacaauauaaa

SEQ ID NO: 436484 - RNA, 19 nt, Artificial Sequence
  Synthetic
aguuaggauacaauauaaa

SEQ ID NO: 436485 - RNA, 20 nt, Artificial Sequence
  Synthetic
gaguuaggauacaauauaaa

SEQ ID NO: 436486 - RNA, 21 nt, Artificial Sequence
  Synthetic
ugaguuaggauacaauauaaa

SEQ ID NO: 436487 - RNA, 22 nt, Artificial Sequence
  Synthetic
gugaguuaggauacaauauaaa

SEQ ID NO: 436488 - RNA, 23 nt, Artificial Sequence
  Synthetic
agugaguuaggauacaauauaaa

SEQ ID NO: 436489 - RNA, 24 nt, Artificial Sequence
  Synthetic
cagugaguuaggauacaauauaaa

SEQ ID NO: 436490 - RNA, 18 nt, Artificial Sequence
  Synthetic
augaauuuagaauauaaa

SEQ ID NO: 436491 - RNA, 19 nt, Artificial Sequence
  Synthetic
uaugaauuuagaauauaaa

SEQ ID NO: 436492 - RNA, 20 nt, Artificial Sequence
  Synthetic
auaugaauuuagaauauaaa

SEQ ID NO: 436493 - RNA, 21 nt, Artificial Sequence
  Synthetic
uauaugaauuuagaauauaaa

SEQ ID NO: 436494 - RNA, 22 nt, Artificial Sequence
  Synthetic
guauaugaauuuagaauauaaa

SEQ ID NO: 436495 - RNA, 23 nt, Artificial Sequence
  Synthetic
gguauaugaauuuagaauauaaa

SEQ ID NO: 436496 - RNA, 24 nt, Artificial Sequence
  Synthetic
agguauaugaauuuagaauauaaa

SEQ ID NO: 436497 - RNA, 18 nt, Artificial Sequence
  Synthetic
agauaagggacauauaaa

SEQ ID NO: 436498 - RNA, 19 nt, Artificial Sequence
  Synthetic
gagauaagggacauauaaa

SEQ ID NO: 436499 - RNA, 20 nt, Artificial Sequence
  Synthetic
ggagauaagggacauauaaa

SEQ ID NO: 436500 - RNA, 21 nt, Artificial Sequence
  Synthetic
aggagauaagggacauauaaa

SEQ ID NO: 436501 - RNA, 22 nt, Artificial Sequence
  Synthetic
gaggagauaagggacauauaaa

SEQ ID NO: 436502 - RNA, 23 nt, Artificial Sequence
  Synthetic
agaggagauaagggacauauaaa

SEQ ID NO: 436503 - RNA, 24 nt, Artificial Sequence
  Synthetic
cagaggagauaagggacauauaaa

SEQ ID NO: 436504 - RNA, 18 nt, Artificial Sequence
  Synthetic
agccuuccuacauauaaa

SEQ ID NO: 436505 - RNA, 19 nt, Artificial Sequence
  Synthetic
cagccuuccuacauauaaa

SEQ ID NO: 436506 - RNA, 20 nt, Artificial Sequence
  Synthetic
ucagccuuccuacauauaaa

SEQ ID NO: 436507 - RNA, 21 nt, Artificial Sequence
  Synthetic
uucagccuuccuacauauaaa

SEQ ID NO: 436508 - RNA, 22 nt, Artificial Sequence
  Synthetic
uuucagccuuccuacauauaaa

SEQ ID NO: 436509 - RNA, 23 nt, Artificial Sequence
  Synthetic
uuuucagccuuccuacauauaaa

SEQ ID NO: 436510 - RNA, 24 nt, Artificial Sequence
  Synthetic
uuuuucagccuuccuacauauaaa

SEQ ID NO: 436511 - RNA, 18 nt, Artificial Sequence
  Synthetic
auagaagaaccauauaaa

SEQ ID NO: 436512 - RNA, 19 nt, Artificial Sequence
  Synthetic
cauagaagaaccauauaaa

SEQ ID NO: 436513 - RNA, 20 nt, Artificial Sequence
  Synthetic
acauagaagaaccauauaaa

SEQ ID NO: 436514 - RNA, 21 nt, Artificial Sequence
  Synthetic
aacauagaagaaccauauaaa

SEQ ID NO: 436515 - RNA, 22 nt, Artificial Sequence
  Synthetic
caacauagaagaaccauauaaa

SEQ ID NO: 436516 - RNA, 23 nt, Artificial Sequence
  Synthetic
ucaacauagaagaaccauauaaa

SEQ ID NO: 436517 - RNA, 24 nt, Artificial Sequence
  Synthetic
uucaacauagaagaaccauauaaa

SEQ ID NO: 436518 - RNA, 18 nt, Artificial Sequence
  Synthetic
ugacuugacucauauaaa

SEQ ID NO: 436519 - RNA, 19 nt, Artificial Sequence
  Synthetic
uugacuugacucauauaaa

SEQ ID NO: 436520 - RNA, 20 nt, Artificial Sequence
  Synthetic
guugacuugacucauauaaa

SEQ ID NO: 436521 - RNA, 21 nt, Artificial Sequence
  Synthetic
gguugacuugacucauauaaa

SEQ ID NO: 436522 - RNA, 22 nt, Artificial Sequence
  Synthetic
agguugacuugacucauauaaa

SEQ ID NO: 436523 - RNA, 23 nt, Artificial Sequence
  Synthetic
aagguugacuugacucauauaaa

SEQ ID NO: 436524 - RNA, 24 nt, Artificial Sequence
  Synthetic
uaagguugacuugacucauauaaa

SEQ ID NO: 436525 - RNA, 18 nt, Artificial Sequence
  Synthetic
gcuugguguagauauaaa

SEQ ID NO: 436526 - RNA, 19 nt, Artificial Sequence
  Synthetic
ggcuugguguagauauaaa

SEQ ID NO: 436527 - RNA, 20 nt, Artificial Sequence
  Synthetic
aggcuugguguagauauaaa

SEQ ID NO: 436528 - RNA, 21 nt, Artificial Sequence
  Synthetic
caggcuugguguagauauaaa

SEQ ID NO: 436529 - RNA, 22 nt, Artificial Sequence
  Synthetic
gcaggcuugguguagauauaaa

SEQ ID NO: 436530 - RNA, 23 nt, Artificial Sequence
  Synthetic
ugcaggcuugguguagauauaaa

SEQ ID NO: 436531 - RNA, 24 nt, Artificial Sequence
  Synthetic
gugcaggcuugguguagauauaaa

SEQ ID NO: 436532 - RNA, 18 nt, Artificial Sequence
  Synthetic
uuauagauuagauauaaa

SEQ ID NO: 436533 - RNA, 19 nt, Artificial Sequence
  Synthetic
cuuauagauuagauauaaa

SEQ ID NO: 436534 - RNA, 20 nt, Artificial Sequence
  Synthetic
gcuuauagauuagauauaaa

SEQ ID NO: 436535 - RNA, 21 nt, Artificial Sequence
  Synthetic
ugcuuauagauuagauauaaa

SEQ ID NO: 436536 - RNA, 22 nt, Artificial Sequence
  Synthetic
uugcuuauagauuagauauaaa

SEQ ID NO: 436537 - RNA, 23 nt, Artificial Sequence
  Synthetic
cuugcuuauagauuagauauaaa

SEQ ID NO: 436538 - RNA, 24 nt, Artificial Sequence
  Synthetic
acuugcuuauagauuagauauaaa

SEQ ID NO: 436539 - RNA, 18 nt, Artificial Sequence
  Synthetic
aacacggauggauauaaa

SEQ ID NO: 436540 - RNA, 19 nt, Artificial Sequence
  Synthetic
aaacacggauggauauaaa

SEQ ID NO: 436541 - RNA, 20 nt, Artificial Sequence
  Synthetic
aaaacacggauggauauaaa

SEQ ID NO: 436542 - RNA, 21 nt, Artificial Sequence
  Synthetic
uaaaacacggauggauauaaa

SEQ ID NO: 436543 - RNA, 22 nt, Artificial Sequence
  Synthetic
uuaaaacacggauggauauaaa

SEQ ID NO: 436544 - RNA, 23 nt, Artificial Sequence
  Synthetic
auuaaaacacggauggauauaaa

SEQ ID NO: 436545 - RNA, 24 nt, Artificial Sequence
  Synthetic
uauuaaaacacggauggauauaaa

SEQ ID NO: 436546 - RNA, 18 nt, Artificial Sequence
  Synthetic
uuggacugaauauauaaa

SEQ ID NO: 436547 - RNA, 19 nt, Artificial Sequence
  Synthetic
uuuggacugaauauauaaa

SEQ ID NO: 436548 - RNA, 20 nt, Artificial Sequence
  Synthetic
guuuggacugaauauauaaa

SEQ ID NO: 436549 - RNA, 21 nt, Artificial Sequence
  Synthetic
uguuuggacugaauauauaaa

SEQ ID NO: 436550 - RNA, 22 nt, Artificial Sequence
  Synthetic
auguuuggacugaauauauaaa

SEQ ID NO: 436551 - RNA, 23 nt, Artificial Sequence
  Synthetic
gauguuuggacugaauauauaaa

SEQ ID NO: 436552 - RNA, 24 nt, Artificial Sequence
  Synthetic
agauguuuggacugaauauauaaa

SEQ ID NO: 436553 - RNA, 18 nt, Artificial Sequence
  Synthetic
agcacaaauauauauaaa

SEQ ID NO: 436554 - RNA, 19 nt, Artificial Sequence
  Synthetic
gagcacaaauauauauaaa

SEQ ID NO: 436555 - RNA, 20 nt, Artificial Sequence
  Synthetic
agagcacaaauauauauaaa

SEQ ID NO: 436556 - RNA, 21 nt, Artificial Sequence
  Synthetic
uagagcacaaauauauauaaa

SEQ ID NO: 436557 - RNA, 22 nt, Artificial Sequence
  Synthetic
uuagagcacaaauauauauaaa

SEQ ID NO: 436558 - RNA, 23 nt, Artificial Sequence
  Synthetic
auuagagcacaaauauauauaaa

SEQ ID NO: 436559 - RNA, 24 nt, Artificial Sequence
  Synthetic
aauuagagcacaaauauauauaaa

SEQ ID NO: 436560 - RNA, 18 nt, Artificial Sequence
  Synthetic
cagcuauguauauauaaa

SEQ ID NO: 436561 - RNA, 19 nt, Artificial Sequence
  Synthetic
gcagcuauguauauauaaa

SEQ ID NO: 436562 - RNA, 20 nt, Artificial Sequence
  Synthetic
ggcagcuauguauauauaaa

SEQ ID NO: 436563 - RNA, 21 nt, Artificial Sequence
  Synthetic
aggcagcuauguauauauaaa

SEQ ID NO: 436564 - RNA, 22 nt, Artificial Sequence
  Synthetic
aaggcagcuauguauauauaaa

SEQ ID NO: 436565 - RNA, 23 nt, Artificial Sequence
  Synthetic
gaaggcagcuauguauauauaaa

SEQ ID NO: 436566 - RNA, 24 nt, Artificial Sequence
  Synthetic
ggaaggcagcuauguauauauaaa

SEQ ID NO: 436567 - RNA, 18 nt, Artificial Sequence
  Synthetic
caaccuugcuuauauaaa

SEQ ID NO: 436568 - RNA, 19 nt, Artificial Sequence
  Synthetic
acaaccuugcuuauauaaa

SEQ ID NO: 436569 - RNA, 20 nt, Artificial Sequence
  Synthetic
uacaaccuugcuuauauaaa

SEQ ID NO: 436570 - RNA, 21 nt, Artificial Sequence
  Synthetic
uuacaaccuugcuuauauaaa

SEQ ID NO: 436571 - RNA, 22 nt, Artificial Sequence
  Synthetic
cuuacaaccuugcuuauauaaa

SEQ ID NO: 436572 - RNA, 23 nt, Artificial Sequence
  Synthetic
ccuuacaaccuugcuuauauaaa

SEQ ID NO: 436573 - RNA, 24 nt, Artificial Sequence
  Synthetic
uccuuacaaccuugcuuauauaaa

SEQ ID NO: 436574 - RNA, 18 nt, Artificial Sequence
  Synthetic
auaaaaacaaacuauaaa

SEQ ID NO: 436575 - RNA, 19 nt, Artificial Sequence
  Synthetic
aauaaaaacaaacuauaaa

SEQ ID NO: 436576 - RNA, 20 nt, Artificial Sequence
  Synthetic
gaauaaaaacaaacuauaaa

SEQ ID NO: 436577 - RNA, 21 nt, Artificial Sequence
  Synthetic
agaauaaaaacaaacuauaaa

SEQ ID NO: 436578 - RNA, 22 nt, Artificial Sequence
  Synthetic
cagaauaaaaacaaacuauaaa

SEQ ID NO: 436579 - RNA, 23 nt, Artificial Sequence
  Synthetic
ccagaauaaaaacaaacuauaaa

SEQ ID NO: 436580 - RNA, 24 nt, Artificial Sequence
  Synthetic
uccagaauaaaaacaaacuauaaa

SEQ ID NO: 436581 - RNA, 18 nt, Artificial Sequence
  Synthetic
agugcuuugaacuauaaa

SEQ ID NO: 436582 - RNA, 19 nt, Artificial Sequence
  Synthetic
aagugcuuugaacuauaaa

SEQ ID NO: 436583 - RNA, 20 nt, Artificial Sequence
  Synthetic
uaagugcuuugaacuauaaa

SEQ ID NO: 436584 - RNA, 21 nt, Artificial Sequence
  Synthetic
uuaagugcuuugaacuauaaa

SEQ ID NO: 436585 - RNA, 22 nt, Artificial Sequence
  Synthetic
cuuaagugcuuugaacuauaaa

SEQ ID NO: 436586 - RNA, 23 nt, Artificial Sequence
  Synthetic
ucuuaagugcuuugaacuauaaa

SEQ ID NO: 436587 - RNA, 24 nt, Artificial Sequence
  Synthetic
cucuuaagugcuuugaacuauaaa

SEQ ID NO: 436588 - RNA, 18 nt, Artificial Sequence
  Synthetic
aguuaucuauccuauaaa

SEQ ID NO: 436589 - RNA, 19 nt, Artificial Sequence
  Synthetic
aaguuaucuauccuauaaa

SEQ ID NO: 436590 - RNA, 20 nt, Artificial Sequence
  Synthetic
aaaguuaucuauccuauaaa

SEQ ID NO: 436591 - RNA, 21 nt, Artificial Sequence
  Synthetic
aaaaguuaucuauccuauaaa

SEQ ID NO: 436592 - RNA, 22 nt, Artificial Sequence
  Synthetic
caaaaguuaucuauccuauaaa

SEQ ID NO: 436593 - RNA, 23 nt, Artificial Sequence
  Synthetic
gcaaaaguuaucuauccuauaaa

SEQ ID NO: 436594 - RNA, 24 nt, Artificial Sequence
  Synthetic
agcaaaaguuaucuauccuauaaa

SEQ ID NO: 436595 - RNA, 18 nt, Artificial Sequence
  Synthetic
aguuuauucagcuauaaa

SEQ ID NO: 436596 - RNA, 19 nt, Artificial Sequence
  Synthetic
caguuuauucagcuauaaa

SEQ ID NO: 436597 - RNA, 20 nt, Artificial Sequence
  Synthetic
ucaguuuauucagcuauaaa

SEQ ID NO: 436598 - RNA, 21 nt, Artificial Sequence
  Synthetic
cucaguuuauucagcuauaaa

SEQ ID NO: 436599 - RNA, 22 nt, Artificial Sequence
  Synthetic
gcucaguuuauucagcuauaaa

SEQ ID NO: 436600 - RNA, 23 nt, Artificial Sequence
  Synthetic
ggcucaguuuauucagcuauaaa

SEQ ID NO: 436601 - RNA, 24 nt, Artificial Sequence
  Synthetic
aggcucaguuuauucagcuauaaa

SEQ ID NO: 436602 - RNA, 18 nt, Artificial Sequence
  Synthetic
gguuaucucaucuauaaa

SEQ ID NO: 436603 - RNA, 19 nt, Artificial Sequence
  Synthetic
ugguuaucucaucuauaaa

SEQ ID NO: 436604 - RNA, 20 nt, Artificial Sequence
  Synthetic
uugguuaucucaucuauaaa

SEQ ID NO: 436605 - RNA, 21 nt, Artificial Sequence
  Synthetic
cuugguuaucucaucuauaaa

SEQ ID NO: 436606 - RNA, 22 nt, Artificial Sequence
  Synthetic
ccuugguuaucucaucuauaaa

SEQ ID NO: 436607 - RNA, 23 nt, Artificial Sequence
  Synthetic
cccuugguuaucucaucuauaaa

SEQ ID NO: 436608 - RNA, 24 nt, Artificial Sequence
  Synthetic
acccuugguuaucucaucuauaaa

SEQ ID NO: 436609 - RNA, 18 nt, Artificial Sequence
  Synthetic
cugccuaugcucuauaaa

SEQ ID NO: 436610 - RNA, 19 nt, Artificial Sequence
  Synthetic
ucugccuaugcucuauaaa

SEQ ID NO: 436611 - RNA, 20 nt, Artificial Sequence
  Synthetic
cucugccuaugcucuauaaa

SEQ ID NO: 436612 - RNA, 21 nt, Artificial Sequence
  Synthetic
acucugccuaugcucuauaaa

SEQ ID NO: 436613 - RNA, 22 nt, Artificial Sequence
  Synthetic
gacucugccuaugcucuauaaa

SEQ ID NO: 436614 - RNA, 23 nt, Artificial Sequence
  Synthetic
agacucugccuaugcucuauaaa

SEQ ID NO: 436615 - RNA, 24 nt, Artificial Sequence
  Synthetic
uagacucugccuaugcucuauaaa

SEQ ID NO: 436616 - RNA, 18 nt, Artificial Sequence
  Synthetic
uguuuucucgucuauaaa

SEQ ID NO: 436617 - RNA, 19 nt, Artificial Sequence
  Synthetic
cuguuuucucgucuauaaa

SEQ ID NO: 436618 - RNA, 20 nt, Artificial Sequence
  Synthetic
ccuguuuucucgucuauaaa

SEQ ID NO: 436619 - RNA, 21 nt, Artificial Sequence
  Synthetic
accuguuuucucgucuauaaa

SEQ ID NO: 436620 - RNA, 22 nt, Artificial Sequence
  Synthetic
aaccuguuuucucgucuauaaa

SEQ ID NO: 436621 - RNA, 23 nt, Artificial Sequence
  Synthetic
gaaccuguuuucucgucuauaaa

SEQ ID NO: 436622 - RNA, 24 nt, Artificial Sequence
  Synthetic
ggaaccuguuuucucgucuauaaa

SEQ ID NO: 436623 - RNA, 18 nt, Artificial Sequence
  Synthetic
agaagucaaaaguauaaa

SEQ ID NO: 436624 - RNA, 19 nt, Artificial Sequence
  Synthetic
cagaagucaaaaguauaaa

SEQ ID NO: 436625 - RNA, 20 nt, Artificial Sequence
  Synthetic
acagaagucaaaaguauaaa

SEQ ID NO: 436626 - RNA, 21 nt, Artificial Sequence
  Synthetic
cacagaagucaaaaguauaaa

SEQ ID NO: 436627 - RNA, 22 nt, Artificial Sequence
  Synthetic
acacagaagucaaaaguauaaa

SEQ ID NO: 436628 - RNA, 23 nt, Artificial Sequence
  Synthetic
uacacagaagucaaaaguauaaa

SEQ ID NO: 436629 - RNA, 24 nt, Artificial Sequence
  Synthetic
auacacagaagucaaaaguauaaa

SEQ ID NO: 436630 - RNA, 18 nt, Artificial Sequence
  Synthetic
auuauccauaaguauaaa

SEQ ID NO: 436631 - RNA, 19 nt, Artificial Sequence
  Synthetic
aauuauccauaaguauaaa

SEQ ID NO: 436632 - RNA, 20 nt, Artificial Sequence
  Synthetic
aaauuauccauaaguauaaa

SEQ ID NO: 436633 - RNA, 21 nt, Artificial Sequence
  Synthetic
uaaauuauccauaaguauaaa

SEQ ID NO: 436634 - RNA, 22 nt, Artificial Sequence
  Synthetic
uuaaauuauccauaaguauaaa

SEQ ID NO: 436635 - RNA, 23 nt, Artificial Sequence
  Synthetic
auuaaauuauccauaaguauaaa

SEQ ID NO: 436636 - RNA, 24 nt, Artificial Sequence
  Synthetic
aauuaaauuauccauaaguauaaa

SEQ ID NO: 436637 - RNA, 18 nt, Artificial Sequence
  Synthetic
aaaaagaaaauguauaaa

SEQ ID NO: 436638 - RNA, 19 nt, Artificial Sequence
  Synthetic
aaaaaagaaaauguauaaa

SEQ ID NO: 436639 - RNA, 20 nt, Artificial Sequence
  Synthetic
uaaaaaagaaaauguauaaa

SEQ ID NO: 436640 - RNA, 21 nt, Artificial Sequence
  Synthetic
auaaaaaagaaaauguauaaa

SEQ ID NO: 436641 - RNA, 22 nt, Artificial Sequence
  Synthetic
aauaaaaaagaaaauguauaaa

SEQ ID NO: 436642 - RNA, 23 nt, Artificial Sequence
  Synthetic
aaauaaaaaagaaaauguauaaa

SEQ ID NO: 436643 - RNA, 24 nt, Artificial Sequence
  Synthetic
aaaauaaaaaagaaaauguauaaa

SEQ ID NO: 436644 - RNA, 18 nt, Artificial Sequence
  Synthetic
aaaaguugaaauuauaaa

SEQ ID NO: 436645 - RNA, 19 nt, Artificial Sequence
  Synthetic
uaaaaguugaaauuauaaa

SEQ ID NO: 436646 - RNA, 20 nt, Artificial Sequence
  Synthetic
auaaaaguugaaauuauaaa

SEQ ID NO: 436647 - RNA, 21 nt, Artificial Sequence
  Synthetic
aauaaaaguugaaauuauaaa

SEQ ID NO: 436648 - RNA, 22 nt, Artificial Sequence
  Synthetic
aaauaaaaguugaaauuauaaa

SEQ ID NO: 436649 - RNA, 23 nt, Artificial Sequence
  Synthetic
aaaauaaaaguugaaauuauaaa

SEQ ID NO: 436650 - RNA, 24 nt, Artificial Sequence
  Synthetic
uaaaauaaaaguugaaauuauaaa

SEQ ID NO: 436651 - RNA, 18 nt, Artificial Sequence
  Synthetic
aagaagaggcauuauaaa

SEQ ID NO: 436652 - RNA, 19 nt, Artificial Sequence
  Synthetic
gaagaagaggcauuauaaa

SEQ ID NO: 436653 - RNA, 20 nt, Artificial Sequence
  Synthetic
ugaagaagaggcauuauaaa

SEQ ID NO: 436654 - RNA, 21 nt, Artificial Sequence
  Synthetic
gugaagaagaggcauuauaaa

SEQ ID NO: 436655 - RNA, 22 nt, Artificial Sequence
  Synthetic
agugaagaagaggcauuauaaa

SEQ ID NO: 436656 - RNA, 23 nt, Artificial Sequence
  Synthetic
gagugaagaagaggcauuauaaa

SEQ ID NO: 436657 - RNA, 24 nt, Artificial Sequence
  Synthetic
agagugaagaagaggcauuauaaa

SEQ ID NO: 436658 - RNA, 18 nt, Artificial Sequence
  Synthetic
gauuuuacugauuauaaa

SEQ ID NO: 436659 - RNA, 19 nt, Artificial Sequence
  Synthetic
ggauuuuacugauuauaaa

SEQ ID NO: 436660 - RNA, 20 nt, Artificial Sequence
  Synthetic
uggauuuuacugauuauaaa

SEQ ID NO: 436661 - RNA, 21 nt, Artificial Sequence
  Synthetic
uuggauuuuacugauuauaaa

SEQ ID NO: 436662 - RNA, 22 nt, Artificial Sequence
  Synthetic
cuuggauuuuacugauuauaaa

SEQ ID NO: 436663 - RNA, 23 nt, Artificial Sequence
  Synthetic
ccuuggauuuuacugauuauaaa

SEQ ID NO: 436664 - RNA, 24 nt, Artificial Sequence
  Synthetic
accuuggauuuuacugauuauaaa

SEQ ID NO: 436665 - RNA, 18 nt, Artificial Sequence
  Synthetic
cacaaauaauauuauaaa

SEQ ID NO: 436666 - RNA, 19 nt, Artificial Sequence
  Synthetic
acacaaauaauauuauaaa

SEQ ID NO: 436667 - RNA, 20 nt, Artificial Sequence
  Synthetic
uacacaaauaauauuauaaa

SEQ ID NO: 436668 - RNA, 21 nt, Artificial Sequence
  Synthetic
uuacacaaauaauauuauaaa

SEQ ID NO: 436669 - RNA, 22 nt, Artificial Sequence
  Synthetic
cuuacacaaauaauauuauaaa

SEQ ID NO: 436670 - RNA, 23 nt, Artificial Sequence
  Synthetic
acuuacacaaauaauauuauaaa

SEQ ID NO: 436671 - RNA, 24 nt, Artificial Sequence
  Synthetic
uacuuacacaaauaauauuauaaa

SEQ ID NO: 436672 - RNA, 18 nt, Artificial Sequence
  Synthetic
cuggcaguaccuuauaaa

SEQ ID NO: 436673 - RNA, 19 nt, Artificial Sequence
  Synthetic
gcuggcaguaccuuauaaa

SEQ ID NO: 436674 - RNA, 20 nt, Artificial Sequence
  Synthetic
ggcuggcaguaccuuauaaa

SEQ ID NO: 436675 - RNA, 21 nt, Artificial Sequence
  Synthetic
gggcuggcaguaccuuauaaa

SEQ ID NO: 436676 - RNA, 22 nt, Artificial Sequence
  Synthetic
ugggcuggcaguaccuuauaaa

SEQ ID NO: 436677 - RNA, 23 nt, Artificial Sequence
  Synthetic
uugggcuggcaguaccuuauaaa

SEQ ID NO: 436678 - RNA, 24 nt, Artificial Sequence
  Synthetic
uuugggcuggcaguaccuuauaaa

SEQ ID NO: 436679 - RNA, 18 nt, Artificial Sequence
  Synthetic
uuacaugaguguuauaaa

SEQ ID NO: 436680 - RNA, 19 nt, Artificial Sequence
  Synthetic
auuacaugaguguuauaaa

SEQ ID NO: 436681 - RNA, 20 nt, Artificial Sequence
  Synthetic
uauuacaugaguguuauaaa

SEQ ID NO: 436682 - RNA, 21 nt, Artificial Sequence
  Synthetic
auauuacaugaguguuauaaa

SEQ ID NO: 436683 - RNA, 22 nt, Artificial Sequence
  Synthetic
aauauuacaugaguguuauaaa

SEQ ID NO: 436684 - RNA, 23 nt, Artificial Sequence
  Synthetic
caauauuacaugaguguuauaaa

SEQ ID NO: 436685 - RNA, 24 nt, Artificial Sequence
  Synthetic
acaauauuacaugaguguuauaaa

SEQ ID NO: 436686 - RNA, 18 nt, Artificial Sequence
  Synthetic
agcugucuuauuuauaaa

SEQ ID NO: 436687 - RNA, 19 nt, Artificial Sequence
  Synthetic
gagcugucuuauuuauaaa

SEQ ID NO: 436688 - RNA, 20 nt, Artificial Sequence
  Synthetic
ugagcugucuuauuuauaaa

SEQ ID NO: 436689 - RNA, 21 nt, Artificial Sequence
  Synthetic
uugagcugucuuauuuauaaa

SEQ ID NO: 436690 - RNA, 22 nt, Artificial Sequence
  Synthetic
cuugagcugucuuauuuauaaa

SEQ ID NO: 436691 - RNA, 23 nt, Artificial Sequence
  Synthetic
acuugagcugucuuauuuauaaa

SEQ ID NO: 436692 - RNA, 24 nt, Artificial Sequence
  Synthetic
aacuugagcugucuuauuuauaaa

SEQ ID NO: 436693 - RNA, 18 nt, Artificial Sequence
  Synthetic
acacuuuuuauuuauaaa

SEQ ID NO: 436694 - RNA, 19 nt, Artificial Sequence
  Synthetic
aacacuuuuuauuuauaaa

SEQ ID NO: 436695 - RNA, 20 nt, Artificial Sequence
  Synthetic
caacacuuuuuauuuauaaa

SEQ ID NO: 436696 - RNA, 21 nt, Artificial Sequence
  Synthetic
acaacacuuuuuauuuauaaa

SEQ ID NO: 436697 - RNA, 22 nt, Artificial Sequence
  Synthetic
gacaacacuuuuuauuuauaaa

SEQ ID NO: 436698 - RNA, 23 nt, Artificial Sequence
  Synthetic
agacaacacuuuuuauuuauaaa

SEQ ID NO: 436699 - RNA, 24 nt, Artificial Sequence
  Synthetic
gagacaacacuuuuuauuuauaaa

SEQ ID NO: 436700 - RNA, 18 nt, Artificial Sequence
  Synthetic
cuauucagccuuuauaaa

SEQ ID NO: 436701 - RNA, 19 nt, Artificial Sequence
  Synthetic
acuauucagccuuuauaaa

SEQ ID NO: 436702 - RNA, 20 nt, Artificial Sequence
  Synthetic
uacuauucagccuuuauaaa

SEQ ID NO: 436703 - RNA, 21 nt, Artificial Sequence
  Synthetic
auacuauucagccuuuauaaa

SEQ ID NO: 436704 - RNA, 22 nt, Artificial Sequence
  Synthetic
aauacuauucagccuuuauaaa

SEQ ID NO: 436705 - RNA, 23 nt, Artificial Sequence
  Synthetic
gaauacuauucagccuuuauaaa

SEQ ID NO: 436706 - RNA, 24 nt, Artificial Sequence
  Synthetic
ggaauacuauucagccuuuauaaa

SEQ ID NO: 436707 - RNA, 18 nt, Artificial Sequence
  Synthetic
aucugaugguuuuauaaa

SEQ ID NO: 436708 - RNA, 19 nt, Artificial Sequence
  Synthetic
gaucugaugguuuuauaaa

SEQ ID NO: 436709 - RNA, 20 nt, Artificial Sequence
  Synthetic
agaucugaugguuuuauaaa

SEQ ID NO: 436710 - RNA, 21 nt, Artificial Sequence
  Synthetic
gagaucugaugguuuuauaaa

SEQ ID NO: 436711 - RNA, 22 nt, Artificial Sequence
  Synthetic
ugagaucugaugguuuuauaaa

SEQ ID NO: 436712 - RNA, 23 nt, Artificial Sequence
  Synthetic
augagaucugaugguuuuauaaa

SEQ ID NO: 436713 - RNA, 24 nt, Artificial Sequence
  Synthetic
caugagaucugaugguuuuauaaa

SEQ ID NO: 436714 - RNA, 18 nt, Artificial Sequence
  Synthetic
cucuuuuggaaaacuaaa

SEQ ID NO: 436715 - RNA, 19 nt, Artificial Sequence
  Synthetic
acucuuuuggaaaacuaaa

SEQ ID NO: 436716 - RNA, 20 nt, Artificial Sequence
  Synthetic
aacucuuuuggaaaacuaaa

SEQ ID NO: 436717 - RNA, 21 nt, Artificial Sequence
  Synthetic
aaacucuuuuggaaaacuaaa

SEQ ID NO: 436718 - RNA, 22 nt, Artificial Sequence
  Synthetic
caaacucuuuuggaaaacuaaa

SEQ ID NO: 436719 - RNA, 23 nt, Artificial Sequence
  Synthetic
ucaaacucuuuuggaaaacuaaa

SEQ ID NO: 436720 - RNA, 24 nt, Artificial Sequence
  Synthetic
cucaaacucuuuuggaaaacuaaa

SEQ ID NO: 436721 - RNA, 18 nt, Artificial Sequence
  Synthetic
uucugcuugacaacuaaa

SEQ ID NO: 436722 - RNA, 19 nt, Artificial Sequence
  Synthetic
cuucugcuugacaacuaaa

SEQ ID NO: 436723 - RNA, 20 nt, Artificial Sequence
  Synthetic
ccuucugcuugacaacuaaa

SEQ ID NO: 436724 - RNA, 21 nt, Artificial Sequence
  Synthetic
accuucugcuugacaacuaaa

SEQ ID NO: 436725 - RNA, 22 nt, Artificial Sequence
  Synthetic
caccuucugcuugacaacuaaa

SEQ ID NO: 436726 - RNA, 23 nt, Artificial Sequence
  Synthetic
ucaccuucugcuugacaacuaaa

SEQ ID NO: 436727 - RNA, 24 nt, Artificial Sequence
  Synthetic
uucaccuucugcuugacaacuaaa

SEQ ID NO: 436728 - RNA, 18 nt, Artificial Sequence
  Synthetic
auuaaaaaacgaacuaaa

SEQ ID NO: 436729 - RNA, 19 nt, Artificial Sequence
  Synthetic
uauuaaaaaacgaacuaaa

SEQ ID NO: 436730 - RNA, 20 nt, Artificial Sequence
  Synthetic
auauuaaaaaacgaacuaaa

SEQ ID NO: 436731 - RNA, 21 nt, Artificial Sequence
  Synthetic
aauauuaaaaaacgaacuaaa

SEQ ID NO: 436732 - RNA, 22 nt, Artificial Sequence
  Synthetic
aaauauuaaaaaacgaacuaaa

SEQ ID NO: 436733 - RNA, 23 nt, Artificial Sequence
  Synthetic
gaaauauuaaaaaacgaacuaaa

SEQ ID NO: 436734 - RNA, 24 nt, Artificial Sequence
  Synthetic
ugaaauauuaaaaaacgaacuaaa

SEQ ID NO: 436735 - RNA, 18 nt, Artificial Sequence
  Synthetic
gaagagagaugaacuaaa

SEQ ID NO: 436736 - RNA, 19 nt, Artificial Sequence
  Synthetic
agaagagagaugaacuaaa

SEQ ID NO: 436737 - RNA, 20 nt, Artificial Sequence
  Synthetic
gagaagagagaugaacuaaa

SEQ ID NO: 436738 - RNA, 21 nt, Artificial Sequence
  Synthetic
agagaagagagaugaacuaaa

SEQ ID NO: 436739 - RNA, 22 nt, Artificial Sequence
  Synthetic
aagagaagagagaugaacuaaa

SEQ ID NO: 436740 - RNA, 23 nt, Artificial Sequence
  Synthetic
gaagagaagagagaugaacuaaa

SEQ ID NO: 436741 - RNA, 24 nt, Artificial Sequence
  Synthetic
agaagagaagagagaugaacuaaa

SEQ ID NO: 436742 - RNA, 18 nt, Artificial Sequence
  Synthetic
aagaaggccaccacuaaa

SEQ ID NO: 436743 - RNA, 19 nt, Artificial Sequence
  Synthetic
gaagaaggccaccacuaaa

SEQ ID NO: 436744 - RNA, 20 nt, Artificial Sequence
  Synthetic
ugaagaaggccaccacuaaa

SEQ ID NO: 436745 - RNA, 21 nt, Artificial Sequence
  Synthetic
gugaagaaggccaccacuaaa

SEQ ID NO: 436746 - RNA, 22 nt, Artificial Sequence
  Synthetic
ggugaagaaggccaccacuaaa

SEQ ID NO: 436747 - RNA, 23 nt, Artificial Sequence
  Synthetic
aggugaagaaggccaccacuaaa

SEQ ID NO: 436748 - RNA, 24 nt, Artificial Sequence
  Synthetic
aaggugaagaaggccaccacuaaa

SEQ ID NO: 436749 - RNA, 18 nt, Artificial Sequence
  Synthetic
uaacacuguaucacuaaa

SEQ ID NO: 436750 - RNA, 19 nt, Artificial Sequence
  Synthetic
auaacacuguaucacuaaa

SEQ ID NO: 436751 - RNA, 20 nt, Artificial Sequence
  Synthetic
uauaacacuguaucacuaaa

SEQ ID NO: 436752 - RNA, 21 nt, Artificial Sequence
  Synthetic
auauaacacuguaucacuaaa

SEQ ID NO: 436753 - RNA, 22 nt, Artificial Sequence
  Synthetic
cauauaacacuguaucacuaaa

SEQ ID NO: 436754 - RNA, 23 nt, Artificial Sequence
  Synthetic
ucauauaacacuguaucacuaaa

SEQ ID NO: 436755 - RNA, 24 nt, Artificial Sequence
  Synthetic
cucauauaacacuguaucacuaaa

SEQ ID NO: 436756 - RNA, 18 nt, Artificial Sequence
  Synthetic
aucuaguaguagacuaaa

SEQ ID NO: 436757 - RNA, 19 nt, Artificial Sequence
  Synthetic
aaucuaguaguagacuaaa

SEQ ID NO: 436758 - RNA, 20 nt, Artificial Sequence
  Synthetic
uaaucuaguaguagacuaaa

SEQ ID NO: 436759 - RNA, 21 nt, Artificial Sequence
  Synthetic
auaaucuaguaguagacuaaa

SEQ ID NO: 436760 - RNA, 22 nt, Artificial Sequence
  Synthetic
aauaaucuaguaguagacuaaa

SEQ ID NO: 436761 - RNA, 23 nt, Artificial Sequence
  Synthetic
aaauaaucuaguaguagacuaaa

SEQ ID NO: 436762 - RNA, 24 nt, Artificial Sequence
  Synthetic
aaaauaaucuaguaguagacuaaa

SEQ ID NO: 436763 - RNA, 18 nt, Artificial Sequence
  Synthetic
caagcaauacauacuaaa

SEQ ID NO: 436764 - RNA, 19 nt, Artificial Sequence
  Synthetic
ucaagcaauacauacuaaa

SEQ ID NO: 436765 - RNA, 20 nt, Artificial Sequence
  Synthetic
aucaagcaauacauacuaaa

SEQ ID NO: 436766 - RNA, 21 nt, Artificial Sequence
  Synthetic
aaucaagcaauacauacuaaa

SEQ ID NO: 436767 - RNA, 22 nt, Artificial Sequence
  Synthetic
uaaucaagcaauacauacuaaa

SEQ ID NO: 436768 - RNA, 23 nt, Artificial Sequence
  Synthetic
uuaaucaagcaauacauacuaaa

SEQ ID NO: 436769 - RNA, 24 nt, Artificial Sequence
  Synthetic
uuuaaucaagcaauacauacuaaa

SEQ ID NO: 436770 - RNA, 18 nt, Artificial Sequence
  Synthetic
aaguuuaaagauacuaaa

SEQ ID NO: 436771 - RNA, 19 nt, Artificial Sequence
  Synthetic
gaaguuuaaagauacuaaa

SEQ ID NO: 436772 - RNA, 20 nt, Artificial Sequence
  Synthetic
ggaaguuuaaagauacuaaa

SEQ ID NO: 436773 - RNA, 21 nt, Artificial Sequence
  Synthetic
uggaaguuuaaagauacuaaa

SEQ ID NO: 436774 - RNA, 22 nt, Artificial Sequence
  Synthetic
auggaaguuuaaagauacuaaa

SEQ ID NO: 436775 - RNA, 23 nt, Artificial Sequence
  Synthetic
uauggaaguuuaaagauacuaaa

SEQ ID NO: 436776 - RNA, 24 nt, Artificial Sequence
  Synthetic
auauggaaguuuaaagauacuaaa

SEQ ID NO: 436777 - RNA, 18 nt, Artificial Sequence
  Synthetic
cauacucauccuacuaaa

SEQ ID NO: 436778 - RNA, 19 nt, Artificial Sequence
  Synthetic
gcauacucauccuacuaaa

SEQ ID NO: 436779 - RNA, 20 nt, Artificial Sequence
  Synthetic
cgcauacucauccuacuaaa

SEQ ID NO: 436780 - RNA, 21 nt, Artificial Sequence
  Synthetic
acgcauacucauccuacuaaa

SEQ ID NO: 436781 - RNA, 22 nt, Artificial Sequence
  Synthetic
uacgcauacucauccuacuaaa

SEQ ID NO: 436782 - RNA, 23 nt, Artificial Sequence
  Synthetic
cuacgcauacucauccuacuaaa

SEQ ID NO: 436783 - RNA, 24 nt, Artificial Sequence
  Synthetic
gcuacgcauacucauccuacuaaa

SEQ ID NO: 436784 - RNA, 18 nt, Artificial Sequence
  Synthetic
gcauauauaauuacuaaa

SEQ ID NO: 436785 - RNA, 19 nt, Artificial Sequence
  Synthetic
ugcauauauaauuacuaaa

SEQ ID NO: 436786 - RNA, 20 nt, Artificial Sequence
  Synthetic
gugcauauauaauuacuaaa

SEQ ID NO: 436787 - RNA, 21 nt, Artificial Sequence
  Synthetic
agugcauauauaauuacuaaa

SEQ ID NO: 436788 - RNA, 22 nt, Artificial Sequence
  Synthetic
uagugcauauauaauuacuaaa

SEQ ID NO: 436789 - RNA, 23 nt, Artificial Sequence
  Synthetic
cuagugcauauauaauuacuaaa

SEQ ID NO: 436790 - RNA, 24 nt, Artificial Sequence
  Synthetic
gcuagugcauauauaauuacuaaa

SEQ ID NO: 436791 - RNA, 18 nt, Artificial Sequence
  Synthetic
acauuaagauuuacuaaa

SEQ ID NO: 436792 - RNA, 19 nt, Artificial Sequence
  Synthetic
gacauuaagauuuacuaaa

SEQ ID NO: 436793 - RNA, 20 nt, Artificial Sequence
  Synthetic
ugacauuaagauuuacuaaa

SEQ ID NO: 436794 - RNA, 21 nt, Artificial Sequence
  Synthetic
uugacauuaagauuuacuaaa

SEQ ID NO: 436795 - RNA, 22 nt, Artificial Sequence
  Synthetic
uuugacauuaagauuuacuaaa

SEQ ID NO: 436796 - RNA, 23 nt, Artificial Sequence
  Synthetic
guuugacauuaagauuuacuaaa

SEQ ID NO: 436797 - RNA, 24 nt, Artificial Sequence
  Synthetic
uguuugacauuaagauuuacuaaa

SEQ ID NO: 436798 - RNA, 18 nt, Artificial Sequence
  Synthetic
auaugcuuuuuuacuaaa

SEQ ID NO: 436799 - RNA, 19 nt, Artificial Sequence
  Synthetic
aauaugcuuuuuuacuaaa

SEQ ID NO: 436800 - RNA, 20 nt, Artificial Sequence
  Synthetic
aaauaugcuuuuuuacuaaa

SEQ ID NO: 436801 - RNA, 21 nt, Artificial Sequence
  Synthetic
caaauaugcuuuuuuacuaaa

SEQ ID NO: 436802 - RNA, 22 nt, Artificial Sequence
  Synthetic
ucaaauaugcuuuuuuacuaaa

SEQ ID NO: 436803 - RNA, 23 nt, Artificial Sequence
  Synthetic
cucaaauaugcuuuuuuacuaaa

SEQ ID NO: 436804 - RNA, 24 nt, Artificial Sequence
  Synthetic
ucucaaauaugcuuuuuuacuaaa

SEQ ID NO: 436805 - RNA, 18 nt, Artificial Sequence
  Synthetic
aaugacagcacaccuaaa

SEQ ID NO: 436806 - RNA, 19 nt, Artificial Sequence
  Synthetic
caaugacagcacaccuaaa

SEQ ID NO: 436807 - RNA, 20 nt, Artificial Sequence
  Synthetic
ucaaugacagcacaccuaaa

SEQ ID NO: 436808 - RNA, 21 nt, Artificial Sequence
  Synthetic
uucaaugacagcacaccuaaa

SEQ ID NO: 436809 - RNA, 22 nt, Artificial Sequence
  Synthetic
cuucaaugacagcacaccuaaa

SEQ ID NO: 436810 - RNA, 23 nt, Artificial Sequence
  Synthetic
gcuucaaugacagcacaccuaaa

SEQ ID NO: 436811 - RNA, 24 nt, Artificial Sequence
  Synthetic
agcuucaaugacagcacaccuaaa

SEQ ID NO: 436812 - RNA, 18 nt, Artificial Sequence
  Synthetic
aauacaguguuaccuaaa

SEQ ID NO: 436813 - RNA, 19 nt, Artificial Sequence
  Synthetic
caauacaguguuaccuaaa

SEQ ID NO: 436814 - RNA, 20 nt, Artificial Sequence
  Synthetic
ucaauacaguguuaccuaaa

SEQ ID NO: 436815 - RNA, 21 nt, Artificial Sequence
  Synthetic
uucaauacaguguuaccuaaa

SEQ ID NO: 436816 - RNA, 22 nt, Artificial Sequence
  Synthetic
auucaauacaguguuaccuaaa

SEQ ID NO: 436817 - RNA, 23 nt, Artificial Sequence
  Synthetic
gauucaauacaguguuaccuaaa

SEQ ID NO: 436818 - RNA, 24 nt, Artificial Sequence
  Synthetic
agauucaauacaguguuaccuaaa

SEQ ID NO: 436819 - RNA, 18 nt, Artificial Sequence
  Synthetic
cagauagguugcccuaaa

SEQ ID NO: 436820 - RNA, 19 nt, Artificial Sequence
  Synthetic
ucagauagguugcccuaaa

SEQ ID NO: 436821 - RNA, 20 nt, Artificial Sequence
  Synthetic
cucagauagguugcccuaaa

SEQ ID NO: 436822 - RNA, 21 nt, Artificial Sequence
  Synthetic
acucagauagguugcccuaaa

SEQ ID NO: 436823 - RNA, 22 nt, Artificial Sequence
  Synthetic
gacucagauagguugcccuaaa

SEQ ID NO: 436824 - RNA, 23 nt, Artificial Sequence
  Synthetic
ggacucagauagguugcccuaaa

SEQ ID NO: 436825 - RNA, 24 nt, Artificial Sequence
  Synthetic
aggacucagauagguugcccuaaa

SEQ ID NO: 436826 - RNA, 18 nt, Artificial Sequence
  Synthetic
uuuuggauauucccuaaa

SEQ ID NO: 436827 - RNA, 19 nt, Artificial Sequence
  Synthetic
cuuuuggauauucccuaaa

SEQ ID NO: 436828 - RNA, 20 nt, Artificial Sequence
  Synthetic
ccuuuuggauauucccuaaa

SEQ ID NO: 436829 - RNA, 21 nt, Artificial Sequence
  Synthetic
gccuuuuggauauucccuaaa

SEQ ID NO: 436830 - RNA, 22 nt, Artificial Sequence
  Synthetic
cgccuuuuggauauucccuaaa

SEQ ID NO: 436831 - RNA, 23 nt, Artificial Sequence
  Synthetic
ccgccuuuuggauauucccuaaa

SEQ ID NO: 436832 - RNA, 24 nt, Artificial Sequence
  Synthetic
uccgccuuuuggauauucccuaaa

SEQ ID NO: 436833 - RNA, 18 nt, Artificial Sequence
  Synthetic
uaguuuggguucccuaaa

SEQ ID NO: 436834 - RNA, 19 nt, Artificial Sequence
  Synthetic
uuaguuuggguucccuaaa

SEQ ID NO: 436835 - RNA, 20 nt, Artificial Sequence
  Synthetic
cuuaguuuggguucccuaaa

SEQ ID NO: 436836 - RNA, 21 nt, Artificial Sequence
  Synthetic
ucuuaguuuggguucccuaaa

SEQ ID NO: 436837 - RNA, 22 nt, Artificial Sequence
  Synthetic
aucuuaguuuggguucccuaaa

SEQ ID NO: 436838 - RNA, 23 nt, Artificial Sequence
  Synthetic
uaucuuaguuuggguucccuaaa

SEQ ID NO: 436839 - RNA, 24 nt, Artificial Sequence
  Synthetic
auaucuuaguuuggguucccuaaa

SEQ ID NO: 436840 - RNA, 18 nt, Artificial Sequence
  Synthetic
cgguaugugaagccuaaa

SEQ ID NO: 436841 - RNA, 19 nt, Artificial Sequence
  Synthetic
ccgguaugugaagccuaaa

SEQ ID NO: 436842 - RNA, 20 nt, Artificial Sequence
  Synthetic
uccgguaugugaagccuaaa

SEQ ID NO: 436843 - RNA, 21 nt, Artificial Sequence
  Synthetic
auccgguaugugaagccuaaa

SEQ ID NO: 436844 - RNA, 22 nt, Artificial Sequence
  Synthetic
aauccgguaugugaagccuaaa

SEQ ID NO: 436845 - RNA, 23 nt, Artificial Sequence
  Synthetic
aaauccgguaugugaagccuaaa

SEQ ID NO: 436846 - RNA, 24 nt, Artificial Sequence
  Synthetic
gaaauccgguaugugaagccuaaa

SEQ ID NO: 436847 - RNA, 18 nt, Artificial Sequence
  Synthetic
cuuggaaaacagccuaaa

SEQ ID NO: 436848 - RNA, 19 nt, Artificial Sequence
  Synthetic
ucuuggaaaacagccuaaa

SEQ ID NO: 436849 - RNA, 20 nt, Artificial Sequence
  Synthetic
cucuuggaaaacagccuaaa

SEQ ID NO: 436850 - RNA, 21 nt, Artificial Sequence
  Synthetic
acucuuggaaaacagccuaaa

SEQ ID NO: 436851 - RNA, 22 nt, Artificial Sequence
  Synthetic
gacucuuggaaaacagccuaaa

SEQ ID NO: 436852 - RNA, 23 nt, Artificial Sequence
  Synthetic
agacucuuggaaaacagccuaaa

SEQ ID NO: 436853 - RNA, 24 nt, Artificial Sequence
  Synthetic
aagacucuuggaaaacagccuaaa

SEQ ID NO: 436854 - RNA, 18 nt, Artificial Sequence
  Synthetic
gggaggaacaauccuaaa

SEQ ID NO: 436855 - RNA, 19 nt, Artificial Sequence
  Synthetic
ggggaggaacaauccuaaa

SEQ ID NO: 436856 - RNA, 20 nt, Artificial Sequence
  Synthetic
uggggaggaacaauccuaaa

SEQ ID NO: 436857 - RNA, 21 nt, Artificial Sequence
  Synthetic
auggggaggaacaauccuaaa

SEQ ID NO: 436858 - RNA, 22 nt, Artificial Sequence
  Synthetic
gauggggaggaacaauccuaaa

SEQ ID NO: 436859 - RNA, 23 nt, Artificial Sequence
  Synthetic
agauggggaggaacaauccuaaa

SEQ ID NO: 436860 - RNA, 24 nt, Artificial Sequence
  Synthetic
aagauggggaggaacaauccuaaa

SEQ ID NO: 436861 - RNA, 18 nt, Artificial Sequence
  Synthetic
gagaauggugcuccuaaa

SEQ ID NO: 436862 - RNA, 19 nt, Artificial Sequence
  Synthetic
agagaauggugcuccuaaa

SEQ ID NO: 436863 - RNA, 20 nt, Artificial Sequence
  Synthetic
aagagaauggugcuccuaaa

SEQ ID NO: 436864 - RNA, 21 nt, Artificial Sequence
  Synthetic
gaagagaauggugcuccuaaa

SEQ ID NO: 436865 - RNA, 22 nt, Artificial Sequence
  Synthetic
ggaagagaauggugcuccuaaa

SEQ ID NO: 436866 - RNA, 23 nt, Artificial Sequence
  Synthetic
aggaagagaauggugcuccuaaa

SEQ ID NO: 436867 - RNA, 24 nt, Artificial Sequence
  Synthetic
aaggaagagaauggugcuccuaaa

SEQ ID NO: 436868 - RNA, 18 nt, Artificial Sequence
  Synthetic
ggugguucucuuccuaaa

SEQ ID NO: 436869 - RNA, 19 nt, Artificial Sequence
  Synthetic
aggugguucucuuccuaaa

SEQ ID NO: 436870 - RNA, 20 nt, Artificial Sequence
  Synthetic
aaggugguucucuuccuaaa

SEQ ID NO: 436871 - RNA, 21 nt, Artificial Sequence
  Synthetic
aaaggugguucucuuccuaaa

SEQ ID NO: 436872 - RNA, 22 nt, Artificial Sequence
  Synthetic
aaaaggugguucucuuccuaaa

SEQ ID NO: 436873 - RNA, 23 nt, Artificial Sequence
  Synthetic
aaaaaggugguucucuuccuaaa

SEQ ID NO: 436874 - RNA, 24 nt, Artificial Sequence
  Synthetic
gaaaaaggugguucucuuccuaaa

SEQ ID NO: 436875 - RNA, 18 nt, Artificial Sequence
  Synthetic
uggcagggucuuccuaaa

SEQ ID NO: 436876 - RNA, 19 nt, Artificial Sequence
  Synthetic
uuggcagggucuuccuaaa

SEQ ID NO: 436877 - RNA, 20 nt, Artificial Sequence
  Synthetic
cuuggcagggucuuccuaaa

SEQ ID NO: 436878 - RNA, 21 nt, Artificial Sequence
  Synthetic
acuuggcagggucuuccuaaa

SEQ ID NO: 436879 - RNA, 22 nt, Artificial Sequence
  Synthetic
aacuuggcagggucuuccuaaa

SEQ ID NO: 436880 - RNA, 23 nt, Artificial Sequence
  Synthetic
aaacuuggcagggucuuccuaaa

SEQ ID NO: 436881 - RNA, 24 nt, Artificial Sequence
  Synthetic
gaaacuuggcagggucuuccuaaa

SEQ ID NO: 436882 - RNA, 18 nt, Artificial Sequence
  Synthetic
cauuaaagcgaagcuaaa

SEQ ID NO: 436883 - RNA, 19 nt, Artificial Sequence
  Synthetic
ucauuaaagcgaagcuaaa

SEQ ID NO: 436884 - RNA, 20 nt, Artificial Sequence
  Synthetic
uucauuaaagcgaagcuaaa

SEQ ID NO: 436885 - RNA, 21 nt, Artificial Sequence
  Synthetic
guucauuaaagcgaagcuaaa

SEQ ID NO: 436886 - RNA, 22 nt, Artificial Sequence
  Synthetic
aguucauuaaagcgaagcuaaa

SEQ ID NO: 436887 - RNA, 23 nt, Artificial Sequence
  Synthetic
gaguucauuaaagcgaagcuaaa

SEQ ID NO: 436888 - RNA, 24 nt, Artificial Sequence
  Synthetic
agaguucauuaaagcgaagcuaaa

SEQ ID NO: 436889 - RNA, 18 nt, Artificial Sequence
  Synthetic
agcaaaacaacagcuaaa

SEQ ID NO: 436890 - RNA, 19 nt, Artificial Sequence
  Synthetic
cagcaaaacaacagcuaaa

SEQ ID NO: 436891 - RNA, 20 nt, Artificial Sequence
  Synthetic
ccagcaaaacaacagcuaaa

SEQ ID NO: 436892 - RNA, 21 nt, Artificial Sequence
  Synthetic
uccagcaaaacaacagcuaaa

SEQ ID NO: 436893 - RNA, 22 nt, Artificial Sequence
  Synthetic
uuccagcaaaacaacagcuaaa

SEQ ID NO: 436894 - RNA, 23 nt, Artificial Sequence
  Synthetic
guuccagcaaaacaacagcuaaa

SEQ ID NO: 436895 - RNA, 24 nt, Artificial Sequence
  Synthetic
aguuccagcaaaacaacagcuaaa

SEQ ID NO: 436896 - RNA, 18 nt, Artificial Sequence
  Synthetic
gcuagacucacagcuaaa

SEQ ID NO: 436897 - RNA, 19 nt, Artificial Sequence
  Synthetic
agcuagacucacagcuaaa

SEQ ID NO: 436898 - RNA, 20 nt, Artificial Sequence
  Synthetic
aagcuagacucacagcuaaa

SEQ ID NO: 436899 - RNA, 21 nt, Artificial Sequence
  Synthetic
aaagcuagacucacagcuaaa

SEQ ID NO: 436900 - RNA, 22 nt, Artificial Sequence
  Synthetic
aaaagcuagacucacagcuaaa

SEQ ID NO: 436901 - RNA, 23 nt, Artificial Sequence
  Synthetic
caaaagcuagacucacagcuaaa

SEQ ID NO: 436902 - RNA, 24 nt, Artificial Sequence
  Synthetic
ucaaaagcuagacucacagcuaaa

SEQ ID NO: 436903 - RNA, 18 nt, Artificial Sequence
  Synthetic
agcugaagagcagcuaaa

SEQ ID NO: 436904 - RNA, 19 nt, Artificial Sequence
  Synthetic
aagcugaagagcagcuaaa

SEQ ID NO: 436905 - RNA, 20 nt, Artificial Sequence
  Synthetic
aaagcugaagagcagcuaaa

SEQ ID NO: 436906 - RNA, 21 nt, Artificial Sequence
  Synthetic
uaaagcugaagagcagcuaaa

SEQ ID NO: 436907 - RNA, 22 nt, Artificial Sequence
  Synthetic
guaaagcugaagagcagcuaaa

SEQ ID NO: 436908 - RNA, 23 nt, Artificial Sequence
  Synthetic
gguaaagcugaagagcagcuaaa

SEQ ID NO: 436909 - RNA, 24 nt, Artificial Sequence
  Synthetic
agguaaagcugaagagcagcuaaa

SEQ ID NO: 436910 - RNA, 18 nt, Artificial Sequence
  Synthetic
gagcuggacucagcuaaa

SEQ ID NO: 436911 - RNA, 19 nt, Artificial Sequence
  Synthetic
agagcuggacucagcuaaa

SEQ ID NO: 436912 - RNA, 20 nt, Artificial Sequence
  Synthetic
gagagcuggacucagcuaaa

SEQ ID NO: 436913 - RNA, 21 nt, Artificial Sequence
  Synthetic
ugagagcuggacucagcuaaa

SEQ ID NO: 436914 - RNA, 22 nt, Artificial Sequence
  Synthetic
cugagagcuggacucagcuaaa

SEQ ID NO: 436915 - RNA, 23 nt, Artificial Sequence
  Synthetic
ucugagagcuggacucagcuaaa

SEQ ID NO: 436916 - RNA, 24 nt, Artificial Sequence
  Synthetic
gucugagagcuggacucagcuaaa

SEQ ID NO: 436917 - RNA, 18 nt, Artificial Sequence
  Synthetic
uauuuccaaauagcuaaa

SEQ ID NO: 436918 - RNA, 19 nt, Artificial Sequence
  Synthetic
auauuuccaaauagcuaaa

SEQ ID NO: 436919 - RNA, 20 nt, Artificial Sequence
  Synthetic
uauauuuccaaauagcuaaa

SEQ ID NO: 436920 - RNA, 21 nt, Artificial Sequence
  Synthetic
guauauuuccaaauagcuaaa

SEQ ID NO: 436921 - RNA, 22 nt, Artificial Sequence
  Synthetic
uguauauuuccaaauagcuaaa

SEQ ID NO: 436922 - RNA, 23 nt, Artificial Sequence
  Synthetic
uuguauauuuccaaauagcuaaa

SEQ ID NO: 436923 - RNA, 24 nt, Artificial Sequence
  Synthetic
auuguauauuuccaaauagcuaaa

SEQ ID NO: 436924 - RNA, 18 nt, Artificial Sequence
  Synthetic
cuaggauaaauagcuaaa

SEQ ID NO: 436925 - RNA, 19 nt, Artificial Sequence
  Synthetic
acuaggauaaauagcuaaa

SEQ ID NO: 436926 - RNA, 20 nt, Artificial Sequence
  Synthetic
cacuaggauaaauagcuaaa

SEQ ID NO: 436927 - RNA, 21 nt, Artificial Sequence
  Synthetic
acacuaggauaaauagcuaaa

SEQ ID NO: 436928 - RNA, 22 nt, Artificial Sequence
  Synthetic
aacacuaggauaaauagcuaaa

SEQ ID NO: 436929 - RNA, 23 nt, Artificial Sequence
  Synthetic
gaacacuaggauaaauagcuaaa

SEQ ID NO: 436930 - RNA, 24 nt, Artificial Sequence
  Synthetic
ggaacacuaggauaaauagcuaaa

SEQ ID NO: 436931 - RNA, 18 nt, Artificial Sequence
  Synthetic
aaauguggacuagcuaaa

SEQ ID NO: 436932 - RNA, 19 nt, Artificial Sequence
  Synthetic
aaaauguggacuagcuaaa

SEQ ID NO: 436933 - RNA, 20 nt, Artificial Sequence
  Synthetic
aaaaauguggacuagcuaaa

SEQ ID NO: 436934 - RNA, 21 nt, Artificial Sequence
  Synthetic
gaaaaauguggacuagcuaaa

SEQ ID NO: 436935 - RNA, 22 nt, Artificial Sequence
  Synthetic
ugaaaaauguggacuagcuaaa

SEQ ID NO: 436936 - RNA, 23 nt, Artificial Sequence
  Synthetic
uugaaaaauguggacuagcuaaa

SEQ ID NO: 436937 - RNA, 24 nt, Artificial Sequence
  Synthetic
auugaaaaauguggacuagcuaaa

SEQ ID NO: 436938 - RNA, 18 nt, Artificial Sequence
  Synthetic
cacuguggaauggcuaaa

SEQ ID NO: 436939 - RNA, 19 nt, Artificial Sequence
  Synthetic
acacuguggaauggcuaaa

SEQ ID NO: 436940 - RNA, 20 nt, Artificial Sequence
  Synthetic
uacacuguggaauggcuaaa

SEQ ID NO: 436941 - RNA, 21 nt, Artificial Sequence
  Synthetic
auacacuguggaauggcuaaa

SEQ ID NO: 436942 - RNA, 22 nt, Artificial Sequence
  Synthetic
cauacacuguggaauggcuaaa

SEQ ID NO: 436943 - RNA, 23 nt, Artificial Sequence
  Synthetic
gcauacacuguggaauggcuaaa

SEQ ID NO: 436944 - RNA, 24 nt, Artificial Sequence
  Synthetic
ugcauacacuguggaauggcuaaa

SEQ ID NO: 436945 - RNA, 18 nt, Artificial Sequence
  Synthetic
acuccagccauggcuaaa

SEQ ID NO: 436946 - RNA, 19 nt, Artificial Sequence
  Synthetic
cacuccagccauggcuaaa

SEQ ID NO: 436947 - RNA, 20 nt, Artificial Sequence
  Synthetic
ccacuccagccauggcuaaa

SEQ ID NO: 436948 - RNA, 21 nt, Artificial Sequence
  Synthetic
gccacuccagccauggcuaaa

SEQ ID NO: 436949 - RNA, 22 nt, Artificial Sequence
  Synthetic
agccacuccagccauggcuaaa

SEQ ID NO: 436950 - RNA, 23 nt, Artificial Sequence
  Synthetic
cagccacuccagccauggcuaaa

SEQ ID NO: 436951 - RNA, 24 nt, Artificial Sequence
  Synthetic
ccagccacuccagccauggcuaaa

SEQ ID NO: 436952 - RNA, 18 nt, Artificial Sequence
  Synthetic
caaauucauauggcuaaa

SEQ ID NO: 436953 - RNA, 19 nt, Artificial Sequence
  Synthetic
acaaauucauauggcuaaa

SEQ ID NO: 436954 - RNA, 20 nt, Artificial Sequence
  Synthetic
uacaaauucauauggcuaaa

SEQ ID NO: 436955 - RNA, 21 nt, Artificial Sequence
  Synthetic
auacaaauucauauggcuaaa

SEQ ID NO: 436956 - RNA, 22 nt, Artificial Sequence
  Synthetic
aauacaaauucauauggcuaaa

SEQ ID NO: 436957 - RNA, 23 nt, Artificial Sequence
  Synthetic
aaauacaaauucauauggcuaaa

SEQ ID NO: 436958 - RNA, 24 nt, Artificial Sequence
  Synthetic
gaaauacaaauucauauggcuaaa

SEQ ID NO: 436959 - RNA, 18 nt, Artificial Sequence
  Synthetic
uagccaaugcuggcuaaa

SEQ ID NO: 436960 - RNA, 19 nt, Artificial Sequence
  Synthetic
auagccaaugcuggcuaaa

SEQ ID NO: 436961 - RNA, 20 nt, Artificial Sequence
  Synthetic
aauagccaaugcuggcuaaa

SEQ ID NO: 436962 - RNA, 21 nt, Artificial Sequence
  Synthetic
uaauagccaaugcuggcuaaa

SEQ ID NO: 436963 - RNA, 22 nt, Artificial Sequence
  Synthetic
uuaauagccaaugcuggcuaaa

SEQ ID NO: 436964 - RNA, 23 nt, Artificial Sequence
  Synthetic
guuaauagccaaugcuggcuaaa

SEQ ID NO: 436965 - RNA, 24 nt, Artificial Sequence
  Synthetic
uguuaauagccaaugcuggcuaaa

SEQ ID NO: 436966 - RNA, 18 nt, Artificial Sequence
  Synthetic
uuauccuaaguggcuaaa

SEQ ID NO: 436967 - RNA, 19 nt, Artificial Sequence
  Synthetic
auuauccuaaguggcuaaa

SEQ ID NO: 436968 - RNA, 20 nt, Artificial Sequence
  Synthetic
aauuauccuaaguggcuaaa

SEQ ID NO: 436969 - RNA, 21 nt, Artificial Sequence
  Synthetic
aaauuauccuaaguggcuaaa

SEQ ID NO: 436970 - RNA, 22 nt, Artificial Sequence
  Synthetic
gaaauuauccuaaguggcuaaa

SEQ ID NO: 436971 - RNA, 23 nt, Artificial Sequence
  Synthetic
agaaauuauccuaaguggcuaaa

SEQ ID NO: 436972 - RNA, 24 nt, Artificial Sequence
  Synthetic
aagaaauuauccuaaguggcuaaa

SEQ ID NO: 436973 - RNA, 18 nt, Artificial Sequence
  Synthetic
gacucaacuuuggcuaaa

SEQ ID NO: 436974 - RNA, 19 nt, Artificial Sequence
  Synthetic
agacucaacuuuggcuaaa

SEQ ID NO: 436975 - RNA, 20 nt, Artificial Sequence
  Synthetic
gagacucaacuuuggcuaaa

SEQ ID NO: 436976 - RNA, 21 nt, Artificial Sequence
  Synthetic
ugagacucaacuuuggcuaaa

SEQ ID NO: 436977 - RNA, 22 nt, Artificial Sequence
  Synthetic
uugagacucaacuuuggcuaaa

SEQ ID NO: 436978 - RNA, 23 nt, Artificial Sequence
  Synthetic
guugagacucaacuuuggcuaaa

SEQ ID NO: 436979 - RNA, 24 nt, Artificial Sequence
  Synthetic
uguugagacucaacuuuggcuaaa

SEQ ID NO: 436980 - RNA, 18 nt, Artificial Sequence
  Synthetic
guauguuggccugcuaaa

SEQ ID NO: 436981 - RNA, 19 nt, Artificial Sequence
  Synthetic
aguauguuggccugcuaaa

SEQ ID NO: 436982 - RNA, 20 nt, Artificial Sequence
  Synthetic
gaguauguuggccugcuaaa

SEQ ID NO: 436983 - RNA, 21 nt, Artificial Sequence
  Synthetic
ugaguauguuggccugcuaaa

SEQ ID NO: 436984 - RNA, 22 nt, Artificial Sequence
  Synthetic
uugaguauguuggccugcuaaa

SEQ ID NO: 436985 - RNA, 23 nt, Artificial Sequence
  Synthetic
cuugaguauguuggccugcuaaa

SEQ ID NO: 436986 - RNA, 24 nt, Artificial Sequence
  Synthetic
acuugaguauguuggccugcuaaa

SEQ ID NO: 436987 - RNA, 18 nt, Artificial Sequence
  Synthetic
auccacaagagugcuaaa

SEQ ID NO: 436988 - RNA, 19 nt, Artificial Sequence
  Synthetic
gauccacaagagugcuaaa

SEQ ID NO: 436989 - RNA, 20 nt, Artificial Sequence
  Synthetic
ggauccacaagagugcuaaa

SEQ ID NO: 436990 - RNA, 21 nt, Artificial Sequence
  Synthetic
uggauccacaagagugcuaaa

SEQ ID NO: 436991 - RNA, 22 nt, Artificial Sequence
  Synthetic
uuggauccacaagagugcuaaa

SEQ ID NO: 436992 - RNA, 23 nt, Artificial Sequence
  Synthetic
auuggauccacaagagugcuaaa

SEQ ID NO: 436993 - RNA, 24 nt, Artificial Sequence
  Synthetic
aauuggauccacaagagugcuaaa

SEQ ID NO: 436994 - RNA, 18 nt, Artificial Sequence
  Synthetic
guuuccuccuuugcuaaa

SEQ ID NO: 436995 - RNA, 19 nt, Artificial Sequence
  Synthetic
aguuuccuccuuugcuaaa

SEQ ID NO: 436996 - RNA, 20 nt, Artificial Sequence
  Synthetic
caguuuccuccuuugcuaaa

SEQ ID NO: 436997 - RNA, 21 nt, Artificial Sequence
  Synthetic
ucaguuuccuccuuugcuaaa

SEQ ID NO: 436998 - RNA, 22 nt, Artificial Sequence
  Synthetic
cucaguuuccuccuuugcuaaa

SEQ ID NO: 436999 - RNA, 23 nt, Artificial Sequence
  Synthetic
ccucaguuuccuccuuugcuaaa

SEQ ID NO: 437000 - RNA, 24 nt, Artificial Sequence
  Synthetic
gccucaguuuccuccuuugcuaaa

SEQ ID NO: 437001 - RNA, 18 nt, Artificial Sequence
  Synthetic
cauauccuguuugcuaaa

SEQ ID NO: 437002 - RNA, 19 nt, Artificial Sequence
  Synthetic
ucauauccuguuugcuaaa

SEQ ID NO: 437003 - RNA, 20 nt, Artificial Sequence
  Synthetic
cucauauccuguuugcuaaa

SEQ ID NO: 437004 - RNA, 21 nt, Artificial Sequence
  Synthetic
acucauauccuguuugcuaaa

SEQ ID NO: 437005 - RNA, 22 nt, Artificial Sequence
  Synthetic
gacucauauccuguuugcuaaa

SEQ ID NO: 437006 - RNA, 23 nt, Artificial Sequence
  Synthetic
agacucauauccuguuugcuaaa

SEQ ID NO: 437007 - RNA, 24 nt, Artificial Sequence
  Synthetic
aagacucauauccuguuugcuaaa

SEQ ID NO: 437008 - RNA, 18 nt, Artificial Sequence
  Synthetic
ucuugcagggaaucuaaa

SEQ ID NO: 437009 - RNA, 19 nt, Artificial Sequence
  Synthetic
cucuugcagggaaucuaaa

SEQ ID NO: 437010 - RNA, 20 nt, Artificial Sequence
  Synthetic
ccucuugcagggaaucuaaa

SEQ ID NO: 437011 - RNA, 21 nt, Artificial Sequence
  Synthetic
accucuugcagggaaucuaaa

SEQ ID NO: 437012 - RNA, 22 nt, Artificial Sequence
  Synthetic
aaccucuugcagggaaucuaaa

SEQ ID NO: 437013 - RNA, 23 nt, Artificial Sequence
  Synthetic
aaaccucuugcagggaaucuaaa

SEQ ID NO: 437014 - RNA, 24 nt, Artificial Sequence
  Synthetic
aaaaccucuugcagggaaucuaaa

SEQ ID NO: 437015 - RNA, 18 nt, Artificial Sequence
  Synthetic
accugagggacaucuaaa

SEQ ID NO: 437016 - RNA, 19 nt, Artificial Sequence
  Synthetic
caccugagggacaucuaaa

SEQ ID NO: 437017 - RNA, 20 nt, Artificial Sequence
  Synthetic
gcaccugagggacaucuaaa

SEQ ID NO: 437018 - RNA, 21 nt, Artificial Sequence
  Synthetic
agcaccugagggacaucuaaa

SEQ ID NO: 437019 - RNA, 22 nt, Artificial Sequence
  Synthetic
aagcaccugagggacaucuaaa

SEQ ID NO: 437020 - RNA, 23 nt, Artificial Sequence
  Synthetic
gaagcaccugagggacaucuaaa

SEQ ID NO: 437021 - RNA, 24 nt, Artificial Sequence
  Synthetic
ugaagcaccugagggacaucuaaa

SEQ ID NO: 437022 - RNA, 18 nt, Artificial Sequence
  Synthetic
caaagcuuaagaucuaaa

SEQ ID NO: 437023 - RNA, 19 nt, Artificial Sequence
  Synthetic
acaaagcuuaagaucuaaa

SEQ ID NO: 437024 - RNA, 20 nt, Artificial Sequence
  Synthetic
cacaaagcuuaagaucuaaa

SEQ ID NO: 437025 - RNA, 21 nt, Artificial Sequence
  Synthetic
ucacaaagcuuaagaucuaaa

SEQ ID NO: 437026 - RNA, 22 nt, Artificial Sequence
  Synthetic
cucacaaagcuuaagaucuaaa

SEQ ID NO: 437027 - RNA, 23 nt, Artificial Sequence
  Synthetic
ccucacaaagcuuaagaucuaaa

SEQ ID NO: 437028 - RNA, 24 nt, Artificial Sequence
  Synthetic
accucacaaagcuuaagaucuaaa

SEQ ID NO: 437029 - RNA, 18 nt, Artificial Sequence
  Synthetic
agaauauggagaucuaaa

SEQ ID NO: 437030 - RNA, 19 nt, Artificial Sequence
  Synthetic
gagaauauggagaucuaaa

SEQ ID NO: 437031 - RNA, 20 nt, Artificial Sequence
  Synthetic
agagaauauggagaucuaaa

SEQ ID NO: 437032 - RNA, 21 nt, Artificial Sequence
  Synthetic
aagagaauauggagaucuaaa

SEQ ID NO: 437033 - RNA, 22 nt, Artificial Sequence
  Synthetic
caagagaauauggagaucuaaa

SEQ ID NO: 437034 - RNA, 23 nt, Artificial Sequence
  Synthetic
gcaagagaauauggagaucuaaa

SEQ ID NO: 437035 - RNA, 24 nt, Artificial Sequence
  Synthetic
ggcaagagaauauggagaucuaaa

SEQ ID NO: 437036 - RNA, 18 nt, Artificial Sequence
  Synthetic
auuagcaagaacucuaaa

SEQ ID NO: 437037 - RNA, 19 nt, Artificial Sequence
  Synthetic
cauuagcaagaacucuaaa

SEQ ID NO: 437038 - RNA, 20 nt, Artificial Sequence
  Synthetic
ucauuagcaagaacucuaaa

SEQ ID NO: 437039 - RNA, 21 nt, Artificial Sequence
  Synthetic
aucauuagcaagaacucuaaa

SEQ ID NO: 437040 - RNA, 22 nt, Artificial Sequence
  Synthetic
caucauuagcaagaacucuaaa

SEQ ID NO: 437041 - RNA, 23 nt, Artificial Sequence
  Synthetic
ccaucauuagcaagaacucuaaa

SEQ ID NO: 437042 - RNA, 24 nt, Artificial Sequence
  Synthetic
cccaucauuagcaagaacucuaaa

SEQ ID NO: 437043 - RNA, 18 nt, Artificial Sequence
  Synthetic
aguuucugacccucuaaa

SEQ ID NO: 437044 - RNA, 19 nt, Artificial Sequence
  Synthetic
uaguuucugacccucuaaa

SEQ ID NO: 437045 - RNA, 20 nt, Artificial Sequence
  Synthetic
auaguuucugacccucuaaa

SEQ ID NO: 437046 - RNA, 21 nt, Artificial Sequence
  Synthetic
uauaguuucugacccucuaaa

SEQ ID NO: 437047 - RNA, 22 nt, Artificial Sequence
  Synthetic
uuauaguuucugacccucuaaa

SEQ ID NO: 437048 - RNA, 23 nt, Artificial Sequence
  Synthetic
uuuauaguuucugacccucuaaa

SEQ ID NO: 437049 - RNA, 24 nt, Artificial Sequence
  Synthetic
cuuuauaguuucugacccucuaaa

SEQ ID NO: 437050 - RNA, 18 nt, Artificial Sequence
  Synthetic
ggacuuugcagcucuaaa

SEQ ID NO: 437051 - RNA, 19 nt, Artificial Sequence
  Synthetic
uggacuuugcagcucuaaa

SEQ ID NO: 437052 - RNA, 20 nt, Artificial Sequence
  Synthetic
uuggacuuugcagcucuaaa

SEQ ID NO: 437053 - RNA, 21 nt, Artificial Sequence
  Synthetic
auuggacuuugcagcucuaaa

SEQ ID NO: 437054 - RNA, 22 nt, Artificial Sequence
  Synthetic
aauuggacuuugcagcucuaaa

SEQ ID NO: 437055 - RNA, 23 nt, Artificial Sequence
  Synthetic
gaauuggacuuugcagcucuaaa

SEQ ID NO: 437056 - RNA, 24 nt, Artificial Sequence
  Synthetic
ugaauuggacuuugcagcucuaaa

SEQ ID NO: 437057 - RNA, 18 nt, Artificial Sequence
  Synthetic
ugaauacuuaucucuaaa

SEQ ID NO: 437058 - RNA, 19 nt, Artificial Sequence
  Synthetic
augaauacuuaucucuaaa

SEQ ID NO: 437059 - RNA, 20 nt, Artificial Sequence
  Synthetic
uaugaauacuuaucucuaaa

SEQ ID NO: 437060 - RNA, 21 nt, Artificial Sequence
  Synthetic
auaugaauacuuaucucuaaa

SEQ ID NO: 437061 - RNA, 22 nt, Artificial Sequence
  Synthetic
uauaugaauacuuaucucuaaa

SEQ ID NO: 437062 - RNA, 23 nt, Artificial Sequence
  Synthetic
auauaugaauacuuaucucuaaa

SEQ ID NO: 437063 - RNA, 24 nt, Artificial Sequence
  Synthetic
uauauaugaauacuuaucucuaaa

SEQ ID NO: 437064 - RNA, 18 nt, Artificial Sequence
  Synthetic
cgguuuucugucucuaaa

SEQ ID NO: 437065 - RNA, 19 nt, Artificial Sequence
  Synthetic
ucgguuuucugucucuaaa

SEQ ID NO: 437066 - RNA, 20 nt, Artificial Sequence
  Synthetic
cucgguuuucugucucuaaa

SEQ ID NO: 437067 - RNA, 21 nt, Artificial Sequence
  Synthetic
ucucgguuuucugucucuaaa

SEQ ID NO: 437068 - RNA, 22 nt, Artificial Sequence
  Synthetic
gucucgguuuucugucucuaaa

SEQ ID NO: 437069 - RNA, 23 nt, Artificial Sequence
  Synthetic
agucucgguuuucugucucuaaa

SEQ ID NO: 437070 - RNA, 24 nt, Artificial Sequence
  Synthetic
gagucucgguuuucugucucuaaa

SEQ ID NO: 437071 - RNA, 18 nt, Artificial Sequence
  Synthetic
aaggugacuuucucuaaa

SEQ ID NO: 437072 - RNA, 19 nt, Artificial Sequence
  Synthetic
uaaggugacuuucucuaaa

SEQ ID NO: 437073 - RNA, 20 nt, Artificial Sequence
  Synthetic
cuaaggugacuuucucuaaa

SEQ ID NO: 437074 - RNA, 21 nt, Artificial Sequence
  Synthetic
ucuaaggugacuuucucuaaa

SEQ ID NO: 437075 - RNA, 22 nt, Artificial Sequence
  Synthetic
uucuaaggugacuuucucuaaa

SEQ ID NO: 437076 - RNA, 23 nt, Artificial Sequence
  Synthetic
cuucuaaggugacuuucucuaaa

SEQ ID NO: 437077 - RNA, 24 nt, Artificial Sequence
  Synthetic
ucuucuaaggugacuuucucuaaa

SEQ ID NO: 437078 - RNA, 18 nt, Artificial Sequence
  Synthetic
uacccaauauggucuaaa

SEQ ID NO: 437079 - RNA, 19 nt, Artificial Sequence
  Synthetic
uuacccaauauggucuaaa

SEQ ID NO: 437080 - RNA, 20 nt, Artificial Sequence
  Synthetic
guuacccaauauggucuaaa

SEQ ID NO: 437081 - RNA, 21 nt, Artificial Sequence
  Synthetic
aguuacccaauauggucuaaa

SEQ ID NO: 437082 - RNA, 22 nt, Artificial Sequence
  Synthetic
aaguuacccaauauggucuaaa

SEQ ID NO: 437083 - RNA, 23 nt, Artificial Sequence
  Synthetic
gaaguuacccaauauggucuaaa

SEQ ID NO: 437084 - RNA, 24 nt, Artificial Sequence
  Synthetic
agaaguuacccaauauggucuaaa

SEQ ID NO: 437085 - RNA, 18 nt, Artificial Sequence
  Synthetic
acauauuuuaugucuaaa

SEQ ID NO: 437086 - RNA, 19 nt, Artificial Sequence
  Synthetic
aacauauuuuaugucuaaa

SEQ ID NO: 437087 - RNA, 20 nt, Artificial Sequence
  Synthetic
caacauauuuuaugucuaaa

SEQ ID NO: 437088 - RNA, 21 nt, Artificial Sequence
  Synthetic
ucaacauauuuuaugucuaaa

SEQ ID NO: 437089 - RNA, 22 nt, Artificial Sequence
  Synthetic
aucaacauauuuuaugucuaaa

SEQ ID NO: 437090 - RNA, 23 nt, Artificial Sequence
  Synthetic
aaucaacauauuuuaugucuaaa

SEQ ID NO: 437091 - RNA, 24 nt, Artificial Sequence
  Synthetic
aaaucaacauauuuuaugucuaaa

SEQ ID NO: 437092 - RNA, 18 nt, Artificial Sequence
  Synthetic
uauuuucuacugucuaaa

SEQ ID NO: 437093 - RNA, 19 nt, Artificial Sequence
  Synthetic
auauuuucuacugucuaaa

SEQ ID NO: 437094 - RNA, 20 nt, Artificial Sequence
  Synthetic
uauauuuucuacugucuaaa

SEQ ID NO: 437095 - RNA, 21 nt, Artificial Sequence
  Synthetic
guauauuuucuacugucuaaa

SEQ ID NO: 437096 - RNA, 22 nt, Artificial Sequence
  Synthetic
gguauauuuucuacugucuaaa

SEQ ID NO: 437097 - RNA, 23 nt, Artificial Sequence
  Synthetic
ugguauauuuucuacugucuaaa

SEQ ID NO: 437098 - RNA, 24 nt, Artificial Sequence
  Synthetic
augguauauuuucuacugucuaaa

SEQ ID NO: 437099 - RNA, 18 nt, Artificial Sequence
  Synthetic
aaaucuugcaauucuaaa

SEQ ID NO: 437100 - RNA, 19 nt, Artificial Sequence
  Synthetic
uaaaucuugcaauucuaaa

SEQ ID NO: 437101 - RNA, 20 nt, Artificial Sequence
  Synthetic
cuaaaucuugcaauucuaaa

SEQ ID NO: 437102 - RNA, 21 nt, Artificial Sequence
  Synthetic
ucuaaaucuugcaauucuaaa

SEQ ID NO: 437103 - RNA, 22 nt, Artificial Sequence
  Synthetic
aucuaaaucuugcaauucuaaa

SEQ ID NO: 437104 - RNA, 23 nt, Artificial Sequence
  Synthetic
aaucuaaaucuugcaauucuaaa

SEQ ID NO: 437105 - RNA, 24 nt, Artificial Sequence
  Synthetic
gaaucuaaaucuugcaauucuaaa

SEQ ID NO: 437106 - RNA, 18 nt, Artificial Sequence
  Synthetic
ucucugcuuaauucuaaa

SEQ ID NO: 437107 - RNA, 19 nt, Artificial Sequence
  Synthetic
uucucugcuuaauucuaaa

SEQ ID NO: 437108 - RNA, 20 nt, Artificial Sequence
  Synthetic
auucucugcuuaauucuaaa

SEQ ID NO: 437109 - RNA, 21 nt, Artificial Sequence
  Synthetic
gauucucugcuuaauucuaaa

SEQ ID NO: 437110 - RNA, 22 nt, Artificial Sequence
  Synthetic
ugauucucugcuuaauucuaaa

SEQ ID NO: 437111 - RNA, 23 nt, Artificial Sequence
  Synthetic
uugauucucugcuuaauucuaaa

SEQ ID NO: 437112 - RNA, 24 nt, Artificial Sequence
  Synthetic
uuugauucucugcuuaauucuaaa

SEQ ID NO: 437113 - RNA, 18 nt, Artificial Sequence
  Synthetic
acuuagcuuuauucuaaa

SEQ ID NO: 437114 - RNA, 19 nt, Artificial Sequence
  Synthetic
uacuuagcuuuauucuaaa

SEQ ID NO: 437115 - RNA, 20 nt, Artificial Sequence
  Synthetic
uuacuuagcuuuauucuaaa

SEQ ID NO: 437116 - RNA, 21 nt, Artificial Sequence
  Synthetic
uuuacuuagcuuuauucuaaa

SEQ ID NO: 437117 - RNA, 22 nt, Artificial Sequence
  Synthetic
uuuuacuuagcuuuauucuaaa

SEQ ID NO: 437118 - RNA, 23 nt, Artificial Sequence
  Synthetic
uuuuuacuuagcuuuauucuaaa

SEQ ID NO: 437119 - RNA, 24 nt, Artificial Sequence
  Synthetic
cuuuuuacuuagcuuuauucuaaa

SEQ ID NO: 437120 - RNA, 18 nt, Artificial Sequence
  Synthetic
uauauuuuaucuucuaaa

SEQ ID NO: 437121 - RNA, 19 nt, Artificial Sequence
  Synthetic
auauauuuuaucuucuaaa

SEQ ID NO: 437122 - RNA, 20 nt, Artificial Sequence
  Synthetic
uauauauuuuaucuucuaaa

SEQ ID NO: 437123 - RNA, 21 nt, Artificial Sequence
  Synthetic
cuauauauuuuaucuucuaaa

SEQ ID NO: 437124 - RNA, 22 nt, Artificial Sequence
  Synthetic
ucuauauauuuuaucuucuaaa

SEQ ID NO: 437125 - RNA, 23 nt, Artificial Sequence
  Synthetic
cucuauauauuuuaucuucuaaa

SEQ ID NO: 437126 - RNA, 24 nt, Artificial Sequence
  Synthetic
ucucuauauauuuuaucuucuaaa

SEQ ID NO: 437127 - RNA, 18 nt, Artificial Sequence
  Synthetic
acucuucaucuuucuaaa

SEQ ID NO: 437128 - RNA, 19 nt, Artificial Sequence
  Synthetic
aacucuucaucuuucuaaa

SEQ ID NO: 437129 - RNA, 20 nt, Artificial Sequence
  Synthetic
aaacucuucaucuuucuaaa

SEQ ID NO: 437130 - RNA, 21 nt, Artificial Sequence
  Synthetic
aaaacucuucaucuuucuaaa

SEQ ID NO: 437131 - RNA, 22 nt, Artificial Sequence
  Synthetic
caaaacucuucaucuuucuaaa

SEQ ID NO: 437132 - RNA, 23 nt, Artificial Sequence
  Synthetic
ccaaaacucuucaucuuucuaaa

SEQ ID NO: 437133 - RNA, 24 nt, Artificial Sequence
  Synthetic
uccaaaacucuucaucuuucuaaa

SEQ ID NO: 437134 - RNA, 18 nt, Artificial Sequence
  Synthetic
gccuuuuaucuuucuaaa

SEQ ID NO: 437135 - RNA, 19 nt, Artificial Sequence
  Synthetic
agccuuuuaucuuucuaaa

SEQ ID NO: 437136 - RNA, 20 nt, Artificial Sequence
  Synthetic
uagccuuuuaucuuucuaaa

SEQ ID NO: 437137 - RNA, 21 nt, Artificial Sequence
  Synthetic
uuagccuuuuaucuuucuaaa

SEQ ID NO: 437138 - RNA, 22 nt, Artificial Sequence
  Synthetic
guuagccuuuuaucuuucuaaa

SEQ ID NO: 437139 - RNA, 23 nt, Artificial Sequence
  Synthetic
uguuagccuuuuaucuuucuaaa

SEQ ID NO: 437140 - RNA, 24 nt, Artificial Sequence
  Synthetic
auguuagccuuuuaucuuucuaaa

SEQ ID NO: 437141 - RNA, 18 nt, Artificial Sequence
  Synthetic
aacaugugcuuuucuaaa

SEQ ID NO: 437142 - RNA, 19 nt, Artificial Sequence
  Synthetic
aaacaugugcuuuucuaaa

SEQ ID NO: 437143 - RNA, 20 nt, Artificial Sequence
  Synthetic
uaaacaugugcuuuucuaaa

SEQ ID NO: 437144 - RNA, 21 nt, Artificial Sequence
  Synthetic
cuaaacaugugcuuuucuaaa

SEQ ID NO: 437145 - RNA, 22 nt, Artificial Sequence
  Synthetic
ucuaaacaugugcuuuucuaaa

SEQ ID NO: 437146 - RNA, 23 nt, Artificial Sequence
  Synthetic
gucuaaacaugugcuuuucuaaa

SEQ ID NO: 437147 - RNA, 24 nt, Artificial Sequence
  Synthetic
ugucuaaacaugugcuuuucuaaa

SEQ ID NO: 437148 - RNA, 18 nt, Artificial Sequence
  Synthetic
agaauuggaaaaaguaaa

SEQ ID NO: 437149 - RNA, 19 nt, Artificial Sequence
  Synthetic
cagaauuggaaaaaguaaa

SEQ ID NO: 437150 - RNA, 20 nt, Artificial Sequence
  Synthetic
gcagaauuggaaaaaguaaa

SEQ ID NO: 437151 - RNA, 21 nt, Artificial Sequence
  Synthetic
cgcagaauuggaaaaaguaaa

SEQ ID NO: 437152 - RNA, 22 nt, Artificial Sequence
  Synthetic
acgcagaauuggaaaaaguaaa

SEQ ID NO: 437153 - RNA, 23 nt, Artificial Sequence
  Synthetic
cacgcagaauuggaaaaaguaaa

SEQ ID NO: 437154 - RNA, 24 nt, Artificial Sequence
  Synthetic
acacgcagaauuggaaaaaguaaa

SEQ ID NO: 437155 - RNA, 18 nt, Artificial Sequence
  Synthetic
agauccuccaaaaguaaa

SEQ ID NO: 437156 - RNA, 19 nt, Artificial Sequence
  Synthetic
cagauccuccaaaaguaaa

SEQ ID NO: 437157 - RNA, 20 nt, Artificial Sequence
  Synthetic
gcagauccuccaaaaguaaa

SEQ ID NO: 437158 - RNA, 21 nt, Artificial Sequence
  Synthetic
agcagauccuccaaaaguaaa

SEQ ID NO: 437159 - RNA, 22 nt, Artificial Sequence
  Synthetic
cagcagauccuccaaaaguaaa

SEQ ID NO: 437160 - RNA, 23 nt, Artificial Sequence
  Synthetic
ucagcagauccuccaaaaguaaa

SEQ ID NO: 437161 - RNA, 24 nt, Artificial Sequence
  Synthetic
aucagcagauccuccaaaaguaaa

SEQ ID NO: 437162 - RNA, 18 nt, Artificial Sequence
  Synthetic
aguagacagaaaaguaaa

SEQ ID NO: 437163 - RNA, 19 nt, Artificial Sequence
  Synthetic
aaguagacagaaaaguaaa

SEQ ID NO: 437164 - RNA, 20 nt, Artificial Sequence
  Synthetic
aaaguagacagaaaaguaaa

SEQ ID NO: 437165 - RNA, 21 nt, Artificial Sequence
  Synthetic
aaaaguagacagaaaaguaaa

SEQ ID NO: 437166 - RNA, 22 nt, Artificial Sequence
  Synthetic
gaaaaguagacagaaaaguaaa

SEQ ID NO: 437167 - RNA, 23 nt, Artificial Sequence
  Synthetic
agaaaaguagacagaaaaguaaa

SEQ ID NO: 437168 - RNA, 24 nt, Artificial Sequence
  Synthetic
gagaaaaguagacagaaaaguaaa

SEQ ID NO: 437169 - RNA, 18 nt, Artificial Sequence
  Synthetic
ugaaauaacgaaaguaaa

SEQ ID NO: 437170 - RNA, 19 nt, Artificial Sequence
  Synthetic
augaaauaacgaaaguaaa

SEQ ID NO: 437171 - RNA, 20 nt, Artificial Sequence
  Synthetic
aaugaaauaacgaaaguaaa

SEQ ID NO: 437172 - RNA, 21 nt, Artificial Sequence
  Synthetic
aaaugaaauaacgaaaguaaa

SEQ ID NO: 437173 - RNA, 22 nt, Artificial Sequence
  Synthetic
uaaaugaaauaacgaaaguaaa

SEQ ID NO: 437174 - RNA, 23 nt, Artificial Sequence
  Synthetic
cuaaaugaaauaacgaaaguaaa

SEQ ID NO: 437175 - RNA, 24 nt, Artificial Sequence
  Synthetic
acuaaaugaaauaacgaaaguaaa

SEQ ID NO: 437176 - RNA, 18 nt, Artificial Sequence
  Synthetic
guugcucaggaaaguaaa

SEQ ID NO: 437177 - RNA, 19 nt, Artificial Sequence
  Synthetic
gguugcucaggaaaguaaa

SEQ ID NO: 437178 - RNA, 20 nt, Artificial Sequence
  Synthetic
ugguugcucaggaaaguaaa

SEQ ID NO: 437179 - RNA, 21 nt, Artificial Sequence
  Synthetic
cugguugcucaggaaaguaaa

SEQ ID NO: 437180 - RNA, 22 nt, Artificial Sequence
  Synthetic
gcugguugcucaggaaaguaaa

SEQ ID NO: 437181 - RNA, 23 nt, Artificial Sequence
  Synthetic
agcugguugcucaggaaaguaaa

SEQ ID NO: 437182 - RNA, 24 nt, Artificial Sequence
  Synthetic
cagcugguugcucaggaaaguaaa

SEQ ID NO: 437183 - RNA, 18 nt, Artificial Sequence
  Synthetic
cucuucagauaaaguaaa

SEQ ID NO: 437184 - RNA, 19 nt, Artificial Sequence
  Synthetic
acucuucagauaaaguaaa

SEQ ID NO: 437185 - RNA, 20 nt, Artificial Sequence
  Synthetic
gacucuucagauaaaguaaa

SEQ ID NO: 437186 - RNA, 21 nt, Artificial Sequence
  Synthetic
agacucuucagauaaaguaaa

SEQ ID NO: 437187 - RNA, 22 nt, Artificial Sequence
  Synthetic
uagacucuucagauaaaguaaa

SEQ ID NO: 437188 - RNA, 23 nt, Artificial Sequence
  Synthetic
guagacucuucagauaaaguaaa

SEQ ID NO: 437189 - RNA, 24 nt, Artificial Sequence
  Synthetic
aguagacucuucagauaaaguaaa

SEQ ID NO: 437190 - RNA, 18 nt, Artificial Sequence
  Synthetic
cugaaagggagaaguaaa

SEQ ID NO: 437191 - RNA, 19 nt, Artificial Sequence
  Synthetic
ccugaaagggagaaguaaa

SEQ ID NO: 437192 - RNA, 20 nt, Artificial Sequence
  Synthetic
uccugaaagggagaaguaaa

SEQ ID NO: 437193 - RNA, 21 nt, Artificial Sequence
  Synthetic
auccugaaagggagaaguaaa

SEQ ID NO: 437194 - RNA, 22 nt, Artificial Sequence
  Synthetic
cauccugaaagggagaaguaaa

SEQ ID NO: 437195 - RNA, 23 nt, Artificial Sequence
  Synthetic
ccauccugaaagggagaaguaaa

SEQ ID NO: 437196 - RNA, 24 nt, Artificial Sequence
  Synthetic
uccauccugaaagggagaaguaaa

SEQ ID NO: 437197 - RNA, 18 nt, Artificial Sequence
  Synthetic
guugagaugagaaguaaa

SEQ ID NO: 437198 - RNA, 19 nt, Artificial Sequence
  Synthetic
gguugagaugagaaguaaa

SEQ ID NO: 437199 - RNA, 20 nt, Artificial Sequence
  Synthetic
ugguugagaugagaaguaaa

SEQ ID NO: 437200 - RNA, 21 nt, Artificial Sequence
  Synthetic
gugguugagaugagaaguaaa

SEQ ID NO: 437201 - RNA, 22 nt, Artificial Sequence
  Synthetic
ggugguugagaugagaaguaaa

SEQ ID NO: 437202 - RNA, 23 nt, Artificial Sequence
  Synthetic
aggugguugagaugagaaguaaa

SEQ ID NO: 437203 - RNA, 24 nt, Artificial Sequence
  Synthetic
caggugguugagaugagaaguaaa

SEQ ID NO: 437204 - RNA, 18 nt, Artificial Sequence
  Synthetic
uagcaacugauaaguaaa

SEQ ID NO: 437205 - RNA, 19 nt, Artificial Sequence
  Synthetic
cuagcaacugauaaguaaa

SEQ ID NO: 437206 - RNA, 20 nt, Artificial Sequence
  Synthetic
acuagcaacugauaaguaaa

SEQ ID NO: 437207 - RNA, 21 nt, Artificial Sequence
  Synthetic
aacuagcaacugauaaguaaa

SEQ ID NO: 437208 - RNA, 22 nt, Artificial Sequence
  Synthetic
caacuagcaacugauaaguaaa

SEQ ID NO: 437209 - RNA, 23 nt, Artificial Sequence
  Synthetic
ucaacuagcaacugauaaguaaa

SEQ ID NO: 437210 - RNA, 24 nt, Artificial Sequence
  Synthetic
gucaacuagcaacugauaaguaaa

SEQ ID NO: 437211 - RNA, 18 nt, Artificial Sequence
  Synthetic
aagacauauauaaguaaa

SEQ ID NO: 437212 - RNA, 19 nt, Artificial Sequence
  Synthetic
aaagacauauauaaguaaa

SEQ ID NO: 437213 - RNA, 20 nt, Artificial Sequence
  Synthetic
caaagacauauauaaguaaa

SEQ ID NO: 437214 - RNA, 21 nt, Artificial Sequence
  Synthetic
ucaaagacauauauaaguaaa

SEQ ID NO: 437215 - RNA, 22 nt, Artificial Sequence
  Synthetic
uucaaagacauauauaaguaaa

SEQ ID NO: 437216 - RNA, 23 nt, Artificial Sequence
  Synthetic
cuucaaagacauauauaaguaaa

SEQ ID NO: 437217 - RNA, 24 nt, Artificial Sequence
  Synthetic
ucuucaaagacauauauaaguaaa

SEQ ID NO: 437218 - RNA, 18 nt, Artificial Sequence
  Synthetic
ccaucagcacuaaguaaa

SEQ ID NO: 437219 - RNA, 19 nt, Artificial Sequence
  Synthetic
uccaucagcacuaaguaaa

SEQ ID NO: 437220 - RNA, 20 nt, Artificial Sequence
  Synthetic
guccaucagcacuaaguaaa

SEQ ID NO: 437221 - RNA, 21 nt, Artificial Sequence
  Synthetic
aguccaucagcacuaaguaaa

SEQ ID NO: 437222 - RNA, 22 nt, Artificial Sequence
  Synthetic
uaguccaucagcacuaaguaaa

SEQ ID NO: 437223 - RNA, 23 nt, Artificial Sequence
  Synthetic
cuaguccaucagcacuaaguaaa

SEQ ID NO: 437224 - RNA, 24 nt, Artificial Sequence
  Synthetic
ucuaguccaucagcacuaaguaaa

SEQ ID NO: 437225 - RNA, 18 nt, Artificial Sequence
  Synthetic
aagacaauccuaaguaaa

SEQ ID NO: 437226 - RNA, 19 nt, Artificial Sequence
  Synthetic
caagacaauccuaaguaaa

SEQ ID NO: 437227 - RNA, 20 nt, Artificial Sequence
  Synthetic
ccaagacaauccuaaguaaa

SEQ ID NO: 437228 - RNA, 21 nt, Artificial Sequence
  Synthetic
gccaagacaauccuaaguaaa

SEQ ID NO: 437229 - RNA, 22 nt, Artificial Sequence
  Synthetic
agccaagacaauccuaaguaaa

SEQ ID NO: 437230 - RNA, 23 nt, Artificial Sequence
  Synthetic
uagccaagacaauccuaaguaaa

SEQ ID NO: 437231 - RNA, 24 nt, Artificial Sequence
  Synthetic
auagccaagacaauccuaaguaaa

SEQ ID NO: 437232 - RNA, 18 nt, Artificial Sequence
  Synthetic
cucuagcaucuaaguaaa

SEQ ID NO: 437233 - RNA, 19 nt, Artificial Sequence
  Synthetic
ucucuagcaucuaaguaaa

SEQ ID NO: 437234 - RNA, 20 nt, Artificial Sequence
  Synthetic
uucucuagcaucuaaguaaa

SEQ ID NO: 437235 - RNA, 21 nt, Artificial Sequence
  Synthetic
guucucuagcaucuaaguaaa

SEQ ID NO: 437236 - RNA, 22 nt, Artificial Sequence
  Synthetic
uguucucuagcaucuaaguaaa

SEQ ID NO: 437237 - RNA, 23 nt, Artificial Sequence
  Synthetic
cuguucucuagcaucuaaguaaa

SEQ ID NO: 437238 - RNA, 24 nt, Artificial Sequence
  Synthetic
ccuguucucuagcaucuaaguaaa

SEQ ID NO: 437239 - RNA, 18 nt, Artificial Sequence
  Synthetic
ugagaauccaccaguaaa

SEQ ID NO: 437240 - RNA, 19 nt, Artificial Sequence
  Synthetic
cugagaauccaccaguaaa

SEQ ID NO: 437241 - RNA, 20 nt, Artificial Sequence
  Synthetic
acugagaauccaccaguaaa

SEQ ID NO: 437242 - RNA, 21 nt, Artificial Sequence
  Synthetic
uacugagaauccaccaguaaa

SEQ ID NO: 437243 - RNA, 22 nt, Artificial Sequence
  Synthetic
auacugagaauccaccaguaaa

SEQ ID NO: 437244 - RNA, 23 nt, Artificial Sequence
  Synthetic
gauacugagaauccaccaguaaa

SEQ ID NO: 437245 - RNA, 24 nt, Artificial Sequence
  Synthetic
agauacugagaauccaccaguaaa

SEQ ID NO: 437246 - RNA, 18 nt, Artificial Sequence
  Synthetic
aaugaaaacaucaguaaa

SEQ ID NO: 437247 - RNA, 19 nt, Artificial Sequence
  Synthetic
aaaugaaaacaucaguaaa

SEQ ID NO: 437248 - RNA, 20 nt, Artificial Sequence
  Synthetic
caaaugaaaacaucaguaaa

SEQ ID NO: 437249 - RNA, 21 nt, Artificial Sequence
  Synthetic
gcaaaugaaaacaucaguaaa

SEQ ID NO: 437250 - RNA, 22 nt, Artificial Sequence
  Synthetic
agcaaaugaaaacaucaguaaa

SEQ ID NO: 437251 - RNA, 23 nt, Artificial Sequence
  Synthetic
aagcaaaugaaaacaucaguaaa

SEQ ID NO: 437252 - RNA, 24 nt, Artificial Sequence
  Synthetic
gaagcaaaugaaaacaucaguaaa

SEQ ID NO: 437253 - RNA, 18 nt, Artificial Sequence
  Synthetic
gacaaaaauaucaguaaa

SEQ ID NO: 437254 - RNA, 19 nt, Artificial Sequence
  Synthetic
agacaaaaauaucaguaaa

SEQ ID NO: 437255 - RNA, 20 nt, Artificial Sequence
  Synthetic
cagacaaaaauaucaguaaa

SEQ ID NO: 437256 - RNA, 21 nt, Artificial Sequence
  Synthetic
acagacaaaaauaucaguaaa

SEQ ID NO: 437257 - RNA, 22 nt, Artificial Sequence
  Synthetic
aacagacaaaaauaucaguaaa

SEQ ID NO: 437258 - RNA, 23 nt, Artificial Sequence
  Synthetic
uaacagacaaaaauaucaguaaa

SEQ ID NO: 437259 - RNA, 24 nt, Artificial Sequence
  Synthetic
uuaacagacaaaaauaucaguaaa

SEQ ID NO: 437260 - RNA, 18 nt, Artificial Sequence
  Synthetic
uguauucauaucaguaaa

SEQ ID NO: 437261 - RNA, 19 nt, Artificial Sequence
  Synthetic
auguauucauaucaguaaa

SEQ ID NO: 437262 - RNA, 20 nt, Artificial Sequence
  Synthetic
aauguauucauaucaguaaa

SEQ ID NO: 437263 - RNA, 21 nt, Artificial Sequence
  Synthetic
aaauguauucauaucaguaaa

SEQ ID NO: 437264 - RNA, 22 nt, Artificial Sequence
  Synthetic
aaaauguauucauaucaguaaa

SEQ ID NO: 437265 - RNA, 23 nt, Artificial Sequence
  Synthetic
uaaaauguauucauaucaguaaa

SEQ ID NO: 437266 - RNA, 24 nt, Artificial Sequence
  Synthetic
uuaaaauguauucauaucaguaaa

SEQ ID NO: 437267 - RNA, 18 nt, Artificial Sequence
  Synthetic
auuguagaguucaguaaa

SEQ ID NO: 437268 - RNA, 19 nt, Artificial Sequence
  Synthetic
gauuguagaguucaguaaa

SEQ ID NO: 437269 - RNA, 20 nt, Artificial Sequence
  Synthetic
ugauuguagaguucaguaaa

SEQ ID NO: 437270 - RNA, 21 nt, Artificial Sequence
  Synthetic
uugauuguagaguucaguaaa

SEQ ID NO: 437271 - RNA, 22 nt, Artificial Sequence
  Synthetic
uuugauuguagaguucaguaaa

SEQ ID NO: 437272 - RNA, 23 nt, Artificial Sequence
  Synthetic
auuugauuguagaguucaguaaa

SEQ ID NO: 437273 - RNA, 24 nt, Artificial Sequence
  Synthetic
uauuugauuguagaguucaguaaa

SEQ ID NO: 437274 - RNA, 18 nt, Artificial Sequence
  Synthetic
ggugcuauuuucaguaaa

SEQ ID NO: 437275 - RNA, 19 nt, Artificial Sequence
  Synthetic
uggugcuauuuucaguaaa

SEQ ID NO: 437276 - RNA, 20 nt, Artificial Sequence
  Synthetic
cuggugcuauuuucaguaaa

SEQ ID NO: 437277 - RNA, 21 nt, Artificial Sequence
  Synthetic
acuggugcuauuuucaguaaa

SEQ ID NO: 437278 - RNA, 22 nt, Artificial Sequence
  Synthetic
cacuggugcuauuuucaguaaa

SEQ ID NO: 437279 - RNA, 23 nt, Artificial Sequence
  Synthetic
gcacuggugcuauuuucaguaaa

SEQ ID NO: 437280 - RNA, 24 nt, Artificial Sequence
  Synthetic
agcacuggugcuauuuucaguaaa

SEQ ID NO: 437281 - RNA, 18 nt, Artificial Sequence
  Synthetic
aagacuagaaagaguaaa

SEQ ID NO: 437282 - RNA, 19 nt, Artificial Sequence
  Synthetic
aaagacuagaaagaguaaa

SEQ ID NO: 437283 - RNA, 20 nt, Artificial Sequence
  Synthetic
gaaagacuagaaagaguaaa

SEQ ID NO: 437284 - RNA, 21 nt, Artificial Sequence
  Synthetic
ggaaagacuagaaagaguaaa

SEQ ID NO: 437285 - RNA, 22 nt, Artificial Sequence
  Synthetic
uggaaagacuagaaagaguaaa

SEQ ID NO: 437286 - RNA, 23 nt, Artificial Sequence
  Synthetic
uuggaaagacuagaaagaguaaa

SEQ ID NO: 437287 - RNA, 24 nt, Artificial Sequence
  Synthetic
guuggaaagacuagaaagaguaaa

SEQ ID NO: 437288 - RNA, 18 nt, Artificial Sequence
  Synthetic
caaucuuaacagaguaaa

SEQ ID NO: 437289 - RNA, 19 nt, Artificial Sequence
  Synthetic
acaaucuuaacagaguaaa

SEQ ID NO: 437290 - RNA, 20 nt, Artificial Sequence
  Synthetic
cacaaucuuaacagaguaaa

SEQ ID NO: 437291 - RNA, 21 nt, Artificial Sequence
  Synthetic
acacaaucuuaacagaguaaa

SEQ ID NO: 437292 - RNA, 22 nt, Artificial Sequence
  Synthetic
aacacaaucuuaacagaguaaa

SEQ ID NO: 437293 - RNA, 23 nt, Artificial Sequence
  Synthetic
aaacacaaucuuaacagaguaaa

SEQ ID NO: 437294 - RNA, 24 nt, Artificial Sequence
  Synthetic
uaaacacaaucuuaacagaguaaa

SEQ ID NO: 437295 - RNA, 18 nt, Artificial Sequence
  Synthetic
aaauuacucaugaguaaa

SEQ ID NO: 437296 - RNA, 19 nt, Artificial Sequence
  Synthetic
aaaauuacucaugaguaaa

SEQ ID NO: 437297 - RNA, 20 nt, Artificial Sequence
  Synthetic
aaaaauuacucaugaguaaa

SEQ ID NO: 437298 - RNA, 21 nt, Artificial Sequence
  Synthetic
caaaaauuacucaugaguaaa

SEQ ID NO: 437299 - RNA, 22 nt, Artificial Sequence
  Synthetic
ccaaaaauuacucaugaguaaa

SEQ ID NO: 437300 - RNA, 23 nt, Artificial Sequence
  Synthetic
gccaaaaauuacucaugaguaaa

SEQ ID NO: 437301 - RNA, 24 nt, Artificial Sequence
  Synthetic
ugccaaaaauuacucaugaguaaa

SEQ ID NO: 437302 - RNA, 18 nt, Artificial Sequence
  Synthetic
cagaauucccauaguaaa

SEQ ID NO: 437303 - RNA, 19 nt, Artificial Sequence
  Synthetic
acagaauucccauaguaaa

SEQ ID NO: 437304 - RNA, 20 nt, Artificial Sequence
  Synthetic
aacagaauucccauaguaaa

SEQ ID NO: 437305 - RNA, 21 nt, Artificial Sequence
  Synthetic
aaacagaauucccauaguaaa

SEQ ID NO: 437306 - RNA, 22 nt, Artificial Sequence
  Synthetic
gaaacagaauucccauaguaaa

SEQ ID NO: 437307 - RNA, 23 nt, Artificial Sequence
  Synthetic
ugaaacagaauucccauaguaaa

SEQ ID NO: 437308 - RNA, 24 nt, Artificial Sequence
  Synthetic
cugaaacagaauucccauaguaaa

SEQ ID NO: 437309 - RNA, 18 nt, Artificial Sequence
  Synthetic
aagucaggauauaguaaa

SEQ ID NO: 437310 - RNA, 19 nt, Artificial Sequence
  Synthetic
aaagucaggauauaguaaa

SEQ ID NO: 437311 - RNA, 20 nt, Artificial Sequence
  Synthetic
gaaagucaggauauaguaaa

SEQ ID NO: 437312 - RNA, 21 nt, Artificial Sequence
  Synthetic
agaaagucaggauauaguaaa

SEQ ID NO: 437313 - RNA, 22 nt, Artificial Sequence
  Synthetic
uagaaagucaggauauaguaaa

SEQ ID NO: 437314 - RNA, 23 nt, Artificial Sequence
  Synthetic
cuagaaagucaggauauaguaaa

SEQ ID NO: 437315 - RNA, 24 nt, Artificial Sequence
  Synthetic
gcuagaaagucaggauauaguaaa

SEQ ID NO: 437316 - RNA, 18 nt, Artificial Sequence
  Synthetic
aaaaagaagccuaguaaa

SEQ ID NO: 437317 - RNA, 19 nt, Artificial Sequence
  Synthetic
uaaaaagaagccuaguaaa

SEQ ID NO: 437318 - RNA, 20 nt, Artificial Sequence
  Synthetic
auaaaaagaagccuaguaaa

SEQ ID NO: 437319 - RNA, 21 nt, Artificial Sequence
  Synthetic
cauaaaaagaagccuaguaaa

SEQ ID NO: 437320 - RNA, 22 nt, Artificial Sequence
  Synthetic
ucauaaaaagaagccuaguaaa

SEQ ID NO: 437321 - RNA, 23 nt, Artificial Sequence
  Synthetic
uucauaaaaagaagccuaguaaa

SEQ ID NO: 437322 - RNA, 24 nt, Artificial Sequence
  Synthetic
uuucauaaaaagaagccuaguaaa

SEQ ID NO: 437323 - RNA, 18 nt, Artificial Sequence
  Synthetic
uuugugaguccuaguaaa

SEQ ID NO: 437324 - RNA, 19 nt, Artificial Sequence
  Synthetic
guuugugaguccuaguaaa

SEQ ID NO: 437325 - RNA, 20 nt, Artificial Sequence
  Synthetic
aguuugugaguccuaguaaa

SEQ ID NO: 437326 - RNA, 21 nt, Artificial Sequence
  Synthetic
uaguuugugaguccuaguaaa

SEQ ID NO: 437327 - RNA, 22 nt, Artificial Sequence
  Synthetic
auaguuugugaguccuaguaaa

SEQ ID NO: 437328 - RNA, 23 nt, Artificial Sequence
  Synthetic
uauaguuugugaguccuaguaaa

SEQ ID NO: 437329 - RNA, 24 nt, Artificial Sequence
  Synthetic
cuauaguuugugaguccuaguaaa

SEQ ID NO: 437330 - RNA, 18 nt, Artificial Sequence
  Synthetic
cagagcugcuguaguaaa

SEQ ID NO: 437331 - RNA, 19 nt, Artificial Sequence
  Synthetic
gcagagcugcuguaguaaa

SEQ ID NO: 437332 - RNA, 20 nt, Artificial Sequence
  Synthetic
ggcagagcugcuguaguaaa

SEQ ID NO: 437333 - RNA, 21 nt, Artificial Sequence
  Synthetic
gggcagagcugcuguaguaaa

SEQ ID NO: 437334 - RNA, 22 nt, Artificial Sequence
  Synthetic
ugggcagagcugcuguaguaaa

SEQ ID NO: 437335 - RNA, 23 nt, Artificial Sequence
  Synthetic
cugggcagagcugcuguaguaaa

SEQ ID NO: 437336 - RNA, 24 nt, Artificial Sequence
  Synthetic
acugggcagagcugcuguaguaaa

SEQ ID NO: 437337 - RNA, 18 nt, Artificial Sequence
  Synthetic
ggcagagguuguaguaaa

SEQ ID NO: 437338 - RNA, 19 nt, Artificial Sequence
  Synthetic
aggcagagguuguaguaaa

SEQ ID NO: 437339 - RNA, 20 nt, Artificial Sequence
  Synthetic
aaggcagagguuguaguaaa

SEQ ID NO: 437340 - RNA, 21 nt, Artificial Sequence
  Synthetic
aaaggcagagguuguaguaaa

SEQ ID NO: 437341 - RNA, 22 nt, Artificial Sequence
  Synthetic
gaaaggcagagguuguaguaaa

SEQ ID NO: 437342 - RNA, 23 nt, Artificial Sequence
  Synthetic
ugaaaggcagagguuguaguaaa

SEQ ID NO: 437343 - RNA, 24 nt, Artificial Sequence
  Synthetic
cugaaaggcagagguuguaguaaa

SEQ ID NO: 437344 - RNA, 18 nt, Artificial Sequence
  Synthetic
uauuuuuggauuaguaaa

SEQ ID NO: 437345 - RNA, 19 nt, Artificial Sequence
  Synthetic
uuauuuuuggauuaguaaa

SEQ ID NO: 437346 - RNA, 20 nt, Artificial Sequence
  Synthetic
uuuauuuuuggauuaguaaa

SEQ ID NO: 437347 - RNA, 21 nt, Artificial Sequence
  Synthetic
cuuuauuuuuggauuaguaaa

SEQ ID NO: 437348 - RNA, 22 nt, Artificial Sequence
  Synthetic
ucuuuauuuuuggauuaguaaa

SEQ ID NO: 437349 - RNA, 23 nt, Artificial Sequence
  Synthetic
aucuuuauuuuuggauuaguaaa

SEQ ID NO: 437350 - RNA, 24 nt, Artificial Sequence
  Synthetic
uaucuuuauuuuuggauuaguaaa

SEQ ID NO: 437351 - RNA, 18 nt, Artificial Sequence
  Synthetic
gugacacagagacguaaa

SEQ ID NO: 437352 - RNA, 19 nt, Artificial Sequence
  Synthetic
cgugacacagagacguaaa

SEQ ID NO: 437353 - RNA, 20 nt, Artificial Sequence
  Synthetic
acgugacacagagacguaaa

SEQ ID NO: 437354 - RNA, 21 nt, Artificial Sequence
  Synthetic
aacgugacacagagacguaaa

SEQ ID NO: 437355 - RNA, 22 nt, Artificial Sequence
  Synthetic
aaacgugacacagagacguaaa

SEQ ID NO: 437356 - RNA, 23 nt, Artificial Sequence
  Synthetic
aaaacgugacacagagacguaaa

SEQ ID NO: 437357 - RNA, 24 nt, Artificial Sequence
  Synthetic
caaaacgugacacagagacguaaa

SEQ ID NO: 437358 - RNA, 18 nt, Artificial Sequence
  Synthetic
uuucaugugauacguaaa

SEQ ID NO: 437359 - RNA, 19 nt, Artificial Sequence
  Synthetic
auuucaugugauacguaaa

SEQ ID NO: 437360 - RNA, 20 nt, Artificial Sequence
  Synthetic
cauuucaugugauacguaaa

SEQ ID NO: 437361 - RNA, 21 nt, Artificial Sequence
  Synthetic
gcauuucaugugauacguaaa

SEQ ID NO: 437362 - RNA, 22 nt, Artificial Sequence
  Synthetic
ugcauuucaugugauacguaaa

SEQ ID NO: 437363 - RNA, 23 nt, Artificial Sequence
  Synthetic
cugcauuucaugugauacguaaa

SEQ ID NO: 437364 - RNA, 24 nt, Artificial Sequence
  Synthetic
acugcauuucaugugauacguaaa

SEQ ID NO: 437365 - RNA, 18 nt, Artificial Sequence
  Synthetic
aacaccaccaaagguaaa

SEQ ID NO: 437366 - RNA, 19 nt, Artificial Sequence
  Synthetic
aaacaccaccaaagguaaa

SEQ ID NO: 437367 - RNA, 20 nt, Artificial Sequence
  Synthetic
gaaacaccaccaaagguaaa

SEQ ID NO: 437368 - RNA, 21 nt, Artificial Sequence
  Synthetic
ugaaacaccaccaaagguaaa

SEQ ID NO: 437369 - RNA, 22 nt, Artificial Sequence
  Synthetic
augaaacaccaccaaagguaaa

SEQ ID NO: 437370 - RNA, 23 nt, Artificial Sequence
  Synthetic
uaugaaacaccaccaaagguaaa

SEQ ID NO: 437371 - RNA, 24 nt, Artificial Sequence
  Synthetic
guaugaaacaccaccaaagguaaa

SEQ ID NO: 437372 - RNA, 18 nt, Artificial Sequence
  Synthetic
gucuaaggugaagguaaa

SEQ ID NO: 437373 - RNA, 19 nt, Artificial Sequence
  Synthetic
agucuaaggugaagguaaa

SEQ ID NO: 437374 - RNA, 20 nt, Artificial Sequence
  Synthetic
aagucuaaggugaagguaaa

SEQ ID NO: 437375 - RNA, 21 nt, Artificial Sequence
  Synthetic
uaagucuaaggugaagguaaa

SEQ ID NO: 437376 - RNA, 22 nt, Artificial Sequence
  Synthetic
uuaagucuaaggugaagguaaa

SEQ ID NO: 437377 - RNA, 23 nt, Artificial Sequence
  Synthetic
uuuaagucuaaggugaagguaaa

SEQ ID NO: 437378 - RNA, 24 nt, Artificial Sequence
  Synthetic
guuuaagucuaaggugaagguaaa

SEQ ID NO: 437379 - RNA, 18 nt, Artificial Sequence
  Synthetic
gaaacacuuccagguaaa

SEQ ID NO: 437380 - RNA, 19 nt, Artificial Sequence
  Synthetic
agaaacacuuccagguaaa

SEQ ID NO: 437381 - RNA, 20 nt, Artificial Sequence
  Synthetic
aagaaacacuuccagguaaa

SEQ ID NO: 437382 - RNA, 21 nt, Artificial Sequence
  Synthetic
aaagaaacacuuccagguaaa

SEQ ID NO: 437383 - RNA, 22 nt, Artificial Sequence
  Synthetic
aaaagaaacacuuccagguaaa

SEQ ID NO: 437384 - RNA, 23 nt, Artificial Sequence
  Synthetic
aaaaagaaacacuuccagguaaa

SEQ ID NO: 437385 - RNA, 24 nt, Artificial Sequence
  Synthetic
aaaaaagaaacacuuccagguaaa

SEQ ID NO: 437386 - RNA, 18 nt, Artificial Sequence
  Synthetic
guaagauaaauagguaaa

SEQ ID NO: 437387 - RNA, 19 nt, Artificial Sequence
  Synthetic
uguaagauaaauagguaaa

SEQ ID NO: 437388 - RNA, 20 nt, Artificial Sequence
  Synthetic
cuguaagauaaauagguaaa

SEQ ID NO: 437389 - RNA, 21 nt, Artificial Sequence
  Synthetic
ccuguaagauaaauagguaaa

SEQ ID NO: 437390 - RNA, 22 nt, Artificial Sequence
  Synthetic
accuguaagauaaauagguaaa

SEQ ID NO: 437391 - RNA, 23 nt, Artificial Sequence
  Synthetic
aaccuguaagauaaauagguaaa

SEQ ID NO: 437392 - RNA, 24 nt, Artificial Sequence
  Synthetic
uaaccuguaagauaaauagguaaa

SEQ ID NO: 437393 - RNA, 18 nt, Artificial Sequence
  Synthetic
uuacuauauagggguaaa

SEQ ID NO: 437394 - RNA, 19 nt, Artificial Sequence
  Synthetic
uuuacuauauagggguaaa

SEQ ID NO: 437395 - RNA, 20 nt, Artificial Sequence
  Synthetic
uuuuacuauauagggguaaa

SEQ ID NO: 437396 - RNA, 21 nt, Artificial Sequence
  Synthetic
auuuuacuauauagggguaaa

SEQ ID NO: 437397 - RNA, 22 nt, Artificial Sequence
  Synthetic
uauuuuacuauauagggguaaa

SEQ ID NO: 437398 - RNA, 23 nt, Artificial Sequence
  Synthetic
auauuuuacuauauagggguaaa

SEQ ID NO: 437399 - RNA, 24 nt, Artificial Sequence
  Synthetic
uauauuuuacuauauagggguaaa

SEQ ID NO: 437400 - RNA, 18 nt, Artificial Sequence
  Synthetic
agaaacauuagggguaaa

SEQ ID NO: 437401 - RNA, 19 nt, Artificial Sequence
  Synthetic
cagaaacauuagggguaaa

SEQ ID NO: 437402 - RNA, 20 nt, Artificial Sequence
  Synthetic
ccagaaacauuagggguaaa

SEQ ID NO: 437403 - RNA, 21 nt, Artificial Sequence
  Synthetic
uccagaaacauuagggguaaa

SEQ ID NO: 437404 - RNA, 22 nt, Artificial Sequence
  Synthetic
uuccagaaacauuagggguaaa

SEQ ID NO: 437405 - RNA, 23 nt, Artificial Sequence
  Synthetic
cuuccagaaacauuagggguaaa

SEQ ID NO: 437406 - RNA, 24 nt, Artificial Sequence
  Synthetic
acuuccagaaacauuagggguaaa

SEQ ID NO: 437407 - RNA, 18 nt, Artificial Sequence
  Synthetic
gaagaacuuagggguaaa

SEQ ID NO: 437408 - RNA, 19 nt, Artificial Sequence
  Synthetic
ugaagaacuuagggguaaa

SEQ ID NO: 437409 - RNA, 20 nt, Artificial Sequence
  Synthetic
uugaagaacuuagggguaaa

SEQ ID NO: 437410 - RNA, 21 nt, Artificial Sequence
  Synthetic
guugaagaacuuagggguaaa

SEQ ID NO: 437411 - RNA, 22 nt, Artificial Sequence
  Synthetic
uguugaagaacuuagggguaaa

SEQ ID NO: 437412 - RNA, 23 nt, Artificial Sequence
  Synthetic
auguugaagaacuuagggguaaa

SEQ ID NO: 437413 - RNA, 24 nt, Artificial Sequence
  Synthetic
cauguugaagaacuuagggguaaa

SEQ ID NO: 437414 - RNA, 18 nt, Artificial Sequence
  Synthetic
cugauggaucuggguaaa

SEQ ID NO: 437415 - RNA, 19 nt, Artificial Sequence
  Synthetic
ucugauggaucuggguaaa

SEQ ID NO: 437416 - RNA, 20 nt, Artificial Sequence
  Synthetic
cucugauggaucuggguaaa

SEQ ID NO: 437417 - RNA, 21 nt, Artificial Sequence
  Synthetic
ccucugauggaucuggguaaa

SEQ ID NO: 437418 - RNA, 22 nt, Artificial Sequence
  Synthetic
uccucugauggaucuggguaaa

SEQ ID NO: 437419 - RNA, 23 nt, Artificial Sequence
  Synthetic
uuccucugauggaucuggguaaa

SEQ ID NO: 437420 - RNA, 24 nt, Artificial Sequence
  Synthetic
auuccucugauggaucuggguaaa

SEQ ID NO: 437421 - RNA, 18 nt, Artificial Sequence
  Synthetic
cuggaguuaaaugguaaa

SEQ ID NO: 437422 - RNA, 19 nt, Artificial Sequence
  Synthetic
ccuggaguuaaaugguaaa

SEQ ID NO: 437423 - RNA, 20 nt, Artificial Sequence
  Synthetic
uccuggaguuaaaugguaaa

SEQ ID NO: 437424 - RNA, 21 nt, Artificial Sequence
  Synthetic
guccuggaguuaaaugguaaa

SEQ ID NO: 437425 - RNA, 22 nt, Artificial Sequence
  Synthetic
uguccuggaguuaaaugguaaa

SEQ ID NO: 437426 - RNA, 23 nt, Artificial Sequence
  Synthetic
uuguccuggaguuaaaugguaaa

SEQ ID NO: 437427 - RNA, 24 nt, Artificial Sequence
  Synthetic
uuuguccuggaguuaaaugguaaa

SEQ ID NO: 437428 - RNA, 18 nt, Artificial Sequence
  Synthetic
guucaguugcaugguaaa

SEQ ID NO: 437429 - RNA, 19 nt, Artificial Sequence
  Synthetic
uguucaguugcaugguaaa

SEQ ID NO: 437430 - RNA, 20 nt, Artificial Sequence
  Synthetic
guguucaguugcaugguaaa

SEQ ID NO: 437431 - RNA, 21 nt, Artificial Sequence
  Synthetic
uguguucaguugcaugguaaa

SEQ ID NO: 437432 - RNA, 22 nt, Artificial Sequence
  Synthetic
cuguguucaguugcaugguaaa

SEQ ID NO: 437433 - RNA, 23 nt, Artificial Sequence
  Synthetic
ucuguguucaguugcaugguaaa

SEQ ID NO: 437434 - RNA, 24 nt, Artificial Sequence
  Synthetic
aucuguguucaguugcaugguaaa

SEQ ID NO: 437435 - RNA, 18 nt, Artificial Sequence
  Synthetic
ggugaaauaaaauguaaa

SEQ ID NO: 437436 - RNA, 19 nt, Artificial Sequence
  Synthetic
uggugaaauaaaauguaaa

SEQ ID NO: 437437 - RNA, 20 nt, Artificial Sequence
  Synthetic
guggugaaauaaaauguaaa

SEQ ID NO: 437438 - RNA, 21 nt, Artificial Sequence
  Synthetic
gguggugaaauaaaauguaaa

SEQ ID NO: 437439 - RNA, 22 nt, Artificial Sequence
  Synthetic
cgguggugaaauaaaauguaaa

SEQ ID NO: 437440 - RNA, 23 nt, Artificial Sequence
  Synthetic
ucgguggugaaauaaaauguaaa

SEQ ID NO: 437441 - RNA, 24 nt, Artificial Sequence
  Synthetic
cucgguggugaaauaaaauguaaa

SEQ ID NO: 437442 - RNA, 18 nt, Artificial Sequence
  Synthetic
uauuuuaagaaauguaaa

SEQ ID NO: 437443 - RNA, 19 nt, Artificial Sequence
  Synthetic
uuauuuuaagaaauguaaa

SEQ ID NO: 437444 - RNA, 20 nt, Artificial Sequence
  Synthetic
auuauuuuaagaaauguaaa

SEQ ID NO: 437445 - RNA, 21 nt, Artificial Sequence
  Synthetic
aauuauuuuaagaaauguaaa

SEQ ID NO: 437446 - RNA, 22 nt, Artificial Sequence
  Synthetic
gaauuauuuuaagaaauguaaa

SEQ ID NO: 437447 - RNA, 23 nt, Artificial Sequence
  Synthetic
agaauuauuuuaagaaauguaaa

SEQ ID NO: 437448 - RNA, 24 nt, Artificial Sequence
  Synthetic
gagaauuauuuuaagaaauguaaa

SEQ ID NO: 437449 - RNA, 18 nt, Artificial Sequence
  Synthetic
aaguuuaugaaauguaaa

SEQ ID NO: 437450 - RNA, 19 nt, Artificial Sequence
  Synthetic
aaaguuuaugaaauguaaa

SEQ ID NO: 437451 - RNA, 20 nt, Artificial Sequence
  Synthetic
uaaaguuuaugaaauguaaa

SEQ ID NO: 437452 - RNA, 21 nt, Artificial Sequence
  Synthetic
auaaaguuuaugaaauguaaa

SEQ ID NO: 437453 - RNA, 22 nt, Artificial Sequence
  Synthetic
uauaaaguuuaugaaauguaaa

SEQ ID NO: 437454 - RNA, 23 nt, Artificial Sequence
  Synthetic
cuauaaaguuuaugaaauguaaa

SEQ ID NO: 437455 - RNA, 24 nt, Artificial Sequence
  Synthetic
acuauaaaguuuaugaaauguaaa

SEQ ID NO: 437456 - RNA, 18 nt, Artificial Sequence
  Synthetic
uaaauaauacaauguaaa

SEQ ID NO: 437457 - RNA, 19 nt, Artificial Sequence
  Synthetic
guaaauaauacaauguaaa

SEQ ID NO: 437458 - RNA, 20 nt, Artificial Sequence
  Synthetic
aguaaauaauacaauguaaa

SEQ ID NO: 437459 - RNA, 21 nt, Artificial Sequence
  Synthetic
aaguaaauaauacaauguaaa

SEQ ID NO: 437460 - RNA, 22 nt, Artificial Sequence
  Synthetic
caaguaaauaauacaauguaaa

SEQ ID NO: 437461 - RNA, 23 nt, Artificial Sequence
  Synthetic
acaaguaaauaauacaauguaaa

SEQ ID NO: 437462 - RNA, 24 nt, Artificial Sequence
  Synthetic
gacaaguaaauaauacaauguaaa

SEQ ID NO: 437463 - RNA, 18 nt, Artificial Sequence
  Synthetic
uagaaauaaggauguaaa

SEQ ID NO: 437464 - RNA, 19 nt, Artificial Sequence
  Synthetic
auagaaauaaggauguaaa

SEQ ID NO: 437465 - RNA, 20 nt, Artificial Sequence
  Synthetic
cauagaaauaaggauguaaa

SEQ ID NO: 437466 - RNA, 21 nt, Artificial Sequence
  Synthetic
acauagaaauaaggauguaaa

SEQ ID NO: 437467 - RNA, 22 nt, Artificial Sequence
  Synthetic
aacauagaaauaaggauguaaa

SEQ ID NO: 437468 - RNA, 23 nt, Artificial Sequence
  Synthetic
aaacauagaaauaaggauguaaa

SEQ ID NO: 437469 - RNA, 24 nt, Artificial Sequence
  Synthetic
uaaacauagaaauaaggauguaaa

SEQ ID NO: 437470 - RNA, 18 nt, Artificial Sequence
  Synthetic
ucaaaaguccuauguaaa

SEQ ID NO: 437471 - RNA, 19 nt, Artificial Sequence
  Synthetic
uucaaaaguccuauguaaa

SEQ ID NO: 437472 - RNA, 20 nt, Artificial Sequence
  Synthetic
auucaaaaguccuauguaaa

SEQ ID NO: 437473 - RNA, 21 nt, Artificial Sequence
  Synthetic
uauucaaaaguccuauguaaa

SEQ ID NO: 437474 - RNA, 22 nt, Artificial Sequence
  Synthetic
uuauucaaaaguccuauguaaa

SEQ ID NO: 437475 - RNA, 23 nt, Artificial Sequence
  Synthetic
auuauucaaaaguccuauguaaa

SEQ ID NO: 437476 - RNA, 24 nt, Artificial Sequence
  Synthetic
gauuauucaaaaguccuauguaaa

SEQ ID NO: 437477 - RNA, 18 nt, Artificial Sequence
  Synthetic
gugaggggaaacuguaaa

SEQ ID NO: 437478 - RNA, 19 nt, Artificial Sequence
  Synthetic
ugugaggggaaacuguaaa

SEQ ID NO: 437479 - RNA, 20 nt, Artificial Sequence
  Synthetic
augugaggggaaacuguaaa

SEQ ID NO: 437480 - RNA, 21 nt, Artificial Sequence
  Synthetic
caugugaggggaaacuguaaa

SEQ ID NO: 437481 - RNA, 22 nt, Artificial Sequence
  Synthetic
ucaugugaggggaaacuguaaa

SEQ ID NO: 437482 - RNA, 23 nt, Artificial Sequence
  Synthetic
aucaugugaggggaaacuguaaa

SEQ ID NO: 437483 - RNA, 24 nt, Artificial Sequence
  Synthetic
uaucaugugaggggaaacuguaaa

SEQ ID NO: 437484 - RNA, 18 nt, Artificial Sequence
  Synthetic
cacaguaaucacuguaaa

SEQ ID NO: 437485 - RNA, 19 nt, Artificial Sequence
  Synthetic
gcacaguaaucacuguaaa

SEQ ID NO: 437486 - RNA, 20 nt, Artificial Sequence
  Synthetic
ugcacaguaaucacuguaaa

SEQ ID NO: 437487 - RNA, 21 nt, Artificial Sequence
  Synthetic
gugcacaguaaucacuguaaa

SEQ ID NO: 437488 - RNA, 22 nt, Artificial Sequence
  Synthetic
ugugcacaguaaucacuguaaa

SEQ ID NO: 437489 - RNA, 23 nt, Artificial Sequence
  Synthetic
augugcacaguaaucacuguaaa

SEQ ID NO: 437490 - RNA, 24 nt, Artificial Sequence
  Synthetic
aaugugcacaguaaucacuguaaa

SEQ ID NO: 437491 - RNA, 18 nt, Artificial Sequence
  Synthetic
uuaaauuuaaccuguaaa

SEQ ID NO: 437492 - RNA, 19 nt, Artificial Sequence
  Synthetic
auuaaauuuaaccuguaaa

SEQ ID NO: 437493 - RNA, 20 nt, Artificial Sequence
  Synthetic
uauuaaauuuaaccuguaaa

SEQ ID NO: 437494 - RNA, 21 nt, Artificial Sequence
  Synthetic
auauuaaauuuaaccuguaaa

SEQ ID NO: 437495 - RNA, 22 nt, Artificial Sequence
  Synthetic
cauauuaaauuuaaccuguaaa

SEQ ID NO: 437496 - RNA, 23 nt, Artificial Sequence
  Synthetic
ccauauuaaauuuaaccuguaaa

SEQ ID NO: 437497 - RNA, 24 nt, Artificial Sequence
  Synthetic
gccauauuaaauuuaaccuguaaa

SEQ ID NO: 437498 - RNA, 18 nt, Artificial Sequence
  Synthetic
uaauuucucagcuguaaa

SEQ ID NO: 437499 - RNA, 19 nt, Artificial Sequence
  Synthetic
uuaauuucucagcuguaaa

SEQ ID NO: 437500 - RNA, 20 nt, Artificial Sequence
  Synthetic
cuuaauuucucagcuguaaa

SEQ ID NO: 437501 - RNA, 21 nt, Artificial Sequence
  Synthetic
ucuuaauuucucagcuguaaa

SEQ ID NO: 437502 - RNA, 22 nt, Artificial Sequence
  Synthetic
gucuuaauuucucagcuguaaa

SEQ ID NO: 437503 - RNA, 23 nt, Artificial Sequence
  Synthetic
ugucuuaauuucucagcuguaaa

SEQ ID NO: 437504 - RNA, 24 nt, Artificial Sequence
  Synthetic
augucuuaauuucucagcuguaaa

SEQ ID NO: 437505 - RNA, 18 nt, Artificial Sequence
  Synthetic
aaaaauuaaugcuguaaa

SEQ ID NO: 437506 - RNA, 19 nt, Artificial Sequence
  Synthetic
aaaaaauuaaugcuguaaa

SEQ ID NO: 437507 - RNA, 20 nt, Artificial Sequence
  Synthetic
gaaaaaauuaaugcuguaaa

SEQ ID NO: 437508 - RNA, 21 nt, Artificial Sequence
  Synthetic
ugaaaaaauuaaugcuguaaa

SEQ ID NO: 437509 - RNA, 22 nt, Artificial Sequence
  Synthetic
gugaaaaaauuaaugcuguaaa

SEQ ID NO: 437510 - RNA, 23 nt, Artificial Sequence
  Synthetic
agugaaaaaauuaaugcuguaaa

SEQ ID NO: 437511 - RNA, 24 nt, Artificial Sequence
  Synthetic
aagugaaaaaauuaaugcuguaaa

SEQ ID NO: 437512 - RNA, 18 nt, Artificial Sequence
  Synthetic
acauugucauucuguaaa

SEQ ID NO: 437513 - RNA, 19 nt, Artificial Sequence
  Synthetic
uacauugucauucuguaaa

SEQ ID NO: 437514 - RNA, 20 nt, Artificial Sequence
  Synthetic
auacauugucauucuguaaa

SEQ ID NO: 437515 - RNA, 21 nt, Artificial Sequence
  Synthetic
uauacauugucauucuguaaa

SEQ ID NO: 437516 - RNA, 22 nt, Artificial Sequence
  Synthetic
auauacauugucauucuguaaa

SEQ ID NO: 437517 - RNA, 23 nt, Artificial Sequence
  Synthetic
uauauacauugucauucuguaaa

SEQ ID NO: 437518 - RNA, 24 nt, Artificial Sequence
  Synthetic
cuauauacauugucauucuguaaa

SEQ ID NO: 437519 - RNA, 18 nt, Artificial Sequence
  Synthetic
auuuucucuuucuguaaa

SEQ ID NO: 437520 - RNA, 19 nt, Artificial Sequence
  Synthetic
uauuuucucuuucuguaaa

SEQ ID NO: 437521 - RNA, 20 nt, Artificial Sequence
  Synthetic
auauuuucucuuucuguaaa

SEQ ID NO: 437522 - RNA, 21 nt, Artificial Sequence
  Synthetic
gauauuuucucuuucuguaaa

SEQ ID NO: 437523 - RNA, 22 nt, Artificial Sequence
  Synthetic
agauauuuucucuuucuguaaa

SEQ ID NO: 437524 - RNA, 23 nt, Artificial Sequence
  Synthetic
aagauauuuucucuuucuguaaa

SEQ ID NO: 437525 - RNA, 24 nt, Artificial Sequence
  Synthetic
aaagauauuuucucuuucuguaaa

SEQ ID NO: 437526 - RNA, 18 nt, Artificial Sequence
  Synthetic
caaauaaguuucuguaaa

SEQ ID NO: 437527 - RNA, 19 nt, Artificial Sequence
  Synthetic
acaaauaaguuucuguaaa

SEQ ID NO: 437528 - RNA, 20 nt, Artificial Sequence
  Synthetic
aacaaauaaguuucuguaaa

SEQ ID NO: 437529 - RNA, 21 nt, Artificial Sequence
  Synthetic
aaacaaauaaguuucuguaaa

SEQ ID NO: 437530 - RNA, 22 nt, Artificial Sequence
  Synthetic
gaaacaaauaaguuucuguaaa

SEQ ID NO: 437531 - RNA, 23 nt, Artificial Sequence
  Synthetic
ugaaacaaauaaguuucuguaaa

SEQ ID NO: 437532 - RNA, 24 nt, Artificial Sequence
  Synthetic
augaaacaaauaaguuucuguaaa

SEQ ID NO: 437533 - RNA, 18 nt, Artificial Sequence
  Synthetic
auuaugugaccguguaaa

SEQ ID NO: 437534 - RNA, 19 nt, Artificial Sequence
  Synthetic
gauuaugugaccguguaaa

SEQ ID NO: 437535 - RNA, 20 nt, Artificial Sequence
  Synthetic
ugauuaugugaccguguaaa

SEQ ID NO: 437536 - RNA, 21 nt, Artificial Sequence
  Synthetic
uugauuaugugaccguguaaa

SEQ ID NO: 437537 - RNA, 22 nt, Artificial Sequence
  Synthetic
uuugauuaugugaccguguaaa

SEQ ID NO: 437538 - RNA, 23 nt, Artificial Sequence
  Synthetic
cuuugauuaugugaccguguaaa

SEQ ID NO: 437539 - RNA, 24 nt, Artificial Sequence
  Synthetic
ccuuugauuaugugaccguguaaa

SEQ ID NO: 437540 - RNA, 18 nt, Artificial Sequence
  Synthetic
gaaucagaaagguguaaa

SEQ ID NO: 437541 - RNA, 19 nt, Artificial Sequence
  Synthetic
agaaucagaaagguguaaa

SEQ ID NO: 437542 - RNA, 20 nt, Artificial Sequence
  Synthetic
gagaaucagaaagguguaaa

SEQ ID NO: 437543 - RNA, 21 nt, Artificial Sequence
  Synthetic
agagaaucagaaagguguaaa

SEQ ID NO: 437544 - RNA, 22 nt, Artificial Sequence
  Synthetic
cagagaaucagaaagguguaaa

SEQ ID NO: 437545 - RNA, 23 nt, Artificial Sequence
  Synthetic
acagagaaucagaaagguguaaa

SEQ ID NO: 437546 - RNA, 24 nt, Artificial Sequence
  Synthetic
uacagagaaucagaaagguguaaa

SEQ ID NO: 437547 - RNA, 18 nt, Artificial Sequence
  Synthetic
uguguguguguguguaaa

SEQ ID NO: 437548 - RNA, 19 nt, Artificial Sequence
  Synthetic
guguguguguguguguaaa

SEQ ID NO: 437549 - RNA, 20 nt, Artificial Sequence
  Synthetic
uguguguguguguguguaaa

SEQ ID NO: 437550 - RNA, 21 nt, Artificial Sequence
  Synthetic
guguguguguguguguguaaa

SEQ ID NO: 437551 - RNA, 22 nt, Artificial Sequence
  Synthetic
uguguguguguguguguguaaa

SEQ ID NO: 437552 - RNA, 23 nt, Artificial Sequence
  Synthetic
guguguguguguguguguguaaa

SEQ ID NO: 437553 - RNA, 24 nt, Artificial Sequence
  Synthetic
uguguguguguguguguguguaaa

SEQ ID NO: 437554 - RNA, 18 nt, Artificial Sequence
  Synthetic
gucauggaagauuguaaa

SEQ ID NO: 437555 - RNA, 19 nt, Artificial Sequence
  Synthetic
ugucauggaagauuguaaa

SEQ ID NO: 437556 - RNA, 20 nt, Artificial Sequence
  Synthetic
augucauggaagauuguaaa

SEQ ID NO: 437557 - RNA, 21 nt, Artificial Sequence
  Synthetic
uaugucauggaagauuguaaa

SEQ ID NO: 437558 - RNA, 22 nt, Artificial Sequence
  Synthetic
uuaugucauggaagauuguaaa

SEQ ID NO: 437559 - RNA, 23 nt, Artificial Sequence
  Synthetic
uuuaugucauggaagauuguaaa

SEQ ID NO: 437560 - RNA, 24 nt, Artificial Sequence
  Synthetic
uuuuaugucauggaagauuguaaa

SEQ ID NO: 437561 - RNA, 18 nt, Artificial Sequence
  Synthetic
auggacaacccuuguaaa

SEQ ID NO: 437562 - RNA, 19 nt, Artificial Sequence
  Synthetic
gauggacaacccuuguaaa

SEQ ID NO: 437563 - RNA, 20 nt, Artificial Sequence
  Synthetic
ggauggacaacccuuguaaa

SEQ ID NO: 437564 - RNA, 21 nt, Artificial Sequence
  Synthetic
uggauggacaacccuuguaaa

SEQ ID NO: 437565 - RNA, 22 nt, Artificial Sequence
  Synthetic
uuggauggacaacccuuguaaa

SEQ ID NO: 437566 - RNA, 23 nt, Artificial Sequence
  Synthetic
uuuggauggacaacccuuguaaa

SEQ ID NO: 437567 - RNA, 24 nt, Artificial Sequence
  Synthetic
guuuggauggacaacccuuguaaa

SEQ ID NO: 437568 - RNA, 18 nt, Artificial Sequence
  Synthetic
uuccugcacccuuguaaa

SEQ ID NO: 437569 - RNA, 19 nt, Artificial Sequence
  Synthetic
guuccugcacccuuguaaa

SEQ ID NO: 437570 - RNA, 20 nt, Artificial Sequence
  Synthetic
uguuccugcacccuuguaaa

SEQ ID NO: 437571 - RNA, 21 nt, Artificial Sequence
  Synthetic
uuguuccugcacccuuguaaa

SEQ ID NO: 437572 - RNA, 22 nt, Artificial Sequence
  Synthetic
uuuguuccugcacccuuguaaa

SEQ ID NO: 437573 - RNA, 23 nt, Artificial Sequence
  Synthetic
auuuguuccugcacccuuguaaa

SEQ ID NO: 437574 - RNA, 24 nt, Artificial Sequence
  Synthetic
gauuuguuccugcacccuuguaaa

SEQ ID NO: 437575 - RNA, 18 nt, Artificial Sequence
  Synthetic
uauaccagaucuuguaaa

SEQ ID NO: 437576 - RNA, 19 nt, Artificial Sequence
  Synthetic
uuauaccagaucuuguaaa

SEQ ID NO: 437577 - RNA, 20 nt, Artificial Sequence
  Synthetic
uuuauaccagaucuuguaaa

SEQ ID NO: 437578 - RNA, 21 nt, Artificial Sequence
  Synthetic
uuuuauaccagaucuuguaaa

SEQ ID NO: 437579 - RNA, 22 nt, Artificial Sequence
  Synthetic
auuuuauaccagaucuuguaaa

SEQ ID NO: 437580 - RNA, 23 nt, Artificial Sequence
  Synthetic
gauuuuauaccagaucuuguaaa

SEQ ID NO: 437581 - RNA, 24 nt, Artificial Sequence
  Synthetic
ugauuuuauaccagaucuuguaaa

SEQ ID NO: 437582 - RNA, 18 nt, Artificial Sequence
  Synthetic
aucgauacaauuuguaaa

SEQ ID NO: 437583 - RNA, 19 nt, Artificial Sequence
  Synthetic
aaucgauacaauuuguaaa

SEQ ID NO: 437584 - RNA, 20 nt, Artificial Sequence
  Synthetic
uaaucgauacaauuuguaaa

SEQ ID NO: 437585 - RNA, 21 nt, Artificial Sequence
  Synthetic
auaaucgauacaauuuguaaa

SEQ ID NO: 437586 - RNA, 22 nt, Artificial Sequence
  Synthetic
aauaaucgauacaauuuguaaa

SEQ ID NO: 437587 - RNA, 23 nt, Artificial Sequence
  Synthetic
aaauaaucgauacaauuuguaaa

SEQ ID NO: 437588 - RNA, 24 nt, Artificial Sequence
  Synthetic
uaaauaaucgauacaauuuguaaa

SEQ ID NO: 437589 - RNA, 18 nt, Artificial Sequence
  Synthetic
aaugugguaauuuguaaa

SEQ ID NO: 437590 - RNA, 19 nt, Artificial Sequence
  Synthetic
uaaugugguaauuuguaaa

SEQ ID NO: 437591 - RNA, 20 nt, Artificial Sequence
  Synthetic
uuaaugugguaauuuguaaa

SEQ ID NO: 437592 - RNA, 21 nt, Artificial Sequence
  Synthetic
cuuaaugugguaauuuguaaa

SEQ ID NO: 437593 - RNA, 22 nt, Artificial Sequence
  Synthetic
gcuuaaugugguaauuuguaaa

SEQ ID NO: 437594 - RNA, 23 nt, Artificial Sequence
  Synthetic
ugcuuaaugugguaauuuguaaa

SEQ ID NO: 437595 - RNA, 24 nt, Artificial Sequence
  Synthetic
gugcuuaaugugguaauuuguaaa

SEQ ID NO: 437596 - RNA, 18 nt, Artificial Sequence
  Synthetic
aauucuuuuguuuguaaa

SEQ ID NO: 437597 - RNA, 19 nt, Artificial Sequence
  Synthetic
gaauucuuuuguuuguaaa

SEQ ID NO: 437598 - RNA, 20 nt, Artificial Sequence
  Synthetic
ggaauucuuuuguuuguaaa

SEQ ID NO: 437599 - RNA, 21 nt, Artificial Sequence
  Synthetic
gggaauucuuuuguuuguaaa

SEQ ID NO: 437600 - RNA, 22 nt, Artificial Sequence
  Synthetic
ugggaauucuuuuguuuguaaa

SEQ ID NO: 437601 - RNA, 23 nt, Artificial Sequence
  Synthetic
uugggaauucuuuuguuuguaaa

SEQ ID NO: 437602 - RNA, 24 nt, Artificial Sequence
  Synthetic
uuugggaauucuuuuguuuguaaa

SEQ ID NO: 437603 - RNA, 18 nt, Artificial Sequence
  Synthetic
guguuccauuuuuguaaa

SEQ ID NO: 437604 - RNA, 19 nt, Artificial Sequence
  Synthetic
gguguuccauuuuuguaaa

SEQ ID NO: 437605 - RNA, 20 nt, Artificial Sequence
  Synthetic
ugguguuccauuuuuguaaa

SEQ ID NO: 437606 - RNA, 21 nt, Artificial Sequence
  Synthetic
gugguguuccauuuuuguaaa

SEQ ID NO: 437607 - RNA, 22 nt, Artificial Sequence
  Synthetic
ggugguguuccauuuuuguaaa

SEQ ID NO: 437608 - RNA, 23 nt, Artificial Sequence
  Synthetic
uggugguguuccauuuuuguaaa

SEQ ID NO: 437609 - RNA, 24 nt, Artificial Sequence
  Synthetic
cuggugguguuccauuuuuguaaa

SEQ ID NO: 437610 - RNA, 18 nt, Artificial Sequence
  Synthetic
uucuucagaaaaauuaaa

SEQ ID NO: 437611 - RNA, 19 nt, Artificial Sequence
  Synthetic
auucuucagaaaaauuaaa

SEQ ID NO: 437612 - RNA, 20 nt, Artificial Sequence
  Synthetic
aauucuucagaaaaauuaaa

SEQ ID NO: 437613 - RNA, 21 nt, Artificial Sequence
  Synthetic
aaauucuucagaaaaauuaaa

SEQ ID NO: 437614 - RNA, 22 nt, Artificial Sequence
  Synthetic
caaauucuucagaaaaauuaaa

SEQ ID NO: 437615 - RNA, 23 nt, Artificial Sequence
  Synthetic
ucaaauucuucagaaaaauuaaa

SEQ ID NO: 437616 - RNA, 24 nt, Artificial Sequence
  Synthetic
cucaaauucuucagaaaaauuaaa

SEQ ID NO: 437617 - RNA, 18 nt, Artificial Sequence
  Synthetic
cccuccuguaaaauuaaa

SEQ ID NO: 437618 - RNA, 19 nt, Artificial Sequence
  Synthetic
gcccuccuguaaaauuaaa

SEQ ID NO: 437619 - RNA, 20 nt, Artificial Sequence
  Synthetic
ugcccuccuguaaaauuaaa

SEQ ID NO: 437620 - RNA, 21 nt, Artificial Sequence
  Synthetic
uugcccuccuguaaaauuaaa

SEQ ID NO: 437621 - RNA, 22 nt, Artificial Sequence
  Synthetic
guugcccuccuguaaaauuaaa

SEQ ID NO: 437622 - RNA, 23 nt, Artificial Sequence
  Synthetic
cguugcccuccuguaaaauuaaa

SEQ ID NO: 437623 - RNA, 24 nt, Artificial Sequence
  Synthetic
ucguugcccuccuguaaaauuaaa

SEQ ID NO: 437624 - RNA, 18 nt, Artificial Sequence
  Synthetic
uuucuaugacaaauuaaa

SEQ ID NO: 437625 - RNA, 19 nt, Artificial Sequence
  Synthetic
auuucuaugacaaauuaaa

SEQ ID NO: 437626 - RNA, 20 nt, Artificial Sequence
  Synthetic
cauuucuaugacaaauuaaa

SEQ ID NO: 437627 - RNA, 21 nt, Artificial Sequence
  Synthetic
ucauuucuaugacaaauuaaa

SEQ ID NO: 437628 - RNA, 22 nt, Artificial Sequence
  Synthetic
cucauuucuaugacaaauuaaa

SEQ ID NO: 437629 - RNA, 23 nt, Artificial Sequence
  Synthetic
acucauuucuaugacaaauuaaa

SEQ ID NO: 437630 - RNA, 24 nt, Artificial Sequence
  Synthetic
aacucauuucuaugacaaauuaaa

SEQ ID NO: 437631 - RNA, 18 nt, Artificial Sequence
  Synthetic
aauauacaccaaauuaaa

SEQ ID NO: 437632 - RNA, 19 nt, Artificial Sequence
  Synthetic
aaauauacaccaaauuaaa

SEQ ID NO: 437633 - RNA, 20 nt, Artificial Sequence
  Synthetic
aaaauauacaccaaauuaaa

SEQ ID NO: 437634 - RNA, 21 nt, Artificial Sequence
  Synthetic
aaaaauauacaccaaauuaaa

SEQ ID NO: 437635 - RNA, 22 nt, Artificial Sequence
  Synthetic
uaaaaauauacaccaaauuaaa

SEQ ID NO: 437636 - RNA, 23 nt, Artificial Sequence
  Synthetic
uuaaaaauauacaccaaauuaaa

SEQ ID NO: 437637 - RNA, 24 nt, Artificial Sequence
  Synthetic
uuuaaaaauauacaccaaauuaaa

SEQ ID NO: 437638 - RNA, 18 nt, Artificial Sequence
  Synthetic
cuguuaaauuaaauuaaa

SEQ ID NO: 437639 - RNA, 19 nt, Artificial Sequence
  Synthetic
gcuguuaaauuaaauuaaa

SEQ ID NO: 437640 - RNA, 20 nt, Artificial Sequence
  Synthetic
ugcuguuaaauuaaauuaaa

SEQ ID NO: 437641 - RNA, 21 nt, Artificial Sequence
  Synthetic
uugcuguuaaauuaaauuaaa

SEQ ID NO: 437642 - RNA, 22 nt, Artificial Sequence
  Synthetic
guugcuguuaaauuaaauuaaa

SEQ ID NO: 437643 - RNA, 23 nt, Artificial Sequence
  Synthetic
uguugcuguuaaauuaaauuaaa

SEQ ID NO: 437644 - RNA, 24 nt, Artificial Sequence
  Synthetic
uuguugcuguuaaauuaaauuaaa

SEQ ID NO: 437645 - RNA, 18 nt, Artificial Sequence
  Synthetic
gcuguugaaacaauuaaa

SEQ ID NO: 437646 - RNA, 19 nt, Artificial Sequence
  Synthetic
ugcuguugaaacaauuaaa

SEQ ID NO: 437647 - RNA, 20 nt, Artificial Sequence
  Synthetic
augcuguugaaacaauuaaa

SEQ ID NO: 437648 - RNA, 21 nt, Artificial Sequence
  Synthetic
aaugcuguugaaacaauuaaa

SEQ ID NO: 437649 - RNA, 22 nt, Artificial Sequence
  Synthetic
aaaugcuguugaaacaauuaaa

SEQ ID NO: 437650 - RNA, 23 nt, Artificial Sequence
  Synthetic
caaaugcuguugaaacaauuaaa

SEQ ID NO: 437651 - RNA, 24 nt, Artificial Sequence
  Synthetic
ucaaaugcuguugaaacaauuaaa

SEQ ID NO: 437652 - RNA, 18 nt, Artificial Sequence
  Synthetic
uauuuaauuucaauuaaa

SEQ ID NO: 437653 - RNA, 19 nt, Artificial Sequence
  Synthetic
uuauuuaauuucaauuaaa

SEQ ID NO: 437654 - RNA, 20 nt, Artificial Sequence
  Synthetic
guuauuuaauuucaauuaaa

SEQ ID NO: 437655 - RNA, 21 nt, Artificial Sequence
  Synthetic
uguuauuuaauuucaauuaaa

SEQ ID NO: 437656 - RNA, 22 nt, Artificial Sequence
  Synthetic
auguuauuuaauuucaauuaaa

SEQ ID NO: 437657 - RNA, 23 nt, Artificial Sequence
  Synthetic
cauguuauuuaauuucaauuaaa

SEQ ID NO: 437658 - RNA, 24 nt, Artificial Sequence
  Synthetic
gcauguuauuuaauuucaauuaaa

SEQ ID NO: 437659 - RNA, 18 nt, Artificial Sequence
  Synthetic
auauuuggaagaauuaaa

SEQ ID NO: 437660 - RNA, 19 nt, Artificial Sequence
  Synthetic
aauauuuggaagaauuaaa

SEQ ID NO: 437661 - RNA, 20 nt, Artificial Sequence
  Synthetic
gaauauuuggaagaauuaaa

SEQ ID NO: 437662 - RNA, 21 nt, Artificial Sequence
  Synthetic
agaauauuuggaagaauuaaa

SEQ ID NO: 437663 - RNA, 22 nt, Artificial Sequence
  Synthetic
aagaauauuuggaagaauuaaa

SEQ ID NO: 437664 - RNA, 23 nt, Artificial Sequence
  Synthetic
aaagaauauuuggaagaauuaaa

SEQ ID NO: 437665 - RNA, 24 nt, Artificial Sequence
  Synthetic
uaaagaauauuuggaagaauuaaa

SEQ ID NO: 437666 - RNA, 18 nt, Artificial Sequence
  Synthetic
aagaaccacagaauuaaa

SEQ ID NO: 437667 - RNA, 19 nt, Artificial Sequence
  Synthetic
aaagaaccacagaauuaaa

SEQ ID NO: 437668 - RNA, 20 nt, Artificial Sequence
  Synthetic
uaaagaaccacagaauuaaa

SEQ ID NO: 437669 - RNA, 21 nt, Artificial Sequence
  Synthetic
uuaaagaaccacagaauuaaa

SEQ ID NO: 437670 - RNA, 22 nt, Artificial Sequence
  Synthetic
auuaaagaaccacagaauuaaa

SEQ ID NO: 437671 - RNA, 23 nt, Artificial Sequence
  Synthetic
aauuaaagaaccacagaauuaaa

SEQ ID NO: 437672 - RNA, 24 nt, Artificial Sequence
  Synthetic
aaauuaaagaaccacagaauuaaa

SEQ ID NO: 437673 - RNA, 18 nt, Artificial Sequence
  Synthetic
caauuaagaggaauuaaa

SEQ ID NO: 437674 - RNA, 19 nt, Artificial Sequence
  Synthetic
acaauuaagaggaauuaaa

SEQ ID NO: 437675 - RNA, 20 nt, Artificial Sequence
  Synthetic
aacaauuaagaggaauuaaa

SEQ ID NO: 437676 - RNA, 21 nt, Artificial Sequence
  Synthetic
gaacaauuaagaggaauuaaa

SEQ ID NO: 437677 - RNA, 22 nt, Artificial Sequence
  Synthetic
agaacaauuaagaggaauuaaa

SEQ ID NO: 437678 - RNA, 23 nt, Artificial Sequence
  Synthetic
uagaacaauuaagaggaauuaaa

SEQ ID NO: 437679 - RNA, 24 nt, Artificial Sequence
  Synthetic
uuagaacaauuaagaggaauuaaa

SEQ ID NO: 437680 - RNA, 18 nt, Artificial Sequence
  Synthetic
aaugcaucacuaauuaaa

SEQ ID NO: 437681 - RNA, 19 nt, Artificial Sequence
  Synthetic
gaaugcaucacuaauuaaa

SEQ ID NO: 437682 - RNA, 20 nt, Artificial Sequence
  Synthetic
ugaaugcaucacuaauuaaa

SEQ ID NO: 437683 - RNA, 21 nt, Artificial Sequence
  Synthetic
uugaaugcaucacuaauuaaa

SEQ ID NO: 437684 - RNA, 22 nt, Artificial Sequence
  Synthetic
auugaaugcaucacuaauuaaa

SEQ ID NO: 437685 - RNA, 23 nt, Artificial Sequence
  Synthetic
uauugaaugcaucacuaauuaaa

SEQ ID NO: 437686 - RNA, 24 nt, Artificial Sequence
  Synthetic
uuauugaaugcaucacuaauuaaa

SEQ ID NO: 437687 - RNA, 18 nt, Artificial Sequence
  Synthetic
aaaugggaucuaauuaaa

SEQ ID NO: 437688 - RNA, 19 nt, Artificial Sequence
  Synthetic
caaaugggaucuaauuaaa

SEQ ID NO: 437689 - RNA, 20 nt, Artificial Sequence
  Synthetic
acaaaugggaucuaauuaaa

SEQ ID NO: 437690 - RNA, 21 nt, Artificial Sequence
  Synthetic
gacaaaugggaucuaauuaaa

SEQ ID NO: 437691 - RNA, 22 nt, Artificial Sequence
  Synthetic
ugacaaaugggaucuaauuaaa

SEQ ID NO: 437692 - RNA, 23 nt, Artificial Sequence
  Synthetic
uugacaaaugggaucuaauuaaa

SEQ ID NO: 437693 - RNA, 24 nt, Artificial Sequence
  Synthetic
auugacaaaugggaucuaauuaaa

SEQ ID NO: 437694 - RNA, 18 nt, Artificial Sequence
  Synthetic
agaauuugcuuaauuaaa

SEQ ID NO: 437695 - RNA, 19 nt, Artificial Sequence
  Synthetic
cagaauuugcuuaauuaaa

SEQ ID NO: 437696 - RNA, 20 nt, Artificial Sequence
  Synthetic
acagaauuugcuuaauuaaa

SEQ ID NO: 437697 - RNA, 21 nt, Artificial Sequence
  Synthetic
gacagaauuugcuuaauuaaa

SEQ ID NO: 437698 - RNA, 22 nt, Artificial Sequence
  Synthetic
ugacagaauuugcuuaauuaaa

SEQ ID NO: 437699 - RNA, 23 nt, Artificial Sequence
  Synthetic
cugacagaauuugcuuaauuaaa

SEQ ID NO: 437700 - RNA, 24 nt, Artificial Sequence
  Synthetic
ucugacagaauuugcuuaauuaaa

SEQ ID NO: 437701 - RNA, 18 nt, Artificial Sequence
  Synthetic
ucaugauauuuaauuaaa

SEQ ID NO: 437702 - RNA, 19 nt, Artificial Sequence
  Synthetic
uucaugauauuuaauuaaa

SEQ ID NO: 437703 - RNA, 20 nt, Artificial Sequence
  Synthetic
uuucaugauauuuaauuaaa

SEQ ID NO: 437704 - RNA, 21 nt, Artificial Sequence
  Synthetic
uuuucaugauauuuaauuaaa

SEQ ID NO: 437705 - RNA, 22 nt, Artificial Sequence
  Synthetic
guuuucaugauauuuaauuaaa

SEQ ID NO: 437706 - RNA, 23 nt, Artificial Sequence
  Synthetic
aguuuucaugauauuuaauuaaa

SEQ ID NO: 437707 - RNA, 24 nt, Artificial Sequence
  Synthetic
uaguuuucaugauauuuaauuaaa

SEQ ID NO: 437708 - RNA, 18 nt, Artificial Sequence
  Synthetic
uucuuaggccccauuaaa

SEQ ID NO: 437709 - RNA, 19 nt, Artificial Sequence
  Synthetic
uuucuuaggccccauuaaa

SEQ ID NO: 437710 - RNA, 20 nt, Artificial Sequence
  Synthetic
cuuucuuaggccccauuaaa

SEQ ID NO: 437711 - RNA, 21 nt, Artificial Sequence
  Synthetic
ucuuucuuaggccccauuaaa

SEQ ID NO: 437712 - RNA, 22 nt, Artificial Sequence
  Synthetic
uucuuucuuaggccccauuaaa

SEQ ID NO: 437713 - RNA, 23 nt, Artificial Sequence
  Synthetic
guucuuucuuaggccccauuaaa

SEQ ID NO: 437714 - RNA, 24 nt, Artificial Sequence
  Synthetic
aguucuuucuuaggccccauuaaa

SEQ ID NO: 437715 - RNA, 18 nt, Artificial Sequence
  Synthetic
aacucauauugcauuaaa

SEQ ID NO: 437716 - RNA, 19 nt, Artificial Sequence
  Synthetic
aaacucauauugcauuaaa

SEQ ID NO: 437717 - RNA, 20 nt, Artificial Sequence
  Synthetic
uaaacucauauugcauuaaa

SEQ ID NO: 437718 - RNA, 21 nt, Artificial Sequence
  Synthetic
cuaaacucauauugcauuaaa

SEQ ID NO: 437719 - RNA, 22 nt, Artificial Sequence
  Synthetic
gcuaaacucauauugcauuaaa

SEQ ID NO: 437720 - RNA, 23 nt, Artificial Sequence
  Synthetic
agcuaaacucauauugcauuaaa

SEQ ID NO: 437721 - RNA, 24 nt, Artificial Sequence
  Synthetic
uagcuaaacucauauugcauuaaa

SEQ ID NO: 437722 - RNA, 18 nt, Artificial Sequence
  Synthetic
cagcaagaguucauuaaa

SEQ ID NO: 437723 - RNA, 19 nt, Artificial Sequence
  Synthetic
ucagcaagaguucauuaaa

SEQ ID NO: 437724 - RNA, 20 nt, Artificial Sequence
  Synthetic
uucagcaagaguucauuaaa

SEQ ID NO: 437725 - RNA, 21 nt, Artificial Sequence
  Synthetic
guucagcaagaguucauuaaa

SEQ ID NO: 437726 - RNA, 22 nt, Artificial Sequence
  Synthetic
uguucagcaagaguucauuaaa

SEQ ID NO: 437727 - RNA, 23 nt, Artificial Sequence
  Synthetic
guguucagcaagaguucauuaaa

SEQ ID NO: 437728 - RNA, 24 nt, Artificial Sequence
  Synthetic
aguguucagcaagaguucauuaaa

SEQ ID NO: 437729 - RNA, 18 nt, Artificial Sequence
  Synthetic
auguacauuuucauuaaa

SEQ ID NO: 437730 - RNA, 19 nt, Artificial Sequence
  Synthetic
aauguacauuuucauuaaa

SEQ ID NO: 437731 - RNA, 20 nt, Artificial Sequence
  Synthetic
aaauguacauuuucauuaaa

SEQ ID NO: 437732 - RNA, 21 nt, Artificial Sequence
  Synthetic
uaaauguacauuuucauuaaa

SEQ ID NO: 437733 - RNA, 22 nt, Artificial Sequence
  Synthetic
uuaaauguacauuuucauuaaa

SEQ ID NO: 437734 - RNA, 23 nt, Artificial Sequence
  Synthetic
guuaaauguacauuuucauuaaa

SEQ ID NO: 437735 - RNA, 24 nt, Artificial Sequence
  Synthetic
uguuaaauguacauuuucauuaaa

SEQ ID NO: 437736 - RNA, 18 nt, Artificial Sequence
  Synthetic
gagucauugaagauuaaa

SEQ ID NO: 437737 - RNA, 19 nt, Artificial Sequence
  Synthetic
ugagucauugaagauuaaa

SEQ ID NO: 437738 - RNA, 20 nt, Artificial Sequence
  Synthetic
augagucauugaagauuaaa

SEQ ID NO: 437739 - RNA, 21 nt, Artificial Sequence
  Synthetic
uaugagucauugaagauuaaa

SEQ ID NO: 437740 - RNA, 22 nt, Artificial Sequence
  Synthetic
auaugagucauugaagauuaaa

SEQ ID NO: 437741 - RNA, 23 nt, Artificial Sequence
  Synthetic
aauaugagucauugaagauuaaa

SEQ ID NO: 437742 - RNA, 24 nt, Artificial Sequence
  Synthetic
aaauaugagucauugaagauuaaa

SEQ ID NO: 437743 - RNA, 18 nt, Artificial Sequence
  Synthetic
ggcugcuguaagauuaaa

SEQ ID NO: 437744 - RNA, 19 nt, Artificial Sequence
  Synthetic
aggcugcuguaagauuaaa

SEQ ID NO: 437745 - RNA, 20 nt, Artificial Sequence
  Synthetic
aaggcugcuguaagauuaaa

SEQ ID NO: 437746 - RNA, 21 nt, Artificial Sequence
  Synthetic
uaaggcugcuguaagauuaaa

SEQ ID NO: 437747 - RNA, 22 nt, Artificial Sequence
  Synthetic
auaaggcugcuguaagauuaaa

SEQ ID NO: 437748 - RNA, 23 nt, Artificial Sequence
  Synthetic
cauaaggcugcuguaagauuaaa

SEQ ID NO: 437749 - RNA, 24 nt, Artificial Sequence
  Synthetic
ucauaaggcugcuguaagauuaaa

SEQ ID NO: 437750 - RNA, 18 nt, Artificial Sequence
  Synthetic
aagaugcuggggauuaaa

SEQ ID NO: 437751 - RNA, 19 nt, Artificial Sequence
  Synthetic
aaagaugcuggggauuaaa

SEQ ID NO: 437752 - RNA, 20 nt, Artificial Sequence
  Synthetic
aaaagaugcuggggauuaaa

SEQ ID NO: 437753 - RNA, 21 nt, Artificial Sequence
  Synthetic
uaaaagaugcuggggauuaaa

SEQ ID NO: 437754 - RNA, 22 nt, Artificial Sequence
  Synthetic
guaaaagaugcuggggauuaaa

SEQ ID NO: 437755 - RNA, 23 nt, Artificial Sequence
  Synthetic
aguaaaagaugcuggggauuaaa

SEQ ID NO: 437756 - RNA, 24 nt, Artificial Sequence
  Synthetic
aaguaaaagaugcuggggauuaaa

SEQ ID NO: 437757 - RNA, 18 nt, Artificial Sequence
  Synthetic
uggguuucauggauuaaa

SEQ ID NO: 437758 - RNA, 19 nt, Artificial Sequence
  Synthetic
auggguuucauggauuaaa

SEQ ID NO: 437759 - RNA, 20 nt, Artificial Sequence
  Synthetic
aauggguuucauggauuaaa

SEQ ID NO: 437760 - RNA, 21 nt, Artificial Sequence
  Synthetic
aaauggguuucauggauuaaa

SEQ ID NO: 437761 - RNA, 22 nt, Artificial Sequence
  Synthetic
gaaauggguuucauggauuaaa

SEQ ID NO: 437762 - RNA, 23 nt, Artificial Sequence
  Synthetic
ugaaauggguuucauggauuaaa

SEQ ID NO: 437763 - RNA, 24 nt, Artificial Sequence
  Synthetic
uugaaauggguuucauggauuaaa

SEQ ID NO: 437764 - RNA, 18 nt, Artificial Sequence
  Synthetic
uaaaauuauaugauuaaa

SEQ ID NO: 437765 - RNA, 19 nt, Artificial Sequence
  Synthetic
guaaaauuauaugauuaaa

SEQ ID NO: 437766 - RNA, 20 nt, Artificial Sequence
  Synthetic
aguaaaauuauaugauuaaa

SEQ ID NO: 437767 - RNA, 21 nt, Artificial Sequence
  Synthetic
aaguaaaauuauaugauuaaa

SEQ ID NO: 437768 - RNA, 22 nt, Artificial Sequence
  Synthetic
caaguaaaauuauaugauuaaa

SEQ ID NO: 437769 - RNA, 23 nt, Artificial Sequence
  Synthetic
acaaguaaaauuauaugauuaaa

SEQ ID NO: 437770 - RNA, 24 nt, Artificial Sequence
  Synthetic
aacaaguaaaauuauaugauuaaa

SEQ ID NO: 437771 - RNA, 18 nt, Artificial Sequence
  Synthetic
gaaagaucaaauauuaaa

SEQ ID NO: 437772 - RNA, 19 nt, Artificial Sequence
  Synthetic
ugaaagaucaaauauuaaa

SEQ ID NO: 437773 - RNA, 20 nt, Artificial Sequence
  Synthetic
augaaagaucaaauauuaaa

SEQ ID NO: 437774 - RNA, 21 nt, Artificial Sequence
  Synthetic
aaugaaagaucaaauauuaaa

SEQ ID NO: 437775 - RNA, 22 nt, Artificial Sequence
  Synthetic
caaugaaagaucaaauauuaaa

SEQ ID NO: 437776 - RNA, 23 nt, Artificial Sequence
  Synthetic
acaaugaaagaucaaauauuaaa

SEQ ID NO: 437777 - RNA, 24 nt, Artificial Sequence
  Synthetic
gacaaugaaagaucaaauauuaaa

SEQ ID NO: 437778 - RNA, 18 nt, Artificial Sequence
  Synthetic
uuuuugaggaauauuaaa

SEQ ID NO: 437779 - RNA, 19 nt, Artificial Sequence
  Synthetic
cuuuuugaggaauauuaaa

SEQ ID NO: 437780 - RNA, 20 nt, Artificial Sequence
  Synthetic
acuuuuugaggaauauuaaa

SEQ ID NO: 437781 - RNA, 21 nt, Artificial Sequence
  Synthetic
aacuuuuugaggaauauuaaa

SEQ ID NO: 437782 - RNA, 22 nt, Artificial Sequence
  Synthetic
caacuuuuugaggaauauuaaa

SEQ ID NO: 437783 - RNA, 23 nt, Artificial Sequence
  Synthetic
ccaacuuuuugaggaauauuaaa

SEQ ID NO: 437784 - RNA, 24 nt, Artificial Sequence
  Synthetic
uccaacuuuuugaggaauauuaaa

SEQ ID NO: 437785 - RNA, 18 nt, Artificial Sequence
  Synthetic
cuugaaugaucuauuaaa

SEQ ID NO: 437786 - RNA, 19 nt, Artificial Sequence
  Synthetic
ccuugaaugaucuauuaaa

SEQ ID NO: 437787 - RNA, 20 nt, Artificial Sequence
  Synthetic
cccuugaaugaucuauuaaa

SEQ ID NO: 437788 - RNA, 21 nt, Artificial Sequence
  Synthetic
ccccuugaaugaucuauuaaa

SEQ ID NO: 437789 - RNA, 22 nt, Artificial Sequence
  Synthetic
cccccuugaaugaucuauuaaa

SEQ ID NO: 437790 - RNA, 23 nt, Artificial Sequence
  Synthetic
ucccccuugaaugaucuauuaaa

SEQ ID NO: 437791 - RNA, 24 nt, Artificial Sequence
  Synthetic
cucccccuugaaugaucuauuaaa

SEQ ID NO: 437792 - RNA, 18 nt, Artificial Sequence
  Synthetic
aaaaaauagaguauuaaa

SEQ ID NO: 437793 - RNA, 19 nt, Artificial Sequence
  Synthetic
uaaaaaauagaguauuaaa

SEQ ID NO: 437794 - RNA, 20 nt, Artificial Sequence
  Synthetic
auaaaaaauagaguauuaaa

SEQ ID NO: 437795 - RNA, 21 nt, Artificial Sequence
  Synthetic
aauaaaaaauagaguauuaaa

SEQ ID NO: 437796 - RNA, 22 nt, Artificial Sequence
  Synthetic
uaauaaaaaauagaguauuaaa

SEQ ID NO: 437797 - RNA, 23 nt, Artificial Sequence
  Synthetic
guaauaaaaaauagaguauuaaa

SEQ ID NO: 437798 - RNA, 24 nt, Artificial Sequence
  Synthetic
aguaauaaaaaauagaguauuaaa

SEQ ID NO: 437799 - RNA, 18 nt, Artificial Sequence
  Synthetic
ucuuauauaauuauuaaa

SEQ ID NO: 437800 - RNA, 19 nt, Artificial Sequence
  Synthetic
cucuuauauaauuauuaaa

SEQ ID NO: 437801 - RNA, 20 nt, Artificial Sequence
  Synthetic
acucuuauauaauuauuaaa

SEQ ID NO: 437802 - RNA, 21 nt, Artificial Sequence
  Synthetic
uacucuuauauaauuauuaaa

SEQ ID NO: 437803 - RNA, 22 nt, Artificial Sequence
  Synthetic
auacucuuauauaauuauuaaa

SEQ ID NO: 437804 - RNA, 23 nt, Artificial Sequence
  Synthetic
cauacucuuauauaauuauuaaa

SEQ ID NO: 437805 - RNA, 24 nt, Artificial Sequence
  Synthetic
ucauacucuuauauaauuauuaaa

SEQ ID NO: 437806 - RNA, 21 nt, Artificial Sequence
  Synthetic
cucccagcaccauuuauuaaa

SEQ ID NO: 437807 - RNA, 22 nt, Artificial Sequence
  Synthetic
ucucccagcaccauuuauuaaa

SEQ ID NO: 437808 - RNA, 23 nt, Artificial Sequence
  Synthetic
uucucccagcaccauuuauuaaa

SEQ ID NO: 437809 - RNA, 24 nt, Artificial Sequence
  Synthetic
guucucccagcaccauuuauuaaa

SEQ ID NO: 437810 - RNA, 21 nt, Artificial Sequence
  Synthetic
uucccagcaccauuuauuaaa

SEQ ID NO: 437811 - RNA, 22 nt, Artificial Sequence
  Synthetic
cuucccagcaccauuuauuaaa

SEQ ID NO: 437812 - RNA, 23 nt, Artificial Sequence
  Synthetic
ucuucccagcaccauuuauuaaa

SEQ ID NO: 437813 - RNA, 24 nt, Artificial Sequence
  Synthetic
gucuucccagcaccauuuauuaaa

SEQ ID NO: 437814 - RNA, 22 nt, Artificial Sequence
  Synthetic
uuucccagcaccauuuauuaaa

SEQ ID NO: 437815 - RNA, 23 nt, Artificial Sequence
  Synthetic
uuuucccagcaccauuuauuaaa

SEQ ID NO: 437816 - RNA, 24 nt, Artificial Sequence
  Synthetic
guuuucccagcaccauuuauuaaa

SEQ ID NO: 437817 - RNA, 18 nt, Artificial Sequence
  Synthetic
aaaauagcacaacuuaaa

SEQ ID NO: 437818 - RNA, 19 nt, Artificial Sequence
  Synthetic
uaaaauagcacaacuuaaa

SEQ ID NO: 437819 - RNA, 20 nt, Artificial Sequence
  Synthetic
auaaaauagcacaacuuaaa

SEQ ID NO: 437820 - RNA, 21 nt, Artificial Sequence
  Synthetic
cauaaaauagcacaacuuaaa

SEQ ID NO: 437821 - RNA, 22 nt, Artificial Sequence
  Synthetic
ucauaaaauagcacaacuuaaa

SEQ ID NO: 437822 - RNA, 23 nt, Artificial Sequence
  Synthetic
aucauaaaauagcacaacuuaaa

SEQ ID NO: 437823 - RNA, 24 nt, Artificial Sequence
  Synthetic
gaucauaaaauagcacaacuuaaa

SEQ ID NO: 437824 - RNA, 18 nt, Artificial Sequence
  Synthetic
agagauaaucaacuuaaa

SEQ ID NO: 437825 - RNA, 19 nt, Artificial Sequence
  Synthetic
cagagauaaucaacuuaaa

SEQ ID NO: 437826 - RNA, 20 nt, Artificial Sequence
  Synthetic
acagagauaaucaacuuaaa

SEQ ID NO: 437827 - RNA, 21 nt, Artificial Sequence
  Synthetic
uacagagauaaucaacuuaaa

SEQ ID NO: 437828 - RNA, 22 nt, Artificial Sequence
  Synthetic
uuacagagauaaucaacuuaaa

SEQ ID NO: 437829 - RNA, 23 nt, Artificial Sequence
  Synthetic
auuacagagauaaucaacuuaaa

SEQ ID NO: 437830 - RNA, 24 nt, Artificial Sequence
  Synthetic
cauuacagagauaaucaacuuaaa

SEQ ID NO: 437831 - RNA, 18 nt, Artificial Sequence
  Synthetic
ugacacaaauaacuuaaa

SEQ ID NO: 437832 - RNA, 19 nt, Artificial Sequence
  Synthetic
gugacacaaauaacuuaaa

SEQ ID NO: 437833 - RNA, 20 nt, Artificial Sequence
  Synthetic
ugugacacaaauaacuuaaa

SEQ ID NO: 437834 - RNA, 21 nt, Artificial Sequence
  Synthetic
uugugacacaaauaacuuaaa

SEQ ID NO: 437835 - RNA, 22 nt, Artificial Sequence
  Synthetic
uuugugacacaaauaacuuaaa

SEQ ID NO: 437836 - RNA, 23 nt, Artificial Sequence
  Synthetic
auuugugacacaaauaacuuaaa

SEQ ID NO: 437837 - RNA, 24 nt, Artificial Sequence
  Synthetic
uauuugugacacaaauaacuuaaa

SEQ ID NO: 437838 - RNA, 18 nt, Artificial Sequence
  Synthetic
gauuuugcagcacuuaaa

SEQ ID NO: 437839 - RNA, 19 nt, Artificial Sequence
  Synthetic
agauuuugcagcacuuaaa

SEQ ID NO: 437840 - RNA, 20 nt, Artificial Sequence
  Synthetic
gagauuuugcagcacuuaaa

SEQ ID NO: 437841 - RNA, 21 nt, Artificial Sequence
  Synthetic
ggagauuuugcagcacuuaaa

SEQ ID NO: 437842 - RNA, 22 nt, Artificial Sequence
  Synthetic
gggagauuuugcagcacuuaaa

SEQ ID NO: 437843 - RNA, 23 nt, Artificial Sequence
  Synthetic
ugggagauuuugcagcacuuaaa

SEQ ID NO: 437844 - RNA, 24 nt, Artificial Sequence
  Synthetic
cugggagauuuugcagcacuuaaa

SEQ ID NO: 437845 - RNA, 18 nt, Artificial Sequence
  Synthetic
aaaugcaauaaccuuaaa

SEQ ID NO: 437846 - RNA, 19 nt, Artificial Sequence
  Synthetic
uaaaugcaauaaccuuaaa

SEQ ID NO: 437847 - RNA, 20 nt, Artificial Sequence
  Synthetic
uuaaaugcaauaaccuuaaa

SEQ ID NO: 437848 - RNA, 21 nt, Artificial Sequence
  Synthetic
uuuaaaugcaauaaccuuaaa

SEQ ID NO: 437849 - RNA, 22 nt, Artificial Sequence
  Synthetic
cuuuaaaugcaauaaccuuaaa

SEQ ID NO: 437850 - RNA, 23 nt, Artificial Sequence
  Synthetic
acuuuaaaugcaauaaccuuaaa

SEQ ID NO: 437851 - RNA, 24 nt, Artificial Sequence
  Synthetic
gacuuuaaaugcaauaaccuuaaa

SEQ ID NO: 437852 - RNA, 18 nt, Artificial Sequence
  Synthetic
gaagcucuccaccuuaaa

SEQ ID NO: 437853 - RNA, 19 nt, Artificial Sequence
  Synthetic
ggaagcucuccaccuuaaa

SEQ ID NO: 437854 - RNA, 20 nt, Artificial Sequence
  Synthetic
uggaagcucuccaccuuaaa

SEQ ID NO: 437855 - RNA, 21 nt, Artificial Sequence
  Synthetic
auggaagcucuccaccuuaaa

SEQ ID NO: 437856 - RNA, 22 nt, Artificial Sequence
  Synthetic
uauggaagcucuccaccuuaaa

SEQ ID NO: 437857 - RNA, 23 nt, Artificial Sequence
  Synthetic
cuauggaagcucuccaccuuaaa

SEQ ID NO: 437858 - RNA, 24 nt, Artificial Sequence
  Synthetic
ucuauggaagcucuccaccuuaaa

SEQ ID NO: 437859 - RNA, 18 nt, Artificial Sequence
  Synthetic
ggaaucugcuaccuuaaa

SEQ ID NO: 437860 - RNA, 19 nt, Artificial Sequence
  Synthetic
gggaaucugcuaccuuaaa

SEQ ID NO: 437861 - RNA, 20 nt, Artificial Sequence
  Synthetic
agggaaucugcuaccuuaaa

SEQ ID NO: 437862 - RNA, 21 nt, Artificial Sequence
  Synthetic
aagggaaucugcuaccuuaaa

SEQ ID NO: 437863 - RNA, 22 nt, Artificial Sequence
  Synthetic
aaagggaaucugcuaccuuaaa

SEQ ID NO: 437864 - RNA, 23 nt, Artificial Sequence
  Synthetic
aaaagggaaucugcuaccuuaaa

SEQ ID NO: 437865 - RNA, 24 nt, Artificial Sequence
  Synthetic
caaaagggaaucugcuaccuuaaa

SEQ ID NO: 437866 - RNA, 18 nt, Artificial Sequence
  Synthetic
cagaucuuuccccuuaaa

SEQ ID NO: 437867 - RNA, 19 nt, Artificial Sequence
  Synthetic
ccagaucuuuccccuuaaa

SEQ ID NO: 437868 - RNA, 20 nt, Artificial Sequence
  Synthetic
cccagaucuuuccccuuaaa

SEQ ID NO: 437869 - RNA, 21 nt, Artificial Sequence
  Synthetic
acccagaucuuuccccuuaaa

SEQ ID NO: 437870 - RNA, 22 nt, Artificial Sequence
  Synthetic
aacccagaucuuuccccuuaaa

SEQ ID NO: 437871 - RNA, 23 nt, Artificial Sequence
  Synthetic
uaacccagaucuuuccccuuaaa

SEQ ID NO: 437872 - RNA, 24 nt, Artificial Sequence
  Synthetic
uuaacccagaucuuuccccuuaaa

SEQ ID NO: 437873 - RNA, 18 nt, Artificial Sequence
  Synthetic
ucuuuccuuugccuuaaa

SEQ ID NO: 437874 - RNA, 19 nt, Artificial Sequence
  Synthetic
uucuuuccuuugccuuaaa

SEQ ID NO: 437875 - RNA, 20 nt, Artificial Sequence
  Synthetic
auucuuuccuuugccuuaaa

SEQ ID NO: 437876 - RNA, 21 nt, Artificial Sequence
  Synthetic
uauucuuuccuuugccuuaaa

SEQ ID NO: 437877 - RNA, 22 nt, Artificial Sequence
  Synthetic
uuauucuuuccuuugccuuaaa

SEQ ID NO: 437878 - RNA, 23 nt, Artificial Sequence
  Synthetic
auuauucuuuccuuugccuuaaa

SEQ ID NO: 437879 - RNA, 24 nt, Artificial Sequence
  Synthetic
gauuauucuuuccuuugccuuaaa

SEQ ID NO: 437880 - RNA, 18 nt, Artificial Sequence
  Synthetic
auccucucaguccuuaaa

SEQ ID NO: 437881 - RNA, 19 nt, Artificial Sequence
  Synthetic
aauccucucaguccuuaaa

SEQ ID NO: 437882 - RNA, 20 nt, Artificial Sequence
  Synthetic
aaauccucucaguccuuaaa

SEQ ID NO: 437883 - RNA, 21 nt, Artificial Sequence
  Synthetic
caaauccucucaguccuuaaa

SEQ ID NO: 437884 - RNA, 22 nt, Artificial Sequence
  Synthetic
ccaaauccucucaguccuuaaa

SEQ ID NO: 437885 - RNA, 23 nt, Artificial Sequence
  Synthetic
accaaauccucucaguccuuaaa

SEQ ID NO: 437886 - RNA, 24 nt, Artificial Sequence
  Synthetic
uaccaaauccucucaguccuuaaa

SEQ ID NO: 437887 - RNA, 18 nt, Artificial Sequence
  Synthetic
uaugacucuguccuuaaa

SEQ ID NO: 437888 - RNA, 19 nt, Artificial Sequence
  Synthetic
auaugacucuguccuuaaa

SEQ ID NO: 437889 - RNA, 20 nt, Artificial Sequence
  Synthetic
aauaugacucuguccuuaaa

SEQ ID NO: 437890 - RNA, 21 nt, Artificial Sequence
  Synthetic
caauaugacucuguccuuaaa

SEQ ID NO: 437891 - RNA, 22 nt, Artificial Sequence
  Synthetic
ccaauaugacucuguccuuaaa

SEQ ID NO: 437892 - RNA, 23 nt, Artificial Sequence
  Synthetic
uccaauaugacucuguccuuaaa

SEQ ID NO: 437893 - RNA, 24 nt, Artificial Sequence
  Synthetic
guccaauaugacucuguccuuaaa

SEQ ID NO: 437894 - RNA, 18 nt, Artificial Sequence
  Synthetic
uuauauuaacagcuuaaa

SEQ ID NO: 437895 - RNA, 19 nt, Artificial Sequence
  Synthetic
cuuauauuaacagcuuaaa

SEQ ID NO: 437896 - RNA, 20 nt, Artificial Sequence
  Synthetic
gcuuauauuaacagcuuaaa

SEQ ID NO: 437897 - RNA, 21 nt, Artificial Sequence
  Synthetic
agcuuauauuaacagcuuaaa

SEQ ID NO: 437898 - RNA, 22 nt, Artificial Sequence
  Synthetic
aagcuuauauuaacagcuuaaa

SEQ ID NO: 437899 - RNA, 23 nt, Artificial Sequence
  Synthetic
aaagcuuauauuaacagcuuaaa

SEQ ID NO: 437900 - RNA, 24 nt, Artificial Sequence
  Synthetic
caaagcuuauauuaacagcuuaaa

SEQ ID NO: 437901 - RNA, 18 nt, Artificial Sequence
  Synthetic
aucaauugagaucuuaaa

SEQ ID NO: 437902 - RNA, 19 nt, Artificial Sequence
  Synthetic
uaucaauugagaucuuaaa

SEQ ID NO: 437903 - RNA, 20 nt, Artificial Sequence
  Synthetic
guaucaauugagaucuuaaa

SEQ ID NO: 437904 - RNA, 21 nt, Artificial Sequence
  Synthetic
uguaucaauugagaucuuaaa

SEQ ID NO: 437905 - RNA, 22 nt, Artificial Sequence
  Synthetic
auguaucaauugagaucuuaaa

SEQ ID NO: 437906 - RNA, 23 nt, Artificial Sequence
  Synthetic
aauguaucaauugagaucuuaaa

SEQ ID NO: 437907 - RNA, 24 nt, Artificial Sequence
  Synthetic
gaauguaucaauugagaucuuaaa

SEQ ID NO: 437908 - RNA, 18 nt, Artificial Sequence
  Synthetic
gaguagaucuaucuuaaa

SEQ ID NO: 437909 - RNA, 19 nt, Artificial Sequence
  Synthetic
ggaguagaucuaucuuaaa

SEQ ID NO: 437910 - RNA, 20 nt, Artificial Sequence
  Synthetic
gggaguagaucuaucuuaaa

SEQ ID NO: 437911 - RNA, 21 nt, Artificial Sequence
  Synthetic
ggggaguagaucuaucuuaaa

SEQ ID NO: 437912 - RNA, 22 nt, Artificial Sequence
  Synthetic
uggggaguagaucuaucuuaaa

SEQ ID NO: 437913 - RNA, 23 nt, Artificial Sequence
  Synthetic
uuggggaguagaucuaucuuaaa

SEQ ID NO: 437914 - RNA, 24 nt, Artificial Sequence
  Synthetic
guuggggaguagaucuaucuuaaa

SEQ ID NO: 437915 - RNA, 18 nt, Artificial Sequence
  Synthetic
uucaggcaggcucuuaaa

SEQ ID NO: 437916 - RNA, 19 nt, Artificial Sequence
  Synthetic
cuucaggcaggcucuuaaa

SEQ ID NO: 437917 - RNA, 20 nt, Artificial Sequence
  Synthetic
acuucaggcaggcucuuaaa

SEQ ID NO: 437918 - RNA, 21 nt, Artificial Sequence
  Synthetic
uacuucaggcaggcucuuaaa

SEQ ID NO: 437919 - RNA, 22 nt, Artificial Sequence
  Synthetic
uuacuucaggcaggcucuuaaa

SEQ ID NO: 437920 - RNA, 23 nt, Artificial Sequence
  Synthetic
uuuacuucaggcaggcucuuaaa

SEQ ID NO: 437921 - RNA, 24 nt, Artificial Sequence
  Synthetic
auuuacuucaggcaggcucuuaaa

SEQ ID NO: 437922 - RNA, 18 nt, Artificial Sequence
  Synthetic
auaucagagucucuuaaa

SEQ ID NO: 437923 - RNA, 19 nt, Artificial Sequence
  Synthetic
uauaucagagucucuuaaa

SEQ ID NO: 437924 - RNA, 20 nt, Artificial Sequence
  Synthetic
uuauaucagagucucuuaaa

SEQ ID NO: 437925 - RNA, 21 nt, Artificial Sequence
  Synthetic
auuauaucagagucucuuaaa

SEQ ID NO: 437926 - RNA, 22 nt, Artificial Sequence
  Synthetic
aauuauaucagagucucuuaaa

SEQ ID NO: 437927 - RNA, 23 nt, Artificial Sequence
  Synthetic
caauuauaucagagucucuuaaa

SEQ ID NO: 437928 - RNA, 24 nt, Artificial Sequence
  Synthetic
ucaauuauaucagagucucuuaaa

SEQ ID NO: 437929 - RNA, 18 nt, Artificial Sequence
  Synthetic
aggcauaacugucuuaaa

SEQ ID NO: 437930 - RNA, 19 nt, Artificial Sequence
  Synthetic
gaggcauaacugucuuaaa

SEQ ID NO: 437931 - RNA, 20 nt, Artificial Sequence
  Synthetic
ugaggcauaacugucuuaaa

SEQ ID NO: 437932 - RNA, 21 nt, Artificial Sequence
  Synthetic
cugaggcauaacugucuuaaa

SEQ ID NO: 437933 - RNA, 22 nt, Artificial Sequence
  Synthetic
ucugaggcauaacugucuuaaa

SEQ ID NO: 437934 - RNA, 23 nt, Artificial Sequence
  Synthetic
uucugaggcauaacugucuuaaa

SEQ ID NO: 437935 - RNA, 24 nt, Artificial Sequence
  Synthetic
uuucugaggcauaacugucuuaaa

SEQ ID NO: 437936 - RNA, 18 nt, Artificial Sequence
  Synthetic
aaggcaugcauucuuaaa

SEQ ID NO: 437937 - RNA, 19 nt, Artificial Sequence
  Synthetic
aaaggcaugcauucuuaaa

SEQ ID NO: 437938 - RNA, 20 nt, Artificial Sequence
  Synthetic
gaaaggcaugcauucuuaaa

SEQ ID NO: 437939 - RNA, 21 nt, Artificial Sequence
  Synthetic
ugaaaggcaugcauucuuaaa

SEQ ID NO: 437940 - RNA, 22 nt, Artificial Sequence
  Synthetic
cugaaaggcaugcauucuuaaa

SEQ ID NO: 437941 - RNA, 23 nt, Artificial Sequence
  Synthetic
ucugaaaggcaugcauucuuaaa

SEQ ID NO: 437942 - RNA, 24 nt, Artificial Sequence
  Synthetic
cucugaaaggcaugcauucuuaaa

SEQ ID NO: 437943 - RNA, 18 nt, Artificial Sequence
  Synthetic
aaggaaugauuucuuaaa

SEQ ID NO: 437944 - RNA, 19 nt, Artificial Sequence
  Synthetic
uaaggaaugauuucuuaaa

SEQ ID NO: 437945 - RNA, 20 nt, Artificial Sequence
  Synthetic
auaaggaaugauuucuuaaa

SEQ ID NO: 437946 - RNA, 21 nt, Artificial Sequence
  Synthetic
uauaaggaaugauuucuuaaa

SEQ ID NO: 437947 - RNA, 22 nt, Artificial Sequence
  Synthetic
cuauaaggaaugauuucuuaaa

SEQ ID NO: 437948 - RNA, 23 nt, Artificial Sequence
  Synthetic
ucuauaaggaaugauuucuuaaa

SEQ ID NO: 437949 - RNA, 24 nt, Artificial Sequence
  Synthetic
uucuauaaggaaugauuucuuaaa

SEQ ID NO: 437950 - RNA, 18 nt, Artificial Sequence
  Synthetic
aaguuaaauuuucuuaaa

SEQ ID NO: 437951 - RNA, 19 nt, Artificial Sequence
  Synthetic
aaaguuaaauuuucuuaaa

SEQ ID NO: 437952 - RNA, 20 nt, Artificial Sequence
  Synthetic
gaaaguuaaauuuucuuaaa

SEQ ID NO: 437953 - RNA, 21 nt, Artificial Sequence
  Synthetic
ugaaaguuaaauuuucuuaaa

SEQ ID NO: 437954 - RNA, 22 nt, Artificial Sequence
  Synthetic
augaaaguuaaauuuucuuaaa

SEQ ID NO: 437955 - RNA, 23 nt, Artificial Sequence
  Synthetic
aaugaaaguuaaauuuucuuaaa

SEQ ID NO: 437956 - RNA, 24 nt, Artificial Sequence
  Synthetic
uaaugaaaguuaaauuuucuuaaa

SEQ ID NO: 437957 - RNA, 18 nt, Artificial Sequence
  Synthetic
aaggcuuuuuuucuuaaa

SEQ ID NO: 437958 - RNA, 19 nt, Artificial Sequence
  Synthetic
uaaggcuuuuuuucuuaaa

SEQ ID NO: 437959 - RNA, 20 nt, Artificial Sequence
  Synthetic
auaaggcuuuuuuucuuaaa

SEQ ID NO: 437960 - RNA, 21 nt, Artificial Sequence
  Synthetic
uauaaggcuuuuuuucuuaaa

SEQ ID NO: 437961 - RNA, 22 nt, Artificial Sequence
  Synthetic
auauaaggcuuuuuuucuuaaa

SEQ ID NO: 437962 - RNA, 23 nt, Artificial Sequence
  Synthetic
aauauaaggcuuuuuuucuuaaa

SEQ ID NO: 437963 - RNA, 24 nt, Artificial Sequence
  Synthetic
aaauauaaggcuuuuuuucuuaaa

SEQ ID NO: 437964 - RNA, 18 nt, Artificial Sequence
  Synthetic
acacuuaagaaaguuaaa

SEQ ID NO: 437965 - RNA, 19 nt, Artificial Sequence
  Synthetic
aacacuuaagaaaguuaaa

SEQ ID NO: 437966 - RNA, 20 nt, Artificial Sequence
  Synthetic
gaacacuuaagaaaguuaaa

SEQ ID NO: 437967 - RNA, 21 nt, Artificial Sequence
  Synthetic
ugaacacuuaagaaaguuaaa

SEQ ID NO: 437968 - RNA, 22 nt, Artificial Sequence
  Synthetic
augaacacuuaagaaaguuaaa

SEQ ID NO: 437969 - RNA, 23 nt, Artificial Sequence
  Synthetic
caugaacacuuaagaaaguuaaa

SEQ ID NO: 437970 - RNA, 24 nt, Artificial Sequence
  Synthetic
acaugaacacuuaagaaaguuaaa

SEQ ID NO: 437971 - RNA, 18 nt, Artificial Sequence
  Synthetic
aaauuugaaucaguuaaa

SEQ ID NO: 437972 - RNA, 19 nt, Artificial Sequence
  Synthetic
aaaauuugaaucaguuaaa

SEQ ID NO: 437973 - RNA, 20 nt, Artificial Sequence
  Synthetic
gaaaauuugaaucaguuaaa

SEQ ID NO: 437974 - RNA, 21 nt, Artificial Sequence
  Synthetic
agaaaauuugaaucaguuaaa

SEQ ID NO: 437975 - RNA, 22 nt, Artificial Sequence
  Synthetic
gagaaaauuugaaucaguuaaa

SEQ ID NO: 437976 - RNA, 23 nt, Artificial Sequence
  Synthetic
ugagaaaauuugaaucaguuaaa

SEQ ID NO: 437977 - RNA, 24 nt, Artificial Sequence
  Synthetic
augagaaaauuugaaucaguuaaa

SEQ ID NO: 437978 - RNA, 18 nt, Artificial Sequence
  Synthetic
cauuucacuucaguuaaa

SEQ ID NO: 437979 - RNA, 19 nt, Artificial Sequence
  Synthetic
ucauuucacuucaguuaaa

SEQ ID NO: 437980 - RNA, 20 nt, Artificial Sequence
  Synthetic
uucauuucacuucaguuaaa

SEQ ID NO: 437981 - RNA, 21 nt, Artificial Sequence
  Synthetic
uuucauuucacuucaguuaaa

SEQ ID NO: 437982 - RNA, 22 nt, Artificial Sequence
  Synthetic
guuucauuucacuucaguuaaa

SEQ ID NO: 437983 - RNA, 23 nt, Artificial Sequence
  Synthetic
aguuucauuucacuucaguuaaa

SEQ ID NO: 437984 - RNA, 24 nt, Artificial Sequence
  Synthetic
aaguuucauuucacuucaguuaaa

SEQ ID NO: 437985 - RNA, 18 nt, Artificial Sequence
  Synthetic
aaaacccaccuaguuaaa

SEQ ID NO: 437986 - RNA, 19 nt, Artificial Sequence
  Synthetic
aaaaacccaccuaguuaaa

SEQ ID NO: 437987 - RNA, 20 nt, Artificial Sequence
  Synthetic
caaaaacccaccuaguuaaa

SEQ ID NO: 437988 - RNA, 21 nt, Artificial Sequence
  Synthetic
ucaaaaacccaccuaguuaaa

SEQ ID NO: 437989 - RNA, 22 nt, Artificial Sequence
  Synthetic
aucaaaaacccaccuaguuaaa

SEQ ID NO: 437990 - RNA, 23 nt, Artificial Sequence
  Synthetic
gaucaaaaacccaccuaguuaaa

SEQ ID NO: 437991 - RNA, 24 nt, Artificial Sequence
  Synthetic
agaucaaaaacccaccuaguuaaa

SEQ ID NO: 437992 - RNA, 18 nt, Artificial Sequence
  Synthetic
gauaucaugguaguuaaa

SEQ ID NO: 437993 - RNA, 19 nt, Artificial Sequence
  Synthetic
agauaucaugguaguuaaa

SEQ ID NO: 437994 - RNA, 20 nt, Artificial Sequence
  Synthetic
gagauaucaugguaguuaaa

SEQ ID NO: 437995 - RNA, 21 nt, Artificial Sequence
  Synthetic
ggagauaucaugguaguuaaa

SEQ ID NO: 437996 - RNA, 22 nt, Artificial Sequence
  Synthetic
aggagauaucaugguaguuaaa

SEQ ID NO: 437997 - RNA, 23 nt, Artificial Sequence
  Synthetic
caggagauaucaugguaguuaaa

SEQ ID NO: 437998 - RNA, 24 nt, Artificial Sequence
  Synthetic
gcaggagauaucaugguaguuaaa

SEQ ID NO: 437999 - RNA, 18 nt, Artificial Sequence
  Synthetic
uaaauuuuacauguuaaa

SEQ ID NO: 438000 - RNA, 19 nt, Artificial Sequence
  Synthetic
cuaaauuuuacauguuaaa

SEQ ID NO: 438001 - RNA, 20 nt, Artificial Sequence
  Synthetic
ucuaaauuuuacauguuaaa

SEQ ID NO: 438002 - RNA, 21 nt, Artificial Sequence
  Synthetic
uucuaaauuuuacauguuaaa

SEQ ID NO: 438003 - RNA, 22 nt, Artificial Sequence
  Synthetic
uuucuaaauuuuacauguuaaa

SEQ ID NO: 438004 - RNA, 23 nt, Artificial Sequence
  Synthetic
uuuucuaaauuuuacauguuaaa

SEQ ID NO: 438005 - RNA, 24 nt, Artificial Sequence
  Synthetic
auuuucuaaauuuuacauguuaaa

SEQ ID NO: 438006 - RNA, 18 nt, Artificial Sequence
  Synthetic
acaugugaucauguuaaa

SEQ ID NO: 438007 - RNA, 19 nt, Artificial Sequence
  Synthetic
aacaugugaucauguuaaa

SEQ ID NO: 438008 - RNA, 20 nt, Artificial Sequence
  Synthetic
uaacaugugaucauguuaaa

SEQ ID NO: 438009 - RNA, 21 nt, Artificial Sequence
  Synthetic
auaacaugugaucauguuaaa

SEQ ID NO: 438010 - RNA, 22 nt, Artificial Sequence
  Synthetic
aauaacaugugaucauguuaaa

SEQ ID NO: 438011 - RNA, 23 nt, Artificial Sequence
  Synthetic
aaauaacaugugaucauguuaaa

SEQ ID NO: 438012 - RNA, 24 nt, Artificial Sequence
  Synthetic
aaaauaacaugugaucauguuaaa

SEQ ID NO: 438013 - RNA, 18 nt, Artificial Sequence
  Synthetic
uuuuauccauauguuaaa

SEQ ID NO: 438014 - RNA, 19 nt, Artificial Sequence
  Synthetic
auuuuauccauauguuaaa

SEQ ID NO: 438015 - RNA, 20 nt, Artificial Sequence
  Synthetic
uauuuuauccauauguuaaa

SEQ ID NO: 438016 - RNA, 21 nt, Artificial Sequence
  Synthetic
auauuuuauccauauguuaaa

SEQ ID NO: 438017 - RNA, 22 nt, Artificial Sequence
  Synthetic
aauauuuuauccauauguuaaa

SEQ ID NO: 438018 - RNA, 23 nt, Artificial Sequence
  Synthetic
aaauauuuuauccauauguuaaa

SEQ ID NO: 438019 - RNA, 24 nt, Artificial Sequence
  Synthetic
aaaauauuuuauccauauguuaaa

SEQ ID NO: 438020 - RNA, 18 nt, Artificial Sequence
  Synthetic
uauguuuuauauguuaaa

SEQ ID NO: 438021 - RNA, 19 nt, Artificial Sequence
  Synthetic
auauguuuuauauguuaaa

SEQ ID NO: 438022 - RNA, 20 nt, Artificial Sequence
  Synthetic
uauauguuuuauauguuaaa

SEQ ID NO: 438023 - RNA, 21 nt, Artificial Sequence
  Synthetic
uuauauguuuuauauguuaaa

SEQ ID NO: 438024 - RNA, 22 nt, Artificial Sequence
  Synthetic
auuauauguuuuauauguuaaa

SEQ ID NO: 438025 - RNA, 23 nt, Artificial Sequence
  Synthetic
uauuauauguuuuauauguuaaa

SEQ ID NO: 438026 - RNA, 24 nt, Artificial Sequence
  Synthetic
auauuauauguuuuauauguuaaa

SEQ ID NO: 438027 - RNA, 18 nt, Artificial Sequence
  Synthetic
uuaaaaaucauuguuaaa

SEQ ID NO: 438028 - RNA, 19 nt, Artificial Sequence
  Synthetic
guuaaaaaucauuguuaaa

SEQ ID NO: 438029 - RNA, 20 nt, Artificial Sequence
  Synthetic
aguuaaaaaucauuguuaaa

SEQ ID NO: 438030 - RNA, 21 nt, Artificial Sequence
  Synthetic
gaguuaaaaaucauuguuaaa

SEQ ID NO: 438031 - RNA, 22 nt, Artificial Sequence
  Synthetic
agaguuaaaaaucauuguuaaa

SEQ ID NO: 438032 - RNA, 23 nt, Artificial Sequence
  Synthetic
uagaguuaaaaaucauuguuaaa

SEQ ID NO: 438033 - RNA, 24 nt, Artificial Sequence
  Synthetic
uuagaguuaaaaaucauuguuaaa

SEQ ID NO: 438034 - RNA, 18 nt, Artificial Sequence
  Synthetic
aauuguuuguuuguuaaa

SEQ ID NO: 438035 - RNA, 19 nt, Artificial Sequence
  Synthetic
caauuguuuguuuguuaaa

SEQ ID NO: 438036 - RNA, 20 nt, Artificial Sequence
  Synthetic
acaauuguuuguuuguuaaa

SEQ ID NO: 438037 - RNA, 21 nt, Artificial Sequence
  Synthetic
gacaauuguuuguuuguuaaa

SEQ ID NO: 438038 - RNA, 22 nt, Artificial Sequence
  Synthetic
ggacaauuguuuguuuguuaaa

SEQ ID NO: 438039 - RNA, 23 nt, Artificial Sequence
  Synthetic
uggacaauuguuuguuuguuaaa

SEQ ID NO: 438040 - RNA, 24 nt, Artificial Sequence
  Synthetic
uuggacaauuguuuguuuguuaaa

SEQ ID NO: 438041 - RNA, 18 nt, Artificial Sequence
  Synthetic
uucugaaacaaauuuaaa

SEQ ID NO: 438042 - RNA, 19 nt, Artificial Sequence
  Synthetic
uuucugaaacaaauuuaaa

SEQ ID NO: 438043 - RNA, 20 nt, Artificial Sequence
  Synthetic
auuucugaaacaaauuuaaa

SEQ ID NO: 438044 - RNA, 21 nt, Artificial Sequence
  Synthetic
gauuucugaaacaaauuuaaa

SEQ ID NO: 438045 - RNA, 22 nt, Artificial Sequence
  Synthetic
ugauuucugaaacaaauuuaaa

SEQ ID NO: 438046 - RNA, 23 nt, Artificial Sequence
  Synthetic
uugauuucugaaacaaauuuaaa

SEQ ID NO: 438047 - RNA, 24 nt, Artificial Sequence
  Synthetic
cuugauuucugaaacaaauuuaaa

SEQ ID NO: 438048 - RNA, 18 nt, Artificial Sequence
  Synthetic
aaauaauggaaauuuaaa

SEQ ID NO: 438049 - RNA, 19 nt, Artificial Sequence
  Synthetic
aaaauaauggaaauuuaaa

SEQ ID NO: 438050 - RNA, 20 nt, Artificial Sequence
  Synthetic
aaaaauaauggaaauuuaaa

SEQ ID NO: 438051 - RNA, 21 nt, Artificial Sequence
  Synthetic
caaaaauaauggaaauuuaaa

SEQ ID NO: 438052 - RNA, 22 nt, Artificial Sequence
  Synthetic
ucaaaaauaauggaaauuuaaa

SEQ ID NO: 438053 - RNA, 23 nt, Artificial Sequence
  Synthetic
uucaaaaauaauggaaauuuaaa

SEQ ID NO: 438054 - RNA, 24 nt, Artificial Sequence
  Synthetic
uuucaaaaauaauggaaauuuaaa

SEQ ID NO: 438055 - RNA, 18 nt, Artificial Sequence
  Synthetic
uuugauauucaauuuaaa

SEQ ID NO: 438056 - RNA, 19 nt, Artificial Sequence
  Synthetic
auuugauauucaauuuaaa

SEQ ID NO: 438057 - RNA, 20 nt, Artificial Sequence
  Synthetic
gauuugauauucaauuuaaa

SEQ ID NO: 438058 - RNA, 21 nt, Artificial Sequence
  Synthetic
ggauuugauauucaauuuaaa

SEQ ID NO: 438059 - RNA, 22 nt, Artificial Sequence
  Synthetic
aggauuugauauucaauuuaaa

SEQ ID NO: 438060 - RNA, 23 nt, Artificial Sequence
  Synthetic
gaggauuugauauucaauuuaaa

SEQ ID NO: 438061 - RNA, 24 nt, Artificial Sequence
  Synthetic
ugaggauuugauauucaauuuaaa

SEQ ID NO: 438062 - RNA, 18 nt, Artificial Sequence
  Synthetic
cacaauagagaauuuaaa

SEQ ID NO: 438063 - RNA, 19 nt, Artificial Sequence
  Synthetic
acacaauagagaauuuaaa

SEQ ID NO: 438064 - RNA, 20 nt, Artificial Sequence
  Synthetic
aacacaauagagaauuuaaa

SEQ ID NO: 438065 - RNA, 21 nt, Artificial Sequence
  Synthetic
uaacacaauagagaauuuaaa

SEQ ID NO: 438066 - RNA, 22 nt, Artificial Sequence
  Synthetic
cuaacacaauagagaauuuaaa

SEQ ID NO: 438067 - RNA, 23 nt, Artificial Sequence
  Synthetic
acuaacacaauagagaauuuaaa

SEQ ID NO: 438068 - RNA, 24 nt, Artificial Sequence
  Synthetic
aacuaacacaauagagaauuuaaa

SEQ ID NO: 438069 - RNA, 18 nt, Artificial Sequence
  Synthetic
uaggaagcuuaauuuaaa

SEQ ID NO: 438070 - RNA, 19 nt, Artificial Sequence
  Synthetic
uuaggaagcuuaauuuaaa

SEQ ID NO: 438071 - RNA, 20 nt, Artificial Sequence
  Synthetic
uuuaggaagcuuaauuuaaa

SEQ ID NO: 438072 - RNA, 21 nt, Artificial Sequence
  Synthetic
uuuuaggaagcuuaauuuaaa

SEQ ID NO: 438073 - RNA, 22 nt, Artificial Sequence
  Synthetic
guuuuaggaagcuuaauuuaaa

SEQ ID NO: 438074 - RNA, 23 nt, Artificial Sequence
  Synthetic
uguuuuaggaagcuuaauuuaaa

SEQ ID NO: 438075 - RNA, 24 nt, Artificial Sequence
  Synthetic
auguuuuaggaagcuuaauuuaaa

SEQ ID NO: 438076 - RNA, 18 nt, Artificial Sequence
  Synthetic
aauagcucuuaauuuaaa

SEQ ID NO: 438077 - RNA, 19 nt, Artificial Sequence
  Synthetic
aaauagcucuuaauuuaaa

SEQ ID NO: 438078 - RNA, 20 nt, Artificial Sequence
  Synthetic
uaaauagcucuuaauuuaaa

SEQ ID NO: 438079 - RNA, 21 nt, Artificial Sequence
  Synthetic
uuaaauagcucuuaauuuaaa

SEQ ID NO: 438080 - RNA, 22 nt, Artificial Sequence
  Synthetic
auuaaauagcucuuaauuuaaa

SEQ ID NO: 438081 - RNA, 23 nt, Artificial Sequence
  Synthetic
aauuaaauagcucuuaauuuaaa

SEQ ID NO: 438082 - RNA, 24 nt, Artificial Sequence
  Synthetic
uaauuaaauagcucuuaauuuaaa

SEQ ID NO: 438083 - RNA, 18 nt, Artificial Sequence
  Synthetic
uggaaguauacauuuaaa

SEQ ID NO: 438084 - RNA, 19 nt, Artificial Sequence
  Synthetic
auggaaguauacauuuaaa

SEQ ID NO: 438085 - RNA, 20 nt, Artificial Sequence
  Synthetic
cauggaaguauacauuuaaa

SEQ ID NO: 438086 - RNA, 21 nt, Artificial Sequence
  Synthetic
ccauggaaguauacauuuaaa

SEQ ID NO: 438087 - RNA, 22 nt, Artificial Sequence
  Synthetic
gccauggaaguauacauuuaaa

SEQ ID NO: 438088 - RNA, 23 nt, Artificial Sequence
  Synthetic
ugccauggaaguauacauuuaaa

SEQ ID NO: 438089 - RNA, 24 nt, Artificial Sequence
  Synthetic
augccauggaaguauacauuuaaa

SEQ ID NO: 438090 - RNA, 18 nt, Artificial Sequence
  Synthetic
uuucaaagaagauuuaaa

SEQ ID NO: 438091 - RNA, 19 nt, Artificial Sequence
  Synthetic
auuucaaagaagauuuaaa

SEQ ID NO: 438092 - RNA, 20 nt, Artificial Sequence
  Synthetic
uauuucaaagaagauuuaaa

SEQ ID NO: 438093 - RNA, 21 nt, Artificial Sequence
  Synthetic
guauuucaaagaagauuuaaa

SEQ ID NO: 438094 - RNA, 22 nt, Artificial Sequence
  Synthetic
aguauuucaaagaagauuuaaa

SEQ ID NO: 438095 - RNA, 23 nt, Artificial Sequence
  Synthetic
gaguauuucaaagaagauuuaaa

SEQ ID NO: 438096 - RNA, 24 nt, Artificial Sequence
  Synthetic
agaguauuucaaagaagauuuaaa

SEQ ID NO: 438097 - RNA, 18 nt, Artificial Sequence
  Synthetic
uuauuauguagauuuaaa

SEQ ID NO: 438098 - RNA, 19 nt, Artificial Sequence
  Synthetic
guuauuauguagauuuaaa

SEQ ID NO: 438099 - RNA, 20 nt, Artificial Sequence
  Synthetic
uguuauuauguagauuuaaa

SEQ ID NO: 438100 - RNA, 21 nt, Artificial Sequence
  Synthetic
cuguuauuauguagauuuaaa

SEQ ID NO: 438101 - RNA, 22 nt, Artificial Sequence
  Synthetic
ccuguuauuauguagauuuaaa

SEQ ID NO: 438102 - RNA, 23 nt, Artificial Sequence
  Synthetic
uccuguuauuauguagauuuaaa

SEQ ID NO: 438103 - RNA, 24 nt, Artificial Sequence
  Synthetic
cuccuguuauuauguagauuuaaa

SEQ ID NO: 438104 - RNA, 18 nt, Artificial Sequence
  Synthetic
ugaaauaguggauuuaaa

SEQ ID NO: 438105 - RNA, 19 nt, Artificial Sequence
  Synthetic
augaaauaguggauuuaaa

SEQ ID NO: 438106 - RNA, 20 nt, Artificial Sequence
  Synthetic
gaugaaauaguggauuuaaa

SEQ ID NO: 438107 - RNA, 21 nt, Artificial Sequence
  Synthetic
cgaugaaauaguggauuuaaa

SEQ ID NO: 438108 - RNA, 22 nt, Artificial Sequence
  Synthetic
gcgaugaaauaguggauuuaaa

SEQ ID NO: 438109 - RNA, 23 nt, Artificial Sequence
  Synthetic
agcgaugaaauaguggauuuaaa

SEQ ID NO: 438110 - RNA, 24 nt, Artificial Sequence
  Synthetic
uagcgaugaaauaguggauuuaaa

SEQ ID NO: 438111 - RNA, 18 nt, Artificial Sequence
  Synthetic
guuugaagcugauuuaaa

SEQ ID NO: 438112 - RNA, 19 nt, Artificial Sequence
  Synthetic
uguuugaagcugauuuaaa

SEQ ID NO: 438113 - RNA, 20 nt, Artificial Sequence
  Synthetic
auguuugaagcugauuuaaa

SEQ ID NO: 438114 - RNA, 21 nt, Artificial Sequence
  Synthetic
uauguuugaagcugauuuaaa

SEQ ID NO: 438115 - RNA, 22 nt, Artificial Sequence
  Synthetic
auauguuugaagcugauuuaaa

SEQ ID NO: 438116 - RNA, 23 nt, Artificial Sequence
  Synthetic
aauauguuugaagcugauuuaaa

SEQ ID NO: 438117 - RNA, 24 nt, Artificial Sequence
  Synthetic
gaauauguuugaagcugauuuaaa

SEQ ID NO: 438118 - RNA, 18 nt, Artificial Sequence
  Synthetic
uuuuuacuaauauuuaaa

SEQ ID NO: 438119 - RNA, 19 nt, Artificial Sequence
  Synthetic
uuuuuuacuaauauuuaaa

SEQ ID NO: 438120 - RNA, 20 nt, Artificial Sequence
  Synthetic
uuuuuuuacuaauauuuaaa

SEQ ID NO: 438121 - RNA, 21 nt, Artificial Sequence
  Synthetic
uuuuuuuuacuaauauuuaaa

SEQ ID NO: 438122 - RNA, 22 nt, Artificial Sequence
  Synthetic
uuuuuuuuuacuaauauuuaaa

SEQ ID NO: 438123 - RNA, 23 nt, Artificial Sequence
  Synthetic
auuuuuuuuuacuaauauuuaaa

SEQ ID NO: 438124 - RNA, 24 nt, Artificial Sequence
  Synthetic
gauuuuuuuuuacuaauauuuaaa

SEQ ID NO: 438125 - RNA, 18 nt, Artificial Sequence
  Synthetic
aucacuuuuauauuuaaa

SEQ ID NO: 438126 - RNA, 19 nt, Artificial Sequence
  Synthetic
aaucacuuuuauauuuaaa

SEQ ID NO: 438127 - RNA, 20 nt, Artificial Sequence
  Synthetic
gaaucacuuuuauauuuaaa

SEQ ID NO: 438128 - RNA, 21 nt, Artificial Sequence
  Synthetic
ggaaucacuuuuauauuuaaa

SEQ ID NO: 438129 - RNA, 22 nt, Artificial Sequence
  Synthetic
uggaaucacuuuuauauuuaaa

SEQ ID NO: 438130 - RNA, 23 nt, Artificial Sequence
  Synthetic
uuggaaucacuuuuauauuuaaa

SEQ ID NO: 438131 - RNA, 24 nt, Artificial Sequence
  Synthetic
uuuggaaucacuuuuauauuuaaa

SEQ ID NO: 438132 - RNA, 18 nt, Artificial Sequence
  Synthetic
aauucucucuuauuuaaa

SEQ ID NO: 438133 - RNA, 19 nt, Artificial Sequence
  Synthetic
caauucucucuuauuuaaa

SEQ ID NO: 438134 - RNA, 20 nt, Artificial Sequence
  Synthetic
acaauucucucuuauuuaaa

SEQ ID NO: 438135 - RNA, 21 nt, Artificial Sequence
  Synthetic
gacaauucucucuuauuuaaa

SEQ ID NO: 438136 - RNA, 22 nt, Artificial Sequence
  Synthetic
ugacaauucucucuuauuuaaa

SEQ ID NO: 438137 - RNA, 23 nt, Artificial Sequence
  Synthetic
uugacaauucucucuuauuuaaa

SEQ ID NO: 438138 - RNA, 24 nt, Artificial Sequence
  Synthetic
auugacaauucucucuuauuuaaa

SEQ ID NO: 438139 - RNA, 18 nt, Artificial Sequence
  Synthetic
gggaugauuuuauuuaaa

SEQ ID NO: 438140 - RNA, 19 nt, Artificial Sequence
  Synthetic
ugggaugauuuuauuuaaa

SEQ ID NO: 438141 - RNA, 20 nt, Artificial Sequence
  Synthetic
gugggaugauuuuauuuaaa

SEQ ID NO: 438142 - RNA, 21 nt, Artificial Sequence
  Synthetic
agugggaugauuuuauuuaaa

SEQ ID NO: 438143 - RNA, 22 nt, Artificial Sequence
  Synthetic
gagugggaugauuuuauuuaaa

SEQ ID NO: 438144 - RNA, 23 nt, Artificial Sequence
  Synthetic
agagugggaugauuuuauuuaaa

SEQ ID NO: 438145 - RNA, 24 nt, Artificial Sequence
  Synthetic
aagagugggaugauuuuauuuaaa

SEQ ID NO: 438146 - RNA, 18 nt, Artificial Sequence
  Synthetic
gaaacugggugcuuuaaa

SEQ ID NO: 438147 - RNA, 19 nt, Artificial Sequence
  Synthetic
ugaaacugggugcuuuaaa

SEQ ID NO: 438148 - RNA, 20 nt, Artificial Sequence
  Synthetic
cugaaacugggugcuuuaaa

SEQ ID NO: 438149 - RNA, 21 nt, Artificial Sequence
  Synthetic
ccugaaacugggugcuuuaaa

SEQ ID NO: 438150 - RNA, 22 nt, Artificial Sequence
  Synthetic
accugaaacugggugcuuuaaa

SEQ ID NO: 438151 - RNA, 23 nt, Artificial Sequence
  Synthetic
uaccugaaacugggugcuuuaaa

SEQ ID NO: 438152 - RNA, 24 nt, Artificial Sequence
  Synthetic
auaccugaaacugggugcuuuaaa

SEQ ID NO: 438153 - RNA, 18 nt, Artificial Sequence
  Synthetic
aacuacaaacucuuuaaa

SEQ ID NO: 438154 - RNA, 19 nt, Artificial Sequence
  Synthetic
aaacuacaaacucuuuaaa

SEQ ID NO: 438155 - RNA, 20 nt, Artificial Sequence
  Synthetic
gaaacuacaaacucuuuaaa

SEQ ID NO: 438156 - RNA, 21 nt, Artificial Sequence
  Synthetic
agaaacuacaaacucuuuaaa

SEQ ID NO: 438157 - RNA, 22 nt, Artificial Sequence
  Synthetic
cagaaacuacaaacucuuuaaa

SEQ ID NO: 438158 - RNA, 23 nt, Artificial Sequence
  Synthetic
ccagaaacuacaaacucuuuaaa

SEQ ID NO: 438159 - RNA, 24 nt, Artificial Sequence
  Synthetic
gccagaaacuacaaacucuuuaaa

SEQ ID NO: 438160 - RNA, 18 nt, Artificial Sequence
  Synthetic
gggagcuaucucuuuaaa

SEQ ID NO: 438161 - RNA, 19 nt, Artificial Sequence
  Synthetic
ugggagcuaucucuuuaaa

SEQ ID NO: 438162 - RNA, 20 nt, Artificial Sequence
  Synthetic
augggagcuaucucuuuaaa

SEQ ID NO: 438163 - RNA, 21 nt, Artificial Sequence
  Synthetic
aaugggagcuaucucuuuaaa

SEQ ID NO: 438164 - RNA, 22 nt, Artificial Sequence
  Synthetic
aaaugggagcuaucucuuuaaa

SEQ ID NO: 438165 - RNA, 23 nt, Artificial Sequence
  Synthetic
aaaaugggagcuaucucuuuaaa

SEQ ID NO: 438166 - RNA, 24 nt, Artificial Sequence
  Synthetic
uaaaaugggagcuaucucuuuaaa

SEQ ID NO: 438167 - RNA, 18 nt, Artificial Sequence
  Synthetic
uaaauucucuucuuuaaa

SEQ ID NO: 438168 - RNA, 19 nt, Artificial Sequence
  Synthetic
cuaaauucucuucuuuaaa

SEQ ID NO: 438169 - RNA, 20 nt, Artificial Sequence
  Synthetic
acuaaauucucuucuuuaaa

SEQ ID NO: 438170 - RNA, 21 nt, Artificial Sequence
  Synthetic
cacuaaauucucuucuuuaaa

SEQ ID NO: 438171 - RNA, 22 nt, Artificial Sequence
  Synthetic
gcacuaaauucucuucuuuaaa

SEQ ID NO: 438172 - RNA, 23 nt, Artificial Sequence
  Synthetic
agcacuaaauucucuucuuuaaa

SEQ ID NO: 438173 - RNA, 24 nt, Artificial Sequence
  Synthetic
aagcacuaaauucucuucuuuaaa

SEQ ID NO: 438174 - RNA, 18 nt, Artificial Sequence
  Synthetic
uaaaaauauuaguuuaaa

SEQ ID NO: 438175 - RNA, 19 nt, Artificial Sequence
  Synthetic
auaaaaauauuaguuuaaa

SEQ ID NO: 438176 - RNA, 20 nt, Artificial Sequence
  Synthetic
cauaaaaauauuaguuuaaa

SEQ ID NO: 438177 - RNA, 21 nt, Artificial Sequence
  Synthetic
ucauaaaaauauuaguuuaaa

SEQ ID NO: 438178 - RNA, 22 nt, Artificial Sequence
  Synthetic
aucauaaaaauauuaguuuaaa

SEQ ID NO: 438179 - RNA, 23 nt, Artificial Sequence
  Synthetic
aaucauaaaaauauuaguuuaaa

SEQ ID NO: 438180 - RNA, 24 nt, Artificial Sequence
  Synthetic
aaaucauaaaaauauuaguuuaaa

SEQ ID NO: 438181 - RNA, 18 nt, Artificial Sequence
  Synthetic
uaggucaacauguuuaaa

SEQ ID NO: 438182 - RNA, 19 nt, Artificial Sequence
  Synthetic
guaggucaacauguuuaaa

SEQ ID NO: 438183 - RNA, 20 nt, Artificial Sequence
  Synthetic
uguaggucaacauguuuaaa

SEQ ID NO: 438184 - RNA, 21 nt, Artificial Sequence
  Synthetic
auguaggucaacauguuuaaa

SEQ ID NO: 438185 - RNA, 22 nt, Artificial Sequence
  Synthetic
aauguaggucaacauguuuaaa

SEQ ID NO: 438186 - RNA, 23 nt, Artificial Sequence
  Synthetic
uaauguaggucaacauguuuaaa

SEQ ID NO: 438187 - RNA, 24 nt, Artificial Sequence
  Synthetic
uuaauguaggucaacauguuuaaa

SEQ ID NO: 438188 - RNA, 18 nt, Artificial Sequence
  Synthetic
uuggaaauuauguuuaaa

SEQ ID NO: 438189 - RNA, 19 nt, Artificial Sequence
  Synthetic
auuggaaauuauguuuaaa

SEQ ID NO: 438190 - RNA, 20 nt, Artificial Sequence
  Synthetic
aauuggaaauuauguuuaaa

SEQ ID NO: 438191 - RNA, 21 nt, Artificial Sequence
  Synthetic
gaauuggaaauuauguuuaaa

SEQ ID NO: 438192 - RNA, 22 nt, Artificial Sequence
  Synthetic
ggaauuggaaauuauguuuaaa

SEQ ID NO: 438193 - RNA, 23 nt, Artificial Sequence
  Synthetic
uggaauuggaaauuauguuuaaa

SEQ ID NO: 438194 - RNA, 24 nt, Artificial Sequence
  Synthetic
uuggaauuggaaauuauguuuaaa

SEQ ID NO: 438195 - RNA, 18 nt, Artificial Sequence
  Synthetic
aauucgggacuguuuaaa

SEQ ID NO: 438196 - RNA, 19 nt, Artificial Sequence
  Synthetic
aaauucgggacuguuuaaa

SEQ ID NO: 438197 - RNA, 20 nt, Artificial Sequence
  Synthetic
aaaauucgggacuguuuaaa

SEQ ID NO: 438198 - RNA, 21 nt, Artificial Sequence
  Synthetic
aaaaauucgggacuguuuaaa

SEQ ID NO: 438199 - RNA, 22 nt, Artificial Sequence
  Synthetic
aaaaaauucgggacuguuuaaa

SEQ ID NO: 438200 - RNA, 23 nt, Artificial Sequence
  Synthetic
uaaaaaauucgggacuguuuaaa

SEQ ID NO: 438201 - RNA, 24 nt, Artificial Sequence
  Synthetic
guaaaaaauucgggacuguuuaaa

SEQ ID NO: 438202 - RNA, 18 nt, Artificial Sequence
  Synthetic
guaaacucauuguuuaaa

SEQ ID NO: 438203 - RNA, 19 nt, Artificial Sequence
  Synthetic
uguaaacucauuguuuaaa

SEQ ID NO: 438204 - RNA, 20 nt, Artificial Sequence
  Synthetic
auguaaacucauuguuuaaa

SEQ ID NO: 438205 - RNA, 21 nt, Artificial Sequence
  Synthetic
uauguaaacucauuguuuaaa

SEQ ID NO: 438206 - RNA, 22 nt, Artificial Sequence
  Synthetic
uuauguaaacucauuguuuaaa

SEQ ID NO: 438207 - RNA, 23 nt, Artificial Sequence
  Synthetic
guuauguaaacucauuguuuaaa

SEQ ID NO: 438208 - RNA, 24 nt, Artificial Sequence
  Synthetic
uguuauguaaacucauuguuuaaa

SEQ ID NO: 438209 - RNA, 18 nt, Artificial Sequence
  Synthetic
auaaaauuguuguuuaaa

SEQ ID NO: 438210 - RNA, 19 nt, Artificial Sequence
  Synthetic
cauaaaauuguuguuuaaa

SEQ ID NO: 438211 - RNA, 20 nt, Artificial Sequence
  Synthetic
gcauaaaauuguuguuuaaa

SEQ ID NO: 438212 - RNA, 21 nt, Artificial Sequence
  Synthetic
ggcauaaaauuguuguuuaaa

SEQ ID NO: 438213 - RNA, 22 nt, Artificial Sequence
  Synthetic
aggcauaaaauuguuguuuaaa

SEQ ID NO: 438214 - RNA, 23 nt, Artificial Sequence
  Synthetic
uaggcauaaaauuguuguuuaaa

SEQ ID NO: 438215 - RNA, 24 nt, Artificial Sequence
  Synthetic
auaggcauaaaauuguuguuuaaa

SEQ ID NO: 438216 - RNA, 18 nt, Artificial Sequence
  Synthetic
auuuaaaaaaauuuuaaa

SEQ ID NO: 438217 - RNA, 19 nt, Artificial Sequence
  Synthetic
aauuuaaaaaaauuuuaaa

SEQ ID NO: 438218 - RNA, 20 nt, Artificial Sequence
  Synthetic
aaauuuaaaaaaauuuuaaa

SEQ ID NO: 438219 - RNA, 21 nt, Artificial Sequence
  Synthetic
aaaauuuaaaaaaauuuuaaa

SEQ ID NO: 438220 - RNA, 22 nt, Artificial Sequence
  Synthetic
aaaaauuuaaaaaaauuuuaaa

SEQ ID NO: 438221 - RNA, 23 nt, Artificial Sequence
  Synthetic
caaaaauuuaaaaaaauuuuaaa

SEQ ID NO: 438222 - RNA, 24 nt, Artificial Sequence
  Synthetic
acaaaaauuuaaaaaaauuuuaaa

SEQ ID NO: 438223 - RNA, 18 nt, Artificial Sequence
  Synthetic
ugcaagacaaauuuuaaa

SEQ ID NO: 438224 - RNA, 19 nt, Artificial Sequence
  Synthetic
gugcaagacaaauuuuaaa

SEQ ID NO: 438225 - RNA, 20 nt, Artificial Sequence
  Synthetic
ugugcaagacaaauuuuaaa

SEQ ID NO: 438226 - RNA, 21 nt, Artificial Sequence
  Synthetic
cugugcaagacaaauuuuaaa

SEQ ID NO: 438227 - RNA, 22 nt, Artificial Sequence
  Synthetic
acugugcaagacaaauuuuaaa

SEQ ID NO: 438228 - RNA, 23 nt, Artificial Sequence
  Synthetic
cacugugcaagacaaauuuuaaa

SEQ ID NO: 438229 - RNA, 24 nt, Artificial Sequence
  Synthetic
ucacugugcaagacaaauuuuaaa

SEQ ID NO: 438230 - RNA, 18 nt, Artificial Sequence
  Synthetic
acaaaagagaauuuuaaa

SEQ ID NO: 438231 - RNA, 19 nt, Artificial Sequence
  Synthetic
aacaaaagagaauuuuaaa

SEQ ID NO: 438232 - RNA, 20 nt, Artificial Sequence
  Synthetic
aaacaaaagagaauuuuaaa

SEQ ID NO: 438233 - RNA, 21 nt, Artificial Sequence
  Synthetic
aaaacaaaagagaauuuuaaa

SEQ ID NO: 438234 - RNA, 22 nt, Artificial Sequence
  Synthetic
uaaaacaaaagagaauuuuaaa

SEQ ID NO: 438235 - RNA, 23 nt, Artificial Sequence
  Synthetic
guaaaacaaaagagaauuuuaaa

SEQ ID NO: 438236 - RNA, 24 nt, Artificial Sequence
  Synthetic
aguaaaacaaaagagaauuuuaaa

SEQ ID NO: 438237 - RNA, 18 nt, Artificial Sequence
  Synthetic
caguuccguaauuuuaaa

SEQ ID NO: 438238 - RNA, 19 nt, Artificial Sequence
  Synthetic
ucaguuccguaauuuuaaa

SEQ ID NO: 438239 - RNA, 20 nt, Artificial Sequence
  Synthetic
gucaguuccguaauuuuaaa

SEQ ID NO: 438240 - RNA, 21 nt, Artificial Sequence
  Synthetic
ugucaguuccguaauuuuaaa

SEQ ID NO: 438241 - RNA, 22 nt, Artificial Sequence
  Synthetic
cugucaguuccguaauuuuaaa

SEQ ID NO: 438242 - RNA, 23 nt, Artificial Sequence
  Synthetic
acugucaguuccguaauuuuaaa

SEQ ID NO: 438243 - RNA, 24 nt, Artificial Sequence
  Synthetic
gacugucaguuccguaauuuuaaa

SEQ ID NO: 438244 - RNA, 18 nt, Artificial Sequence
  Synthetic
aaucaccuuaauuuuaaa

SEQ ID NO: 438245 - RNA, 19 nt, Artificial Sequence
  Synthetic
uaaucaccuuaauuuuaaa

SEQ ID NO: 438246 - RNA, 20 nt, Artificial Sequence
  Synthetic
auaaucaccuuaauuuuaaa

SEQ ID NO: 438247 - RNA, 21 nt, Artificial Sequence
  Synthetic
uauaaucaccuuaauuuuaaa

SEQ ID NO: 438248 - RNA, 22 nt, Artificial Sequence
  Synthetic
guauaaucaccuuaauuuuaaa

SEQ ID NO: 438249 - RNA, 23 nt, Artificial Sequence
  Synthetic
aguauaaucaccuuaauuuuaaa

SEQ ID NO: 438250 - RNA, 24 nt, Artificial Sequence
  Synthetic
uaguauaaucaccuuaauuuuaaa

SEQ ID NO: 438251 - RNA, 18 nt, Artificial Sequence
  Synthetic
aauuaaccugauuuuaaa

SEQ ID NO: 438252 - RNA, 19 nt, Artificial Sequence
  Synthetic
caauuaaccugauuuuaaa

SEQ ID NO: 438253 - RNA, 20 nt, Artificial Sequence
  Synthetic
acaauuaaccugauuuuaaa

SEQ ID NO: 438254 - RNA, 21 nt, Artificial Sequence
  Synthetic
aacaauuaaccugauuuuaaa

SEQ ID NO: 438255 - RNA, 22 nt, Artificial Sequence
  Synthetic
aaacaauuaaccugauuuuaaa

SEQ ID NO: 438256 - RNA, 23 nt, Artificial Sequence
  Synthetic
aaaacaauuaaccugauuuuaaa

SEQ ID NO: 438257 - RNA, 24 nt, Artificial Sequence
  Synthetic
aaaaacaauuaaccugauuuuaaa

SEQ ID NO: 438258 - RNA, 18 nt, Artificial Sequence
  Synthetic
auaaaagcugauuuuaaa

SEQ ID NO: 438259 - RNA, 19 nt, Artificial Sequence
  Synthetic
uauaaaagcugauuuuaaa

SEQ ID NO: 438260 - RNA, 20 nt, Artificial Sequence
  Synthetic
auauaaaagcugauuuuaaa

SEQ ID NO: 438261 - RNA, 21 nt, Artificial Sequence
  Synthetic
aauauaaaagcugauuuuaaa

SEQ ID NO: 438262 - RNA, 22 nt, Artificial Sequence
  Synthetic
caauauaaaagcugauuuuaaa

SEQ ID NO: 438263 - RNA, 23 nt, Artificial Sequence
  Synthetic
ucaauauaaaagcugauuuuaaa

SEQ ID NO: 438264 - RNA, 24 nt, Artificial Sequence
  Synthetic
cucaauauaaaagcugauuuuaaa

SEQ ID NO: 438265 - RNA, 18 nt, Artificial Sequence
  Synthetic
cggaauuuauauuuuaaa

SEQ ID NO: 438266 - RNA, 19 nt, Artificial Sequence
  Synthetic
gcggaauuuauauuuuaaa

SEQ ID NO: 438267 - RNA, 20 nt, Artificial Sequence
  Synthetic
ugcggaauuuauauuuuaaa

SEQ ID NO: 438268 - RNA, 21 nt, Artificial Sequence
  Synthetic
cugcggaauuuauauuuuaaa

SEQ ID NO: 438269 - RNA, 22 nt, Artificial Sequence
  Synthetic
acugcggaauuuauauuuuaaa

SEQ ID NO: 438270 - RNA, 23 nt, Artificial Sequence
  Synthetic
gacugcggaauuuauauuuuaaa

SEQ ID NO: 438271 - RNA, 24 nt, Artificial Sequence
  Synthetic
ugacugcggaauuuauauuuuaaa

SEQ ID NO: 438272 - RNA, 18 nt, Artificial Sequence
  Synthetic
agauuuuuauauuuuaaa

SEQ ID NO: 438273 - RNA, 19 nt, Artificial Sequence
  Synthetic
gagauuuuuauauuuuaaa

SEQ ID NO: 438274 - RNA, 20 nt, Artificial Sequence
  Synthetic
ggagauuuuuauauuuuaaa

SEQ ID NO: 438275 - RNA, 21 nt, Artificial Sequence
  Synthetic
gggagauuuuuauauuuuaaa

SEQ ID NO: 438276 - RNA, 22 nt, Artificial Sequence
  Synthetic
ugggagauuuuuauauuuuaaa

SEQ ID NO: 438277 - RNA, 23 nt, Artificial Sequence
  Synthetic
cugggagauuuuuauauuuuaaa

SEQ ID NO: 438278 - RNA, 24 nt, Artificial Sequence
  Synthetic
ucugggagauuuuuauauuuuaaa

SEQ ID NO: 438279 - RNA, 18 nt, Artificial Sequence
  Synthetic
uuucauuucuauuuuaaa

SEQ ID NO: 438280 - RNA, 19 nt, Artificial Sequence
  Synthetic
auuucauuucuauuuuaaa

SEQ ID NO: 438281 - RNA, 20 nt, Artificial Sequence
  Synthetic
aauuucauuucuauuuuaaa

SEQ ID NO: 438282 - RNA, 21 nt, Artificial Sequence
  Synthetic
uaauuucauuucuauuuuaaa

SEQ ID NO: 438283 - RNA, 22 nt, Artificial Sequence
  Synthetic
auaauuucauuucuauuuuaaa

SEQ ID NO: 438284 - RNA, 23 nt, Artificial Sequence
  Synthetic
uauaauuucauuucuauuuuaaa

SEQ ID NO: 438285 - RNA, 24 nt, Artificial Sequence
  Synthetic
auauaauuucauuucuauuuuaaa

SEQ ID NO: 438286 - RNA, 18 nt, Artificial Sequence
  Synthetic
aaauuugauuauuuuaaa

SEQ ID NO: 438287 - RNA, 19 nt, Artificial Sequence
  Synthetic
aaaauuugauuauuuuaaa

SEQ ID NO: 438288 - RNA, 20 nt, Artificial Sequence
  Synthetic
uaaaauuugauuauuuuaaa

SEQ ID NO: 438289 - RNA, 21 nt, Artificial Sequence
  Synthetic
auaaaauuugauuauuuuaaa

SEQ ID NO: 438290 - RNA, 22 nt, Artificial Sequence
  Synthetic
aauaaaauuugauuauuuuaaa

SEQ ID NO: 438291 - RNA, 23 nt, Artificial Sequence
  Synthetic
aaauaaaauuugauuauuuuaaa

SEQ ID NO: 438292 - RNA, 24 nt, Artificial Sequence
  Synthetic
aaaauaaaauuugauuauuuuaaa

SEQ ID NO: 438293 - RNA, 18 nt, Artificial Sequence
  Synthetic
accacauuuuauuuuaaa

SEQ ID NO: 438294 - RNA, 19 nt, Artificial Sequence
  Synthetic
aaccacauuuuauuuuaaa

SEQ ID NO: 438295 - RNA, 20 nt, Artificial Sequence
  Synthetic
aaaccacauuuuauuuuaaa

SEQ ID NO: 438296 - RNA, 21 nt, Artificial Sequence
  Synthetic
uaaaccacauuuuauuuuaaa

SEQ ID NO: 438297 - RNA, 22 nt, Artificial Sequence
  Synthetic
uuaaaccacauuuuauuuuaaa

SEQ ID NO: 438298 - RNA, 23 nt, Artificial Sequence
  Synthetic
auuaaaccacauuuuauuuuaaa

SEQ ID NO: 438299 - RNA, 24 nt, Artificial Sequence
  Synthetic
gauuaaaccacauuuuauuuuaaa

SEQ ID NO: 438300 - RNA, 18 nt, Artificial Sequence
  Synthetic
ucggaagaugcuuuuaaa

SEQ ID NO: 438301 - RNA, 19 nt, Artificial Sequence
  Synthetic
cucggaagaugcuuuuaaa

SEQ ID NO: 438302 - RNA, 20 nt, Artificial Sequence
  Synthetic
ucucggaagaugcuuuuaaa

SEQ ID NO: 438303 - RNA, 21 nt, Artificial Sequence
  Synthetic
cucucggaagaugcuuuuaaa

SEQ ID NO: 438304 - RNA, 22 nt, Artificial Sequence
  Synthetic
gcucucggaagaugcuuuuaaa

SEQ ID NO: 438305 - RNA, 23 nt, Artificial Sequence
  Synthetic
ugcucucggaagaugcuuuuaaa

SEQ ID NO: 438306 - RNA, 24 nt, Artificial Sequence
  Synthetic
cugcucucggaagaugcuuuuaaa

SEQ ID NO: 438307 - RNA, 18 nt, Artificial Sequence
  Synthetic
auuaacacauguuuuaaa

SEQ ID NO: 438308 - RNA, 19 nt, Artificial Sequence
  Synthetic
gauuaacacauguuuuaaa

SEQ ID NO: 438309 - RNA, 20 nt, Artificial Sequence
  Synthetic
agauuaacacauguuuuaaa

SEQ ID NO: 438310 - RNA, 21 nt, Artificial Sequence
  Synthetic
aagauuaacacauguuuuaaa

SEQ ID NO: 438311 - RNA, 22 nt, Artificial Sequence
  Synthetic
aaagauuaacacauguuuuaaa

SEQ ID NO: 438312 - RNA, 23 nt, Artificial Sequence
  Synthetic
aaaagauuaacacauguuuuaaa

SEQ ID NO: 438313 - RNA, 24 nt, Artificial Sequence
  Synthetic
gaaaagauuaacacauguuuuaaa

SEQ ID NO: 438314 - RNA, 18 nt, Artificial Sequence
  Synthetic
aacaacccaauuuuuaaa

SEQ ID NO: 438315 - RNA, 19 nt, Artificial Sequence
  Synthetic
gaacaacccaauuuuuaaa

SEQ ID NO: 438316 - RNA, 20 nt, Artificial Sequence
  Synthetic
cgaacaacccaauuuuuaaa

SEQ ID NO: 438317 - RNA, 21 nt, Artificial Sequence
  Synthetic
ucgaacaacccaauuuuuaaa

SEQ ID NO: 438318 - RNA, 22 nt, Artificial Sequence
  Synthetic
uucgaacaacccaauuuuuaaa

SEQ ID NO: 438319 - RNA, 23 nt, Artificial Sequence
  Synthetic
auucgaacaacccaauuuuuaaa

SEQ ID NO: 438320 - RNA, 24 nt, Artificial Sequence
  Synthetic
aauucgaacaacccaauuuuuaaa

SEQ ID NO: 438321 - RNA, 18 nt, Artificial Sequence
  Synthetic
uucaauagaauuuuuaaa

SEQ ID NO: 438322 - RNA, 19 nt, Artificial Sequence
  Synthetic
guucaauagaauuuuuaaa

SEQ ID NO: 438323 - RNA, 20 nt, Artificial Sequence
  Synthetic
uguucaauagaauuuuuaaa

SEQ ID NO: 438324 - RNA, 21 nt, Artificial Sequence
  Synthetic
auguucaauagaauuuuuaaa

SEQ ID NO: 438325 - RNA, 22 nt, Artificial Sequence
  Synthetic
uauguucaauagaauuuuuaaa

SEQ ID NO: 438326 - RNA, 23 nt, Artificial Sequence
  Synthetic
auauguucaauagaauuuuuaaa

SEQ ID NO: 438327 - RNA, 24 nt, Artificial Sequence
  Synthetic
aauauguucaauagaauuuuuaaa

SEQ ID NO: 438328 - RNA, 18 nt, Artificial Sequence
  Synthetic
gcagcauugauuuuuaaa

SEQ ID NO: 438329 - RNA, 19 nt, Artificial Sequence
  Synthetic
ugcagcauugauuuuuaaa

SEQ ID NO: 438330 - RNA, 20 nt, Artificial Sequence
  Synthetic
augcagcauugauuuuuaaa

SEQ ID NO: 438331 - RNA, 21 nt, Artificial Sequence
  Synthetic
aaugcagcauugauuuuuaaa

SEQ ID NO: 438332 - RNA, 22 nt, Artificial Sequence
  Synthetic
uaaugcagcauugauuuuuaaa

SEQ ID NO: 438333 - RNA, 23 nt, Artificial Sequence
  Synthetic
auaaugcagcauugauuuuuaaa

SEQ ID NO: 438334 - RNA, 24 nt, Artificial Sequence
  Synthetic
cauaaugcagcauugauuuuuaaa

SEQ ID NO: 438335 - RNA, 18 nt, Artificial Sequence
  Synthetic
gcuucagauauuuuuaaa

SEQ ID NO: 438336 - RNA, 19 nt, Artificial Sequence
  Synthetic
ugcuucagauauuuuuaaa

SEQ ID NO: 438337 - RNA, 20 nt, Artificial Sequence
  Synthetic
cugcuucagauauuuuuaaa

SEQ ID NO: 438338 - RNA, 21 nt, Artificial Sequence
  Synthetic
acugcuucagauauuuuuaaa

SEQ ID NO: 438339 - RNA, 22 nt, Artificial Sequence
  Synthetic
cacugcuucagauauuuuuaaa

SEQ ID NO: 438340 - RNA, 23 nt, Artificial Sequence
  Synthetic
acacugcuucagauauuuuuaaa

SEQ ID NO: 438341 - RNA, 24 nt, Artificial Sequence
  Synthetic
aacacugcuucagauauuuuuaaa

SEQ ID NO: 438342 - RNA, 18 nt, Artificial Sequence
  Synthetic
cugaaucgccuuuuuaaa

SEQ ID NO: 438343 - RNA, 19 nt, Artificial Sequence
  Synthetic
ucugaaucgccuuuuuaaa

SEQ ID NO: 438344 - RNA, 20 nt, Artificial Sequence
  Synthetic
uucugaaucgccuuuuuaaa

SEQ ID NO: 438345 - RNA, 21 nt, Artificial Sequence
  Synthetic
auucugaaucgccuuuuuaaa

SEQ ID NO: 438346 - RNA, 22 nt, Artificial Sequence
  Synthetic
aauucugaaucgccuuuuuaaa

SEQ ID NO: 438347 - RNA, 23 nt, Artificial Sequence
  Synthetic
caauucugaaucgccuuuuuaaa

SEQ ID NO: 438348 - RNA, 24 nt, Artificial Sequence
  Synthetic
acaauucugaaucgccuuuuuaaa

SEQ ID NO: 438349 - RNA, 18 nt, Artificial Sequence
  Synthetic
gaaauaauauuuuuuaaa

SEQ ID NO: 438350 - RNA, 19 nt, Artificial Sequence
  Synthetic
ugaaauaauauuuuuuaaa

SEQ ID NO: 438351 - RNA, 20 nt, Artificial Sequence
  Synthetic
cugaaauaauauuuuuuaaa

SEQ ID NO: 438352 - RNA, 21 nt, Artificial Sequence
  Synthetic
acugaaauaauauuuuuuaaa

SEQ ID NO: 438353 - RNA, 22 nt, Artificial Sequence
  Synthetic
aacugaaauaauauuuuuuaaa

SEQ ID NO: 438354 - RNA, 23 nt, Artificial Sequence
  Synthetic
caacugaaauaauauuuuuuaaa

SEQ ID NO: 438355 - RNA, 24 nt, Artificial Sequence
  Synthetic
ucaacugaaauaauauuuuuuaaa

SEQ ID NO: 438356 - RNA, 18 nt, Artificial Sequence
  Synthetic
ugcccagcguuuuuuaaa

SEQ ID NO: 438357 - RNA, 19 nt, Artificial Sequence
  Synthetic
augcccagcguuuuuuaaa

SEQ ID NO: 438358 - RNA, 20 nt, Artificial Sequence
  Synthetic
uaugcccagcguuuuuuaaa

SEQ ID NO: 438359 - RNA, 21 nt, Artificial Sequence
  Synthetic
uuaugcccagcguuuuuuaaa

SEQ ID NO: 438360 - RNA, 22 nt, Artificial Sequence
  Synthetic
cuuaugcccagcguuuuuuaaa

SEQ ID NO: 438361 - RNA, 23 nt, Artificial Sequence
  Synthetic
ucuuaugcccagcguuuuuuaaa

SEQ ID NO: 438362 - RNA, 24 nt, Artificial Sequence
  Synthetic
uucuuaugcccagcguuuuuuaaa

SEQ ID NO: 438363 - RNA, 18 nt, Artificial Sequence
  Synthetic
ucccaacgaaaaaaacaa

SEQ ID NO: 438364 - RNA, 19 nt, Artificial Sequence
  Synthetic
gucccaacgaaaaaaacaa

SEQ ID NO: 438365 - RNA, 20 nt, Artificial Sequence
  Synthetic
ugucccaacgaaaaaaacaa

SEQ ID NO: 438366 - RNA, 21 nt, Artificial Sequence
  Synthetic
augucccaacgaaaaaaacaa

SEQ ID NO: 438367 - RNA, 22 nt, Artificial Sequence
  Synthetic
caugucccaacgaaaaaaacaa

SEQ ID NO: 438368 - RNA, 23 nt, Artificial Sequence
  Synthetic
ucaugucccaacgaaaaaaacaa

SEQ ID NO: 438369 - RNA, 24 nt, Artificial Sequence
  Synthetic
uucaugucccaacgaaaaaaacaa

SEQ ID NO: 438370 - RNA, 18 nt, Artificial Sequence
  Synthetic
uugcuggggaaaaaacaa

SEQ ID NO: 438371 - RNA, 19 nt, Artificial Sequence
  Synthetic
uuugcuggggaaaaaacaa

SEQ ID NO: 438372 - RNA, 20 nt, Artificial Sequence
  Synthetic
uuuugcuggggaaaaaacaa

SEQ ID NO: 438373 - RNA, 21 nt, Artificial Sequence
  Synthetic
auuuugcuggggaaaaaacaa

SEQ ID NO: 438374 - RNA, 22 nt, Artificial Sequence
  Synthetic
aauuuugcuggggaaaaaacaa

SEQ ID NO: 438375 - RNA, 23 nt, Artificial Sequence
  Synthetic
aaauuuugcuggggaaaaaacaa

SEQ ID NO: 438376 - RNA, 24 nt, Artificial Sequence
  Synthetic
caaauuuugcuggggaaaaaacaa

SEQ ID NO: 438377 - RNA, 18 nt, Artificial Sequence
  Synthetic
aaaaaaaaacaaaaacaa

SEQ ID NO: 438378 - RNA, 19 nt, Artificial Sequence
  Synthetic
aaaaaaaaaacaaaaacaa

SEQ ID NO: 438379 - RNA, 20 nt, Artificial Sequence
  Synthetic
aaaaaaaaaaacaaaaacaa

SEQ ID NO: 438380 - RNA, 21 nt, Artificial Sequence
  Synthetic
aaaaaaaaaaaacaaaaacaa

SEQ ID NO: 438381 - RNA, 22 nt, Artificial Sequence
  Synthetic
aaaaaaaaaaaaacaaaaacaa

SEQ ID NO: 438382 - RNA, 23 nt, Artificial Sequence
  Synthetic
aaaaaaaaaaaaaacaaaaacaa

SEQ ID NO: 438383 - RNA, 24 nt, Artificial Sequence
  Synthetic
aaaaaaaaaaaaaaacaaaaacaa

SEQ ID NO: 438384 - RNA, 18 nt, Artificial Sequence
  Synthetic
aggcaaaaucaaaaacaa

SEQ ID NO: 438385 - RNA, 19 nt, Artificial Sequence
  Synthetic
uaggcaaaaucaaaaacaa

SEQ ID NO: 438386 - RNA, 20 nt, Artificial Sequence
  Synthetic
auaggcaaaaucaaaaacaa

SEQ ID NO: 438387 - RNA, 21 nt, Artificial Sequence
  Synthetic
cauaggcaaaaucaaaaacaa

SEQ ID NO: 438388 - RNA, 22 nt, Artificial Sequence
  Synthetic
ccauaggcaaaaucaaaaacaa

SEQ ID NO: 438389 - RNA, 23 nt, Artificial Sequence
  Synthetic
gccauaggcaaaaucaaaaacaa

SEQ ID NO: 438390 - RNA, 24 nt, Artificial Sequence
  Synthetic
agccauaggcaaaaucaaaaacaa

SEQ ID NO: 438391 - RNA, 18 nt, Artificial Sequence
  Synthetic
aaucuucuugaaaaacaa

SEQ ID NO: 438392 - RNA, 19 nt, Artificial Sequence
  Synthetic
aaaucuucuugaaaaacaa

SEQ ID NO: 438393 - RNA, 20 nt, Artificial Sequence
  Synthetic
aaaaucuucuugaaaaacaa

SEQ ID NO: 438394 - RNA, 21 nt, Artificial Sequence
  Synthetic
uaaaaucuucuugaaaaacaa

SEQ ID NO: 438395 - RNA, 22 nt, Artificial Sequence
  Synthetic
cuaaaaucuucuugaaaaacaa

SEQ ID NO: 438396 - RNA, 23 nt, Artificial Sequence
  Synthetic
ucuaaaaucuucuugaaaaacaa

SEQ ID NO: 438397 - RNA, 24 nt, Artificial Sequence
  Synthetic
uucuaaaaucuucuugaaaaacaa

SEQ ID NO: 438398 - RNA, 18 nt, Artificial Sequence
  Synthetic
cuuccauacacaaaacaa

SEQ ID NO: 438399 - RNA, 19 nt, Artificial Sequence
  Synthetic
acuuccauacacaaaacaa

SEQ ID NO: 438400 - RNA, 20 nt, Artificial Sequence
  Synthetic
cacuuccauacacaaaacaa

SEQ ID NO: 438401 - RNA, 21 nt, Artificial Sequence
  Synthetic
ucacuuccauacacaaaacaa

SEQ ID NO: 438402 - RNA, 22 nt, Artificial Sequence
  Synthetic
uucacuuccauacacaaaacaa

SEQ ID NO: 438403 - RNA, 23 nt, Artificial Sequence
  Synthetic
uuucacuuccauacacaaaacaa

SEQ ID NO: 438404 - RNA, 24 nt, Artificial Sequence
  Synthetic
uuuucacuuccauacacaaaacaa

SEQ ID NO: 438405 - RNA, 18 nt, Artificial Sequence
  Synthetic
cucagccucccaaaacaa

SEQ ID NO: 438406 - RNA, 19 nt, Artificial Sequence
  Synthetic
ccucagccucccaaaacaa

SEQ ID NO: 438407 - RNA, 20 nt, Artificial Sequence
  Synthetic
gccucagccucccaaaacaa

SEQ ID NO: 438408 - RNA, 21 nt, Artificial Sequence
  Synthetic
cgccucagccucccaaaacaa

SEQ ID NO: 438409 - RNA, 22 nt, Artificial Sequence
  Synthetic
ccgccucagccucccaaaacaa

SEQ ID NO: 438410 - RNA, 23 nt, Artificial Sequence
  Synthetic
cccgccucagccucccaaaacaa

SEQ ID NO: 438411 - RNA, 24 nt, Artificial Sequence
  Synthetic
acccgccucagccucccaaaacaa

SEQ ID NO: 438412 - RNA, 18 nt, Artificial Sequence
  Synthetic
aucuaaaaaucaaaacaa

SEQ ID NO: 438413 - RNA, 19 nt, Artificial Sequence
  Synthetic
aaucuaaaaaucaaaacaa

SEQ ID NO: 438414 - RNA, 20 nt, Artificial Sequence
  Synthetic
gaaucuaaaaaucaaaacaa

SEQ ID NO: 438415 - RNA, 21 nt, Artificial Sequence
  Synthetic
agaaucuaaaaaucaaaacaa

SEQ ID NO: 438416 - RNA, 22 nt, Artificial Sequence
  Synthetic
cagaaucuaaaaaucaaaacaa

SEQ ID NO: 438417 - RNA, 23 nt, Artificial Sequence
  Synthetic
gcagaaucuaaaaaucaaaacaa

SEQ ID NO: 438418 - RNA, 24 nt, Artificial Sequence
  Synthetic
ugcagaaucuaaaaaucaaaacaa

SEQ ID NO: 438419 - RNA, 18 nt, Artificial Sequence
  Synthetic
agguaaaaaucaaaacaa

SEQ ID NO: 438420 - RNA, 19 nt, Artificial Sequence
  Synthetic
cagguaaaaaucaaaacaa

SEQ ID NO: 438421 - RNA, 20 nt, Artificial Sequence
  Synthetic
gcagguaaaaaucaaaacaa

SEQ ID NO: 438422 - RNA, 21 nt, Artificial Sequence
  Synthetic
ggcagguaaaaaucaaaacaa

SEQ ID NO: 438423 - RNA, 22 nt, Artificial Sequence
  Synthetic
uggcagguaaaaaucaaaacaa

SEQ ID NO: 438424 - RNA, 23 nt, Artificial Sequence
  Synthetic
guggcagguaaaaaucaaaacaa

SEQ ID NO: 438425 - RNA, 24 nt, Artificial Sequence
  Synthetic
uguggcagguaaaaaucaaaacaa

SEQ ID NO: 438426 - RNA, 18 nt, Artificial Sequence
  Synthetic
auuuaaaauucaaaacaa

SEQ ID NO: 438427 - RNA, 19 nt, Artificial Sequence
  Synthetic
gauuuaaaauucaaaacaa

SEQ ID NO: 438428 - RNA, 20 nt, Artificial Sequence
  Synthetic
ggauuuaaaauucaaaacaa

SEQ ID NO: 438429 - RNA, 21 nt, Artificial Sequence
  Synthetic
gggauuuaaaauucaaaacaa

SEQ ID NO: 438430 - RNA, 22 nt, Artificial Sequence
  Synthetic
ugggauuuaaaauucaaaacaa

SEQ ID NO: 438431 - RNA, 23 nt, Artificial Sequence
  Synthetic
gugggauuuaaaauucaaaacaa

SEQ ID NO: 438432 - RNA, 24 nt, Artificial Sequence
  Synthetic
ugugggauuuaaaauucaaaacaa

SEQ ID NO: 438433 - RNA, 18 nt, Artificial Sequence
  Synthetic
cuuuuagaaagaaaacaa

SEQ ID NO: 438434 - RNA, 19 nt, Artificial Sequence
  Synthetic
gcuuuuagaaagaaaacaa

SEQ ID NO: 438435 - RNA, 20 nt, Artificial Sequence
  Synthetic
agcuuuuagaaagaaaacaa

SEQ ID NO: 438436 - RNA, 21 nt, Artificial Sequence
  Synthetic
uagcuuuuagaaagaaaacaa

SEQ ID NO: 438437 - RNA, 22 nt, Artificial Sequence
  Synthetic
uuagcuuuuagaaagaaaacaa

SEQ ID NO: 438438 - RNA, 23 nt, Artificial Sequence
  Synthetic
uuuagcuuuuagaaagaaaacaa

SEQ ID NO: 438439 - RNA, 24 nt, Artificial Sequence
  Synthetic
cuuuagcuuuuagaaagaaaacaa

SEQ ID NO: 438440 - RNA, 18 nt, Artificial Sequence
  Synthetic
guugaaacaagaaaacaa

SEQ ID NO: 438441 - RNA, 19 nt, Artificial Sequence
  Synthetic
aguugaaacaagaaaacaa

SEQ ID NO: 438442 - RNA, 20 nt, Artificial Sequence
  Synthetic
uaguugaaacaagaaaacaa

SEQ ID NO: 438443 - RNA, 21 nt, Artificial Sequence
  Synthetic
auaguugaaacaagaaaacaa

SEQ ID NO: 438444 - RNA, 22 nt, Artificial Sequence
  Synthetic
gauaguugaaacaagaaaacaa

SEQ ID NO: 438445 - RNA, 23 nt, Artificial Sequence
  Synthetic
agauaguugaaacaagaaaacaa

SEQ ID NO: 438446 - RNA, 24 nt, Artificial Sequence
  Synthetic
aagauaguugaaacaagaaaacaa

SEQ ID NO: 438447 - RNA, 18 nt, Artificial Sequence
  Synthetic
aauugaaauagaaaacaa

SEQ ID NO: 438448 - RNA, 19 nt, Artificial Sequence
  Synthetic
aaauugaaauagaaaacaa

SEQ ID NO: 438449 - RNA, 20 nt, Artificial Sequence
  Synthetic
aaaauugaaauagaaaacaa

SEQ ID NO: 438450 - RNA, 21 nt, Artificial Sequence
  Synthetic
caaaauugaaauagaaaacaa

SEQ ID NO: 438451 - RNA, 22 nt, Artificial Sequence
  Synthetic
ccaaaauugaaauagaaaacaa

SEQ ID NO: 438452 - RNA, 23 nt, Artificial Sequence
  Synthetic
gccaaaauugaaauagaaaacaa

SEQ ID NO: 438453 - RNA, 24 nt, Artificial Sequence
  Synthetic
agccaaaauugaaauagaaaacaa

SEQ ID NO: 438454 - RNA, 18 nt, Artificial Sequence
  Synthetic
acugcucaaguaaaacaa

SEQ ID NO: 438455 - RNA, 19 nt, Artificial Sequence
  Synthetic
gacugcucaaguaaaacaa

SEQ ID NO: 438456 - RNA, 20 nt, Artificial Sequence
  Synthetic
ugacugcucaaguaaaacaa

SEQ ID NO: 438457 - RNA, 21 nt, Artificial Sequence
  Synthetic
gugacugcucaaguaaaacaa

SEQ ID NO: 438458 - RNA, 22 nt, Artificial Sequence
  Synthetic
agugacugcucaaguaaaacaa

SEQ ID NO: 438459 - RNA, 23 nt, Artificial Sequence
  Synthetic
uagugacugcucaaguaaaacaa

SEQ ID NO: 438460 - RNA, 24 nt, Artificial Sequence
  Synthetic
uuagugacugcucaaguaaaacaa

SEQ ID NO: 438461 - RNA, 18 nt, Artificial Sequence
  Synthetic
auauaauuaguaaaacaa

SEQ ID NO: 438462 - RNA, 19 nt, Artificial Sequence
  Synthetic
cauauaauuaguaaaacaa

SEQ ID NO: 438463 - RNA, 20 nt, Artificial Sequence
  Synthetic
acauauaauuaguaaaacaa

SEQ ID NO: 438464 - RNA, 21 nt, Artificial Sequence
  Synthetic
aacauauaauuaguaaaacaa

SEQ ID NO: 438465 - RNA, 22 nt, Artificial Sequence
  Synthetic
caacauauaauuaguaaaacaa

SEQ ID NO: 438466 - RNA, 23 nt, Artificial Sequence
  Synthetic
acaacauauaauuaguaaaacaa

SEQ ID NO: 438467 - RNA, 24 nt, Artificial Sequence
  Synthetic
gacaacauauaauuaguaaaacaa

SEQ ID NO: 438468 - RNA, 18 nt, Artificial Sequence
  Synthetic
auuaauaaaaacaaacaa

SEQ ID NO: 438469 - RNA, 19 nt, Artificial Sequence
  Synthetic
uauuaauaaaaacaaacaa

SEQ ID NO: 438470 - RNA, 20 nt, Artificial Sequence
  Synthetic
auauuaauaaaaacaaacaa

SEQ ID NO: 438471 - RNA, 21 nt, Artificial Sequence
  Synthetic
uauauuaauaaaaacaaacaa

SEQ ID NO: 438472 - RNA, 22 nt, Artificial Sequence
  Synthetic
auauauuaauaaaaacaaacaa

SEQ ID NO: 438473 - RNA, 23 nt, Artificial Sequence
  Synthetic
uauauauuaauaaaaacaaacaa

SEQ ID NO: 438474 - RNA, 24 nt, Artificial Sequence
  Synthetic
uuauauauuaauaaaaacaaacaa

SEQ ID NO: 438475 - RNA, 18 nt, Artificial Sequence
  Synthetic
ccacaaacaaacaaacaa

SEQ ID NO: 438476 - RNA, 19 nt, Artificial Sequence
  Synthetic
gccacaaacaaacaaacaa

SEQ ID NO: 438477 - RNA, 20 nt, Artificial Sequence
  Synthetic
ugccacaaacaaacaaacaa

SEQ ID NO: 438478 - RNA, 21 nt, Artificial Sequence
  Synthetic
uugccacaaacaaacaaacaa

SEQ ID NO: 438479 - RNA, 22 nt, Artificial Sequence
  Synthetic
uuugccacaaacaaacaaacaa

SEQ ID NO: 438480 - RNA, 23 nt, Artificial Sequence
  Synthetic
uuuugccacaaacaaacaaacaa

SEQ ID NO: 438481 - RNA, 24 nt, Artificial Sequence
  Synthetic
auuuugccacaaacaaacaaacaa

SEQ ID NO: 438482 - RNA, 18 nt, Artificial Sequence
  Synthetic
uccuaaauaaacaaacaa

SEQ ID NO: 438483 - RNA, 19 nt, Artificial Sequence
  Synthetic
cuccuaaauaaacaaacaa

SEQ ID NO: 438484 - RNA, 20 nt, Artificial Sequence
  Synthetic
ucuccuaaauaaacaaacaa

SEQ ID NO: 438485 - RNA, 21 nt, Artificial Sequence
  Synthetic
cucuccuaaauaaacaaacaa

SEQ ID NO: 438486 - RNA, 22 nt, Artificial Sequence
  Synthetic
ccucuccuaaauaaacaaacaa

SEQ ID NO: 438487 - RNA, 23 nt, Artificial Sequence
  Synthetic
cccucuccuaaauaaacaaacaa

SEQ ID NO: 438488 - RNA, 24 nt, Artificial Sequence
  Synthetic
ucccucuccuaaauaaacaaacaa

SEQ ID NO: 438489 - RNA, 21 nt, Artificial Sequence
  Synthetic
aauaaaagaggacacaaacaa

SEQ ID NO: 438490 - RNA, 22 nt, Artificial Sequence
  Synthetic
aaauaaaagaggacacaaacaa

SEQ ID NO: 438491 - RNA, 23 nt, Artificial Sequence
  Synthetic
gaaauaaaagaggacacaaacaa

SEQ ID NO: 438492 - RNA, 24 nt, Artificial Sequence
  Synthetic
ggaaauaaaagaggacacaaacaa

SEQ ID NO: 438493 - RNA, 18 nt, Artificial Sequence
  Synthetic
ugcagaauuaccaaacaa

SEQ ID NO: 438494 - RNA, 19 nt, Artificial Sequence
  Synthetic
gugcagaauuaccaaacaa

SEQ ID NO: 438495 - RNA, 20 nt, Artificial Sequence
  Synthetic
ugugcagaauuaccaaacaa

SEQ ID NO: 438496 - RNA, 21 nt, Artificial Sequence
  Synthetic
augugcagaauuaccaaacaa

SEQ ID NO: 438497 - RNA, 22 nt, Artificial Sequence
  Synthetic
uaugugcagaauuaccaaacaa

SEQ ID NO: 438498 - RNA, 23 nt, Artificial Sequence
  Synthetic
auaugugcagaauuaccaaacaa

SEQ ID NO: 438499 - RNA, 24 nt, Artificial Sequence
  Synthetic
aauaugugcagaauuaccaaacaa

SEQ ID NO: 438500 - RNA, 18 nt, Artificial Sequence
  Synthetic
aagagaggacccaaacaa

SEQ ID NO: 438501 - RNA, 19 nt, Artificial Sequence
  Synthetic
uaagagaggacccaaacaa

SEQ ID NO: 438502 - RNA, 20 nt, Artificial Sequence
  Synthetic
auaagagaggacccaaacaa

SEQ ID NO: 438503 - RNA, 21 nt, Artificial Sequence
  Synthetic
aauaagagaggacccaaacaa

SEQ ID NO: 438504 - RNA, 22 nt, Artificial Sequence
  Synthetic
aaauaagagaggacccaaacaa

SEQ ID NO: 438505 - RNA, 23 nt, Artificial Sequence
  Synthetic
gaaauaagagaggacccaaacaa

SEQ ID NO: 438506 - RNA, 24 nt, Artificial Sequence
  Synthetic
ggaaauaagagaggacccaaacaa

SEQ ID NO: 438507 - RNA, 18 nt, Artificial Sequence
  Synthetic
uaaggaaaucccaaacaa

SEQ ID NO: 438508 - RNA, 19 nt, Artificial Sequence
  Synthetic
uuaaggaaaucccaaacaa

SEQ ID NO: 438509 - RNA, 20 nt, Artificial Sequence
  Synthetic
uuuaaggaaaucccaaacaa

SEQ ID NO: 438510 - RNA, 21 nt, Artificial Sequence
  Synthetic
auuuaaggaaaucccaaacaa

SEQ ID NO: 438511 - RNA, 22 nt, Artificial Sequence
  Synthetic
aauuuaaggaaaucccaaacaa

SEQ ID NO: 438512 - RNA, 23 nt, Artificial Sequence
  Synthetic
aaauuuaaggaaaucccaaacaa

SEQ ID NO: 438513 - RNA, 24 nt, Artificial Sequence
  Synthetic
uaaauuuaaggaaaucccaaacaa

SEQ ID NO: 438514 - RNA, 18 nt, Artificial Sequence
  Synthetic
aggcaauggagcaaacaa

SEQ ID NO: 438515 - RNA, 19 nt, Artificial Sequence
  Synthetic
gaggcaauggagcaaacaa

SEQ ID NO: 438516 - RNA, 20 nt, Artificial Sequence
  Synthetic
agaggcaauggagcaaacaa

SEQ ID NO: 438517 - RNA, 21 nt, Artificial Sequence
  Synthetic
aagaggcaauggagcaaacaa

SEQ ID NO: 438518 - RNA, 22 nt, Artificial Sequence
  Synthetic
aaagaggcaauggagcaaacaa

SEQ ID NO: 438519 - RNA, 23 nt, Artificial Sequence
  Synthetic
gaaagaggcaauggagcaaacaa

SEQ ID NO: 438520 - RNA, 24 nt, Artificial Sequence
  Synthetic
agaaagaggcaauggagcaaacaa

SEQ ID NO: 438521 - RNA, 18 nt, Artificial Sequence
  Synthetic
acgaaaggacgcaaacaa

SEQ ID NO: 438522 - RNA, 19 nt, Artificial Sequence
  Synthetic
uacgaaaggacgcaaacaa

SEQ ID NO: 438523 - RNA, 20 nt, Artificial Sequence
  Synthetic
auacgaaaggacgcaaacaa

SEQ ID NO: 438524 - RNA, 21 nt, Artificial Sequence
  Synthetic
aauacgaaaggacgcaaacaa

SEQ ID NO: 438525 - RNA, 22 nt, Artificial Sequence
  Synthetic
aaauacgaaaggacgcaaacaa

SEQ ID NO: 438526 - RNA, 23 nt, Artificial Sequence
  Synthetic
aaaauacgaaaggacgcaaacaa

SEQ ID NO: 438527 - RNA, 24 nt, Artificial Sequence
  Synthetic
gaaaauacgaaaggacgcaaacaa

SEQ ID NO: 438528 - RNA, 18 nt, Artificial Sequence
  Synthetic
ucuuucucugucaaacaa

SEQ ID NO: 438529 - RNA, 19 nt, Artificial Sequence
  Synthetic
uucuuucucugucaaacaa

SEQ ID NO: 438530 - RNA, 20 nt, Artificial Sequence
  Synthetic
auucuuucucugucaaacaa

SEQ ID NO: 438531 - RNA, 21 nt, Artificial Sequence
  Synthetic
uauucuuucucugucaaacaa

SEQ ID NO: 438532 - RNA, 22 nt, Artificial Sequence
  Synthetic
auauucuuucucugucaaacaa

SEQ ID NO: 438533 - RNA, 23 nt, Artificial Sequence
  Synthetic
gauauucuuucucugucaaacaa

SEQ ID NO: 438534 - RNA, 24 nt, Artificial Sequence
  Synthetic
ugauauucuuucucugucaaacaa

SEQ ID NO: 438535 - RNA, 18 nt, Artificial Sequence
  Synthetic
aacagguaguucaaacaa

SEQ ID NO: 438536 - RNA, 19 nt, Artificial Sequence
  Synthetic
gaacagguaguucaaacaa

SEQ ID NO: 438537 - RNA, 20 nt, Artificial Sequence
  Synthetic
ggaacagguaguucaaacaa

SEQ ID NO: 438538 - RNA, 21 nt, Artificial Sequence
  Synthetic
aggaacagguaguucaaacaa

SEQ ID NO: 438539 - RNA, 22 nt, Artificial Sequence
  Synthetic
uaggaacagguaguucaaacaa

SEQ ID NO: 438540 - RNA, 23 nt, Artificial Sequence
  Synthetic
auaggaacagguaguucaaacaa

SEQ ID NO: 438541 - RNA, 24 nt, Artificial Sequence
  Synthetic
aauaggaacagguaguucaaacaa

SEQ ID NO: 438542 - RNA, 18 nt, Artificial Sequence
  Synthetic
gaaggaaggaagaaacaa

SEQ ID NO: 438543 - RNA, 19 nt, Artificial Sequence
  Synthetic
ggaaggaaggaagaaacaa

SEQ ID NO: 438544 - RNA, 20 nt, Artificial Sequence
  Synthetic
aggaaggaaggaagaaacaa

SEQ ID NO: 438545 - RNA, 21 nt, Artificial Sequence
  Synthetic
aaggaaggaaggaagaaacaa

SEQ ID NO: 438546 - RNA, 22 nt, Artificial Sequence
  Synthetic
gaaggaaggaaggaagaaacaa

SEQ ID NO: 438547 - RNA, 23 nt, Artificial Sequence
  Synthetic
ggaaggaaggaaggaagaaacaa

SEQ ID NO: 438548 - RNA, 24 nt, Artificial Sequence
  Synthetic
aggaaggaaggaaggaagaaacaa

SEQ ID NO: 438549 - RNA, 18 nt, Artificial Sequence
  Synthetic
aaagcauugcagaaacaa

SEQ ID NO: 438550 - RNA, 19 nt, Artificial Sequence
  Synthetic
aaaagcauugcagaaacaa

SEQ ID NO: 438551 - RNA, 20 nt, Artificial Sequence
  Synthetic
uaaaagcauugcagaaacaa

SEQ ID NO: 438552 - RNA, 21 nt, Artificial Sequence
  Synthetic
guaaaagcauugcagaaacaa

SEQ ID NO: 438553 - RNA, 22 nt, Artificial Sequence
  Synthetic
aguaaaagcauugcagaaacaa

SEQ ID NO: 438554 - RNA, 23 nt, Artificial Sequence
  Synthetic
aaguaaaagcauugcagaaacaa

SEQ ID NO: 438555 - RNA, 24 nt, Artificial Sequence
  Synthetic
uaaguaaaagcauugcagaaacaa

SEQ ID NO: 438556 - RNA, 18 nt, Artificial Sequence
  Synthetic
uagagacuagagaaacaa

SEQ ID NO: 438557 - RNA, 19 nt, Artificial Sequence
  Synthetic
auagagacuagagaaacaa

SEQ ID NO: 438558 - RNA, 20 nt, Artificial Sequence
  Synthetic
aauagagacuagagaaacaa

SEQ ID NO: 438559 - RNA, 21 nt, Artificial Sequence
  Synthetic
aaauagagacuagagaaacaa

SEQ ID NO: 438560 - RNA, 22 nt, Artificial Sequence
  Synthetic
gaaauagagacuagagaaacaa

SEQ ID NO: 438561 - RNA, 23 nt, Artificial Sequence
  Synthetic
ugaaauagagacuagagaaacaa

SEQ ID NO: 438562 - RNA, 24 nt, Artificial Sequence
  Synthetic
augaaauagagacuagagaaacaa

SEQ ID NO: 438563 - RNA, 18 nt, Artificial Sequence
  Synthetic
gguuccuuagagaaacaa

SEQ ID NO: 438564 - RNA, 19 nt, Artificial Sequence
  Synthetic
ggguuccuuagagaaacaa

SEQ ID NO: 438565 - RNA, 20 nt, Artificial Sequence
  Synthetic
aggguuccuuagagaaacaa

SEQ ID NO: 438566 - RNA, 21 nt, Artificial Sequence
  Synthetic
uaggguuccuuagagaaacaa

SEQ ID NO: 438567 - RNA, 22 nt, Artificial Sequence
  Synthetic
uuaggguuccuuagagaaacaa

SEQ ID NO: 438568 - RNA, 23 nt, Artificial Sequence
  Synthetic
auuaggguuccuuagagaaacaa

SEQ ID NO: 438569 - RNA, 24 nt, Artificial Sequence
  Synthetic
uauuaggguuccuuagagaaacaa

SEQ ID NO: 438570 - RNA, 18 nt, Artificial Sequence
  Synthetic
uuugaagaaaauaaacaa

SEQ ID NO: 438571 - RNA, 19 nt, Artificial Sequence
  Synthetic
cuuugaagaaaauaaacaa

SEQ ID NO: 438572 - RNA, 20 nt, Artificial Sequence
  Synthetic
gcuuugaagaaaauaaacaa

SEQ ID NO: 438573 - RNA, 21 nt, Artificial Sequence
  Synthetic
ugcuuugaagaaaauaaacaa

SEQ ID NO: 438574 - RNA, 22 nt, Artificial Sequence
  Synthetic
augcuuugaagaaaauaaacaa

SEQ ID NO: 438575 - RNA, 23 nt, Artificial Sequence
  Synthetic
aaugcuuugaagaaaauaaacaa

SEQ ID NO: 438576 - RNA, 24 nt, Artificial Sequence
  Synthetic
gaaugcuuugaagaaaauaaacaa

SEQ ID NO: 438577 - RNA, 18 nt, Artificial Sequence
  Synthetic
aauguguuacauaaacaa

SEQ ID NO: 438578 - RNA, 19 nt, Artificial Sequence
  Synthetic
gaauguguuacauaaacaa

SEQ ID NO: 438579 - RNA, 20 nt, Artificial Sequence
  Synthetic
agaauguguuacauaaacaa

SEQ ID NO: 438580 - RNA, 21 nt, Artificial Sequence
  Synthetic
gagaauguguuacauaaacaa

SEQ ID NO: 438581 - RNA, 22 nt, Artificial Sequence
  Synthetic
agagaauguguuacauaaacaa

SEQ ID NO: 438582 - RNA, 23 nt, Artificial Sequence
  Synthetic
aagagaauguguuacauaaacaa

SEQ ID NO: 438583 - RNA, 24 nt, Artificial Sequence
  Synthetic
gaagagaauguguuacauaaacaa

SEQ ID NO: 438584 - RNA, 18 nt, Artificial Sequence
  Synthetic
aagcggggauguaaacaa

SEQ ID NO: 438585 - RNA, 19 nt, Artificial Sequence
  Synthetic
gaagcggggauguaaacaa

SEQ ID NO: 438586 - RNA, 20 nt, Artificial Sequence
  Synthetic
agaagcggggauguaaacaa

SEQ ID NO: 438587 - RNA, 21 nt, Artificial Sequence
  Synthetic
cagaagcggggauguaaacaa

SEQ ID NO: 438588 - RNA, 22 nt, Artificial Sequence
  Synthetic
acagaagcggggauguaaacaa

SEQ ID NO: 438589 - RNA, 23 nt, Artificial Sequence
  Synthetic
cacagaagcggggauguaaacaa

SEQ ID NO: 438590 - RNA, 24 nt, Artificial Sequence
  Synthetic
gcacagaagcggggauguaaacaa

SEQ ID NO: 438591 - RNA, 18 nt, Artificial Sequence
  Synthetic
uauaggauuuguaaacaa

SEQ ID NO: 438592 - RNA, 19 nt, Artificial Sequence
  Synthetic
cuauaggauuuguaaacaa

SEQ ID NO: 438593 - RNA, 20 nt, Artificial Sequence
  Synthetic
ucuauaggauuuguaaacaa

SEQ ID NO: 438594 - RNA, 21 nt, Artificial Sequence
  Synthetic
uucuauaggauuuguaaacaa

SEQ ID NO: 438595 - RNA, 22 nt, Artificial Sequence
  Synthetic
guucuauaggauuuguaaacaa

SEQ ID NO: 438596 - RNA, 23 nt, Artificial Sequence
  Synthetic
uguucuauaggauuuguaaacaa

SEQ ID NO: 438597 - RNA, 24 nt, Artificial Sequence
  Synthetic
auguucuauaggauuuguaaacaa

SEQ ID NO: 438598 - RNA, 18 nt, Artificial Sequence
  Synthetic
auguaaauuccacaacaa

SEQ ID NO: 438599 - RNA, 19 nt, Artificial Sequence
  Synthetic
aauguaaauuccacaacaa

SEQ ID NO: 438600 - RNA, 20 nt, Artificial Sequence
  Synthetic
aaauguaaauuccacaacaa

SEQ ID NO: 438601 - RNA, 21 nt, Artificial Sequence
  Synthetic
aaaauguaaauuccacaacaa

SEQ ID NO: 438602 - RNA, 22 nt, Artificial Sequence
  Synthetic
uaaaauguaaauuccacaacaa

SEQ ID NO: 438603 - RNA, 23 nt, Artificial Sequence
  Synthetic
cuaaaauguaaauuccacaacaa

SEQ ID NO: 438604 - RNA, 24 nt, Artificial Sequence
  Synthetic
gcuaaaauguaaauuccacaacaa

SEQ ID NO: 438605 - RNA, 18 nt, Artificial Sequence
  Synthetic
gagugggauggacaacaa

SEQ ID NO: 438606 - RNA, 19 nt, Artificial Sequence
  Synthetic
ggagugggauggacaacaa

SEQ ID NO: 438607 - RNA, 20 nt, Artificial Sequence
  Synthetic
gggagugggauggacaacaa

SEQ ID NO: 438608 - RNA, 21 nt, Artificial Sequence
  Synthetic
ggggagugggauggacaacaa

SEQ ID NO: 438609 - RNA, 22 nt, Artificial Sequence
  Synthetic
gggggagugggauggacaacaa

SEQ ID NO: 438610 - RNA, 23 nt, Artificial Sequence
  Synthetic
ugggggagugggauggacaacaa

SEQ ID NO: 438611 - RNA, 24 nt, Artificial Sequence
  Synthetic
gugggggagugggauggacaacaa

SEQ ID NO: 438612 - RNA, 18 nt, Artificial Sequence
  Synthetic
uacaaucuaugacaacaa

SEQ ID NO: 438613 - RNA, 19 nt, Artificial Sequence
  Synthetic
guacaaucuaugacaacaa

SEQ ID NO: 438614 - RNA, 20 nt, Artificial Sequence
  Synthetic
uguacaaucuaugacaacaa

SEQ ID NO: 438615 - RNA, 21 nt, Artificial Sequence
  Synthetic
cuguacaaucuaugacaacaa

SEQ ID NO: 438616 - RNA, 22 nt, Artificial Sequence
  Synthetic
ccuguacaaucuaugacaacaa

SEQ ID NO: 438617 - RNA, 23 nt, Artificial Sequence
  Synthetic
accuguacaaucuaugacaacaa

SEQ ID NO: 438618 - RNA, 24 nt, Artificial Sequence
  Synthetic
aaccuguacaaucuaugacaacaa

SEQ ID NO: 438619 - RNA, 18 nt, Artificial Sequence
  Synthetic
augcauccaauacaacaa

SEQ ID NO: 438620 - RNA, 19 nt, Artificial Sequence
  Synthetic
gaugcauccaauacaacaa

SEQ ID NO: 438621 - RNA, 20 nt, Artificial Sequence
  Synthetic
agaugcauccaauacaacaa

SEQ ID NO: 438622 - RNA, 21 nt, Artificial Sequence
  Synthetic
gagaugcauccaauacaacaa

SEQ ID NO: 438623 - RNA, 22 nt, Artificial Sequence
  Synthetic
agagaugcauccaauacaacaa

SEQ ID NO: 438624 - RNA, 23 nt, Artificial Sequence
  Synthetic
uagagaugcauccaauacaacaa

SEQ ID NO: 438625 - RNA, 24 nt, Artificial Sequence
  Synthetic
auagagaugcauccaauacaacaa

SEQ ID NO: 438626 - RNA, 18 nt, Artificial Sequence
  Synthetic
uuguccaacacccaacaa

SEQ ID NO: 438627 - RNA, 19 nt, Artificial Sequence
  Synthetic
uuuguccaacacccaacaa

SEQ ID NO: 438628 - RNA, 20 nt, Artificial Sequence
  Synthetic
auuuguccaacacccaacaa

SEQ ID NO: 438629 - RNA, 21 nt, Artificial Sequence
  Synthetic
gauuuguccaacacccaacaa

SEQ ID NO: 438630 - RNA, 22 nt, Artificial Sequence
  Synthetic
ggauuuguccaacacccaacaa

SEQ ID NO: 438631 - RNA, 23 nt, Artificial Sequence
  Synthetic
uggauuuguccaacacccaacaa

SEQ ID NO: 438632 - RNA, 24 nt, Artificial Sequence
  Synthetic
cuggauuuguccaacacccaacaa

SEQ ID NO: 438633 - RNA, 18 nt, Artificial Sequence
  Synthetic
acauaaugauggcaacaa

SEQ ID NO: 438634 - RNA, 19 nt, Artificial Sequence
  Synthetic
gacauaaugauggcaacaa

SEQ ID NO: 438635 - RNA, 20 nt, Artificial Sequence
  Synthetic
ggacauaaugauggcaacaa

SEQ ID NO: 438636 - RNA, 21 nt, Artificial Sequence
  Synthetic
uggacauaaugauggcaacaa

SEQ ID NO: 438637 - RNA, 22 nt, Artificial Sequence
  Synthetic
auggacauaaugauggcaacaa

SEQ ID NO: 438638 - RNA, 23 nt, Artificial Sequence
  Synthetic
cauggacauaaugauggcaacaa

SEQ ID NO: 438639 - RNA, 24 nt, Artificial Sequence
  Synthetic
ucauggacauaaugauggcaacaa

SEQ ID NO: 438640 - RNA, 18 nt, Artificial Sequence
  Synthetic
ggugcuucuaugcaacaa

SEQ ID NO: 438641 - RNA, 19 nt, Artificial Sequence
  Synthetic
gggugcuucuaugcaacaa

SEQ ID NO: 438642 - RNA, 20 nt, Artificial Sequence
  Synthetic
ggggugcuucuaugcaacaa

SEQ ID NO: 438643 - RNA, 21 nt, Artificial Sequence
  Synthetic
uggggugcuucuaugcaacaa

SEQ ID NO: 438644 - RNA, 22 nt, Artificial Sequence
  Synthetic
uuggggugcuucuaugcaacaa

SEQ ID NO: 438645 - RNA, 23 nt, Artificial Sequence
  Synthetic
uuuggggugcuucuaugcaacaa

SEQ ID NO: 438646 - RNA, 24 nt, Artificial Sequence
  Synthetic
uuuuggggugcuucuaugcaacaa

SEQ ID NO: 438647 - RNA, 18 nt, Artificial Sequence
  Synthetic
acacauuaacaucaacaa

SEQ ID NO: 438648 - RNA, 19 nt, Artificial Sequence
  Synthetic
gacacauuaacaucaacaa

SEQ ID NO: 438649 - RNA, 20 nt, Artificial Sequence
  Synthetic
agacacauuaacaucaacaa

SEQ ID NO: 438650 - RNA, 21 nt, Artificial Sequence
  Synthetic
aagacacauuaacaucaacaa

SEQ ID NO: 438651 - RNA, 22 nt, Artificial Sequence
  Synthetic
caagacacauuaacaucaacaa

SEQ ID NO: 438652 - RNA, 23 nt, Artificial Sequence
  Synthetic
acaagacacauuaacaucaacaa

SEQ ID NO: 438653 - RNA, 24 nt, Artificial Sequence
  Synthetic
aacaagacacauuaacaucaacaa

SEQ ID NO: 438654 - RNA, 18 nt, Artificial Sequence
  Synthetic
uuuaacaaauaucaacaa

SEQ ID NO: 438655 - RNA, 19 nt, Artificial Sequence
  Synthetic
uuuuaacaaauaucaacaa

SEQ ID NO: 438656 - RNA, 20 nt, Artificial Sequence
  Synthetic
auuuuaacaaauaucaacaa

SEQ ID NO: 438657 - RNA, 21 nt, Artificial Sequence
  Synthetic
aauuuuaacaaauaucaacaa

SEQ ID NO: 438658 - RNA, 22 nt, Artificial Sequence
  Synthetic
aaauuuuaacaaauaucaacaa

SEQ ID NO: 438659 - RNA, 23 nt, Artificial Sequence
  Synthetic
uaaauuuuaacaaauaucaacaa

SEQ ID NO: 438660 - RNA, 24 nt, Artificial Sequence
  Synthetic
auaaauuuuaacaaauaucaacaa

SEQ ID NO: 438661 - RNA, 18 nt, Artificial Sequence
  Synthetic
aauaccuucuaucaacaa

SEQ ID NO: 438662 - RNA, 19 nt, Artificial Sequence
  Synthetic
gaauaccuucuaucaacaa

SEQ ID NO: 438663 - RNA, 20 nt, Artificial Sequence
  Synthetic
ugaauaccuucuaucaacaa

SEQ ID NO: 438664 - RNA, 21 nt, Artificial Sequence
  Synthetic
augaauaccuucuaucaacaa

SEQ ID NO: 438665 - RNA, 22 nt, Artificial Sequence
  Synthetic
uaugaauaccuucuaucaacaa

SEQ ID NO: 438666 - RNA, 23 nt, Artificial Sequence
  Synthetic
uuaugaauaccuucuaucaacaa

SEQ ID NO: 438667 - RNA, 24 nt, Artificial Sequence
  Synthetic
uuuaugaauaccuucuaucaacaa

SEQ ID NO: 438668 - RNA, 18 nt, Artificial Sequence
  Synthetic
aagggaucaauucaacaa

SEQ ID NO: 438669 - RNA, 19 nt, Artificial Sequence
  Synthetic
aaagggaucaauucaacaa

SEQ ID NO: 438670 - RNA, 20 nt, Artificial Sequence
  Synthetic
uaaagggaucaauucaacaa

SEQ ID NO: 438671 - RNA, 21 nt, Artificial Sequence
  Synthetic
guaaagggaucaauucaacaa

SEQ ID NO: 438672 - RNA, 22 nt, Artificial Sequence
  Synthetic
gguaaagggaucaauucaacaa

SEQ ID NO: 438673 - RNA, 23 nt, Artificial Sequence
  Synthetic
ugguaaagggaucaauucaacaa

SEQ ID NO: 438674 - RNA, 24 nt, Artificial Sequence
  Synthetic
augguaaagggaucaauucaacaa

SEQ ID NO: 438675 - RNA, 18 nt, Artificial Sequence
  Synthetic
cagcuaguccuucaacaa

SEQ ID NO: 438676 - RNA, 19 nt, Artificial Sequence
  Synthetic
ucagcuaguccuucaacaa

SEQ ID NO: 438677 - RNA, 20 nt, Artificial Sequence
  Synthetic
uucagcuaguccuucaacaa

SEQ ID NO: 438678 - RNA, 21 nt, Artificial Sequence
  Synthetic
guucagcuaguccuucaacaa

SEQ ID NO: 438679 - RNA, 22 nt, Artificial Sequence
  Synthetic
cguucagcuaguccuucaacaa

SEQ ID NO: 438680 - RNA, 23 nt, Artificial Sequence
  Synthetic
ucguucagcuaguccuucaacaa

SEQ ID NO: 438681 - RNA, 24 nt, Artificial Sequence
  Synthetic
uucguucagcuaguccuucaacaa

SEQ ID NO: 438682 - RNA, 18 nt, Artificial Sequence
  Synthetic
aguuuacaugaagaacaa

SEQ ID NO: 438683 - RNA, 19 nt, Artificial Sequence
  Synthetic
caguuuacaugaagaacaa

SEQ ID NO: 438684 - RNA, 20 nt, Artificial Sequence
  Synthetic
ccaguuuacaugaagaacaa

SEQ ID NO: 438685 - RNA, 21 nt, Artificial Sequence
  Synthetic
accaguuuacaugaagaacaa

SEQ ID NO: 438686 - RNA, 22 nt, Artificial Sequence
  Synthetic
aaccaguuuacaugaagaacaa

SEQ ID NO: 438687 - RNA, 23 nt, Artificial Sequence
  Synthetic
aaaccaguuuacaugaagaacaa

SEQ ID NO: 438688 - RNA, 24 nt, Artificial Sequence
  Synthetic
caaaccaguuuacaugaagaacaa

SEQ ID NO: 438689 - RNA, 18 nt, Artificial Sequence
  Synthetic
caaagauuugaagaacaa

SEQ ID NO: 438690 - RNA, 19 nt, Artificial Sequence
  Synthetic
acaaagauuugaagaacaa

SEQ ID NO: 438691 - RNA, 20 nt, Artificial Sequence
  Synthetic
gacaaagauuugaagaacaa

SEQ ID NO: 438692 - RNA, 21 nt, Artificial Sequence
  Synthetic
agacaaagauuugaagaacaa

SEQ ID NO: 438693 - RNA, 22 nt, Artificial Sequence
  Synthetic
gagacaaagauuugaagaacaa

SEQ ID NO: 438694 - RNA, 23 nt, Artificial Sequence
  Synthetic
ugagacaaagauuugaagaacaa

SEQ ID NO: 438695 - RNA, 24 nt, Artificial Sequence
  Synthetic
cugagacaaagauuugaagaacaa

SEQ ID NO: 438696 - RNA, 18 nt, Artificial Sequence
  Synthetic
uuugccacuuaagaacaa

SEQ ID NO: 438697 - RNA, 19 nt, Artificial Sequence
  Synthetic
auuugccacuuaagaacaa

SEQ ID NO: 438698 - RNA, 20 nt, Artificial Sequence
  Synthetic
gauuugccacuuaagaacaa

SEQ ID NO: 438699 - RNA, 21 nt, Artificial Sequence
  Synthetic
agauuugccacuuaagaacaa

SEQ ID NO: 438700 - RNA, 22 nt, Artificial Sequence
  Synthetic
aagauuugccacuuaagaacaa

SEQ ID NO: 438701 - RNA, 23 nt, Artificial Sequence
  Synthetic
aaagauuugccacuuaagaacaa

SEQ ID NO: 438702 - RNA, 24 nt, Artificial Sequence
  Synthetic
uaaagauuugccacuuaagaacaa

SEQ ID NO: 438703 - RNA, 18 nt, Artificial Sequence
  Synthetic
aggaagaaaacagaacaa

SEQ ID NO: 438704 - RNA, 19 nt, Artificial Sequence
  Synthetic
gaggaagaaaacagaacaa

SEQ ID NO: 438705 - RNA, 20 nt, Artificial Sequence
  Synthetic
cgaggaagaaaacagaacaa

SEQ ID NO: 438706 - RNA, 21 nt, Artificial Sequence
  Synthetic
gcgaggaagaaaacagaacaa

SEQ ID NO: 438707 - RNA, 22 nt, Artificial Sequence
  Synthetic
ggcgaggaagaaaacagaacaa

SEQ ID NO: 438708 - RNA, 23 nt, Artificial Sequence
  Synthetic
aggcgaggaagaaaacagaacaa

SEQ ID NO: 438709 - RNA, 24 nt, Artificial Sequence
  Synthetic
gaggcgaggaagaaaacagaacaa

SEQ ID NO: 438710 - RNA, 18 nt, Artificial Sequence
  Synthetic
ucuacaagaacagaacaa

SEQ ID NO: 438711 - RNA, 19 nt, Artificial Sequence
  Synthetic
uucuacaagaacagaacaa

SEQ ID NO: 438712 - RNA, 20 nt, Artificial Sequence
  Synthetic
uuucuacaagaacagaacaa

SEQ ID NO: 438713 - RNA, 21 nt, Artificial Sequence
  Synthetic
cuuucuacaagaacagaacaa

SEQ ID NO: 438714 - RNA, 22 nt, Artificial Sequence
  Synthetic
ccuuucuacaagaacagaacaa

SEQ ID NO: 438715 - RNA, 23 nt, Artificial Sequence
  Synthetic
uccuuucuacaagaacagaacaa

SEQ ID NO: 438716 - RNA, 24 nt, Artificial Sequence
  Synthetic
cuccuuucuacaagaacagaacaa

SEQ ID NO: 438717 - RNA, 18 nt, Artificial Sequence
  Synthetic
ugaggauagucagaacaa

SEQ ID NO: 438718 - RNA, 19 nt, Artificial Sequence
  Synthetic
cugaggauagucagaacaa

SEQ ID NO: 438719 - RNA, 20 nt, Artificial Sequence
  Synthetic
ccugaggauagucagaacaa

SEQ ID NO: 438720 - RNA, 21 nt, Artificial Sequence
  Synthetic
accugaggauagucagaacaa

SEQ ID NO: 438721 - RNA, 22 nt, Artificial Sequence
  Synthetic
caccugaggauagucagaacaa

SEQ ID NO: 438722 - RNA, 23 nt, Artificial Sequence
  Synthetic
gcaccugaggauagucagaacaa

SEQ ID NO: 438723 - RNA, 24 nt, Artificial Sequence
  Synthetic
agcaccugaggauagucagaacaa

SEQ ID NO: 438724 - RNA, 18 nt, Artificial Sequence
  Synthetic
accuuaugaagagaacaa

SEQ ID NO: 438725 - RNA, 19 nt, Artificial Sequence
  Synthetic
uaccuuaugaagagaacaa

SEQ ID NO: 438726 - RNA, 20 nt, Artificial Sequence
  Synthetic
guaccuuaugaagagaacaa

SEQ ID NO: 438727 - RNA, 21 nt, Artificial Sequence
  Synthetic
gguaccuuaugaagagaacaa

SEQ ID NO: 438728 - RNA, 22 nt, Artificial Sequence
  Synthetic
ugguaccuuaugaagagaacaa

SEQ ID NO: 438729 - RNA, 23 nt, Artificial Sequence
  Synthetic
augguaccuuaugaagagaacaa

SEQ ID NO: 438730 - RNA, 24 nt, Artificial Sequence
  Synthetic
aaugguaccuuaugaagagaacaa

SEQ ID NO: 438731 - RNA, 18 nt, Artificial Sequence
  Synthetic
uggaaaacaggagaacaa

SEQ ID NO: 438732 - RNA, 19 nt, Artificial Sequence
  Synthetic
auggaaaacaggagaacaa

SEQ ID NO: 438733 - RNA, 20 nt, Artificial Sequence
  Synthetic
aauggaaaacaggagaacaa

SEQ ID NO: 438734 - RNA, 21 nt, Artificial Sequence
  Synthetic
aaauggaaaacaggagaacaa

SEQ ID NO: 438735 - RNA, 22 nt, Artificial Sequence
  Synthetic
gaaauggaaaacaggagaacaa

SEQ ID NO: 438736 - RNA, 23 nt, Artificial Sequence
  Synthetic
ggaaauggaaaacaggagaacaa

SEQ ID NO: 438737 - RNA, 24 nt, Artificial Sequence
  Synthetic
gggaaauggaaaacaggagaacaa

SEQ ID NO: 438738 - RNA, 18 nt, Artificial Sequence
  Synthetic
agcuuuaggggagaacaa

SEQ ID NO: 438739 - RNA, 19 nt, Artificial Sequence
  Synthetic
aagcuuuaggggagaacaa

SEQ ID NO: 438740 - RNA, 20 nt, Artificial Sequence
  Synthetic
gaagcuuuaggggagaacaa

SEQ ID NO: 438741 - RNA, 21 nt, Artificial Sequence
  Synthetic
agaagcuuuaggggagaacaa

SEQ ID NO: 438742 - RNA, 22 nt, Artificial Sequence
  Synthetic
uagaagcuuuaggggagaacaa

SEQ ID NO: 438743 - RNA, 23 nt, Artificial Sequence
  Synthetic
auagaagcuuuaggggagaacaa

SEQ ID NO: 438744 - RNA, 24 nt, Artificial Sequence
  Synthetic
cauagaagcuuuaggggagaacaa

SEQ ID NO: 438745 - RNA, 18 nt, Artificial Sequence
  Synthetic
uacaaauguggagaacaa

SEQ ID NO: 438746 - RNA, 19 nt, Artificial Sequence
  Synthetic
auacaaauguggagaacaa

SEQ ID NO: 438747 - RNA, 20 nt, Artificial Sequence
  Synthetic
cauacaaauguggagaacaa

SEQ ID NO: 438748 - RNA, 21 nt, Artificial Sequence
  Synthetic
ucauacaaauguggagaacaa

SEQ ID NO: 438749 - RNA, 22 nt, Artificial Sequence
  Synthetic
uucauacaaauguggagaacaa

SEQ ID NO: 438750 - RNA, 23 nt, Artificial Sequence
  Synthetic
uuucauacaaauguggagaacaa

SEQ ID NO: 438751 - RNA, 24 nt, Artificial Sequence
  Synthetic
auuucauacaaauguggagaacaa

SEQ ID NO: 438752 - RNA, 18 nt, Artificial Sequence
  Synthetic
uauuucaguugagaacaa

SEQ ID NO: 438753 - RNA, 19 nt, Artificial Sequence
  Synthetic
uuauuucaguugagaacaa

SEQ ID NO: 438754 - RNA, 20 nt, Artificial Sequence
  Synthetic
guuauuucaguugagaacaa

SEQ ID NO: 438755 - RNA, 21 nt, Artificial Sequence
  Synthetic
aguuauuucaguugagaacaa

SEQ ID NO: 438756 - RNA, 22 nt, Artificial Sequence
  Synthetic
uaguuauuucaguugagaacaa

SEQ ID NO: 438757 - RNA, 23 nt, Artificial Sequence
  Synthetic
uuaguuauuucaguugagaacaa

SEQ ID NO: 438758 - RNA, 24 nt, Artificial Sequence
  Synthetic
cuuaguuauuucaguugagaacaa

SEQ ID NO: 438759 - RNA, 18 nt, Artificial Sequence
  Synthetic
aauuacacccuagaacaa

SEQ ID NO: 438760 - RNA, 19 nt, Artificial Sequence
  Synthetic
aaauuacacccuagaacaa

SEQ ID NO: 438761 - RNA, 20 nt, Artificial Sequence
  Synthetic
uaaauuacacccuagaacaa

SEQ ID NO: 438762 - RNA, 21 nt, Artificial Sequence
  Synthetic
uuaaauuacacccuagaacaa

SEQ ID NO: 438763 - RNA, 22 nt, Artificial Sequence
  Synthetic
cuuaaauuacacccuagaacaa

SEQ ID NO: 438764 - RNA, 23 nt, Artificial Sequence
  Synthetic
acuuaaauuacacccuagaacaa

SEQ ID NO: 438765 - RNA, 24 nt, Artificial Sequence
  Synthetic
gacuuaaauuacacccuagaacaa

SEQ ID NO: 438766 - RNA, 18 nt, Artificial Sequence
  Synthetic
uccaggaaaaacgaacaa

SEQ ID NO: 438767 - RNA, 19 nt, Artificial Sequence
  Synthetic
uuccaggaaaaacgaacaa

SEQ ID NO: 438768 - RNA, 20 nt, Artificial Sequence
  Synthetic
auuccaggaaaaacgaacaa

SEQ ID NO: 438769 - RNA, 21 nt, Artificial Sequence
  Synthetic
uauuccaggaaaaacgaacaa

SEQ ID NO: 438770 - RNA, 22 nt, Artificial Sequence
  Synthetic
uuauuccaggaaaaacgaacaa

SEQ ID NO: 438771 - RNA, 23 nt, Artificial Sequence
  Synthetic
uuuauuccaggaaaaacgaacaa

SEQ ID NO: 438772 - RNA, 24 nt, Artificial Sequence
  Synthetic
auuuauuccaggaaaaacgaacaa

SEQ ID NO: 438773 - RNA, 18 nt, Artificial Sequence
  Synthetic
gacaaauagaaggaacaa

SEQ ID NO: 438774 - RNA, 19 nt, Artificial Sequence
  Synthetic
agacaaauagaaggaacaa

SEQ ID NO: 438775 - RNA, 20 nt, Artificial Sequence
  Synthetic
uagacaaauagaaggaacaa

SEQ ID NO: 438776 - RNA, 21 nt, Artificial Sequence
  Synthetic
uuagacaaauagaaggaacaa

SEQ ID NO: 438777 - RNA, 22 nt, Artificial Sequence
  Synthetic
auuagacaaauagaaggaacaa

SEQ ID NO: 438778 - RNA, 23 nt, Artificial Sequence
  Synthetic
gauuagacaaauagaaggaacaa

SEQ ID NO: 438779 - RNA, 24 nt, Artificial Sequence
  Synthetic
ggauuagacaaauagaaggaacaa

SEQ ID NO: 438780 - RNA, 18 nt, Artificial Sequence
  Synthetic
gaauacaugaaggaacaa

SEQ ID NO: 438781 - RNA, 19 nt, Artificial Sequence
  Synthetic
ugaauacaugaaggaacaa

SEQ ID NO: 438782 - RNA, 20 nt, Artificial Sequence
  Synthetic
uugaauacaugaaggaacaa

SEQ ID NO: 438783 - RNA, 21 nt, Artificial Sequence
  Synthetic
auugaauacaugaaggaacaa

SEQ ID NO: 438784 - RNA, 22 nt, Artificial Sequence
  Synthetic
uauugaauacaugaaggaacaa

SEQ ID NO: 438785 - RNA, 23 nt, Artificial Sequence
  Synthetic
uuauugaauacaugaaggaacaa

SEQ ID NO: 438786 - RNA, 24 nt, Artificial Sequence
  Synthetic
auuauugaauacaugaaggaacaa

SEQ ID NO: 438787 - RNA, 18 nt, Artificial Sequence
  Synthetic
gcuucaugagaggaacaa

SEQ ID NO: 438788 - RNA, 19 nt, Artificial Sequence
  Synthetic
ugcuucaugagaggaacaa

SEQ ID NO: 438789 - RNA, 20 nt, Artificial Sequence
  Synthetic
uugcuucaugagaggaacaa

SEQ ID NO: 438790 - RNA, 21 nt, Artificial Sequence
  Synthetic
uuugcuucaugagaggaacaa

SEQ ID NO: 438791 - RNA, 22 nt, Artificial Sequence
  Synthetic
auuugcuucaugagaggaacaa

SEQ ID NO: 438792 - RNA, 23 nt, Artificial Sequence
  Synthetic
gauuugcuucaugagaggaacaa

SEQ ID NO: 438793 - RNA, 24 nt, Artificial Sequence
  Synthetic
ugauuugcuucaugagaggaacaa

SEQ ID NO: 438794 - RNA, 18 nt, Artificial Sequence
  Synthetic
acacaaagaagggaacaa

SEQ ID NO: 438795 - RNA, 19 nt, Artificial Sequence
  Synthetic
aacacaaagaagggaacaa

SEQ ID NO: 438796 - RNA, 20 nt, Artificial Sequence
  Synthetic
gaacacaaagaagggaacaa

SEQ ID NO: 438797 - RNA, 21 nt, Artificial Sequence
  Synthetic
ugaacacaaagaagggaacaa

SEQ ID NO: 438798 - RNA, 22 nt, Artificial Sequence
  Synthetic
augaacacaaagaagggaacaa

SEQ ID NO: 438799 - RNA, 23 nt, Artificial Sequence
  Synthetic
uaugaacacaaagaagggaacaa

SEQ ID NO: 438800 - RNA, 24 nt, Artificial Sequence
  Synthetic
auaugaacacaaagaagggaacaa

SEQ ID NO: 438801 - RNA, 18 nt, Artificial Sequence
  Synthetic
auugggaaauuggaacaa

SEQ ID NO: 438802 - RNA, 19 nt, Artificial Sequence
  Synthetic
gauugggaaauuggaacaa

SEQ ID NO: 438803 - RNA, 20 nt, Artificial Sequence
  Synthetic
cgauugggaaauuggaacaa

SEQ ID NO: 438804 - RNA, 21 nt, Artificial Sequence
  Synthetic
acgauugggaaauuggaacaa

SEQ ID NO: 438805 - RNA, 22 nt, Artificial Sequence
  Synthetic
uacgauugggaaauuggaacaa

SEQ ID NO: 438806 - RNA, 23 nt, Artificial Sequence
  Synthetic
auacgauugggaaauuggaacaa

SEQ ID NO: 438807 - RNA, 24 nt, Artificial Sequence
  Synthetic
uauacgauugggaaauuggaacaa

SEQ ID NO: 438808 - RNA, 18 nt, Artificial Sequence
  Synthetic
gcaauaacgaaugaacaa

SEQ ID NO: 438809 - RNA, 19 nt, Artificial Sequence
  Synthetic
agcaauaacgaaugaacaa

SEQ ID NO: 438810 - RNA, 20 nt, Artificial Sequence
  Synthetic
aagcaauaacgaaugaacaa

SEQ ID NO: 438811 - RNA, 21 nt, Artificial Sequence
  Synthetic
aaagcaauaacgaaugaacaa

SEQ ID NO: 438812 - RNA, 22 nt, Artificial Sequence
  Synthetic
aaaagcaauaacgaaugaacaa

SEQ ID NO: 438813 - RNA, 23 nt, Artificial Sequence
  Synthetic
gaaaagcaauaacgaaugaacaa

SEQ ID NO: 438814 - RNA, 24 nt, Artificial Sequence
  Synthetic
ggaaaagcaauaacgaaugaacaa

SEQ ID NO: 438815 - RNA, 18 nt, Artificial Sequence
  Synthetic
aaaucaacauaugaacaa

SEQ ID NO: 438816 - RNA, 19 nt, Artificial Sequence
  Synthetic
uaaaucaacauaugaacaa

SEQ ID NO: 438817 - RNA, 20 nt, Artificial Sequence
  Synthetic
guaaaucaacauaugaacaa

SEQ ID NO: 438818 - RNA, 21 nt, Artificial Sequence
  Synthetic
uguaaaucaacauaugaacaa

SEQ ID NO: 438819 - RNA, 22 nt, Artificial Sequence
  Synthetic
guguaaaucaacauaugaacaa

SEQ ID NO: 438820 - RNA, 23 nt, Artificial Sequence
  Synthetic
aguguaaaucaacauaugaacaa

SEQ ID NO: 438821 - RNA, 24 nt, Artificial Sequence
  Synthetic
aaguguaaaucaacauaugaacaa

SEQ ID NO: 438822 - RNA, 18 nt, Artificial Sequence
  Synthetic
gcuaugagaacugaacaa

SEQ ID NO: 438823 - RNA, 19 nt, Artificial Sequence
  Synthetic
ugcuaugagaacugaacaa

SEQ ID NO: 438824 - RNA, 20 nt, Artificial Sequence
  Synthetic
cugcuaugagaacugaacaa

SEQ ID NO: 438825 - RNA, 21 nt, Artificial Sequence
  Synthetic
acugcuaugagaacugaacaa

SEQ ID NO: 438826 - RNA, 22 nt, Artificial Sequence
  Synthetic
uacugcuaugagaacugaacaa

SEQ ID NO: 438827 - RNA, 23 nt, Artificial Sequence
  Synthetic
uuacugcuaugagaacugaacaa

SEQ ID NO: 438828 - RNA, 24 nt, Artificial Sequence
  Synthetic
cuuacugcuaugagaacugaacaa

SEQ ID NO: 438829 - RNA, 18 nt, Artificial Sequence
  Synthetic
aaugccaacugugaacaa

SEQ ID NO: 438830 - RNA, 19 nt, Artificial Sequence
  Synthetic
aaaugccaacugugaacaa

SEQ ID NO: 438831 - RNA, 20 nt, Artificial Sequence
  Synthetic
uaaaugccaacugugaacaa

SEQ ID NO: 438832 - RNA, 21 nt, Artificial Sequence
  Synthetic
cuaaaugccaacugugaacaa

SEQ ID NO: 438833 - RNA, 22 nt, Artificial Sequence
  Synthetic
acuaaaugccaacugugaacaa

SEQ ID NO: 438834 - RNA, 23 nt, Artificial Sequence
  Synthetic
cacuaaaugccaacugugaacaa

SEQ ID NO: 438835 - RNA, 24 nt, Artificial Sequence
  Synthetic
ucacuaaaugccaacugugaacaa

SEQ ID NO: 438836 - RNA, 18 nt, Artificial Sequence
  Synthetic
auucaaaagauugaacaa

SEQ ID NO: 438837 - RNA, 19 nt, Artificial Sequence
  Synthetic
uauucaaaagauugaacaa

SEQ ID NO: 438838 - RNA, 20 nt, Artificial Sequence
  Synthetic
uuauucaaaagauugaacaa

SEQ ID NO: 438839 - RNA, 21 nt, Artificial Sequence
  Synthetic
guuauucaaaagauugaacaa

SEQ ID NO: 438840 - RNA, 22 nt, Artificial Sequence
  Synthetic
uguuauucaaaagauugaacaa

SEQ ID NO: 438841 - RNA, 23 nt, Artificial Sequence
  Synthetic
guguuauucaaaagauugaacaa

SEQ ID NO: 438842 - RNA, 24 nt, Artificial Sequence
  Synthetic
uguguuauucaaaagauugaacaa

SEQ ID NO: 438843 - RNA, 18 nt, Artificial Sequence
  Synthetic
ggaaauagaaaauaacaa

SEQ ID NO: 438844 - RNA, 19 nt, Artificial Sequence
  Synthetic
aggaaauagaaaauaacaa

SEQ ID NO: 438845 - RNA, 20 nt, Artificial Sequence
  Synthetic
gaggaaauagaaaauaacaa

SEQ ID NO: 438846 - RNA, 21 nt, Artificial Sequence
  Synthetic
agaggaaauagaaaauaacaa

SEQ ID NO: 438847 - RNA, 22 nt, Artificial Sequence
  Synthetic
cagaggaaauagaaaauaacaa

SEQ ID NO: 438848 - RNA, 23 nt, Artificial Sequence
  Synthetic
acagaggaaauagaaaauaacaa

SEQ ID NO: 438849 - RNA, 24 nt, Artificial Sequence
  Synthetic
aacagaggaaauagaaaauaacaa

SEQ ID NO: 438850 - RNA, 18 nt, Artificial Sequence
  Synthetic
ucaacaguaaaauaacaa

SEQ ID NO: 438851 - RNA, 19 nt, Artificial Sequence
  Synthetic
cucaacaguaaaauaacaa

SEQ ID NO: 438852 - RNA, 20 nt, Artificial Sequence
  Synthetic
ucucaacaguaaaauaacaa

SEQ ID NO: 438853 - RNA, 21 nt, Artificial Sequence
  Synthetic
uucucaacaguaaaauaacaa

SEQ ID NO: 438854 - RNA, 22 nt, Artificial Sequence
  Synthetic
uuucucaacaguaaaauaacaa

SEQ ID NO: 438855 - RNA, 23 nt, Artificial Sequence
  Synthetic
uuuucucaacaguaaaauaacaa

SEQ ID NO: 438856 - RNA, 24 nt, Artificial Sequence
  Synthetic
guuuucucaacaguaaaauaacaa

SEQ ID NO: 438857 - RNA, 18 nt, Artificial Sequence
  Synthetic
auccauuugaaauaacaa

SEQ ID NO: 438858 - RNA, 19 nt, Artificial Sequence
  Synthetic
aauccauuugaaauaacaa

SEQ ID NO: 438859 - RNA, 20 nt, Artificial Sequence
  Synthetic
uaauccauuugaaauaacaa

SEQ ID NO: 438860 - RNA, 21 nt, Artificial Sequence
  Synthetic
cuaauccauuugaaauaacaa

SEQ ID NO: 438861 - RNA, 22 nt, Artificial Sequence
  Synthetic
ucuaauccauuugaaauaacaa

SEQ ID NO: 438862 - RNA, 23 nt, Artificial Sequence
  Synthetic
uucuaauccauuugaaauaacaa

SEQ ID NO: 438863 - RNA, 24 nt, Artificial Sequence
  Synthetic
uuucuaauccauuugaaauaacaa

SEQ ID NO: 438864 - RNA, 18 nt, Artificial Sequence
  Synthetic
auaucaugggcauaacaa

SEQ ID NO: 438865 - RNA, 19 nt, Artificial Sequence
  Synthetic
aauaucaugggcauaacaa

SEQ ID NO: 438866 - RNA, 20 nt, Artificial Sequence
  Synthetic
uaauaucaugggcauaacaa

SEQ ID NO: 438867 - RNA, 21 nt, Artificial Sequence
  Synthetic
uuaauaucaugggcauaacaa

SEQ ID NO: 438868 - RNA, 22 nt, Artificial Sequence
  Synthetic
guuaauaucaugggcauaacaa

SEQ ID NO: 438869 - RNA, 23 nt, Artificial Sequence
  Synthetic
uguuaauaucaugggcauaacaa

SEQ ID NO: 438870 - RNA, 24 nt, Artificial Sequence
  Synthetic
auguuaauaucaugggcauaacaa

SEQ ID NO: 438871 - RNA, 18 nt, Artificial Sequence
  Synthetic
uuaguucccuuauaacaa

SEQ ID NO: 438872 - RNA, 19 nt, Artificial Sequence
  Synthetic
auuaguucccuuauaacaa

SEQ ID NO: 438873 - RNA, 20 nt, Artificial Sequence
  Synthetic
aauuaguucccuuauaacaa

SEQ ID NO: 438874 - RNA, 21 nt, Artificial Sequence
  Synthetic
gaauuaguucccuuauaacaa

SEQ ID NO: 438875 - RNA, 22 nt, Artificial Sequence
  Synthetic
ggaauuaguucccuuauaacaa

SEQ ID NO: 438876 - RNA, 23 nt, Artificial Sequence
  Synthetic
uggaauuaguucccuuauaacaa

SEQ ID NO: 438877 - RNA, 24 nt, Artificial Sequence
  Synthetic
auggaauuaguucccuuauaacaa

SEQ ID NO: 438878 - RNA, 18 nt, Artificial Sequence
  Synthetic
ggaagugaacacuaacaa

SEQ ID NO: 438879 - RNA, 19 nt, Artificial Sequence
  Synthetic
cggaagugaacacuaacaa

SEQ ID NO: 438880 - RNA, 20 nt, Artificial Sequence
  Synthetic
acggaagugaacacuaacaa

SEQ ID NO: 438881 - RNA, 21 nt, Artificial Sequence
  Synthetic
cacggaagugaacacuaacaa

SEQ ID NO: 438882 - RNA, 22 nt, Artificial Sequence
  Synthetic
gcacggaagugaacacuaacaa

SEQ ID NO: 438883 - RNA, 23 nt, Artificial Sequence
  Synthetic
agcacggaagugaacacuaacaa

SEQ ID NO: 438884 - RNA, 24 nt, Artificial Sequence
  Synthetic
gagcacggaagugaacacuaacaa

SEQ ID NO: 438885 - RNA, 18 nt, Artificial Sequence
  Synthetic
gaacauaugugcuaacaa

SEQ ID NO: 438886 - RNA, 19 nt, Artificial Sequence
  Synthetic
ugaacauaugugcuaacaa

SEQ ID NO: 438887 - RNA, 20 nt, Artificial Sequence
  Synthetic
gugaacauaugugcuaacaa

SEQ ID NO: 438888 - RNA, 21 nt, Artificial Sequence
  Synthetic
agugaacauaugugcuaacaa

SEQ ID NO: 438889 - RNA, 22 nt, Artificial Sequence
  Synthetic
cagugaacauaugugcuaacaa

SEQ ID NO: 438890 - RNA, 23 nt, Artificial Sequence
  Synthetic
acagugaacauaugugcuaacaa

SEQ ID NO: 438891 - RNA, 24 nt, Artificial Sequence
  Synthetic
aacagugaacauaugugcuaacaa

SEQ ID NO: 438892 - RNA, 18 nt, Artificial Sequence
  Synthetic
guaugaaaauucuaacaa

SEQ ID NO: 438893 - RNA, 19 nt, Artificial Sequence
  Synthetic
uguaugaaaauucuaacaa

SEQ ID NO: 438894 - RNA, 20 nt, Artificial Sequence
  Synthetic
uuguaugaaaauucuaacaa

SEQ ID NO: 438895 - RNA, 21 nt, Artificial Sequence
  Synthetic
uuuguaugaaaauucuaacaa

SEQ ID NO: 438896 - RNA, 22 nt, Artificial Sequence
  Synthetic
auuuguaugaaaauucuaacaa

SEQ ID NO: 438897 - RNA, 23 nt, Artificial Sequence
  Synthetic
cauuuguaugaaaauucuaacaa

SEQ ID NO: 438898 - RNA, 24 nt, Artificial Sequence
  Synthetic
gcauuuguaugaaaauucuaacaa

SEQ ID NO: 438899 - RNA, 18 nt, Artificial Sequence
  Synthetic
agugugaagagguaacaa

SEQ ID NO: 438900 - RNA, 19 nt, Artificial Sequence
  Synthetic
cagugugaagagguaacaa

SEQ ID NO: 438901 - RNA, 20 nt, Artificial Sequence
  Synthetic
ccagugugaagagguaacaa

SEQ ID NO: 438902 - RNA, 21 nt, Artificial Sequence
  Synthetic
cccagugugaagagguaacaa

SEQ ID NO: 438903 - RNA, 22 nt, Artificial Sequence
  Synthetic
ucccagugugaagagguaacaa

SEQ ID NO: 438904 - RNA, 23 nt, Artificial Sequence
  Synthetic
gucccagugugaagagguaacaa

SEQ ID NO: 438905 - RNA, 24 nt, Artificial Sequence
  Synthetic
ugucccagugugaagagguaacaa

SEQ ID NO: 438906 - RNA, 18 nt, Artificial Sequence
  Synthetic
gggacuagguuguaacaa

SEQ ID NO: 438907 - RNA, 19 nt, Artificial Sequence
  Synthetic
agggacuagguuguaacaa

SEQ ID NO: 438908 - RNA, 20 nt, Artificial Sequence
  Synthetic
uagggacuagguuguaacaa

SEQ ID NO: 438909 - RNA, 21 nt, Artificial Sequence
  Synthetic
auagggacuagguuguaacaa

SEQ ID NO: 438910 - RNA, 22 nt, Artificial Sequence
  Synthetic
uauagggacuagguuguaacaa

SEQ ID NO: 438911 - RNA, 23 nt, Artificial Sequence
  Synthetic
cuauagggacuagguuguaacaa

SEQ ID NO: 438912 - RNA, 24 nt, Artificial Sequence
  Synthetic
ccuauagggacuagguuguaacaa

SEQ ID NO: 438913 - RNA, 18 nt, Artificial Sequence
  Synthetic
uuuauggaagauuaacaa

SEQ ID NO: 438914 - RNA, 19 nt, Artificial Sequence
  Synthetic
auuuauggaagauuaacaa

SEQ ID NO: 438915 - RNA, 20 nt, Artificial Sequence
  Synthetic
aauuuauggaagauuaacaa

SEQ ID NO: 438916 - RNA, 21 nt, Artificial Sequence
  Synthetic
aaauuuauggaagauuaacaa

SEQ ID NO: 438917 - RNA, 22 nt, Artificial Sequence
  Synthetic
aaaauuuauggaagauuaacaa

SEQ ID NO: 438918 - RNA, 23 nt, Artificial Sequence
  Synthetic
uaaaauuuauggaagauuaacaa

SEQ ID NO: 438919 - RNA, 24 nt, Artificial Sequence
  Synthetic
cuaaaauuuauggaagauuaacaa

SEQ ID NO: 438920 - RNA, 18 nt, Artificial Sequence
  Synthetic
agaaugaaaaguuaacaa

SEQ ID NO: 438921 - RNA, 19 nt, Artificial Sequence
  Synthetic
gagaaugaaaaguuaacaa

SEQ ID NO: 438922 - RNA, 20 nt, Artificial Sequence
  Synthetic
ugagaaugaaaaguuaacaa

SEQ ID NO: 438923 - RNA, 21 nt, Artificial Sequence
  Synthetic
augagaaugaaaaguuaacaa

SEQ ID NO: 438924 - RNA, 22 nt, Artificial Sequence
  Synthetic
aaugagaaugaaaaguuaacaa

SEQ ID NO: 438925 - RNA, 23 nt, Artificial Sequence
  Synthetic
gaaugagaaugaaaaguuaacaa

SEQ ID NO: 438926 - RNA, 24 nt, Artificial Sequence
  Synthetic
ggaaugagaaugaaaaguuaacaa

SEQ ID NO: 438927 - RNA, 18 nt, Artificial Sequence
  Synthetic
auuauccucauuuaacaa

SEQ ID NO: 438928 - RNA, 19 nt, Artificial Sequence
  Synthetic
aauuauccucauuuaacaa

SEQ ID NO: 438929 - RNA, 20 nt, Artificial Sequence
  Synthetic
caauuauccucauuuaacaa

SEQ ID NO: 438930 - RNA, 21 nt, Artificial Sequence
  Synthetic
gcaauuauccucauuuaacaa

SEQ ID NO: 438931 - RNA, 22 nt, Artificial Sequence
  Synthetic
ugcaauuauccucauuuaacaa

SEQ ID NO: 438932 - RNA, 23 nt, Artificial Sequence
  Synthetic
cugcaauuauccucauuuaacaa

SEQ ID NO: 438933 - RNA, 24 nt, Artificial Sequence
  Synthetic
gcugcaauuauccucauuuaacaa

SEQ ID NO: 438934 - RNA, 18 nt, Artificial Sequence
  Synthetic
aaaaccaucaaaacacaa

SEQ ID NO: 438935 - RNA, 19 nt, Artificial Sequence
  Synthetic
caaaaccaucaaaacacaa

SEQ ID NO: 438936 - RNA, 20 nt, Artificial Sequence
  Synthetic
acaaaaccaucaaaacacaa

SEQ ID NO: 438937 - RNA, 21 nt, Artificial Sequence
  Synthetic
cacaaaaccaucaaaacacaa

SEQ ID NO: 438938 - RNA, 22 nt, Artificial Sequence
  Synthetic
acacaaaaccaucaaaacacaa

SEQ ID NO: 438939 - RNA, 23 nt, Artificial Sequence
  Synthetic
uacacaaaaccaucaaaacacaa

SEQ ID NO: 438940 - RNA, 24 nt, Artificial Sequence
  Synthetic
cuacacaaaaccaucaaaacacaa

SEQ ID NO: 438941 - RNA, 18 nt, Artificial Sequence
  Synthetic
agaggagagaaaacacaa

SEQ ID NO: 438942 - RNA, 19 nt, Artificial Sequence
  Synthetic
aagaggagagaaaacacaa

SEQ ID NO: 438943 - RNA, 20 nt, Artificial Sequence
  Synthetic
aaagaggagagaaaacacaa

SEQ ID NO: 438944 - RNA, 21 nt, Artificial Sequence
  Synthetic
aaaagaggagagaaaacacaa

SEQ ID NO: 438945 - RNA, 22 nt, Artificial Sequence
  Synthetic
uaaaagaggagagaaaacacaa

SEQ ID NO: 438946 - RNA, 23 nt, Artificial Sequence
  Synthetic
uuaaaagaggagagaaaacacaa

SEQ ID NO: 438947 - RNA, 24 nt, Artificial Sequence
  Synthetic
guuaaaagaggagagaaaacacaa

SEQ ID NO: 438948 - RNA, 18 nt, Artificial Sequence
  Synthetic
ugcgguauauaaacacaa

SEQ ID NO: 438949 - RNA, 19 nt, Artificial Sequence
  Synthetic
uugcgguauauaaacacaa

SEQ ID NO: 438950 - RNA, 20 nt, Artificial Sequence
  Synthetic
auugcgguauauaaacacaa

SEQ ID NO: 438951 - RNA, 21 nt, Artificial Sequence
  Synthetic
aauugcgguauauaaacacaa

SEQ ID NO: 438952 - RNA, 22 nt, Artificial Sequence
  Synthetic
aaauugcgguauauaaacacaa

SEQ ID NO: 438953 - RNA, 23 nt, Artificial Sequence
  Synthetic
gaaauugcgguauauaaacacaa

SEQ ID NO: 438954 - RNA, 24 nt, Artificial Sequence
  Synthetic
agaaauugcgguauauaaacacaa

SEQ ID NO: 438955 - RNA, 18 nt, Artificial Sequence
  Synthetic
ucuucccugacaacacaa

SEQ ID NO: 438956 - RNA, 19 nt, Artificial Sequence
  Synthetic
uucuucccugacaacacaa

SEQ ID NO: 438957 - RNA, 20 nt, Artificial Sequence
  Synthetic
uuucuucccugacaacacaa

SEQ ID NO: 438958 - RNA, 21 nt, Artificial Sequence
  Synthetic
uuuucuucccugacaacacaa

SEQ ID NO: 438959 - RNA, 22 nt, Artificial Sequence
  Synthetic
uuuuucuucccugacaacacaa

SEQ ID NO: 438960 - RNA, 23 nt, Artificial Sequence
  Synthetic
guuuuucuucccugacaacacaa

SEQ ID NO: 438961 - RNA, 24 nt, Artificial Sequence
  Synthetic
aguuuuucuucccugacaacacaa

SEQ ID NO: 438962 - RNA, 18 nt, Artificial Sequence
  Synthetic
cagacucuuagaacacaa

SEQ ID NO: 438963 - RNA, 19 nt, Artificial Sequence
  Synthetic
acagacucuuagaacacaa

SEQ ID NO: 438964 - RNA, 20 nt, Artificial Sequence
  Synthetic
cacagacucuuagaacacaa

SEQ ID NO: 438965 - RNA, 21 nt, Artificial Sequence
  Synthetic
ucacagacucuuagaacacaa

SEQ ID NO: 438966 - RNA, 22 nt, Artificial Sequence
  Synthetic
aucacagacucuuagaacacaa

SEQ ID NO: 438967 - RNA, 23 nt, Artificial Sequence
  Synthetic
aaucacagacucuuagaacacaa

SEQ ID NO: 438968 - RNA, 24 nt, Artificial Sequence
  Synthetic
gaaucacagacucuuagaacacaa

SEQ ID NO: 438969 - RNA, 18 nt, Artificial Sequence
  Synthetic
gaaauuuauugaacacaa

SEQ ID NO: 438970 - RNA, 19 nt, Artificial Sequence
  Synthetic
ugaaauuuauugaacacaa

SEQ ID NO: 438971 - RNA, 20 nt, Artificial Sequence
  Synthetic
uugaaauuuauugaacacaa

SEQ ID NO: 438972 - RNA, 21 nt, Artificial Sequence
  Synthetic
auugaaauuuauugaacacaa

SEQ ID NO: 438973 - RNA, 22 nt, Artificial Sequence
  Synthetic
aauugaaauuuauugaacacaa

SEQ ID NO: 438974 - RNA, 23 nt, Artificial Sequence
  Synthetic
aaauugaaauuuauugaacacaa

SEQ ID NO: 438975 - RNA, 24 nt, Artificial Sequence
  Synthetic
gaaauugaaauuuauugaacacaa

SEQ ID NO: 438976 - RNA, 18 nt, Artificial Sequence
  Synthetic
ucucagaaacuaacacaa

SEQ ID NO: 438977 - RNA, 19 nt, Artificial Sequence
  Synthetic
aucucagaaacuaacacaa

SEQ ID NO: 438978 - RNA, 20 nt, Artificial Sequence
  Synthetic
aaucucagaaacuaacacaa

SEQ ID NO: 438979 - RNA, 21 nt, Artificial Sequence
  Synthetic
caaucucagaaacuaacacaa

SEQ ID NO: 438980 - RNA, 22 nt, Artificial Sequence
  Synthetic
gcaaucucagaaacuaacacaa

SEQ ID NO: 438981 - RNA, 23 nt, Artificial Sequence
  Synthetic
ugcaaucucagaaacuaacacaa

SEQ ID NO: 438982 - RNA, 24 nt, Artificial Sequence
  Synthetic
gugcaaucucagaaacuaacacaa

SEQ ID NO: 438983 - RNA, 18 nt, Artificial Sequence
  Synthetic
caguaacgaguaacacaa

SEQ ID NO: 438984 - RNA, 19 nt, Artificial Sequence
  Synthetic
ccaguaacgaguaacacaa

SEQ ID NO: 438985 - RNA, 20 nt, Artificial Sequence
  Synthetic
accaguaacgaguaacacaa

SEQ ID NO: 438986 - RNA, 21 nt, Artificial Sequence
  Synthetic
gaccaguaacgaguaacacaa

SEQ ID NO: 438987 - RNA, 22 nt, Artificial Sequence
  Synthetic
ggaccaguaacgaguaacacaa

SEQ ID NO: 438988 - RNA, 23 nt, Artificial Sequence
  Synthetic
cggaccaguaacgaguaacacaa

SEQ ID NO: 438989 - RNA, 24 nt, Artificial Sequence
  Synthetic
acggaccaguaacgaguaacacaa

SEQ ID NO: 438990 - RNA, 18 nt, Artificial Sequence
  Synthetic
gguagcaagaacacacaa

SEQ ID NO: 438991 - RNA, 19 nt, Artificial Sequence
  Synthetic
agguagcaagaacacacaa

SEQ ID NO: 438992 - RNA, 20 nt, Artificial Sequence
  Synthetic
aagguagcaagaacacacaa

SEQ ID NO: 438993 - RNA, 21 nt, Artificial Sequence
  Synthetic
aaagguagcaagaacacacaa

SEQ ID NO: 438994 - RNA, 22 nt, Artificial Sequence
  Synthetic
caaagguagcaagaacacacaa

SEQ ID NO: 438995 - RNA, 23 nt, Artificial Sequence
  Synthetic
acaaagguagcaagaacacacaa

SEQ ID NO: 438996 - RNA, 24 nt, Artificial Sequence
  Synthetic
gacaaagguagcaagaacacacaa

SEQ ID NO: 438997 - RNA, 18 nt, Artificial Sequence
  Synthetic
ucagacccacccacacaa

SEQ ID NO: 438998 - RNA, 19 nt, Artificial Sequence
  Synthetic
aucagacccacccacacaa

SEQ ID NO: 438999 - RNA, 20 nt, Artificial Sequence
  Synthetic
gaucagacccacccacacaa

SEQ ID NO: 439000 - RNA, 21 nt, Artificial Sequence
  Synthetic
ggaucagacccacccacacaa

SEQ ID NO: 439001 - RNA, 22 nt, Artificial Sequence
  Synthetic
uggaucagacccacccacacaa

SEQ ID NO: 439002 - RNA, 23 nt, Artificial Sequence
  Synthetic
uuggaucagacccacccacacaa

SEQ ID NO: 439003 - RNA, 24 nt, Artificial Sequence
  Synthetic
auuggaucagacccacccacacaa

SEQ ID NO: 439004 - RNA, 18 nt, Artificial Sequence
  Synthetic
ucaucuggaaucacacaa

SEQ ID NO: 439005 - RNA, 19 nt, Artificial Sequence
  Synthetic
aucaucuggaaucacacaa

SEQ ID NO: 439006 - RNA, 20 nt, Artificial Sequence
  Synthetic
caucaucuggaaucacacaa

SEQ ID NO: 439007 - RNA, 21 nt, Artificial Sequence
  Synthetic
acaucaucuggaaucacacaa

SEQ ID NO: 439008 - RNA, 22 nt, Artificial Sequence
  Synthetic
uacaucaucuggaaucacacaa

SEQ ID NO: 439009 - RNA, 23 nt, Artificial Sequence
  Synthetic
auacaucaucuggaaucacacaa

SEQ ID NO: 439010 - RNA, 24 nt, Artificial Sequence
  Synthetic
cauacaucaucuggaaucacacaa

SEQ ID NO: 439011 - RNA, 18 nt, Artificial Sequence
  Synthetic
caacucacugggacacaa

SEQ ID NO: 439012 - RNA, 19 nt, Artificial Sequence
  Synthetic
acaacucacugggacacaa

SEQ ID NO: 439013 - RNA, 20 nt, Artificial Sequence
  Synthetic
aacaacucacugggacacaa

SEQ ID NO: 439014 - RNA, 21 nt, Artificial Sequence
  Synthetic
gaacaacucacugggacacaa

SEQ ID NO: 439015 - RNA, 22 nt, Artificial Sequence
  Synthetic
ggaacaacucacugggacacaa

SEQ ID NO: 439016 - RNA, 23 nt, Artificial Sequence
  Synthetic
uggaacaacucacugggacacaa

SEQ ID NO: 439017 - RNA, 24 nt, Artificial Sequence
  Synthetic
uuggaacaacucacugggacacaa

SEQ ID NO: 439018 - RNA, 18 nt, Artificial Sequence
  Synthetic
ggugccaagaauacacaa

SEQ ID NO: 439019 - RNA, 19 nt, Artificial Sequence
  Synthetic
gggugccaagaauacacaa

SEQ ID NO: 439020 - RNA, 20 nt, Artificial Sequence
  Synthetic
ggggugccaagaauacacaa

SEQ ID NO: 439021 - RNA, 21 nt, Artificial Sequence
  Synthetic
aggggugccaagaauacacaa

SEQ ID NO: 439022 - RNA, 22 nt, Artificial Sequence
  Synthetic
uaggggugccaagaauacacaa

SEQ ID NO: 439023 - RNA, 23 nt, Artificial Sequence
  Synthetic
auaggggugccaagaauacacaa

SEQ ID NO: 439024 - RNA, 24 nt, Artificial Sequence
  Synthetic
aauaggggugccaagaauacacaa

SEQ ID NO: 439025 - RNA, 18 nt, Artificial Sequence
  Synthetic
cgugguacauauacacaa

SEQ ID NO: 439026 - RNA, 19 nt, Artificial Sequence
  Synthetic
acgugguacauauacacaa

SEQ ID NO: 439027 - RNA, 20 nt, Artificial Sequence
  Synthetic
aacgugguacauauacacaa

SEQ ID NO: 439028 - RNA, 21 nt, Artificial Sequence
  Synthetic
aaacgugguacauauacacaa

SEQ ID NO: 439029 - RNA, 22 nt, Artificial Sequence
  Synthetic
aaaacgugguacauauacacaa

SEQ ID NO: 439030 - RNA, 23 nt, Artificial Sequence
  Synthetic
gaaaacgugguacauauacacaa

SEQ ID NO: 439031 - RNA, 24 nt, Artificial Sequence
  Synthetic
agaaaacgugguacauauacacaa

SEQ ID NO: 439032 - RNA, 18 nt, Artificial Sequence
  Synthetic
uuaucacaauguacacaa

SEQ ID NO: 439033 - RNA, 19 nt, Artificial Sequence
  Synthetic
uuuaucacaauguacacaa

SEQ ID NO: 439034 - RNA, 20 nt, Artificial Sequence
  Synthetic
guuuaucacaauguacacaa

SEQ ID NO: 439035 - RNA, 21 nt, Artificial Sequence
  Synthetic
aguuuaucacaauguacacaa

SEQ ID NO: 439036 - RNA, 22 nt, Artificial Sequence
  Synthetic
uaguuuaucacaauguacacaa

SEQ ID NO: 439037 - RNA, 23 nt, Artificial Sequence
  Synthetic
uuaguuuaucacaauguacacaa

SEQ ID NO: 439038 - RNA, 24 nt, Artificial Sequence
  Synthetic
auuaguuuaucacaauguacacaa

SEQ ID NO: 439039 - RNA, 18 nt, Artificial Sequence
  Synthetic
guggaaacauaaccacaa

SEQ ID NO: 439040 - RNA, 19 nt, Artificial Sequence
  Synthetic
aguggaaacauaaccacaa

SEQ ID NO: 439041 - RNA, 20 nt, Artificial Sequence
  Synthetic
caguggaaacauaaccacaa

SEQ ID NO: 439042 - RNA, 21 nt, Artificial Sequence
  Synthetic
acaguggaaacauaaccacaa

SEQ ID NO: 439043 - RNA, 22 nt, Artificial Sequence
  Synthetic
aacaguggaaacauaaccacaa

SEQ ID NO: 439044 - RNA, 23 nt, Artificial Sequence
  Synthetic
caacaguggaaacauaaccacaa

SEQ ID NO: 439045 - RNA, 24 nt, Artificial Sequence
  Synthetic
ucaacaguggaaacauaaccacaa

SEQ ID NO: 439046 - RNA, 18 nt, Artificial Sequence
  Synthetic
gggaaguauugaccacaa

SEQ ID NO: 439047 - RNA, 19 nt, Artificial Sequence
  Synthetic
agggaaguauugaccacaa

SEQ ID NO: 439048 - RNA, 20 nt, Artificial Sequence
  Synthetic
cagggaaguauugaccacaa

SEQ ID NO: 439049 - RNA, 21 nt, Artificial Sequence
  Synthetic
acagggaaguauugaccacaa

SEQ ID NO: 439050 - RNA, 22 nt, Artificial Sequence
  Synthetic
aacagggaaguauugaccacaa

SEQ ID NO: 439051 - RNA, 23 nt, Artificial Sequence
  Synthetic
gaacagggaaguauugaccacaa

SEQ ID NO: 439052 - RNA, 24 nt, Artificial Sequence
  Synthetic
ggaacagggaaguauugaccacaa

SEQ ID NO: 439053 - RNA, 18 nt, Artificial Sequence
  Synthetic
caauucugaagcccacaa

SEQ ID NO: 439054 - RNA, 19 nt, Artificial Sequence
  Synthetic
ccaauucugaagcccacaa

SEQ ID NO: 439055 - RNA, 20 nt, Artificial Sequence
  Synthetic
uccaauucugaagcccacaa

SEQ ID NO: 439056 - RNA, 21 nt, Artificial Sequence
  Synthetic
auccaauucugaagcccacaa

SEQ ID NO: 439057 - RNA, 22 nt, Artificial Sequence
  Synthetic
cauccaauucugaagcccacaa

SEQ ID NO: 439058 - RNA, 23 nt, Artificial Sequence
  Synthetic
gcauccaauucugaagcccacaa

SEQ ID NO: 439059 - RNA, 24 nt, Artificial Sequence
  Synthetic
agcauccaauucugaagcccacaa

SEQ ID NO: 439060 - RNA, 18 nt, Artificial Sequence
  Synthetic
auuguuccaggcccacaa

SEQ ID NO: 439061 - RNA, 19 nt, Artificial Sequence
  Synthetic
cauuguuccaggcccacaa

SEQ ID NO: 439062 - RNA, 20 nt, Artificial Sequence
  Synthetic
ccauuguuccaggcccacaa

SEQ ID NO: 439063 - RNA, 21 nt, Artificial Sequence
  Synthetic
accauuguuccaggcccacaa

SEQ ID NO: 439064 - RNA, 22 nt, Artificial Sequence
  Synthetic
caccauuguuccaggcccacaa

SEQ ID NO: 439065 - RNA, 23 nt, Artificial Sequence
  Synthetic
acaccauuguuccaggcccacaa

SEQ ID NO: 439066 - RNA, 24 nt, Artificial Sequence
  Synthetic
uacaccauuguuccaggcccacaa

SEQ ID NO: 439067 - RNA, 18 nt, Artificial Sequence
  Synthetic
cuuucucaagucccacaa

SEQ ID NO: 439068 - RNA, 19 nt, Artificial Sequence
  Synthetic
ccuuucucaagucccacaa

SEQ ID NO: 439069 - RNA, 20 nt, Artificial Sequence
  Synthetic
gccuuucucaagucccacaa

SEQ ID NO: 439070 - RNA, 21 nt, Artificial Sequence
  Synthetic
agccuuucucaagucccacaa

SEQ ID NO: 439071 - RNA, 22 nt, Artificial Sequence
  Synthetic
aagccuuucucaagucccacaa

SEQ ID NO: 439072 - RNA, 23 nt, Artificial Sequence
  Synthetic
gaagccuuucucaagucccacaa

SEQ ID NO: 439073 - RNA, 24 nt, Artificial Sequence
  Synthetic
ugaagccuuucucaagucccacaa

SEQ ID NO: 439074 - RNA, 18 nt, Artificial Sequence
  Synthetic
accuuuuaauagccacaa

SEQ ID NO: 439075 - RNA, 19 nt, Artificial Sequence
  Synthetic
caccuuuuaauagccacaa

SEQ ID NO: 439076 - RNA, 20 nt, Artificial Sequence
  Synthetic
ucaccuuuuaauagccacaa

SEQ ID NO: 439077 - RNA, 21 nt, Artificial Sequence
  Synthetic
uucaccuuuuaauagccacaa

SEQ ID NO: 439078 - RNA, 22 nt, Artificial Sequence
  Synthetic
guucaccuuuuaauagccacaa

SEQ ID NO: 439079 - RNA, 23 nt, Artificial Sequence
  Synthetic
aguucaccuuuuaauagccacaa

SEQ ID NO: 439080 - RNA, 24 nt, Artificial Sequence
  Synthetic
caguucaccuuuuaauagccacaa

SEQ ID NO: 439081 - RNA, 18 nt, Artificial Sequence
  Synthetic
agaaguaauucgccacaa

SEQ ID NO: 439082 - RNA, 19 nt, Artificial Sequence
  Synthetic
gagaaguaauucgccacaa

SEQ ID NO: 439083 - RNA, 20 nt, Artificial Sequence
  Synthetic
agagaaguaauucgccacaa

SEQ ID NO: 439084 - RNA, 21 nt, Artificial Sequence
  Synthetic
uagagaaguaauucgccacaa

SEQ ID NO: 439085 - RNA, 22 nt, Artificial Sequence
  Synthetic
auagagaaguaauucgccacaa

SEQ ID NO: 439086 - RNA, 23 nt, Artificial Sequence
  Synthetic
gauagagaaguaauucgccacaa

SEQ ID NO: 439087 - RNA, 24 nt, Artificial Sequence
  Synthetic
ggauagagaaguaauucgccacaa

SEQ ID NO: 439088 - RNA, 18 nt, Artificial Sequence
  Synthetic
ugcaacauuuggccacaa

SEQ ID NO: 439089 - RNA, 19 nt, Artificial Sequence
  Synthetic
gugcaacauuuggccacaa

SEQ ID NO: 439090 - RNA, 20 nt, Artificial Sequence
  Synthetic
cgugcaacauuuggccacaa

SEQ ID NO: 439091 - RNA, 21 nt, Artificial Sequence
  Synthetic
gcgugcaacauuuggccacaa

SEQ ID NO: 439092 - RNA, 22 nt, Artificial Sequence
  Synthetic
ggcgugcaacauuuggccacaa

SEQ ID NO: 439093 - RNA, 23 nt, Artificial Sequence
  Synthetic
gggcgugcaacauuuggccacaa

SEQ ID NO: 439094 - RNA, 24 nt, Artificial Sequence
  Synthetic
agggcgugcaacauuuggccacaa

SEQ ID NO: 439095 - RNA, 18 nt, Artificial Sequence
  Synthetic
uugccauggaauccacaa

SEQ ID NO: 439096 - RNA, 19 nt, Artificial Sequence
  Synthetic
auugccauggaauccacaa

SEQ ID NO: 439097 - RNA, 20 nt, Artificial Sequence
  Synthetic
cauugccauggaauccacaa

SEQ ID NO: 439098 - RNA, 21 nt, Artificial Sequence
  Synthetic
ccauugccauggaauccacaa

SEQ ID NO: 439099 - RNA, 22 nt, Artificial Sequence
  Synthetic
uccauugccauggaauccacaa

SEQ ID NO: 439100 - RNA, 23 nt, Artificial Sequence
  Synthetic
cuccauugccauggaauccacaa

SEQ ID NO: 439101 - RNA, 24 nt, Artificial Sequence
  Synthetic
ucuccauugccauggaauccacaa

SEQ ID NO: 439102 - RNA, 18 nt, Artificial Sequence
  Synthetic
ggguguuuauauccacaa

SEQ ID NO: 439103 - RNA, 19 nt, Artificial Sequence
  Synthetic
aggguguuuauauccacaa

SEQ ID NO: 439104 - RNA, 20 nt, Artificial Sequence
  Synthetic
aaggguguuuauauccacaa

SEQ ID NO: 439105 - RNA, 21 nt, Artificial Sequence
  Synthetic
gaaggguguuuauauccacaa

SEQ ID NO: 439106 - RNA, 22 nt, Artificial Sequence
  Synthetic
ugaaggguguuuauauccacaa

SEQ ID NO: 439107 - RNA, 23 nt, Artificial Sequence
  Synthetic
gugaaggguguuuauauccacaa

SEQ ID NO: 439108 - RNA, 24 nt, Artificial Sequence
  Synthetic
ugugaaggguguuuauauccacaa

SEQ ID NO: 439109 - RNA, 18 nt, Artificial Sequence
  Synthetic
uccaaucucauuccacaa

SEQ ID NO: 439110 - RNA, 19 nt, Artificial Sequence
  Synthetic
auccaaucucauuccacaa

SEQ ID NO: 439111 - RNA, 20 nt, Artificial Sequence
  Synthetic
gauccaaucucauuccacaa

SEQ ID NO: 439112 - RNA, 21 nt, Artificial Sequence
  Synthetic
ugauccaaucucauuccacaa

SEQ ID NO: 439113 - RNA, 22 nt, Artificial Sequence
  Synthetic
uugauccaaucucauuccacaa

SEQ ID NO: 439114 - RNA, 23 nt, Artificial Sequence
  Synthetic
guugauccaaucucauuccacaa

SEQ ID NO: 439115 - RNA, 24 nt, Artificial Sequence
  Synthetic
uguugauccaaucucauuccacaa

SEQ ID NO: 439116 - RNA, 18 nt, Artificial Sequence
  Synthetic
cgucaaagucuuccacaa

SEQ ID NO: 439117 - RNA, 19 nt, Artificial Sequence
  Synthetic
ccgucaaagucuuccacaa

SEQ ID NO: 439118 - RNA, 20 nt, Artificial Sequence
  Synthetic
accgucaaagucuuccacaa

SEQ ID NO: 439119 - RNA, 21 nt, Artificial Sequence
  Synthetic
caccgucaaagucuuccacaa

SEQ ID NO: 439120 - RNA, 22 nt, Artificial Sequence
  Synthetic
ccaccgucaaagucuuccacaa

SEQ ID NO: 439121 - RNA, 23 nt, Artificial Sequence
  Synthetic
accaccgucaaagucuuccacaa

SEQ ID NO: 439122 - RNA, 24 nt, Artificial Sequence
  Synthetic
aaccaccgucaaagucuuccacaa

SEQ ID NO: 439123 - RNA, 18 nt, Artificial Sequence
  Synthetic
uuauuacaaagagcacaa

SEQ ID NO: 439124 - RNA, 19 nt, Artificial Sequence
  Synthetic
uuuauuacaaagagcacaa

SEQ ID NO: 439125 - RNA, 20 nt, Artificial Sequence
  Synthetic
guuuauuacaaagagcacaa

SEQ ID NO: 439126 - RNA, 21 nt, Artificial Sequence
  Synthetic
uguuuauuacaaagagcacaa

SEQ ID NO: 439127 - RNA, 22 nt, Artificial Sequence
  Synthetic
auguuuauuacaaagagcacaa

SEQ ID NO: 439128 - RNA, 23 nt, Artificial Sequence
  Synthetic
gauguuuauuacaaagagcacaa

SEQ ID NO: 439129 - RNA, 24 nt, Artificial Sequence
  Synthetic
ugauguuuauuacaaagagcacaa

SEQ ID NO: 439130 - RNA, 18 nt, Artificial Sequence
  Synthetic
cugaaagaaagagcacaa

SEQ ID NO: 439131 - RNA, 19 nt, Artificial Sequence
  Synthetic
ucugaaagaaagagcacaa

SEQ ID NO: 439132 - RNA, 20 nt, Artificial Sequence
  Synthetic
aucugaaagaaagagcacaa

SEQ ID NO: 439133 - RNA, 21 nt, Artificial Sequence
  Synthetic
gaucugaaagaaagagcacaa

SEQ ID NO: 439134 - RNA, 22 nt, Artificial Sequence
  Synthetic
ggaucugaaagaaagagcacaa

SEQ ID NO: 439135 - RNA, 23 nt, Artificial Sequence
  Synthetic
aggaucugaaagaaagagcacaa

SEQ ID NO: 439136 - RNA, 24 nt, Artificial Sequence
  Synthetic
gaggaucugaaagaaagagcacaa

SEQ ID NO: 439137 - RNA, 18 nt, Artificial Sequence
  Synthetic
uacuauuugauagcacaa

SEQ ID NO: 439138 - RNA, 19 nt, Artificial Sequence
  Synthetic
cuacuauuugauagcacaa

SEQ ID NO: 439139 - RNA, 20 nt, Artificial Sequence
  Synthetic
ccuacuauuugauagcacaa

SEQ ID NO: 439140 - RNA, 21 nt, Artificial Sequence
  Synthetic
accuacuauuugauagcacaa

SEQ ID NO: 439141 - RNA, 22 nt, Artificial Sequence
  Synthetic
gaccuacuauuugauagcacaa

SEQ ID NO: 439142 - RNA, 23 nt, Artificial Sequence
  Synthetic
agaccuacuauuugauagcacaa

SEQ ID NO: 439143 - RNA, 24 nt, Artificial Sequence
  Synthetic
aagaccuacuauuugauagcacaa

SEQ ID NO: 439144 - RNA, 18 nt, Artificial Sequence
  Synthetic
cagacucagguagcacaa

SEQ ID NO: 439145 - RNA, 19 nt, Artificial Sequence
  Synthetic
ucagacucagguagcacaa

SEQ ID NO: 439146 - RNA, 20 nt, Artificial Sequence
  Synthetic
cucagacucagguagcacaa

SEQ ID NO: 439147 - RNA, 21 nt, Artificial Sequence
  Synthetic
ccucagacucagguagcacaa

SEQ ID NO: 439148 - RNA, 22 nt, Artificial Sequence
  Synthetic
accucagacucagguagcacaa

SEQ ID NO: 439149 - RNA, 23 nt, Artificial Sequence
  Synthetic
caccucagacucagguagcacaa

SEQ ID NO: 439150 - RNA, 24 nt, Artificial Sequence
  Synthetic
acaccucagacucagguagcacaa

SEQ ID NO: 439151 - RNA, 18 nt, Artificial Sequence
  Synthetic
auauaguugguagcacaa

SEQ ID NO: 439152 - RNA, 19 nt, Artificial Sequence
  Synthetic
uauauaguugguagcacaa

SEQ ID NO: 439153 - RNA, 20 nt, Artificial Sequence
  Synthetic
uuauauaguugguagcacaa

SEQ ID NO: 439154 - RNA, 21 nt, Artificial Sequence
  Synthetic
cuuauauaguugguagcacaa

SEQ ID NO: 439155 - RNA, 22 nt, Artificial Sequence
  Synthetic
ccuuauauaguugguagcacaa

SEQ ID NO: 439156 - RNA, 23 nt, Artificial Sequence
  Synthetic
cccuuauauaguugguagcacaa

SEQ ID NO: 439157 - RNA, 24 nt, Artificial Sequence
  Synthetic
ucccuuauauaguugguagcacaa

SEQ ID NO: 439158 - RNA, 18 nt, Artificial Sequence
  Synthetic
gaauuaugaaaggcacaa

SEQ ID NO: 439159 - RNA, 19 nt, Artificial Sequence
  Synthetic
agaauuaugaaaggcacaa

SEQ ID NO: 439160 - RNA, 20 nt, Artificial Sequence
  Synthetic
cagaauuaugaaaggcacaa

SEQ ID NO: 439161 - RNA, 21 nt, Artificial Sequence
  Synthetic
ucagaauuaugaaaggcacaa

SEQ ID NO: 439162 - RNA, 22 nt, Artificial Sequence
  Synthetic
aucagaauuaugaaaggcacaa

SEQ ID NO: 439163 - RNA, 23 nt, Artificial Sequence
  Synthetic
uaucagaauuaugaaaggcacaa

SEQ ID NO: 439164 - RNA, 24 nt, Artificial Sequence
  Synthetic
uuaucagaauuaugaaaggcacaa

SEQ ID NO: 439165 - RNA, 18 nt, Artificial Sequence
  Synthetic
agcaaacacauggcacaa

SEQ ID NO: 439166 - RNA, 19 nt, Artificial Sequence
  Synthetic
aagcaaacacauggcacaa

SEQ ID NO: 439167 - RNA, 20 nt, Artificial Sequence
  Synthetic
caagcaaacacauggcacaa

SEQ ID NO: 439168 - RNA, 21 nt, Artificial Sequence
  Synthetic
ccaagcaaacacauggcacaa

SEQ ID NO: 439169 - RNA, 22 nt, Artificial Sequence
  Synthetic
uccaagcaaacacauggcacaa

SEQ ID NO: 439170 - RNA, 23 nt, Artificial Sequence
  Synthetic
uuccaagcaaacacauggcacaa

SEQ ID NO: 439171 - RNA, 24 nt, Artificial Sequence
  Synthetic
guuccaagcaaacacauggcacaa

SEQ ID NO: 439172 - RNA, 18 nt, Artificial Sequence
  Synthetic
cuauccuucucugcacaa

SEQ ID NO: 439173 - RNA, 19 nt, Artificial Sequence
  Synthetic
ccuauccuucucugcacaa

SEQ ID NO: 439174 - RNA, 20 nt, Artificial Sequence
  Synthetic
uccuauccuucucugcacaa

SEQ ID NO: 439175 - RNA, 21 nt, Artificial Sequence
  Synthetic
uuccuauccuucucugcacaa

SEQ ID NO: 439176 - RNA, 22 nt, Artificial Sequence
  Synthetic
auuccuauccuucucugcacaa

SEQ ID NO: 439177 - RNA, 23 nt, Artificial Sequence
  Synthetic
cauuccuauccuucucugcacaa

SEQ ID NO: 439178 - RNA, 24 nt, Artificial Sequence
  Synthetic
ccauuccuauccuucucugcacaa

SEQ ID NO: 439179 - RNA, 18 nt, Artificial Sequence
  Synthetic
aagugaaucugugcacaa

SEQ ID NO: 439180 - RNA, 19 nt, Artificial Sequence
  Synthetic
gaagugaaucugugcacaa

SEQ ID NO: 439181 - RNA, 20 nt, Artificial Sequence
  Synthetic
agaagugaaucugugcacaa

SEQ ID NO: 439182 - RNA, 21 nt, Artificial Sequence
  Synthetic
cagaagugaaucugugcacaa

SEQ ID NO: 439183 - RNA, 22 nt, Artificial Sequence
  Synthetic
acagaagugaaucugugcacaa

SEQ ID NO: 439184 - RNA, 23 nt, Artificial Sequence
  Synthetic
aacagaagugaaucugugcacaa

SEQ ID NO: 439185 - RNA, 24 nt, Artificial Sequence
  Synthetic
uaacagaagugaaucugugcacaa

SEQ ID NO: 439186 - RNA, 18 nt, Artificial Sequence
  Synthetic
uuuuagaaacuugcacaa

SEQ ID NO: 439187 - RNA, 19 nt, Artificial Sequence
  Synthetic
guuuuagaaacuugcacaa

SEQ ID NO: 439188 - RNA, 20 nt, Artificial Sequence
  Synthetic
aguuuuagaaacuugcacaa

SEQ ID NO: 439189 - RNA, 21 nt, Artificial Sequence
  Synthetic
uaguuuuagaaacuugcacaa

SEQ ID NO: 439190 - RNA, 22 nt, Artificial Sequence
  Synthetic
auaguuuuagaaacuugcacaa

SEQ ID NO: 439191 - RNA, 23 nt, Artificial Sequence
  Synthetic
aauaguuuuagaaacuugcacaa

SEQ ID NO: 439192 - RNA, 24 nt, Artificial Sequence
  Synthetic
aaauaguuuuagaaacuugcacaa

SEQ ID NO: 439193 - RNA, 18 nt, Artificial Sequence
  Synthetic
ucaaugauuaaaucacaa

SEQ ID NO: 439194 - RNA, 19 nt, Artificial Sequence
  Synthetic
uucaaugauuaaaucacaa

SEQ ID NO: 439195 - RNA, 20 nt, Artificial Sequence
  Synthetic
uuucaaugauuaaaucacaa

SEQ ID NO: 439196 - RNA, 21 nt, Artificial Sequence
  Synthetic
auuucaaugauuaaaucacaa

SEQ ID NO: 439197 - RNA, 22 nt, Artificial Sequence
  Synthetic
cauuucaaugauuaaaucacaa

SEQ ID NO: 439198 - RNA, 23 nt, Artificial Sequence
  Synthetic
gcauuucaaugauuaaaucacaa

SEQ ID NO: 439199 - RNA, 24 nt, Artificial Sequence
  Synthetic
ggcauuucaaugauuaaaucacaa

SEQ ID NO: 439200 - RNA, 18 nt, Artificial Sequence
  Synthetic
uaauuguuuuuaucacaa

SEQ ID NO: 439201 - RNA, 19 nt, Artificial Sequence
  Synthetic
uuaauuguuuuuaucacaa

SEQ ID NO: 439202 - RNA, 20 nt, Artificial Sequence
  Synthetic
cuuaauuguuuuuaucacaa

SEQ ID NO: 439203 - RNA, 21 nt, Artificial Sequence
  Synthetic
gcuuaauuguuuuuaucacaa

SEQ ID NO: 439204 - RNA, 22 nt, Artificial Sequence
  Synthetic
ggcuuaauuguuuuuaucacaa

SEQ ID NO: 439205 - RNA, 23 nt, Artificial Sequence
  Synthetic
gggcuuaauuguuuuuaucacaa

SEQ ID NO: 439206 - RNA, 24 nt, Artificial Sequence
  Synthetic
ugggcuuaauuguuuuuaucacaa

SEQ ID NO: 439207 - RNA, 18 nt, Artificial Sequence
  Synthetic
ccaaaguaaaccucacaa

SEQ ID NO: 439208 - RNA, 19 nt, Artificial Sequence
  Synthetic
uccaaaguaaaccucacaa

SEQ ID NO: 439209 - RNA, 20 nt, Artificial Sequence
  Synthetic
uuccaaaguaaaccucacaa

SEQ ID NO: 439210 - RNA, 21 nt, Artificial Sequence
  Synthetic
uuuccaaaguaaaccucacaa

SEQ ID NO: 439211 - RNA, 22 nt, Artificial Sequence
  Synthetic
auuuccaaaguaaaccucacaa

SEQ ID NO: 439212 - RNA, 23 nt, Artificial Sequence
  Synthetic
cauuuccaaaguaaaccucacaa

SEQ ID NO: 439213 - RNA, 24 nt, Artificial Sequence
  Synthetic
ucauuuccaaaguaaaccucacaa

SEQ ID NO: 439214 - RNA, 18 nt, Artificial Sequence
  Synthetic
ucugcagacaucucacaa

SEQ ID NO: 439215 - RNA, 19 nt, Artificial Sequence
  Synthetic
uucugcagacaucucacaa

SEQ ID NO: 439216 - RNA, 20 nt, Artificial Sequence
  Synthetic
guucugcagacaucucacaa

SEQ ID NO: 439217 - RNA, 21 nt, Artificial Sequence
  Synthetic
uguucugcagacaucucacaa

SEQ ID NO: 439218 - RNA, 22 nt, Artificial Sequence
  Synthetic
auguucugcagacaucucacaa

SEQ ID NO: 439219 - RNA, 23 nt, Artificial Sequence
  Synthetic
cauguucugcagacaucucacaa

SEQ ID NO: 439220 - RNA, 24 nt, Artificial Sequence
  Synthetic
ucauguucugcagacaucucacaa

SEQ ID NO: 439221 - RNA, 18 nt, Artificial Sequence
  Synthetic
auaaguggugggucacaa

SEQ ID NO: 439222 - RNA, 19 nt, Artificial Sequence
  Synthetic
aauaaguggugggucacaa

SEQ ID NO: 439223 - RNA, 20 nt, Artificial Sequence
  Synthetic
aaauaaguggugggucacaa

SEQ ID NO: 439224 - RNA, 21 nt, Artificial Sequence
  Synthetic
uaaauaaguggugggucacaa

SEQ ID NO: 439225 - RNA, 22 nt, Artificial Sequence
  Synthetic
uuaaauaaguggugggucacaa

SEQ ID NO: 439226 - RNA, 23 nt, Artificial Sequence
  Synthetic
auuaaauaaguggugggucacaa

SEQ ID NO: 439227 - RNA, 24 nt, Artificial Sequence
  Synthetic
aauuaaauaaguggugggucacaa

SEQ ID NO: 439228 - RNA, 18 nt, Artificial Sequence
  Synthetic
cuauuaucaaaaagacaa

SEQ ID NO: 439229 - RNA, 19 nt, Artificial Sequence
  Synthetic
acuauuaucaaaaagacaa

SEQ ID NO: 439230 - RNA, 20 nt, Artificial Sequence
  Synthetic
gacuauuaucaaaaagacaa

SEQ ID NO: 439231 - RNA, 21 nt, Artificial Sequence
  Synthetic
ugacuauuaucaaaaagacaa

SEQ ID NO: 439232 - RNA, 22 nt, Artificial Sequence
  Synthetic
augacuauuaucaaaaagacaa

SEQ ID NO: 439233 - RNA, 23 nt, Artificial Sequence
  Synthetic
aaugacuauuaucaaaaagacaa

SEQ ID NO: 439234 - RNA, 24 nt, Artificial Sequence
  Synthetic
gaaugacuauuaucaaaaagacaa

SEQ ID NO: 439235 - RNA, 18 nt, Artificial Sequence
  Synthetic
aauauuacagaaagacaa

SEQ ID NO: 439236 - RNA, 19 nt, Artificial Sequence
  Synthetic
gaauauuacagaaagacaa

SEQ ID NO: 439237 - RNA, 20 nt, Artificial Sequence
  Synthetic
ugaauauuacagaaagacaa

SEQ ID NO: 439238 - RNA, 21 nt, Artificial Sequence
  Synthetic
uugaauauuacagaaagacaa

SEQ ID NO: 439239 - RNA, 22 nt, Artificial Sequence
  Synthetic
uuugaauauuacagaaagacaa

SEQ ID NO: 439240 - RNA, 23 nt, Artificial Sequence
  Synthetic
uuuugaauauuacagaaagacaa

SEQ ID NO: 439241 - RNA, 24 nt, Artificial Sequence
  Synthetic
auuuugaauauuacagaaagacaa

SEQ ID NO: 439242 - RNA, 18 nt, Artificial Sequence
  Synthetic
uguuaauaggcaagacaa

SEQ ID NO: 439243 - RNA, 19 nt, Artificial Sequence
  Synthetic
auguuaauaggcaagacaa

SEQ ID NO: 439244 - RNA, 20 nt, Artificial Sequence
  Synthetic
aauguuaauaggcaagacaa

SEQ ID NO: 439245 - RNA, 21 nt, Artificial Sequence
  Synthetic
caauguuaauaggcaagacaa

SEQ ID NO: 439246 - RNA, 22 nt, Artificial Sequence
  Synthetic
ccaauguuaauaggcaagacaa

SEQ ID NO: 439247 - RNA, 23 nt, Artificial Sequence
  Synthetic
cccaauguuaauaggcaagacaa

SEQ ID NO: 439248 - RNA, 24 nt, Artificial Sequence
  Synthetic
gcccaauguuaauaggcaagacaa

SEQ ID NO: 439249 - RNA, 18 nt, Artificial Sequence
  Synthetic
aagaaaaguucaagacaa

SEQ ID NO: 439250 - RNA, 19 nt, Artificial Sequence
  Synthetic
aaagaaaaguucaagacaa

SEQ ID NO: 439251 - RNA, 20 nt, Artificial Sequence
  Synthetic
aaaagaaaaguucaagacaa

SEQ ID NO: 439252 - RNA, 21 nt, Artificial Sequence
  Synthetic
gaaaagaaaaguucaagacaa

SEQ ID NO: 439253 - RNA, 22 nt, Artificial Sequence
  Synthetic
ugaaaagaaaaguucaagacaa

SEQ ID NO: 439254 - RNA, 23 nt, Artificial Sequence
  Synthetic
uugaaaagaaaaguucaagacaa

SEQ ID NO: 439255 - RNA, 24 nt, Artificial Sequence
  Synthetic
uuugaaaagaaaaguucaagacaa

SEQ ID NO: 439256 - RNA, 18 nt, Artificial Sequence
  Synthetic
aauuaauguucaagacaa

SEQ ID NO: 439257 - RNA, 19 nt, Artificial Sequence
  Synthetic
uaauuaauguucaagacaa

SEQ ID NO: 439258 - RNA, 20 nt, Artificial Sequence
  Synthetic
uuaauuaauguucaagacaa

SEQ ID NO: 439259 - RNA, 21 nt, Artificial Sequence
  Synthetic
uuuaauuaauguucaagacaa

SEQ ID NO: 439260 - RNA, 22 nt, Artificial Sequence
  Synthetic
uuuuaauuaauguucaagacaa

SEQ ID NO: 439261 - RNA, 23 nt, Artificial Sequence
  Synthetic
guuuuaauuaauguucaagacaa

SEQ ID NO: 439262 - RNA, 24 nt, Artificial Sequence
  Synthetic
aguuuuaauuaauguucaagacaa

SEQ ID NO: 439263 - RNA, 18 nt, Artificial Sequence
  Synthetic
gcccagugcagaagacaa

SEQ ID NO: 439264 - RNA, 19 nt, Artificial Sequence
  Synthetic
agcccagugcagaagacaa

SEQ ID NO: 439265 - RNA, 20 nt, Artificial Sequence
  Synthetic
cagcccagugcagaagacaa

SEQ ID NO: 439266 - RNA, 21 nt, Artificial Sequence
  Synthetic
gcagcccagugcagaagacaa

SEQ ID NO: 439267 - RNA, 22 nt, Artificial Sequence
  Synthetic
ggcagcccagugcagaagacaa

SEQ ID NO: 439268 - RNA, 23 nt, Artificial Sequence
  Synthetic
aggcagcccagugcagaagacaa

SEQ ID NO: 439269 - RNA, 24 nt, Artificial Sequence
  Synthetic
uaggcagcccagugcagaagacaa

SEQ ID NO: 439270 - RNA, 18 nt, Artificial Sequence
  Synthetic
cacagccagagaagacaa

SEQ ID NO: 439271 - RNA, 19 nt, Artificial Sequence
  Synthetic
acacagccagagaagacaa

SEQ ID NO: 439272 - RNA, 20 nt, Artificial Sequence
  Synthetic
uacacagccagagaagacaa

SEQ ID NO: 439273 - RNA, 21 nt, Artificial Sequence
  Synthetic
auacacagccagagaagacaa

SEQ ID NO: 439274 - RNA, 22 nt, Artificial Sequence
  Synthetic
aauacacagccagagaagacaa

SEQ ID NO: 439275 - RNA, 23 nt, Artificial Sequence
  Synthetic
aaauacacagccagagaagacaa

SEQ ID NO: 439276 - RNA, 24 nt, Artificial Sequence
  Synthetic
aaaauacacagccagagaagacaa

SEQ ID NO: 439277 - RNA, 18 nt, Artificial Sequence
  Synthetic
gacacauggagaagacaa

SEQ ID NO: 439278 - RNA, 19 nt, Artificial Sequence
  Synthetic
agacacauggagaagacaa

SEQ ID NO: 439279 - RNA, 20 nt, Artificial Sequence
  Synthetic
gagacacauggagaagacaa

SEQ ID NO: 439280 - RNA, 21 nt, Artificial Sequence
  Synthetic
ggagacacauggagaagacaa

SEQ ID NO: 439281 - RNA, 22 nt, Artificial Sequence
  Synthetic
aggagacacauggagaagacaa

SEQ ID NO: 439282 - RNA, 23 nt, Artificial Sequence
  Synthetic
aaggagacacauggagaagacaa

SEQ ID NO: 439283 - RNA, 24 nt, Artificial Sequence
  Synthetic
aaaggagacacauggagaagacaa

SEQ ID NO: 439284 - RNA, 18 nt, Artificial Sequence
  Synthetic
uguagaaugagaagacaa

SEQ ID NO: 439285 - RNA, 19 nt, Artificial Sequence
  Synthetic
auguagaaugagaagacaa

SEQ ID NO: 439286 - RNA, 20 nt, Artificial Sequence
  Synthetic
cauguagaaugagaagacaa

SEQ ID NO: 439287 - RNA, 21 nt, Artificial Sequence
  Synthetic
ucauguagaaugagaagacaa

SEQ ID NO: 439288 - RNA, 22 nt, Artificial Sequence
  Synthetic
cucauguagaaugagaagacaa

SEQ ID NO: 439289 - RNA, 23 nt, Artificial Sequence
  Synthetic
ucucauguagaaugagaagacaa

SEQ ID NO: 439290 - RNA, 24 nt, Artificial Sequence
  Synthetic
uucucauguagaaugagaagacaa

SEQ ID NO: 439291 - RNA, 18 nt, Artificial Sequence
  Synthetic
uguguggagcuaagacaa

SEQ ID NO: 439292 - RNA, 19 nt, Artificial Sequence
  Synthetic
cuguguggagcuaagacaa

SEQ ID NO: 439293 - RNA, 20 nt, Artificial Sequence
  Synthetic
acuguguggagcuaagacaa

SEQ ID NO: 439294 - RNA, 21 nt, Artificial Sequence
  Synthetic
gacuguguggagcuaagacaa

SEQ ID NO: 439295 - RNA, 22 nt, Artificial Sequence
  Synthetic
ggacuguguggagcuaagacaa

SEQ ID NO: 439296 - RNA, 23 nt, Artificial Sequence
  Synthetic
gggacuguguggagcuaagacaa

SEQ ID NO: 439297 - RNA, 24 nt, Artificial Sequence
  Synthetic
agggacuguguggagcuaagacaa

SEQ ID NO: 439298 - RNA, 18 nt, Artificial Sequence
  Synthetic
gaauuuuggcacagacaa

SEQ ID NO: 439299 - RNA, 19 nt, Artificial Sequence
  Synthetic
agaauuuuggcacagacaa

SEQ ID NO: 439300 - RNA, 20 nt, Artificial Sequence
  Synthetic
aagaauuuuggcacagacaa

SEQ ID NO: 439301 - RNA, 21 nt, Artificial Sequence
  Synthetic
gaagaauuuuggcacagacaa

SEQ ID NO: 439302 - RNA, 22 nt, Artificial Sequence
  Synthetic
ugaagaauuuuggcacagacaa

SEQ ID NO: 439303 - RNA, 23 nt, Artificial Sequence
  Synthetic
augaagaauuuuggcacagacaa

SEQ ID NO: 439304 - RNA, 24 nt, Artificial Sequence
  Synthetic
caugaagaauuuuggcacagacaa

SEQ ID NO: 439305 - RNA, 18 nt, Artificial Sequence
  Synthetic
auacauaauuucagacaa

SEQ ID NO: 439306 - RNA, 19 nt, Artificial Sequence
  Synthetic
cauacauaauuucagacaa

SEQ ID NO: 439307 - RNA, 20 nt, Artificial Sequence
  Synthetic
acauacauaauuucagacaa

SEQ ID NO: 439308 - RNA, 21 nt, Artificial Sequence
  Synthetic
aacauacauaauuucagacaa

SEQ ID NO: 439309 - RNA, 22 nt, Artificial Sequence
  Synthetic
aaacauacauaauuucagacaa

SEQ ID NO: 439310 - RNA, 23 nt, Artificial Sequence
  Synthetic
aaaacauacauaauuucagacaa

SEQ ID NO: 439311 - RNA, 24 nt, Artificial Sequence
  Synthetic
caaaacauacauaauuucagacaa

SEQ ID NO: 439312 - RNA, 18 nt, Artificial Sequence
  Synthetic
gaaaacccacagagacaa

SEQ ID NO: 439313 - RNA, 19 nt, Artificial Sequence
  Synthetic
agaaaacccacagagacaa

SEQ ID NO: 439314 - RNA, 20 nt, Artificial Sequence
  Synthetic
aagaaaacccacagagacaa

SEQ ID NO: 439315 - RNA, 21 nt, Artificial Sequence
  Synthetic
gaagaaaacccacagagacaa

SEQ ID NO: 439316 - RNA, 22 nt, Artificial Sequence
  Synthetic
agaagaaaacccacagagacaa

SEQ ID NO: 439317 - RNA, 23 nt, Artificial Sequence
  Synthetic
uagaagaaaacccacagagacaa

SEQ ID NO: 439318 - RNA, 24 nt, Artificial Sequence
  Synthetic
cuagaagaaaacccacagagacaa

SEQ ID NO: 439319 - RNA, 18 nt, Artificial Sequence
  Synthetic
uugguuuugaugagacaa

SEQ ID NO: 439320 - RNA, 19 nt, Artificial Sequence
  Synthetic
auugguuuugaugagacaa

SEQ ID NO: 439321 - RNA, 20 nt, Artificial Sequence
  Synthetic
aauugguuuugaugagacaa

SEQ ID NO: 439322 - RNA, 21 nt, Artificial Sequence
  Synthetic
uaauugguuuugaugagacaa

SEQ ID NO: 439323 - RNA, 22 nt, Artificial Sequence
  Synthetic
auaauugguuuugaugagacaa

SEQ ID NO: 439324 - RNA, 23 nt, Artificial Sequence
  Synthetic
uauaauugguuuugaugagacaa

SEQ ID NO: 439325 - RNA, 24 nt, Artificial Sequence
  Synthetic
cuauaauugguuuugaugagacaa

SEQ ID NO: 439326 - RNA, 18 nt, Artificial Sequence
  Synthetic
uauagcuuuaugagacaa

SEQ ID NO: 439327 - RNA, 19 nt, Artificial Sequence
  Synthetic
auauagcuuuaugagacaa

SEQ ID NO: 439328 - RNA, 20 nt, Artificial Sequence
  Synthetic
aauauagcuuuaugagacaa

SEQ ID NO: 439329 - RNA, 21 nt, Artificial Sequence
  Synthetic
gaauauagcuuuaugagacaa

SEQ ID NO: 439330 - RNA, 22 nt, Artificial Sequence
  Synthetic
ugaauauagcuuuaugagacaa

SEQ ID NO: 439331 - RNA, 23 nt, Artificial Sequence
  Synthetic
augaauauagcuuuaugagacaa

SEQ ID NO: 439332 - RNA, 24 nt, Artificial Sequence
  Synthetic
caugaauauagcuuuaugagacaa

SEQ ID NO: 439333 - RNA, 18 nt, Artificial Sequence
  Synthetic
gauaaucacuugagacaa

SEQ ID NO: 439334 - RNA, 19 nt, Artificial Sequence
  Synthetic
agauaaucacuugagacaa

SEQ ID NO: 439335 - RNA, 20 nt, Artificial Sequence
  Synthetic
gagauaaucacuugagacaa

SEQ ID NO: 439336 - RNA, 21 nt, Artificial Sequence
  Synthetic
ggagauaaucacuugagacaa

SEQ ID NO: 439337 - RNA, 22 nt, Artificial Sequence
  Synthetic
uggagauaaucacuugagacaa

SEQ ID NO: 439338 - RNA, 23 nt, Artificial Sequence
  Synthetic
guggagauaaucacuugagacaa

SEQ ID NO: 439339 - RNA, 24 nt, Artificial Sequence
  Synthetic
aguggagauaaucacuugagacaa

SEQ ID NO: 439340 - RNA, 18 nt, Artificial Sequence
  Synthetic
ccuaugggccauagacaa

SEQ ID NO: 439341 - RNA, 19 nt, Artificial Sequence
  Synthetic
cccuaugggccauagacaa

SEQ ID NO: 439342 - RNA, 20 nt, Artificial Sequence
  Synthetic
gcccuaugggccauagacaa

SEQ ID NO: 439343 - RNA, 21 nt, Artificial Sequence
  Synthetic
agcccuaugggccauagacaa

SEQ ID NO: 439344 - RNA, 22 nt, Artificial Sequence
  Synthetic
gagcccuaugggccauagacaa

SEQ ID NO: 439345 - RNA, 23 nt, Artificial Sequence
  Synthetic
agagcccuaugggccauagacaa

SEQ ID NO: 439346 - RNA, 24 nt, Artificial Sequence
  Synthetic
cagagcccuaugggccauagacaa

SEQ ID NO: 439347 - RNA, 18 nt, Artificial Sequence
  Synthetic
aaugacaucacuagacaa

SEQ ID NO: 439348 - RNA, 19 nt, Artificial Sequence
  Synthetic
uaaugacaucacuagacaa

SEQ ID NO: 439349 - RNA, 20 nt, Artificial Sequence
  Synthetic
auaaugacaucacuagacaa

SEQ ID NO: 439350 - RNA, 21 nt, Artificial Sequence
  Synthetic
uauaaugacaucacuagacaa

SEQ ID NO: 439351 - RNA, 22 nt, Artificial Sequence
  Synthetic
auauaaugacaucacuagacaa

SEQ ID NO: 439352 - RNA, 23 nt, Artificial Sequence
  Synthetic
aauauaaugacaucacuagacaa

SEQ ID NO: 439353 - RNA, 24 nt, Artificial Sequence
  Synthetic
aaauauaaugacaucacuagacaa

SEQ ID NO: 439354 - RNA, 18 nt, Artificial Sequence
  Synthetic
uuucucuuaucuagacaa

SEQ ID NO: 439355 - RNA, 19 nt, Artificial Sequence
  Synthetic
uuuucucuuaucuagacaa

SEQ ID NO: 439356 - RNA, 20 nt, Artificial Sequence
  Synthetic
uuuuucucuuaucuagacaa

SEQ ID NO: 439357 - RNA, 21 nt, Artificial Sequence
  Synthetic
uuuuuucucuuaucuagacaa

SEQ ID NO: 439358 - RNA, 22 nt, Artificial Sequence
  Synthetic
cuuuuuucucuuaucuagacaa

SEQ ID NO: 439359 - RNA, 23 nt, Artificial Sequence
  Synthetic
ccuuuuuucucuuaucuagacaa

SEQ ID NO: 439360 - RNA, 24 nt, Artificial Sequence
  Synthetic
accuuuuuucucuuaucuagacaa

SEQ ID NO: 439361 - RNA, 18 nt, Artificial Sequence
  Synthetic
uauagaaagaguagacaa

SEQ ID NO: 439362 - RNA, 19 nt, Artificial Sequence
  Synthetic
uuauagaaagaguagacaa

SEQ ID NO: 439363 - RNA, 20 nt, Artificial Sequence
  Synthetic
guuauagaaagaguagacaa

SEQ ID NO: 439364 - RNA, 21 nt, Artificial Sequence
  Synthetic
uguuauagaaagaguagacaa

SEQ ID NO: 439365 - RNA, 22 nt, Artificial Sequence
  Synthetic
uuguuauagaaagaguagacaa

SEQ ID NO: 439366 - RNA, 23 nt, Artificial Sequence
  Synthetic
auuguuauagaaagaguagacaa

SEQ ID NO: 439367 - RNA, 24 nt, Artificial Sequence
  Synthetic
aauuguuauagaaagaguagacaa

SEQ ID NO: 439368 - RNA, 18 nt, Artificial Sequence
  Synthetic
guuagggggaguagacaa

SEQ ID NO: 439369 - RNA, 19 nt, Artificial Sequence
  Synthetic
uguuagggggaguagacaa

SEQ ID NO: 439370 - RNA, 20 nt, Artificial Sequence
  Synthetic
guguuagggggaguagacaa

SEQ ID NO: 439371 - RNA, 21 nt, Artificial Sequence
  Synthetic
uguguuagggggaguagacaa

SEQ ID NO: 439372 - RNA, 22 nt, Artificial Sequence
  Synthetic
guguguuagggggaguagacaa

SEQ ID NO: 439373 - RNA, 23 nt, Artificial Sequence
  Synthetic
aguguguuagggggaguagacaa

SEQ ID NO: 439374 - RNA, 24 nt, Artificial Sequence
  Synthetic
aaguguguuagggggaguagacaa

SEQ ID NO: 439375 - RNA, 18 nt, Artificial Sequence
  Synthetic
uuuuagccacguagacaa

SEQ ID NO: 439376 - RNA, 19 nt, Artificial Sequence
  Synthetic
guuuuagccacguagacaa

SEQ ID NO: 439377 - RNA, 20 nt, Artificial Sequence
  Synthetic
uguuuuagccacguagacaa

SEQ ID NO: 439378 - RNA, 21 nt, Artificial Sequence
  Synthetic
uuguuuuagccacguagacaa

SEQ ID NO: 439379 - RNA, 22 nt, Artificial Sequence
  Synthetic
uuuguuuuagccacguagacaa

SEQ ID NO: 439380 - RNA, 23 nt, Artificial Sequence
  Synthetic
cuuuguuuuagccacguagacaa

SEQ ID NO: 439381 - RNA, 24 nt, Artificial Sequence
  Synthetic
gcuuuguuuuagccacguagacaa

SEQ ID NO: 439382 - RNA, 18 nt, Artificial Sequence
  Synthetic
cuggucaaauguagacaa

SEQ ID NO: 439383 - RNA, 19 nt, Artificial Sequence
  Synthetic
ucuggucaaauguagacaa

SEQ ID NO: 439384 - RNA, 20 nt, Artificial Sequence
  Synthetic
aucuggucaaauguagacaa

SEQ ID NO: 439385 - RNA, 21 nt, Artificial Sequence
  Synthetic
gaucuggucaaauguagacaa

SEQ ID NO: 439386 - RNA, 22 nt, Artificial Sequence
  Synthetic
agaucuggucaaauguagacaa

SEQ ID NO: 439387 - RNA, 23 nt, Artificial Sequence
  Synthetic
aagaucuggucaaauguagacaa

SEQ ID NO: 439388 - RNA, 24 nt, Artificial Sequence
  Synthetic
aaagaucuggucaaauguagacaa

SEQ ID NO: 439389 - RNA, 18 nt, Artificial Sequence
  Synthetic
ccuggaggcauuagacaa

SEQ ID NO: 439390 - RNA, 19 nt, Artificial Sequence
  Synthetic
uccuggaggcauuagacaa

SEQ ID NO: 439391 - RNA, 20 nt, Artificial Sequence
  Synthetic
cuccuggaggcauuagacaa

SEQ ID NO: 439392 - RNA, 21 nt, Artificial Sequence
  Synthetic
gcuccuggaggcauuagacaa

SEQ ID NO: 439393 - RNA, 22 nt, Artificial Sequence
  Synthetic
ggcuccuggaggcauuagacaa

SEQ ID NO: 439394 - RNA, 23 nt, Artificial Sequence
  Synthetic
uggcuccuggaggcauuagacaa

SEQ ID NO: 439395 - RNA, 24 nt, Artificial Sequence
  Synthetic
auggcuccuggaggcauuagacaa

SEQ ID NO: 439396 - RNA, 18 nt, Artificial Sequence
  Synthetic
ucucaauaauuuagacaa

SEQ ID NO: 439397 - RNA, 19 nt, Artificial Sequence
  Synthetic
aucucaauaauuuagacaa

SEQ ID NO: 439398 - RNA, 20 nt, Artificial Sequence
  Synthetic
uaucucaauaauuuagacaa

SEQ ID NO: 439399 - RNA, 21 nt, Artificial Sequence
  Synthetic
uuaucucaauaauuuagacaa

SEQ ID NO: 439400 - RNA, 22 nt, Artificial Sequence
  Synthetic
uuuaucucaauaauuuagacaa

SEQ ID NO: 439401 - RNA, 23 nt, Artificial Sequence
  Synthetic
uuuuaucucaauaauuuagacaa

SEQ ID NO: 439402 - RNA, 24 nt, Artificial Sequence
  Synthetic
auuuuaucucaauaauuuagacaa

SEQ ID NO: 439403 - RNA, 18 nt, Artificial Sequence
  Synthetic
accagugccagacgacaa

SEQ ID NO: 439404 - RNA, 19 nt, Artificial Sequence
  Synthetic
caccagugccagacgacaa

SEQ ID NO: 439405 - RNA, 20 nt, Artificial Sequence
  Synthetic
gcaccagugccagacgacaa

SEQ ID NO: 439406 - RNA, 21 nt, Artificial Sequence
  Synthetic
agcaccagugccagacgacaa

SEQ ID NO: 439407 - RNA, 22 nt, Artificial Sequence
  Synthetic
cagcaccagugccagacgacaa

SEQ ID NO: 439408 - RNA, 23 nt, Artificial Sequence
  Synthetic
acagcaccagugccagacgacaa

SEQ ID NO: 439409 - RNA, 24 nt, Artificial Sequence
  Synthetic
cacagcaccagugccagacgacaa

SEQ ID NO: 439410 - RNA, 18 nt, Artificial Sequence
  Synthetic
gcuagcucuggacgacaa

SEQ ID NO: 439411 - RNA, 19 nt, Artificial Sequence
  Synthetic
ugcuagcucuggacgacaa

SEQ ID NO: 439412 - RNA, 20 nt, Artificial Sequence
  Synthetic
augcuagcucuggacgacaa

SEQ ID NO: 439413 - RNA, 21 nt, Artificial Sequence
  Synthetic
uaugcuagcucuggacgacaa

SEQ ID NO: 439414 - RNA, 22 nt, Artificial Sequence
  Synthetic
auaugcuagcucuggacgacaa

SEQ ID NO: 439415 - RNA, 23 nt, Artificial Sequence
  Synthetic
cauaugcuagcucuggacgacaa

SEQ ID NO: 439416 - RNA, 24 nt, Artificial Sequence
  Synthetic
acauaugcuagcucuggacgacaa

SEQ ID NO: 439417 - RNA, 18 nt, Artificial Sequence
  Synthetic
uucaaugaaaaucgacaa

SEQ ID NO: 439418 - RNA, 19 nt, Artificial Sequence
  Synthetic
auucaaugaaaaucgacaa

SEQ ID NO: 439419 - RNA, 20 nt, Artificial Sequence
  Synthetic
gauucaaugaaaaucgacaa

SEQ ID NO: 439420 - RNA, 21 nt, Artificial Sequence
  Synthetic
ggauucaaugaaaaucgacaa

SEQ ID NO: 439421 - RNA, 22 nt, Artificial Sequence
  Synthetic
gggauucaaugaaaaucgacaa

SEQ ID NO: 439422 - RNA, 23 nt, Artificial Sequence
  Synthetic
ggggauucaaugaaaaucgacaa

SEQ ID NO: 439423 - RNA, 24 nt, Artificial Sequence
  Synthetic
uggggauucaaugaaaaucgacaa

SEQ ID NO: 439424 - RNA, 18 nt, Artificial Sequence
  Synthetic
caaucuuaaaaucgacaa

SEQ ID NO: 439425 - RNA, 19 nt, Artificial Sequence
  Synthetic
acaaucuuaaaaucgacaa

SEQ ID NO: 439426 - RNA, 20 nt, Artificial Sequence
  Synthetic
cacaaucuuaaaaucgacaa

SEQ ID NO: 439427 - RNA, 21 nt, Artificial Sequence
  Synthetic
ccacaaucuuaaaaucgacaa

SEQ ID NO: 439428 - RNA, 22 nt, Artificial Sequence
  Synthetic
accacaaucuuaaaaucgacaa

SEQ ID NO: 439429 - RNA, 23 nt, Artificial Sequence
  Synthetic
gaccacaaucuuaaaaucgacaa

SEQ ID NO: 439430 - RNA, 24 nt, Artificial Sequence
  Synthetic
agaccacaaucuuaaaaucgacaa

SEQ ID NO: 439431 - RNA, 18 nt, Artificial Sequence
  Synthetic
auuuuaucacaaggacaa

SEQ ID NO: 439432 - RNA, 19 nt, Artificial Sequence
  Synthetic
aauuuuaucacaaggacaa

SEQ ID NO: 439433 - RNA, 20 nt, Artificial Sequence
  Synthetic
gaauuuuaucacaaggacaa

SEQ ID NO: 439434 - RNA, 21 nt, Artificial Sequence
  Synthetic
ugaauuuuaucacaaggacaa

SEQ ID NO: 439435 - RNA, 22 nt, Artificial Sequence
  Synthetic
uugaauuuuaucacaaggacaa

SEQ ID NO: 439436 - RNA, 23 nt, Artificial Sequence
  Synthetic
uuugaauuuuaucacaaggacaa

SEQ ID NO: 439437 - RNA, 24 nt, Artificial Sequence
  Synthetic
uuuugaauuuuaucacaaggacaa

SEQ ID NO: 439438 - RNA, 18 nt, Artificial Sequence
  Synthetic
ggacuaagacaaggacaa

SEQ ID NO: 439439 - RNA, 19 nt, Artificial Sequence
  Synthetic
aggacuaagacaaggacaa

SEQ ID NO: 439440 - RNA, 20 nt, Artificial Sequence
  Synthetic
aaggacuaagacaaggacaa

SEQ ID NO: 439441 - RNA, 21 nt, Artificial Sequence
  Synthetic
aaaggacuaagacaaggacaa

SEQ ID NO: 439442 - RNA, 22 nt, Artificial Sequence
  Synthetic
aaaaggacuaagacaaggacaa

SEQ ID NO: 439443 - RNA, 23 nt, Artificial Sequence
  Synthetic
gaaaaggacuaagacaaggacaa

SEQ ID NO: 439444 - RNA, 24 nt, Artificial Sequence
  Synthetic
cgaaaaggacuaagacaaggacaa

SEQ ID NO: 439445 - RNA, 18 nt, Artificial Sequence
  Synthetic
gauaacaaggcaggacaa

SEQ ID NO: 439446 - RNA, 19 nt, Artificial Sequence
  Synthetic
agauaacaaggcaggacaa

SEQ ID NO: 439447 - RNA, 20 nt, Artificial Sequence
  Synthetic
aagauaacaaggcaggacaa

SEQ ID NO: 439448 - RNA, 21 nt, Artificial Sequence
  Synthetic
caagauaacaaggcaggacaa

SEQ ID NO: 439449 - RNA, 22 nt, Artificial Sequence
  Synthetic
gcaagauaacaaggcaggacaa

SEQ ID NO: 439450 - RNA, 23 nt, Artificial Sequence
  Synthetic
ggcaagauaacaaggcaggacaa

SEQ ID NO: 439451 - RNA, 24 nt, Artificial Sequence
  Synthetic
uggcaagauaacaaggcaggacaa

SEQ ID NO: 439452 - RNA, 18 nt, Artificial Sequence
  Synthetic
aaaagccaaaacggacaa

SEQ ID NO: 439453 - RNA, 19 nt, Artificial Sequence
  Synthetic
caaaagccaaaacggacaa

SEQ ID NO: 439454 - RNA, 20 nt, Artificial Sequence
  Synthetic
acaaaagccaaaacggacaa

SEQ ID NO: 439455 - RNA, 21 nt, Artificial Sequence
  Synthetic
aacaaaagccaaaacggacaa

SEQ ID NO: 439456 - RNA, 22 nt, Artificial Sequence
  Synthetic
caacaaaagccaaaacggacaa

SEQ ID NO: 439457 - RNA, 23 nt, Artificial Sequence
  Synthetic
gcaacaaaagccaaaacggacaa

SEQ ID NO: 439458 - RNA, 24 nt, Artificial Sequence
  Synthetic
ggcaacaaaagccaaaacggacaa

SEQ ID NO: 439459 - RNA, 18 nt, Artificial Sequence
  Synthetic
uugugguaauagggacaa

SEQ ID NO: 439460 - RNA, 19 nt, Artificial Sequence
  Synthetic
auugugguaauagggacaa

SEQ ID NO: 439461 - RNA, 20 nt, Artificial Sequence
  Synthetic
uauugugguaauagggacaa

SEQ ID NO: 439462 - RNA, 21 nt, Artificial Sequence
  Synthetic
auauugugguaauagggacaa

SEQ ID NO: 439463 - RNA, 22 nt, Artificial Sequence
  Synthetic
cauauugugguaauagggacaa

SEQ ID NO: 439464 - RNA, 23 nt, Artificial Sequence
  Synthetic
acauauugugguaauagggacaa

SEQ ID NO: 439465 - RNA, 24 nt, Artificial Sequence
  Synthetic
cacauauugugguaauagggacaa

SEQ ID NO: 439466 - RNA, 18 nt, Artificial Sequence
  Synthetic
aguagggagaggggacaa

SEQ ID NO: 439467 - RNA, 19 nt, Artificial Sequence
  Synthetic
gaguagggagaggggacaa

SEQ ID NO: 439468 - RNA, 20 nt, Artificial Sequence
  Synthetic
ggaguagggagaggggacaa

SEQ ID NO: 439469 - RNA, 21 nt, Artificial Sequence
  Synthetic
aggaguagggagaggggacaa

SEQ ID NO: 439470 - RNA, 22 nt, Artificial Sequence
  Synthetic
uaggaguagggagaggggacaa

SEQ ID NO: 439471 - RNA, 23 nt, Artificial Sequence
  Synthetic
auaggaguagggagaggggacaa

SEQ ID NO: 439472 - RNA, 24 nt, Artificial Sequence
  Synthetic
aauaggaguagggagaggggacaa

SEQ ID NO: 439473 - RNA, 18 nt, Artificial Sequence
  Synthetic
aauguuuuugggggacaa

SEQ ID NO: 439474 - RNA, 19 nt, Artificial Sequence
  Synthetic
uaauguuuuugggggacaa

SEQ ID NO: 439475 - RNA, 20 nt, Artificial Sequence
  Synthetic
auaauguuuuugggggacaa

SEQ ID NO: 439476 - RNA, 21 nt, Artificial Sequence
  Synthetic
aauaauguuuuugggggacaa

SEQ ID NO: 439477 - RNA, 22 nt, Artificial Sequence
  Synthetic
aaauaauguuuuugggggacaa

SEQ ID NO: 439478 - RNA, 23 nt, Artificial Sequence
  Synthetic
aaaauaauguuuuugggggacaa

SEQ ID NO: 439479 - RNA, 24 nt, Artificial Sequence
  Synthetic
uaaaauaauguuuuugggggacaa

SEQ ID NO: 439480 - RNA, 18 nt, Artificial Sequence
  Synthetic
aaggugagccugggacaa

SEQ ID NO: 439481 - RNA, 19 nt, Artificial Sequence
  Synthetic
caaggugagccugggacaa

SEQ ID NO: 439482 - RNA, 20 nt, Artificial Sequence
  Synthetic
ccaaggugagccugggacaa

SEQ ID NO: 439483 - RNA, 21 nt, Artificial Sequence
  Synthetic
uccaaggugagccugggacaa

SEQ ID NO: 439484 - RNA, 22 nt, Artificial Sequence
  Synthetic
guccaaggugagccugggacaa

SEQ ID NO: 439485 - RNA, 23 nt, Artificial Sequence
  Synthetic
aguccaaggugagccugggacaa

SEQ ID NO: 439486 - RNA, 24 nt, Artificial Sequence
  Synthetic
aaguccaaggugagccugggacaa

SEQ ID NO: 439487 - RNA, 18 nt, Artificial Sequence
  Synthetic
acaugccaugcuggacaa

SEQ ID NO: 439488 - RNA, 19 nt, Artificial Sequence
  Synthetic
aacaugccaugcuggacaa

SEQ ID NO: 439489 - RNA, 20 nt, Artificial Sequence
  Synthetic
aaacaugccaugcuggacaa

SEQ ID NO: 439490 - RNA, 21 nt, Artificial Sequence
  Synthetic
uaaacaugccaugcuggacaa

SEQ ID NO: 439491 - RNA, 22 nt, Artificial Sequence
  Synthetic
uuaaacaugccaugcuggacaa

SEQ ID NO: 439492 - RNA, 23 nt, Artificial Sequence
  Synthetic
cuuaaacaugccaugcuggacaa

SEQ ID NO: 439493 - RNA, 24 nt, Artificial Sequence
  Synthetic
ucuuaaacaugccaugcuggacaa

SEQ ID NO: 439494 - RNA, 18 nt, Artificial Sequence
  Synthetic
ugcaucacuguuggacaa

SEQ ID NO: 439495 - RNA, 19 nt, Artificial Sequence
  Synthetic
augcaucacuguuggacaa

SEQ ID NO: 439496 - RNA, 20 nt, Artificial Sequence
  Synthetic
aaugcaucacuguuggacaa

SEQ ID NO: 439497 - RNA, 21 nt, Artificial Sequence
  Synthetic
uaaugcaucacuguuggacaa

SEQ ID NO: 439498 - RNA, 22 nt, Artificial Sequence
  Synthetic
auaaugcaucacuguuggacaa

SEQ ID NO: 439499 - RNA, 23 nt, Artificial Sequence
  Synthetic
cauaaugcaucacuguuggacaa

SEQ ID NO: 439500 - RNA, 24 nt, Artificial Sequence
  Synthetic
ucauaaugcaucacuguuggacaa

SEQ ID NO: 439501 - RNA, 18 nt, Artificial Sequence
  Synthetic
aauuaaaacaaaugacaa

SEQ ID NO: 439502 - RNA, 19 nt, Artificial Sequence
  Synthetic
aaauuaaaacaaaugacaa

SEQ ID NO: 439503 - RNA, 20 nt, Artificial Sequence
  Synthetic
aaaauuaaaacaaaugacaa

SEQ ID NO: 439504 - RNA, 21 nt, Artificial Sequence
  Synthetic
caaaauuaaaacaaaugacaa

SEQ ID NO: 439505 - RNA, 22 nt, Artificial Sequence
  Synthetic
ucaaaauuaaaacaaaugacaa

SEQ ID NO: 439506 - RNA, 23 nt, Artificial Sequence
  Synthetic
aucaaaauuaaaacaaaugacaa

SEQ ID NO: 439507 - RNA, 24 nt, Artificial Sequence
  Synthetic
aaucaaaauuaaaacaaaugacaa

SEQ ID NO: 439508 - RNA, 18 nt, Artificial Sequence
  Synthetic
uaauauaugaccugacaa

SEQ ID NO: 439509 - RNA, 19 nt, Artificial Sequence
  Synthetic
auaauauaugaccugacaa

SEQ ID NO: 439510 - RNA, 20 nt, Artificial Sequence
  Synthetic
cauaauauaugaccugacaa

SEQ ID NO: 439511 - RNA, 21 nt, Artificial Sequence
  Synthetic
gcauaauauaugaccugacaa

SEQ ID NO: 439512 - RNA, 22 nt, Artificial Sequence
  Synthetic
ugcauaauauaugaccugacaa

SEQ ID NO: 439513 - RNA, 23 nt, Artificial Sequence
  Synthetic
augcauaauauaugaccugacaa

SEQ ID NO: 439514 - RNA, 24 nt, Artificial Sequence
  Synthetic
caugcauaauauaugaccugacaa

SEQ ID NO: 439515 - RNA, 18 nt, Artificial Sequence
  Synthetic
gagcagauucccugacaa

SEQ ID NO: 439516 - RNA, 19 nt, Artificial Sequence
  Synthetic
ugagcagauucccugacaa

SEQ ID NO: 439517 - RNA, 20 nt, Artificial Sequence
  Synthetic
gugagcagauucccugacaa

SEQ ID NO: 439518 - RNA, 21 nt, Artificial Sequence
  Synthetic
agugagcagauucccugacaa

SEQ ID NO: 439519 - RNA, 22 nt, Artificial Sequence
  Synthetic
cagugagcagauucccugacaa

SEQ ID NO: 439520 - RNA, 23 nt, Artificial Sequence
  Synthetic
acagugagcagauucccugacaa

SEQ ID NO: 439521 - RNA, 24 nt, Artificial Sequence
  Synthetic
gacagugagcagauucccugacaa

SEQ ID NO: 439522 - RNA, 18 nt, Artificial Sequence
  Synthetic
ucagucagacucugacaa

SEQ ID NO: 439523 - RNA, 19 nt, Artificial Sequence
  Synthetic
gucagucagacucugacaa

SEQ ID NO: 439524 - RNA, 20 nt, Artificial Sequence
  Synthetic
ugucagucagacucugacaa

SEQ ID NO: 439525 - RNA, 21 nt, Artificial Sequence
  Synthetic
uugucagucagacucugacaa

SEQ ID NO: 439526 - RNA, 22 nt, Artificial Sequence
  Synthetic
auugucagucagacucugacaa

SEQ ID NO: 439527 - RNA, 23 nt, Artificial Sequence
  Synthetic
gauugucagucagacucugacaa

SEQ ID NO: 439528 - RNA, 24 nt, Artificial Sequence
  Synthetic
agauugucagucagacucugacaa

SEQ ID NO: 439529 - RNA, 18 nt, Artificial Sequence
  Synthetic
uuuaggaugaggugacaa

SEQ ID NO: 439530 - RNA, 19 nt, Artificial Sequence
  Synthetic
cuuuaggaugaggugacaa

SEQ ID NO: 439531 - RNA, 20 nt, Artificial Sequence
  Synthetic
gcuuuaggaugaggugacaa

SEQ ID NO: 439532 - RNA, 21 nt, Artificial Sequence
  Synthetic
ggcuuuaggaugaggugacaa

SEQ ID NO: 439533 - RNA, 22 nt, Artificial Sequence
  Synthetic
aggcuuuaggaugaggugacaa

SEQ ID NO: 439534 - RNA, 23 nt, Artificial Sequence
  Synthetic
gaggcuuuaggaugaggugacaa

SEQ ID NO: 439535 - RNA, 24 nt, Artificial Sequence
  Synthetic
agaggcuuuaggaugaggugacaa

SEQ ID NO: 439536 - RNA, 18 nt, Artificial Sequence
  Synthetic
uauaaacaaaugugacaa

SEQ ID NO: 439537 - RNA, 19 nt, Artificial Sequence
  Synthetic
cuauaaacaaaugugacaa

SEQ ID NO: 439538 - RNA, 20 nt, Artificial Sequence
  Synthetic
gcuauaaacaaaugugacaa

SEQ ID NO: 439539 - RNA, 21 nt, Artificial Sequence
  Synthetic
ggcuauaaacaaaugugacaa

SEQ ID NO: 439540 - RNA, 22 nt, Artificial Sequence
  Synthetic
gggcuauaaacaaaugugacaa

SEQ ID NO: 439541 - RNA, 23 nt, Artificial Sequence
  Synthetic
ugggcuauaaacaaaugugacaa

SEQ ID NO: 439542 - RNA, 24 nt, Artificial Sequence
  Synthetic
augggcuauaaacaaaugugacaa

SEQ ID NO: 439543 - RNA, 18 nt, Artificial Sequence
  Synthetic
aaaaauagaaugugacaa

SEQ ID NO: 439544 - RNA, 19 nt, Artificial Sequence
  Synthetic
gaaaaauagaaugugacaa

SEQ ID NO: 439545 - RNA, 20 nt, Artificial Sequence
  Synthetic
ugaaaaauagaaugugacaa

SEQ ID NO: 439546 - RNA, 21 nt, Artificial Sequence
  Synthetic
augaaaaauagaaugugacaa

SEQ ID NO: 439547 - RNA, 22 nt, Artificial Sequence
  Synthetic
gaugaaaaauagaaugugacaa

SEQ ID NO: 439548 - RNA, 23 nt, Artificial Sequence
  Synthetic
agaugaaaaauagaaugugacaa

SEQ ID NO: 439549 - RNA, 24 nt, Artificial Sequence
  Synthetic
uagaugaaaaauagaaugugacaa

SEQ ID NO: 439550 - RNA, 18 nt, Artificial Sequence
  Synthetic
aaaaccaaaaauugacaa

SEQ ID NO: 439551 - RNA, 19 nt, Artificial Sequence
  Synthetic
caaaaccaaaaauugacaa

SEQ ID NO: 439552 - RNA, 20 nt, Artificial Sequence
  Synthetic
acaaaaccaaaaauugacaa

SEQ ID NO: 439553 - RNA, 21 nt, Artificial Sequence
  Synthetic
aacaaaaccaaaaauugacaa

SEQ ID NO: 439554 - RNA, 22 nt, Artificial Sequence
  Synthetic
uaacaaaaccaaaaauugacaa

SEQ ID NO: 439555 - RNA, 23 nt, Artificial Sequence
  Synthetic
auaacaaaaccaaaaauugacaa

SEQ ID NO: 439556 - RNA, 24 nt, Artificial Sequence
  Synthetic
uauaacaaaaccaaaaauugacaa

SEQ ID NO: 439557 - RNA, 21 nt, Artificial Sequence
  Synthetic
aacaaaagccaaaauugacaa

SEQ ID NO: 439558 - RNA, 22 nt, Artificial Sequence
  Synthetic
caacaaaagccaaaauugacaa

SEQ ID NO: 439559 - RNA, 23 nt, Artificial Sequence
  Synthetic
gcaacaaaagccaaaauugacaa

SEQ ID NO: 439560 - RNA, 24 nt, Artificial Sequence
  Synthetic
agcaacaaaagccaaaauugacaa

SEQ ID NO: 439561 - RNA, 18 nt, Artificial Sequence
  Synthetic
agaagccaaaauugacaa

SEQ ID NO: 439562 - RNA, 19 nt, Artificial Sequence
  Synthetic
cagaagccaaaauugacaa

SEQ ID NO: 439563 - RNA, 20 nt, Artificial Sequence
  Synthetic
acagaagccaaaauugacaa

SEQ ID NO: 439564 - RNA, 21 nt, Artificial Sequence
  Synthetic
aacagaagccaaaauugacaa

SEQ ID NO: 439565 - RNA, 22 nt, Artificial Sequence
  Synthetic
caacagaagccaaaauugacaa

SEQ ID NO: 439566 - RNA, 23 nt, Artificial Sequence
  Synthetic
gcaacagaagccaaaauugacaa

SEQ ID NO: 439567 - RNA, 24 nt, Artificial Sequence
  Synthetic
ggcaacagaagccaaaauugacaa

SEQ ID NO: 439568 - RNA, 18 nt, Artificial Sequence
  Synthetic
aucuuccccuauugacaa

SEQ ID NO: 439569 - RNA, 19 nt, Artificial Sequence
  Synthetic
aaucuuccccuauugacaa

SEQ ID NO: 439570 - RNA, 20 nt, Artificial Sequence
  Synthetic
uaaucuuccccuauugacaa

SEQ ID NO: 439571 - RNA, 21 nt, Artificial Sequence
  Synthetic
auaaucuuccccuauugacaa

SEQ ID NO: 439572 - RNA, 22 nt, Artificial Sequence
  Synthetic
gauaaucuuccccuauugacaa

SEQ ID NO: 439573 - RNA, 23 nt, Artificial Sequence
  Synthetic
ggauaaucuuccccuauugacaa

SEQ ID NO: 439574 - RNA, 24 nt, Artificial Sequence
  Synthetic
uggauaaucuuccccuauugacaa

SEQ ID NO: 439575 - RNA, 18 nt, Artificial Sequence
  Synthetic
uucucaggcccuugacaa

SEQ ID NO: 439576 - RNA, 19 nt, Artificial Sequence
  Synthetic
uuucucaggcccuugacaa

SEQ ID NO: 439577 - RNA, 20 nt, Artificial Sequence
  Synthetic
auuucucaggcccuugacaa

SEQ ID NO: 439578 - RNA, 21 nt, Artificial Sequence
  Synthetic
uauuucucaggcccuugacaa

SEQ ID NO: 439579 - RNA, 22 nt, Artificial Sequence
  Synthetic
uuauuucucaggcccuugacaa

SEQ ID NO: 439580 - RNA, 23 nt, Artificial Sequence
  Synthetic
uuuauuucucaggcccuugacaa

SEQ ID NO: 439581 - RNA, 24 nt, Artificial Sequence
  Synthetic
cuuuauuucucaggcccuugacaa

SEQ ID NO: 439582 - RNA, 18 nt, Artificial Sequence
  Synthetic
gauuagucaauuugacaa

SEQ ID NO: 439583 - RNA, 19 nt, Artificial Sequence
  Synthetic
agauuagucaauuugacaa

SEQ ID NO: 439584 - RNA, 20 nt, Artificial Sequence
  Synthetic
aagauuagucaauuugacaa

SEQ ID NO: 439585 - RNA, 21 nt, Artificial Sequence
  Synthetic
aaagauuagucaauuugacaa

SEQ ID NO: 439586 - RNA, 22 nt, Artificial Sequence
  Synthetic
aaaagauuagucaauuugacaa

SEQ ID NO: 439587 - RNA, 23 nt, Artificial Sequence
  Synthetic
aaaaagauuagucaauuugacaa

SEQ ID NO: 439588 - RNA, 24 nt, Artificial Sequence
  Synthetic
gaaaaagauuagucaauuugacaa

SEQ ID NO: 439589 - RNA, 18 nt, Artificial Sequence
  Synthetic
uguuaaaauauuugacaa

SEQ ID NO: 439590 - RNA, 19 nt, Artificial Sequence
  Synthetic
cuguuaaaauauuugacaa

SEQ ID NO: 439591 - RNA, 20 nt, Artificial Sequence
  Synthetic
ucuguuaaaauauuugacaa

SEQ ID NO: 439592 - RNA, 21 nt, Artificial Sequence
  Synthetic
uucuguuaaaauauuugacaa

SEQ ID NO: 439593 - RNA, 22 nt, Artificial Sequence
  Synthetic
uuucuguuaaaauauuugacaa

SEQ ID NO: 439594 - RNA, 23 nt, Artificial Sequence
  Synthetic
auuucuguuaaaauauuugacaa

SEQ ID NO: 439595 - RNA, 24 nt, Artificial Sequence
  Synthetic
aauuucuguuaaaauauuugacaa

SEQ ID NO: 439596 - RNA, 18 nt, Artificial Sequence
  Synthetic
caaaauccccaaauacaa

SEQ ID NO: 439597 - RNA, 19 nt, Artificial Sequence
  Synthetic
acaaaauccccaaauacaa

SEQ ID NO: 439598 - RNA, 20 nt, Artificial Sequence
  Synthetic
aacaaaauccccaaauacaa

SEQ ID NO: 439599 - RNA, 21 nt, Artificial Sequence
  Synthetic
gaacaaaauccccaaauacaa

SEQ ID NO: 439600 - RNA, 22 nt, Artificial Sequence
  Synthetic
cgaacaaaauccccaaauacaa

SEQ ID NO: 439601 - RNA, 23 nt, Artificial Sequence
  Synthetic
ucgaacaaaauccccaaauacaa

SEQ ID NO: 439602 - RNA, 24 nt, Artificial Sequence
  Synthetic
gucgaacaaaauccccaaauacaa

SEQ ID NO: 439603 - RNA, 18 nt, Artificial Sequence
  Synthetic
cuauuccaagcaauacaa

SEQ ID NO: 439604 - RNA, 19 nt, Artificial Sequence
  Synthetic
acuauuccaagcaauacaa

SEQ ID NO: 439605 - RNA, 20 nt, Artificial Sequence
  Synthetic
aacuauuccaagcaauacaa

SEQ ID NO: 439606 - RNA, 21 nt, Artificial Sequence
  Synthetic
aaacuauuccaagcaauacaa

SEQ ID NO: 439607 - RNA, 22 nt, Artificial Sequence
  Synthetic
aaaacuauuccaagcaauacaa

SEQ ID NO: 439608 - RNA, 23 nt, Artificial Sequence
  Synthetic
uaaaacuauuccaagcaauacaa

SEQ ID NO: 439609 - RNA, 24 nt, Artificial Sequence
  Synthetic
cuaaaacuauuccaagcaauacaa

SEQ ID NO: 439610 - RNA, 18 nt, Artificial Sequence
  Synthetic
uaugaaacgagaauacaa

SEQ ID NO: 439611 - RNA, 19 nt, Artificial Sequence
  Synthetic
auaugaaacgagaauacaa

SEQ ID NO: 439612 - RNA, 20 nt, Artificial Sequence
  Synthetic
gauaugaaacgagaauacaa

SEQ ID NO: 439613 - RNA, 21 nt, Artificial Sequence
  Synthetic
ggauaugaaacgagaauacaa

SEQ ID NO: 439614 - RNA, 22 nt, Artificial Sequence
  Synthetic
gggauaugaaacgagaauacaa

SEQ ID NO: 439615 - RNA, 23 nt, Artificial Sequence
  Synthetic
agggauaugaaacgagaauacaa

SEQ ID NO: 439616 - RNA, 24 nt, Artificial Sequence
  Synthetic
cagggauaugaaacgagaauacaa

SEQ ID NO: 439617 - RNA, 18 nt, Artificial Sequence
  Synthetic
ugagccaauggaauacaa

SEQ ID NO: 439618 - RNA, 19 nt, Artificial Sequence
  Synthetic
augagccaauggaauacaa

SEQ ID NO: 439619 - RNA, 20 nt, Artificial Sequence
  Synthetic
uaugagccaauggaauacaa

SEQ ID NO: 439620 - RNA, 21 nt, Artificial Sequence
  Synthetic
uuaugagccaauggaauacaa

SEQ ID NO: 439621 - RNA, 22 nt, Artificial Sequence
  Synthetic
cuuaugagccaauggaauacaa

SEQ ID NO: 439622 - RNA, 23 nt, Artificial Sequence
  Synthetic
ucuuaugagccaauggaauacaa

SEQ ID NO: 439623 - RNA, 24 nt, Artificial Sequence
  Synthetic
cucuuaugagccaauggaauacaa

SEQ ID NO: 439624 - RNA, 18 nt, Artificial Sequence
  Synthetic
ugcaagggcugaauacaa

SEQ ID NO: 439625 - RNA, 19 nt, Artificial Sequence
  Synthetic
augcaagggcugaauacaa

SEQ ID NO: 439626 - RNA, 20 nt, Artificial Sequence
  Synthetic
uaugcaagggcugaauacaa

SEQ ID NO: 439627 - RNA, 21 nt, Artificial Sequence
  Synthetic
cuaugcaagggcugaauacaa

SEQ ID NO: 439628 - RNA, 22 nt, Artificial Sequence
  Synthetic
acuaugcaagggcugaauacaa

SEQ ID NO: 439629 - RNA, 23 nt, Artificial Sequence
  Synthetic
uacuaugcaagggcugaauacaa

SEQ ID NO: 439630 - RNA, 24 nt, Artificial Sequence
  Synthetic
uuacuaugcaagggcugaauacaa

SEQ ID NO: 439631 - RNA, 18 nt, Artificial Sequence
  Synthetic
ucauaaguaauaauacaa

SEQ ID NO: 439632 - RNA, 19 nt, Artificial Sequence
  Synthetic
uucauaaguaauaauacaa

SEQ ID NO: 439633 - RNA, 20 nt, Artificial Sequence
  Synthetic
guucauaaguaauaauacaa

SEQ ID NO: 439634 - RNA, 21 nt, Artificial Sequence
  Synthetic
uguucauaaguaauaauacaa

SEQ ID NO: 439635 - RNA, 22 nt, Artificial Sequence
  Synthetic
guguucauaaguaauaauacaa

SEQ ID NO: 439636 - RNA, 23 nt, Artificial Sequence
  Synthetic
gguguucauaaguaauaauacaa

SEQ ID NO: 439637 - RNA, 24 nt, Artificial Sequence
  Synthetic
ugguguucauaaguaauaauacaa

SEQ ID NO: 439638 - RNA, 18 nt, Artificial Sequence
  Synthetic
uuuuguguaauaauacaa

SEQ ID NO: 439639 - RNA, 19 nt, Artificial Sequence
  Synthetic
uuuuuguguaauaauacaa

SEQ ID NO: 439640 - RNA, 20 nt, Artificial Sequence
  Synthetic
uuuuuuguguaauaauacaa

SEQ ID NO: 439641 - RNA, 21 nt, Artificial Sequence
  Synthetic
auuuuuuguguaauaauacaa

SEQ ID NO: 439642 - RNA, 22 nt, Artificial Sequence
  Synthetic
uauuuuuuguguaauaauacaa

SEQ ID NO: 439643 - RNA, 23 nt, Artificial Sequence
  Synthetic
uuauuuuuuguguaauaauacaa

SEQ ID NO: 439644 - RNA, 24 nt, Artificial Sequence
  Synthetic
auuauuuuuuguguaauaauacaa

SEQ ID NO: 439645 - RNA, 18 nt, Artificial Sequence
  Synthetic
ucuuuucauauaauacaa

SEQ ID NO: 439646 - RNA, 19 nt, Artificial Sequence
  Synthetic
aucuuuucauauaauacaa

SEQ ID NO: 439647 - RNA, 20 nt, Artificial Sequence
  Synthetic
aaucuuuucauauaauacaa

SEQ ID NO: 439648 - RNA, 21 nt, Artificial Sequence
  Synthetic
aaaucuuuucauauaauacaa

SEQ ID NO: 439649 - RNA, 22 nt, Artificial Sequence
  Synthetic
caaaucuuuucauauaauacaa

SEQ ID NO: 439650 - RNA, 23 nt, Artificial Sequence
  Synthetic
acaaaucuuuucauauaauacaa

SEQ ID NO: 439651 - RNA, 24 nt, Artificial Sequence
  Synthetic
uacaaaucuuuucauauaauacaa

SEQ ID NO: 439652 - RNA, 18 nt, Artificial Sequence
  Synthetic
uaaguguaacuaauacaa

SEQ ID NO: 439653 - RNA, 19 nt, Artificial Sequence
  Synthetic
uuaaguguaacuaauacaa

SEQ ID NO: 439654 - RNA, 20 nt, Artificial Sequence
  Synthetic
uuuaaguguaacuaauacaa

SEQ ID NO: 439655 - RNA, 21 nt, Artificial Sequence
  Synthetic
cuuuaaguguaacuaauacaa

SEQ ID NO: 439656 - RNA, 22 nt, Artificial Sequence
  Synthetic
ucuuuaaguguaacuaauacaa

SEQ ID NO: 439657 - RNA, 23 nt, Artificial Sequence
  Synthetic
cucuuuaaguguaacuaauacaa

SEQ ID NO: 439658 - RNA, 24 nt, Artificial Sequence
  Synthetic
ucucuuuaaguguaacuaauacaa

SEQ ID NO: 439659 - RNA, 18 nt, Artificial Sequence
  Synthetic
uucuaaauauacauacaa

SEQ ID NO: 439660 - RNA, 19 nt, Artificial Sequence
  Synthetic
auucuaaauauacauacaa

SEQ ID NO: 439661 - RNA, 20 nt, Artificial Sequence
  Synthetic
aauucuaaauauacauacaa

SEQ ID NO: 439662 - RNA, 21 nt, Artificial Sequence
  Synthetic
aaauucuaaauauacauacaa

SEQ ID NO: 439663 - RNA, 22 nt, Artificial Sequence
  Synthetic
gaaauucuaaauauacauacaa

SEQ ID NO: 439664 - RNA, 23 nt, Artificial Sequence
  Synthetic
ggaaauucuaaauauacauacaa

SEQ ID NO: 439665 - RNA, 24 nt, Artificial Sequence
  Synthetic
aggaaauucuaaauauacauacaa

SEQ ID NO: 439666 - RNA, 18 nt, Artificial Sequence
  Synthetic
caacuaccaaccauacaa

SEQ ID NO: 439667 - RNA, 19 nt, Artificial Sequence
  Synthetic
acaacuaccaaccauacaa

SEQ ID NO: 439668 - RNA, 20 nt, Artificial Sequence
  Synthetic
gacaacuaccaaccauacaa

SEQ ID NO: 439669 - RNA, 21 nt, Artificial Sequence
  Synthetic
cgacaacuaccaaccauacaa

SEQ ID NO: 439670 - RNA, 22 nt, Artificial Sequence
  Synthetic
gcgacaacuaccaaccauacaa

SEQ ID NO: 439671 - RNA, 23 nt, Artificial Sequence
  Synthetic
ugcgacaacuaccaaccauacaa

SEQ ID NO: 439672 - RNA, 24 nt, Artificial Sequence
  Synthetic
gugcgacaacuaccaaccauacaa

SEQ ID NO: 439673 - RNA, 18 nt, Artificial Sequence
  Synthetic
ucagguauuaccauacaa

SEQ ID NO: 439674 - RNA, 19 nt, Artificial Sequence
  Synthetic
gucagguauuaccauacaa

SEQ ID NO: 439675 - RNA, 20 nt, Artificial Sequence
  Synthetic
ggucagguauuaccauacaa

SEQ ID NO: 439676 - RNA, 21 nt, Artificial Sequence
  Synthetic
aggucagguauuaccauacaa

SEQ ID NO: 439677 - RNA, 22 nt, Artificial Sequence
  Synthetic
caggucagguauuaccauacaa

SEQ ID NO: 439678 - RNA, 23 nt, Artificial Sequence
  Synthetic
acaggucagguauuaccauacaa

SEQ ID NO: 439679 - RNA, 24 nt, Artificial Sequence
  Synthetic
gacaggucagguauuaccauacaa

SEQ ID NO: 439680 - RNA, 18 nt, Artificial Sequence
  Synthetic
aacuacuugaucauacaa

SEQ ID NO: 439681 - RNA, 19 nt, Artificial Sequence
  Synthetic
uaacuacuugaucauacaa

SEQ ID NO: 439682 - RNA, 20 nt, Artificial Sequence
  Synthetic
uuaacuacuugaucauacaa

SEQ ID NO: 439683 - RNA, 21 nt, Artificial Sequence
  Synthetic
uuuaacuacuugaucauacaa

SEQ ID NO: 439684 - RNA, 22 nt, Artificial Sequence
  Synthetic
auuuaacuacuugaucauacaa

SEQ ID NO: 439685 - RNA, 23 nt, Artificial Sequence
  Synthetic
uauuuaacuacuugaucauacaa

SEQ ID NO: 439686 - RNA, 24 nt, Artificial Sequence
  Synthetic
auauuuaacuacuugaucauacaa

SEQ ID NO: 439687 - RNA, 18 nt, Artificial Sequence
  Synthetic
uacaauagucucauacaa

SEQ ID NO: 439688 - RNA, 19 nt, Artificial Sequence
  Synthetic
auacaauagucucauacaa

SEQ ID NO: 439689 - RNA, 20 nt, Artificial Sequence
  Synthetic
aauacaauagucucauacaa

SEQ ID NO: 439690 - RNA, 21 nt, Artificial Sequence
  Synthetic
caauacaauagucucauacaa

SEQ ID NO: 439691 - RNA, 22 nt, Artificial Sequence
  Synthetic
gcaauacaauagucucauacaa

SEQ ID NO: 439692 - RNA, 23 nt, Artificial Sequence
  Synthetic
ugcaauacaauagucucauacaa

SEQ ID NO: 439693 - RNA, 24 nt, Artificial Sequence
  Synthetic
cugcaauacaauagucucauacaa

SEQ ID NO: 439694 - RNA, 18 nt, Artificial Sequence
  Synthetic
gcagagaaaaagauacaa

SEQ ID NO: 439695 - RNA, 19 nt, Artificial Sequence
  Synthetic
cgcagagaaaaagauacaa

SEQ ID NO: 439696 - RNA, 20 nt, Artificial Sequence
  Synthetic
ccgcagagaaaaagauacaa

SEQ ID NO: 439697 - RNA, 21 nt, Artificial Sequence
  Synthetic
accgcagagaaaaagauacaa

SEQ ID NO: 439698 - RNA, 22 nt, Artificial Sequence
  Synthetic
uaccgcagagaaaaagauacaa

SEQ ID NO: 439699 - RNA, 23 nt, Artificial Sequence
  Synthetic
guaccgcagagaaaaagauacaa

SEQ ID NO: 439700 - RNA, 24 nt, Artificial Sequence
  Synthetic
aguaccgcagagaaaaagauacaa

SEQ ID NO: 439701 - RNA, 18 nt, Artificial Sequence
  Synthetic
aaucaauccaagauacaa

SEQ ID NO: 439702 - RNA, 19 nt, Artificial Sequence
  Synthetic
aaaucaauccaagauacaa

SEQ ID NO: 439703 - RNA, 20 nt, Artificial Sequence
  Synthetic
uaaaucaauccaagauacaa

SEQ ID NO: 439704 - RNA, 21 nt, Artificial Sequence
  Synthetic
auaaaucaauccaagauacaa

SEQ ID NO: 439705 - RNA, 22 nt, Artificial Sequence
  Synthetic
aauaaaucaauccaagauacaa

SEQ ID NO: 439706 - RNA, 23 nt, Artificial Sequence
  Synthetic
gaauaaaucaauccaagauacaa

SEQ ID NO: 439707 - RNA, 24 nt, Artificial Sequence
  Synthetic
ugaauaaaucaauccaagauacaa

SEQ ID NO: 439708 - RNA, 18 nt, Artificial Sequence
  Synthetic
ccuaauuauuagauacaa

SEQ ID NO: 439709 - RNA, 19 nt, Artificial Sequence
  Synthetic
uccuaauuauuagauacaa

SEQ ID NO: 439710 - RNA, 20 nt, Artificial Sequence
  Synthetic
cuccuaauuauuagauacaa

SEQ ID NO: 439711 - RNA, 21 nt, Artificial Sequence
  Synthetic
ucuccuaauuauuagauacaa

SEQ ID NO: 439712 - RNA, 22 nt, Artificial Sequence
  Synthetic
aucuccuaauuauuagauacaa

SEQ ID NO: 439713 - RNA, 23 nt, Artificial Sequence
  Synthetic
uaucuccuaauuauuagauacaa

SEQ ID NO: 439714 - RNA, 24 nt, Artificial Sequence
  Synthetic
auaucuccuaauuauuagauacaa

SEQ ID NO: 439715 - RNA, 18 nt, Artificial Sequence
  Synthetic
guuacuuccaggauacaa

SEQ ID NO: 439716 - RNA, 19 nt, Artificial Sequence
  Synthetic
aguuacuuccaggauacaa

SEQ ID NO: 439717 - RNA, 20 nt, Artificial Sequence
  Synthetic
uaguuacuuccaggauacaa

SEQ ID NO: 439718 - RNA, 21 nt, Artificial Sequence
  Synthetic
uuaguuacuuccaggauacaa

SEQ ID NO: 439719 - RNA, 22 nt, Artificial Sequence
  Synthetic
guuaguuacuuccaggauacaa

SEQ ID NO: 439720 - RNA, 23 nt, Artificial Sequence
  Synthetic
aguuaguuacuuccaggauacaa

SEQ ID NO: 439721 - RNA, 24 nt, Artificial Sequence
  Synthetic
aaguuaguuacuuccaggauacaa

SEQ ID NO: 439722 - RNA, 18 nt, Artificial Sequence
  Synthetic
auaaaggaucauauacaa

SEQ ID NO: 439723 - RNA, 19 nt, Artificial Sequence
  Synthetic
uauaaaggaucauauacaa

SEQ ID NO: 439724 - RNA, 20 nt, Artificial Sequence
  Synthetic
cuauaaaggaucauauacaa

SEQ ID NO: 439725 - RNA, 21 nt, Artificial Sequence
  Synthetic
acuauaaaggaucauauacaa

SEQ ID NO: 439726 - RNA, 22 nt, Artificial Sequence
  Synthetic
aacuauaaaggaucauauacaa

SEQ ID NO: 439727 - RNA, 23 nt, Artificial Sequence
  Synthetic
aaacuauaaaggaucauauacaa

SEQ ID NO: 439728 - RNA, 24 nt, Artificial Sequence
  Synthetic
uaaacuauaaaggaucauauacaa

SEQ ID NO: 439729 - RNA, 18 nt, Artificial Sequence
  Synthetic
gcugguauagauauacaa

SEQ ID NO: 439730 - RNA, 19 nt, Artificial Sequence
  Synthetic
ugcugguauagauauacaa

SEQ ID NO: 439731 - RNA, 20 nt, Artificial Sequence
  Synthetic
gugcugguauagauauacaa

SEQ ID NO: 439732 - RNA, 21 nt, Artificial Sequence
  Synthetic
ugugcugguauagauauacaa

SEQ ID NO: 439733 - RNA, 22 nt, Artificial Sequence
  Synthetic
gugugcugguauagauauacaa

SEQ ID NO: 439734 - RNA, 23 nt, Artificial Sequence
  Synthetic
agugugcugguauagauauacaa

SEQ ID NO: 439735 - RNA, 24 nt, Artificial Sequence
  Synthetic
cagugugcugguauagauauacaa

SEQ ID NO: 439736 - RNA, 18 nt, Artificial Sequence
  Synthetic
uucauuuaccuuauacaa

SEQ ID NO: 439737 - RNA, 19 nt, Artificial Sequence
  Synthetic
auucauuuaccuuauacaa

SEQ ID NO: 439738 - RNA, 20 nt, Artificial Sequence
  Synthetic
cauucauuuaccuuauacaa

SEQ ID NO: 439739 - RNA, 21 nt, Artificial Sequence
  Synthetic
acauucauuuaccuuauacaa

SEQ ID NO: 439740 - RNA, 22 nt, Artificial Sequence
  Synthetic
aacauucauuuaccuuauacaa

SEQ ID NO: 439741 - RNA, 23 nt, Artificial Sequence
  Synthetic
aaacauucauuuaccuuauacaa

SEQ ID NO: 439742 - RNA, 24 nt, Artificial Sequence
  Synthetic
uaaacauucauuuaccuuauacaa

SEQ ID NO: 439743 - RNA, 18 nt, Artificial Sequence
  Synthetic
aauuagcaaucacuacaa

SEQ ID NO: 439744 - RNA, 19 nt, Artificial Sequence
  Synthetic
uaauuagcaaucacuacaa

SEQ ID NO: 439745 - RNA, 20 nt, Artificial Sequence
  Synthetic
uuaauuagcaaucacuacaa

SEQ ID NO: 439746 - RNA, 21 nt, Artificial Sequence
  Synthetic
uuuaauuagcaaucacuacaa

SEQ ID NO: 439747 - RNA, 22 nt, Artificial Sequence
  Synthetic
uuuuaauuagcaaucacuacaa

SEQ ID NO: 439748 - RNA, 23 nt, Artificial Sequence
  Synthetic
auuuuaauuagcaaucacuacaa

SEQ ID NO: 439749 - RNA, 24 nt, Artificial Sequence
  Synthetic
uauuuuaauuagcaaucacuacaa

SEQ ID NO: 439750 - RNA, 18 nt, Artificial Sequence
  Synthetic
uaguaugugauacuacaa

SEQ ID NO: 439751 - RNA, 19 nt, Artificial Sequence
  Synthetic
cuaguaugugauacuacaa

SEQ ID NO: 439752 - RNA, 20 nt, Artificial Sequence
  Synthetic
acuaguaugugauacuacaa

SEQ ID NO: 439753 - RNA, 21 nt, Artificial Sequence
  Synthetic
aacuaguaugugauacuacaa

SEQ ID NO: 439754 - RNA, 22 nt, Artificial Sequence
  Synthetic
gaacuaguaugugauacuacaa

SEQ ID NO: 439755 - RNA, 23 nt, Artificial Sequence
  Synthetic
ugaacuaguaugugauacuacaa

SEQ ID NO: 439756 - RNA, 24 nt, Artificial Sequence
  Synthetic
uugaacuaguaugugauacuacaa

SEQ ID NO: 439757 - RNA, 18 nt, Artificial Sequence
  Synthetic
accaugaaacuacuacaa

SEQ ID NO: 439758 - RNA, 19 nt, Artificial Sequence
  Synthetic
aaccaugaaacuacuacaa

SEQ ID NO: 439759 - RNA, 20 nt, Artificial Sequence
  Synthetic
aaaccaugaaacuacuacaa

SEQ ID NO: 439760 - RNA, 21 nt, Artificial Sequence
  Synthetic
caaaccaugaaacuacuacaa

SEQ ID NO: 439761 - RNA, 22 nt, Artificial Sequence
  Synthetic
ucaaaccaugaaacuacuacaa

SEQ ID NO: 439762 - RNA, 23 nt, Artificial Sequence
  Synthetic
cucaaaccaugaaacuacuacaa

SEQ ID NO: 439763 - RNA, 24 nt, Artificial Sequence
  Synthetic
ccucaaaccaugaaacuacuacaa

SEQ ID NO: 439764 - RNA, 18 nt, Artificial Sequence
  Synthetic
agcacuaaaugccuacaa

SEQ ID NO: 439765 - RNA, 19 nt, Artificial Sequence
  Synthetic
uagcacuaaaugccuacaa

SEQ ID NO: 439766 - RNA, 20 nt, Artificial Sequence
  Synthetic
auagcacuaaaugccuacaa

SEQ ID NO: 439767 - RNA, 21 nt, Artificial Sequence
  Synthetic
uauagcacuaaaugccuacaa

SEQ ID NO: 439768 - RNA, 22 nt, Artificial Sequence
  Synthetic
uuauagcacuaaaugccuacaa

SEQ ID NO: 439769 - RNA, 23 nt, Artificial Sequence
  Synthetic
uuuauagcacuaaaugccuacaa

SEQ ID NO: 439770 - RNA, 24 nt, Artificial Sequence
  Synthetic
auuuauagcacuaaaugccuacaa

SEQ ID NO: 439771 - RNA, 18 nt, Artificial Sequence
  Synthetic
auggauaauuuccuacaa

SEQ ID NO: 439772 - RNA, 19 nt, Artificial Sequence
  Synthetic
aauggauaauuuccuacaa

SEQ ID NO: 439773 - RNA, 20 nt, Artificial Sequence
  Synthetic
gaauggauaauuuccuacaa

SEQ ID NO: 439774 - RNA, 21 nt, Artificial Sequence
  Synthetic
agaauggauaauuuccuacaa

SEQ ID NO: 439775 - RNA, 22 nt, Artificial Sequence
  Synthetic
aagaauggauaauuuccuacaa

SEQ ID NO: 439776 - RNA, 23 nt, Artificial Sequence
  Synthetic
aaagaauggauaauuuccuacaa

SEQ ID NO: 439777 - RNA, 24 nt, Artificial Sequence
  Synthetic
uaaagaauggauaauuuccuacaa

SEQ ID NO: 439778 - RNA, 18 nt, Artificial Sequence
  Synthetic
uuguaaaagcagcuacaa

SEQ ID NO: 439779 - RNA, 19 nt, Artificial Sequence
  Synthetic
cuuguaaaagcagcuacaa

SEQ ID NO: 439780 - RNA, 20 nt, Artificial Sequence
  Synthetic
ccuuguaaaagcagcuacaa

SEQ ID NO: 439781 - RNA, 21 nt, Artificial Sequence
  Synthetic
uccuuguaaaagcagcuacaa

SEQ ID NO: 439782 - RNA, 22 nt, Artificial Sequence
  Synthetic
cuccuuguaaaagcagcuacaa

SEQ ID NO: 439783 - RNA, 23 nt, Artificial Sequence
  Synthetic
ucuccuuguaaaagcagcuacaa

SEQ ID NO: 439784 - RNA, 24 nt, Artificial Sequence
  Synthetic
aucuccuuguaaaagcagcuacaa

SEQ ID NO: 439785 - RNA, 18 nt, Artificial Sequence
  Synthetic
cgaaucucaaugcuacaa

SEQ ID NO: 439786 - RNA, 19 nt, Artificial Sequence
  Synthetic
acgaaucucaaugcuacaa

SEQ ID NO: 439787 - RNA, 20 nt, Artificial Sequence
  Synthetic
cacgaaucucaaugcuacaa

SEQ ID NO: 439788 - RNA, 21 nt, Artificial Sequence
  Synthetic
ccacgaaucucaaugcuacaa

SEQ ID NO: 439789 - RNA, 22 nt, Artificial Sequence
  Synthetic
uccacgaaucucaaugcuacaa

SEQ ID NO: 439790 - RNA, 23 nt, Artificial Sequence
  Synthetic
cuccacgaaucucaaugcuacaa

SEQ ID NO: 439791 - RNA, 24 nt, Artificial Sequence
  Synthetic
acuccacgaaucucaaugcuacaa

SEQ ID NO: 439792 - RNA, 18 nt, Artificial Sequence
  Synthetic
ugauuucuguugcuacaa

SEQ ID NO: 439793 - RNA, 19 nt, Artificial Sequence
  Synthetic
uugauuucuguugcuacaa

SEQ ID NO: 439794 - RNA, 20 nt, Artificial Sequence
  Synthetic
auugauuucuguugcuacaa

SEQ ID NO: 439795 - RNA, 21 nt, Artificial Sequence
  Synthetic
uauugauuucuguugcuacaa

SEQ ID NO: 439796 - RNA, 22 nt, Artificial Sequence
  Synthetic
cuauugauuucuguugcuacaa

SEQ ID NO: 439797 - RNA, 23 nt, Artificial Sequence
  Synthetic
ucuauugauuucuguugcuacaa

SEQ ID NO: 439798 - RNA, 24 nt, Artificial Sequence
  Synthetic
cucuauugauuucuguugcuacaa

SEQ ID NO: 439799 - RNA, 18 nt, Artificial Sequence
  Synthetic
gcuuuacaaugucuacaa

SEQ ID NO: 439800 - RNA, 19 nt, Artificial Sequence
  Synthetic
ggcuuuacaaugucuacaa

SEQ ID NO: 439801 - RNA, 20 nt, Artificial Sequence
  Synthetic
gggcuuuacaaugucuacaa

SEQ ID NO: 439802 - RNA, 21 nt, Artificial Sequence
  Synthetic
agggcuuuacaaugucuacaa

SEQ ID NO: 439803 - RNA, 22 nt, Artificial Sequence
  Synthetic
gagggcuuuacaaugucuacaa

SEQ ID NO: 439804 - RNA, 23 nt, Artificial Sequence
  Synthetic
agagggcuuuacaaugucuacaa

SEQ ID NO: 439805 - RNA, 24 nt, Artificial Sequence
  Synthetic
gagagggcuuuacaaugucuacaa

SEQ ID NO: 439806 - RNA, 18 nt, Artificial Sequence
  Synthetic
aauuguaaaauucuacaa

SEQ ID NO: 439807 - RNA, 19 nt, Artificial Sequence
  Synthetic
caauuguaaaauucuacaa

SEQ ID NO: 439808 - RNA, 20 nt, Artificial Sequence
  Synthetic
ucaauuguaaaauucuacaa

SEQ ID NO: 439809 - RNA, 21 nt, Artificial Sequence
  Synthetic
cucaauuguaaaauucuacaa

SEQ ID NO: 439810 - RNA, 22 nt, Artificial Sequence
  Synthetic
ucucaauuguaaaauucuacaa

SEQ ID NO: 439811 - RNA, 23 nt, Artificial Sequence
  Synthetic
aucucaauuguaaaauucuacaa

SEQ ID NO: 439812 - RNA, 24 nt, Artificial Sequence
  Synthetic
uaucucaauuguaaaauucuacaa

SEQ ID NO: 439813 - RNA, 18 nt, Artificial Sequence
  Synthetic
uauaaauuaauucuacaa

SEQ ID NO: 439814 - RNA, 19 nt, Artificial Sequence
  Synthetic
auauaaauuaauucuacaa

SEQ ID NO: 439815 - RNA, 20 nt, Artificial Sequence
  Synthetic
aauauaaauuaauucuacaa

SEQ ID NO: 439816 - RNA, 21 nt, Artificial Sequence
  Synthetic
gaauauaaauuaauucuacaa

SEQ ID NO: 439817 - RNA, 22 nt, Artificial Sequence
  Synthetic
agaauauaaauuaauucuacaa

SEQ ID NO: 439818 - RNA, 23 nt, Artificial Sequence
  Synthetic
aagaauauaaauuaauucuacaa

SEQ ID NO: 439819 - RNA, 24 nt, Artificial Sequence
  Synthetic
gaagaauauaaauuaauucuacaa

SEQ ID NO: 439820 - RNA, 18 nt, Artificial Sequence
  Synthetic
ccaaacauguuaguacaa

SEQ ID NO: 439821 - RNA, 19 nt, Artificial Sequence
  Synthetic
uccaaacauguuaguacaa

SEQ ID NO: 439822 - RNA, 20 nt, Artificial Sequence
  Synthetic
auccaaacauguuaguacaa

SEQ ID NO: 439823 - RNA, 21 nt, Artificial Sequence
  Synthetic
uauccaaacauguuaguacaa

SEQ ID NO: 439824 - RNA, 22 nt, Artificial Sequence
  Synthetic
auauccaaacauguuaguacaa

SEQ ID NO: 439825 - RNA, 23 nt, Artificial Sequence
  Synthetic
aauauccaaacauguuaguacaa

SEQ ID NO: 439826 - RNA, 24 nt, Artificial Sequence
  Synthetic
uaauauccaaacauguuaguacaa

SEQ ID NO: 439827 - RNA, 18 nt, Artificial Sequence
  Synthetic
uaaauugaaaagguacaa

SEQ ID NO: 439828 - RNA, 19 nt, Artificial Sequence
  Synthetic
uuaaauugaaaagguacaa

SEQ ID NO: 439829 - RNA, 20 nt, Artificial Sequence
  Synthetic
auuaaauugaaaagguacaa

SEQ ID NO: 439830 - RNA, 21 nt, Artificial Sequence
  Synthetic
uauuaaauugaaaagguacaa

SEQ ID NO: 439831 - RNA, 22 nt, Artificial Sequence
  Synthetic
guauuaaauugaaaagguacaa

SEQ ID NO: 439832 - RNA, 23 nt, Artificial Sequence
  Synthetic
aguauuaaauugaaaagguacaa

SEQ ID NO: 439833 - RNA, 24 nt, Artificial Sequence
  Synthetic
gaguauuaaauugaaaagguacaa

SEQ ID NO: 439834 - RNA, 18 nt, Artificial Sequence
  Synthetic
augcaaacguggguacaa

SEQ ID NO: 439835 - RNA, 19 nt, Artificial Sequence
  Synthetic
aaugcaaacguggguacaa

SEQ ID NO: 439836 - RNA, 20 nt, Artificial Sequence
  Synthetic
uaaugcaaacguggguacaa

SEQ ID NO: 439837 - RNA, 21 nt, Artificial Sequence
  Synthetic
guaaugcaaacguggguacaa

SEQ ID NO: 439838 - RNA, 22 nt, Artificial Sequence
  Synthetic
gguaaugcaaacguggguacaa

SEQ ID NO: 439839 - RNA, 23 nt, Artificial Sequence
  Synthetic
ugguaaugcaaacguggguacaa

SEQ ID NO: 439840 - RNA, 24 nt, Artificial Sequence
  Synthetic
augguaaugcaaacguggguacaa

SEQ ID NO: 439841 - RNA, 18 nt, Artificial Sequence
  Synthetic
ucaauggcaaauguacaa

SEQ ID NO: 439842 - RNA, 19 nt, Artificial Sequence
  Synthetic
gucaauggcaaauguacaa

SEQ ID NO: 439843 - RNA, 20 nt, Artificial Sequence
  Synthetic
cgucaauggcaaauguacaa

SEQ ID NO: 439844 - RNA, 21 nt, Artificial Sequence
  Synthetic
acgucaauggcaaauguacaa

SEQ ID NO: 439845 - RNA, 22 nt, Artificial Sequence
  Synthetic
cacgucaauggcaaauguacaa

SEQ ID NO: 439846 - RNA, 23 nt, Artificial Sequence
  Synthetic
ccacgucaauggcaaauguacaa

SEQ ID NO: 439847 - RNA, 24 nt, Artificial Sequence
  Synthetic
uccacgucaauggcaaauguacaa

SEQ ID NO: 439848 - RNA, 18 nt, Artificial Sequence
  Synthetic
agccuaauaaauguacaa

SEQ ID NO: 439849 - RNA, 19 nt, Artificial Sequence
  Synthetic
gagccuaauaaauguacaa

SEQ ID NO: 439850 - RNA, 20 nt, Artificial Sequence
  Synthetic
ggagccuaauaaauguacaa

SEQ ID NO: 439851 - RNA, 21 nt, Artificial Sequence
  Synthetic
aggagccuaauaaauguacaa

SEQ ID NO: 439852 - RNA, 22 nt, Artificial Sequence
  Synthetic
aaggagccuaauaaauguacaa

SEQ ID NO: 439853 - RNA, 23 nt, Artificial Sequence
  Synthetic
uaaggagccuaauaaauguacaa

SEQ ID NO: 439854 - RNA, 24 nt, Artificial Sequence
  Synthetic
uuaaggagccuaauaaauguacaa

SEQ ID NO: 439855 - RNA, 18 nt, Artificial Sequence
  Synthetic
aaggaacauucuguacaa

SEQ ID NO: 439856 - RNA, 19 nt, Artificial Sequence
  Synthetic
caaggaacauucuguacaa

SEQ ID NO: 439857 - RNA, 20 nt, Artificial Sequence
  Synthetic
ucaaggaacauucuguacaa

SEQ ID NO: 439858 - RNA, 21 nt, Artificial Sequence
  Synthetic
gucaaggaacauucuguacaa

SEQ ID NO: 439859 - RNA, 22 nt, Artificial Sequence
  Synthetic
agucaaggaacauucuguacaa

SEQ ID NO: 439860 - RNA, 23 nt, Artificial Sequence
  Synthetic
aagucaaggaacauucuguacaa

SEQ ID NO: 439861 - RNA, 24 nt, Artificial Sequence
  Synthetic
caagucaaggaacauucuguacaa

SEQ ID NO: 439862 - RNA, 18 nt, Artificial Sequence
  Synthetic
gagauucaccaauuacaa

SEQ ID NO: 439863 - RNA, 19 nt, Artificial Sequence
  Synthetic
cgagauucaccaauuacaa

SEQ ID NO: 439864 - RNA, 20 nt, Artificial Sequence
  Synthetic
ccgagauucaccaauuacaa

SEQ ID NO: 439865 - RNA, 21 nt, Artificial Sequence
  Synthetic
accgagauucaccaauuacaa

SEQ ID NO: 439866 - RNA, 22 nt, Artificial Sequence
  Synthetic
caccgagauucaccaauuacaa

SEQ ID NO: 439867 - RNA, 23 nt, Artificial Sequence
  Synthetic
ccaccgagauucaccaauuacaa

SEQ ID NO: 439868 - RNA, 24 nt, Artificial Sequence
  Synthetic
gccaccgagauucaccaauuacaa

SEQ ID NO: 439869 - RNA, 18 nt, Artificial Sequence
  Synthetic
gacaguuugcaauuacaa

SEQ ID NO: 439870 - RNA, 19 nt, Artificial Sequence
  Synthetic
agacaguuugcaauuacaa

SEQ ID NO: 439871 - RNA, 20 nt, Artificial Sequence
  Synthetic
aagacaguuugcaauuacaa

SEQ ID NO: 439872 - RNA, 21 nt, Artificial Sequence
  Synthetic
caagacaguuugcaauuacaa

SEQ ID NO: 439873 - RNA, 22 nt, Artificial Sequence
  Synthetic
ucaagacaguuugcaauuacaa

SEQ ID NO: 439874 - RNA, 23 nt, Artificial Sequence
  Synthetic
uucaagacaguuugcaauuacaa

SEQ ID NO: 439875 - RNA, 24 nt, Artificial Sequence
  Synthetic
uuucaagacaguuugcaauuacaa

SEQ ID NO: 439876 - RNA, 18 nt, Artificial Sequence
  Synthetic
uucacaaaagaauuacaa

SEQ ID NO: 439877 - RNA, 19 nt, Artificial Sequence
  Synthetic
cuucacaaaagaauuacaa

SEQ ID NO: 439878 - RNA, 20 nt, Artificial Sequence
  Synthetic
acuucacaaaagaauuacaa

SEQ ID NO: 439879 - RNA, 21 nt, Artificial Sequence
  Synthetic
gacuucacaaaagaauuacaa

SEQ ID NO: 439880 - RNA, 22 nt, Artificial Sequence
  Synthetic
agacuucacaaaagaauuacaa

SEQ ID NO: 439881 - RNA, 23 nt, Artificial Sequence
  Synthetic
uagacuucacaaaagaauuacaa

SEQ ID NO: 439882 - RNA, 24 nt, Artificial Sequence
  Synthetic
cuagacuucacaaaagaauuacaa

SEQ ID NO: 439883 - RNA, 18 nt, Artificial Sequence
  Synthetic
acuuaaaguccauuacaa

SEQ ID NO: 439884 - RNA, 19 nt, Artificial Sequence
  Synthetic
uacuuaaaguccauuacaa

SEQ ID NO: 439885 - RNA, 20 nt, Artificial Sequence
  Synthetic
guacuuaaaguccauuacaa

SEQ ID NO: 439886 - RNA, 21 nt, Artificial Sequence
  Synthetic
uguacuuaaaguccauuacaa

SEQ ID NO: 439887 - RNA, 22 nt, Artificial Sequence
  Synthetic
cuguacuuaaaguccauuacaa

SEQ ID NO: 439888 - RNA, 23 nt, Artificial Sequence
  Synthetic
gcuguacuuaaaguccauuacaa

SEQ ID NO: 439889 - RNA, 24 nt, Artificial Sequence
  Synthetic
cgcuguacuuaaaguccauuacaa

SEQ ID NO: 439890 - RNA, 18 nt, Artificial Sequence
  Synthetic
auaaagaaaagauuacaa

SEQ ID NO: 439891 - RNA, 19 nt, Artificial Sequence
  Synthetic
uauaaagaaaagauuacaa

SEQ ID NO: 439892 - RNA, 20 nt, Artificial Sequence
  Synthetic
auauaaagaaaagauuacaa

SEQ ID NO: 439893 - RNA, 21 nt, Artificial Sequence
  Synthetic
aauauaaagaaaagauuacaa

SEQ ID NO: 439894 - RNA, 22 nt, Artificial Sequence
  Synthetic
aaauauaaagaaaagauuacaa

SEQ ID NO: 439895 - RNA, 23 nt, Artificial Sequence
  Synthetic
aaaauauaaagaaaagauuacaa

SEQ ID NO: 439896 - RNA, 24 nt, Artificial Sequence
  Synthetic
aaaaauauaaagaaaagauuacaa

SEQ ID NO: 439897 - RNA, 18 nt, Artificial Sequence
  Synthetic
ucaguagaaagauuacaa

SEQ ID NO: 439898 - RNA, 19 nt, Artificial Sequence
  Synthetic
cucaguagaaagauuacaa

SEQ ID NO: 439899 - RNA, 20 nt, Artificial Sequence
  Synthetic
ucucaguagaaagauuacaa

SEQ ID NO: 439900 - RNA, 21 nt, Artificial Sequence
  Synthetic
gucucaguagaaagauuacaa

SEQ ID NO: 439901 - RNA, 22 nt, Artificial Sequence
  Synthetic
ugucucaguagaaagauuacaa

SEQ ID NO: 439902 - RNA, 23 nt, Artificial Sequence
  Synthetic
augucucaguagaaagauuacaa

SEQ ID NO: 439903 - RNA, 24 nt, Artificial Sequence
  Synthetic
aaugucucaguagaaagauuacaa

SEQ ID NO: 439904 - RNA, 18 nt, Artificial Sequence
  Synthetic
aaucaaugcagauuacaa

SEQ ID NO: 439905 - RNA, 19 nt, Artificial Sequence
  Synthetic
aaaucaaugcagauuacaa

SEQ ID NO: 439906 - RNA, 20 nt, Artificial Sequence
  Synthetic
caaaucaaugcagauuacaa

SEQ ID NO: 439907 - RNA, 21 nt, Artificial Sequence
  Synthetic
gcaaaucaaugcagauuacaa

SEQ ID NO: 439908 - RNA, 22 nt, Artificial Sequence
  Synthetic
agcaaaucaaugcagauuacaa

SEQ ID NO: 439909 - RNA, 23 nt, Artificial Sequence
  Synthetic
uagcaaaucaaugcagauuacaa

SEQ ID NO: 439910 - RNA, 24 nt, Artificial Sequence
  Synthetic
guagcaaaucaaugcagauuacaa

SEQ ID NO: 439911 - RNA, 18 nt, Artificial Sequence
  Synthetic
gauccuaugagauuacaa

SEQ ID NO: 439912 - RNA, 19 nt, Artificial Sequence
  Synthetic
ugauccuaugagauuacaa

SEQ ID NO: 439913 - RNA, 20 nt, Artificial Sequence
  Synthetic
gugauccuaugagauuacaa

SEQ ID NO: 439914 - RNA, 21 nt, Artificial Sequence
  Synthetic
ugugauccuaugagauuacaa

SEQ ID NO: 439915 - RNA, 22 nt, Artificial Sequence
  Synthetic
cugugauccuaugagauuacaa

SEQ ID NO: 439916 - RNA, 23 nt, Artificial Sequence
  Synthetic
acugugauccuaugagauuacaa

SEQ ID NO: 439917 - RNA, 24 nt, Artificial Sequence
  Synthetic
gacugugauccuaugagauuacaa

SEQ ID NO: 439918 - RNA, 18 nt, Artificial Sequence
  Synthetic
uggauaaugugauuacaa

SEQ ID NO: 439919 - RNA, 19 nt, Artificial Sequence
  Synthetic
auggauaaugugauuacaa

SEQ ID NO: 439920 - RNA, 20 nt, Artificial Sequence
  Synthetic
aauggauaaugugauuacaa

SEQ ID NO: 439921 - RNA, 21 nt, Artificial Sequence
  Synthetic
gaauggauaaugugauuacaa

SEQ ID NO: 439922 - RNA, 22 nt, Artificial Sequence
  Synthetic
ggaauggauaaugugauuacaa

SEQ ID NO: 439923 - RNA, 23 nt, Artificial Sequence
  Synthetic
uggaauggauaaugugauuacaa

SEQ ID NO: 439924 - RNA, 24 nt, Artificial Sequence
  Synthetic
uuggaauggauaaugugauuacaa

SEQ ID NO: 439925 - RNA, 18 nt, Artificial Sequence
  Synthetic
agccaacaauuauuacaa

SEQ ID NO: 439926 - RNA, 19 nt, Artificial Sequence
  Synthetic
uagccaacaauuauuacaa

SEQ ID NO: 439927 - RNA, 20 nt, Artificial Sequence
  Synthetic
auagccaacaauuauuacaa

SEQ ID NO: 439928 - RNA, 21 nt, Artificial Sequence
  Synthetic
aauagccaacaauuauuacaa

SEQ ID NO: 439929 - RNA, 22 nt, Artificial Sequence
  Synthetic
gaauagccaacaauuauuacaa

SEQ ID NO: 439930 - RNA, 23 nt, Artificial Sequence
  Synthetic
ggaauagccaacaauuauuacaa

SEQ ID NO: 439931 - RNA, 24 nt, Artificial Sequence
  Synthetic
aggaauagccaacaauuauuacaa

SEQ ID NO: 439932 - RNA, 18 nt, Artificial Sequence
  Synthetic
gcauguucucacuuacaa

SEQ ID NO: 439933 - RNA, 19 nt, Artificial Sequence
  Synthetic
ugcauguucucacuuacaa

SEQ ID NO: 439934 - RNA, 20 nt, Artificial Sequence
  Synthetic
uugcauguucucacuuacaa

SEQ ID NO: 439935 - RNA, 21 nt, Artificial Sequence
  Synthetic
auugcauguucucacuuacaa

SEQ ID NO: 439936 - RNA, 22 nt, Artificial Sequence
  Synthetic
uauugcauguucucacuuacaa

SEQ ID NO: 439937 - RNA, 23 nt, Artificial Sequence
  Synthetic
auauugcauguucucacuuacaa

SEQ ID NO: 439938 - RNA, 24 nt, Artificial Sequence
  Synthetic
aauauugcauguucucacuuacaa

SEQ ID NO: 439939 - RNA, 18 nt, Artificial Sequence
  Synthetic
agaauaguacccuuacaa

SEQ ID NO: 439940 - RNA, 19 nt, Artificial Sequence
  Synthetic
gagaauaguacccuuacaa

SEQ ID NO: 439941 - RNA, 20 nt, Artificial Sequence
  Synthetic
ugagaauaguacccuuacaa

SEQ ID NO: 439942 - RNA, 21 nt, Artificial Sequence
  Synthetic
augagaauaguacccuuacaa

SEQ ID NO: 439943 - RNA, 22 nt, Artificial Sequence
  Synthetic
aaugagaauaguacccuuacaa

SEQ ID NO: 439944 - RNA, 23 nt, Artificial Sequence
  Synthetic
gaaugagaauaguacccuuacaa

SEQ ID NO: 439945 - RNA, 24 nt, Artificial Sequence
  Synthetic
agaaugagaauaguacccuuacaa

SEQ ID NO: 439946 - RNA, 18 nt, Artificial Sequence
  Synthetic
aaaagucaaugcuuacaa

SEQ ID NO: 439947 - RNA, 19 nt, Artificial Sequence
  Synthetic
uaaaagucaaugcuuacaa

SEQ ID NO: 439948 - RNA, 20 nt, Artificial Sequence
  Synthetic
guaaaagucaaugcuuacaa

SEQ ID NO: 439949 - RNA, 21 nt, Artificial Sequence
  Synthetic
gguaaaagucaaugcuuacaa

SEQ ID NO: 439950 - RNA, 22 nt, Artificial Sequence
  Synthetic
agguaaaagucaaugcuuacaa

SEQ ID NO: 439951 - RNA, 23 nt, Artificial Sequence
  Synthetic
aagguaaaagucaaugcuuacaa

SEQ ID NO: 439952 - RNA, 24 nt, Artificial Sequence
  Synthetic
aaagguaaaagucaaugcuuacaa

SEQ ID NO: 439953 - RNA, 18 nt, Artificial Sequence
  Synthetic
uauuuuugcugcuuacaa

SEQ ID NO: 439954 - RNA, 19 nt, Artificial Sequence
  Synthetic
uuauuuuugcugcuuacaa

SEQ ID NO: 439955 - RNA, 20 nt, Artificial Sequence
  Synthetic
cuuauuuuugcugcuuacaa

SEQ ID NO: 439956 - RNA, 21 nt, Artificial Sequence
  Synthetic
acuuauuuuugcugcuuacaa

SEQ ID NO: 439957 - RNA, 22 nt, Artificial Sequence
  Synthetic
aacuuauuuuugcugcuuacaa

SEQ ID NO: 439958 - RNA, 23 nt, Artificial Sequence
  Synthetic
gaacuuauuuuugcugcuuacaa

SEQ ID NO: 439959 - RNA, 24 nt, Artificial Sequence
  Synthetic
ugaacuuauuuuugcugcuuacaa

SEQ ID NO: 439960 - RNA, 18 nt, Artificial Sequence
  Synthetic
acuagauauaucuuacaa

SEQ ID NO: 439961 - RNA, 19 nt, Artificial Sequence
  Synthetic
uacuagauauaucuuacaa

SEQ ID NO: 439962 - RNA, 20 nt, Artificial Sequence
  Synthetic
uuacuagauauaucuuacaa

SEQ ID NO: 439963 - RNA, 21 nt, Artificial Sequence
  Synthetic
cuuacuagauauaucuuacaa

SEQ ID NO: 439964 - RNA, 22 nt, Artificial Sequence
  Synthetic
acuuacuagauauaucuuacaa

SEQ ID NO: 439965 - RNA, 23 nt, Artificial Sequence
  Synthetic
aacuuacuagauauaucuuacaa

SEQ ID NO: 439966 - RNA, 24 nt, Artificial Sequence
  Synthetic
aaacuuacuagauauaucuuacaa

SEQ ID NO: 439967 - RNA, 18 nt, Artificial Sequence
  Synthetic
aaguaagcucaguuacaa

SEQ ID NO: 439968 - RNA, 19 nt, Artificial Sequence
  Synthetic
caaguaagcucaguuacaa

SEQ ID NO: 439969 - RNA, 20 nt, Artificial Sequence
  Synthetic
ucaaguaagcucaguuacaa

SEQ ID NO: 439970 - RNA, 21 nt, Artificial Sequence
  Synthetic
uucaaguaagcucaguuacaa

SEQ ID NO: 439971 - RNA, 22 nt, Artificial Sequence
  Synthetic
auucaaguaagcucaguuacaa

SEQ ID NO: 439972 - RNA, 23 nt, Artificial Sequence
  Synthetic
gauucaaguaagcucaguuacaa

SEQ ID NO: 439973 - RNA, 24 nt, Artificial Sequence
  Synthetic
agauucaaguaagcucaguuacaa

SEQ ID NO: 439974 - RNA, 18 nt, Artificial Sequence
  Synthetic
gcuugaaagcuguuacaa

SEQ ID NO: 439975 - RNA, 19 nt, Artificial Sequence
  Synthetic
ggcuugaaagcuguuacaa

SEQ ID NO: 439976 - RNA, 20 nt, Artificial Sequence
  Synthetic
aggcuugaaagcuguuacaa

SEQ ID NO: 439977 - RNA, 21 nt, Artificial Sequence
  Synthetic
aaggcuugaaagcuguuacaa

SEQ ID NO: 439978 - RNA, 22 nt, Artificial Sequence
  Synthetic
aaaggcuugaaagcuguuacaa

SEQ ID NO: 439979 - RNA, 23 nt, Artificial Sequence
  Synthetic
gaaaggcuugaaagcuguuacaa

SEQ ID NO: 439980 - RNA, 24 nt, Artificial Sequence
  Synthetic
agaaaggcuugaaagcuguuacaa

SEQ ID NO: 439981 - RNA, 18 nt, Artificial Sequence
  Synthetic
accugcauaguguuacaa

SEQ ID NO: 439982 - RNA, 19 nt, Artificial Sequence
  Synthetic
aaccugcauaguguuacaa

SEQ ID NO: 439983 - RNA, 20 nt, Artificial Sequence
  Synthetic
uaaccugcauaguguuacaa

SEQ ID NO: 439984 - RNA, 21 nt, Artificial Sequence
  Synthetic
auaaccugcauaguguuacaa

SEQ ID NO: 439985 - RNA, 22 nt, Artificial Sequence
  Synthetic
aauaaccugcauaguguuacaa

SEQ ID NO: 439986 - RNA, 23 nt, Artificial Sequence
  Synthetic
caauaaccugcauaguguuacaa

SEQ ID NO: 439987 - RNA, 24 nt, Artificial Sequence
  Synthetic
ccaauaaccugcauaguguuacaa

SEQ ID NO: 439988 - RNA, 18 nt, Artificial Sequence
  Synthetic
aucauacgugauuuacaa

SEQ ID NO: 439989 - RNA, 19 nt, Artificial Sequence
  Synthetic
aaucauacgugauuuacaa

SEQ ID NO: 439990 - RNA, 20 nt, Artificial Sequence
  Synthetic
uaaucauacgugauuuacaa

SEQ ID NO: 439991 - RNA, 21 nt, Artificial Sequence
  Synthetic
uuaaucauacgugauuuacaa

SEQ ID NO: 439992 - RNA, 22 nt, Artificial Sequence
  Synthetic
guuaaucauacgugauuuacaa

SEQ ID NO: 439993 - RNA, 23 nt, Artificial Sequence
  Synthetic
uguuaaucauacgugauuuacaa

SEQ ID NO: 439994 - RNA, 24 nt, Artificial Sequence
  Synthetic
cuguuaaucauacgugauuuacaa

SEQ ID NO: 439995 - RNA, 18 nt, Artificial Sequence
  Synthetic
ccaaaccucacuuuacaa

SEQ ID NO: 439996 - RNA, 19 nt, Artificial Sequence
  Synthetic
cccaaaccucacuuuacaa

SEQ ID NO: 439997 - RNA, 20 nt, Artificial Sequence
  Synthetic
ccccaaaccucacuuuacaa

SEQ ID NO: 439998 - RNA, 21 nt, Artificial Sequence
  Synthetic
cccccaaaccucacuuuacaa

SEQ ID NO: 439999 - RNA, 22 nt, Artificial Sequence
  Synthetic
ucccccaaaccucacuuuacaa

SEQ ID NO: 440000 - RNA, 23 nt, Artificial Sequence
  Synthetic
aucccccaaaccucacuuuacaa

SEQ ID NO: 440001 - RNA, 24 nt, Artificial Sequence
  Synthetic
caucccccaaaccucacuuuacaa

SEQ ID NO: 440002 - RNA, 18 nt, Artificial Sequence
  Synthetic
aaaaaaaaugcuuuacaa

SEQ ID NO: 440003 - RNA, 19 nt, Artificial Sequence
  Synthetic
aaaaaaaaaugcuuuacaa

SEQ ID NO: 440004 - RNA, 20 nt, Artificial Sequence
  Synthetic
aaaaaaaaaaugcuuuacaa

SEQ ID NO: 440005 - RNA, 21 nt, Artificial Sequence
  Synthetic
aaaaaaaaaaaugcuuuacaa

SEQ ID NO: 440006 - RNA, 22 nt, Artificial Sequence
  Synthetic
gaaaaaaaaaaaugcuuuacaa

SEQ ID NO: 440007 - RNA, 23 nt, Artificial Sequence
  Synthetic
ggaaaaaaaaaaaugcuuuacaa

SEQ ID NO: 440008 - RNA, 24 nt, Artificial Sequence
  Synthetic
gggaaaaaaaaaaaugcuuuacaa

SEQ ID NO: 440009 - RNA, 18 nt, Artificial Sequence
  Synthetic
acucaaccuucuuuacaa

SEQ ID NO: 440010 - RNA, 19 nt, Artificial Sequence
  Synthetic
gacucaaccuucuuuacaa

SEQ ID NO: 440011 - RNA, 20 nt, Artificial Sequence
  Synthetic
ggacucaaccuucuuuacaa

SEQ ID NO: 440012 - RNA, 21 nt, Artificial Sequence
  Synthetic
gggacucaaccuucuuuacaa

SEQ ID NO: 440013 - RNA, 22 nt, Artificial Sequence
  Synthetic
ggggacucaaccuucuuuacaa

SEQ ID NO: 440014 - RNA, 23 nt, Artificial Sequence
  Synthetic
aggggacucaaccuucuuuacaa

SEQ ID NO: 440015 - RNA, 24 nt, Artificial Sequence
  Synthetic
aaggggacucaaccuucuuuacaa

SEQ ID NO: 440016 - RNA, 18 nt, Artificial Sequence
  Synthetic
uaacugcagauuuuacaa

SEQ ID NO: 440017 - RNA, 19 nt, Artificial Sequence
  Synthetic
cuaacugcagauuuuacaa

SEQ ID NO: 440018 - RNA, 20 nt, Artificial Sequence
  Synthetic
ucuaacugcagauuuuacaa

SEQ ID NO: 440019 - RNA, 21 nt, Artificial Sequence
  Synthetic
cucuaacugcagauuuuacaa

SEQ ID NO: 440020 - RNA, 22 nt, Artificial Sequence
  Synthetic
ucucuaacugcagauuuuacaa

SEQ ID NO: 440021 - RNA, 23 nt, Artificial Sequence
  Synthetic
cucucuaacugcagauuuuacaa

SEQ ID NO: 440022 - RNA, 24 nt, Artificial Sequence
  Synthetic
acucucuaacugcagauuuuacaa

SEQ ID NO: 440023 - RNA, 18 nt, Artificial Sequence
  Synthetic
auuuaacauauuuuacaa

SEQ ID NO: 440024 - RNA, 19 nt, Artificial Sequence
  Synthetic
cauuuaacauauuuuacaa

SEQ ID NO: 440025 - RNA, 20 nt, Artificial Sequence
  Synthetic
ucauuuaacauauuuuacaa

SEQ ID NO: 440026 - RNA, 21 nt, Artificial Sequence
  Synthetic
uucauuuaacauauuuuacaa

SEQ ID NO: 440027 - RNA, 22 nt, Artificial Sequence
  Synthetic
uuucauuuaacauauuuuacaa

SEQ ID NO: 440028 - RNA, 23 nt, Artificial Sequence
  Synthetic
uuuucauuuaacauauuuuacaa

SEQ ID NO: 440029 - RNA, 24 nt, Artificial Sequence
  Synthetic
auuuucauuuaacauauuuuacaa

SEQ ID NO: 440030 - RNA, 18 nt, Artificial Sequence
  Synthetic
gauccuuauuuuuuacaa

SEQ ID NO: 440031 - RNA, 19 nt, Artificial Sequence
  Synthetic
ggauccuuauuuuuuacaa

SEQ ID NO: 440032 - RNA, 20 nt, Artificial Sequence
  Synthetic
uggauccuuauuuuuuacaa

SEQ ID NO: 440033 - RNA, 21 nt, Artificial Sequence
  Synthetic
auggauccuuauuuuuuacaa

SEQ ID NO: 440034 - RNA, 22 nt, Artificial Sequence
  Synthetic
aauggauccuuauuuuuuacaa

SEQ ID NO: 440035 - RNA, 23 nt, Artificial Sequence
  Synthetic
aaauggauccuuauuuuuuacaa

SEQ ID NO: 440036 - RNA, 24 nt, Artificial Sequence
  Synthetic
gaaauggauccuuauuuuuuacaa

SEQ ID NO: 440037 - RNA, 18 nt, Artificial Sequence
  Synthetic
acauuuuaauaaaaccaa

SEQ ID NO: 440038 - RNA, 19 nt, Artificial Sequence
  Synthetic
uacauuuuaauaaaaccaa

SEQ ID NO: 440039 - RNA, 20 nt, Artificial Sequence
  Synthetic
auacauuuuaauaaaaccaa

SEQ ID NO: 440040 - RNA, 21 nt, Artificial Sequence
  Synthetic
aauacauuuuaauaaaaccaa

SEQ ID NO: 440041 - RNA, 22 nt, Artificial Sequence
  Synthetic
aaauacauuuuaauaaaaccaa

SEQ ID NO: 440042 - RNA, 23 nt, Artificial Sequence
  Synthetic
uaaauacauuuuaauaaaaccaa

SEQ ID NO: 440043 - RNA, 24 nt, Artificial Sequence
  Synthetic
auaaauacauuuuaauaaaaccaa

SEQ ID NO: 440044 - RNA, 18 nt, Artificial Sequence
  Synthetic
uagaagacuacaaaccaa

SEQ ID NO: 440045 - RNA, 19 nt, Artificial Sequence
  Synthetic
cuagaagacuacaaaccaa

SEQ ID NO: 440046 - RNA, 20 nt, Artificial Sequence
  Synthetic
acuagaagacuacaaaccaa

SEQ ID NO: 440047 - RNA, 21 nt, Artificial Sequence
  Synthetic
gacuagaagacuacaaaccaa

SEQ ID NO: 440048 - RNA, 22 nt, Artificial Sequence
  Synthetic
agacuagaagacuacaaaccaa

SEQ ID NO: 440049 - RNA, 23 nt, Artificial Sequence
  Synthetic
aagacuagaagacuacaaaccaa

SEQ ID NO: 440050 - RNA, 24 nt, Artificial Sequence
  Synthetic
aaagacuagaagacuacaaaccaa

SEQ ID NO: 440051 - RNA, 18 nt, Artificial Sequence
  Synthetic
ugaaaugcaccaaaccaa

SEQ ID NO: 440052 - RNA, 19 nt, Artificial Sequence
  Synthetic
gugaaaugcaccaaaccaa

SEQ ID NO: 440053 - RNA, 20 nt, Artificial Sequence
  Synthetic
agugaaaugcaccaaaccaa

SEQ ID NO: 440054 - RNA, 21 nt, Artificial Sequence
  Synthetic
aagugaaaugcaccaaaccaa

SEQ ID NO: 440055 - RNA, 22 nt, Artificial Sequence
  Synthetic
aaagugaaaugcaccaaaccaa

SEQ ID NO: 440056 - RNA, 23 nt, Artificial Sequence
  Synthetic
caaagugaaaugcaccaaaccaa

SEQ ID NO: 440057 - RNA, 24 nt, Artificial Sequence
  Synthetic
ccaaagugaaaugcaccaaaccaa

SEQ ID NO: 440058 - RNA, 18 nt, Artificial Sequence
  Synthetic
acuuuuuuuggaaaccaa

SEQ ID NO: 440059 - RNA, 19 nt, Artificial Sequence
  Synthetic
aacuuuuuuuggaaaccaa

SEQ ID NO: 440060 - RNA, 20 nt, Artificial Sequence
  Synthetic
gaacuuuuuuuggaaaccaa

SEQ ID NO: 440061 - RNA, 21 nt, Artificial Sequence
  Synthetic
ggaacuuuuuuuggaaaccaa

SEQ ID NO: 440062 - RNA, 22 nt, Artificial Sequence
  Synthetic
cggaacuuuuuuuggaaaccaa

SEQ ID NO: 440063 - RNA, 23 nt, Artificial Sequence
  Synthetic
acggaacuuuuuuuggaaaccaa

SEQ ID NO: 440064 - RNA, 24 nt, Artificial Sequence
  Synthetic
gacggaacuuuuuuuggaaaccaa

SEQ ID NO: 440065 - RNA, 18 nt, Artificial Sequence
  Synthetic
cuugggugccuaaaccaa

SEQ ID NO: 440066 - RNA, 19 nt, Artificial Sequence
  Synthetic
ucuugggugccuaaaccaa

SEQ ID NO: 440067 - RNA, 20 nt, Artificial Sequence
  Synthetic
cucuugggugccuaaaccaa

SEQ ID NO: 440068 - RNA, 21 nt, Artificial Sequence
  Synthetic
gcucuugggugccuaaaccaa

SEQ ID NO: 440069 - RNA, 22 nt, Artificial Sequence
  Synthetic
ggcucuugggugccuaaaccaa

SEQ ID NO: 440070 - RNA, 23 nt, Artificial Sequence
  Synthetic
gggcucuugggugccuaaaccaa

SEQ ID NO: 440071 - RNA, 24 nt, Artificial Sequence
  Synthetic
agggcucuugggugccuaaaccaa

SEQ ID NO: 440072 - RNA, 18 nt, Artificial Sequence
  Synthetic
accuaguuucuaaaccaa

SEQ ID NO: 440073 - RNA, 19 nt, Artificial Sequence
  Synthetic
aaccuaguuucuaaaccaa

SEQ ID NO: 440074 - RNA, 20 nt, Artificial Sequence
  Synthetic
gaaccuaguuucuaaaccaa

SEQ ID NO: 440075 - RNA, 21 nt, Artificial Sequence
  Synthetic
ggaaccuaguuucuaaaccaa

SEQ ID NO: 440076 - RNA, 22 nt, Artificial Sequence
  Synthetic
aggaaccuaguuucuaaaccaa

SEQ ID NO: 440077 - RNA, 23 nt, Artificial Sequence
  Synthetic
gaggaaccuaguuucuaaaccaa

SEQ ID NO: 440078 - RNA, 24 nt, Artificial Sequence
  Synthetic
ugaggaaccuaguuucuaaaccaa

SEQ ID NO: 440079 - RNA, 18 nt, Artificial Sequence
  Synthetic
aguuaucuguuaaaccaa

SEQ ID NO: 440080 - RNA, 19 nt, Artificial Sequence
  Synthetic
uaguuaucuguuaaaccaa

SEQ ID NO: 440081 - RNA, 20 nt, Artificial Sequence
  Synthetic
auaguuaucuguuaaaccaa

SEQ ID NO: 440082 - RNA, 21 nt, Artificial Sequence
  Synthetic
aauaguuaucuguuaaaccaa

SEQ ID NO: 440083 - RNA, 22 nt, Artificial Sequence
  Synthetic
aaauaguuaucuguuaaaccaa

SEQ ID NO: 440084 - RNA, 23 nt, Artificial Sequence
  Synthetic
uaaauaguuaucuguuaaaccaa

SEQ ID NO: 440085 - RNA, 24 nt, Artificial Sequence
  Synthetic
cuaaauaguuaucuguuaaaccaa

SEQ ID NO: 440086 - RNA, 18 nt, Artificial Sequence
  Synthetic
aagugaagagacaaccaa

SEQ ID NO: 440087 - RNA, 19 nt, Artificial Sequence
  Synthetic
aaagugaagagacaaccaa

SEQ ID NO: 440088 - RNA, 20 nt, Artificial Sequence
  Synthetic
uaaagugaagagacaaccaa

SEQ ID NO: 440089 - RNA, 21 nt, Artificial Sequence
  Synthetic
auaaagugaagagacaaccaa

SEQ ID NO: 440090 - RNA, 22 nt, Artificial Sequence
  Synthetic
aauaaagugaagagacaaccaa

SEQ ID NO: 440091 - RNA, 23 nt, Artificial Sequence
  Synthetic
caauaaagugaagagacaaccaa

SEQ ID NO: 440092 - RNA, 24 nt, Artificial Sequence
  Synthetic
ucaauaaagugaagagacaaccaa

SEQ ID NO: 440093 - RNA, 18 nt, Artificial Sequence
  Synthetic
gaaagagaauucaaccaa

SEQ ID NO: 440094 - RNA, 19 nt, Artificial Sequence
  Synthetic
ggaaagagaauucaaccaa

SEQ ID NO: 440095 - RNA, 20 nt, Artificial Sequence
  Synthetic
gggaaagagaauucaaccaa

SEQ ID NO: 440096 - RNA, 21 nt, Artificial Sequence
  Synthetic
ggggaaagagaauucaaccaa

SEQ ID NO: 440097 - RNA, 22 nt, Artificial Sequence
  Synthetic
aggggaaagagaauucaaccaa

SEQ ID NO: 440098 - RNA, 23 nt, Artificial Sequence
  Synthetic
aaggggaaagagaauucaaccaa

SEQ ID NO: 440099 - RNA, 24 nt, Artificial Sequence
  Synthetic
uaaggggaaagagaauucaaccaa

SEQ ID NO: 440100 - RNA, 18 nt, Artificial Sequence
  Synthetic
ggaugucuauucaaccaa

SEQ ID NO: 440101 - RNA, 19 nt, Artificial Sequence
  Synthetic
uggaugucuauucaaccaa

SEQ ID NO: 440102 - RNA, 20 nt, Artificial Sequence
  Synthetic
cuggaugucuauucaaccaa

SEQ ID NO: 440103 - RNA, 21 nt, Artificial Sequence
  Synthetic
gcuggaugucuauucaaccaa

SEQ ID NO: 440104 - RNA, 22 nt, Artificial Sequence
  Synthetic
agcuggaugucuauucaaccaa

SEQ ID NO: 440105 - RNA, 23 nt, Artificial Sequence
  Synthetic
aagcuggaugucuauucaaccaa

SEQ ID NO: 440106 - RNA, 24 nt, Artificial Sequence
  Synthetic
uaagcuggaugucuauucaaccaa

SEQ ID NO: 440107 - RNA, 18 nt, Artificial Sequence
  Synthetic
agcaagcacacuaaccaa

SEQ ID NO: 440108 - RNA, 19 nt, Artificial Sequence
  Synthetic
gagcaagcacacuaaccaa

SEQ ID NO: 440109 - RNA, 20 nt, Artificial Sequence
  Synthetic
ugagcaagcacacuaaccaa

SEQ ID NO: 440110 - RNA, 21 nt, Artificial Sequence
  Synthetic
cugagcaagcacacuaaccaa

SEQ ID NO: 440111 - RNA, 22 nt, Artificial Sequence
  Synthetic
ucugagcaagcacacuaaccaa

SEQ ID NO: 440112 - RNA, 23 nt, Artificial Sequence
  Synthetic
aucugagcaagcacacuaaccaa

SEQ ID NO: 440113 - RNA, 24 nt, Artificial Sequence
  Synthetic
uaucugagcaagcacacuaaccaa

SEQ ID NO: 440114 - RNA, 18 nt, Artificial Sequence
  Synthetic
uaauuucuauaacaccaa

SEQ ID NO: 440115 - RNA, 19 nt, Artificial Sequence
  Synthetic
auaauuucuauaacaccaa

SEQ ID NO: 440116 - RNA, 20 nt, Artificial Sequence
  Synthetic
cauaauuucuauaacaccaa

SEQ ID NO: 440117 - RNA, 21 nt, Artificial Sequence
  Synthetic
acauaauuucuauaacaccaa

SEQ ID NO: 440118 - RNA, 22 nt, Artificial Sequence
  Synthetic
cacauaauuucuauaacaccaa

SEQ ID NO: 440119 - RNA, 23 nt, Artificial Sequence
  Synthetic
ucacauaauuucuauaacaccaa

SEQ ID NO: 440120 - RNA, 24 nt, Artificial Sequence
  Synthetic
uucacauaauuucuauaacaccaa

SEQ ID NO: 440121 - RNA, 18 nt, Artificial Sequence
  Synthetic
aacagagauauacaccaa

SEQ ID NO: 440122 - RNA, 19 nt, Artificial Sequence
  Synthetic
aaacagagauauacaccaa

SEQ ID NO: 440123 - RNA, 20 nt, Artificial Sequence
  Synthetic
aaaacagagauauacaccaa

SEQ ID NO: 440124 - RNA, 21 nt, Artificial Sequence
  Synthetic
caaaacagagauauacaccaa

SEQ ID NO: 440125 - RNA, 22 nt, Artificial Sequence
  Synthetic
ccaaaacagagauauacaccaa

SEQ ID NO: 440126 - RNA, 23 nt, Artificial Sequence
  Synthetic
accaaaacagagauauacaccaa

SEQ ID NO: 440127 - RNA, 24 nt, Artificial Sequence
  Synthetic
uaccaaaacagagauauacaccaa

SEQ ID NO: 440128 - RNA, 18 nt, Artificial Sequence
  Synthetic
guuaaagaguuacaccaa

SEQ ID NO: 440129 - RNA, 19 nt, Artificial Sequence
  Synthetic
cguuaaagaguuacaccaa

SEQ ID NO: 440130 - RNA, 20 nt, Artificial Sequence
  Synthetic
ucguuaaagaguuacaccaa

SEQ ID NO: 440131 - RNA, 21 nt, Artificial Sequence
  Synthetic
uucguuaaagaguuacaccaa

SEQ ID NO: 440132 - RNA, 22 nt, Artificial Sequence
  Synthetic
auucguuaaagaguuacaccaa

SEQ ID NO: 440133 - RNA, 23 nt, Artificial Sequence
  Synthetic
uauucguuaaagaguuacaccaa

SEQ ID NO: 440134 - RNA, 24 nt, Artificial Sequence
  Synthetic
auauucguuaaagaguuacaccaa

SEQ ID NO: 440135 - RNA, 18 nt, Artificial Sequence
  Synthetic
aacagucaaugccaccaa

SEQ ID NO: 440136 - RNA, 19 nt, Artificial Sequence
  Synthetic
caacagucaaugccaccaa

SEQ ID NO: 440137 - RNA, 20 nt, Artificial Sequence
  Synthetic
ccaacagucaaugccaccaa

SEQ ID NO: 440138 - RNA, 21 nt, Artificial Sequence
  Synthetic
accaacagucaaugccaccaa

SEQ ID NO: 440139 - RNA, 22 nt, Artificial Sequence
  Synthetic
uaccaacagucaaugccaccaa

SEQ ID NO: 440140 - RNA, 23 nt, Artificial Sequence
  Synthetic
cuaccaacagucaaugccaccaa

SEQ ID NO: 440141 - RNA, 24 nt, Artificial Sequence
  Synthetic
ucuaccaacagucaaugccaccaa

SEQ ID NO: 440142 - RNA, 18 nt, Artificial Sequence
  Synthetic
caaaagucauagcaccaa

SEQ ID NO: 440143 - RNA, 19 nt, Artificial Sequence
  Synthetic
acaaaagucauagcaccaa

SEQ ID NO: 440144 - RNA, 20 nt, Artificial Sequence
  Synthetic
cacaaaagucauagcaccaa

SEQ ID NO: 440145 - RNA, 21 nt, Artificial Sequence
  Synthetic
ucacaaaagucauagcaccaa

SEQ ID NO: 440146 - RNA, 22 nt, Artificial Sequence
  Synthetic
gucacaaaagucauagcaccaa

SEQ ID NO: 440147 - RNA, 23 nt, Artificial Sequence
  Synthetic
ugucacaaaagucauagcaccaa

SEQ ID NO: 440148 - RNA, 24 nt, Artificial Sequence
  Synthetic
uugucacaaaagucauagcaccaa

SEQ ID NO: 440149 - RNA, 18 nt, Artificial Sequence
  Synthetic
ucaagggcagcucaccaa

SEQ ID NO: 440150 - RNA, 19 nt, Artificial Sequence
  Synthetic
aucaagggcagcucaccaa

SEQ ID NO: 440151 - RNA, 20 nt, Artificial Sequence
  Synthetic
aaucaagggcagcucaccaa

SEQ ID NO: 440152 - RNA, 21 nt, Artificial Sequence
  Synthetic
uaaucaagggcagcucaccaa

SEQ ID NO: 440153 - RNA, 22 nt, Artificial Sequence
  Synthetic
cuaaucaagggcagcucaccaa

SEQ ID NO: 440154 - RNA, 23 nt, Artificial Sequence
  Synthetic
acuaaucaagggcagcucaccaa

SEQ ID NO: 440155 - RNA, 24 nt, Artificial Sequence
  Synthetic
aacuaaucaagggcagcucaccaa

SEQ ID NO: 440156 - RNA, 18 nt, Artificial Sequence
  Synthetic
aaaguaaaaucucaccaa

SEQ ID NO: 440157 - RNA, 19 nt, Artificial Sequence
  Synthetic
caaaguaaaaucucaccaa

SEQ ID NO: 440158 - RNA, 20 nt, Artificial Sequence
  Synthetic
ucaaaguaaaaucucaccaa

SEQ ID NO: 440159 - RNA, 21 nt, Artificial Sequence
  Synthetic
uucaaaguaaaaucucaccaa

SEQ ID NO: 440160 - RNA, 22 nt, Artificial Sequence
  Synthetic
uuucaaaguaaaaucucaccaa

SEQ ID NO: 440161 - RNA, 23 nt, Artificial Sequence
  Synthetic
auuucaaaguaaaaucucaccaa

SEQ ID NO: 440162 - RNA, 24 nt, Artificial Sequence
  Synthetic
aauuucaaaguaaaaucucaccaa

SEQ ID NO: 440163 - RNA, 18 nt, Artificial Sequence
  Synthetic
aauauauucugucaccaa

SEQ ID NO: 440164 - RNA, 19 nt, Artificial Sequence
  Synthetic
gaauauauucugucaccaa

SEQ ID NO: 440165 - RNA, 20 nt, Artificial Sequence
  Synthetic
ugaauauauucugucaccaa

SEQ ID NO: 440166 - RNA, 21 nt, Artificial Sequence
  Synthetic
cugaauauauucugucaccaa

SEQ ID NO: 440167 - RNA, 22 nt, Artificial Sequence
  Synthetic
gcugaauauauucugucaccaa

SEQ ID NO: 440168 - RNA, 23 nt, Artificial Sequence
  Synthetic
ugcugaauauauucugucaccaa

SEQ ID NO: 440169 - RNA, 24 nt, Artificial Sequence
  Synthetic
uugcugaauauauucugucaccaa

SEQ ID NO: 440170 - RNA, 18 nt, Artificial Sequence
  Synthetic
ggccauuuuugucaccaa

SEQ ID NO: 440171 - RNA, 19 nt, Artificial Sequence
  Synthetic
aggccauuuuugucaccaa

SEQ ID NO: 440172 - RNA, 20 nt, Artificial Sequence
  Synthetic
caggccauuuuugucaccaa

SEQ ID NO: 440173 - RNA, 21 nt, Artificial Sequence
  Synthetic
ucaggccauuuuugucaccaa

SEQ ID NO: 440174 - RNA, 22 nt, Artificial Sequence
  Synthetic
uucaggccauuuuugucaccaa

SEQ ID NO: 440175 - RNA, 23 nt, Artificial Sequence
  Synthetic
cuucaggccauuuuugucaccaa

SEQ ID NO: 440176 - RNA, 24 nt, Artificial Sequence
  Synthetic
gcuucaggccauuuuugucaccaa

SEQ ID NO: 440177 - RNA, 18 nt, Artificial Sequence
  Synthetic
cagaaaaauauucaccaa

SEQ ID NO: 440178 - RNA, 19 nt, Artificial Sequence
  Synthetic
gcagaaaaauauucaccaa

SEQ ID NO: 440179 - RNA, 20 nt, Artificial Sequence
  Synthetic
agcagaaaaauauucaccaa

SEQ ID NO: 440180 - RNA, 21 nt, Artificial Sequence
  Synthetic
uagcagaaaaauauucaccaa

SEQ ID NO: 440181 - RNA, 22 nt, Artificial Sequence
  Synthetic
uuagcagaaaaauauucaccaa

SEQ ID NO: 440182 - RNA, 23 nt, Artificial Sequence
  Synthetic
uuuagcagaaaaauauucaccaa

SEQ ID NO: 440183 - RNA, 24 nt, Artificial Sequence
  Synthetic
auuuagcagaaaaauauucaccaa

SEQ ID NO: 440184 - RNA, 18 nt, Artificial Sequence
  Synthetic
aaagcauuauaagaccaa

SEQ ID NO: 440185 - RNA, 19 nt, Artificial Sequence
  Synthetic
uaaagcauuauaagaccaa

SEQ ID NO: 440186 - RNA, 20 nt, Artificial Sequence
  Synthetic
auaaagcauuauaagaccaa

SEQ ID NO: 440187 - RNA, 21 nt, Artificial Sequence
  Synthetic
uauaaagcauuauaagaccaa

SEQ ID NO: 440188 - RNA, 22 nt, Artificial Sequence
  Synthetic
guauaaagcauuauaagaccaa

SEQ ID NO: 440189 - RNA, 23 nt, Artificial Sequence
  Synthetic
gguauaaagcauuauaagaccaa

SEQ ID NO: 440190 - RNA, 24 nt, Artificial Sequence
  Synthetic
agguauaaagcauuauaagaccaa

SEQ ID NO: 440191 - RNA, 18 nt, Artificial Sequence
  Synthetic
aggaauauaggagaccaa

SEQ ID NO: 440192 - RNA, 19 nt, Artificial Sequence
  Synthetic
gaggaauauaggagaccaa

SEQ ID NO: 440193 - RNA, 20 nt, Artificial Sequence
  Synthetic
ggaggaauauaggagaccaa

SEQ ID NO: 440194 - RNA, 21 nt, Artificial Sequence
  Synthetic
uggaggaauauaggagaccaa

SEQ ID NO: 440195 - RNA, 22 nt, Artificial Sequence
  Synthetic
uuggaggaauauaggagaccaa

SEQ ID NO: 440196 - RNA, 23 nt, Artificial Sequence
  Synthetic
cuuggaggaauauaggagaccaa

SEQ ID NO: 440197 - RNA, 24 nt, Artificial Sequence
  Synthetic
ccuuggaggaauauaggagaccaa

SEQ ID NO: 440198 - RNA, 18 nt, Artificial Sequence
  Synthetic
ggcagacauauagaccaa

SEQ ID NO: 440199 - RNA, 19 nt, Artificial Sequence
  Synthetic
aggcagacauauagaccaa

SEQ ID NO: 440200 - RNA, 20 nt, Artificial Sequence
  Synthetic
aaggcagacauauagaccaa

SEQ ID NO: 440201 - RNA, 21 nt, Artificial Sequence
  Synthetic
aaaggcagacauauagaccaa

SEQ ID NO: 440202 - RNA, 22 nt, Artificial Sequence
  Synthetic
uaaaggcagacauauagaccaa

SEQ ID NO: 440203 - RNA, 23 nt, Artificial Sequence
  Synthetic
auaaaggcagacauauagaccaa

SEQ ID NO: 440204 - RNA, 24 nt, Artificial Sequence
  Synthetic
cauaaaggcagacauauagaccaa

SEQ ID NO: 440205 - RNA, 18 nt, Artificial Sequence
  Synthetic
aacagagauauagaccaa

SEQ ID NO: 440206 - RNA, 19 nt, Artificial Sequence
  Synthetic
aaacagagauauagaccaa

SEQ ID NO: 440207 - RNA, 20 nt, Artificial Sequence
  Synthetic
aaaacagagauauagaccaa

SEQ ID NO: 440208 - RNA, 21 nt, Artificial Sequence
  Synthetic
caaaacagagauauagaccaa

SEQ ID NO: 440209 - RNA, 22 nt, Artificial Sequence
  Synthetic
ccaaaacagagauauagaccaa

SEQ ID NO: 440210 - RNA, 23 nt, Artificial Sequence
  Synthetic
accaaaacagagauauagaccaa

SEQ ID NO: 440211 - RNA, 24 nt, Artificial Sequence
  Synthetic
uaccaaaacagagauauagaccaa

SEQ ID NO: 440212 - RNA, 18 nt, Artificial Sequence
  Synthetic
aaugacauuuuagaccaa

SEQ ID NO: 440213 - RNA, 19 nt, Artificial Sequence
  Synthetic
gaaugacauuuuagaccaa

SEQ ID NO: 440214 - RNA, 20 nt, Artificial Sequence
  Synthetic
ugaaugacauuuuagaccaa

SEQ ID NO: 440215 - RNA, 21 nt, Artificial Sequence
  Synthetic
uugaaugacauuuuagaccaa

SEQ ID NO: 440216 - RNA, 22 nt, Artificial Sequence
  Synthetic
cuugaaugacauuuuagaccaa

SEQ ID NO: 440217 - RNA, 23 nt, Artificial Sequence
  Synthetic
acuugaaugacauuuuagaccaa

SEQ ID NO: 440218 - RNA, 24 nt, Artificial Sequence
  Synthetic
gacuugaaugacauuuuagaccaa

SEQ ID NO: 440219 - RNA, 18 nt, Artificial Sequence
  Synthetic
aagcuucugcacgaccaa

SEQ ID NO: 440220 - RNA, 19 nt, Artificial Sequence
  Synthetic
aaagcuucugcacgaccaa

SEQ ID NO: 440221 - RNA, 20 nt, Artificial Sequence
  Synthetic
aaaagcuucugcacgaccaa

SEQ ID NO: 440222 - RNA, 21 nt, Artificial Sequence
  Synthetic
caaaagcuucugcacgaccaa

SEQ ID NO: 440223 - RNA, 22 nt, Artificial Sequence
  Synthetic
ucaaaagcuucugcacgaccaa

SEQ ID NO: 440224 - RNA, 23 nt, Artificial Sequence
  Synthetic
aucaaaagcuucugcacgaccaa

SEQ ID NO: 440225 - RNA, 24 nt, Artificial Sequence
  Synthetic
aaucaaaagcuucugcacgaccaa

SEQ ID NO: 440226 - RNA, 18 nt, Artificial Sequence
  Synthetic
auuauucaccaugaccaa

SEQ ID NO: 440227 - RNA, 19 nt, Artificial Sequence
  Synthetic
gauuauucaccaugaccaa

SEQ ID NO: 440228 - RNA, 20 nt, Artificial Sequence
  Synthetic
ggauuauucaccaugaccaa

SEQ ID NO: 440229 - RNA, 21 nt, Artificial Sequence
  Synthetic
aggauuauucaccaugaccaa

SEQ ID NO: 440230 - RNA, 22 nt, Artificial Sequence
  Synthetic
aaggauuauucaccaugaccaa

SEQ ID NO: 440231 - RNA, 23 nt, Artificial Sequence
  Synthetic
gaaggauuauucaccaugaccaa

SEQ ID NO: 440232 - RNA, 24 nt, Artificial Sequence
  Synthetic
agaaggauuauucaccaugaccaa

SEQ ID NO: 440233 - RNA, 18 nt, Artificial Sequence
  Synthetic
auggaugaggaugaccaa

SEQ ID NO: 440234 - RNA, 19 nt, Artificial Sequence
  Synthetic
aauggaugaggaugaccaa

SEQ ID NO: 440235 - RNA, 20 nt, Artificial Sequence
  Synthetic
gaauggaugaggaugaccaa

SEQ ID NO: 440236 - RNA, 21 nt, Artificial Sequence
  Synthetic
ggaauggaugaggaugaccaa

SEQ ID NO: 440237 - RNA, 22 nt, Artificial Sequence
  Synthetic
cggaauggaugaggaugaccaa

SEQ ID NO: 440238 - RNA, 23 nt, Artificial Sequence
  Synthetic
acggaauggaugaggaugaccaa

SEQ ID NO: 440239 - RNA, 24 nt, Artificial Sequence
  Synthetic
cacggaauggaugaggaugaccaa

SEQ ID NO: 440240 - RNA, 18 nt, Artificial Sequence
  Synthetic
guuggccagauugaccaa

SEQ ID NO: 440241 - RNA, 19 nt, Artificial Sequence
  Synthetic
gguuggccagauugaccaa

SEQ ID NO: 440242 - RNA, 20 nt, Artificial Sequence
  Synthetic
agguuggccagauugaccaa

SEQ ID NO: 440243 - RNA, 21 nt, Artificial Sequence
  Synthetic
aagguuggccagauugaccaa

SEQ ID NO: 440244 - RNA, 22 nt, Artificial Sequence
  Synthetic
aaagguuggccagauugaccaa

SEQ ID NO: 440245 - RNA, 23 nt, Artificial Sequence
  Synthetic
caaagguuggccagauugaccaa

SEQ ID NO: 440246 - RNA, 24 nt, Artificial Sequence
  Synthetic
ccaaagguuggccagauugaccaa

SEQ ID NO: 440247 - RNA, 18 nt, Artificial Sequence
  Synthetic
acuuacaguuuugaccaa

SEQ ID NO: 440248 - RNA, 19 nt, Artificial Sequence
  Synthetic
cacuuacaguuuugaccaa

SEQ ID NO: 440249 - RNA, 20 nt, Artificial Sequence
  Synthetic
acacuuacaguuuugaccaa

SEQ ID NO: 440250 - RNA, 21 nt, Artificial Sequence
  Synthetic
aacacuuacaguuuugaccaa

SEQ ID NO: 440251 - RNA, 22 nt, Artificial Sequence
  Synthetic
uaacacuuacaguuuugaccaa

SEQ ID NO: 440252 - RNA, 23 nt, Artificial Sequence
  Synthetic
auaacacuuacaguuuugaccaa

SEQ ID NO: 440253 - RNA, 24 nt, Artificial Sequence
  Synthetic
uauaacacuuacaguuuugaccaa

SEQ ID NO: 440254 - RNA, 18 nt, Artificial Sequence
  Synthetic
gugucauuaaaauaccaa

SEQ ID NO: 440255 - RNA, 19 nt, Artificial Sequence
  Synthetic
agugucauuaaaauaccaa

SEQ ID NO: 440256 - RNA, 20 nt, Artificial Sequence
  Synthetic
cagugucauuaaaauaccaa

SEQ ID NO: 440257 - RNA, 21 nt, Artificial Sequence
  Synthetic
ccagugucauuaaaauaccaa

SEQ ID NO: 440258 - RNA, 22 nt, Artificial Sequence
  Synthetic
accagugucauuaaaauaccaa

SEQ ID NO: 440259 - RNA, 23 nt, Artificial Sequence
  Synthetic
uaccagugucauuaaaauaccaa

SEQ ID NO: 440260 - RNA, 24 nt, Artificial Sequence
  Synthetic
guaccagugucauuaaaauaccaa

SEQ ID NO: 440261 - RNA, 18 nt, Artificial Sequence
  Synthetic
guacacuguaaauaccaa

SEQ ID NO: 440262 - RNA, 19 nt, Artificial Sequence
  Synthetic
aguacacuguaaauaccaa

SEQ ID NO: 440263 - RNA, 20 nt, Artificial Sequence
  Synthetic
caguacacuguaaauaccaa

SEQ ID NO: 440264 - RNA, 21 nt, Artificial Sequence
  Synthetic
gcaguacacuguaaauaccaa

SEQ ID NO: 440265 - RNA, 22 nt, Artificial Sequence
  Synthetic
ggcaguacacuguaaauaccaa

SEQ ID NO: 440266 - RNA, 23 nt, Artificial Sequence
  Synthetic
uggcaguacacuguaaauaccaa

SEQ ID NO: 440267 - RNA, 24 nt, Artificial Sequence
  Synthetic
guggcaguacacuguaaauaccaa

SEQ ID NO: 440268 - RNA, 18 nt, Artificial Sequence
  Synthetic
uuuucuuaaagauaccaa

SEQ ID NO: 440269 - RNA, 19 nt, Artificial Sequence
  Synthetic
uuuuucuuaaagauaccaa

SEQ ID NO: 440270 - RNA, 20 nt, Artificial Sequence
  Synthetic
auuuuucuuaaagauaccaa

SEQ ID NO: 440271 - RNA, 21 nt, Artificial Sequence
  Synthetic
aauuuuucuuaaagauaccaa

SEQ ID NO: 440272 - RNA, 22 nt, Artificial Sequence
  Synthetic
gaauuuuucuuaaagauaccaa

SEQ ID NO: 440273 - RNA, 23 nt, Artificial Sequence
  Synthetic
agaauuuuucuuaaagauaccaa

SEQ ID NO: 440274 - RNA, 24 nt, Artificial Sequence
  Synthetic
aagaauuuuucuuaaagauaccaa

SEQ ID NO: 440275 - RNA, 18 nt, Artificial Sequence
  Synthetic
uggagauggggauaccaa

SEQ ID NO: 440276 - RNA, 19 nt, Artificial Sequence
  Synthetic
cuggagauggggauaccaa

SEQ ID NO: 440277 - RNA, 20 nt, Artificial Sequence
  Synthetic
acuggagauggggauaccaa

SEQ ID NO: 440278 - RNA, 21 nt, Artificial Sequence
  Synthetic
cacuggagauggggauaccaa

SEQ ID NO: 440279 - RNA, 22 nt, Artificial Sequence
  Synthetic
ccacuggagauggggauaccaa

SEQ ID NO: 440280 - RNA, 23 nt, Artificial Sequence
  Synthetic
gccacuggagauggggauaccaa

SEQ ID NO: 440281 - RNA, 24 nt, Artificial Sequence
  Synthetic
agccacuggagauggggauaccaa

SEQ ID NO: 440282 - RNA, 18 nt, Artificial Sequence
  Synthetic
cuuuaauaaugauaccaa

SEQ ID NO: 440283 - RNA, 19 nt, Artificial Sequence
  Synthetic
ucuuuaauaaugauaccaa

SEQ ID NO: 440284 - RNA, 20 nt, Artificial Sequence
  Synthetic
gucuuuaauaaugauaccaa

SEQ ID NO: 440285 - RNA, 21 nt, Artificial Sequence
  Synthetic
ugucuuuaauaaugauaccaa

SEQ ID NO: 440286 - RNA, 22 nt, Artificial Sequence
  Synthetic
uugucuuuaauaaugauaccaa

SEQ ID NO: 440287 - RNA, 23 nt, Artificial Sequence
  Synthetic
uuugucuuuaauaaugauaccaa

SEQ ID NO: 440288 - RNA, 24 nt, Artificial Sequence
  Synthetic
uuuugucuuuaauaaugauaccaa

SEQ ID NO: 440289 - RNA, 18 nt, Artificial Sequence
  Synthetic
aaaaggccaacaacccaa

SEQ ID NO: 440290 - RNA, 19 nt, Artificial Sequence
  Synthetic
aaaaaggccaacaacccaa

SEQ ID NO: 440291 - RNA, 20 nt, Artificial Sequence
  Synthetic
gaaaaaggccaacaacccaa

SEQ ID NO: 440292 - RNA, 21 nt, Artificial Sequence
  Synthetic
agaaaaaggccaacaacccaa

SEQ ID NO: 440293 - RNA, 22 nt, Artificial Sequence
  Synthetic
aagaaaaaggccaacaacccaa

SEQ ID NO: 440294 - RNA, 23 nt, Artificial Sequence
  Synthetic
uaagaaaaaggccaacaacccaa

SEQ ID NO: 440295 - RNA, 24 nt, Artificial Sequence
  Synthetic
auaagaaaaaggccaacaacccaa

SEQ ID NO: 440296 - RNA, 18 nt, Artificial Sequence
  Synthetic
ucuucugagugaacccaa

SEQ ID NO: 440297 - RNA, 19 nt, Artificial Sequence
  Synthetic
gucuucugagugaacccaa

SEQ ID NO: 440298 - RNA, 20 nt, Artificial Sequence
  Synthetic
ggucuucugagugaacccaa

SEQ ID NO: 440299 - RNA, 21 nt, Artificial Sequence
  Synthetic
gggucuucugagugaacccaa

SEQ ID NO: 440300 - RNA, 22 nt, Artificial Sequence
  Synthetic
agggucuucugagugaacccaa

SEQ ID NO: 440301 - RNA, 23 nt, Artificial Sequence
  Synthetic
aagggucuucugagugaacccaa

SEQ ID NO: 440302 - RNA, 24 nt, Artificial Sequence
  Synthetic
caagggucuucugagugaacccaa

SEQ ID NO: 440303 - RNA, 18 nt, Artificial Sequence
  Synthetic
aagagaccaauaacccaa

SEQ ID NO: 440304 - RNA, 19 nt, Artificial Sequence
  Synthetic
aaagagaccaauaacccaa

SEQ ID NO: 440305 - RNA, 20 nt, Artificial Sequence
  Synthetic
gaaagagaccaauaacccaa

SEQ ID NO: 440306 - RNA, 21 nt, Artificial Sequence
  Synthetic
agaaagagaccaauaacccaa

SEQ ID NO: 440307 - RNA, 22 nt, Artificial Sequence
  Synthetic
aagaaagagaccaauaacccaa

SEQ ID NO: 440308 - RNA, 23 nt, Artificial Sequence
  Synthetic
uaagaaagagaccaauaacccaa

SEQ ID NO: 440309 - RNA, 24 nt, Artificial Sequence
  Synthetic
guaagaaagagaccaauaacccaa

SEQ ID NO: 440310 - RNA, 18 nt, Artificial Sequence
  Synthetic
aaacuauuuuuaacccaa

SEQ ID NO: 440311 - RNA, 19 nt, Artificial Sequence
  Synthetic
gaaacuauuuuuaacccaa

SEQ ID NO: 440312 - RNA, 20 nt, Artificial Sequence
  Synthetic
agaaacuauuuuuaacccaa

SEQ ID NO: 440313 - RNA, 21 nt, Artificial Sequence
  Synthetic
gagaaacuauuuuuaacccaa

SEQ ID NO: 440314 - RNA, 22 nt, Artificial Sequence
  Synthetic
agagaaacuauuuuuaacccaa

SEQ ID NO: 440315 - RNA, 23 nt, Artificial Sequence
  Synthetic
uagagaaacuauuuuuaacccaa

SEQ ID NO: 440316 - RNA, 24 nt, Artificial Sequence
  Synthetic
uuagagaaacuauuuuuaacccaa

SEQ ID NO: 440317 - RNA, 18 nt, Artificial Sequence
  Synthetic
uauauauuugacacccaa

SEQ ID NO: 440318 - RNA, 19 nt, Artificial Sequence
  Synthetic
uuauauauuugacacccaa

SEQ ID NO: 440319 - RNA, 20 nt, Artificial Sequence
  Synthetic
uuuauauauuugacacccaa

SEQ ID NO: 440320 - RNA, 21 nt, Artificial Sequence
  Synthetic
uuuuauauauuugacacccaa

SEQ ID NO: 440321 - RNA, 22 nt, Artificial Sequence
  Synthetic
auuuuauauauuugacacccaa

SEQ ID NO: 440322 - RNA, 23 nt, Artificial Sequence
  Synthetic
uauuuuauauauuugacacccaa

SEQ ID NO: 440323 - RNA, 24 nt, Artificial Sequence
  Synthetic
auauuuuauauauuugacacccaa

SEQ ID NO: 440324 - RNA, 18 nt, Artificial Sequence
  Synthetic
agaaggaucaggacccaa

SEQ ID NO: 440325 - RNA, 19 nt, Artificial Sequence
  Synthetic
gagaaggaucaggacccaa

SEQ ID NO: 440326 - RNA, 20 nt, Artificial Sequence
  Synthetic
ugagaaggaucaggacccaa

SEQ ID NO: 440327 - RNA, 21 nt, Artificial Sequence
  Synthetic
augagaaggaucaggacccaa

SEQ ID NO: 440328 - RNA, 22 nt, Artificial Sequence
  Synthetic
aaugagaaggaucaggacccaa

SEQ ID NO: 440329 - RNA, 23 nt, Artificial Sequence
  Synthetic
uaaugagaaggaucaggacccaa

SEQ ID NO: 440330 - RNA, 24 nt, Artificial Sequence
  Synthetic
uuaaugagaaggaucaggacccaa

SEQ ID NO: 440331 - RNA, 18 nt, Artificial Sequence
  Synthetic
cauaaggcauauacccaa

SEQ ID NO: 440332 - RNA, 19 nt, Artificial Sequence
  Synthetic
ccauaaggcauauacccaa

SEQ ID NO: 440333 - RNA, 20 nt, Artificial Sequence
  Synthetic
uccauaaggcauauacccaa

SEQ ID NO: 440334 - RNA, 21 nt, Artificial Sequence
  Synthetic
uuccauaaggcauauacccaa

SEQ ID NO: 440335 - RNA, 22 nt, Artificial Sequence
  Synthetic
uuuccauaaggcauauacccaa

SEQ ID NO: 440336 - RNA, 23 nt, Artificial Sequence
  Synthetic
uuuuccauaaggcauauacccaa

SEQ ID NO: 440337 - RNA, 24 nt, Artificial Sequence
  Synthetic
uuuuuccauaaggcauauacccaa

SEQ ID NO: 440338 - RNA, 18 nt, Artificial Sequence
  Synthetic
ugcuggguauauacccaa

SEQ ID NO: 440339 - RNA, 19 nt, Artificial Sequence
  Synthetic
cugcuggguauauacccaa

SEQ ID NO: 440340 - RNA, 20 nt, Artificial Sequence
  Synthetic
gcugcuggguauauacccaa

SEQ ID NO: 440341 - RNA, 21 nt, Artificial Sequence
  Synthetic
cgcugcuggguauauacccaa

SEQ ID NO: 440342 - RNA, 22 nt, Artificial Sequence
  Synthetic
ccgcugcuggguauauacccaa

SEQ ID NO: 440343 - RNA, 23 nt, Artificial Sequence
  Synthetic
cccgcugcuggguauauacccaa

SEQ ID NO: 440344 - RNA, 24 nt, Artificial Sequence
  Synthetic
ucccgcugcuggguauauacccaa

SEQ ID NO: 440345 - RNA, 18 nt, Artificial Sequence
  Synthetic
uggagguguccuacccaa

SEQ ID NO: 440346 - RNA, 19 nt, Artificial Sequence
  Synthetic
uuggagguguccuacccaa

SEQ ID NO: 440347 - RNA, 20 nt, Artificial Sequence
  Synthetic
auuggagguguccuacccaa

SEQ ID NO: 440348 - RNA, 21 nt, Artificial Sequence
  Synthetic
cauuggagguguccuacccaa

SEQ ID NO: 440349 - RNA, 22 nt, Artificial Sequence
  Synthetic
gcauuggagguguccuacccaa

SEQ ID NO: 440350 - RNA, 23 nt, Artificial Sequence
  Synthetic
ugcauuggagguguccuacccaa

SEQ ID NO: 440351 - RNA, 24 nt, Artificial Sequence
  Synthetic
augcauuggagguguccuacccaa

SEQ ID NO: 440352 - RNA, 18 nt, Artificial Sequence
  Synthetic
agugaacauaguacccaa

SEQ ID NO: 440353 - RNA, 19 nt, Artificial Sequence
  Synthetic
uagugaacauaguacccaa

SEQ ID NO: 440354 - RNA, 20 nt, Artificial Sequence
  Synthetic
auagugaacauaguacccaa

SEQ ID NO: 440355 - RNA, 21 nt, Artificial Sequence
  Synthetic
gauagugaacauaguacccaa

SEQ ID NO: 440356 - RNA, 22 nt, Artificial Sequence
  Synthetic
agauagugaacauaguacccaa

SEQ ID NO: 440357 - RNA, 23 nt, Artificial Sequence
  Synthetic
cagauagugaacauaguacccaa

SEQ ID NO: 440358 - RNA, 24 nt, Artificial Sequence
  Synthetic
ccagauagugaacauaguacccaa

SEQ ID NO: 440359 - RNA, 18 nt, Artificial Sequence
  Synthetic
aguccuaauagaccccaa

SEQ ID NO: 440360 - RNA, 19 nt, Artificial Sequence
  Synthetic
aaguccuaauagaccccaa

SEQ ID NO: 440361 - RNA, 20 nt, Artificial Sequence
  Synthetic
aaaguccuaauagaccccaa

SEQ ID NO: 440362 - RNA, 21 nt, Artificial Sequence
  Synthetic
caaaguccuaauagaccccaa

SEQ ID NO: 440363 - RNA, 22 nt, Artificial Sequence
  Synthetic
ccaaaguccuaauagaccccaa

SEQ ID NO: 440364 - RNA, 23 nt, Artificial Sequence
  Synthetic
uccaaaguccuaauagaccccaa

SEQ ID NO: 440365 - RNA, 24 nt, Artificial Sequence
  Synthetic
guccaaaguccuaauagaccccaa

SEQ ID NO: 440366 - RNA, 18 nt, Artificial Sequence
  Synthetic
gauagcccccuaccccaa

SEQ ID NO: 440367 - RNA, 19 nt, Artificial Sequence
  Synthetic
agauagcccccuaccccaa

SEQ ID NO: 440368 - RNA, 20 nt, Artificial Sequence
  Synthetic
cagauagcccccuaccccaa

SEQ ID NO: 440369 - RNA, 21 nt, Artificial Sequence
  Synthetic
gcagauagcccccuaccccaa

SEQ ID NO: 440370 - RNA, 22 nt, Artificial Sequence
  Synthetic
ugcagauagcccccuaccccaa

SEQ ID NO: 440371 - RNA, 23 nt, Artificial Sequence
  Synthetic
augcagauagcccccuaccccaa

SEQ ID NO: 440372 - RNA, 24 nt, Artificial Sequence
  Synthetic
caugcagauagcccccuaccccaa

SEQ ID NO: 440373 - RNA, 18 nt, Artificial Sequence
  Synthetic
uuggaaaaucauccccaa

SEQ ID NO: 440374 - RNA, 19 nt, Artificial Sequence
  Synthetic
uuuggaaaaucauccccaa

SEQ ID NO: 440375 - RNA, 20 nt, Artificial Sequence
  Synthetic
auuuggaaaaucauccccaa

SEQ ID NO: 440376 - RNA, 21 nt, Artificial Sequence
  Synthetic
cauuuggaaaaucauccccaa

SEQ ID NO: 440377 - RNA, 22 nt, Artificial Sequence
  Synthetic
acauuuggaaaaucauccccaa

SEQ ID NO: 440378 - RNA, 23 nt, Artificial Sequence
  Synthetic
uacauuuggaaaaucauccccaa

SEQ ID NO: 440379 - RNA, 24 nt, Artificial Sequence
  Synthetic
guacauuuggaaaaucauccccaa

SEQ ID NO: 440380 - RNA, 18 nt, Artificial Sequence
  Synthetic
acagccucugguccccaa

SEQ ID NO: 440381 - RNA, 19 nt, Artificial Sequence
  Synthetic
uacagccucugguccccaa

SEQ ID NO: 440382 - RNA, 20 nt, Artificial Sequence
  Synthetic
uuacagccucugguccccaa

SEQ ID NO: 440383 - RNA, 21 nt, Artificial Sequence
  Synthetic
auuacagccucugguccccaa

SEQ ID NO: 440384 - RNA, 22 nt, Artificial Sequence
  Synthetic
gauuacagccucugguccccaa

SEQ ID NO: 440385 - RNA, 23 nt, Artificial Sequence
  Synthetic
agauuacagccucugguccccaa

SEQ ID NO: 440386 - RNA, 24 nt, Artificial Sequence
  Synthetic
aagauuacagccucugguccccaa

SEQ ID NO: 440387 - RNA, 18 nt, Artificial Sequence
  Synthetic
acugcugcuggggcccaa

SEQ ID NO: 440388 - RNA, 19 nt, Artificial Sequence
  Synthetic
cacugcugcuggggcccaa

SEQ ID NO: 440389 - RNA, 20 nt, Artificial Sequence
  Synthetic
ucacugcugcuggggcccaa

SEQ ID NO: 440390 - RNA, 21 nt, Artificial Sequence
  Synthetic
uucacugcugcuggggcccaa

SEQ ID NO: 440391 - RNA, 22 nt, Artificial Sequence
  Synthetic
auucacugcugcuggggcccaa

SEQ ID NO: 440392 - RNA, 23 nt, Artificial Sequence
  Synthetic
gauucacugcugcuggggcccaa

SEQ ID NO: 440393 - RNA, 24 nt, Artificial Sequence
  Synthetic
agauucacugcugcuggggcccaa

SEQ ID NO: 440394 - RNA, 18 nt, Artificial Sequence
  Synthetic
ccccauuuuacaucccaa

SEQ ID NO: 440395 - RNA, 19 nt, Artificial Sequence
  Synthetic
uccccauuuuacaucccaa

SEQ ID NO: 440396 - RNA, 20 nt, Artificial Sequence
  Synthetic
uuccccauuuuacaucccaa

SEQ ID NO: 440397 - RNA, 21 nt, Artificial Sequence
  Synthetic
auuccccauuuuacaucccaa

SEQ ID NO: 440398 - RNA, 22 nt, Artificial Sequence
  Synthetic
aauuccccauuuuacaucccaa

SEQ ID NO: 440399 - RNA, 23 nt, Artificial Sequence
  Synthetic
gaauuccccauuuuacaucccaa

SEQ ID NO: 440400 - RNA, 24 nt, Artificial Sequence
  Synthetic
agaauuccccauuuuacaucccaa

SEQ ID NO: 440401 - RNA, 18 nt, Artificial Sequence
  Synthetic
aguacaguaguaucccaa

SEQ ID NO: 440402 - RNA, 19 nt, Artificial Sequence
  Synthetic
gaguacaguaguaucccaa

SEQ ID NO: 440403 - RNA, 20 nt, Artificial Sequence
  Synthetic
ugaguacaguaguaucccaa

SEQ ID NO: 440404 - RNA, 21 nt, Artificial Sequence
  Synthetic
augaguacaguaguaucccaa

SEQ ID NO: 440405 - RNA, 22 nt, Artificial Sequence
  Synthetic
caugaguacaguaguaucccaa

SEQ ID NO: 440406 - RNA, 23 nt, Artificial Sequence
  Synthetic
ucaugaguacaguaguaucccaa

SEQ ID NO: 440407 - RNA, 24 nt, Artificial Sequence
  Synthetic
cucaugaguacaguaguaucccaa

SEQ ID NO: 440408 - RNA, 18 nt, Artificial Sequence
  Synthetic
cagagaaaaaacucccaa

SEQ ID NO: 440409 - RNA, 19 nt, Artificial Sequence
  Synthetic
gcagagaaaaaacucccaa

SEQ ID NO: 440410 - RNA, 20 nt, Artificial Sequence
  Synthetic
ggcagagaaaaaacucccaa

SEQ ID NO: 440411 - RNA, 21 nt, Artificial Sequence
  Synthetic
gggcagagaaaaaacucccaa

SEQ ID NO: 440412 - RNA, 22 nt, Artificial Sequence
  Synthetic
ugggcagagaaaaaacucccaa

SEQ ID NO: 440413 - RNA, 23 nt, Artificial Sequence
  Synthetic
cugggcagagaaaaaacucccaa

SEQ ID NO: 440414 - RNA, 24 nt, Artificial Sequence
  Synthetic
ucugggcagagaaaaaacucccaa

SEQ ID NO: 440415 - RNA, 18 nt, Artificial Sequence
  Synthetic
uccuuuacauucucccaa

SEQ ID NO: 440416 - RNA, 19 nt, Artificial Sequence
  Synthetic
uuccuuuacauucucccaa

SEQ ID NO: 440417 - RNA, 20 nt, Artificial Sequence
  Synthetic
uuuccuuuacauucucccaa

SEQ ID NO: 440418 - RNA, 21 nt, Artificial Sequence
  Synthetic
cuuuccuuuacauucucccaa

SEQ ID NO: 440419 - RNA, 22 nt, Artificial Sequence
  Synthetic
ucuuuccuuuacauucucccaa

SEQ ID NO: 440420 - RNA, 23 nt, Artificial Sequence
  Synthetic
aucuuuccuuuacauucucccaa

SEQ ID NO: 440421 - RNA, 24 nt, Artificial Sequence
  Synthetic
uaucuuuccuuuacauucucccaa

SEQ ID NO: 440422 - RNA, 18 nt, Artificial Sequence
  Synthetic
gcagaguugucgucccaa

SEQ ID NO: 440423 - RNA, 19 nt, Artificial Sequence
  Synthetic
agcagaguugucgucccaa

SEQ ID NO: 440424 - RNA, 20 nt, Artificial Sequence
  Synthetic
cagcagaguugucgucccaa

SEQ ID NO: 440425 - RNA, 21 nt, Artificial Sequence
  Synthetic
gcagcagaguugucgucccaa

SEQ ID NO: 440426 - RNA, 22 nt, Artificial Sequence
  Synthetic
agcagcagaguugucgucccaa

SEQ ID NO: 440427 - RNA, 23 nt, Artificial Sequence
  Synthetic
aagcagcagaguugucgucccaa

SEQ ID NO: 440428 - RNA, 24 nt, Artificial Sequence
  Synthetic
aaagcagcagaguugucgucccaa

SEQ ID NO: 440429 - RNA, 18 nt, Artificial Sequence
  Synthetic
uacccuccagauucccaa

SEQ ID NO: 440430 - RNA, 19 nt, Artificial Sequence
  Synthetic
cuacccuccagauucccaa

SEQ ID NO: 440431 - RNA, 20 nt, Artificial Sequence
  Synthetic
gcuacccuccagauucccaa

SEQ ID NO: 440432 - RNA, 21 nt, Artificial Sequence
  Synthetic
agcuacccuccagauucccaa

SEQ ID NO: 440433 - RNA, 22 nt, Artificial Sequence
  Synthetic
cagcuacccuccagauucccaa

SEQ ID NO: 440434 - RNA, 23 nt, Artificial Sequence
  Synthetic
ucagcuacccuccagauucccaa

SEQ ID NO: 440435 - RNA, 24 nt, Artificial Sequence
  Synthetic
cucagcuacccuccagauucccaa

SEQ ID NO: 440436 - RNA, 18 nt, Artificial Sequence
  Synthetic
auuugcucaguuucccaa

SEQ ID NO: 440437 - RNA, 19 nt, Artificial Sequence
  Synthetic
gauuugcucaguuucccaa

SEQ ID NO: 440438 - RNA, 20 nt, Artificial Sequence
  Synthetic
agauuugcucaguuucccaa

SEQ ID NO: 440439 - RNA, 21 nt, Artificial Sequence
  Synthetic
cagauuugcucaguuucccaa

SEQ ID NO: 440440 - RNA, 22 nt, Artificial Sequence
  Synthetic
ucagauuugcucaguuucccaa

SEQ ID NO: 440441 - RNA, 23 nt, Artificial Sequence
  Synthetic
uucagauuugcucaguuucccaa

SEQ ID NO: 440442 - RNA, 24 nt, Artificial Sequence
  Synthetic
cuucagauuugcucaguuucccaa

SEQ ID NO: 440443 - RNA, 18 nt, Artificial Sequence
  Synthetic
augugcuagguuucccaa

SEQ ID NO: 440444 - RNA, 19 nt, Artificial Sequence
  Synthetic
uaugugcuagguuucccaa

SEQ ID NO: 440445 - RNA, 20 nt, Artificial Sequence
  Synthetic
guaugugcuagguuucccaa

SEQ ID NO: 440446 - RNA, 21 nt, Artificial Sequence
  Synthetic
uguaugugcuagguuucccaa

SEQ ID NO: 440447 - RNA, 22 nt, Artificial Sequence
  Synthetic
guguaugugcuagguuucccaa

SEQ ID NO: 440448 - RNA, 23 nt, Artificial Sequence
  Synthetic
uguguaugugcuagguuucccaa

SEQ ID NO: 440449 - RNA, 24 nt, Artificial Sequence
  Synthetic
cuguguaugugcuagguuucccaa

SEQ ID NO: 440450 - RNA, 18 nt, Artificial Sequence
  Synthetic
uuuuagcacaaaagccaa

SEQ ID NO: 440451 - RNA, 19 nt, Artificial Sequence
  Synthetic
uuuuuagcacaaaagccaa

SEQ ID NO: 440452 - RNA, 20 nt, Artificial Sequence
  Synthetic
auuuuuagcacaaaagccaa

SEQ ID NO: 440453 - RNA, 21 nt, Artificial Sequence
  Synthetic
cauuuuuagcacaaaagccaa

SEQ ID NO: 440454 - RNA, 22 nt, Artificial Sequence
  Synthetic
acauuuuuagcacaaaagccaa

SEQ ID NO: 440455 - RNA, 23 nt, Artificial Sequence
  Synthetic
cacauuuuuagcacaaaagccaa

SEQ ID NO: 440456 - RNA, 24 nt, Artificial Sequence
  Synthetic
ucacauuuuuagcacaaaagccaa

SEQ ID NO: 440457 - RNA, 18 nt, Artificial Sequence
  Synthetic
uauaguguuaaaagccaa

SEQ ID NO: 440458 - RNA, 19 nt, Artificial Sequence
  Synthetic
cuauaguguuaaaagccaa

SEQ ID NO: 440459 - RNA, 20 nt, Artificial Sequence
  Synthetic
ucuauaguguuaaaagccaa

SEQ ID NO: 440460 - RNA, 21 nt, Artificial Sequence
  Synthetic
cucuauaguguuaaaagccaa

SEQ ID NO: 440461 - RNA, 22 nt, Artificial Sequence
  Synthetic
gcucuauaguguuaaaagccaa

SEQ ID NO: 440462 - RNA, 23 nt, Artificial Sequence
  Synthetic
ugcucuauaguguuaaaagccaa

SEQ ID NO: 440463 - RNA, 24 nt, Artificial Sequence
  Synthetic
uugcucuauaguguuaaaagccaa

SEQ ID NO: 440464 - RNA, 18 nt, Artificial Sequence
  Synthetic
cagaauagucaaagccaa

SEQ ID NO: 440465 - RNA, 19 nt, Artificial Sequence
  Synthetic
gcagaauagucaaagccaa

SEQ ID NO: 440466 - RNA, 20 nt, Artificial Sequence
  Synthetic
agcagaauagucaaagccaa

SEQ ID NO: 440467 - RNA, 21 nt, Artificial Sequence
  Synthetic
cagcagaauagucaaagccaa

SEQ ID NO: 440468 - RNA, 22 nt, Artificial Sequence
  Synthetic
ccagcagaauagucaaagccaa

SEQ ID NO: 440469 - RNA, 23 nt, Artificial Sequence
  Synthetic
cccagcagaauagucaaagccaa

SEQ ID NO: 440470 - RNA, 24 nt, Artificial Sequence
  Synthetic
ucccagcagaauagucaaagccaa

SEQ ID NO: 440471 - RNA, 18 nt, Artificial Sequence
  Synthetic
aggcaugucgaaagccaa

SEQ ID NO: 440472 - RNA, 19 nt, Artificial Sequence
  Synthetic
aaggcaugucgaaagccaa

SEQ ID NO: 440473 - RNA, 20 nt, Artificial Sequence
  Synthetic
gaaggcaugucgaaagccaa

SEQ ID NO: 440474 - RNA, 21 nt, Artificial Sequence
  Synthetic
ggaaggcaugucgaaagccaa

SEQ ID NO: 440475 - RNA, 22 nt, Artificial Sequence
  Synthetic
aggaaggcaugucgaaagccaa

SEQ ID NO: 440476 - RNA, 23 nt, Artificial Sequence
  Synthetic
uaggaaggcaugucgaaagccaa

SEQ ID NO: 440477 - RNA, 24 nt, Artificial Sequence
  Synthetic
uuaggaaggcaugucgaaagccaa

SEQ ID NO: 440478 - RNA, 18 nt, Artificial Sequence
  Synthetic
cggcuaucugcaagccaa

SEQ ID NO: 440479 - RNA, 19 nt, Artificial Sequence
  Synthetic
gcggcuaucugcaagccaa

SEQ ID NO: 440480 - RNA, 20 nt, Artificial Sequence
  Synthetic
ggcggcuaucugcaagccaa

SEQ ID NO: 440481 - RNA, 21 nt, Artificial Sequence
  Synthetic
aggcggcuaucugcaagccaa

SEQ ID NO: 440482 - RNA, 22 nt, Artificial Sequence
  Synthetic
aaggcggcuaucugcaagccaa

SEQ ID NO: 440483 - RNA, 23 nt, Artificial Sequence
  Synthetic
gaaggcggcuaucugcaagccaa

SEQ ID NO: 440484 - RNA, 24 nt, Artificial Sequence
  Synthetic
agaaggcggcuaucugcaagccaa

SEQ ID NO: 440485 - RNA, 18 nt, Artificial Sequence
  Synthetic
aagcuguggggaagccaa

SEQ ID NO: 440486 - RNA, 19 nt, Artificial Sequence
  Synthetic
caagcuguggggaagccaa

SEQ ID NO: 440487 - RNA, 20 nt, Artificial Sequence
  Synthetic
ccaagcuguggggaagccaa

SEQ ID NO: 440488 - RNA, 21 nt, Artificial Sequence
  Synthetic
accaagcuguggggaagccaa

SEQ ID NO: 440489 - RNA, 22 nt, Artificial Sequence
  Synthetic
caccaagcuguggggaagccaa

SEQ ID NO: 440490 - RNA, 23 nt, Artificial Sequence
  Synthetic
ccaccaagcuguggggaagccaa

SEQ ID NO: 440491 - RNA, 24 nt, Artificial Sequence
  Synthetic
accaccaagcuguggggaagccaa

SEQ ID NO: 440492 - RNA, 21 nt, Artificial Sequence
  Synthetic
gccaagucaauccuaagccaa

SEQ ID NO: 440493 - RNA, 22 nt, Artificial Sequence
  Synthetic
cgccaagucaauccuaagccaa

SEQ ID NO: 440494 - RNA, 23 nt, Artificial Sequence
  Synthetic
ucgccaagucaauccuaagccaa

SEQ ID NO: 440495 - RNA, 24 nt, Artificial Sequence
  Synthetic
aucgccaagucaauccuaagccaa

SEQ ID NO: 440496 - RNA, 18 nt, Artificial Sequence
  Synthetic
cgacccaaccccagccaa

SEQ ID NO: 440497 - RNA, 19 nt, Artificial Sequence
  Synthetic
acgacccaaccccagccaa

SEQ ID NO: 440498 - RNA, 20 nt, Artificial Sequence
  Synthetic
uacgacccaaccccagccaa

SEQ ID NO: 440499 - RNA, 21 nt, Artificial Sequence
  Synthetic
guacgacccaaccccagccaa

SEQ ID NO: 440500 - RNA, 22 nt, Artificial Sequence
  Synthetic
uguacgacccaaccccagccaa

SEQ ID NO: 440501 - RNA, 23 nt, Artificial Sequence
  Synthetic
uuguacgacccaaccccagccaa

SEQ ID NO: 440502 - RNA, 24 nt, Artificial Sequence
  Synthetic
auuguacgacccaaccccagccaa

SEQ ID NO: 440503 - RNA, 18 nt, Artificial Sequence
  Synthetic
ugaggucuccccagccaa

SEQ ID NO: 440504 - RNA, 19 nt, Artificial Sequence
  Synthetic
gugaggucuccccagccaa

SEQ ID NO: 440505 - RNA, 20 nt, Artificial Sequence
  Synthetic
ugugaggucuccccagccaa

SEQ ID NO: 440506 - RNA, 21 nt, Artificial Sequence
  Synthetic
uugugaggucuccccagccaa

SEQ ID NO: 440507 - RNA, 22 nt, Artificial Sequence
  Synthetic
guugugaggucuccccagccaa

SEQ ID NO: 440508 - RNA, 23 nt, Artificial Sequence
  Synthetic
aguugugaggucuccccagccaa

SEQ ID NO: 440509 - RNA, 24 nt, Artificial Sequence
  Synthetic
uaguugugaggucuccccagccaa

SEQ ID NO: 440510 - RNA, 18 nt, Artificial Sequence
  Synthetic
aaaacuuccagcagccaa

SEQ ID NO: 440511 - RNA, 19 nt, Artificial Sequence
  Synthetic
uaaaacuuccagcagccaa

SEQ ID NO: 440512 - RNA, 20 nt, Artificial Sequence
  Synthetic
auaaaacuuccagcagccaa

SEQ ID NO: 440513 - RNA, 21 nt, Artificial Sequence
  Synthetic
aauaaaacuuccagcagccaa

SEQ ID NO: 440514 - RNA, 22 nt, Artificial Sequence
  Synthetic
aaauaaaacuuccagcagccaa

SEQ ID NO: 440515 - RNA, 23 nt, Artificial Sequence
  Synthetic
gaaauaaaacuuccagcagccaa

SEQ ID NO: 440516 - RNA, 24 nt, Artificial Sequence
  Synthetic
agaaauaaaacuuccagcagccaa

SEQ ID NO: 440517 - RNA, 18 nt, Artificial Sequence
  Synthetic
uauacuauuugcagccaa

SEQ ID NO: 440518 - RNA, 19 nt, Artificial Sequence
  Synthetic
cuauacuauuugcagccaa

SEQ ID NO: 440519 - RNA, 20 nt, Artificial Sequence
  Synthetic
ccuauacuauuugcagccaa

SEQ ID NO: 440520 - RNA, 21 nt, Artificial Sequence
  Synthetic
gccuauacuauuugcagccaa

SEQ ID NO: 440521 - RNA, 22 nt, Artificial Sequence
  Synthetic
ugccuauacuauuugcagccaa

SEQ ID NO: 440522 - RNA, 23 nt, Artificial Sequence
  Synthetic
uugccuauacuauuugcagccaa

SEQ ID NO: 440523 - RNA, 24 nt, Artificial Sequence
  Synthetic
uuugccuauacuauuugcagccaa

SEQ ID NO: 440524 - RNA, 18 nt, Artificial Sequence
  Synthetic
agcaugucagucagccaa

SEQ ID NO: 440525 - RNA, 19 nt, Artificial Sequence
  Synthetic
gagcaugucagucagccaa

SEQ ID NO: 440526 - RNA, 20 nt, Artificial Sequence
  Synthetic
agagcaugucagucagccaa

SEQ ID NO: 440527 - RNA, 21 nt, Artificial Sequence
  Synthetic
cagagcaugucagucagccaa

SEQ ID NO: 440528 - RNA, 22 nt, Artificial Sequence
  Synthetic
ucagagcaugucagucagccaa

SEQ ID NO: 440529 - RNA, 23 nt, Artificial Sequence
  Synthetic
aucagagcaugucagucagccaa

SEQ ID NO: 440530 - RNA, 24 nt, Artificial Sequence
  Synthetic
aaucagagcaugucagucagccaa

SEQ ID NO: 440531 - RNA, 18 nt, Artificial Sequence
  Synthetic
aagacaauccugagccaa

SEQ ID NO: 440532 - RNA, 19 nt, Artificial Sequence
  Synthetic
caagacaauccugagccaa

SEQ ID NO: 440533 - RNA, 20 nt, Artificial Sequence
  Synthetic
ccaagacaauccugagccaa

SEQ ID NO: 440534 - RNA, 21 nt, Artificial Sequence
  Synthetic
gccaagacaauccugagccaa

SEQ ID NO: 440535 - RNA, 22 nt, Artificial Sequence
  Synthetic
ugccaagacaauccugagccaa

SEQ ID NO: 440536 - RNA, 23 nt, Artificial Sequence
  Synthetic
uugccaagacaauccugagccaa

SEQ ID NO: 440537 - RNA, 24 nt, Artificial Sequence
  Synthetic
auugccaagacaauccugagccaa

SEQ ID NO: 440538 - RNA, 21 nt, Artificial Sequence
  Synthetic
gccaagucaauccugagccaa

SEQ ID NO: 440539 - RNA, 22 nt, Artificial Sequence
  Synthetic
cgccaagucaauccugagccaa

SEQ ID NO: 440540 - RNA, 23 nt, Artificial Sequence
  Synthetic
ucgccaagucaauccugagccaa

SEQ ID NO: 440541 - RNA, 24 nt, Artificial Sequence
  Synthetic
aucgccaagucaauccugagccaa

SEQ ID NO: 440542 - RNA, 18 nt, Artificial Sequence
  Synthetic
uuuuuuuuauauagccaa

SEQ ID NO: 440543 - RNA, 19 nt, Artificial Sequence
  Synthetic
cuuuuuuuuauauagccaa

SEQ ID NO: 440544 - RNA, 20 nt, Artificial Sequence
  Synthetic
gcuuuuuuuuauauagccaa

SEQ ID NO: 440545 - RNA, 21 nt, Artificial Sequence
  Synthetic
agcuuuuuuuuauauagccaa

SEQ ID NO: 440546 - RNA, 22 nt, Artificial Sequence
  Synthetic
aagcuuuuuuuuauauagccaa

SEQ ID NO: 440547 - RNA, 23 nt, Artificial Sequence
  Synthetic
aaagcuuuuuuuuauauagccaa

SEQ ID NO: 440548 - RNA, 24 nt, Artificial Sequence
  Synthetic
aaaagcuuuuuuuuauauagccaa

SEQ ID NO: 440549 - RNA, 18 nt, Artificial Sequence
  Synthetic
aaucaaauguuuagccaa

SEQ ID NO: 440550 - RNA, 19 nt, Artificial Sequence
  Synthetic
aaaucaaauguuuagccaa

SEQ ID NO: 440551 - RNA, 20 nt, Artificial Sequence
  Synthetic
aaaaucaaauguuuagccaa

SEQ ID NO: 440552 - RNA, 21 nt, Artificial Sequence
  Synthetic
aaaaaucaaauguuuagccaa

SEQ ID NO: 440553 - RNA, 22 nt, Artificial Sequence
  Synthetic
aaaaaaucaaauguuuagccaa

SEQ ID NO: 440554 - RNA, 23 nt, Artificial Sequence
  Synthetic
aaaaaaaucaaauguuuagccaa

SEQ ID NO: 440555 - RNA, 24 nt, Artificial Sequence
  Synthetic
uaaaaaaaucaaauguuuagccaa

SEQ ID NO: 440556 - RNA, 18 nt, Artificial Sequence
  Synthetic
caaccaagaauccgccaa

SEQ ID NO: 440557 - RNA, 19 nt, Artificial Sequence
  Synthetic
ucaaccaagaauccgccaa

SEQ ID NO: 440558 - RNA, 20 nt, Artificial Sequence
  Synthetic
cucaaccaagaauccgccaa

SEQ ID NO: 440559 - RNA, 21 nt, Artificial Sequence
  Synthetic
acucaaccaagaauccgccaa

SEQ ID NO: 440560 - RNA, 22 nt, Artificial Sequence
  Synthetic
aacucaaccaagaauccgccaa

SEQ ID NO: 440561 - RNA, 23 nt, Artificial Sequence
  Synthetic
gaacucaaccaagaauccgccaa

SEQ ID NO: 440562 - RNA, 24 nt, Artificial Sequence
  Synthetic
ugaacucaaccaagaauccgccaa

SEQ ID NO: 440563 - RNA, 18 nt, Artificial Sequence
  Synthetic
uggaagguuagaggccaa

SEQ ID NO: 440564 - RNA, 19 nt, Artificial Sequence
  Synthetic
uuggaagguuagaggccaa

SEQ ID NO: 440565 - RNA, 20 nt, Artificial Sequence
  Synthetic
uuuggaagguuagaggccaa

SEQ ID NO: 440566 - RNA, 21 nt, Artificial Sequence
  Synthetic
uuuuggaagguuagaggccaa

SEQ ID NO: 440567 - RNA, 22 nt, Artificial Sequence
  Synthetic
auuuuggaagguuagaggccaa

SEQ ID NO: 440568 - RNA, 23 nt, Artificial Sequence
  Synthetic
aauuuuggaagguuagaggccaa

SEQ ID NO: 440569 - RNA, 24 nt, Artificial Sequence
  Synthetic
caauuuuggaagguuagaggccaa

SEQ ID NO: 440570 - RNA, 18 nt, Artificial Sequence
  Synthetic
agacacacccugggccaa

SEQ ID NO: 440571 - RNA, 19 nt, Artificial Sequence
  Synthetic
uagacacacccugggccaa

SEQ ID NO: 440572 - RNA, 20 nt, Artificial Sequence
  Synthetic
cuagacacacccugggccaa

SEQ ID NO: 440573 - RNA, 21 nt, Artificial Sequence
  Synthetic
ucuagacacacccugggccaa

SEQ ID NO: 440574 - RNA, 22 nt, Artificial Sequence
  Synthetic
uucuagacacacccugggccaa

SEQ ID NO: 440575 - RNA, 23 nt, Artificial Sequence
  Synthetic
uuucuagacacacccugggccaa

SEQ ID NO: 440576 - RNA, 24 nt, Artificial Sequence
  Synthetic
auuucuagacacacccugggccaa

SEQ ID NO: 440577 - RNA, 18 nt, Artificial Sequence
  Synthetic
ccuaacauuuugggccaa

SEQ ID NO: 440578 - RNA, 19 nt, Artificial Sequence
  Synthetic
accuaacauuuugggccaa

SEQ ID NO: 440579 - RNA, 20 nt, Artificial Sequence
  Synthetic
gaccuaacauuuugggccaa

SEQ ID NO: 440580 - RNA, 21 nt, Artificial Sequence
  Synthetic
ugaccuaacauuuugggccaa

SEQ ID NO: 440581 - RNA, 22 nt, Artificial Sequence
  Synthetic
augaccuaacauuuugggccaa

SEQ ID NO: 440582 - RNA, 23 nt, Artificial Sequence
  Synthetic
uaugaccuaacauuuugggccaa

SEQ ID NO: 440583 - RNA, 24 nt, Artificial Sequence
  Synthetic
auaugaccuaacauuuugggccaa

SEQ ID NO: 440584 - RNA, 18 nt, Artificial Sequence
  Synthetic
ucaauguagaauggccaa

SEQ ID NO: 440585 - RNA, 19 nt, Artificial Sequence
  Synthetic
gucaauguagaauggccaa

SEQ ID NO: 440586 - RNA, 20 nt, Artificial Sequence
  Synthetic
ugucaauguagaauggccaa

SEQ ID NO: 440587 - RNA, 21 nt, Artificial Sequence
  Synthetic
augucaauguagaauggccaa

SEQ ID NO: 440588 - RNA, 22 nt, Artificial Sequence
  Synthetic
gaugucaauguagaauggccaa

SEQ ID NO: 440589 - RNA, 23 nt, Artificial Sequence
  Synthetic
agaugucaauguagaauggccaa

SEQ ID NO: 440590 - RNA, 24 nt, Artificial Sequence
  Synthetic
cagaugucaauguagaauggccaa

SEQ ID NO: 440591 - RNA, 18 nt, Artificial Sequence
  Synthetic
uccugaacaccuggccaa

SEQ ID NO: 440592 - RNA, 19 nt, Artificial Sequence
  Synthetic
auccugaacaccuggccaa

SEQ ID NO: 440593 - RNA, 20 nt, Artificial Sequence
  Synthetic
uauccugaacaccuggccaa

SEQ ID NO: 440594 - RNA, 21 nt, Artificial Sequence
  Synthetic
uuauccugaacaccuggccaa

SEQ ID NO: 440595 - RNA, 22 nt, Artificial Sequence
  Synthetic
auuauccugaacaccuggccaa

SEQ ID NO: 440596 - RNA, 23 nt, Artificial Sequence
  Synthetic
aauuauccugaacaccuggccaa

SEQ ID NO: 440597 - RNA, 24 nt, Artificial Sequence
  Synthetic
gaauuauccugaacaccuggccaa

SEQ ID NO: 440598 - RNA, 18 nt, Artificial Sequence
  Synthetic
aaagauauuccaugccaa

SEQ ID NO: 440599 - RNA, 19 nt, Artificial Sequence
  Synthetic
aaaagauauuccaugccaa

SEQ ID NO: 440600 - RNA, 20 nt, Artificial Sequence
  Synthetic
aaaaagauauuccaugccaa

SEQ ID NO: 440601 - RNA, 21 nt, Artificial Sequence
  Synthetic
gaaaaagauauuccaugccaa

SEQ ID NO: 440602 - RNA, 22 nt, Artificial Sequence
  Synthetic
ggaaaaagauauuccaugccaa

SEQ ID NO: 440603 - RNA, 23 nt, Artificial Sequence
  Synthetic
uggaaaaagauauuccaugccaa

SEQ ID NO: 440604 - RNA, 24 nt, Artificial Sequence
  Synthetic
auggaaaaagauauuccaugccaa

SEQ ID NO: 440605 - RNA, 18 nt, Artificial Sequence
  Synthetic
gagcagguggcaugccaa

SEQ ID NO: 440606 - RNA, 19 nt, Artificial Sequence
  Synthetic
agagcagguggcaugccaa

SEQ ID NO: 440607 - RNA, 20 nt, Artificial Sequence
  Synthetic
aagagcagguggcaugccaa

SEQ ID NO: 440608 - RNA, 21 nt, Artificial Sequence
  Synthetic
gaagagcagguggcaugccaa

SEQ ID NO: 440609 - RNA, 22 nt, Artificial Sequence
  Synthetic
ugaagagcagguggcaugccaa

SEQ ID NO: 440610 - RNA, 23 nt, Artificial Sequence
  Synthetic
cugaagagcagguggcaugccaa

SEQ ID NO: 440611 - RNA, 24 nt, Artificial Sequence
  Synthetic
acugaagagcagguggcaugccaa

SEQ ID NO: 440612 - RNA, 18 nt, Artificial Sequence
  Synthetic
aacaugaaaauaugccaa

SEQ ID NO: 440613 - RNA, 19 nt, Artificial Sequence
  Synthetic
uaacaugaaaauaugccaa

SEQ ID NO: 440614 - RNA, 20 nt, Artificial Sequence
  Synthetic
auaacaugaaaauaugccaa

SEQ ID NO: 440615 - RNA, 21 nt, Artificial Sequence
  Synthetic
aauaacaugaaaauaugccaa

SEQ ID NO: 440616 - RNA, 22 nt, Artificial Sequence
  Synthetic
gaauaacaugaaaauaugccaa

SEQ ID NO: 440617 - RNA, 23 nt, Artificial Sequence
  Synthetic
agaauaacaugaaaauaugccaa

SEQ ID NO: 440618 - RNA, 24 nt, Artificial Sequence
  Synthetic
cagaauaacaugaaaauaugccaa

SEQ ID NO: 440619 - RNA, 18 nt, Artificial Sequence
  Synthetic
aacccugugauaugccaa

SEQ ID NO: 440620 - RNA, 19 nt, Artificial Sequence
  Synthetic
uaacccugugauaugccaa

SEQ ID NO: 440621 - RNA, 20 nt, Artificial Sequence
  Synthetic
auaacccugugauaugccaa

SEQ ID NO: 440622 - RNA, 21 nt, Artificial Sequence
  Synthetic
uauaacccugugauaugccaa

SEQ ID NO: 440623 - RNA, 22 nt, Artificial Sequence
  Synthetic
guauaacccugugauaugccaa

SEQ ID NO: 440624 - RNA, 23 nt, Artificial Sequence
  Synthetic
uguauaacccugugauaugccaa

SEQ ID NO: 440625 - RNA, 24 nt, Artificial Sequence
  Synthetic
uuguauaacccugugauaugccaa

SEQ ID NO: 440626 - RNA, 18 nt, Artificial Sequence
  Synthetic
acacucacuauaugccaa

SEQ ID NO: 440627 - RNA, 19 nt, Artificial Sequence
  Synthetic
cacacucacuauaugccaa

SEQ ID NO: 440628 - RNA, 20 nt, Artificial Sequence
  Synthetic
acacacucacuauaugccaa

SEQ ID NO: 440629 - RNA, 21 nt, Artificial Sequence
  Synthetic
cacacacucacuauaugccaa

SEQ ID NO: 440630 - RNA, 22 nt, Artificial Sequence
  Synthetic
acacacacucacuauaugccaa

SEQ ID NO: 440631 - RNA, 23 nt, Artificial Sequence
  Synthetic
uacacacacucacuauaugccaa

SEQ ID NO: 440632 - RNA, 24 nt, Artificial Sequence
  Synthetic
auacacacacucacuauaugccaa

SEQ ID NO: 440633 - RNA, 18 nt, Artificial Sequence
  Synthetic
guguugugcuuaugccaa

SEQ ID NO: 440634 - RNA, 19 nt, Artificial Sequence
  Synthetic
aguguugugcuuaugccaa

SEQ ID NO: 440635 - RNA, 20 nt, Artificial Sequence
  Synthetic
aaguguugugcuuaugccaa

SEQ ID NO: 440636 - RNA, 21 nt, Artificial Sequence
  Synthetic
gaaguguugugcuuaugccaa

SEQ ID NO: 440637 - RNA, 22 nt, Artificial Sequence
  Synthetic
ggaaguguugugcuuaugccaa

SEQ ID NO: 440638 - RNA, 23 nt, Artificial Sequence
  Synthetic
aggaaguguugugcuuaugccaa

SEQ ID NO: 440639 - RNA, 24 nt, Artificial Sequence
  Synthetic
uaggaaguguugugcuuaugccaa

SEQ ID NO: 440640 - RNA, 18 nt, Artificial Sequence
  Synthetic
guggcugcugacugccaa

SEQ ID NO: 440641 - RNA, 19 nt, Artificial Sequence
  Synthetic
uguggcugcugacugccaa

SEQ ID NO: 440642 - RNA, 20 nt, Artificial Sequence
  Synthetic
auguggcugcugacugccaa

SEQ ID NO: 440643 - RNA, 21 nt, Artificial Sequence
  Synthetic
gauguggcugcugacugccaa

SEQ ID NO: 440644 - RNA, 22 nt, Artificial Sequence
  Synthetic
agauguggcugcugacugccaa

SEQ ID NO: 440645 - RNA, 23 nt, Artificial Sequence
  Synthetic
cagauguggcugcugacugccaa

SEQ ID NO: 440646 - RNA, 24 nt, Artificial Sequence
  Synthetic
ucagauguggcugcugacugccaa

SEQ ID NO: 440647 - RNA, 18 nt, Artificial Sequence
  Synthetic
acauguaacuagugccaa

SEQ ID NO: 440648 - RNA, 19 nt, Artificial Sequence
  Synthetic
uacauguaacuagugccaa

SEQ ID NO: 440649 - RNA, 20 nt, Artificial Sequence
  Synthetic
uuacauguaacuagugccaa

SEQ ID NO: 440650 - RNA, 21 nt, Artificial Sequence
  Synthetic
auuacauguaacuagugccaa

SEQ ID NO: 440651 - RNA, 22 nt, Artificial Sequence
  Synthetic
uauuacauguaacuagugccaa

SEQ ID NO: 440652 - RNA, 23 nt, Artificial Sequence
  Synthetic
uuauuacauguaacuagugccaa

SEQ ID NO: 440653 - RNA, 24 nt, Artificial Sequence
  Synthetic
cuuauuacauguaacuagugccaa

SEQ ID NO: 440654 - RNA, 18 nt, Artificial Sequence
  Synthetic
uguaggugauggugccaa

SEQ ID NO: 440655 - RNA, 19 nt, Artificial Sequence
  Synthetic
uuguaggugauggugccaa

SEQ ID NO: 440656 - RNA, 20 nt, Artificial Sequence
  Synthetic
guuguaggugauggugccaa

SEQ ID NO: 440657 - RNA, 21 nt, Artificial Sequence
  Synthetic
aguuguaggugauggugccaa

SEQ ID NO: 440658 - RNA, 22 nt, Artificial Sequence
  Synthetic
caguuguaggugauggugccaa

SEQ ID NO: 440659 - RNA, 23 nt, Artificial Sequence
  Synthetic
ucaguuguaggugauggugccaa

SEQ ID NO: 440660 - RNA, 24 nt, Artificial Sequence
  Synthetic
cucaguuguaggugauggugccaa

SEQ ID NO: 440661 - RNA, 18 nt, Artificial Sequence
  Synthetic
cagugucuugguugccaa

SEQ ID NO: 440662 - RNA, 19 nt, Artificial Sequence
  Synthetic
ucagugucuugguugccaa

SEQ ID NO: 440663 - RNA, 20 nt, Artificial Sequence
  Synthetic
cucagugucuugguugccaa

SEQ ID NO: 440664 - RNA, 21 nt, Artificial Sequence
  Synthetic
acucagugucuugguugccaa

SEQ ID NO: 440665 - RNA, 22 nt, Artificial Sequence
  Synthetic
aacucagugucuugguugccaa

SEQ ID NO: 440666 - RNA, 23 nt, Artificial Sequence
  Synthetic
uaacucagugucuugguugccaa

SEQ ID NO: 440667 - RNA, 24 nt, Artificial Sequence
  Synthetic
auaacucagugucuugguugccaa

SEQ ID NO: 440668 - RNA, 18 nt, Artificial Sequence
  Synthetic
auuuuucuccaaauccaa

SEQ ID NO: 440669 - RNA, 19 nt, Artificial Sequence
  Synthetic
gauuuuucuccaaauccaa

SEQ ID NO: 440670 - RNA, 20 nt, Artificial Sequence
  Synthetic
ugauuuuucuccaaauccaa

SEQ ID NO: 440671 - RNA, 21 nt, Artificial Sequence
  Synthetic
uugauuuuucuccaaauccaa

SEQ ID NO: 440672 - RNA, 22 nt, Artificial Sequence
  Synthetic
guugauuuuucuccaaauccaa

SEQ ID NO: 440673 - RNA, 23 nt, Artificial Sequence
  Synthetic
uguugauuuuucuccaaauccaa

SEQ ID NO: 440674 - RNA, 24 nt, Artificial Sequence
  Synthetic
auguugauuuuucuccaaauccaa

SEQ ID NO: 440675 - RNA, 18 nt, Artificial Sequence
  Synthetic
uaagcaugagaaauccaa

SEQ ID NO: 440676 - RNA, 19 nt, Artificial Sequence
  Synthetic
auaagcaugagaaauccaa

SEQ ID NO: 440677 - RNA, 20 nt, Artificial Sequence
  Synthetic
aauaagcaugagaaauccaa

SEQ ID NO: 440678 - RNA, 21 nt, Artificial Sequence
  Synthetic
caauaagcaugagaaauccaa

SEQ ID NO: 440679 - RNA, 22 nt, Artificial Sequence
  Synthetic
acaauaagcaugagaaauccaa

SEQ ID NO: 440680 - RNA, 23 nt, Artificial Sequence
  Synthetic
uacaauaagcaugagaaauccaa

SEQ ID NO: 440681 - RNA, 24 nt, Artificial Sequence
  Synthetic
auacaauaagcaugagaaauccaa

SEQ ID NO: 440682 - RNA, 18 nt, Artificial Sequence
  Synthetic
uuccccacuuaaauccaa

SEQ ID NO: 440683 - RNA, 19 nt, Artificial Sequence
  Synthetic
auuccccacuuaaauccaa

SEQ ID NO: 440684 - RNA, 20 nt, Artificial Sequence
  Synthetic
gauuccccacuuaaauccaa

SEQ ID NO: 440685 - RNA, 21 nt, Artificial Sequence
  Synthetic
agauuccccacuuaaauccaa

SEQ ID NO: 440686 - RNA, 22 nt, Artificial Sequence
  Synthetic
uagauuccccacuuaaauccaa

SEQ ID NO: 440687 - RNA, 23 nt, Artificial Sequence
  Synthetic
auagauuccccacuuaaauccaa

SEQ ID NO: 440688 - RNA, 24 nt, Artificial Sequence
  Synthetic
cauagauuccccacuuaaauccaa

SEQ ID NO: 440689 - RNA, 18 nt, Artificial Sequence
  Synthetic
ugcaagucuuaaauccaa

SEQ ID NO: 440690 - RNA, 19 nt, Artificial Sequence
  Synthetic
augcaagucuuaaauccaa

SEQ ID NO: 440691 - RNA, 20 nt, Artificial Sequence
  Synthetic
caugcaagucuuaaauccaa

SEQ ID NO: 440692 - RNA, 21 nt, Artificial Sequence
  Synthetic
acaugcaagucuuaaauccaa

SEQ ID NO: 440693 - RNA, 22 nt, Artificial Sequence
  Synthetic
cacaugcaagucuuaaauccaa

SEQ ID NO: 440694 - RNA, 23 nt, Artificial Sequence
  Synthetic
ccacaugcaagucuuaaauccaa

SEQ ID NO: 440695 - RNA, 24 nt, Artificial Sequence
  Synthetic
gccacaugcaagucuuaaauccaa

SEQ ID NO: 440696 - RNA, 18 nt, Artificial Sequence
  Synthetic
agaaaguaaacaauccaa

SEQ ID NO: 440697 - RNA, 19 nt, Artificial Sequence
  Synthetic
gagaaaguaaacaauccaa

SEQ ID NO: 440698 - RNA, 20 nt, Artificial Sequence
  Synthetic
agagaaaguaaacaauccaa

SEQ ID NO: 440699 - RNA, 21 nt, Artificial Sequence
  Synthetic
aagagaaaguaaacaauccaa

SEQ ID NO: 440700 - RNA, 22 nt, Artificial Sequence
  Synthetic
uaagagaaaguaaacaauccaa

SEQ ID NO: 440701 - RNA, 23 nt, Artificial Sequence
  Synthetic
guaagagaaaguaaacaauccaa

SEQ ID NO: 440702 - RNA, 24 nt, Artificial Sequence
  Synthetic
gguaagagaaaguaaacaauccaa

SEQ ID NO: 440703 - RNA, 18 nt, Artificial Sequence
  Synthetic
cuccaucuagcaauccaa

SEQ ID NO: 440704 - RNA, 19 nt, Artificial Sequence
  Synthetic
ucuccaucuagcaauccaa

SEQ ID NO: 440705 - RNA, 20 nt, Artificial Sequence
  Synthetic
aucuccaucuagcaauccaa

SEQ ID NO: 440706 - RNA, 21 nt, Artificial Sequence
  Synthetic
aaucuccaucuagcaauccaa

SEQ ID NO: 440707 - RNA, 22 nt, Artificial Sequence
  Synthetic
uaaucuccaucuagcaauccaa

SEQ ID NO: 440708 - RNA, 23 nt, Artificial Sequence
  Synthetic
uuaaucuccaucuagcaauccaa

SEQ ID NO: 440709 - RNA, 24 nt, Artificial Sequence
  Synthetic
uuuaaucuccaucuagcaauccaa

SEQ ID NO: 440710 - RNA, 18 nt, Artificial Sequence
  Synthetic
acuucccuuucaauccaa

SEQ ID NO: 440711 - RNA, 19 nt, Artificial Sequence
  Synthetic
gacuucccuuucaauccaa

SEQ ID NO: 440712 - RNA, 20 nt, Artificial Sequence
  Synthetic
agacuucccuuucaauccaa

SEQ ID NO: 440713 - RNA, 21 nt, Artificial Sequence
  Synthetic
aagacuucccuuucaauccaa

SEQ ID NO: 440714 - RNA, 22 nt, Artificial Sequence
  Synthetic
caagacuucccuuucaauccaa

SEQ ID NO: 440715 - RNA, 23 nt, Artificial Sequence
  Synthetic
ccaagacuucccuuucaauccaa

SEQ ID NO: 440716 - RNA, 24 nt, Artificial Sequence
  Synthetic
uccaagacuucccuuucaauccaa

SEQ ID NO: 440717 - RNA, 18 nt, Artificial Sequence
  Synthetic
aaaaugaaauagauccaa

SEQ ID NO: 440718 - RNA, 19 nt, Artificial Sequence
  Synthetic
uaaaaugaaauagauccaa

SEQ ID NO: 440719 - RNA, 20 nt, Artificial Sequence
  Synthetic
cuaaaaugaaauagauccaa

SEQ ID NO: 440720 - RNA, 21 nt, Artificial Sequence
  Synthetic
acuaaaaugaaauagauccaa

SEQ ID NO: 440721 - RNA, 22 nt, Artificial Sequence
  Synthetic
aacuaaaaugaaauagauccaa

SEQ ID NO: 440722 - RNA, 23 nt, Artificial Sequence
  Synthetic
caacuaaaaugaaauagauccaa

SEQ ID NO: 440723 - RNA, 24 nt, Artificial Sequence
  Synthetic
acaacuaaaaugaaauagauccaa

SEQ ID NO: 440724 - RNA, 18 nt, Artificial Sequence
  Synthetic
aaucguggggauauccaa

SEQ ID NO: 440725 - RNA, 19 nt, Artificial Sequence
  Synthetic
uaaucguggggauauccaa

SEQ ID NO: 440726 - RNA, 20 nt, Artificial Sequence
  Synthetic
uuaaucguggggauauccaa

SEQ ID NO: 440727 - RNA, 21 nt, Artificial Sequence
  Synthetic
guuaaucguggggauauccaa

SEQ ID NO: 440728 - RNA, 22 nt, Artificial Sequence
  Synthetic
aguuaaucguggggauauccaa

SEQ ID NO: 440729 - RNA, 23 nt, Artificial Sequence
  Synthetic
aaguuaaucguggggauauccaa

SEQ ID NO: 440730 - RNA, 24 nt, Artificial Sequence
  Synthetic
aaaguuaaucguggggauauccaa

SEQ ID NO: 440731 - RNA, 18 nt, Artificial Sequence
  Synthetic
cucugggcauauauccaa

SEQ ID NO: 440732 - RNA, 19 nt, Artificial Sequence
  Synthetic
ucucugggcauauauccaa

SEQ ID NO: 440733 - RNA, 20 nt, Artificial Sequence
  Synthetic
aucucugggcauauauccaa

SEQ ID NO: 440734 - RNA, 21 nt, Artificial Sequence
  Synthetic
uaucucugggcauauauccaa

SEQ ID NO: 440735 - RNA, 22 nt, Artificial Sequence
  Synthetic
uuaucucugggcauauauccaa

SEQ ID NO: 440736 - RNA, 23 nt, Artificial Sequence
  Synthetic
cuuaucucugggcauauauccaa

SEQ ID NO: 440737 - RNA, 24 nt, Artificial Sequence
  Synthetic
ucuuaucucugggcauauauccaa

SEQ ID NO: 440738 - RNA, 18 nt, Artificial Sequence
  Synthetic
ucccagguguauauccaa

SEQ ID NO: 440739 - RNA, 19 nt, Artificial Sequence
  Synthetic
cucccagguguauauccaa

SEQ ID NO: 440740 - RNA, 20 nt, Artificial Sequence
  Synthetic
acucccagguguauauccaa

SEQ ID NO: 440741 - RNA, 21 nt, Artificial Sequence
  Synthetic
cacucccagguguauauccaa

SEQ ID NO: 440742 - RNA, 22 nt, Artificial Sequence
  Synthetic
ccacucccagguguauauccaa

SEQ ID NO: 440743 - RNA, 23 nt, Artificial Sequence
  Synthetic
uccacucccagguguauauccaa

SEQ ID NO: 440744 - RNA, 24 nt, Artificial Sequence
  Synthetic
uuccacucccagguguauauccaa

SEQ ID NO: 440745 - RNA, 18 nt, Artificial Sequence
  Synthetic
aucugguagacuauccaa

SEQ ID NO: 440746 - RNA, 19 nt, Artificial Sequence
  Synthetic
aaucugguagacuauccaa

SEQ ID NO: 440747 - RNA, 20 nt, Artificial Sequence
  Synthetic
aaaucugguagacuauccaa

SEQ ID NO: 440748 - RNA, 21 nt, Artificial Sequence
  Synthetic
uaaaucugguagacuauccaa

SEQ ID NO: 440749 - RNA, 22 nt, Artificial Sequence
  Synthetic
auaaaucugguagacuauccaa

SEQ ID NO: 440750 - RNA, 23 nt, Artificial Sequence
  Synthetic
gauaaaucugguagacuauccaa

SEQ ID NO: 440751 - RNA, 24 nt, Artificial Sequence
  Synthetic
agauaaaucugguagacuauccaa

SEQ ID NO: 440752 - RNA, 18 nt, Artificial Sequence
  Synthetic
aaaaaaaaaaguauccaa

SEQ ID NO: 440753 - RNA, 19 nt, Artificial Sequence
  Synthetic
aaaaaaaaaaaguauccaa

SEQ ID NO: 440754 - RNA, 20 nt, Artificial Sequence
  Synthetic
aaaaaaaaaaaaguauccaa

SEQ ID NO: 440755 - RNA, 21 nt, Artificial Sequence
  Synthetic
caaaaaaaaaaaaguauccaa

SEQ ID NO: 440756 - RNA, 22 nt, Artificial Sequence
  Synthetic
ucaaaaaaaaaaaaguauccaa

SEQ ID NO: 440757 - RNA, 23 nt, Artificial Sequence
  Synthetic
cucaaaaaaaaaaaaguauccaa

SEQ ID NO: 440758 - RNA, 24 nt, Artificial Sequence
  Synthetic
ucucaaaaaaaaaaaaguauccaa

SEQ ID NO: 440759 - RNA, 18 nt, Artificial Sequence
  Synthetic
acuaaaaaucaacuccaa

SEQ ID NO: 440760 - RNA, 19 nt, Artificial Sequence
  Synthetic
aacuaaaaaucaacuccaa

SEQ ID NO: 440761 - RNA, 20 nt, Artificial Sequence
  Synthetic
aaacuaaaaaucaacuccaa

SEQ ID NO: 440762 - RNA, 21 nt, Artificial Sequence
  Synthetic
aaaacuaaaaaucaacuccaa

SEQ ID NO: 440763 - RNA, 22 nt, Artificial Sequence
  Synthetic
uaaaacuaaaaaucaacuccaa

SEQ ID NO: 440764 - RNA, 23 nt, Artificial Sequence
  Synthetic
auaaaacuaaaaaucaacuccaa

SEQ ID NO: 440765 - RNA, 24 nt, Artificial Sequence
  Synthetic
aauaaaacuaaaaaucaacuccaa

SEQ ID NO: 440766 - RNA, 18 nt, Artificial Sequence
  Synthetic
acuuguuuuccacuccaa

SEQ ID NO: 440767 - RNA, 19 nt, Artificial Sequence
  Synthetic
cacuuguuuuccacuccaa

SEQ ID NO: 440768 - RNA, 20 nt, Artificial Sequence
  Synthetic
acacuuguuuuccacuccaa

SEQ ID NO: 440769 - RNA, 21 nt, Artificial Sequence
  Synthetic
aacacuuguuuuccacuccaa

SEQ ID NO: 440770 - RNA, 22 nt, Artificial Sequence
  Synthetic
gaacacuuguuuuccacuccaa

SEQ ID NO: 440771 - RNA, 23 nt, Artificial Sequence
  Synthetic
agaacacuuguuuuccacuccaa

SEQ ID NO: 440772 - RNA, 24 nt, Artificial Sequence
  Synthetic
aagaacacuuguuuuccacuccaa

SEQ ID NO: 440773 - RNA, 18 nt, Artificial Sequence
  Synthetic
ccuagauuuugacuccaa

SEQ ID NO: 440774 - RNA, 19 nt, Artificial Sequence
  Synthetic
accuagauuuugacuccaa

SEQ ID NO: 440775 - RNA, 20 nt, Artificial Sequence
  Synthetic
caccuagauuuugacuccaa

SEQ ID NO: 440776 - RNA, 21 nt, Artificial Sequence
  Synthetic
ucaccuagauuuugacuccaa

SEQ ID NO: 440777 - RNA, 22 nt, Artificial Sequence
  Synthetic
uucaccuagauuuugacuccaa

SEQ ID NO: 440778 - RNA, 23 nt, Artificial Sequence
  Synthetic
auucaccuagauuuugacuccaa

SEQ ID NO: 440779 - RNA, 24 nt, Artificial Sequence
  Synthetic
uauucaccuagauuuugacuccaa

SEQ ID NO: 440780 - RNA, 18 nt, Artificial Sequence
  Synthetic
cucaaggccacccuccaa

SEQ ID NO: 440781 - RNA, 19 nt, Artificial Sequence
  Synthetic
ccucaaggccacccuccaa

SEQ ID NO: 440782 - RNA, 20 nt, Artificial Sequence
  Synthetic
gccucaaggccacccuccaa

SEQ ID NO: 440783 - RNA, 21 nt, Artificial Sequence
  Synthetic
agccucaaggccacccuccaa

SEQ ID NO: 440784 - RNA, 22 nt, Artificial Sequence
  Synthetic
cagccucaaggccacccuccaa

SEQ ID NO: 440785 - RNA, 23 nt, Artificial Sequence
  Synthetic
gcagccucaaggccacccuccaa

SEQ ID NO: 440786 - RNA, 24 nt, Artificial Sequence
  Synthetic
ggcagccucaaggccacccuccaa

SEQ ID NO: 440787 - RNA, 18 nt, Artificial Sequence
  Synthetic
guucugcaggcucuccaa

SEQ ID NO: 440788 - RNA, 19 nt, Artificial Sequence
  Synthetic
uguucugcaggcucuccaa

SEQ ID NO: 440789 - RNA, 20 nt, Artificial Sequence
  Synthetic
auguucugcaggcucuccaa

SEQ ID NO: 440790 - RNA, 21 nt, Artificial Sequence
  Synthetic
uauguucugcaggcucuccaa

SEQ ID NO: 440791 - RNA, 22 nt, Artificial Sequence
  Synthetic
uuauguucugcaggcucuccaa

SEQ ID NO: 440792 - RNA, 23 nt, Artificial Sequence
  Synthetic
guuauguucugcaggcucuccaa

SEQ ID NO: 440793 - RNA, 24 nt, Artificial Sequence
  Synthetic
gguuauguucugcaggcucuccaa

SEQ ID NO: 440794 - RNA, 18 nt, Artificial Sequence
  Synthetic
aauauauguggucuccaa

SEQ ID NO: 440795 - RNA, 19 nt, Artificial Sequence
  Synthetic
aaauauauguggucuccaa

SEQ ID NO: 440796 - RNA, 20 nt, Artificial Sequence
  Synthetic
gaaauauauguggucuccaa

SEQ ID NO: 440797 - RNA, 21 nt, Artificial Sequence
  Synthetic
agaaauauauguggucuccaa

SEQ ID NO: 440798 - RNA, 22 nt, Artificial Sequence
  Synthetic
aagaaauauauguggucuccaa

SEQ ID NO: 440799 - RNA, 23 nt, Artificial Sequence
  Synthetic
uaagaaauauauguggucuccaa

SEQ ID NO: 440800 - RNA, 24 nt, Artificial Sequence
  Synthetic
cuaagaaauauauguggucuccaa

SEQ ID NO: 440801 - RNA, 18 nt, Artificial Sequence
  Synthetic
cguugagcuugucuccaa

SEQ ID NO: 440802 - RNA, 19 nt, Artificial Sequence
  Synthetic
ucguugagcuugucuccaa

SEQ ID NO: 440803 - RNA, 20 nt, Artificial Sequence
  Synthetic
cucguugagcuugucuccaa

SEQ ID NO: 440804 - RNA, 21 nt, Artificial Sequence
  Synthetic
acucguugagcuugucuccaa

SEQ ID NO: 440805 - RNA, 22 nt, Artificial Sequence
  Synthetic
aacucguugagcuugucuccaa

SEQ ID NO: 440806 - RNA, 23 nt, Artificial Sequence
  Synthetic
uaacucguugagcuugucuccaa

SEQ ID NO: 440807 - RNA, 24 nt, Artificial Sequence
  Synthetic
cuaacucguugagcuugucuccaa

SEQ ID NO: 440808 - RNA, 18 nt, Artificial Sequence
  Synthetic
guaucauuggaaguccaa

SEQ ID NO: 440809 - RNA, 19 nt, Artificial Sequence
  Synthetic
gguaucauuggaaguccaa

SEQ ID NO: 440810 - RNA, 20 nt, Artificial Sequence
  Synthetic
ugguaucauuggaaguccaa

SEQ ID NO: 440811 - RNA, 21 nt, Artificial Sequence
  Synthetic
cugguaucauuggaaguccaa

SEQ ID NO: 440812 - RNA, 22 nt, Artificial Sequence
  Synthetic
acugguaucauuggaaguccaa

SEQ ID NO: 440813 - RNA, 23 nt, Artificial Sequence
  Synthetic
cacugguaucauuggaaguccaa

SEQ ID NO: 440814 - RNA, 24 nt, Artificial Sequence
  Synthetic
ucacugguaucauuggaaguccaa

SEQ ID NO: 440815 - RNA, 18 nt, Artificial Sequence
  Synthetic
uuuguauuuuuuguccaa

SEQ ID NO: 440816 - RNA, 19 nt, Artificial Sequence
  Synthetic
uuuuguauuuuuuguccaa

SEQ ID NO: 440817 - RNA, 20 nt, Artificial Sequence
  Synthetic
uuuuuguauuuuuuguccaa

SEQ ID NO: 440818 - RNA, 21 nt, Artificial Sequence
  Synthetic
auuuuuguauuuuuuguccaa

SEQ ID NO: 440819 - RNA, 22 nt, Artificial Sequence
  Synthetic
aauuuuuguauuuuuuguccaa

SEQ ID NO: 440820 - RNA, 23 nt, Artificial Sequence
  Synthetic
uaauuuuuguauuuuuuguccaa

SEQ ID NO: 440821 - RNA, 24 nt, Artificial Sequence
  Synthetic
uuaauuuuuguauuuuuuguccaa

SEQ ID NO: 440822 - RNA, 18 nt, Artificial Sequence
  Synthetic
caccaaggaaaauuccaa

SEQ ID NO: 440823 - RNA, 19 nt, Artificial Sequence
  Synthetic
ccaccaaggaaaauuccaa

SEQ ID NO: 440824 - RNA, 20 nt, Artificial Sequence
  Synthetic
uccaccaaggaaaauuccaa

SEQ ID NO: 440825 - RNA, 21 nt, Artificial Sequence
  Synthetic
uuccaccaaggaaaauuccaa

SEQ ID NO: 440826 - RNA, 22 nt, Artificial Sequence
  Synthetic
uuuccaccaaggaaaauuccaa

SEQ ID NO: 440827 - RNA, 23 nt, Artificial Sequence
  Synthetic
uuuuccaccaaggaaaauuccaa

SEQ ID NO: 440828 - RNA, 24 nt, Artificial Sequence
  Synthetic
cuuuuccaccaaggaaaauuccaa

SEQ ID NO: 440829 - RNA, 18 nt, Artificial Sequence
  Synthetic
aaaugauccaaauuccaa

SEQ ID NO: 440830 - RNA, 19 nt, Artificial Sequence
  Synthetic
aaaaugauccaaauuccaa

SEQ ID NO: 440831 - RNA, 20 nt, Artificial Sequence
  Synthetic
caaaaugauccaaauuccaa

SEQ ID NO: 440832 - RNA, 21 nt, Artificial Sequence
  Synthetic
gcaaaaugauccaaauuccaa

SEQ ID NO: 440833 - RNA, 22 nt, Artificial Sequence
  Synthetic
ggcaaaaugauccaaauuccaa

SEQ ID NO: 440834 - RNA, 23 nt, Artificial Sequence
  Synthetic
uggcaaaaugauccaaauuccaa

SEQ ID NO: 440835 - RNA, 24 nt, Artificial Sequence
  Synthetic
uuggcaaaaugauccaaauuccaa

SEQ ID NO: 440836 - RNA, 18 nt, Artificial Sequence
  Synthetic
gccuucaauacauuccaa

SEQ ID NO: 440837 - RNA, 19 nt, Artificial Sequence
  Synthetic
ugccuucaauacauuccaa

SEQ ID NO: 440838 - RNA, 20 nt, Artificial Sequence
  Synthetic
gugccuucaauacauuccaa

SEQ ID NO: 440839 - RNA, 21 nt, Artificial Sequence
  Synthetic
ugugccuucaauacauuccaa

SEQ ID NO: 440840 - RNA, 22 nt, Artificial Sequence
  Synthetic
cugugccuucaauacauuccaa

SEQ ID NO: 440841 - RNA, 23 nt, Artificial Sequence
  Synthetic
ucugugccuucaauacauuccaa

SEQ ID NO: 440842 - RNA, 24 nt, Artificial Sequence
  Synthetic
uucugugccuucaauacauuccaa

SEQ ID NO: 440843 - RNA, 18 nt, Artificial Sequence
  Synthetic
aauagccauucauuccaa

SEQ ID NO: 440844 - RNA, 19 nt, Artificial Sequence
  Synthetic
gaauagccauucauuccaa

SEQ ID NO: 440845 - RNA, 20 nt, Artificial Sequence
  Synthetic
ugaauagccauucauuccaa

SEQ ID NO: 440846 - RNA, 21 nt, Artificial Sequence
  Synthetic
cugaauagccauucauuccaa

SEQ ID NO: 440847 - RNA, 22 nt, Artificial Sequence
  Synthetic
ccugaauagccauucauuccaa

SEQ ID NO: 440848 - RNA, 23 nt, Artificial Sequence
  Synthetic
gccugaauagccauucauuccaa

SEQ ID NO: 440849 - RNA, 24 nt, Artificial Sequence
  Synthetic
ugccugaauagccauucauuccaa

SEQ ID NO: 440850 - RNA, 18 nt, Artificial Sequence
  Synthetic
agagagaauguauuccaa

SEQ ID NO: 440851 - RNA, 19 nt, Artificial Sequence
  Synthetic
cagagagaauguauuccaa

SEQ ID NO: 440852 - RNA, 20 nt, Artificial Sequence
  Synthetic
gcagagagaauguauuccaa

SEQ ID NO: 440853 - RNA, 21 nt, Artificial Sequence
  Synthetic
ggcagagagaauguauuccaa

SEQ ID NO: 440854 - RNA, 22 nt, Artificial Sequence
  Synthetic
cggcagagagaauguauuccaa

SEQ ID NO: 440855 - RNA, 23 nt, Artificial Sequence
  Synthetic
acggcagagagaauguauuccaa

SEQ ID NO: 440856 - RNA, 24 nt, Artificial Sequence
  Synthetic
gacggcagagagaauguauuccaa

SEQ ID NO: 440857 - RNA, 18 nt, Artificial Sequence
  Synthetic
uucaaaaucaccuuccaa

SEQ ID NO: 440858 - RNA, 19 nt, Artificial Sequence
  Synthetic
cuucaaaaucaccuuccaa

SEQ ID NO: 440859 - RNA, 20 nt, Artificial Sequence
  Synthetic
ucuucaaaaucaccuuccaa

SEQ ID NO: 440860 - RNA, 21 nt, Artificial Sequence
  Synthetic
uucuucaaaaucaccuuccaa

SEQ ID NO: 440861 - RNA, 22 nt, Artificial Sequence
  Synthetic
cuucuucaaaaucaccuuccaa

SEQ ID NO: 440862 - RNA, 23 nt, Artificial Sequence
  Synthetic
ucuucuucaaaaucaccuuccaa

SEQ ID NO: 440863 - RNA, 24 nt, Artificial Sequence
  Synthetic
uucuucuucaaaaucaccuuccaa

SEQ ID NO: 440864 - RNA, 18 nt, Artificial Sequence
  Synthetic
acaaauguugccuuccaa

SEQ ID NO: 440865 - RNA, 19 nt, Artificial Sequence
  Synthetic
uacaaauguugccuuccaa

SEQ ID NO: 440866 - RNA, 20 nt, Artificial Sequence
  Synthetic
uuacaaauguugccuuccaa

SEQ ID NO: 440867 - RNA, 21 nt, Artificial Sequence
  Synthetic
auuacaaauguugccuuccaa

SEQ ID NO: 440868 - RNA, 22 nt, Artificial Sequence
  Synthetic
uauuacaaauguugccuuccaa

SEQ ID NO: 440869 - RNA, 23 nt, Artificial Sequence
  Synthetic
guauuacaaauguugccuuccaa

SEQ ID NO: 440870 - RNA, 24 nt, Artificial Sequence
  Synthetic
uguauuacaaauguugccuuccaa

SEQ ID NO: 440871 - RNA, 18 nt, Artificial Sequence
  Synthetic
gucagaacuggcuuccaa

SEQ ID NO: 440872 - RNA, 19 nt, Artificial Sequence
  Synthetic
ggucagaacuggcuuccaa

SEQ ID NO: 440873 - RNA, 20 nt, Artificial Sequence
  Synthetic
uggucagaacuggcuuccaa

SEQ ID NO: 440874 - RNA, 21 nt, Artificial Sequence
  Synthetic
cuggucagaacuggcuuccaa

SEQ ID NO: 440875 - RNA, 22 nt, Artificial Sequence
  Synthetic
acuggucagaacuggcuuccaa

SEQ ID NO: 440876 - RNA, 23 nt, Artificial Sequence
  Synthetic
cacuggucagaacuggcuuccaa

SEQ ID NO: 440877 - RNA, 24 nt, Artificial Sequence
  Synthetic
ccacuggucagaacuggcuuccaa

SEQ ID NO: 440878 - RNA, 18 nt, Artificial Sequence
  Synthetic
cugauaguguaguuccaa

SEQ ID NO: 440879 - RNA, 19 nt, Artificial Sequence
  Synthetic
gcugauaguguaguuccaa

SEQ ID NO: 440880 - RNA, 20 nt, Artificial Sequence
  Synthetic
agcugauaguguaguuccaa

SEQ ID NO: 440881 - RNA, 21 nt, Artificial Sequence
  Synthetic
gagcugauaguguaguuccaa

SEQ ID NO: 440882 - RNA, 22 nt, Artificial Sequence
  Synthetic
agagcugauaguguaguuccaa

SEQ ID NO: 440883 - RNA, 23 nt, Artificial Sequence
  Synthetic
gagagcugauaguguaguuccaa

SEQ ID NO: 440884 - RNA, 24 nt, Artificial Sequence
  Synthetic
agagagcugauaguguaguuccaa

SEQ ID NO: 440885 - RNA, 18 nt, Artificial Sequence
  Synthetic
cugacauuaaauuuccaa

SEQ ID NO: 440886 - RNA, 19 nt, Artificial Sequence
  Synthetic
acugacauuaaauuuccaa

SEQ ID NO: 440887 - RNA, 20 nt, Artificial Sequence
  Synthetic
cacugacauuaaauuuccaa

SEQ ID NO: 440888 - RNA, 21 nt, Artificial Sequence
  Synthetic
acacugacauuaaauuuccaa

SEQ ID NO: 440889 - RNA, 22 nt, Artificial Sequence
  Synthetic
uacacugacauuaaauuuccaa

SEQ ID NO: 440890 - RNA, 23 nt, Artificial Sequence
  Synthetic
auacacugacauuaaauuuccaa

SEQ ID NO: 440891 - RNA, 24 nt, Artificial Sequence
  Synthetic
gauacacugacauuaaauuuccaa

SEQ ID NO: 440892 - RNA, 18 nt, Artificial Sequence
  Synthetic
ugaauugacuauuuccaa

SEQ ID NO: 440893 - RNA, 19 nt, Artificial Sequence
  Synthetic
augaauugacuauuuccaa

SEQ ID NO: 440894 - RNA, 20 nt, Artificial Sequence
  Synthetic
caugaauugacuauuuccaa

SEQ ID NO: 440895 - RNA, 21 nt, Artificial Sequence
  Synthetic
gcaugaauugacuauuuccaa

SEQ ID NO: 440896 - RNA, 22 nt, Artificial Sequence
  Synthetic
agcaugaauugacuauuuccaa

SEQ ID NO: 440897 - RNA, 23 nt, Artificial Sequence
  Synthetic
uagcaugaauugacuauuuccaa

SEQ ID NO: 440898 - RNA, 24 nt, Artificial Sequence
  Synthetic
cuagcaugaauugacuauuuccaa

SEQ ID NO: 440899 - RNA, 18 nt, Artificial Sequence
  Synthetic
agauccuagacuuuccaa

SEQ ID NO: 440900 - RNA, 19 nt, Artificial Sequence
  Synthetic
aagauccuagacuuuccaa

SEQ ID NO: 440901 - RNA, 20 nt, Artificial Sequence
  Synthetic
aaagauccuagacuuuccaa

SEQ ID NO: 440902 - RNA, 21 nt, Artificial Sequence
  Synthetic
aaaagauccuagacuuuccaa

SEQ ID NO: 440903 - RNA, 22 nt, Artificial Sequence
  Synthetic
gaaaagauccuagacuuuccaa

SEQ ID NO: 440904 - RNA, 23 nt, Artificial Sequence
  Synthetic
agaaaagauccuagacuuuccaa

SEQ ID NO: 440905 - RNA, 24 nt, Artificial Sequence
  Synthetic
aagaaaagauccuagacuuuccaa

SEQ ID NO: 440906 - RNA, 18 nt, Artificial Sequence
  Synthetic
uucagaauaccuuuccaa

SEQ ID NO: 440907 - RNA, 19 nt, Artificial Sequence
  Synthetic
auucagaauaccuuuccaa

SEQ ID NO: 440908 - RNA, 20 nt, Artificial Sequence
  Synthetic
gauucagaauaccuuuccaa

SEQ ID NO: 440909 - RNA, 21 nt, Artificial Sequence
  Synthetic
ggauucagaauaccuuuccaa

SEQ ID NO: 440910 - RNA, 22 nt, Artificial Sequence
  Synthetic
uggauucagaauaccuuuccaa

SEQ ID NO: 440911 - RNA, 23 nt, Artificial Sequence
  Synthetic
auggauucagaauaccuuuccaa

SEQ ID NO: 440912 - RNA, 24 nt, Artificial Sequence
  Synthetic
aauggauucagaauaccuuuccaa

SEQ ID NO: 440913 - RNA, 18 nt, Artificial Sequence
  Synthetic
gacuaucccauuuuccaa

SEQ ID NO: 440914 - RNA, 19 nt, Artificial Sequence
  Synthetic
ugacuaucccauuuuccaa

SEQ ID NO: 440915 - RNA, 20 nt, Artificial Sequence
  Synthetic
gugacuaucccauuuuccaa

SEQ ID NO: 440916 - RNA, 21 nt, Artificial Sequence
  Synthetic
ggugacuaucccauuuuccaa

SEQ ID NO: 440917 - RNA, 22 nt, Artificial Sequence
  Synthetic
aggugacuaucccauuuuccaa

SEQ ID NO: 440918 - RNA, 23 nt, Artificial Sequence
  Synthetic
aaggugacuaucccauuuuccaa

SEQ ID NO: 440919 - RNA, 24 nt, Artificial Sequence
  Synthetic
aaaggugacuaucccauuuuccaa

SEQ ID NO: 440920 - RNA, 18 nt, Artificial Sequence
  Synthetic
gauggcauccuuuuccaa

SEQ ID NO: 440921 - RNA, 19 nt, Artificial Sequence
  Synthetic
agauggcauccuuuuccaa

SEQ ID NO: 440922 - RNA, 20 nt, Artificial Sequence
  Synthetic
uagauggcauccuuuuccaa

SEQ ID NO: 440923 - RNA, 21 nt, Artificial Sequence
  Synthetic
cuagauggcauccuuuuccaa

SEQ ID NO: 440924 - RNA, 22 nt, Artificial Sequence
  Synthetic
ccuagauggcauccuuuuccaa

SEQ ID NO: 440925 - RNA, 23 nt, Artificial Sequence
  Synthetic
uccuagauggcauccuuuuccaa

SEQ ID NO: 440926 - RNA, 24 nt, Artificial Sequence
  Synthetic
guccuagauggcauccuuuuccaa

SEQ ID NO: 440927 - RNA, 18 nt, Artificial Sequence
  Synthetic
ggaaacagugaaaagcaa

SEQ ID NO: 440928 - RNA, 19 nt, Artificial Sequence
  Synthetic
cggaaacagugaaaagcaa

SEQ ID NO: 440929 - RNA, 20 nt, Artificial Sequence
  Synthetic
acggaaacagugaaaagcaa

SEQ ID NO: 440930 - RNA, 21 nt, Artificial Sequence
  Synthetic
gacggaaacagugaaaagcaa

SEQ ID NO: 440931 - RNA, 22 nt, Artificial Sequence
  Synthetic
ugacggaaacagugaaaagcaa

SEQ ID NO: 440932 - RNA, 23 nt, Artificial Sequence
  Synthetic
augacggaaacagugaaaagcaa

SEQ ID NO: 440933 - RNA, 24 nt, Artificial Sequence
  Synthetic
caugacggaaacagugaaaagcaa

SEQ ID NO: 440934 - RNA, 18 nt, Artificial Sequence
  Synthetic
aaagcuucuacaaagcaa

SEQ ID NO: 440935 - RNA, 19 nt, Artificial Sequence
  Synthetic
aaaagcuucuacaaagcaa

SEQ ID NO: 440936 - RNA, 20 nt, Artificial Sequence
  Synthetic
aaaaagcuucuacaaagcaa

SEQ ID NO: 440937 - RNA, 21 nt, Artificial Sequence
  Synthetic
uaaaaagcuucuacaaagcaa

SEQ ID NO: 440938 - RNA, 22 nt, Artificial Sequence
  Synthetic
cuaaaaagcuucuacaaagcaa

SEQ ID NO: 440939 - RNA, 23 nt, Artificial Sequence
  Synthetic
acuaaaaagcuucuacaaagcaa

SEQ ID NO: 440940 - RNA, 24 nt, Artificial Sequence
  Synthetic
aacuaaaaagcuucuacaaagcaa

SEQ ID NO: 440941 - RNA, 18 nt, Artificial Sequence
  Synthetic
guacugaaaagaaagcaa

SEQ ID NO: 440942 - RNA, 19 nt, Artificial Sequence
  Synthetic
gguacugaaaagaaagcaa

SEQ ID NO: 440943 - RNA, 20 nt, Artificial Sequence
  Synthetic
ugguacugaaaagaaagcaa

SEQ ID NO: 440944 - RNA, 21 nt, Artificial Sequence
  Synthetic
gugguacugaaaagaaagcaa

SEQ ID NO: 440945 - RNA, 22 nt, Artificial Sequence
  Synthetic
ugugguacugaaaagaaagcaa

SEQ ID NO: 440946 - RNA, 23 nt, Artificial Sequence
  Synthetic
uugugguacugaaaagaaagcaa

SEQ ID NO: 440947 - RNA, 24 nt, Artificial Sequence
  Synthetic
uuugugguacugaaaagaaagcaa

SEQ ID NO: 440948 - RNA, 18 nt, Artificial Sequence
  Synthetic
uacaacugaagaaagcaa

SEQ ID NO: 440949 - RNA, 19 nt, Artificial Sequence
  Synthetic
uuacaacugaagaaagcaa

SEQ ID NO: 440950 - RNA, 20 nt, Artificial Sequence
  Synthetic
uuuacaacugaagaaagcaa

SEQ ID NO: 440951 - RNA, 21 nt, Artificial Sequence
  Synthetic
uuuuacaacugaagaaagcaa

SEQ ID NO: 440952 - RNA, 22 nt, Artificial Sequence
  Synthetic
auuuuacaacugaagaaagcaa

SEQ ID NO: 440953 - RNA, 23 nt, Artificial Sequence
  Synthetic
gauuuuacaacugaagaaagcaa

SEQ ID NO: 440954 - RNA, 24 nt, Artificial Sequence
  Synthetic
agauuuuacaacugaagaaagcaa

SEQ ID NO: 440955 - RNA, 18 nt, Artificial Sequence
  Synthetic
agaaagcaaggaaagcaa

SEQ ID NO: 440956 - RNA, 19 nt, Artificial Sequence
  Synthetic
aagaaagcaaggaaagcaa

SEQ ID NO: 440957 - RNA, 20 nt, Artificial Sequence
  Synthetic
gaagaaagcaaggaaagcaa

SEQ ID NO: 440958 - RNA, 21 nt, Artificial Sequence
  Synthetic
cgaagaaagcaaggaaagcaa

SEQ ID NO: 440959 - RNA, 22 nt, Artificial Sequence
  Synthetic
gcgaagaaagcaaggaaagcaa

SEQ ID NO: 440960 - RNA, 23 nt, Artificial Sequence
  Synthetic
agcgaagaaagcaaggaaagcaa

SEQ ID NO: 440961 - RNA, 24 nt, Artificial Sequence
  Synthetic
aagcgaagaaagcaaggaaagcaa

SEQ ID NO: 440962 - RNA, 18 nt, Artificial Sequence
  Synthetic
uccugagucauaaagcaa

SEQ ID NO: 440963 - RNA, 19 nt, Artificial Sequence
  Synthetic
auccugagucauaaagcaa

SEQ ID NO: 440964 - RNA, 20 nt, Artificial Sequence
  Synthetic
aauccugagucauaaagcaa

SEQ ID NO: 440965 - RNA, 21 nt, Artificial Sequence
  Synthetic
aaauccugagucauaaagcaa

SEQ ID NO: 440966 - RNA, 22 nt, Artificial Sequence
  Synthetic
uaaauccugagucauaaagcaa

SEQ ID NO: 440967 - RNA, 23 nt, Artificial Sequence
  Synthetic
uuaaauccugagucauaaagcaa

SEQ ID NO: 440968 - RNA, 24 nt, Artificial Sequence
  Synthetic
cuuaaauccugagucauaaagcaa

SEQ ID NO: 440969 - RNA, 18 nt, Artificial Sequence
  Synthetic
caauucaaacuaaagcaa

SEQ ID NO: 440970 - RNA, 19 nt, Artificial Sequence
  Synthetic
ucaauucaaacuaaagcaa

SEQ ID NO: 440971 - RNA, 20 nt, Artificial Sequence
  Synthetic
cucaauucaaacuaaagcaa

SEQ ID NO: 440972 - RNA, 21 nt, Artificial Sequence
  Synthetic
acucaauucaaacuaaagcaa

SEQ ID NO: 440973 - RNA, 22 nt, Artificial Sequence
  Synthetic
aacucaauucaaacuaaagcaa

SEQ ID NO: 440974 - RNA, 23 nt, Artificial Sequence
  Synthetic
aaacucaauucaaacuaaagcaa

SEQ ID NO: 440975 - RNA, 24 nt, Artificial Sequence
  Synthetic
aaaacucaauucaaacuaaagcaa

SEQ ID NO: 440976 - RNA, 24 nt, Artificial Sequence
  Synthetic
gacaaaccugacaaaaacaagcaa

SEQ ID NO: 440977 - RNA, 21 nt, Artificial Sequence
  Synthetic
aaaccugagaaaaacaagcaa

SEQ ID NO: 440978 - RNA, 22 nt, Artificial Sequence
  Synthetic
caaaccugagaaaaacaagcaa

SEQ ID NO: 440979 - RNA, 23 nt, Artificial Sequence
  Synthetic
acaaaccugagaaaaacaagcaa

SEQ ID NO: 440980 - RNA, 24 nt, Artificial Sequence
  Synthetic
gacaaaccugagaaaaacaagcaa

SEQ ID NO: 440981 - RNA, 18 nt, Artificial Sequence
  Synthetic
gagaaagugaacaagcaa

SEQ ID NO: 440982 - RNA, 19 nt, Artificial Sequence
  Synthetic
agagaaagugaacaagcaa

SEQ ID NO: 440983 - RNA, 20 nt, Artificial Sequence
  Synthetic
aagagaaagugaacaagcaa

SEQ ID NO: 440984 - RNA, 21 nt, Artificial Sequence
  Synthetic
caagagaaagugaacaagcaa

SEQ ID NO: 440985 - RNA, 22 nt, Artificial Sequence
  Synthetic
acaagagaaagugaacaagcaa

SEQ ID NO: 440986 - RNA, 23 nt, Artificial Sequence
  Synthetic
uacaagagaaagugaacaagcaa

SEQ ID NO: 440987 - RNA, 24 nt, Artificial Sequence
  Synthetic
uuacaagagaaagugaacaagcaa

SEQ ID NO: 440988 - RNA, 18 nt, Artificial Sequence
  Synthetic
ggaagaucuaccaagcaa

SEQ ID NO: 440989 - RNA, 19 nt, Artificial Sequence
  Synthetic
aggaagaucuaccaagcaa

SEQ ID NO: 440990 - RNA, 20 nt, Artificial Sequence
  Synthetic
gaggaagaucuaccaagcaa

SEQ ID NO: 440991 - RNA, 21 nt, Artificial Sequence
  Synthetic
ggaggaagaucuaccaagcaa

SEQ ID NO: 440992 - RNA, 22 nt, Artificial Sequence
  Synthetic
uggaggaagaucuaccaagcaa

SEQ ID NO: 440993 - RNA, 23 nt, Artificial Sequence
  Synthetic
auggaggaagaucuaccaagcaa

SEQ ID NO: 440994 - RNA, 24 nt, Artificial Sequence
  Synthetic
gauggaggaagaucuaccaagcaa

SEQ ID NO: 440995 - RNA, 18 nt, Artificial Sequence
  Synthetic
ccccuauucagcaagcaa

SEQ ID NO: 440996 - RNA, 19 nt, Artificial Sequence
  Synthetic
cccccuauucagcaagcaa

SEQ ID NO: 440997 - RNA, 20 nt, Artificial Sequence
  Synthetic
ucccccuauucagcaagcaa

SEQ ID NO: 440998 - RNA, 21 nt, Artificial Sequence
  Synthetic
aucccccuauucagcaagcaa

SEQ ID NO: 440999 - RNA, 22 nt, Artificial Sequence
  Synthetic
caucccccuauucagcaagcaa

SEQ ID NO: 441000 - RNA, 23 nt, Artificial Sequence
  Synthetic
gcaucccccuauucagcaagcaa

SEQ ID NO: 441001 - RNA, 24 nt, Artificial Sequence
  Synthetic
agcaucccccuauucagcaagcaa

SEQ ID NO: 441002 - RNA, 18 nt, Artificial Sequence
  Synthetic
ucucaaaggggcaagcaa

SEQ ID NO: 441003 - RNA, 19 nt, Artificial Sequence
  Synthetic
cucucaaaggggcaagcaa

SEQ ID NO: 441004 - RNA, 20 nt, Artificial Sequence
  Synthetic
ucucucaaaggggcaagcaa

SEQ ID NO: 441005 - RNA, 21 nt, Artificial Sequence
  Synthetic
uucucucaaaggggcaagcaa

SEQ ID NO: 441006 - RNA, 22 nt, Artificial Sequence
  Synthetic
cuucucucaaaggggcaagcaa

SEQ ID NO: 441007 - RNA, 23 nt, Artificial Sequence
  Synthetic
ccuucucucaaaggggcaagcaa

SEQ ID NO: 441008 - RNA, 24 nt, Artificial Sequence
  Synthetic
uccuucucucaaaggggcaagcaa

SEQ ID NO: 441009 - RNA, 18 nt, Artificial Sequence
  Synthetic
gagggagugugcaagcaa

SEQ ID NO: 441010 - RNA, 19 nt, Artificial Sequence
  Synthetic
ggagggagugugcaagcaa

SEQ ID NO: 441011 - RNA, 20 nt, Artificial Sequence
  Synthetic
uggagggagugugcaagcaa

SEQ ID NO: 441012 - RNA, 21 nt, Artificial Sequence
  Synthetic
cuggagggagugugcaagcaa

SEQ ID NO: 441013 - RNA, 22 nt, Artificial Sequence
  Synthetic
acuggagggagugugcaagcaa

SEQ ID NO: 441014 - RNA, 23 nt, Artificial Sequence
  Synthetic
cacuggagggagugugcaagcaa

SEQ ID NO: 441015 - RNA, 24 nt, Artificial Sequence
  Synthetic
ucacuggagggagugugcaagcaa

SEQ ID NO: 441016 - RNA, 18 nt, Artificial Sequence
  Synthetic
aauccauucaucaagcaa

SEQ ID NO: 441017 - RNA, 19 nt, Artificial Sequence
  Synthetic
caauccauucaucaagcaa

SEQ ID NO: 441018 - RNA, 20 nt, Artificial Sequence
  Synthetic
ucaauccauucaucaagcaa

SEQ ID NO: 441019 - RNA, 21 nt, Artificial Sequence
  Synthetic
uucaauccauucaucaagcaa

SEQ ID NO: 441020 - RNA, 22 nt, Artificial Sequence
  Synthetic
uuucaauccauucaucaagcaa

SEQ ID NO: 441021 - RNA, 23 nt, Artificial Sequence
  Synthetic
auuucaauccauucaucaagcaa

SEQ ID NO: 441022 - RNA, 24 nt, Artificial Sequence
  Synthetic
aauuucaauccauucaucaagcaa

SEQ ID NO: 441023 - RNA, 18 nt, Artificial Sequence
  Synthetic
uguaugucuaucaagcaa

SEQ ID NO: 441024 - RNA, 19 nt, Artificial Sequence
  Synthetic
auguaugucuaucaagcaa

SEQ ID NO: 441025 - RNA, 20 nt, Artificial Sequence
  Synthetic
aauguaugucuaucaagcaa

SEQ ID NO: 441026 - RNA, 21 nt, Artificial Sequence
  Synthetic
aaauguaugucuaucaagcaa

SEQ ID NO: 441027 - RNA, 22 nt, Artificial Sequence
  Synthetic
uaaauguaugucuaucaagcaa

SEQ ID NO: 441028 - RNA, 23 nt, Artificial Sequence
  Synthetic
cuaaauguaugucuaucaagcaa

SEQ ID NO: 441029 - RNA, 24 nt, Artificial Sequence
  Synthetic
acuaaauguaugucuaucaagcaa

SEQ ID NO: 441030 - RNA, 18 nt, Artificial Sequence
  Synthetic
ucugaaacaaagaagcaa

SEQ ID NO: 441031 - RNA, 19 nt, Artificial Sequence
  Synthetic
gucugaaacaaagaagcaa

SEQ ID NO: 441032 - RNA, 20 nt, Artificial Sequence
  Synthetic
ugucugaaacaaagaagcaa

SEQ ID NO: 441033 - RNA, 21 nt, Artificial Sequence
  Synthetic
uugucugaaacaaagaagcaa

SEQ ID NO: 441034 - RNA, 22 nt, Artificial Sequence
  Synthetic
auugucugaaacaaagaagcaa

SEQ ID NO: 441035 - RNA, 23 nt, Artificial Sequence
  Synthetic
cauugucugaaacaaagaagcaa

SEQ ID NO: 441036 - RNA, 24 nt, Artificial Sequence
  Synthetic
ccauugucugaaacaaagaagcaa

SEQ ID NO: 441037 - RNA, 18 nt, Artificial Sequence
  Synthetic
gcugggggcaggaagcaa

SEQ ID NO: 441038 - RNA, 19 nt, Artificial Sequence
  Synthetic
ggcugggggcaggaagcaa

SEQ ID NO: 441039 - RNA, 20 nt, Artificial Sequence
  Synthetic
gggcugggggcaggaagcaa

SEQ ID NO: 441040 - RNA, 21 nt, Artificial Sequence
  Synthetic
ggggcugggggcaggaagcaa

SEQ ID NO: 441041 - RNA, 22 nt, Artificial Sequence
  Synthetic
aggggcugggggcaggaagcaa

SEQ ID NO: 441042 - RNA, 23 nt, Artificial Sequence
  Synthetic
caggggcugggggcaggaagcaa

SEQ ID NO: 441043 - RNA, 24 nt, Artificial Sequence
  Synthetic
ccaggggcugggggcaggaagcaa

SEQ ID NO: 441044 - RNA, 18 nt, Artificial Sequence
  Synthetic
aauaaaugaaugaagcaa

SEQ ID NO: 441045 - RNA, 19 nt, Artificial Sequence
  Synthetic
caauaaaugaaugaagcaa

SEQ ID NO: 441046 - RNA, 20 nt, Artificial Sequence
  Synthetic
ccaauaaaugaaugaagcaa

SEQ ID NO: 441047 - RNA, 21 nt, Artificial Sequence
  Synthetic
uccaauaaaugaaugaagcaa

SEQ ID NO: 441048 - RNA, 22 nt, Artificial Sequence
  Synthetic
uuccaauaaaugaaugaagcaa

SEQ ID NO: 441049 - RNA, 23 nt, Artificial Sequence
  Synthetic
cuuccaauaaaugaaugaagcaa

SEQ ID NO: 441050 - RNA, 24 nt, Artificial Sequence
  Synthetic
ucuuccaauaaaugaaugaagcaa

SEQ ID NO: 441051 - RNA, 18 nt, Artificial Sequence
  Synthetic
ggagaggggaauaagcaa

SEQ ID NO: 441052 - RNA, 19 nt, Artificial Sequence
  Synthetic
gggagaggggaauaagcaa

SEQ ID NO: 441053 - RNA, 20 nt, Artificial Sequence
  Synthetic
agggagaggggaauaagcaa

SEQ ID NO: 441054 - RNA, 21 nt, Artificial Sequence
  Synthetic
gagggagaggggaauaagcaa

SEQ ID NO: 441055 - RNA, 22 nt, Artificial Sequence
  Synthetic
ggagggagaggggaauaagcaa

SEQ ID NO: 441056 - RNA, 23 nt, Artificial Sequence
  Synthetic
gggagggagaggggaauaagcaa

SEQ ID NO: 441057 - RNA, 24 nt, Artificial Sequence
  Synthetic
agggagggagaggggaauaagcaa

SEQ ID NO: 441058 - RNA, 18 nt, Artificial Sequence
  Synthetic
uuccucauauauaagcaa

SEQ ID NO: 441059 - RNA, 19 nt, Artificial Sequence
  Synthetic
guuccucauauauaagcaa

SEQ ID NO: 441060 - RNA, 20 nt, Artificial Sequence
  Synthetic
aguuccucauauauaagcaa

SEQ ID NO: 441061 - RNA, 21 nt, Artificial Sequence
  Synthetic
gaguuccucauauauaagcaa

SEQ ID NO: 441062 - RNA, 22 nt, Artificial Sequence
  Synthetic
agaguuccucauauauaagcaa

SEQ ID NO: 441063 - RNA, 23 nt, Artificial Sequence
  Synthetic
uagaguuccucauauauaagcaa

SEQ ID NO: 441064 - RNA, 24 nt, Artificial Sequence
  Synthetic
uuagaguuccucauauauaagcaa

SEQ ID NO: 441065 - RNA, 18 nt, Artificial Sequence
  Synthetic
cuggcauccaaacagcaa

SEQ ID NO: 441066 - RNA, 19 nt, Artificial Sequence
  Synthetic
gcuggcauccaaacagcaa

SEQ ID NO: 441067 - RNA, 20 nt, Artificial Sequence
  Synthetic
ggcuggcauccaaacagcaa

SEQ ID NO: 441068 - RNA, 21 nt, Artificial Sequence
  Synthetic
uggcuggcauccaaacagcaa

SEQ ID NO: 441069 - RNA, 22 nt, Artificial Sequence
  Synthetic
auggcuggcauccaaacagcaa

SEQ ID NO: 441070 - RNA, 23 nt, Artificial Sequence
  Synthetic
uauggcuggcauccaaacagcaa

SEQ ID NO: 441071 - RNA, 24 nt, Artificial Sequence
  Synthetic
guauggcuggcauccaaacagcaa

SEQ ID NO: 441072 - RNA, 18 nt, Artificial Sequence
  Synthetic
aucaaaagcaaacagcaa

SEQ ID NO: 441073 - RNA, 19 nt, Artificial Sequence
  Synthetic
gaucaaaagcaaacagcaa

SEQ ID NO: 441074 - RNA, 20 nt, Artificial Sequence
  Synthetic
ggaucaaaagcaaacagcaa

SEQ ID NO: 441075 - RNA, 21 nt, Artificial Sequence
  Synthetic
uggaucaaaagcaaacagcaa

SEQ ID NO: 441076 - RNA, 22 nt, Artificial Sequence
  Synthetic
uuggaucaaaagcaaacagcaa

SEQ ID NO: 441077 - RNA, 23 nt, Artificial Sequence
  Synthetic
uuuggaucaaaagcaaacagcaa

SEQ ID NO: 441078 - RNA, 24 nt, Artificial Sequence
  Synthetic
guuuggaucaaaagcaaacagcaa

SEQ ID NO: 441079 - RNA, 18 nt, Artificial Sequence
  Synthetic
uguuacaagcaacagcaa

SEQ ID NO: 441080 - RNA, 19 nt, Artificial Sequence
  Synthetic
cuguuacaagcaacagcaa

SEQ ID NO: 441081 - RNA, 20 nt, Artificial Sequence
  Synthetic
ucuguuacaagcaacagcaa

SEQ ID NO: 441082 - RNA, 21 nt, Artificial Sequence
  Synthetic
uucuguuacaagcaacagcaa

SEQ ID NO: 441083 - RNA, 22 nt, Artificial Sequence
  Synthetic
auucuguuacaagcaacagcaa

SEQ ID NO: 441084 - RNA, 23 nt, Artificial Sequence
  Synthetic
uauucuguuacaagcaacagcaa

SEQ ID NO: 441085 - RNA, 24 nt, Artificial Sequence
  Synthetic
guauucuguuacaagcaacagcaa

SEQ ID NO: 441086 - RNA, 21 nt, Artificial Sequence
  Synthetic
gaaagagcuucugcacagcaa

SEQ ID NO: 441087 - RNA, 22 nt, Artificial Sequence
  Synthetic
cgaaagagcuucugcacagcaa

SEQ ID NO: 441088 - RNA, 23 nt, Artificial Sequence
  Synthetic
acgaaagagcuucugcacagcaa

SEQ ID NO: 441089 - RNA, 24 nt, Artificial Sequence
  Synthetic
aacgaaagagcuucugcacagcaa

SEQ ID NO: 441090 - RNA, 18 nt, Artificial Sequence
  Synthetic
aaaagcuuugcacagcaa

SEQ ID NO: 441091 - RNA, 19 nt, Artificial Sequence
  Synthetic
aaaaagcuuugcacagcaa

SEQ ID NO: 441092 - RNA, 20 nt, Artificial Sequence
  Synthetic
uaaaaagcuuugcacagcaa

SEQ ID NO: 441093 - RNA, 21 nt, Artificial Sequence
  Synthetic
cuaaaaagcuuugcacagcaa

SEQ ID NO: 441094 - RNA, 22 nt, Artificial Sequence
  Synthetic
acuaaaaagcuuugcacagcaa

SEQ ID NO: 441095 - RNA, 23 nt, Artificial Sequence
  Synthetic
aacuaaaaagcuuugcacagcaa

SEQ ID NO: 441096 - RNA, 24 nt, Artificial Sequence
  Synthetic
aaacuaaaaagcuuugcacagcaa

SEQ ID NO: 441097 - RNA, 18 nt, Artificial Sequence
  Synthetic
cacaaaggaagacagcaa

SEQ ID NO: 441098 - RNA, 19 nt, Artificial Sequence
  Synthetic
acacaaaggaagacagcaa

SEQ ID NO: 441099 - RNA, 20 nt, Artificial Sequence
  Synthetic
aacacaaaggaagacagcaa

SEQ ID NO: 441100 - RNA, 21 nt, Artificial Sequence
  Synthetic
aaacacaaaggaagacagcaa

SEQ ID NO: 441101 - RNA, 22 nt, Artificial Sequence
  Synthetic
aaaacacaaaggaagacagcaa

SEQ ID NO: 441102 - RNA, 23 nt, Artificial Sequence
  Synthetic
caaaacacaaaggaagacagcaa

SEQ ID NO: 441103 - RNA, 24 nt, Artificial Sequence
  Synthetic
ucaaaacacaaaggaagacagcaa

SEQ ID NO: 441104 - RNA, 18 nt, Artificial Sequence
  Synthetic
gagaaugagugccagcaa

SEQ ID NO: 441105 - RNA, 19 nt, Artificial Sequence
  Synthetic
agagaaugagugccagcaa

SEQ ID NO: 441106 - RNA, 20 nt, Artificial Sequence
  Synthetic
gagagaaugagugccagcaa

SEQ ID NO: 441107 - RNA, 21 nt, Artificial Sequence
  Synthetic
agagagaaugagugccagcaa

SEQ ID NO: 441108 - RNA, 22 nt, Artificial Sequence
  Synthetic
gagagagaaugagugccagcaa

SEQ ID NO: 441109 - RNA, 23 nt, Artificial Sequence
  Synthetic
ggagagagaaugagugccagcaa

SEQ ID NO: 441110 - RNA, 24 nt, Artificial Sequence
  Synthetic
aggagagagaaugagugccagcaa

SEQ ID NO: 441111 - RNA, 18 nt, Artificial Sequence
  Synthetic
gguacuccagggcagcaa

SEQ ID NO: 441112 - RNA, 19 nt, Artificial Sequence
  Synthetic
ugguacuccagggcagcaa

SEQ ID NO: 441113 - RNA, 20 nt, Artificial Sequence
  Synthetic
cugguacuccagggcagcaa

SEQ ID NO: 441114 - RNA, 21 nt, Artificial Sequence
  Synthetic
acugguacuccagggcagcaa

SEQ ID NO: 441115 - RNA, 22 nt, Artificial Sequence
  Synthetic
aacugguacuccagggcagcaa

SEQ ID NO: 441116 - RNA, 23 nt, Artificial Sequence
  Synthetic
caacugguacuccagggcagcaa

SEQ ID NO: 441117 - RNA, 24 nt, Artificial Sequence
  Synthetic
acaacugguacuccagggcagcaa

SEQ ID NO: 441118 - RNA, 18 nt, Artificial Sequence
  Synthetic
uaggacagcaugcagcaa

SEQ ID NO: 441119 - RNA, 19 nt, Artificial Sequence
  Synthetic
cuaggacagcaugcagcaa

SEQ ID NO: 441120 - RNA, 20 nt, Artificial Sequence
  Synthetic
acuaggacagcaugcagcaa

SEQ ID NO: 441121 - RNA, 21 nt, Artificial Sequence
  Synthetic
cacuaggacagcaugcagcaa

SEQ ID NO: 441122 - RNA, 22 nt, Artificial Sequence
  Synthetic
gcacuaggacagcaugcagcaa

SEQ ID NO: 441123 - RNA, 23 nt, Artificial Sequence
  Synthetic
agcacuaggacagcaugcagcaa

SEQ ID NO: 441124 - RNA, 24 nt, Artificial Sequence
  Synthetic
gagcacuaggacagcaugcagcaa

SEQ ID NO: 441125 - RNA, 18 nt, Artificial Sequence
  Synthetic
cagugaagcuugcagcaa

SEQ ID NO: 441126 - RNA, 19 nt, Artificial Sequence
  Synthetic
gcagugaagcuugcagcaa

SEQ ID NO: 441127 - RNA, 20 nt, Artificial Sequence
  Synthetic
agcagugaagcuugcagcaa

SEQ ID NO: 441128 - RNA, 21 nt, Artificial Sequence
  Synthetic
cagcagugaagcuugcagcaa

SEQ ID NO: 441129 - RNA, 22 nt, Artificial Sequence
  Synthetic
ccagcagugaagcuugcagcaa

SEQ ID NO: 441130 - RNA, 23 nt, Artificial Sequence
  Synthetic
cccagcagugaagcuugcagcaa

SEQ ID NO: 441131 - RNA, 24 nt, Artificial Sequence
  Synthetic
ucccagcagugaagcuugcagcaa

SEQ ID NO: 441132 - RNA, 18 nt, Artificial Sequence
  Synthetic
uucugucaaaaucagcaa

SEQ ID NO: 441133 - RNA, 19 nt, Artificial Sequence
  Synthetic
uuucugucaaaaucagcaa

SEQ ID NO: 441134 - RNA, 20 nt, Artificial Sequence
  Synthetic
auuucugucaaaaucagcaa

SEQ ID NO: 441135 - RNA, 21 nt, Artificial Sequence
  Synthetic
uauuucugucaaaaucagcaa

SEQ ID NO: 441136 - RNA, 22 nt, Artificial Sequence
  Synthetic
cuauuucugucaaaaucagcaa

SEQ ID NO: 441137 - RNA, 23 nt, Artificial Sequence
  Synthetic
ccuauuucugucaaaaucagcaa

SEQ ID NO: 441138 - RNA, 24 nt, Artificial Sequence
  Synthetic
uccuauuucugucaaaaucagcaa

SEQ ID NO: 441139 - RNA, 18 nt, Artificial Sequence
  Synthetic
aagaaaggguaucagcaa

SEQ ID NO: 441140 - RNA, 19 nt, Artificial Sequence
  Synthetic
gaagaaaggguaucagcaa

SEQ ID NO: 441141 - RNA, 20 nt, Artificial Sequence
  Synthetic
ggaagaaaggguaucagcaa

SEQ ID NO: 441142 - RNA, 21 nt, Artificial Sequence
  Synthetic
uggaagaaaggguaucagcaa

SEQ ID NO: 441143 - RNA, 22 nt, Artificial Sequence
  Synthetic
cuggaagaaaggguaucagcaa

SEQ ID NO: 441144 - RNA, 23 nt, Artificial Sequence
  Synthetic
acuggaagaaaggguaucagcaa

SEQ ID NO: 441145 - RNA, 24 nt, Artificial Sequence
  Synthetic
aacuggaagaaaggguaucagcaa

SEQ ID NO: 441146 - RNA, 18 nt, Artificial Sequence
  Synthetic
uaaaauaggacucagcaa

SEQ ID NO: 441147 - RNA, 19 nt, Artificial Sequence
  Synthetic
cuaaaauaggacucagcaa

SEQ ID NO: 441148 - RNA, 20 nt, Artificial Sequence
  Synthetic
ucuaaaauaggacucagcaa

SEQ ID NO: 441149 - RNA, 21 nt, Artificial Sequence
  Synthetic
cucuaaaauaggacucagcaa

SEQ ID NO: 441150 - RNA, 22 nt, Artificial Sequence
  Synthetic
ucucuaaaauaggacucagcaa

SEQ ID NO: 441151 - RNA, 23 nt, Artificial Sequence
  Synthetic
gucucuaaaauaggacucagcaa

SEQ ID NO: 441152 - RNA, 24 nt, Artificial Sequence
  Synthetic
ggucucuaaaauaggacucagcaa

SEQ ID NO: 441153 - RNA, 18 nt, Artificial Sequence
  Synthetic
gaauaaaauagucagcaa

SEQ ID NO: 441154 - RNA, 19 nt, Artificial Sequence
  Synthetic
ggaauaaaauagucagcaa

SEQ ID NO: 441155 - RNA, 20 nt, Artificial Sequence
  Synthetic
uggaauaaaauagucagcaa

SEQ ID NO: 441156 - RNA, 21 nt, Artificial Sequence
  Synthetic
uuggaauaaaauagucagcaa

SEQ ID NO: 441157 - RNA, 22 nt, Artificial Sequence
  Synthetic
uuuggaauaaaauagucagcaa

SEQ ID NO: 441158 - RNA, 23 nt, Artificial Sequence
  Synthetic
guuuggaauaaaauagucagcaa

SEQ ID NO: 441159 - RNA, 24 nt, Artificial Sequence
  Synthetic
uguuuggaauaaaauagucagcaa

SEQ ID NO: 441160 - RNA, 18 nt, Artificial Sequence
  Synthetic
uuugcacuucuucagcaa

SEQ ID NO: 441161 - RNA, 19 nt, Artificial Sequence
  Synthetic
auuugcacuucuucagcaa

SEQ ID NO: 441162 - RNA, 20 nt, Artificial Sequence
  Synthetic
aauuugcacuucuucagcaa

SEQ ID NO: 441163 - RNA, 21 nt, Artificial Sequence
  Synthetic
uaauuugcacuucuucagcaa

SEQ ID NO: 441164 - RNA, 22 nt, Artificial Sequence
  Synthetic
cuaauuugcacuucuucagcaa

SEQ ID NO: 441165 - RNA, 23 nt, Artificial Sequence
  Synthetic
ccuaauuugcacuucuucagcaa

SEQ ID NO: 441166 - RNA, 24 nt, Artificial Sequence
  Synthetic
gccuaauuugcacuucuucagcaa

SEQ ID NO: 441167 - RNA, 18 nt, Artificial Sequence
  Synthetic
agauggggaaaagagcaa

SEQ ID NO: 441168 - RNA, 19 nt, Artificial Sequence
  Synthetic
gagauggggaaaagagcaa

SEQ ID NO: 441169 - RNA, 20 nt, Artificial Sequence
  Synthetic
cgagauggggaaaagagcaa

SEQ ID NO: 441170 - RNA, 21 nt, Artificial Sequence
  Synthetic
acgagauggggaaaagagcaa

SEQ ID NO: 441171 - RNA, 22 nt, Artificial Sequence
  Synthetic
gacgagauggggaaaagagcaa

SEQ ID NO: 441172 - RNA, 23 nt, Artificial Sequence
  Synthetic
agacgagauggggaaaagagcaa

SEQ ID NO: 441173 - RNA, 24 nt, Artificial Sequence
  Synthetic
gagacgagauggggaaaagagcaa

SEQ ID NO: 441174 - RNA, 18 nt, Artificial Sequence
  Synthetic
ucccagaauaaagagcaa

SEQ ID NO: 441175 - RNA, 19 nt, Artificial Sequence
  Synthetic
cucccagaauaaagagcaa

SEQ ID NO: 441176 - RNA, 20 nt, Artificial Sequence
  Synthetic
ccucccagaauaaagagcaa

SEQ ID NO: 441177 - RNA, 21 nt, Artificial Sequence
  Synthetic
gccucccagaauaaagagcaa

SEQ ID NO: 441178 - RNA, 22 nt, Artificial Sequence
  Synthetic
agccucccagaauaaagagcaa

SEQ ID NO: 441179 - RNA, 23 nt, Artificial Sequence
  Synthetic
cagccucccagaauaaagagcaa

SEQ ID NO: 441180 - RNA, 24 nt, Artificial Sequence
  Synthetic
ucagccucccagaauaaagagcaa

SEQ ID NO: 441181 - RNA, 18 nt, Artificial Sequence
  Synthetic
cagacagagacagagcaa

SEQ ID NO: 441182 - RNA, 19 nt, Artificial Sequence
  Synthetic
acagacagagacagagcaa

SEQ ID NO: 441183 - RNA, 20 nt, Artificial Sequence
  Synthetic
gacagacagagacagagcaa

SEQ ID NO: 441184 - RNA, 21 nt, Artificial Sequence
  Synthetic
agacagacagagacagagcaa

SEQ ID NO: 441185 - RNA, 22 nt, Artificial Sequence
  Synthetic
gagacagacagagacagagcaa

SEQ ID NO: 441186 - RNA, 23 nt, Artificial Sequence
  Synthetic
agagacagacagagacagagcaa

SEQ ID NO: 441187 - RNA, 24 nt, Artificial Sequence
  Synthetic
gagagacagacagagacagagcaa

SEQ ID NO: 441188 - RNA, 18 nt, Artificial Sequence
  Synthetic
aguuugaguacagagcaa

SEQ ID NO: 441189 - RNA, 19 nt, Artificial Sequence
  Synthetic
aaguuugaguacagagcaa

SEQ ID NO: 441190 - RNA, 20 nt, Artificial Sequence
  Synthetic
gaaguuugaguacagagcaa

SEQ ID NO: 441191 - RNA, 21 nt, Artificial Sequence
  Synthetic
ggaaguuugaguacagagcaa

SEQ ID NO: 441192 - RNA, 22 nt, Artificial Sequence
  Synthetic
aggaaguuugaguacagagcaa

SEQ ID NO: 441193 - RNA, 23 nt, Artificial Sequence
  Synthetic
aaggaaguuugaguacagagcaa

SEQ ID NO: 441194 - RNA, 24 nt, Artificial Sequence
  Synthetic
aaaggaaguuugaguacagagcaa

SEQ ID NO: 441195 - RNA, 18 nt, Artificial Sequence
  Synthetic
guuggcuccugagagcaa

SEQ ID NO: 441196 - RNA, 19 nt, Artificial Sequence
  Synthetic
gguuggcuccugagagcaa

SEQ ID NO: 441197 - RNA, 20 nt, Artificial Sequence
  Synthetic
ugguuggcuccugagagcaa

SEQ ID NO: 441198 - RNA, 21 nt, Artificial Sequence
  Synthetic
gugguuggcuccugagagcaa

SEQ ID NO: 441199 - RNA, 22 nt, Artificial Sequence
  Synthetic
ugugguuggcuccugagagcaa

SEQ ID NO: 441200 - RNA, 23 nt, Artificial Sequence
  Synthetic
augugguuggcuccugagagcaa

SEQ ID NO: 441201 - RNA, 24 nt, Artificial Sequence
  Synthetic
aaugugguuggcuccugagagcaa

SEQ ID NO: 441202 - RNA, 18 nt, Artificial Sequence
  Synthetic
aauucacucugagagcaa

SEQ ID NO: 441203 - RNA, 19 nt, Artificial Sequence
  Synthetic
aaauucacucugagagcaa

SEQ ID NO: 441204 - RNA, 20 nt, Artificial Sequence
  Synthetic
uaaauucacucugagagcaa

SEQ ID NO: 441205 - RNA, 21 nt, Artificial Sequence
  Synthetic
guaaauucacucugagagcaa

SEQ ID NO: 441206 - RNA, 22 nt, Artificial Sequence
  Synthetic
aguaaauucacucugagagcaa

SEQ ID NO: 441207 - RNA, 23 nt, Artificial Sequence
  Synthetic
caguaaauucacucugagagcaa

SEQ ID NO: 441208 - RNA, 24 nt, Artificial Sequence
  Synthetic
acaguaaauucacucugagagcaa

SEQ ID NO: 441209 - RNA, 18 nt, Artificial Sequence
  Synthetic
ggauauuuuugagagcaa

SEQ ID NO: 441210 - RNA, 19 nt, Artificial Sequence
  Synthetic
aggauauuuuugagagcaa

SEQ ID NO: 441211 - RNA, 20 nt, Artificial Sequence
  Synthetic
aaggauauuuuugagagcaa

SEQ ID NO: 441212 - RNA, 21 nt, Artificial Sequence
  Synthetic
caaggauauuuuugagagcaa

SEQ ID NO: 441213 - RNA, 22 nt, Artificial Sequence
  Synthetic
acaaggauauuuuugagagcaa

SEQ ID NO: 441214 - RNA, 23 nt, Artificial Sequence
  Synthetic
aacaaggauauuuuugagagcaa

SEQ ID NO: 441215 - RNA, 24 nt, Artificial Sequence
  Synthetic
aaacaaggauauuuuugagagcaa

SEQ ID NO: 441216 - RNA, 18 nt, Artificial Sequence
  Synthetic
auuuaagaaguagagcaa

SEQ ID NO: 441217 - RNA, 19 nt, Artificial Sequence
  Synthetic
cauuuaagaaguagagcaa

SEQ ID NO: 441218 - RNA, 20 nt, Artificial Sequence
  Synthetic
ccauuuaagaaguagagcaa

SEQ ID NO: 441219 - RNA, 21 nt, Artificial Sequence
  Synthetic
accauuuaagaaguagagcaa

SEQ ID NO: 441220 - RNA, 22 nt, Artificial Sequence
  Synthetic
uaccauuuaagaaguagagcaa

SEQ ID NO: 441221 - RNA, 23 nt, Artificial Sequence
  Synthetic
cuaccauuuaagaaguagagcaa

SEQ ID NO: 441222 - RNA, 24 nt, Artificial Sequence
  Synthetic
ccuaccauuuaagaaguagagcaa

SEQ ID NO: 441223 - RNA, 18 nt, Artificial Sequence
  Synthetic
uagguagcuaccgagcaa

SEQ ID NO: 441224 - RNA, 19 nt, Artificial Sequence
  Synthetic
guagguagcuaccgagcaa

SEQ ID NO: 441225 - RNA, 20 nt, Artificial Sequence
  Synthetic
uguagguagcuaccgagcaa

SEQ ID NO: 441226 - RNA, 21 nt, Artificial Sequence
  Synthetic
cuguagguagcuaccgagcaa

SEQ ID NO: 441227 - RNA, 22 nt, Artificial Sequence
  Synthetic
gcuguagguagcuaccgagcaa

SEQ ID NO: 441228 - RNA, 23 nt, Artificial Sequence
  Synthetic
ggcuguagguagcuaccgagcaa

SEQ ID NO: 441229 - RNA, 24 nt, Artificial Sequence
  Synthetic
uggcuguagguagcuaccgagcaa

SEQ ID NO: 441230 - RNA, 18 nt, Artificial Sequence
  Synthetic
agguaggacagggagcaa

SEQ ID NO: 441231 - RNA, 19 nt, Artificial Sequence
  Synthetic
aagguaggacagggagcaa

SEQ ID NO: 441232 - RNA, 20 nt, Artificial Sequence
  Synthetic
uaagguaggacagggagcaa

SEQ ID NO: 441233 - RNA, 21 nt, Artificial Sequence
  Synthetic
guaagguaggacagggagcaa

SEQ ID NO: 441234 - RNA, 22 nt, Artificial Sequence
  Synthetic
uguaagguaggacagggagcaa

SEQ ID NO: 441235 - RNA, 23 nt, Artificial Sequence
  Synthetic
guguaagguaggacagggagcaa

SEQ ID NO: 441236 - RNA, 24 nt, Artificial Sequence
  Synthetic
uguguaagguaggacagggagcaa

SEQ ID NO: 441237 - RNA, 18 nt, Artificial Sequence
  Synthetic
cugggguacagggagcaa

SEQ ID NO: 441238 - RNA, 19 nt, Artificial Sequence
  Synthetic
gcugggguacagggagcaa

SEQ ID NO: 441239 - RNA, 20 nt, Artificial Sequence
  Synthetic
ugcugggguacagggagcaa

SEQ ID NO: 441240 - RNA, 21 nt, Artificial Sequence
  Synthetic
gugcugggguacagggagcaa

SEQ ID NO: 441241 - RNA, 22 nt, Artificial Sequence
  Synthetic
agugcugggguacagggagcaa

SEQ ID NO: 441242 - RNA, 23 nt, Artificial Sequence
  Synthetic
cagugcugggguacagggagcaa

SEQ ID NO: 441243 - RNA, 24 nt, Artificial Sequence
  Synthetic
ccagugcugggguacagggagcaa

SEQ ID NO: 441244 - RNA, 18 nt, Artificial Sequence
  Synthetic
agagggcauguggagcaa

SEQ ID NO: 441245 - RNA, 19 nt, Artificial Sequence
  Synthetic
cagagggcauguggagcaa

SEQ ID NO: 441246 - RNA, 20 nt, Artificial Sequence
  Synthetic
ucagagggcauguggagcaa

SEQ ID NO: 441247 - RNA, 21 nt, Artificial Sequence
  Synthetic
cucagagggcauguggagcaa

SEQ ID NO: 441248 - RNA, 22 nt, Artificial Sequence
  Synthetic
ucucagagggcauguggagcaa

SEQ ID NO: 441249 - RNA, 23 nt, Artificial Sequence
  Synthetic
aucucagagggcauguggagcaa

SEQ ID NO: 441250 - RNA, 24 nt, Artificial Sequence
  Synthetic
aaucucagagggcauguggagcaa

SEQ ID NO: 441251 - RNA, 18 nt, Artificial Sequence
  Synthetic
uauucauucacugagcaa

SEQ ID NO: 441252 - RNA, 19 nt, Artificial Sequence
  Synthetic
cuauucauucacugagcaa

SEQ ID NO: 441253 - RNA, 20 nt, Artificial Sequence
  Synthetic
gcuauucauucacugagcaa

SEQ ID NO: 441254 - RNA, 21 nt, Artificial Sequence
  Synthetic
ugcuauucauucacugagcaa

SEQ ID NO: 441255 - RNA, 22 nt, Artificial Sequence
  Synthetic
gugcuauucauucacugagcaa

SEQ ID NO: 441256 - RNA, 23 nt, Artificial Sequence
  Synthetic
ugugcuauucauucacugagcaa

SEQ ID NO: 441257 - RNA, 24 nt, Artificial Sequence
  Synthetic
gugugcuauucauucacugagcaa

SEQ ID NO: 441258 - RNA, 18 nt, Artificial Sequence
  Synthetic
guggaaucuagugagcaa

SEQ ID NO: 441259 - RNA, 19 nt, Artificial Sequence
  Synthetic
aguggaaucuagugagcaa

SEQ ID NO: 441260 - RNA, 20 nt, Artificial Sequence
  Synthetic
gaguggaaucuagugagcaa

SEQ ID NO: 441261 - RNA, 21 nt, Artificial Sequence
  Synthetic
ugaguggaaucuagugagcaa

SEQ ID NO: 441262 - RNA, 22 nt, Artificial Sequence
  Synthetic
gugaguggaaucuagugagcaa

SEQ ID NO: 441263 - RNA, 23 nt, Artificial Sequence
  Synthetic
ggugaguggaaucuagugagcaa

SEQ ID NO: 441264 - RNA, 24 nt, Artificial Sequence
  Synthetic
gggugaguggaaucuagugagcaa

SEQ ID NO: 441265 - RNA, 18 nt, Artificial Sequence
  Synthetic
caaauguauuucuagcaa

SEQ ID NO: 441266 - RNA, 19 nt, Artificial Sequence
  Synthetic
acaaauguauuucuagcaa

SEQ ID NO: 441267 - RNA, 20 nt, Artificial Sequence
  Synthetic
gacaaauguauuucuagcaa

SEQ ID NO: 441268 - RNA, 21 nt, Artificial Sequence
  Synthetic
ugacaaauguauuucuagcaa

SEQ ID NO: 441269 - RNA, 22 nt, Artificial Sequence
  Synthetic
augacaaauguauuucuagcaa

SEQ ID NO: 441270 - RNA, 23 nt, Artificial Sequence
  Synthetic
uaugacaaauguauuucuagcaa

SEQ ID NO: 441271 - RNA, 24 nt, Artificial Sequence
  Synthetic
uuaugacaaauguauuucuagcaa

SEQ ID NO: 441272 - RNA, 18 nt, Artificial Sequence
  Synthetic
gauaacagaaaguagcaa

SEQ ID NO: 441273 - RNA, 19 nt, Artificial Sequence
  Synthetic
ugauaacagaaaguagcaa

SEQ ID NO: 441274 - RNA, 20 nt, Artificial Sequence
  Synthetic
cugauaacagaaaguagcaa

SEQ ID NO: 441275 - RNA, 21 nt, Artificial Sequence
  Synthetic
ucugauaacagaaaguagcaa

SEQ ID NO: 441276 - RNA, 22 nt, Artificial Sequence
  Synthetic
uucugauaacagaaaguagcaa

SEQ ID NO: 441277 - RNA, 23 nt, Artificial Sequence
  Synthetic
auucugauaacagaaaguagcaa

SEQ ID NO: 441278 - RNA, 24 nt, Artificial Sequence
  Synthetic
cauucugauaacagaaaguagcaa

SEQ ID NO: 441279 - RNA, 18 nt, Artificial Sequence
  Synthetic
uaacacugagcguagcaa

SEQ ID NO: 441280 - RNA, 19 nt, Artificial Sequence
  Synthetic
cuaacacugagcguagcaa

SEQ ID NO: 441281 - RNA, 20 nt, Artificial Sequence
  Synthetic
ucuaacacugagcguagcaa

SEQ ID NO: 441282 - RNA, 21 nt, Artificial Sequence
  Synthetic
cucuaacacugagcguagcaa

SEQ ID NO: 441283 - RNA, 22 nt, Artificial Sequence
  Synthetic
ucucuaacacugagcguagcaa

SEQ ID NO: 441284 - RNA, 23 nt, Artificial Sequence
  Synthetic
uucucuaacacugagcguagcaa

SEQ ID NO: 441285 - RNA, 24 nt, Artificial Sequence
  Synthetic
uuucucuaacacugagcguagcaa

SEQ ID NO: 441286 - RNA, 18 nt, Artificial Sequence
  Synthetic
ucacauagcugguagcaa

SEQ ID NO: 441287 - RNA, 19 nt, Artificial Sequence
  Synthetic
aucacauagcugguagcaa

SEQ ID NO: 441288 - RNA, 20 nt, Artificial Sequence
  Synthetic
gaucacauagcugguagcaa

SEQ ID NO: 441289 - RNA, 21 nt, Artificial Sequence
  Synthetic
agaucacauagcugguagcaa

SEQ ID NO: 441290 - RNA, 22 nt, Artificial Sequence
  Synthetic
aagaucacauagcugguagcaa

SEQ ID NO: 441291 - RNA, 23 nt, Artificial Sequence
  Synthetic
uaagaucacauagcugguagcaa

SEQ ID NO: 441292 - RNA, 24 nt, Artificial Sequence
  Synthetic
auaagaucacauagcugguagcaa

SEQ ID NO: 441293 - RNA, 18 nt, Artificial Sequence
  Synthetic
cuggcauuucauuagcaa

SEQ ID NO: 441294 - RNA, 19 nt, Artificial Sequence
  Synthetic
gcuggcauuucauuagcaa

SEQ ID NO: 441295 - RNA, 20 nt, Artificial Sequence
  Synthetic
ggcuggcauuucauuagcaa

SEQ ID NO: 441296 - RNA, 21 nt, Artificial Sequence
  Synthetic
uggcuggcauuucauuagcaa

SEQ ID NO: 441297 - RNA, 22 nt, Artificial Sequence
  Synthetic
cuggcuggcauuucauuagcaa

SEQ ID NO: 441298 - RNA, 23 nt, Artificial Sequence
  Synthetic
acuggcuggcauuucauuagcaa

SEQ ID NO: 441299 - RNA, 24 nt, Artificial Sequence
  Synthetic
uacuggcuggcauuucauuagcaa

SEQ ID NO: 441300 - RNA, 18 nt, Artificial Sequence
  Synthetic
uuuccauaagguuagcaa

SEQ ID NO: 441301 - RNA, 19 nt, Artificial Sequence
  Synthetic
uuuuccauaagguuagcaa

SEQ ID NO: 441302 - RNA, 20 nt, Artificial Sequence
  Synthetic
cuuuuccauaagguuagcaa

SEQ ID NO: 441303 - RNA, 21 nt, Artificial Sequence
  Synthetic
ucuuuuccauaagguuagcaa

SEQ ID NO: 441304 - RNA, 22 nt, Artificial Sequence
  Synthetic
cucuuuuccauaagguuagcaa

SEQ ID NO: 441305 - RNA, 23 nt, Artificial Sequence
  Synthetic
acucuuuuccauaagguuagcaa

SEQ ID NO: 441306 - RNA, 24 nt, Artificial Sequence
  Synthetic
gacucuuuuccauaagguuagcaa

SEQ ID NO: 441307 - RNA, 18 nt, Artificial Sequence
  Synthetic
auguaauuugguuagcaa

SEQ ID NO: 441308 - RNA, 19 nt, Artificial Sequence
  Synthetic
cauguaauuugguuagcaa

SEQ ID NO: 441309 - RNA, 20 nt, Artificial Sequence
  Synthetic
ucauguaauuugguuagcaa

SEQ ID NO: 441310 - RNA, 21 nt, Artificial Sequence
  Synthetic
gucauguaauuugguuagcaa

SEQ ID NO: 441311 - RNA, 22 nt, Artificial Sequence
  Synthetic
agucauguaauuugguuagcaa

SEQ ID NO: 441312 - RNA, 23 nt, Artificial Sequence
  Synthetic
aagucauguaauuugguuagcaa

SEQ ID NO: 441313 - RNA, 24 nt, Artificial Sequence
  Synthetic
caagucauguaauuugguuagcaa

SEQ ID NO: 441314 - RNA, 18 nt, Artificial Sequence
  Synthetic
uuacuuaguucaacgcaa

SEQ ID NO: 441315 - RNA, 19 nt, Artificial Sequence
  Synthetic
auuacuuaguucaacgcaa

SEQ ID NO: 441316 - RNA, 20 nt, Artificial Sequence
  Synthetic
uauuacuuaguucaacgcaa

SEQ ID NO: 441317 - RNA, 21 nt, Artificial Sequence
  Synthetic
auauuacuuaguucaacgcaa

SEQ ID NO: 441318 - RNA, 22 nt, Artificial Sequence
  Synthetic
uauauuacuuaguucaacgcaa

SEQ ID NO: 441319 - RNA, 23 nt, Artificial Sequence
  Synthetic
guauauuacuuaguucaacgcaa

SEQ ID NO: 441320 - RNA, 24 nt, Artificial Sequence
  Synthetic
uguauauuacuuaguucaacgcaa

SEQ ID NO: 441321 - RNA, 18 nt, Artificial Sequence
  Synthetic
gaaagcaaaggaacgcaa

SEQ ID NO: 441322 - RNA, 19 nt, Artificial Sequence
  Synthetic
ggaaagcaaaggaacgcaa

SEQ ID NO: 441323 - RNA, 20 nt, Artificial Sequence
  Synthetic
aggaaagcaaaggaacgcaa

SEQ ID NO: 441324 - RNA, 21 nt, Artificial Sequence
  Synthetic
aaggaaagcaaaggaacgcaa

SEQ ID NO: 441325 - RNA, 22 nt, Artificial Sequence
  Synthetic
caaggaaagcaaaggaacgcaa

SEQ ID NO: 441326 - RNA, 23 nt, Artificial Sequence
  Synthetic
gcaaggaaagcaaaggaacgcaa

SEQ ID NO: 441327 - RNA, 24 nt, Artificial Sequence
  Synthetic
agcaaggaaagcaaaggaacgcaa

SEQ ID NO: 441328 - RNA, 18 nt, Artificial Sequence
  Synthetic
agcuugggccaagcgcaa

SEQ ID NO: 441329 - RNA, 19 nt, Artificial Sequence
  Synthetic
aagcuugggccaagcgcaa

SEQ ID NO: 441330 - RNA, 20 nt, Artificial Sequence
  Synthetic
gaagcuugggccaagcgcaa

SEQ ID NO: 441331 - RNA, 21 nt, Artificial Sequence
  Synthetic
ugaagcuugggccaagcgcaa

SEQ ID NO: 441332 - RNA, 22 nt, Artificial Sequence
  Synthetic
augaagcuugggccaagcgcaa

SEQ ID NO: 441333 - RNA, 23 nt, Artificial Sequence
  Synthetic
aaugaagcuugggccaagcgcaa

SEQ ID NO: 441334 - RNA, 24 nt, Artificial Sequence
  Synthetic
aaaugaagcuugggccaagcgcaa

SEQ ID NO: 441335 - RNA, 18 nt, Artificial Sequence
  Synthetic
ccuuuguggaacucgcaa

SEQ ID NO: 441336 - RNA, 19 nt, Artificial Sequence
  Synthetic
cccuuuguggaacucgcaa

SEQ ID NO: 441337 - RNA, 20 nt, Artificial Sequence
  Synthetic
ccccuuuguggaacucgcaa

SEQ ID NO: 441338 - RNA, 21 nt, Artificial Sequence
  Synthetic
accccuuuguggaacucgcaa

SEQ ID NO: 441339 - RNA, 22 nt, Artificial Sequence
  Synthetic
gaccccuuuguggaacucgcaa

SEQ ID NO: 441340 - RNA, 23 nt, Artificial Sequence
  Synthetic
ugaccccuuuguggaacucgcaa

SEQ ID NO: 441341 - RNA, 24 nt, Artificial Sequence
  Synthetic
cugaccccuuuguggaacucgcaa

SEQ ID NO: 441342 - RNA, 18 nt, Artificial Sequence
  Synthetic
ugaacagacacuucgcaa

SEQ ID NO: 441343 - RNA, 19 nt, Artificial Sequence
  Synthetic
augaacagacacuucgcaa

SEQ ID NO: 441344 - RNA, 20 nt, Artificial Sequence
  Synthetic
uaugaacagacacuucgcaa

SEQ ID NO: 441345 - RNA, 21 nt, Artificial Sequence
  Synthetic
auaugaacagacacuucgcaa

SEQ ID NO: 441346 - RNA, 22 nt, Artificial Sequence
  Synthetic
gauaugaacagacacuucgcaa

SEQ ID NO: 441347 - RNA, 23 nt, Artificial Sequence
  Synthetic
ggauaugaacagacacuucgcaa

SEQ ID NO: 441348 - RNA, 24 nt, Artificial Sequence
  Synthetic
aggauaugaacagacacuucgcaa

SEQ ID NO: 441349 - RNA, 18 nt, Artificial Sequence
  Synthetic
guagcauaaaaaaggcaa

SEQ ID NO: 441350 - RNA, 19 nt, Artificial Sequence
  Synthetic
gguagcauaaaaaaggcaa

SEQ ID NO: 441351 - RNA, 20 nt, Artificial Sequence
  Synthetic
ugguagcauaaaaaaggcaa

SEQ ID NO: 441352 - RNA, 21 nt, Artificial Sequence
  Synthetic
uugguagcauaaaaaaggcaa

SEQ ID NO: 441353 - RNA, 22 nt, Artificial Sequence
  Synthetic
uuugguagcauaaaaaaggcaa

SEQ ID NO: 441354 - RNA, 23 nt, Artificial Sequence
  Synthetic
uuuugguagcauaaaaaaggcaa

SEQ ID NO: 441355 - RNA, 24 nt, Artificial Sequence
  Synthetic
auuuugguagcauaaaaaaggcaa

SEQ ID NO: 441356 - RNA, 18 nt, Artificial Sequence
  Synthetic
ucauaaaugaaaaggcaa

SEQ ID NO: 441357 - RNA, 19 nt, Artificial Sequence
  Synthetic
gucauaaaugaaaaggcaa

SEQ ID NO: 441358 - RNA, 20 nt, Artificial Sequence
  Synthetic
ggucauaaaugaaaaggcaa

SEQ ID NO: 441359 - RNA, 21 nt, Artificial Sequence
  Synthetic
gggucauaaaugaaaaggcaa

SEQ ID NO: 441360 - RNA, 22 nt, Artificial Sequence
  Synthetic
ugggucauaaaugaaaaggcaa

SEQ ID NO: 441361 - RNA, 23 nt, Artificial Sequence
  Synthetic
augggucauaaaugaaaaggcaa

SEQ ID NO: 441362 - RNA, 24 nt, Artificial Sequence
  Synthetic
gaugggucauaaaugaaaaggcaa

SEQ ID NO: 441363 - RNA, 18 nt, Artificial Sequence
  Synthetic
aaggggggagaaaggcaa

SEQ ID NO: 441364 - RNA, 19 nt, Artificial Sequence
  Synthetic
gaaggggggagaaaggcaa

SEQ ID NO: 441365 - RNA, 20 nt, Artificial Sequence
  Synthetic
ggaaggggggagaaaggcaa

SEQ ID NO: 441366 - RNA, 21 nt, Artificial Sequence
  Synthetic
aggaaggggggagaaaggcaa

SEQ ID NO: 441367 - RNA, 22 nt, Artificial Sequence
  Synthetic
aaggaaggggggagaaaggcaa

SEQ ID NO: 441368 - RNA, 23 nt, Artificial Sequence
  Synthetic
aaaggaaggggggagaaaggcaa

SEQ ID NO: 441369 - RNA, 24 nt, Artificial Sequence
  Synthetic
aaaaggaaggggggagaaaggcaa

SEQ ID NO: 441370 - RNA, 18 nt, Artificial Sequence
  Synthetic
agcuaugauacaaggcaa

SEQ ID NO: 441371 - RNA, 19 nt, Artificial Sequence
  Synthetic
cagcuaugauacaaggcaa

SEQ ID NO: 441372 - RNA, 20 nt, Artificial Sequence
  Synthetic
gcagcuaugauacaaggcaa

SEQ ID NO: 441373 - RNA, 21 nt, Artificial Sequence
  Synthetic
agcagcuaugauacaaggcaa

SEQ ID NO: 441374 - RNA, 22 nt, Artificial Sequence
  Synthetic
aagcagcuaugauacaaggcaa

SEQ ID NO: 441375 - RNA, 23 nt, Artificial Sequence
  Synthetic
caagcagcuaugauacaaggcaa

SEQ ID NO: 441376 - RNA, 24 nt, Artificial Sequence
  Synthetic
acaagcagcuaugauacaaggcaa

SEQ ID NO: 441377 - RNA, 18 nt, Artificial Sequence
  Synthetic
uguuaaucaccaaggcaa

SEQ ID NO: 441378 - RNA, 19 nt, Artificial Sequence
  Synthetic
auguuaaucaccaaggcaa

SEQ ID NO: 441379 - RNA, 20 nt, Artificial Sequence
  Synthetic
aauguuaaucaccaaggcaa

SEQ ID NO: 441380 - RNA, 21 nt, Artificial Sequence
  Synthetic
aaauguuaaucaccaaggcaa

SEQ ID NO: 441381 - RNA, 22 nt, Artificial Sequence
  Synthetic
caaauguuaaucaccaaggcaa

SEQ ID NO: 441382 - RNA, 23 nt, Artificial Sequence
  Synthetic
ccaaauguuaaucaccaaggcaa

SEQ ID NO: 441383 - RNA, 24 nt, Artificial Sequence
  Synthetic
gccaaauguuaaucaccaaggcaa

SEQ ID NO: 441384 - RNA, 18 nt, Artificial Sequence
  Synthetic
aaaguaaaaagaaggcaa

SEQ ID NO: 441385 - RNA, 19 nt, Artificial Sequence
  Synthetic
gaaaguaaaaagaaggcaa

SEQ ID NO: 441386 - RNA, 20 nt, Artificial Sequence
  Synthetic
cgaaaguaaaaagaaggcaa

SEQ ID NO: 441387 - RNA, 21 nt, Artificial Sequence
  Synthetic
acgaaaguaaaaagaaggcaa

SEQ ID NO: 441388 - RNA, 22 nt, Artificial Sequence
  Synthetic
aacgaaaguaaaaagaaggcaa

SEQ ID NO: 441389 - RNA, 23 nt, Artificial Sequence
  Synthetic
uaacgaaaguaaaaagaaggcaa

SEQ ID NO: 441390 - RNA, 24 nt, Artificial Sequence
  Synthetic
auaacgaaaguaaaaagaaggcaa

SEQ ID NO: 441391 - RNA, 18 nt, Artificial Sequence
  Synthetic
aaucauggcagaaggcaa

SEQ ID NO: 441392 - RNA, 19 nt, Artificial Sequence
  Synthetic
caaucauggcagaaggcaa

SEQ ID NO: 441393 - RNA, 20 nt, Artificial Sequence
  Synthetic
acaaucauggcagaaggcaa

SEQ ID NO: 441394 - RNA, 21 nt, Artificial Sequence
  Synthetic
cacaaucauggcagaaggcaa

SEQ ID NO: 441395 - RNA, 22 nt, Artificial Sequence
  Synthetic
ucacaaucauggcagaaggcaa

SEQ ID NO: 441396 - RNA, 23 nt, Artificial Sequence
  Synthetic
cucacaaucauggcagaaggcaa

SEQ ID NO: 441397 - RNA, 24 nt, Artificial Sequence
  Synthetic
ccucacaaucauggcagaaggcaa

SEQ ID NO: 441398 - RNA, 18 nt, Artificial Sequence
  Synthetic
aaccaugguggaaggcaa

SEQ ID NO: 441399 - RNA, 19 nt, Artificial Sequence
  Synthetic
caaccaugguggaaggcaa

SEQ ID NO: 441400 - RNA, 20 nt, Artificial Sequence
  Synthetic
ccaaccaugguggaaggcaa

SEQ ID NO: 441401 - RNA, 21 nt, Artificial Sequence
  Synthetic
accaaccaugguggaaggcaa

SEQ ID NO: 441402 - RNA, 22 nt, Artificial Sequence
  Synthetic
aaccaaccaugguggaaggcaa

SEQ ID NO: 441403 - RNA, 23 nt, Artificial Sequence
  Synthetic
caaccaaccaugguggaaggcaa

SEQ ID NO: 441404 - RNA, 24 nt, Artificial Sequence
  Synthetic
acaaccaaccaugguggaaggcaa

SEQ ID NO: 441405 - RNA, 18 nt, Artificial Sequence
  Synthetic
gccagggcaaucaggcaa

SEQ ID NO: 441406 - RNA, 19 nt, Artificial Sequence
  Synthetic
ggccagggcaaucaggcaa

SEQ ID NO: 441407 - RNA, 20 nt, Artificial Sequence
  Synthetic
uggccagggcaaucaggcaa

SEQ ID NO: 441408 - RNA, 21 nt, Artificial Sequence
  Synthetic
cuggccagggcaaucaggcaa

SEQ ID NO: 441409 - RNA, 22 nt, Artificial Sequence
  Synthetic
ccuggccagggcaaucaggcaa

SEQ ID NO: 441410 - RNA, 23 nt, Artificial Sequence
  Synthetic
uccuggccagggcaaucaggcaa

SEQ ID NO: 441411 - RNA, 24 nt, Artificial Sequence
  Synthetic
guccuggccagggcaaucaggcaa

SEQ ID NO: 441412 - RNA, 18 nt, Artificial Sequence
  Synthetic
gggagauaaaagaggcaa

SEQ ID NO: 441413 - RNA, 19 nt, Artificial Sequence
  Synthetic
agggagauaaaagaggcaa

SEQ ID NO: 441414 - RNA, 20 nt, Artificial Sequence
  Synthetic
aagggagauaaaagaggcaa

SEQ ID NO: 441415 - RNA, 21 nt, Artificial Sequence
  Synthetic
uaagggagauaaaagaggcaa

SEQ ID NO: 441416 - RNA, 22 nt, Artificial Sequence
  Synthetic
guaagggagauaaaagaggcaa

SEQ ID NO: 441417 - RNA, 23 nt, Artificial Sequence
  Synthetic
gguaagggagauaaaagaggcaa

SEQ ID NO: 441418 - RNA, 24 nt, Artificial Sequence
  Synthetic
agguaagggagauaaaagaggcaa

SEQ ID NO: 441419 - RNA, 18 nt, Artificial Sequence
  Synthetic
auuugaagaaagaggcaa

SEQ ID NO: 441420 - RNA, 19 nt, Artificial Sequence
  Synthetic
aauuugaagaaagaggcaa

SEQ ID NO: 441421 - RNA, 20 nt, Artificial Sequence
  Synthetic
aaauuugaagaaagaggcaa

SEQ ID NO: 441422 - RNA, 21 nt, Artificial Sequence
  Synthetic
aaaauuugaagaaagaggcaa

SEQ ID NO: 441423 - RNA, 22 nt, Artificial Sequence
  Synthetic
aaaaauuugaagaaagaggcaa

SEQ ID NO: 441424 - RNA, 23 nt, Artificial Sequence
  Synthetic
aaaaaauuugaagaaagaggcaa

SEQ ID NO: 441425 - RNA, 24 nt, Artificial Sequence
  Synthetic
aaaaaaauuugaagaaagaggcaa

SEQ ID NO: 441426 - RNA, 18 nt, Artificial Sequence
  Synthetic
agcuauacuacgaggcaa

SEQ ID NO: 441427 - RNA, 19 nt, Artificial Sequence
  Synthetic
aagcuauacuacgaggcaa

SEQ ID NO: 441428 - RNA, 20 nt, Artificial Sequence
  Synthetic
caagcuauacuacgaggcaa

SEQ ID NO: 441429 - RNA, 21 nt, Artificial Sequence
  Synthetic
ccaagcuauacuacgaggcaa

SEQ ID NO: 441430 - RNA, 22 nt, Artificial Sequence
  Synthetic
uccaagcuauacuacgaggcaa

SEQ ID NO: 441431 - RNA, 23 nt, Artificial Sequence
  Synthetic
uuccaagcuauacuacgaggcaa

SEQ ID NO: 441432 - RNA, 24 nt, Artificial Sequence
  Synthetic
uuuccaagcuauacuacgaggcaa

SEQ ID NO: 441433 - RNA, 18 nt, Artificial Sequence
  Synthetic
auugcagaugggaggcaa

SEQ ID NO: 441434 - RNA, 19 nt, Artificial Sequence
  Synthetic
aauugcagaugggaggcaa

SEQ ID NO: 441435 - RNA, 20 nt, Artificial Sequence
  Synthetic
aaauugcagaugggaggcaa

SEQ ID NO: 441436 - RNA, 21 nt, Artificial Sequence
  Synthetic
gaaauugcagaugggaggcaa

SEQ ID NO: 441437 - RNA, 22 nt, Artificial Sequence
  Synthetic
ugaaauugcagaugggaggcaa

SEQ ID NO: 441438 - RNA, 23 nt, Artificial Sequence
  Synthetic
uugaaauugcagaugggaggcaa

SEQ ID NO: 441439 - RNA, 24 nt, Artificial Sequence
  Synthetic
guugaaauugcagaugggaggcaa

SEQ ID NO: 441440 - RNA, 18 nt, Artificial Sequence
  Synthetic
acuucauuucugaggcaa

SEQ ID NO: 441441 - RNA, 19 nt, Artificial Sequence
  Synthetic
aacuucauuucugaggcaa

SEQ ID NO: 441442 - RNA, 20 nt, Artificial Sequence
  Synthetic
aaacuucauuucugaggcaa

SEQ ID NO: 441443 - RNA, 21 nt, Artificial Sequence
  Synthetic
aaaacuucauuucugaggcaa

SEQ ID NO: 441444 - RNA, 22 nt, Artificial Sequence
  Synthetic
uaaaacuucauuucugaggcaa

SEQ ID NO: 441445 - RNA, 23 nt, Artificial Sequence
  Synthetic
auaaaacuucauuucugaggcaa

SEQ ID NO: 441446 - RNA, 24 nt, Artificial Sequence
  Synthetic
cauaaaacuucauuucugaggcaa

SEQ ID NO: 441447 - RNA, 18 nt, Artificial Sequence
  Synthetic
guuaaccugcuuaggcaa

SEQ ID NO: 441448 - RNA, 19 nt, Artificial Sequence
  Synthetic
aguuaaccugcuuaggcaa

SEQ ID NO: 441449 - RNA, 20 nt, Artificial Sequence
  Synthetic
aaguuaaccugcuuaggcaa

SEQ ID NO: 441450 - RNA, 21 nt, Artificial Sequence
  Synthetic
caaguuaaccugcuuaggcaa

SEQ ID NO: 441451 - RNA, 22 nt, Artificial Sequence
  Synthetic
ccaaguuaaccugcuuaggcaa

SEQ ID NO: 441452 - RNA, 23 nt, Artificial Sequence
  Synthetic
accaaguuaaccugcuuaggcaa

SEQ ID NO: 441453 - RNA, 24 nt, Artificial Sequence
  Synthetic
caccaaguuaaccugcuuaggcaa

SEQ ID NO: 441454 - RNA, 18 nt, Artificial Sequence
  Synthetic
guugggcuucuuaggcaa

SEQ ID NO: 441455 - RNA, 19 nt, Artificial Sequence
  Synthetic
uguugggcuucuuaggcaa

SEQ ID NO: 441456 - RNA, 20 nt, Artificial Sequence
  Synthetic
uuguugggcuucuuaggcaa

SEQ ID NO: 441457 - RNA, 21 nt, Artificial Sequence
  Synthetic
uuuguugggcuucuuaggcaa

SEQ ID NO: 441458 - RNA, 22 nt, Artificial Sequence
  Synthetic
cuuuguugggcuucuuaggcaa

SEQ ID NO: 441459 - RNA, 23 nt, Artificial Sequence
  Synthetic
gcuuuguugggcuucuuaggcaa

SEQ ID NO: 441460 - RNA, 24 nt, Artificial Sequence
  Synthetic
ggcuuuguugggcuucuuaggcaa

SEQ ID NO: 441461 - RNA, 18 nt, Artificial Sequence
  Synthetic
cagaagguagaagggcaa

SEQ ID NO: 441462 - RNA, 19 nt, Artificial Sequence
  Synthetic
gcagaagguagaagggcaa

SEQ ID NO: 441463 - RNA, 20 nt, Artificial Sequence
  Synthetic
ggcagaagguagaagggcaa

SEQ ID NO: 441464 - RNA, 21 nt, Artificial Sequence
  Synthetic
aggcagaagguagaagggcaa

SEQ ID NO: 441465 - RNA, 22 nt, Artificial Sequence
  Synthetic
aaggcagaagguagaagggcaa

SEQ ID NO: 441466 - RNA, 23 nt, Artificial Sequence
  Synthetic
caaggcagaagguagaagggcaa

SEQ ID NO: 441467 - RNA, 24 nt, Artificial Sequence
  Synthetic
acaaggcagaagguagaagggcaa

SEQ ID NO: 441468 - RNA, 18 nt, Artificial Sequence
  Synthetic
auuagaucugaagggcaa

SEQ ID NO: 441469 - RNA, 19 nt, Artificial Sequence
  Synthetic
uauuagaucugaagggcaa

SEQ ID NO: 441470 - RNA, 20 nt, Artificial Sequence
  Synthetic
uuauuagaucugaagggcaa

SEQ ID NO: 441471 - RNA, 21 nt, Artificial Sequence
  Synthetic
guuauuagaucugaagggcaa

SEQ ID NO: 441472 - RNA, 22 nt, Artificial Sequence
  Synthetic
aguuauuagaucugaagggcaa

SEQ ID NO: 441473 - RNA, 23 nt, Artificial Sequence
  Synthetic
gaguuauuagaucugaagggcaa

SEQ ID NO: 441474 - RNA, 24 nt, Artificial Sequence
  Synthetic
ggaguuauuagaucugaagggcaa

SEQ ID NO: 441475 - RNA, 18 nt, Artificial Sequence
  Synthetic
aauuacauaucagggcaa

SEQ ID NO: 441476 - RNA, 19 nt, Artificial Sequence
  Synthetic
aaauuacauaucagggcaa

SEQ ID NO: 441477 - RNA, 20 nt, Artificial Sequence
  Synthetic
uaaauuacauaucagggcaa

SEQ ID NO: 441478 - RNA, 21 nt, Artificial Sequence
  Synthetic
auaaauuacauaucagggcaa

SEQ ID NO: 441479 - RNA, 22 nt, Artificial Sequence
  Synthetic
cauaaauuacauaucagggcaa

SEQ ID NO: 441480 - RNA, 23 nt, Artificial Sequence
  Synthetic
ccauaaauuacauaucagggcaa

SEQ ID NO: 441481 - RNA, 24 nt, Artificial Sequence
  Synthetic
uccauaaauuacauaucagggcaa

SEQ ID NO: 441482 - RNA, 18 nt, Artificial Sequence
  Synthetic
aaggggauuggagggcaa

SEQ ID NO: 441483 - RNA, 19 nt, Artificial Sequence
  Synthetic
gaaggggauuggagggcaa

SEQ ID NO: 441484 - RNA, 20 nt, Artificial Sequence
  Synthetic
agaaggggauuggagggcaa

SEQ ID NO: 441485 - RNA, 21 nt, Artificial Sequence
  Synthetic
aagaaggggauuggagggcaa

SEQ ID NO: 441486 - RNA, 22 nt, Artificial Sequence
  Synthetic
aaagaaggggauuggagggcaa

SEQ ID NO: 441487 - RNA, 23 nt, Artificial Sequence
  Synthetic
aaaagaaggggauuggagggcaa

SEQ ID NO: 441488 - RNA, 24 nt, Artificial Sequence
  Synthetic
aaaaagaaggggauuggagggcaa

SEQ ID NO: 441489 - RNA, 18 nt, Artificial Sequence
  Synthetic
guacuccaacccgggcaa

SEQ ID NO: 441490 - RNA, 19 nt, Artificial Sequence
  Synthetic
uguacuccaacccgggcaa

SEQ ID NO: 441491 - RNA, 20 nt, Artificial Sequence
  Synthetic
uuguacuccaacccgggcaa

SEQ ID NO: 441492 - RNA, 21 nt, Artificial Sequence
  Synthetic
auuguacuccaacccgggcaa

SEQ ID NO: 441493 - RNA, 22 nt, Artificial Sequence
  Synthetic
cauuguacuccaacccgggcaa

SEQ ID NO: 441494 - RNA, 23 nt, Artificial Sequence
  Synthetic
ccauuguacuccaacccgggcaa

SEQ ID NO: 441495 - RNA, 24 nt, Artificial Sequence
  Synthetic
accauuguacuccaacccgggcaa

SEQ ID NO: 441496 - RNA, 18 nt, Artificial Sequence
  Synthetic
gcacuccaccccgggcaa

SEQ ID NO: 441497 - RNA, 19 nt, Artificial Sequence
  Synthetic
ugcacuccaccccgggcaa

SEQ ID NO: 441498 - RNA, 20 nt, Artificial Sequence
  Synthetic
cugcacuccaccccgggcaa

SEQ ID NO: 441499 - RNA, 21 nt, Artificial Sequence
  Synthetic
acugcacuccaccccgggcaa

SEQ ID NO: 441500 - RNA, 22 nt, Artificial Sequence
  Synthetic
cacugcacuccaccccgggcaa

SEQ ID NO: 441501 - RNA, 23 nt, Artificial Sequence
  Synthetic
ccacugcacuccaccccgggcaa

SEQ ID NO: 441502 - RNA, 24 nt, Artificial Sequence
  Synthetic
gccacugcacuccaccccgggcaa

SEQ ID NO: 441503 - RNA, 18 nt, Artificial Sequence
  Synthetic
uuuugugacagcgggcaa

SEQ ID NO: 441504 - RNA, 19 nt, Artificial Sequence
  Synthetic
cuuuugugacagcgggcaa

SEQ ID NO: 441505 - RNA, 20 nt, Artificial Sequence
  Synthetic
acuuuugugacagcgggcaa

SEQ ID NO: 441506 - RNA, 21 nt, Artificial Sequence
  Synthetic
uacuuuugugacagcgggcaa

SEQ ID NO: 441507 - RNA, 22 nt, Artificial Sequence
  Synthetic
cuacuuuugugacagcgggcaa

SEQ ID NO: 441508 - RNA, 23 nt, Artificial Sequence
  Synthetic
acuacuuuugugacagcgggcaa

SEQ ID NO: 441509 - RNA, 24 nt, Artificial Sequence
  Synthetic
cacuacuuuugugacagcgggcaa

SEQ ID NO: 441510 - RNA, 18 nt, Artificial Sequence
  Synthetic
ucaaggggugaggggcaa

SEQ ID NO: 441511 - RNA, 19 nt, Artificial Sequence
  Synthetic
gucaaggggugaggggcaa

SEQ ID NO: 441512 - RNA, 20 nt, Artificial Sequence
  Synthetic
ugucaaggggugaggggcaa

SEQ ID NO: 441513 - RNA, 21 nt, Artificial Sequence
  Synthetic
cugucaaggggugaggggcaa

SEQ ID NO: 441514 - RNA, 22 nt, Artificial Sequence
  Synthetic
ccugucaaggggugaggggcaa

SEQ ID NO: 441515 - RNA, 23 nt, Artificial Sequence
  Synthetic
gccugucaaggggugaggggcaa

SEQ ID NO: 441516 - RNA, 24 nt, Artificial Sequence
  Synthetic
ggccugucaaggggugaggggcaa

SEQ ID NO: 441517 - RNA, 18 nt, Artificial Sequence
  Synthetic
aggucuucaagggggcaa

SEQ ID NO: 441518 - RNA, 19 nt, Artificial Sequence
  Synthetic
caggucuucaagggggcaa

SEQ ID NO: 441519 - RNA, 20 nt, Artificial Sequence
  Synthetic
gcaggucuucaagggggcaa

SEQ ID NO: 441520 - RNA, 21 nt, Artificial Sequence
  Synthetic
ggcaggucuucaagggggcaa

SEQ ID NO: 441521 - RNA, 22 nt, Artificial Sequence
  Synthetic
uggcaggucuucaagggggcaa

SEQ ID NO: 441522 - RNA, 23 nt, Artificial Sequence
  Synthetic
guggcaggucuucaagggggcaa

SEQ ID NO: 441523 - RNA, 24 nt, Artificial Sequence
  Synthetic
uguggcaggucuucaagggggcaa

SEQ ID NO: 441524 - RNA, 18 nt, Artificial Sequence
  Synthetic
uuggcggguggggggcaa

SEQ ID NO: 441525 - RNA, 19 nt, Artificial Sequence
  Synthetic
guuggcggguggggggcaa

SEQ ID NO: 441526 - RNA, 20 nt, Artificial Sequence
  Synthetic
uguuggcggguggggggcaa

SEQ ID NO: 441527 - RNA, 21 nt, Artificial Sequence
  Synthetic
cuguuggcggguggggggcaa

SEQ ID NO: 441528 - RNA, 22 nt, Artificial Sequence
  Synthetic
ccuguuggcggguggggggcaa

SEQ ID NO: 441529 - RNA, 23 nt, Artificial Sequence
  Synthetic
gccuguuggcggguggggggcaa

SEQ ID NO: 441530 - RNA, 24 nt, Artificial Sequence
  Synthetic
ggccuguuggcggguggggggcaa

SEQ ID NO: 441531 - RNA, 18 nt, Artificial Sequence
  Synthetic
gacuuagguauggggcaa

SEQ ID NO: 441532 - RNA, 19 nt, Artificial Sequence
  Synthetic
agacuuagguauggggcaa

SEQ ID NO: 441533 - RNA, 20 nt, Artificial Sequence
  Synthetic
gagacuuagguauggggcaa

SEQ ID NO: 441534 - RNA, 21 nt, Artificial Sequence
  Synthetic
agagacuuagguauggggcaa

SEQ ID NO: 441535 - RNA, 22 nt, Artificial Sequence
  Synthetic
aagagacuuagguauggggcaa

SEQ ID NO: 441536 - RNA, 23 nt, Artificial Sequence
  Synthetic
uaagagacuuagguauggggcaa

SEQ ID NO: 441537 - RNA, 24 nt, Artificial Sequence
  Synthetic
auaagagacuuagguauggggcaa

SEQ ID NO: 441538 - RNA, 18 nt, Artificial Sequence
  Synthetic
aaccugggaaaugggcaa

SEQ ID NO: 441539 - RNA, 19 nt, Artificial Sequence
  Synthetic
aaaccugggaaaugggcaa

SEQ ID NO: 441540 - RNA, 20 nt, Artificial Sequence
  Synthetic
aaaaccugggaaaugggcaa

SEQ ID NO: 441541 - RNA, 21 nt, Artificial Sequence
  Synthetic
gaaaaccugggaaaugggcaa

SEQ ID NO: 441542 - RNA, 22 nt, Artificial Sequence
  Synthetic
ugaaaaccugggaaaugggcaa

SEQ ID NO: 441543 - RNA, 23 nt, Artificial Sequence
  Synthetic
augaaaaccugggaaaugggcaa

SEQ ID NO: 441544 - RNA, 24 nt, Artificial Sequence
  Synthetic
caugaaaaccugggaaaugggcaa

SEQ ID NO: 441545 - RNA, 18 nt, Artificial Sequence
  Synthetic
auacaaauucaugggcaa

SEQ ID NO: 441546 - RNA, 19 nt, Artificial Sequence
  Synthetic
aauacaaauucaugggcaa

SEQ ID NO: 441547 - RNA, 20 nt, Artificial Sequence
  Synthetic
gaauacaaauucaugggcaa

SEQ ID NO: 441548 - RNA, 21 nt, Artificial Sequence
  Synthetic
ggaauacaaauucaugggcaa

SEQ ID NO: 441549 - RNA, 22 nt, Artificial Sequence
  Synthetic
aggaauacaaauucaugggcaa

SEQ ID NO: 441550 - RNA, 23 nt, Artificial Sequence
  Synthetic
caggaauacaaauucaugggcaa

SEQ ID NO: 441551 - RNA, 24 nt, Artificial Sequence
  Synthetic
acaggaauacaaauucaugggcaa

SEQ ID NO: 441552 - RNA, 18 nt, Artificial Sequence
  Synthetic
gcacuacagccugggcaa

SEQ ID NO: 441553 - RNA, 19 nt, Artificial Sequence
  Synthetic
ugcacuacagccugggcaa

SEQ ID NO: 441554 - RNA, 20 nt, Artificial Sequence
  Synthetic
cugcacuacagccugggcaa

SEQ ID NO: 441555 - RNA, 21 nt, Artificial Sequence
  Synthetic
acugcacuacagccugggcaa

SEQ ID NO: 441556 - RNA, 22 nt, Artificial Sequence
  Synthetic
cacugcacuacagccugggcaa

SEQ ID NO: 441557 - RNA, 23 nt, Artificial Sequence
  Synthetic
ccacugcacuacagccugggcaa

SEQ ID NO: 441558 - RNA, 24 nt, Artificial Sequence
  Synthetic
accacugcacuacagccugggcaa

SEQ ID NO: 441559 - RNA, 18 nt, Artificial Sequence
  Synthetic
gcgcuccagccugggcaa

SEQ ID NO: 441560 - RNA, 19 nt, Artificial Sequence
  Synthetic
ugcgcuccagccugggcaa

SEQ ID NO: 441561 - RNA, 20 nt, Artificial Sequence
  Synthetic
cugcgcuccagccugggcaa

SEQ ID NO: 441562 - RNA, 21 nt, Artificial Sequence
  Synthetic
acugcgcuccagccugggcaa

SEQ ID NO: 441563 - RNA, 22 nt, Artificial Sequence
  Synthetic
cacugcgcuccagccugggcaa

SEQ ID NO: 441564 - RNA, 23 nt, Artificial Sequence
  Synthetic
ccacugcgcuccagccugggcaa

SEQ ID NO: 441565 - RNA, 24 nt, Artificial Sequence
  Synthetic
accacugcgcuccagccugggcaa

SEQ ID NO: 441566 - RNA, 18 nt, Artificial Sequence
  Synthetic
ugggugagaguugggcaa

SEQ ID NO: 441567 - RNA, 19 nt, Artificial Sequence
  Synthetic
gugggugagaguugggcaa

SEQ ID NO: 441568 - RNA, 20 nt, Artificial Sequence
  Synthetic
ugugggugagaguugggcaa

SEQ ID NO: 441569 - RNA, 21 nt, Artificial Sequence
  Synthetic
gugugggugagaguugggcaa

SEQ ID NO: 441570 - RNA, 22 nt, Artificial Sequence
  Synthetic
ugugugggugagaguugggcaa

SEQ ID NO: 441571 - RNA, 23 nt, Artificial Sequence
  Synthetic
cugugugggugagaguugggcaa

SEQ ID NO: 441572 - RNA, 24 nt, Artificial Sequence
  Synthetic
ccugugugggugagaguugggcaa

SEQ ID NO: 441573 - RNA, 18 nt, Artificial Sequence
  Synthetic
aucgcaggaguugggcaa

SEQ ID NO: 441574 - RNA, 19 nt, Artificial Sequence
  Synthetic
gaucgcaggaguugggcaa

SEQ ID NO: 441575 - RNA, 20 nt, Artificial Sequence
  Synthetic
agaucgcaggaguugggcaa

SEQ ID NO: 441576 - RNA, 21 nt, Artificial Sequence
  Synthetic
aagaucgcaggaguugggcaa

SEQ ID NO: 441577 - RNA, 22 nt, Artificial Sequence
  Synthetic
uaagaucgcaggaguugggcaa

SEQ ID NO: 441578 - RNA, 23 nt, Artificial Sequence
  Synthetic
auaagaucgcaggaguugggcaa

SEQ ID NO: 441579 - RNA, 24 nt, Artificial Sequence
  Synthetic
gauaagaucgcaggaguugggcaa

SEQ ID NO: 441580 - RNA, 18 nt, Artificial Sequence
  Synthetic
ggguaagucuuugggcaa

SEQ ID NO: 441581 - RNA, 19 nt, Artificial Sequence
  Synthetic
gggguaagucuuugggcaa

SEQ ID NO: 441582 - RNA, 20 nt, Artificial Sequence
  Synthetic
agggguaagucuuugggcaa

SEQ ID NO: 441583 - RNA, 21 nt, Artificial Sequence
  Synthetic
uagggguaagucuuugggcaa

SEQ ID NO: 441584 - RNA, 22 nt, Artificial Sequence
  Synthetic
cuagggguaagucuuugggcaa

SEQ ID NO: 441585 - RNA, 23 nt, Artificial Sequence
  Synthetic
ccuagggguaagucuuugggcaa

SEQ ID NO: 441586 - RNA, 24 nt, Artificial Sequence
  Synthetic
cccuagggguaagucuuugggcaa

SEQ ID NO: 441587 - RNA, 18 nt, Artificial Sequence
  Synthetic
aacuuuuuuaaauggcaa

SEQ ID NO: 441588 - RNA, 19 nt, Artificial Sequence
  Synthetic
uaacuuuuuuaaauggcaa

SEQ ID NO: 441589 - RNA, 20 nt, Artificial Sequence
  Synthetic
cuaacuuuuuuaaauggcaa

SEQ ID NO: 441590 - RNA, 21 nt, Artificial Sequence
  Synthetic
acuaacuuuuuuaaauggcaa

SEQ ID NO: 441591 - RNA, 22 nt, Artificial Sequence
  Synthetic
aacuaacuuuuuuaaauggcaa

SEQ ID NO: 441592 - RNA, 23 nt, Artificial Sequence
  Synthetic
aaacuaacuuuuuuaaauggcaa

SEQ ID NO: 441593 - RNA, 24 nt, Artificial Sequence
  Synthetic
caaacuaacuuuuuuaaauggcaa

SEQ ID NO: 441594 - RNA, 18 nt, Artificial Sequence
  Synthetic
caccaaaagcaauggcaa

SEQ ID NO: 441595 - RNA, 19 nt, Artificial Sequence
  Synthetic
acaccaaaagcaauggcaa

SEQ ID NO: 441596 - RNA, 20 nt, Artificial Sequence
  Synthetic
aacaccaaaagcaauggcaa

SEQ ID NO: 441597 - RNA, 21 nt, Artificial Sequence
  Synthetic
aaacaccaaaagcaauggcaa

SEQ ID NO: 441598 - RNA, 22 nt, Artificial Sequence
  Synthetic
aaaacaccaaaagcaauggcaa

SEQ ID NO: 441599 - RNA, 23 nt, Artificial Sequence
  Synthetic
gaaaacaccaaaagcaauggcaa

SEQ ID NO: 441600 - RNA, 24 nt, Artificial Sequence
  Synthetic
ugaaaacaccaaaagcaauggcaa

SEQ ID NO: 441601 - RNA, 18 nt, Artificial Sequence
  Synthetic
agauuuauguaauggcaa

SEQ ID NO: 441602 - RNA, 19 nt, Artificial Sequence
  Synthetic
cagauuuauguaauggcaa

SEQ ID NO: 441603 - RNA, 20 nt, Artificial Sequence
  Synthetic
acagauuuauguaauggcaa

SEQ ID NO: 441604 - RNA, 21 nt, Artificial Sequence
  Synthetic
cacagauuuauguaauggcaa

SEQ ID NO: 441605 - RNA, 22 nt, Artificial Sequence
  Synthetic
gcacagauuuauguaauggcaa

SEQ ID NO: 441606 - RNA, 23 nt, Artificial Sequence
  Synthetic
ggcacagauuuauguaauggcaa

SEQ ID NO: 441607 - RNA, 24 nt, Artificial Sequence
  Synthetic
uggcacagauuuauguaauggcaa

SEQ ID NO: 441608 - RNA, 18 nt, Artificial Sequence
  Synthetic
gacucacaugcauggcaa

SEQ ID NO: 441609 - RNA, 19 nt, Artificial Sequence
  Synthetic
ugacucacaugcauggcaa

SEQ ID NO: 441610 - RNA, 20 nt, Artificial Sequence
  Synthetic
uugacucacaugcauggcaa

SEQ ID NO: 441611 - RNA, 21 nt, Artificial Sequence
  Synthetic
auugacucacaugcauggcaa

SEQ ID NO: 441612 - RNA, 22 nt, Artificial Sequence
  Synthetic
aauugacucacaugcauggcaa

SEQ ID NO: 441613 - RNA, 23 nt, Artificial Sequence
  Synthetic
aaauugacucacaugcauggcaa

SEQ ID NO: 441614 - RNA, 24 nt, Artificial Sequence
  Synthetic
aaaauugacucacaugcauggcaa

SEQ ID NO: 441615 - RNA, 18 nt, Artificial Sequence
  Synthetic
ugcugcaagagauggcaa

SEQ ID NO: 441616 - RNA, 19 nt, Artificial Sequence
  Synthetic
uugcugcaagagauggcaa

SEQ ID NO: 441617 - RNA, 20 nt, Artificial Sequence
  Synthetic
uuugcugcaagagauggcaa

SEQ ID NO: 441618 - RNA, 21 nt, Artificial Sequence
  Synthetic
guuugcugcaagagauggcaa

SEQ ID NO: 441619 - RNA, 22 nt, Artificial Sequence
  Synthetic
gguuugcugcaagagauggcaa

SEQ ID NO: 441620 - RNA, 23 nt, Artificial Sequence
  Synthetic
agguuugcugcaagagauggcaa

SEQ ID NO: 441621 - RNA, 24 nt, Artificial Sequence
  Synthetic
uagguuugcugcaagagauggcaa

SEQ ID NO: 441622 - RNA, 18 nt, Artificial Sequence
  Synthetic
ugugaccuaaucuggcaa

SEQ ID NO: 441623 - RNA, 19 nt, Artificial Sequence
  Synthetic
augugaccuaaucuggcaa

SEQ ID NO: 441624 - RNA, 20 nt, Artificial Sequence
  Synthetic
aaugugaccuaaucuggcaa

SEQ ID NO: 441625 - RNA, 21 nt, Artificial Sequence
  Synthetic
gaaugugaccuaaucuggcaa

SEQ ID NO: 441626 - RNA, 22 nt, Artificial Sequence
  Synthetic
agaaugugaccuaaucuggcaa

SEQ ID NO: 441627 - RNA, 23 nt, Artificial Sequence
  Synthetic
gagaaugugaccuaaucuggcaa

SEQ ID NO: 441628 - RNA, 24 nt, Artificial Sequence
  Synthetic
agagaaugugaccuaaucuggcaa

SEQ ID NO: 441629 - RNA, 18 nt, Artificial Sequence
  Synthetic
gugaucgcuuaguggcaa

SEQ ID NO: 441630 - RNA, 19 nt, Artificial Sequence
  Synthetic
cgugaucgcuuaguggcaa

SEQ ID NO: 441631 - RNA, 20 nt, Artificial Sequence
  Synthetic
gcgugaucgcuuaguggcaa

SEQ ID NO: 441632 - RNA, 21 nt, Artificial Sequence
  Synthetic
ggcgugaucgcuuaguggcaa

SEQ ID NO: 441633 - RNA, 22 nt, Artificial Sequence
  Synthetic
uggcgugaucgcuuaguggcaa

SEQ ID NO: 441634 - RNA, 23 nt, Artificial Sequence
  Synthetic
cuggcgugaucgcuuaguggcaa

SEQ ID NO: 441635 - RNA, 24 nt, Artificial Sequence
  Synthetic
ccuggcgugaucgcuuaguggcaa

SEQ ID NO: 441636 - RNA, 18 nt, Artificial Sequence
  Synthetic
cacccuccaggguggcaa

SEQ ID NO: 441637 - RNA, 19 nt, Artificial Sequence
  Synthetic
ccacccuccaggguggcaa

SEQ ID NO: 441638 - RNA, 20 nt, Artificial Sequence
  Synthetic
gccacccuccaggguggcaa

SEQ ID NO: 441639 - RNA, 21 nt, Artificial Sequence
  Synthetic
ugccacccuccaggguggcaa

SEQ ID NO: 441640 - RNA, 22 nt, Artificial Sequence
  Synthetic
uugccacccuccaggguggcaa

SEQ ID NO: 441641 - RNA, 23 nt, Artificial Sequence
  Synthetic
uuugccacccuccaggguggcaa

SEQ ID NO: 441642 - RNA, 24 nt, Artificial Sequence
  Synthetic
auuugccacccuccaggguggcaa

SEQ ID NO: 441643 - RNA, 18 nt, Artificial Sequence
  Synthetic
gaaauaagcugguggcaa

SEQ ID NO: 441644 - RNA, 19 nt, Artificial Sequence
  Synthetic
agaaauaagcugguggcaa

SEQ ID NO: 441645 - RNA, 20 nt, Artificial Sequence
  Synthetic
cagaaauaagcugguggcaa

SEQ ID NO: 441646 - RNA, 21 nt, Artificial Sequence
  Synthetic
ccagaaauaagcugguggcaa

SEQ ID NO: 441647 - RNA, 22 nt, Artificial Sequence
  Synthetic
gccagaaauaagcugguggcaa

SEQ ID NO: 441648 - RNA, 23 nt, Artificial Sequence
  Synthetic
ggccagaaauaagcugguggcaa

SEQ ID NO: 441649 - RNA, 24 nt, Artificial Sequence
  Synthetic
uggccagaaauaagcugguggcaa

SEQ ID NO: 441650 - RNA, 18 nt, Artificial Sequence
  Synthetic
aaaacacucaauuggcaa

SEQ ID NO: 441651 - RNA, 19 nt, Artificial Sequence
  Synthetic
aaaaacacucaauuggcaa

SEQ ID NO: 441652 - RNA, 20 nt, Artificial Sequence
  Synthetic
gaaaaacacucaauuggcaa

SEQ ID NO: 441653 - RNA, 21 nt, Artificial Sequence
  Synthetic
agaaaaacacucaauuggcaa

SEQ ID NO: 441654 - RNA, 22 nt, Artificial Sequence
  Synthetic
aagaaaaacacucaauuggcaa

SEQ ID NO: 441655 - RNA, 23 nt, Artificial Sequence
  Synthetic
uaagaaaaacacucaauuggcaa

SEQ ID NO: 441656 - RNA, 24 nt, Artificial Sequence
  Synthetic
auaagaaaaacacucaauuggcaa

SEQ ID NO: 441657 - RNA, 18 nt, Artificial Sequence
  Synthetic
gaugcaagagcuuggcaa

SEQ ID NO: 441658 - RNA, 19 nt, Artificial Sequence
  Synthetic
ggaugcaagagcuuggcaa

SEQ ID NO: 441659 - RNA, 20 nt, Artificial Sequence
  Synthetic
gggaugcaagagcuuggcaa

SEQ ID NO: 441660 - RNA, 21 nt, Artificial Sequence
  Synthetic
ugggaugcaagagcuuggcaa

SEQ ID NO: 441661 - RNA, 22 nt, Artificial Sequence
  Synthetic
gugggaugcaagagcuuggcaa

SEQ ID NO: 441662 - RNA, 23 nt, Artificial Sequence
  Synthetic
ggugggaugcaagagcuuggcaa

SEQ ID NO: 441663 - RNA, 24 nt, Artificial Sequence
  Synthetic
gggugggaugcaagagcuuggcaa

SEQ ID NO: 441664 - RNA, 18 nt, Artificial Sequence
  Synthetic
cugugccuucguuggcaa

SEQ ID NO: 441665 - RNA, 19 nt, Artificial Sequence
  Synthetic
gcugugccuucguuggcaa

SEQ ID NO: 441666 - RNA, 20 nt, Artificial Sequence
  Synthetic
ugcugugccuucguuggcaa

SEQ ID NO: 441667 - RNA, 21 nt, Artificial Sequence
  Synthetic
cugcugugccuucguuggcaa

SEQ ID NO: 441668 - RNA, 22 nt, Artificial Sequence
  Synthetic
ccugcugugccuucguuggcaa

SEQ ID NO: 441669 - RNA, 23 nt, Artificial Sequence
  Synthetic
accugcugugccuucguuggcaa

SEQ ID NO: 441670 - RNA, 24 nt, Artificial Sequence
  Synthetic
uaccugcugugccuucguuggcaa

SEQ ID NO: 441671 - RNA, 18 nt, Artificial Sequence
  Synthetic
gcagaauucuuuuggcaa

SEQ ID NO: 441672 - RNA, 19 nt, Artificial Sequence
  Synthetic
ggcagaauucuuuuggcaa

SEQ ID NO: 441673 - RNA, 20 nt, Artificial Sequence
  Synthetic
uggcagaauucuuuuggcaa

SEQ ID NO: 441674 - RNA, 21 nt, Artificial Sequence
  Synthetic
uuggcagaauucuuuuggcaa

SEQ ID NO: 441675 - RNA, 22 nt, Artificial Sequence
  Synthetic
uuuggcagaauucuuuuggcaa

SEQ ID NO: 441676 - RNA, 23 nt, Artificial Sequence
  Synthetic
uuuuggcagaauucuuuuggcaa

SEQ ID NO: 441677 - RNA, 24 nt, Artificial Sequence
  Synthetic
uuuuuggcagaauucuuuuggcaa

SEQ ID NO: 441678 - RNA, 18 nt, Artificial Sequence
  Synthetic
uauaaaguaaaaaugcaa

SEQ ID NO: 441679 - RNA, 19 nt, Artificial Sequence
  Synthetic
auauaaaguaaaaaugcaa

SEQ ID NO: 441680 - RNA, 20 nt, Artificial Sequence
  Synthetic
aauauaaaguaaaaaugcaa

SEQ ID NO: 441681 - RNA, 21 nt, Artificial Sequence
  Synthetic
gaauauaaaguaaaaaugcaa

SEQ ID NO: 441682 - RNA, 22 nt, Artificial Sequence
  Synthetic
ggaauauaaaguaaaaaugcaa

SEQ ID NO: 441683 - RNA, 23 nt, Artificial Sequence
  Synthetic
aggaauauaaaguaaaaaugcaa

SEQ ID NO: 441684 - RNA, 24 nt, Artificial Sequence
  Synthetic
aaggaauauaaaguaaaaaugcaa

SEQ ID NO: 441685 - RNA, 18 nt, Artificial Sequence
  Synthetic
agaagagauaaaaugcaa

SEQ ID NO: 441686 - RNA, 19 nt, Artificial Sequence
  Synthetic
cagaagagauaaaaugcaa

SEQ ID NO: 441687 - RNA, 20 nt, Artificial Sequence
  Synthetic
acagaagagauaaaaugcaa

SEQ ID NO: 441688 - RNA, 21 nt, Artificial Sequence
  Synthetic
aacagaagagauaaaaugcaa

SEQ ID NO: 441689 - RNA, 22 nt, Artificial Sequence
  Synthetic
aaacagaagagauaaaaugcaa

SEQ ID NO: 441690 - RNA, 23 nt, Artificial Sequence
  Synthetic
aaaacagaagagauaaaaugcaa

SEQ ID NO: 441691 - RNA, 24 nt, Artificial Sequence
  Synthetic
aaaaacagaagagauaaaaugcaa

SEQ ID NO: 441692 - RNA, 18 nt, Artificial Sequence
  Synthetic
auacaccaccaaaugcaa

SEQ ID NO: 441693 - RNA, 19 nt, Artificial Sequence
  Synthetic
cauacaccaccaaaugcaa

SEQ ID NO: 441694 - RNA, 20 nt, Artificial Sequence
  Synthetic
acauacaccaccaaaugcaa

SEQ ID NO: 441695 - RNA, 21 nt, Artificial Sequence
  Synthetic
uacauacaccaccaaaugcaa

SEQ ID NO: 441696 - RNA, 22 nt, Artificial Sequence
  Synthetic
uuacauacaccaccaaaugcaa

SEQ ID NO: 441697 - RNA, 23 nt, Artificial Sequence
  Synthetic
uuuacauacaccaccaaaugcaa

SEQ ID NO: 441698 - RNA, 24 nt, Artificial Sequence
  Synthetic
uuuuacauacaccaccaaaugcaa

SEQ ID NO: 441699 - RNA, 18 nt, Artificial Sequence
  Synthetic
aucaucggggaaaugcaa

SEQ ID NO: 441700 - RNA, 19 nt, Artificial Sequence
  Synthetic
aaucaucggggaaaugcaa

SEQ ID NO: 441701 - RNA, 20 nt, Artificial Sequence
  Synthetic
caaucaucggggaaaugcaa

SEQ ID NO: 441702 - RNA, 21 nt, Artificial Sequence
  Synthetic
ucaaucaucggggaaaugcaa

SEQ ID NO: 441703 - RNA, 22 nt, Artificial Sequence
  Synthetic
gucaaucaucggggaaaugcaa

SEQ ID NO: 441704 - RNA, 23 nt, Artificial Sequence
  Synthetic
cgucaaucaucggggaaaugcaa

SEQ ID NO: 441705 - RNA, 24 nt, Artificial Sequence
  Synthetic
ucgucaaucaucggggaaaugcaa

SEQ ID NO: 441706 - RNA, 18 nt, Artificial Sequence
  Synthetic
guaaucaaugaaaugcaa

SEQ ID NO: 441707 - RNA, 19 nt, Artificial Sequence
  Synthetic
aguaaucaaugaaaugcaa

SEQ ID NO: 441708 - RNA, 20 nt, Artificial Sequence
  Synthetic
uaguaaucaaugaaaugcaa

SEQ ID NO: 441709 - RNA, 21 nt, Artificial Sequence
  Synthetic
uuaguaaucaaugaaaugcaa

SEQ ID NO: 441710 - RNA, 22 nt, Artificial Sequence
  Synthetic
guuaguaaucaaugaaaugcaa

SEQ ID NO: 441711 - RNA, 23 nt, Artificial Sequence
  Synthetic
aguuaguaaucaaugaaaugcaa

SEQ ID NO: 441712 - RNA, 24 nt, Artificial Sequence
  Synthetic
caguuaguaaucaaugaaaugcaa

SEQ ID NO: 441713 - RNA, 18 nt, Artificial Sequence
  Synthetic
cuucuucaauaaaugcaa

SEQ ID NO: 441714 - RNA, 19 nt, Artificial Sequence
  Synthetic
ucuucuucaauaaaugcaa

SEQ ID NO: 441715 - RNA, 20 nt, Artificial Sequence
  Synthetic
uucuucuucaauaaaugcaa

SEQ ID NO: 441716 - RNA, 21 nt, Artificial Sequence
  Synthetic
uuucuucuucaauaaaugcaa

SEQ ID NO: 441717 - RNA, 22 nt, Artificial Sequence
  Synthetic
uuuucuucuucaauaaaugcaa

SEQ ID NO: 441718 - RNA, 23 nt, Artificial Sequence
  Synthetic
uuuuucuucuucaauaaaugcaa

SEQ ID NO: 441719 - RNA, 24 nt, Artificial Sequence
  Synthetic
uuuuuucuucuucaauaaaugcaa

SEQ ID NO: 441720 - RNA, 18 nt, Artificial Sequence
  Synthetic
ugaaagacaacaaugcaa

SEQ ID NO: 441721 - RNA, 19 nt, Artificial Sequence
  Synthetic
cugaaagacaacaaugcaa

SEQ ID NO: 441722 - RNA, 20 nt, Artificial Sequence
  Synthetic
gcugaaagacaacaaugcaa

SEQ ID NO: 441723 - RNA, 21 nt, Artificial Sequence
  Synthetic
ggcugaaagacaacaaugcaa

SEQ ID NO: 441724 - RNA, 22 nt, Artificial Sequence
  Synthetic
uggcugaaagacaacaaugcaa

SEQ ID NO: 441725 - RNA, 23 nt, Artificial Sequence
  Synthetic
guggcugaaagacaacaaugcaa

SEQ ID NO: 441726 - RNA, 24 nt, Artificial Sequence
  Synthetic
uguggcugaaagacaacaaugcaa

SEQ ID NO: 441727 - RNA, 18 nt, Artificial Sequence
  Synthetic
ucugcaauaacaaugcaa

SEQ ID NO: 441728 - RNA, 19 nt, Artificial Sequence
  Synthetic
uucugcaauaacaaugcaa

SEQ ID NO: 441729 - RNA, 20 nt, Artificial Sequence
  Synthetic
guucugcaauaacaaugcaa

SEQ ID NO: 441730 - RNA, 21 nt, Artificial Sequence
  Synthetic
gguucugcaauaacaaugcaa

SEQ ID NO: 441731 - RNA, 22 nt, Artificial Sequence
  Synthetic
agguucugcaauaacaaugcaa

SEQ ID NO: 441732 - RNA, 23 nt, Artificial Sequence
  Synthetic
uagguucugcaauaacaaugcaa

SEQ ID NO: 441733 - RNA, 24 nt, Artificial Sequence
  Synthetic
cuagguucugcaauaacaaugcaa

SEQ ID NO: 441734 - RNA, 18 nt, Artificial Sequence
  Synthetic
uuuccugugacaaugcaa

SEQ ID NO: 441735 - RNA, 19 nt, Artificial Sequence
  Synthetic
guuuccugugacaaugcaa

SEQ ID NO: 441736 - RNA, 20 nt, Artificial Sequence
  Synthetic
aguuuccugugacaaugcaa

SEQ ID NO: 441737 - RNA, 21 nt, Artificial Sequence
  Synthetic
aaguuuccugugacaaugcaa

SEQ ID NO: 441738 - RNA, 22 nt, Artificial Sequence
  Synthetic
gaaguuuccugugacaaugcaa

SEQ ID NO: 441739 - RNA, 23 nt, Artificial Sequence
  Synthetic
agaaguuuccugugacaaugcaa

SEQ ID NO: 441740 - RNA, 24 nt, Artificial Sequence
  Synthetic
uagaaguuuccugugacaaugcaa

SEQ ID NO: 441741 - RNA, 18 nt, Artificial Sequence
  Synthetic
auaugcagaagaaugcaa

SEQ ID NO: 441742 - RNA, 19 nt, Artificial Sequence
  Synthetic
cauaugcagaagaaugcaa

SEQ ID NO: 441743 - RNA, 20 nt, Artificial Sequence
  Synthetic
ccauaugcagaagaaugcaa

SEQ ID NO: 441744 - RNA, 21 nt, Artificial Sequence
  Synthetic
gccauaugcagaagaaugcaa

SEQ ID NO: 441745 - RNA, 22 nt, Artificial Sequence
  Synthetic
agccauaugcagaagaaugcaa

SEQ ID NO: 441746 - RNA, 23 nt, Artificial Sequence
  Synthetic
uagccauaugcagaagaaugcaa

SEQ ID NO: 441747 - RNA, 24 nt, Artificial Sequence
  Synthetic
uuagccauaugcagaagaaugcaa

SEQ ID NO: 441748 - RNA, 18 nt, Artificial Sequence
  Synthetic
uuaauaguaggaaugcaa

SEQ ID NO: 441749 - RNA, 19 nt, Artificial Sequence
  Synthetic
uuuaauaguaggaaugcaa

SEQ ID NO: 441750 - RNA, 20 nt, Artificial Sequence
  Synthetic
auuuaauaguaggaaugcaa

SEQ ID NO: 441751 - RNA, 21 nt, Artificial Sequence
  Synthetic
uauuuaauaguaggaaugcaa

SEQ ID NO: 441752 - RNA, 22 nt, Artificial Sequence
  Synthetic
auauuuaauaguaggaaugcaa

SEQ ID NO: 441753 - RNA, 23 nt, Artificial Sequence
  Synthetic
cauauuuaauaguaggaaugcaa

SEQ ID NO: 441754 - RNA, 24 nt, Artificial Sequence
  Synthetic
acauauuuaauaguaggaaugcaa

SEQ ID NO: 441755 - RNA, 18 nt, Artificial Sequence
  Synthetic
gcuaaguugugaaugcaa

SEQ ID NO: 441756 - RNA, 19 nt, Artificial Sequence
  Synthetic
agcuaaguugugaaugcaa

SEQ ID NO: 441757 - RNA, 20 nt, Artificial Sequence
  Synthetic
uagcuaaguugugaaugcaa

SEQ ID NO: 441758 - RNA, 21 nt, Artificial Sequence
  Synthetic
uuagcuaaguugugaaugcaa

SEQ ID NO: 441759 - RNA, 22 nt, Artificial Sequence
  Synthetic
guuagcuaaguugugaaugcaa

SEQ ID NO: 441760 - RNA, 23 nt, Artificial Sequence
  Synthetic
cguuagcuaaguugugaaugcaa

SEQ ID NO: 441761 - RNA, 24 nt, Artificial Sequence
  Synthetic
ccguuagcuaaguugugaaugcaa

SEQ ID NO: 441762 - RNA, 18 nt, Artificial Sequence
  Synthetic
caucugucgguaaugcaa

SEQ ID NO: 441763 - RNA, 19 nt, Artificial Sequence
  Synthetic
gcaucugucgguaaugcaa

SEQ ID NO: 441764 - RNA, 20 nt, Artificial Sequence
  Synthetic
ugcaucugucgguaaugcaa

SEQ ID NO: 441765 - RNA, 21 nt, Artificial Sequence
  Synthetic
cugcaucugucgguaaugcaa

SEQ ID NO: 441766 - RNA, 22 nt, Artificial Sequence
  Synthetic
ucugcaucugucgguaaugcaa

SEQ ID NO: 441767 - RNA, 23 nt, Artificial Sequence
  Synthetic
uucugcaucugucgguaaugcaa

SEQ ID NO: 441768 - RNA, 24 nt, Artificial Sequence
  Synthetic
uuucugcaucugucgguaaugcaa

SEQ ID NO: 441769 - RNA, 18 nt, Artificial Sequence
  Synthetic
uaggaaagccacaugcaa

SEQ ID NO: 441770 - RNA, 19 nt, Artificial Sequence
  Synthetic
uuaggaaagccacaugcaa

SEQ ID NO: 441771 - RNA, 20 nt, Artificial Sequence
  Synthetic
cuuaggaaagccacaugcaa

SEQ ID NO: 441772 - RNA, 21 nt, Artificial Sequence
  Synthetic
ccuuaggaaagccacaugcaa

SEQ ID NO: 441773 - RNA, 22 nt, Artificial Sequence
  Synthetic
cccuuaggaaagccacaugcaa

SEQ ID NO: 441774 - RNA, 23 nt, Artificial Sequence
  Synthetic
gcccuuaggaaagccacaugcaa

SEQ ID NO: 441775 - RNA, 24 nt, Artificial Sequence
  Synthetic
agcccuuaggaaagccacaugcaa

SEQ ID NO: 441776 - RNA, 18 nt, Artificial Sequence
  Synthetic
gggagcagagccaugcaa

SEQ ID NO: 441777 - RNA, 19 nt, Artificial Sequence
  Synthetic
ggggagcagagccaugcaa

SEQ ID NO: 441778 - RNA, 20 nt, Artificial Sequence
  Synthetic
uggggagcagagccaugcaa

SEQ ID NO: 441779 - RNA, 21 nt, Artificial Sequence
  Synthetic
cuggggagcagagccaugcaa

SEQ ID NO: 441780 - RNA, 22 nt, Artificial Sequence
  Synthetic
acuggggagcagagccaugcaa

SEQ ID NO: 441781 - RNA, 23 nt, Artificial Sequence
  Synthetic
uacuggggagcagagccaugcaa

SEQ ID NO: 441782 - RNA, 24 nt, Artificial Sequence
  Synthetic
auacuggggagcagagccaugcaa

SEQ ID NO: 441783 - RNA, 18 nt, Artificial Sequence
  Synthetic
aaaagauacuccaugcaa

SEQ ID NO: 441784 - RNA, 19 nt, Artificial Sequence
  Synthetic
aaaaagauacuccaugcaa

SEQ ID NO: 441785 - RNA, 20 nt, Artificial Sequence
  Synthetic
gaaaaagauacuccaugcaa

SEQ ID NO: 441786 - RNA, 21 nt, Artificial Sequence
  Synthetic
ggaaaaagauacuccaugcaa

SEQ ID NO: 441787 - RNA, 22 nt, Artificial Sequence
  Synthetic
cggaaaaagauacuccaugcaa

SEQ ID NO: 441788 - RNA, 23 nt, Artificial Sequence
  Synthetic
acggaaaaagauacuccaugcaa

SEQ ID NO: 441789 - RNA, 24 nt, Artificial Sequence
  Synthetic
gacggaaaaagauacuccaugcaa

SEQ ID NO: 441790 - RNA, 18 nt, Artificial Sequence
  Synthetic
ugcagccugaagaugcaa

SEQ ID NO: 441791 - RNA, 19 nt, Artificial Sequence
  Synthetic
uugcagccugaagaugcaa

SEQ ID NO: 441792 - RNA, 20 nt, Artificial Sequence
  Synthetic
uuugcagccugaagaugcaa

SEQ ID NO: 441793 - RNA, 21 nt, Artificial Sequence
  Synthetic
auuugcagccugaagaugcaa

SEQ ID NO: 441794 - RNA, 22 nt, Artificial Sequence
  Synthetic
aauuugcagccugaagaugcaa

SEQ ID NO: 441795 - RNA, 23 nt, Artificial Sequence
  Synthetic
aaauuugcagccugaagaugcaa

SEQ ID NO: 441796 - RNA, 24 nt, Artificial Sequence
  Synthetic
aaaauuugcagccugaagaugcaa

SEQ ID NO: 441797 - RNA, 18 nt, Artificial Sequence
  Synthetic
aauugagaugggaugcaa

SEQ ID NO: 441798 - RNA, 19 nt, Artificial Sequence
  Synthetic
aaauugagaugggaugcaa

SEQ ID NO: 441799 - RNA, 20 nt, Artificial Sequence
  Synthetic
caaauugagaugggaugcaa

SEQ ID NO: 441800 - RNA, 21 nt, Artificial Sequence
  Synthetic
ccaaauugagaugggaugcaa

SEQ ID NO: 441801 - RNA, 22 nt, Artificial Sequence
  Synthetic
uccaaauugagaugggaugcaa

SEQ ID NO: 441802 - RNA, 23 nt, Artificial Sequence
  Synthetic
guccaaauugagaugggaugcaa

SEQ ID NO: 441803 - RNA, 24 nt, Artificial Sequence
  Synthetic
uguccaaauugagaugggaugcaa

SEQ ID NO: 441804 - RNA, 18 nt, Artificial Sequence
  Synthetic
gcaacaacauggaugcaa

SEQ ID NO: 441805 - RNA, 19 nt, Artificial Sequence
  Synthetic
ugcaacaacauggaugcaa

SEQ ID NO: 441806 - RNA, 20 nt, Artificial Sequence
  Synthetic
gugcaacaacauggaugcaa

SEQ ID NO: 441807 - RNA, 21 nt, Artificial Sequence
  Synthetic
ugugcaacaacauggaugcaa

SEQ ID NO: 441808 - RNA, 22 nt, Artificial Sequence
  Synthetic
cugugcaacaacauggaugcaa

SEQ ID NO: 441809 - RNA, 23 nt, Artificial Sequence
  Synthetic
ccugugcaacaacauggaugcaa

SEQ ID NO: 441810 - RNA, 24 nt, Artificial Sequence
  Synthetic
gccugugcaacaacauggaugcaa

SEQ ID NO: 441811 - RNA, 18 nt, Artificial Sequence
  Synthetic
agucuccauacuaugcaa

SEQ ID NO: 441812 - RNA, 19 nt, Artificial Sequence
  Synthetic
uagucuccauacuaugcaa

SEQ ID NO: 441813 - RNA, 20 nt, Artificial Sequence
  Synthetic
auagucuccauacuaugcaa

SEQ ID NO: 441814 - RNA, 21 nt, Artificial Sequence
  Synthetic
aauagucuccauacuaugcaa

SEQ ID NO: 441815 - RNA, 22 nt, Artificial Sequence
  Synthetic
caauagucuccauacuaugcaa

SEQ ID NO: 441816 - RNA, 23 nt, Artificial Sequence
  Synthetic
acaauagucuccauacuaugcaa

SEQ ID NO: 441817 - RNA, 24 nt, Artificial Sequence
  Synthetic
gacaauagucuccauacuaugcaa

SEQ ID NO: 441818 - RNA, 18 nt, Artificial Sequence
  Synthetic
auuaguagggcuaugcaa

SEQ ID NO: 441819 - RNA, 19 nt, Artificial Sequence
  Synthetic
gauuaguagggcuaugcaa

SEQ ID NO: 441820 - RNA, 20 nt, Artificial Sequence
  Synthetic
agauuaguagggcuaugcaa

SEQ ID NO: 441821 - RNA, 21 nt, Artificial Sequence
  Synthetic
cagauuaguagggcuaugcaa

SEQ ID NO: 441822 - RNA, 22 nt, Artificial Sequence
  Synthetic
ucagauuaguagggcuaugcaa

SEQ ID NO: 441823 - RNA, 23 nt, Artificial Sequence
  Synthetic
cucagauuaguagggcuaugcaa

SEQ ID NO: 441824 - RNA, 24 nt, Artificial Sequence
  Synthetic
gcucagauuaguagggcuaugcaa

SEQ ID NO: 441825 - RNA, 18 nt, Artificial Sequence
  Synthetic
guuacguacucuaugcaa

SEQ ID NO: 441826 - RNA, 19 nt, Artificial Sequence
  Synthetic
uguuacguacucuaugcaa

SEQ ID NO: 441827 - RNA, 20 nt, Artificial Sequence
  Synthetic
cuguuacguacucuaugcaa

SEQ ID NO: 441828 - RNA, 21 nt, Artificial Sequence
  Synthetic
acuguuacguacucuaugcaa

SEQ ID NO: 441829 - RNA, 22 nt, Artificial Sequence
  Synthetic
cacuguuacguacucuaugcaa

SEQ ID NO: 441830 - RNA, 23 nt, Artificial Sequence
  Synthetic
ccacuguuacguacucuaugcaa

SEQ ID NO: 441831 - RNA, 24 nt, Artificial Sequence
  Synthetic
gccacuguuacguacucuaugcaa

SEQ ID NO: 441832 - RNA, 18 nt, Artificial Sequence
  Synthetic
uggacaguuuuuaugcaa

SEQ ID NO: 441833 - RNA, 19 nt, Artificial Sequence
  Synthetic
auggacaguuuuuaugcaa

SEQ ID NO: 441834 - RNA, 20 nt, Artificial Sequence
  Synthetic
cauggacaguuuuuaugcaa

SEQ ID NO: 441835 - RNA, 21 nt, Artificial Sequence
  Synthetic
gcauggacaguuuuuaugcaa

SEQ ID NO: 441836 - RNA, 22 nt, Artificial Sequence
  Synthetic
ggcauggacaguuuuuaugcaa

SEQ ID NO: 441837 - RNA, 23 nt, Artificial Sequence
  Synthetic
aggcauggacaguuuuuaugcaa

SEQ ID NO: 441838 - RNA, 24 nt, Artificial Sequence
  Synthetic
gaggcauggacaguuuuuaugcaa

SEQ ID NO: 441839 - RNA, 18 nt, Artificial Sequence
  Synthetic
aaaccauguaaacugcaa

SEQ ID NO: 441840 - RNA, 19 nt, Artificial Sequence
  Synthetic
aaaaccauguaaacugcaa

SEQ ID NO: 441841 - RNA, 20 nt, Artificial Sequence
  Synthetic
gaaaaccauguaaacugcaa

SEQ ID NO: 441842 - RNA, 21 nt, Artificial Sequence
  Synthetic
agaaaaccauguaaacugcaa

SEQ ID NO: 441843 - RNA, 22 nt, Artificial Sequence
  Synthetic
uagaaaaccauguaaacugcaa

SEQ ID NO: 441844 - RNA, 23 nt, Artificial Sequence
  Synthetic
uuagaaaaccauguaaacugcaa

SEQ ID NO: 441845 - RNA, 24 nt, Artificial Sequence
  Synthetic
uuuagaaaaccauguaaacugcaa

SEQ ID NO: 441846 - RNA, 18 nt, Artificial Sequence
  Synthetic
agagcuucuacacugcaa

SEQ ID NO: 441847 - RNA, 19 nt, Artificial Sequence
  Synthetic
aagagcuucuacacugcaa

SEQ ID NO: 441848 - RNA, 20 nt, Artificial Sequence
  Synthetic
aaagagcuucuacacugcaa

SEQ ID NO: 441849 - RNA, 21 nt, Artificial Sequence
  Synthetic
uaaagagcuucuacacugcaa

SEQ ID NO: 441850 - RNA, 22 nt, Artificial Sequence
  Synthetic
cuaaagagcuucuacacugcaa

SEQ ID NO: 441851 - RNA, 23 nt, Artificial Sequence
  Synthetic
acuaaagagcuucuacacugcaa

SEQ ID NO: 441852 - RNA, 24 nt, Artificial Sequence
  Synthetic
aacuaaagagcuucuacacugcaa

SEQ ID NO: 441853 - RNA, 18 nt, Artificial Sequence
  Synthetic
gcaggagacugacugcaa

SEQ ID NO: 441854 - RNA, 19 nt, Artificial Sequence
  Synthetic
ggcaggagacugacugcaa

SEQ ID NO: 441855 - RNA, 20 nt, Artificial Sequence
  Synthetic
gggcaggagacugacugcaa

SEQ ID NO: 441856 - RNA, 21 nt, Artificial Sequence
  Synthetic
ggggcaggagacugacugcaa

SEQ ID NO: 441857 - RNA, 22 nt, Artificial Sequence
  Synthetic
uggggcaggagacugacugcaa

SEQ ID NO: 441858 - RNA, 23 nt, Artificial Sequence
  Synthetic
guggggcaggagacugacugcaa

SEQ ID NO: 441859 - RNA, 24 nt, Artificial Sequence
  Synthetic
gguggggcaggagacugacugcaa

SEQ ID NO: 441860 - RNA, 18 nt, Artificial Sequence
  Synthetic
caaucucuuuuacugcaa

SEQ ID NO: 441861 - RNA, 19 nt, Artificial Sequence
  Synthetic
acaaucucuuuuacugcaa

SEQ ID NO: 441862 - RNA, 20 nt, Artificial Sequence
  Synthetic
aacaaucucuuuuacugcaa

SEQ ID NO: 441863 - RNA, 21 nt, Artificial Sequence
  Synthetic
aaacaaucucuuuuacugcaa

SEQ ID NO: 441864 - RNA, 22 nt, Artificial Sequence
  Synthetic
gaaacaaucucuuuuacugcaa

SEQ ID NO: 441865 - RNA, 23 nt, Artificial Sequence
  Synthetic
ugaaacaaucucuuuuacugcaa

SEQ ID NO: 441866 - RNA, 24 nt, Artificial Sequence
  Synthetic
uugaaacaaucucuuuuacugcaa

SEQ ID NO: 441867 - RNA, 18 nt, Artificial Sequence
  Synthetic
aaguuuuaaccccugcaa

SEQ ID NO: 441868 - RNA, 19 nt, Artificial Sequence
  Synthetic
gaaguuuuaaccccugcaa

SEQ ID NO: 441869 - RNA, 20 nt, Artificial Sequence
  Synthetic
ugaaguuuuaaccccugcaa

SEQ ID NO: 441870 - RNA, 21 nt, Artificial Sequence
  Synthetic
uugaaguuuuaaccccugcaa

SEQ ID NO: 441871 - RNA, 22 nt, Artificial Sequence
  Synthetic
guugaaguuuuaaccccugcaa

SEQ ID NO: 441872 - RNA, 23 nt, Artificial Sequence
  Synthetic
uguugaaguuuuaaccccugcaa

SEQ ID NO: 441873 - RNA, 24 nt, Artificial Sequence
  Synthetic
auguugaaguuuuaaccccugcaa

SEQ ID NO: 441874 - RNA, 18 nt, Artificial Sequence
  Synthetic
gaaaaguguagccugcaa

SEQ ID NO: 441875 - RNA, 19 nt, Artificial Sequence
  Synthetic
ggaaaaguguagccugcaa

SEQ ID NO: 441876 - RNA, 20 nt, Artificial Sequence
  Synthetic
aggaaaaguguagccugcaa

SEQ ID NO: 441877 - RNA, 21 nt, Artificial Sequence
  Synthetic
aaggaaaaguguagccugcaa

SEQ ID NO: 441878 - RNA, 22 nt, Artificial Sequence
  Synthetic
gaaggaaaaguguagccugcaa

SEQ ID NO: 441879 - RNA, 23 nt, Artificial Sequence
  Synthetic
agaaggaaaaguguagccugcaa

SEQ ID NO: 441880 - RNA, 24 nt, Artificial Sequence
  Synthetic
gagaaggaaaaguguagccugcaa

SEQ ID NO: 441881 - RNA, 18 nt, Artificial Sequence
  Synthetic
acagcacagugccugcaa

SEQ ID NO: 441882 - RNA, 19 nt, Artificial Sequence
  Synthetic
cacagcacagugccugcaa

SEQ ID NO: 441883 - RNA, 20 nt, Artificial Sequence
  Synthetic
ucacagcacagugccugcaa

SEQ ID NO: 441884 - RNA, 21 nt, Artificial Sequence
  Synthetic
gucacagcacagugccugcaa

SEQ ID NO: 441885 - RNA, 22 nt, Artificial Sequence
  Synthetic
cgucacagcacagugccugcaa

SEQ ID NO: 441886 - RNA, 23 nt, Artificial Sequence
  Synthetic
ccgucacagcacagugccugcaa

SEQ ID NO: 441887 - RNA, 24 nt, Artificial Sequence
  Synthetic
cccgucacagcacagugccugcaa

SEQ ID NO: 441888 - RNA, 18 nt, Artificial Sequence
  Synthetic
ucuucaaaugagcugcaa

SEQ ID NO: 441889 - RNA, 19 nt, Artificial Sequence
  Synthetic
aucuucaaaugagcugcaa

SEQ ID NO: 441890 - RNA, 20 nt, Artificial Sequence
  Synthetic
aaucuucaaaugagcugcaa

SEQ ID NO: 441891 - RNA, 21 nt, Artificial Sequence
  Synthetic
aaaucuucaaaugagcugcaa

SEQ ID NO: 441892 - RNA, 22 nt, Artificial Sequence
  Synthetic
aaaaucuucaaaugagcugcaa

SEQ ID NO: 441893 - RNA, 23 nt, Artificial Sequence
  Synthetic
aaaaaucuucaaaugagcugcaa

SEQ ID NO: 441894 - RNA, 24 nt, Artificial Sequence
  Synthetic
uaaaaaucuucaaaugagcugcaa

SEQ ID NO: 441895 - RNA, 18 nt, Artificial Sequence
  Synthetic
ugcagaagggggcugcaa

SEQ ID NO: 441896 - RNA, 19 nt, Artificial Sequence
  Synthetic
cugcagaagggggcugcaa

SEQ ID NO: 441897 - RNA, 20 nt, Artificial Sequence
  Synthetic
acugcagaagggggcugcaa

SEQ ID NO: 441898 - RNA, 21 nt, Artificial Sequence
  Synthetic
aacugcagaagggggcugcaa

SEQ ID NO: 441899 - RNA, 22 nt, Artificial Sequence
  Synthetic
aaacugcagaagggggcugcaa

SEQ ID NO: 441900 - RNA, 23 nt, Artificial Sequence
  Synthetic
aaaacugcagaagggggcugcaa

SEQ ID NO: 441901 - RNA, 24 nt, Artificial Sequence
  Synthetic
gaaaacugcagaagggggcugcaa

SEQ ID NO: 441902 - RNA, 18 nt, Artificial Sequence
  Synthetic
auuucacagaugcugcaa

SEQ ID NO: 441903 - RNA, 19 nt, Artificial Sequence
  Synthetic
aauuucacagaugcugcaa

SEQ ID NO: 441904 - RNA, 20 nt, Artificial Sequence
  Synthetic
uaauuucacagaugcugcaa

SEQ ID NO: 441905 - RNA, 21 nt, Artificial Sequence
  Synthetic
cuaauuucacagaugcugcaa

SEQ ID NO: 441906 - RNA, 22 nt, Artificial Sequence
  Synthetic
ucuaauuucacagaugcugcaa

SEQ ID NO: 441907 - RNA, 23 nt, Artificial Sequence
  Synthetic
aucuaauuucacagaugcugcaa

SEQ ID NO: 441908 - RNA, 24 nt, Artificial Sequence
  Synthetic
uaucuaauuucacagaugcugcaa

SEQ ID NO: 441909 - RNA, 18 nt, Artificial Sequence
  Synthetic
aucacugaggugcugcaa

SEQ ID NO: 441910 - RNA, 19 nt, Artificial Sequence
  Synthetic
caucacugaggugcugcaa

SEQ ID NO: 441911 - RNA, 20 nt, Artificial Sequence
  Synthetic
ucaucacugaggugcugcaa

SEQ ID NO: 441912 - RNA, 21 nt, Artificial Sequence
  Synthetic
gucaucacugaggugcugcaa

SEQ ID NO: 441913 - RNA, 22 nt, Artificial Sequence
  Synthetic
agucaucacugaggugcugcaa

SEQ ID NO: 441914 - RNA, 23 nt, Artificial Sequence
  Synthetic
uagucaucacugaggugcugcaa

SEQ ID NO: 441915 - RNA, 24 nt, Artificial Sequence
  Synthetic
guagucaucacugaggugcugcaa

SEQ ID NO: 441916 - RNA, 18 nt, Artificial Sequence
  Synthetic
uuccagccugcucugcaa

SEQ ID NO: 441917 - RNA, 19 nt, Artificial Sequence
  Synthetic
cuuccagccugcucugcaa

SEQ ID NO: 441918 - RNA, 20 nt, Artificial Sequence
  Synthetic
gcuuccagccugcucugcaa

SEQ ID NO: 441919 - RNA, 21 nt, Artificial Sequence
  Synthetic
agcuuccagccugcucugcaa

SEQ ID NO: 441920 - RNA, 22 nt, Artificial Sequence
  Synthetic
cagcuuccagccugcucugcaa

SEQ ID NO: 441921 - RNA, 23 nt, Artificial Sequence
  Synthetic
ccagcuuccagccugcucugcaa

SEQ ID NO: 441922 - RNA, 24 nt, Artificial Sequence
  Synthetic
cccagcuuccagccugcucugcaa

SEQ ID NO: 441923 - RNA, 18 nt, Artificial Sequence
  Synthetic
uaauuguacauucugcaa

SEQ ID NO: 441924 - RNA, 19 nt, Artificial Sequence
  Synthetic
guaauuguacauucugcaa

SEQ ID NO: 441925 - RNA, 20 nt, Artificial Sequence
  Synthetic
gguaauuguacauucugcaa

SEQ ID NO: 441926 - RNA, 21 nt, Artificial Sequence
  Synthetic
agguaauuguacauucugcaa

SEQ ID NO: 441927 - RNA, 22 nt, Artificial Sequence
  Synthetic
aagguaauuguacauucugcaa

SEQ ID NO: 441928 - RNA, 23 nt, Artificial Sequence
  Synthetic
caagguaauuguacauucugcaa

SEQ ID NO: 441929 - RNA, 24 nt, Artificial Sequence
  Synthetic
acaagguaauuguacauucugcaa

SEQ ID NO: 441930 - RNA, 18 nt, Artificial Sequence
  Synthetic
uggccacucuuucugcaa

SEQ ID NO: 441931 - RNA, 19 nt, Artificial Sequence
  Synthetic
uuggccacucuuucugcaa

SEQ ID NO: 441932 - RNA, 20 nt, Artificial Sequence
  Synthetic
uuuggccacucuuucugcaa

SEQ ID NO: 441933 - RNA, 21 nt, Artificial Sequence
  Synthetic
uuuuggccacucuuucugcaa

SEQ ID NO: 441934 - RNA, 22 nt, Artificial Sequence
  Synthetic
uuuuuggccacucuuucugcaa

SEQ ID NO: 441935 - RNA, 23 nt, Artificial Sequence
  Synthetic
auuuuuggccacucuuucugcaa

SEQ ID NO: 441936 - RNA, 24 nt, Artificial Sequence
  Synthetic
uauuuuuggccacucuuucugcaa

SEQ ID NO: 441937 - RNA, 18 nt, Artificial Sequence
  Synthetic
ucuucaaccucagugcaa

SEQ ID NO: 441938 - RNA, 19 nt, Artificial Sequence
  Synthetic
gucuucaaccucagugcaa

SEQ ID NO: 441939 - RNA, 20 nt, Artificial Sequence
  Synthetic
ggucuucaaccucagugcaa

SEQ ID NO: 441940 - RNA, 21 nt, Artificial Sequence
  Synthetic
uggucuucaaccucagugcaa

SEQ ID NO: 441941 - RNA, 22 nt, Artificial Sequence
  Synthetic
uuggucuucaaccucagugcaa

SEQ ID NO: 441942 - RNA, 23 nt, Artificial Sequence
  Synthetic
uuuggucuucaaccucagugcaa

SEQ ID NO: 441943 - RNA, 24 nt, Artificial Sequence
  Synthetic
uuuuggucuucaaccucagugcaa

SEQ ID NO: 441944 - RNA, 18 nt, Artificial Sequence
  Synthetic
uauacuauaugagugcaa

SEQ ID NO: 441945 - RNA, 19 nt, Artificial Sequence
  Synthetic
auauacuauaugagugcaa

SEQ ID NO: 441946 - RNA, 20 nt, Artificial Sequence
  Synthetic
aauauacuauaugagugcaa

SEQ ID NO: 441947 - RNA, 21 nt, Artificial Sequence
  Synthetic
aaauauacuauaugagugcaa

SEQ ID NO: 441948 - RNA, 22 nt, Artificial Sequence
  Synthetic
aaaauauacuauaugagugcaa

SEQ ID NO: 441949 - RNA, 23 nt, Artificial Sequence
  Synthetic
gaaaauauacuauaugagugcaa

SEQ ID NO: 441950 - RNA, 24 nt, Artificial Sequence
  Synthetic
agaaaauauacuauaugagugcaa

SEQ ID NO: 441951 - RNA, 18 nt, Artificial Sequence
  Synthetic
uaguauuugauagugcaa

SEQ ID NO: 441952 - RNA, 19 nt, Artificial Sequence
  Synthetic
cuaguauuugauagugcaa

SEQ ID NO: 441953 - RNA, 20 nt, Artificial Sequence
  Synthetic
ccuaguauuugauagugcaa

SEQ ID NO: 441954 - RNA, 21 nt, Artificial Sequence
  Synthetic
accuaguauuugauagugcaa

SEQ ID NO: 441955 - RNA, 22 nt, Artificial Sequence
  Synthetic
gaccuaguauuugauagugcaa

SEQ ID NO: 441956 - RNA, 23 nt, Artificial Sequence
  Synthetic
agaccuaguauuugauagugcaa

SEQ ID NO: 441957 - RNA, 24 nt, Artificial Sequence
  Synthetic
aagaccuaguauuugauagugcaa

SEQ ID NO: 441958 - RNA, 18 nt, Artificial Sequence
  Synthetic
aguuuuaaccacgugcaa

SEQ ID NO: 441959 - RNA, 19 nt, Artificial Sequence
  Synthetic
caguuuuaaccacgugcaa

SEQ ID NO: 441960 - RNA, 20 nt, Artificial Sequence
  Synthetic
ucaguuuuaaccacgugcaa

SEQ ID NO: 441961 - RNA, 21 nt, Artificial Sequence
  Synthetic
aucaguuuuaaccacgugcaa

SEQ ID NO: 441962 - RNA, 22 nt, Artificial Sequence
  Synthetic
uaucaguuuuaaccacgugcaa

SEQ ID NO: 441963 - RNA, 23 nt, Artificial Sequence
  Synthetic
cuaucaguuuuaaccacgugcaa

SEQ ID NO: 441964 - RNA, 24 nt, Artificial Sequence
  Synthetic
ccuaucaguuuuaaccacgugcaa

SEQ ID NO: 441965 - RNA, 18 nt, Artificial Sequence
  Synthetic
acggaauaguacgugcaa

SEQ ID NO: 441966 - RNA, 19 nt, Artificial Sequence
  Synthetic
aacggaauaguacgugcaa

SEQ ID NO: 441967 - RNA, 20 nt, Artificial Sequence
  Synthetic
aaacggaauaguacgugcaa

SEQ ID NO: 441968 - RNA, 21 nt, Artificial Sequence
  Synthetic
caaacggaauaguacgugcaa

SEQ ID NO: 441969 - RNA, 22 nt, Artificial Sequence
  Synthetic
acaaacggaauaguacgugcaa

SEQ ID NO: 441970 - RNA, 23 nt, Artificial Sequence
  Synthetic
gacaaacggaauaguacgugcaa

SEQ ID NO: 441971 - RNA, 24 nt, Artificial Sequence
  Synthetic
ugacaaacggaauaguacgugcaa

SEQ ID NO: 441972 - RNA, 18 nt, Artificial Sequence
  Synthetic
uugagaaaaugggugcaa

SEQ ID NO: 441973 - RNA, 19 nt, Artificial Sequence
  Synthetic
auugagaaaaugggugcaa

SEQ ID NO: 441974 - RNA, 20 nt, Artificial Sequence
  Synthetic
aauugagaaaaugggugcaa

SEQ ID NO: 441975 - RNA, 21 nt, Artificial Sequence
  Synthetic
uaauugagaaaaugggugcaa

SEQ ID NO: 441976 - RNA, 22 nt, Artificial Sequence
  Synthetic
guaauugagaaaaugggugcaa

SEQ ID NO: 441977 - RNA, 23 nt, Artificial Sequence
  Synthetic
aguaauugagaaaaugggugcaa

SEQ ID NO: 441978 - RNA, 24 nt, Artificial Sequence
  Synthetic
aaguaauugagaaaaugggugcaa

SEQ ID NO: 441979 - RNA, 18 nt, Artificial Sequence
  Synthetic
aucuuaaagauggugcaa

SEQ ID NO: 441980 - RNA, 19 nt, Artificial Sequence
  Synthetic
gaucuuaaagauggugcaa

SEQ ID NO: 441981 - RNA, 20 nt, Artificial Sequence
  Synthetic
ugaucuuaaagauggugcaa

SEQ ID NO: 441982 - RNA, 21 nt, Artificial Sequence
  Synthetic
gugaucuuaaagauggugcaa

SEQ ID NO: 441983 - RNA, 22 nt, Artificial Sequence
  Synthetic
agugaucuuaaagauggugcaa

SEQ ID NO: 441984 - RNA, 23 nt, Artificial Sequence
  Synthetic
aagugaucuuaaagauggugcaa

SEQ ID NO: 441985 - RNA, 24 nt, Artificial Sequence
  Synthetic
gaagugaucuuaaagauggugcaa

SEQ ID NO: 441986 - RNA, 18 nt, Artificial Sequence
  Synthetic
uguuagaggauggugcaa

SEQ ID NO: 441987 - RNA, 19 nt, Artificial Sequence
  Synthetic
auguuagaggauggugcaa

SEQ ID NO: 441988 - RNA, 20 nt, Artificial Sequence
  Synthetic
aauguuagaggauggugcaa

SEQ ID NO: 441989 - RNA, 21 nt, Artificial Sequence
  Synthetic
uaauguuagaggauggugcaa

SEQ ID NO: 441990 - RNA, 22 nt, Artificial Sequence
  Synthetic
auaauguuagaggauggugcaa

SEQ ID NO: 441991 - RNA, 23 nt, Artificial Sequence
  Synthetic
aauaauguuagaggauggugcaa

SEQ ID NO: 441992 - RNA, 24 nt, Artificial Sequence
  Synthetic
gaauaauguuagaggauggugcaa

SEQ ID NO: 441993 - RNA, 18 nt, Artificial Sequence
  Synthetic
uuuaaguagcuggugcaa

SEQ ID NO: 441994 - RNA, 19 nt, Artificial Sequence
  Synthetic
auuuaaguagcuggugcaa

SEQ ID NO: 441995 - RNA, 20 nt, Artificial Sequence
  Synthetic
aauuuaaguagcuggugcaa

SEQ ID NO: 441996 - RNA, 21 nt, Artificial Sequence
  Synthetic
uaauuuaaguagcuggugcaa

SEQ ID NO: 441997 - RNA, 22 nt, Artificial Sequence
  Synthetic
auaauuuaaguagcuggugcaa

SEQ ID NO: 441998 - RNA, 23 nt, Artificial Sequence
  Synthetic
gauaauuuaaguagcuggugcaa

SEQ ID NO: 441999 - RNA, 24 nt, Artificial Sequence
  Synthetic
agauaauuuaaguagcuggugcaa

SEQ ID NO: 442000 - RNA, 18 nt, Artificial Sequence
  Synthetic
caacauucaaaugugcaa

SEQ ID NO: 442001 - RNA, 19 nt, Artificial Sequence
  Synthetic
acaacauucaaaugugcaa

SEQ ID NO: 442002 - RNA, 20 nt, Artificial Sequence
  Synthetic
aacaacauucaaaugugcaa

SEQ ID NO: 442003 - RNA, 21 nt, Artificial Sequence
  Synthetic
uaacaacauucaaaugugcaa

SEQ ID NO: 442004 - RNA, 22 nt, Artificial Sequence
  Synthetic
auaacaacauucaaaugugcaa

SEQ ID NO: 442005 - RNA, 23 nt, Artificial Sequence
  Synthetic
aauaacaacauucaaaugugcaa

SEQ ID NO: 442006 - RNA, 24 nt, Artificial Sequence
  Synthetic
aaauaacaacauucaaaugugcaa

SEQ ID NO: 442007 - RNA, 18 nt, Artificial Sequence
  Synthetic
auguggagaaaauugcaa

SEQ ID NO: 442008 - RNA, 19 nt, Artificial Sequence
  Synthetic
gauguggagaaaauugcaa

SEQ ID NO: 442009 - RNA, 20 nt, Artificial Sequence
  Synthetic
ggauguggagaaaauugcaa

SEQ ID NO: 442010 - RNA, 21 nt, Artificial Sequence
  Synthetic
uggauguggagaaaauugcaa

SEQ ID NO: 442011 - RNA, 22 nt, Artificial Sequence
  Synthetic
cuggauguggagaaaauugcaa

SEQ ID NO: 442012 - RNA, 23 nt, Artificial Sequence
  Synthetic
acuggauguggagaaaauugcaa

SEQ ID NO: 442013 - RNA, 24 nt, Artificial Sequence
  Synthetic
cacuggauguggagaaaauugcaa

SEQ ID NO: 442014 - RNA, 18 nt, Artificial Sequence
  Synthetic
aaaauuguacgauugcaa

SEQ ID NO: 442015 - RNA, 19 nt, Artificial Sequence
  Synthetic
uaaaauuguacgauugcaa

SEQ ID NO: 442016 - RNA, 20 nt, Artificial Sequence
  Synthetic
auaaaauuguacgauugcaa

SEQ ID NO: 442017 - RNA, 21 nt, Artificial Sequence
  Synthetic
aauaaaauuguacgauugcaa

SEQ ID NO: 442018 - RNA, 22 nt, Artificial Sequence
  Synthetic
gaauaaaauuguacgauugcaa

SEQ ID NO: 442019 - RNA, 23 nt, Artificial Sequence
  Synthetic
agaauaaaauuguacgauugcaa

SEQ ID NO: 442020 - RNA, 24 nt, Artificial Sequence
  Synthetic
aagaauaaaauuguacgauugcaa

SEQ ID NO: 442021 - RNA, 18 nt, Artificial Sequence
  Synthetic
cagcaacggauauugcaa

SEQ ID NO: 442022 - RNA, 19 nt, Artificial Sequence
  Synthetic
ucagcaacggauauugcaa

SEQ ID NO: 442023 - RNA, 20 nt, Artificial Sequence
  Synthetic
uucagcaacggauauugcaa

SEQ ID NO: 442024 - RNA, 21 nt, Artificial Sequence
  Synthetic
uuucagcaacggauauugcaa

SEQ ID NO: 442025 - RNA, 22 nt, Artificial Sequence
  Synthetic
uuuucagcaacggauauugcaa

SEQ ID NO: 442026 - RNA, 23 nt, Artificial Sequence
  Synthetic
auuuucagcaacggauauugcaa

SEQ ID NO: 442027 - RNA, 24 nt, Artificial Sequence
  Synthetic
aauuuucagcaacggauauugcaa

SEQ ID NO: 442028 - RNA, 18 nt, Artificial Sequence
  Synthetic
cgaagauacuacuugcaa

SEQ ID NO: 442029 - RNA, 19 nt, Artificial Sequence
  Synthetic
acgaagauacuacuugcaa

SEQ ID NO: 442030 - RNA, 20 nt, Artificial Sequence
  Synthetic
aacgaagauacuacuugcaa

SEQ ID NO: 442031 - RNA, 21 nt, Artificial Sequence
  Synthetic
gaacgaagauacuacuugcaa

SEQ ID NO: 442032 - RNA, 22 nt, Artificial Sequence
  Synthetic
ugaacgaagauacuacuugcaa

SEQ ID NO: 442033 - RNA, 23 nt, Artificial Sequence
  Synthetic
cugaacgaagauacuacuugcaa

SEQ ID NO: 442034 - RNA, 24 nt, Artificial Sequence
  Synthetic
ccugaacgaagauacuacuugcaa

SEQ ID NO: 442035 - RNA, 18 nt, Artificial Sequence
  Synthetic
uucagacaacaguugcaa

SEQ ID NO: 442036 - RNA, 19 nt, Artificial Sequence
  Synthetic
auucagacaacaguugcaa

SEQ ID NO: 442037 - RNA, 20 nt, Artificial Sequence
  Synthetic
cauucagacaacaguugcaa

SEQ ID NO: 442038 - RNA, 21 nt, Artificial Sequence
  Synthetic
ccauucagacaacaguugcaa

SEQ ID NO: 442039 - RNA, 22 nt, Artificial Sequence
  Synthetic
accauucagacaacaguugcaa

SEQ ID NO: 442040 - RNA, 23 nt, Artificial Sequence
  Synthetic
gaccauucagacaacaguugcaa

SEQ ID NO: 442041 - RNA, 24 nt, Artificial Sequence
  Synthetic
agaccauucagacaacaguugcaa

SEQ ID NO: 442042 - RNA, 18 nt, Artificial Sequence
  Synthetic
gguuggaaguaguugcaa

SEQ ID NO: 442043 - RNA, 19 nt, Artificial Sequence
  Synthetic
agguuggaaguaguugcaa

SEQ ID NO: 442044 - RNA, 20 nt, Artificial Sequence
  Synthetic
cagguuggaaguaguugcaa

SEQ ID NO: 442045 - RNA, 21 nt, Artificial Sequence
  Synthetic
acagguuggaaguaguugcaa

SEQ ID NO: 442046 - RNA, 22 nt, Artificial Sequence
  Synthetic
aacagguuggaaguaguugcaa

SEQ ID NO: 442047 - RNA, 23 nt, Artificial Sequence
  Synthetic
aaacagguuggaaguaguugcaa

SEQ ID NO: 442048 - RNA, 24 nt, Artificial Sequence
  Synthetic
aaaacagguuggaaguaguugcaa

SEQ ID NO: 442049 - RNA, 18 nt, Artificial Sequence
  Synthetic
uauauuguuguguugcaa

SEQ ID NO: 442050 - RNA, 19 nt, Artificial Sequence
  Synthetic
uuauauuguuguguugcaa

SEQ ID NO: 442051 - RNA, 20 nt, Artificial Sequence
  Synthetic
uuuauauuguuguguugcaa

SEQ ID NO: 442052 - RNA, 21 nt, Artificial Sequence
  Synthetic
cuuuauauuguuguguugcaa

SEQ ID NO: 442053 - RNA, 22 nt, Artificial Sequence
  Synthetic
acuuuauauuguuguguugcaa

SEQ ID NO: 442054 - RNA, 23 nt, Artificial Sequence
  Synthetic
cacuuuauauuguuguguugcaa

SEQ ID NO: 442055 - RNA, 24 nt, Artificial Sequence
  Synthetic
acacuuuauauuguuguguugcaa

SEQ ID NO: 442056 - RNA, 18 nt, Artificial Sequence
  Synthetic
cuggacucucauuugcaa

SEQ ID NO: 442057 - RNA, 19 nt, Artificial Sequence
  Synthetic
acuggacucucauuugcaa

SEQ ID NO: 442058 - RNA, 20 nt, Artificial Sequence
  Synthetic
cacuggacucucauuugcaa

SEQ ID NO: 442059 - RNA, 21 nt, Artificial Sequence
  Synthetic
gcacuggacucucauuugcaa

SEQ ID NO: 442060 - RNA, 22 nt, Artificial Sequence
  Synthetic
agcacuggacucucauuugcaa

SEQ ID NO: 442061 - RNA, 23 nt, Artificial Sequence
  Synthetic
uagcacuggacucucauuugcaa

SEQ ID NO: 442062 - RNA, 24 nt, Artificial Sequence
  Synthetic
uuagcacuggacucucauuugcaa

SEQ ID NO: 442063 - RNA, 18 nt, Artificial Sequence
  Synthetic
uauaguuaagcuuugcaa

SEQ ID NO: 442064 - RNA, 19 nt, Artificial Sequence
  Synthetic
cuauaguuaagcuuugcaa

SEQ ID NO: 442065 - RNA, 20 nt, Artificial Sequence
  Synthetic
ucuauaguuaagcuuugcaa

SEQ ID NO: 442066 - RNA, 21 nt, Artificial Sequence
  Synthetic
aucuauaguuaagcuuugcaa

SEQ ID NO: 442067 - RNA, 22 nt, Artificial Sequence
  Synthetic
uaucuauaguuaagcuuugcaa

SEQ ID NO: 442068 - RNA, 23 nt, Artificial Sequence
  Synthetic
cuaucuauaguuaagcuuugcaa

SEQ ID NO: 442069 - RNA, 24 nt, Artificial Sequence
  Synthetic
ccuaucuauaguuaagcuuugcaa

SEQ ID NO: 442070 - RNA, 18 nt, Artificial Sequence
  Synthetic
cguuucugugcuuugcaa

SEQ ID NO: 442071 - RNA, 19 nt, Artificial Sequence
  Synthetic
ccguuucugugcuuugcaa

SEQ ID NO: 442072 - RNA, 20 nt, Artificial Sequence
  Synthetic
gccguuucugugcuuugcaa

SEQ ID NO: 442073 - RNA, 21 nt, Artificial Sequence
  Synthetic
ugccguuucugugcuuugcaa

SEQ ID NO: 442074 - RNA, 22 nt, Artificial Sequence
  Synthetic
augccguuucugugcuuugcaa

SEQ ID NO: 442075 - RNA, 23 nt, Artificial Sequence
  Synthetic
caugccguuucugugcuuugcaa

SEQ ID NO: 442076 - RNA, 24 nt, Artificial Sequence
  Synthetic
gcaugccguuucugugcuuugcaa

SEQ ID NO: 442077 - RNA, 18 nt, Artificial Sequence
  Synthetic
cucuuaaauuguuugcaa

SEQ ID NO: 442078 - RNA, 19 nt, Artificial Sequence
  Synthetic
gcucuuaaauuguuugcaa

SEQ ID NO: 442079 - RNA, 20 nt, Artificial Sequence
  Synthetic
agcucuuaaauuguuugcaa

SEQ ID NO: 442080 - RNA, 21 nt, Artificial Sequence
  Synthetic
gagcucuuaaauuguuugcaa

SEQ ID NO: 442081 - RNA, 22 nt, Artificial Sequence
  Synthetic
agagcucuuaaauuguuugcaa

SEQ ID NO: 442082 - RNA, 23 nt, Artificial Sequence
  Synthetic
gagagcucuuaaauuguuugcaa

SEQ ID NO: 442083 - RNA, 24 nt, Artificial Sequence
  Synthetic
ggagagcucuuaaauuguuugcaa

SEQ ID NO: 442084 - RNA, 18 nt, Artificial Sequence
  Synthetic
aauaucaguuguuugcaa

SEQ ID NO: 442085 - RNA, 19 nt, Artificial Sequence
  Synthetic
gaauaucaguuguuugcaa

SEQ ID NO: 442086 - RNA, 20 nt, Artificial Sequence
  Synthetic
ugaauaucaguuguuugcaa

SEQ ID NO: 442087 - RNA, 21 nt, Artificial Sequence
  Synthetic
augaauaucaguuguuugcaa

SEQ ID NO: 442088 - RNA, 22 nt, Artificial Sequence
  Synthetic
uaugaauaucaguuguuugcaa

SEQ ID NO: 442089 - RNA, 23 nt, Artificial Sequence
  Synthetic
auaugaauaucaguuguuugcaa

SEQ ID NO: 442090 - RNA, 24 nt, Artificial Sequence
  Synthetic
aauaugaauaucaguuguuugcaa

SEQ ID NO: 442091 - RNA, 18 nt, Artificial Sequence
  Synthetic
auuuuauucauuuugcaa

SEQ ID NO: 442092 - RNA, 19 nt, Artificial Sequence
  Synthetic
cauuuuauucauuuugcaa

SEQ ID NO: 442093 - RNA, 20 nt, Artificial Sequence
  Synthetic
ucauuuuauucauuuugcaa

SEQ ID NO: 442094 - RNA, 21 nt, Artificial Sequence
  Synthetic
aucauuuuauucauuuugcaa

SEQ ID NO: 442095 - RNA, 22 nt, Artificial Sequence
  Synthetic
uaucauuuuauucauuuugcaa

SEQ ID NO: 442096 - RNA, 23 nt, Artificial Sequence
  Synthetic
cuaucauuuuauucauuuugcaa

SEQ ID NO: 442097 - RNA, 24 nt, Artificial Sequence
  Synthetic
acuaucauuuuauucauuuugcaa

SEQ ID NO: 442098 - RNA, 18 nt, Artificial Sequence
  Synthetic
uaggagcaaaaaaaucaa

SEQ ID NO: 442099 - RNA, 19 nt, Artificial Sequence
  Synthetic
uuaggagcaaaaaaaucaa

SEQ ID NO: 442100 - RNA, 20 nt, Artificial Sequence
  Synthetic
uuuaggagcaaaaaaaucaa

SEQ ID NO: 442101 - RNA, 21 nt, Artificial Sequence
  Synthetic
auuuaggagcaaaaaaaucaa

SEQ ID NO: 442102 - RNA, 22 nt, Artificial Sequence
  Synthetic
uauuuaggagcaaaaaaaucaa

SEQ ID NO: 442103 - RNA, 23 nt, Artificial Sequence
  Synthetic
auauuuaggagcaaaaaaaucaa

SEQ ID NO: 442104 - RNA, 24 nt, Artificial Sequence
  Synthetic
aauauuuaggagcaaaaaaaucaa

SEQ ID NO: 442105 - RNA, 18 nt, Artificial Sequence
  Synthetic
caaugccaucaaaaucaa

SEQ ID NO: 442106 - RNA, 19 nt, Artificial Sequence
  Synthetic
ccaaugccaucaaaaucaa

SEQ ID NO: 442107 - RNA, 20 nt, Artificial Sequence
  Synthetic
accaaugccaucaaaaucaa

SEQ ID NO: 442108 - RNA, 21 nt, Artificial Sequence
  Synthetic
gaccaaugccaucaaaaucaa

SEQ ID NO: 442109 - RNA, 22 nt, Artificial Sequence
  Synthetic
agaccaaugccaucaaaaucaa

SEQ ID NO: 442110 - RNA, 23 nt, Artificial Sequence
  Synthetic
uagaccaaugccaucaaaaucaa

SEQ ID NO: 442111 - RNA, 24 nt, Artificial Sequence
  Synthetic
cuagaccaaugccaucaaaaucaa

SEQ ID NO: 442112 - RNA, 18 nt, Artificial Sequence
  Synthetic
aaaagagaucaaaaucaa

SEQ ID NO: 442113 - RNA, 19 nt, Artificial Sequence
  Synthetic
caaaagagaucaaaaucaa

SEQ ID NO: 442114 - RNA, 20 nt, Artificial Sequence
  Synthetic
acaaaagagaucaaaaucaa

SEQ ID NO: 442115 - RNA, 21 nt, Artificial Sequence
  Synthetic
uacaaaagagaucaaaaucaa

SEQ ID NO: 442116 - RNA, 22 nt, Artificial Sequence
  Synthetic
auacaaaagagaucaaaaucaa

SEQ ID NO: 442117 - RNA, 23 nt, Artificial Sequence
  Synthetic
cauacaaaagagaucaaaaucaa

SEQ ID NO: 442118 - RNA, 24 nt, Artificial Sequence
  Synthetic
ccauacaaaagagaucaaaaucaa

SEQ ID NO: 442119 - RNA, 18 nt, Artificial Sequence
  Synthetic
uuugagucucaaaaucaa

SEQ ID NO: 442120 - RNA, 19 nt, Artificial Sequence
  Synthetic
uuuugagucucaaaaucaa

SEQ ID NO: 442121 - RNA, 20 nt, Artificial Sequence
  Synthetic
cuuuugagucucaaaaucaa

SEQ ID NO: 442122 - RNA, 21 nt, Artificial Sequence
  Synthetic
acuuuugagucucaaaaucaa

SEQ ID NO: 442123 - RNA, 22 nt, Artificial Sequence
  Synthetic
uacuuuugagucucaaaaucaa

SEQ ID NO: 442124 - RNA, 23 nt, Artificial Sequence
  Synthetic
guacuuuugagucucaaaaucaa

SEQ ID NO: 442125 - RNA, 24 nt, Artificial Sequence
  Synthetic
gguacuuuugagucucaaaaucaa

SEQ ID NO: 442126 - RNA, 18 nt, Artificial Sequence
  Synthetic
uugaaauuguaaaaucaa

SEQ ID NO: 442127 - RNA, 19 nt, Artificial Sequence
  Synthetic
auugaaauuguaaaaucaa

SEQ ID NO: 442128 - RNA, 20 nt, Artificial Sequence
  Synthetic
uauugaaauuguaaaaucaa

SEQ ID NO: 442129 - RNA, 21 nt, Artificial Sequence
  Synthetic
auauugaaauuguaaaaucaa

SEQ ID NO: 442130 - RNA, 22 nt, Artificial Sequence
  Synthetic
aauauugaaauuguaaaaucaa

SEQ ID NO: 442131 - RNA, 23 nt, Artificial Sequence
  Synthetic
gaauauugaaauuguaaaaucaa

SEQ ID NO: 442132 - RNA, 24 nt, Artificial Sequence
  Synthetic
ugaauauugaaauuguaaaaucaa

SEQ ID NO: 442133 - RNA, 18 nt, Artificial Sequence
  Synthetic
uuuaccagaacaaaucaa

SEQ ID NO: 442134 - RNA, 19 nt, Artificial Sequence
  Synthetic
guuuaccagaacaaaucaa

SEQ ID NO: 442135 - RNA, 20 nt, Artificial Sequence
  Synthetic
aguuuaccagaacaaaucaa

SEQ ID NO: 442136 - RNA, 21 nt, Artificial Sequence
  Synthetic
aaguuuaccagaacaaaucaa

SEQ ID NO: 442137 - RNA, 22 nt, Artificial Sequence
  Synthetic
aaaguuuaccagaacaaaucaa

SEQ ID NO: 442138 - RNA, 23 nt, Artificial Sequence
  Synthetic
caaaguuuaccagaacaaaucaa

SEQ ID NO: 442139 - RNA, 24 nt, Artificial Sequence
  Synthetic
ucaaaguuuaccagaacaaaucaa

SEQ ID NO: 442140 - RNA, 18 nt, Artificial Sequence
  Synthetic
guuucucacacaaaucaa

SEQ ID NO: 442141 - RNA, 19 nt, Artificial Sequence
  Synthetic
aguuucucacacaaaucaa

SEQ ID NO: 442142 - RNA, 20 nt, Artificial Sequence
  Synthetic
uaguuucucacacaaaucaa

SEQ ID NO: 442143 - RNA, 21 nt, Artificial Sequence
  Synthetic
guaguuucucacacaaaucaa

SEQ ID NO: 442144 - RNA, 22 nt, Artificial Sequence
  Synthetic
aguaguuucucacacaaaucaa

SEQ ID NO: 442145 - RNA, 23 nt, Artificial Sequence
  Synthetic
aaguaguuucucacacaaaucaa

SEQ ID NO: 442146 - RNA, 24 nt, Artificial Sequence
  Synthetic
uaaguaguuucucacacaaaucaa

SEQ ID NO: 442147 - RNA, 18 nt, Artificial Sequence
  Synthetic
acauucauggcaaaucaa

SEQ ID NO: 442148 - RNA, 19 nt, Artificial Sequence
  Synthetic
gacauucauggcaaaucaa

SEQ ID NO: 442149 - RNA, 20 nt, Artificial Sequence
  Synthetic
agacauucauggcaaaucaa

SEQ ID NO: 442150 - RNA, 21 nt, Artificial Sequence
  Synthetic
gagacauucauggcaaaucaa

SEQ ID NO: 442151 - RNA, 22 nt, Artificial Sequence
  Synthetic
agagacauucauggcaaaucaa

SEQ ID NO: 442152 - RNA, 23 nt, Artificial Sequence
  Synthetic
aagagacauucauggcaaaucaa

SEQ ID NO: 442153 - RNA, 24 nt, Artificial Sequence
  Synthetic
gaagagacauucauggcaaaucaa

SEQ ID NO: 442154 - RNA, 18 nt, Artificial Sequence
  Synthetic
acuauauaccuaaaucaa

SEQ ID NO: 442155 - RNA, 19 nt, Artificial Sequence
  Synthetic
gacuauauaccuaaaucaa

SEQ ID NO: 442156 - RNA, 20 nt, Artificial Sequence
  Synthetic
agacuauauaccuaaaucaa

SEQ ID NO: 442157 - RNA, 21 nt, Artificial Sequence
  Synthetic
aagacuauauaccuaaaucaa

SEQ ID NO: 442158 - RNA, 22 nt, Artificial Sequence
  Synthetic
aaagacuauauaccuaaaucaa

SEQ ID NO: 442159 - RNA, 23 nt, Artificial Sequence
  Synthetic
aaaagacuauauaccuaaaucaa

SEQ ID NO: 442160 - RNA, 24 nt, Artificial Sequence
  Synthetic
aaaaagacuauauaccuaaaucaa

SEQ ID NO: 442161 - RNA, 18 nt, Artificial Sequence
  Synthetic
gaggguuuaaacaaucaa

SEQ ID NO: 442162 - RNA, 19 nt, Artificial Sequence
  Synthetic
ggaggguuuaaacaaucaa

SEQ ID NO: 442163 - RNA, 20 nt, Artificial Sequence
  Synthetic
gggaggguuuaaacaaucaa

SEQ ID NO: 442164 - RNA, 21 nt, Artificial Sequence
  Synthetic
agggaggguuuaaacaaucaa

SEQ ID NO: 442165 - RNA, 22 nt, Artificial Sequence
  Synthetic
cagggaggguuuaaacaaucaa

SEQ ID NO: 442166 - RNA, 23 nt, Artificial Sequence
  Synthetic
acagggaggguuuaaacaaucaa

SEQ ID NO: 442167 - RNA, 24 nt, Artificial Sequence
  Synthetic
aacagggaggguuuaaacaaucaa

SEQ ID NO: 442168 - RNA, 18 nt, Artificial Sequence
  Synthetic
uaucagcaagccaaucaa

SEQ ID NO: 442169 - RNA, 19 nt, Artificial Sequence
  Synthetic
auaucagcaagccaaucaa

SEQ ID NO: 442170 - RNA, 20 nt, Artificial Sequence
  Synthetic
aauaucagcaagccaaucaa

SEQ ID NO: 442171 - RNA, 21 nt, Artificial Sequence
  Synthetic
uaauaucagcaagccaaucaa

SEQ ID NO: 442172 - RNA, 22 nt, Artificial Sequence
  Synthetic
cuaauaucagcaagccaaucaa

SEQ ID NO: 442173 - RNA, 23 nt, Artificial Sequence
  Synthetic
ucuaauaucagcaagccaaucaa

SEQ ID NO: 442174 - RNA, 24 nt, Artificial Sequence
  Synthetic
uucuaauaucagcaagccaaucaa

SEQ ID NO: 442175 - RNA, 18 nt, Artificial Sequence
  Synthetic
acaacacucuccaaucaa

SEQ ID NO: 442176 - RNA, 19 nt, Artificial Sequence
  Synthetic
gacaacacucuccaaucaa

SEQ ID NO: 442177 - RNA, 20 nt, Artificial Sequence
  Synthetic
ggacaacacucuccaaucaa

SEQ ID NO: 442178 - RNA, 21 nt, Artificial Sequence
  Synthetic
uggacaacacucuccaaucaa

SEQ ID NO: 442179 - RNA, 22 nt, Artificial Sequence
  Synthetic
cuggacaacacucuccaaucaa

SEQ ID NO: 442180 - RNA, 23 nt, Artificial Sequence
  Synthetic
ccuggacaacacucuccaaucaa

SEQ ID NO: 442181 - RNA, 24 nt, Artificial Sequence
  Synthetic
uccuggacaacacucuccaaucaa

SEQ ID NO: 442182 - RNA, 18 nt, Artificial Sequence
  Synthetic
uaaaacuauuccaaucaa

SEQ ID NO: 442183 - RNA, 19 nt, Artificial Sequence
  Synthetic
cuaaaacuauuccaaucaa

SEQ ID NO: 442184 - RNA, 20 nt, Artificial Sequence
  Synthetic
ucuaaaacuauuccaaucaa

SEQ ID NO: 442185 - RNA, 21 nt, Artificial Sequence
  Synthetic
uucuaaaacuauuccaaucaa

SEQ ID NO: 442186 - RNA, 22 nt, Artificial Sequence
  Synthetic
cuucuaaaacuauuccaaucaa

SEQ ID NO: 442187 - RNA, 23 nt, Artificial Sequence
  Synthetic
ccuucuaaaacuauuccaaucaa

SEQ ID NO: 442188 - RNA, 24 nt, Artificial Sequence
  Synthetic
uccuucuaaaacuauuccaaucaa

SEQ ID NO: 442189 - RNA, 21 nt, Artificial Sequence
  Synthetic
uucugaaacuauuccaaucaa

SEQ ID NO: 442190 - RNA, 22 nt, Artificial Sequence
  Synthetic
cuucugaaacuauuccaaucaa

SEQ ID NO: 442191 - RNA, 23 nt, Artificial Sequence
  Synthetic
ccuucugaaacuauuccaaucaa

SEQ ID NO: 442192 - RNA, 24 nt, Artificial Sequence
  Synthetic
uccuucugaaacuauuccaaucaa

SEQ ID NO: 442193 - RNA, 18 nt, Artificial Sequence
  Synthetic
guugcacauaagaaucaa

SEQ ID NO: 442194 - RNA, 19 nt, Artificial Sequence
  Synthetic
aguugcacauaagaaucaa

SEQ ID NO: 442195 - RNA, 20 nt, Artificial Sequence
  Synthetic
caguugcacauaagaaucaa

SEQ ID NO: 442196 - RNA, 21 nt, Artificial Sequence
  Synthetic
acaguugcacauaagaaucaa

SEQ ID NO: 442197 - RNA, 22 nt, Artificial Sequence
  Synthetic
gacaguugcacauaagaaucaa

SEQ ID NO: 442198 - RNA, 23 nt, Artificial Sequence
  Synthetic
agacaguugcacauaagaaucaa

SEQ ID NO: 442199 - RNA, 24 nt, Artificial Sequence
  Synthetic
aagacaguugcacauaagaaucaa

SEQ ID NO: 442200 - RNA, 18 nt, Artificial Sequence
  Synthetic
auugauauggagaaucaa

SEQ ID NO: 442201 - RNA, 19 nt, Artificial Sequence
  Synthetic
gauugauauggagaaucaa

SEQ ID NO: 442202 - RNA, 20 nt, Artificial Sequence
  Synthetic
agauugauauggagaaucaa

SEQ ID NO: 442203 - RNA, 21 nt, Artificial Sequence
  Synthetic
aagauugauauggagaaucaa

SEQ ID NO: 442204 - RNA, 22 nt, Artificial Sequence
  Synthetic
aaagauugauauggagaaucaa

SEQ ID NO: 442205 - RNA, 23 nt, Artificial Sequence
  Synthetic
aaaagauugauauggagaaucaa

SEQ ID NO: 442206 - RNA, 24 nt, Artificial Sequence
  Synthetic
caaaagauugauauggagaaucaa

SEQ ID NO: 442207 - RNA, 18 nt, Artificial Sequence
  Synthetic
auacaaaccuagaaucaa

SEQ ID NO: 442208 - RNA, 19 nt, Artificial Sequence
  Synthetic
aauacaaaccuagaaucaa

SEQ ID NO: 442209 - RNA, 20 nt, Artificial Sequence
  Synthetic
aaauacaaaccuagaaucaa

SEQ ID NO: 442210 - RNA, 21 nt, Artificial Sequence
  Synthetic
aaaauacaaaccuagaaucaa

SEQ ID NO: 442211 - RNA, 22 nt, Artificial Sequence
  Synthetic
gaaaauacaaaccuagaaucaa

SEQ ID NO: 442212 - RNA, 23 nt, Artificial Sequence
  Synthetic
agaaaauacaaaccuagaaucaa

SEQ ID NO: 442213 - RNA, 24 nt, Artificial Sequence
  Synthetic
aagaaaauacaaaccuagaaucaa

SEQ ID NO: 442214 - RNA, 18 nt, Artificial Sequence
  Synthetic
cacaagcuuaggaaucaa

SEQ ID NO: 442215 - RNA, 19 nt, Artificial Sequence
  Synthetic
acacaagcuuaggaaucaa

SEQ ID NO: 442216 - RNA, 20 nt, Artificial Sequence
  Synthetic
aacacaagcuuaggaaucaa

SEQ ID NO: 442217 - RNA, 21 nt, Artificial Sequence
  Synthetic
uaacacaagcuuaggaaucaa

SEQ ID NO: 442218 - RNA, 22 nt, Artificial Sequence
  Synthetic
auaacacaagcuuaggaaucaa

SEQ ID NO: 442219 - RNA, 23 nt, Artificial Sequence
  Synthetic
aauaacacaagcuuaggaaucaa

SEQ ID NO: 442220 - RNA, 24 nt, Artificial Sequence
  Synthetic
uaauaacacaagcuuaggaaucaa

SEQ ID NO: 442221 - RNA, 18 nt, Artificial Sequence
  Synthetic
ugguaaccugggaaucaa

SEQ ID NO: 442222 - RNA, 19 nt, Artificial Sequence
  Synthetic
gugguaaccugggaaucaa

SEQ ID NO: 442223 - RNA, 20 nt, Artificial Sequence
  Synthetic
agugguaaccugggaaucaa

SEQ ID NO: 442224 - RNA, 21 nt, Artificial Sequence
  Synthetic
cagugguaaccugggaaucaa

SEQ ID NO: 442225 - RNA, 22 nt, Artificial Sequence
  Synthetic
ucagugguaaccugggaaucaa

SEQ ID NO: 442226 - RNA, 23 nt, Artificial Sequence
  Synthetic
aucagugguaaccugggaaucaa

SEQ ID NO: 442227 - RNA, 24 nt, Artificial Sequence
  Synthetic
caucagugguaaccugggaaucaa

SEQ ID NO: 442228 - RNA, 18 nt, Artificial Sequence
  Synthetic
aaaaagcacuggaaucaa

SEQ ID NO: 442229 - RNA, 19 nt, Artificial Sequence
  Synthetic
aaaaaagcacuggaaucaa

SEQ ID NO: 442230 - RNA, 20 nt, Artificial Sequence
  Synthetic
aaaaaaagcacuggaaucaa

SEQ ID NO: 442231 - RNA, 21 nt, Artificial Sequence
  Synthetic
aaaaaaaagcacuggaaucaa

SEQ ID NO: 442232 - RNA, 22 nt, Artificial Sequence
  Synthetic
aaaaaaaaagcacuggaaucaa

SEQ ID NO: 442233 - RNA, 23 nt, Artificial Sequence
  Synthetic
uaaaaaaaaagcacuggaaucaa

SEQ ID NO: 442234 - RNA, 24 nt, Artificial Sequence
  Synthetic
guaaaaaaaaagcacuggaaucaa

SEQ ID NO: 442235 - RNA, 18 nt, Artificial Sequence
  Synthetic
aagcagguuuggaaucaa

SEQ ID NO: 442236 - RNA, 19 nt, Artificial Sequence
  Synthetic
caagcagguuuggaaucaa

SEQ ID NO: 442237 - RNA, 20 nt, Artificial Sequence
  Synthetic
acaagcagguuuggaaucaa

SEQ ID NO: 442238 - RNA, 21 nt, Artificial Sequence
  Synthetic
aacaagcagguuuggaaucaa

SEQ ID NO: 442239 - RNA, 22 nt, Artificial Sequence
  Synthetic
gaacaagcagguuuggaaucaa

SEQ ID NO: 442240 - RNA, 23 nt, Artificial Sequence
  Synthetic
ugaacaagcagguuuggaaucaa

SEQ ID NO: 442241 - RNA, 24 nt, Artificial Sequence
  Synthetic
gugaacaagcagguuuggaaucaa

SEQ ID NO: 442242 - RNA, 18 nt, Artificial Sequence
  Synthetic
uaccagaaauugaaucaa

SEQ ID NO: 442243 - RNA, 19 nt, Artificial Sequence
  Synthetic
cuaccagaaauugaaucaa

SEQ ID NO: 442244 - RNA, 20 nt, Artificial Sequence
  Synthetic
acuaccagaaauugaaucaa

SEQ ID NO: 442245 - RNA, 21 nt, Artificial Sequence
  Synthetic
aacuaccagaaauugaaucaa

SEQ ID NO: 442246 - RNA, 22 nt, Artificial Sequence
  Synthetic
aaacuaccagaaauugaaucaa

SEQ ID NO: 442247 - RNA, 23 nt, Artificial Sequence
  Synthetic
gaaacuaccagaaauugaaucaa

SEQ ID NO: 442248 - RNA, 24 nt, Artificial Sequence
  Synthetic
agaaacuaccagaaauugaaucaa

SEQ ID NO: 442249 - RNA, 18 nt, Artificial Sequence
  Synthetic
ucugugcauuugaaucaa

SEQ ID NO: 442250 - RNA, 19 nt, Artificial Sequence
  Synthetic
gucugugcauuugaaucaa

SEQ ID NO: 442251 - RNA, 20 nt, Artificial Sequence
  Synthetic
ugucugugcauuugaaucaa

SEQ ID NO: 442252 - RNA, 21 nt, Artificial Sequence
  Synthetic
uugucugugcauuugaaucaa

SEQ ID NO: 442253 - RNA, 22 nt, Artificial Sequence
  Synthetic
cuugucugugcauuugaaucaa

SEQ ID NO: 442254 - RNA, 23 nt, Artificial Sequence
  Synthetic
ccuugucugugcauuugaaucaa

SEQ ID NO: 442255 - RNA, 24 nt, Artificial Sequence
  Synthetic
accuugucugugcauuugaaucaa

SEQ ID NO: 442256 - RNA, 18 nt, Artificial Sequence
  Synthetic
uaucauaagaauaaucaa

SEQ ID NO: 442257 - RNA, 19 nt, Artificial Sequence
  Synthetic
guaucauaagaauaaucaa

SEQ ID NO: 442258 - RNA, 20 nt, Artificial Sequence
  Synthetic
uguaucauaagaauaaucaa

SEQ ID NO: 442259 - RNA, 21 nt, Artificial Sequence
  Synthetic
uuguaucauaagaauaaucaa

SEQ ID NO: 442260 - RNA, 22 nt, Artificial Sequence
  Synthetic
cuuguaucauaagaauaaucaa

SEQ ID NO: 442261 - RNA, 23 nt, Artificial Sequence
  Synthetic
gcuuguaucauaagaauaaucaa

SEQ ID NO: 442262 - RNA, 24 nt, Artificial Sequence
  Synthetic
ggcuuguaucauaagaauaaucaa

SEQ ID NO: 442263 - RNA, 18 nt, Artificial Sequence
  Synthetic
uuaagacuuucuaaucaa

SEQ ID NO: 442264 - RNA, 19 nt, Artificial Sequence
  Synthetic
uuuaagacuuucuaaucaa

SEQ ID NO: 442265 - RNA, 20 nt, Artificial Sequence
  Synthetic
guuuaagacuuucuaaucaa

SEQ ID NO: 442266 - RNA, 21 nt, Artificial Sequence
  Synthetic
uguuuaagacuuucuaaucaa

SEQ ID NO: 442267 - RNA, 22 nt, Artificial Sequence
  Synthetic
auguuuaagacuuucuaaucaa

SEQ ID NO: 442268 - RNA, 23 nt, Artificial Sequence
  Synthetic
aauguuuaagacuuucuaaucaa

SEQ ID NO: 442269 - RNA, 24 nt, Artificial Sequence
  Synthetic
aaauguuuaagacuuucuaaucaa

SEQ ID NO: 442270 - RNA, 18 nt, Artificial Sequence
  Synthetic
gauaggcaggguaaucaa

SEQ ID NO: 442271 - RNA, 19 nt, Artificial Sequence
  Synthetic
ggauaggcaggguaaucaa

SEQ ID NO: 442272 - RNA, 20 nt, Artificial Sequence
  Synthetic
gggauaggcaggguaaucaa

SEQ ID NO: 442273 - RNA, 21 nt, Artificial Sequence
  Synthetic
agggauaggcaggguaaucaa

SEQ ID NO: 442274 - RNA, 22 nt, Artificial Sequence
  Synthetic
gagggauaggcaggguaaucaa

SEQ ID NO: 442275 - RNA, 23 nt, Artificial Sequence
  Synthetic
ggagggauaggcaggguaaucaa

SEQ ID NO: 442276 - RNA, 24 nt, Artificial Sequence
  Synthetic
aggagggauaggcaggguaaucaa

SEQ ID NO: 442277 - RNA, 18 nt, Artificial Sequence
  Synthetic
aaguacagauuuaaucaa

SEQ ID NO: 442278 - RNA, 19 nt, Artificial Sequence
  Synthetic
aaaguacagauuuaaucaa

SEQ ID NO: 442279 - RNA, 20 nt, Artificial Sequence
  Synthetic
uaaaguacagauuuaaucaa

SEQ ID NO: 442280 - RNA, 21 nt, Artificial Sequence
  Synthetic
uuaaaguacagauuuaaucaa

SEQ ID NO: 442281 - RNA, 22 nt, Artificial Sequence
  Synthetic
guuaaaguacagauuuaaucaa

SEQ ID NO: 442282 - RNA, 23 nt, Artificial Sequence
  Synthetic
uguuaaaguacagauuuaaucaa

SEQ ID NO: 442283 - RNA, 24 nt, Artificial Sequence
  Synthetic
uuguuaaaguacagauuuaaucaa

SEQ ID NO: 442284 - RNA, 18 nt, Artificial Sequence
  Synthetic
cuuucuucagaacaucaa

SEQ ID NO: 442285 - RNA, 19 nt, Artificial Sequence
  Synthetic
gcuuucuucagaacaucaa

SEQ ID NO: 442286 - RNA, 20 nt, Artificial Sequence
  Synthetic
ggcuuucuucagaacaucaa

SEQ ID NO: 442287 - RNA, 21 nt, Artificial Sequence
  Synthetic
uggcuuucuucagaacaucaa

SEQ ID NO: 442288 - RNA, 22 nt, Artificial Sequence
  Synthetic
cuggcuuucuucagaacaucaa

SEQ ID NO: 442289 - RNA, 23 nt, Artificial Sequence
  Synthetic
gcuggcuuucuucagaacaucaa

SEQ ID NO: 442290 - RNA, 24 nt, Artificial Sequence
  Synthetic
ggcuggcuuucuucagaacaucaa

SEQ ID NO: 442291 - RNA, 18 nt, Artificial Sequence
  Synthetic
uaaaacuucccacaucaa

SEQ ID NO: 442292 - RNA, 19 nt, Artificial Sequence
  Synthetic
uuaaaacuucccacaucaa

SEQ ID NO: 442293 - RNA, 20 nt, Artificial Sequence
  Synthetic
auuaaaacuucccacaucaa

SEQ ID NO: 442294 - RNA, 21 nt, Artificial Sequence
  Synthetic
uauuaaaacuucccacaucaa

SEQ ID NO: 442295 - RNA, 22 nt, Artificial Sequence
  Synthetic
guauuaaaacuucccacaucaa

SEQ ID NO: 442296 - RNA, 23 nt, Artificial Sequence
  Synthetic
uguauuaaaacuucccacaucaa

SEQ ID NO: 442297 - RNA, 24 nt, Artificial Sequence
  Synthetic
uuguauuaaaacuucccacaucaa

SEQ ID NO: 442298 - RNA, 18 nt, Artificial Sequence
  Synthetic
uaaaaguucucacaucaa

SEQ ID NO: 442299 - RNA, 19 nt, Artificial Sequence
  Synthetic
uuaaaaguucucacaucaa

SEQ ID NO: 442300 - RNA, 20 nt, Artificial Sequence
  Synthetic
uuuaaaaguucucacaucaa

SEQ ID NO: 442301 - RNA, 21 nt, Artificial Sequence
  Synthetic
auuuaaaaguucucacaucaa

SEQ ID NO: 442302 - RNA, 22 nt, Artificial Sequence
  Synthetic
uauuuaaaaguucucacaucaa

SEQ ID NO: 442303 - RNA, 23 nt, Artificial Sequence
  Synthetic
guauuuaaaaguucucacaucaa

SEQ ID NO: 442304 - RNA, 24 nt, Artificial Sequence
  Synthetic
aguauuuaaaaguucucacaucaa

SEQ ID NO: 442305 - RNA, 18 nt, Artificial Sequence
  Synthetic
gguuggcauaaccaucaa

SEQ ID NO: 442306 - RNA, 19 nt, Artificial Sequence
  Synthetic
agguuggcauaaccaucaa

SEQ ID NO: 442307 - RNA, 20 nt, Artificial Sequence
  Synthetic
gagguuggcauaaccaucaa

SEQ ID NO: 442308 - RNA, 21 nt, Artificial Sequence
  Synthetic
agagguuggcauaaccaucaa

SEQ ID NO: 442309 - RNA, 22 nt, Artificial Sequence
  Synthetic
cagagguuggcauaaccaucaa

SEQ ID NO: 442310 - RNA, 23 nt, Artificial Sequence
  Synthetic
acagagguuggcauaaccaucaa

SEQ ID NO: 442311 - RNA, 24 nt, Artificial Sequence
  Synthetic
uacagagguuggcauaaccaucaa

SEQ ID NO: 442312 - RNA, 18 nt, Artificial Sequence
  Synthetic
uuaaauuuguaccaucaa

SEQ ID NO: 442313 - RNA, 19 nt, Artificial Sequence
  Synthetic
uuuaaauuuguaccaucaa

SEQ ID NO: 442314 - RNA, 20 nt, Artificial Sequence
  Synthetic
uuuuaaauuuguaccaucaa

SEQ ID NO: 442315 - RNA, 21 nt, Artificial Sequence
  Synthetic
uuuuuaaauuuguaccaucaa

SEQ ID NO: 442316 - RNA, 22 nt, Artificial Sequence
  Synthetic
cuuuuuaaauuuguaccaucaa

SEQ ID NO: 442317 - RNA, 23 nt, Artificial Sequence
  Synthetic
ucuuuuuaaauuuguaccaucaa

SEQ ID NO: 442318 - RNA, 24 nt, Artificial Sequence
  Synthetic
cucuuuuuaaauuuguaccaucaa

SEQ ID NO: 442319 - RNA, 18 nt, Artificial Sequence
  Synthetic
caccugaauguccaucaa

SEQ ID NO: 442320 - RNA, 19 nt, Artificial Sequence
  Synthetic
ccaccugaauguccaucaa

SEQ ID NO: 442321 - RNA, 20 nt, Artificial Sequence
  Synthetic
accaccugaauguccaucaa

SEQ ID NO: 442322 - RNA, 21 nt, Artificial Sequence
  Synthetic
aaccaccugaauguccaucaa

SEQ ID NO: 442323 - RNA, 22 nt, Artificial Sequence
  Synthetic
aaaccaccugaauguccaucaa

SEQ ID NO: 442324 - RNA, 23 nt, Artificial Sequence
  Synthetic
aaaaccaccugaauguccaucaa

SEQ ID NO: 442325 - RNA, 24 nt, Artificial Sequence
  Synthetic
gaaaaccaccugaauguccaucaa

SEQ ID NO: 442326 - RNA, 18 nt, Artificial Sequence
  Synthetic
uuuuacucuuuccaucaa

SEQ ID NO: 442327 - RNA, 19 nt, Artificial Sequence
  Synthetic
guuuuacucuuuccaucaa

SEQ ID NO: 442328 - RNA, 20 nt, Artificial Sequence
  Synthetic
uguuuuacucuuuccaucaa

SEQ ID NO: 442329 - RNA, 21 nt, Artificial Sequence
  Synthetic
auguuuuacucuuuccaucaa

SEQ ID NO: 442330 - RNA, 22 nt, Artificial Sequence
  Synthetic
cauguuuuacucuuuccaucaa

SEQ ID NO: 442331 - RNA, 23 nt, Artificial Sequence
  Synthetic
acauguuuuacucuuuccaucaa

SEQ ID NO: 442332 - RNA, 24 nt, Artificial Sequence
  Synthetic
aacauguuuuacucuuuccaucaa

SEQ ID NO: 442333 - RNA, 18 nt, Artificial Sequence
  Synthetic
auaauuuugaagcaucaa

SEQ ID NO: 442334 - RNA, 19 nt, Artificial Sequence
  Synthetic
aauaauuuugaagcaucaa

SEQ ID NO: 442335 - RNA, 20 nt, Artificial Sequence
  Synthetic
caauaauuuugaagcaucaa

SEQ ID NO: 442336 - RNA, 21 nt, Artificial Sequence
  Synthetic
ucaauaauuuugaagcaucaa

SEQ ID NO: 442337 - RNA, 22 nt, Artificial Sequence
  Synthetic
uucaauaauuuugaagcaucaa

SEQ ID NO: 442338 - RNA, 23 nt, Artificial Sequence
  Synthetic
uuucaauaauuuugaagcaucaa

SEQ ID NO: 442339 - RNA, 24 nt, Artificial Sequence
  Synthetic
uuuucaauaauuuugaagcaucaa

SEQ ID NO: 442340 - RNA, 18 nt, Artificial Sequence
  Synthetic
ucaaaauaauagcaucaa

SEQ ID NO: 442341 - RNA, 19 nt, Artificial Sequence
  Synthetic
gucaaaauaauagcaucaa

SEQ ID NO: 442342 - RNA, 20 nt, Artificial Sequence
  Synthetic
agucaaaauaauagcaucaa

SEQ ID NO: 442343 - RNA, 21 nt, Artificial Sequence
  Synthetic
aagucaaaauaauagcaucaa

SEQ ID NO: 442344 - RNA, 22 nt, Artificial Sequence
  Synthetic
aaagucaaaauaauagcaucaa

SEQ ID NO: 442345 - RNA, 23 nt, Artificial Sequence
  Synthetic
gaaagucaaaauaauagcaucaa

SEQ ID NO: 442346 - RNA, 24 nt, Artificial Sequence
  Synthetic
ugaaagucaaaauaauagcaucaa

SEQ ID NO: 442347 - RNA, 18 nt, Artificial Sequence
  Synthetic
gugggaauacugcaucaa

SEQ ID NO: 442348 - RNA, 19 nt, Artificial Sequence
  Synthetic
ggugggaauacugcaucaa

SEQ ID NO: 442349 - RNA, 20 nt, Artificial Sequence
  Synthetic
gggugggaauacugcaucaa

SEQ ID NO: 442350 - RNA, 21 nt, Artificial Sequence
  Synthetic
ggggugggaauacugcaucaa

SEQ ID NO: 442351 - RNA, 22 nt, Artificial Sequence
  Synthetic
uggggugggaauacugcaucaa

SEQ ID NO: 442352 - RNA, 23 nt, Artificial Sequence
  Synthetic
auggggugggaauacugcaucaa

SEQ ID NO: 442353 - RNA, 24 nt, Artificial Sequence
  Synthetic
gauggggugggaauacugcaucaa

SEQ ID NO: 442354 - RNA, 18 nt, Artificial Sequence
  Synthetic
gaagaccaaaaucaucaa

SEQ ID NO: 442355 - RNA, 19 nt, Artificial Sequence
  Synthetic
ggaagaccaaaaucaucaa

SEQ ID NO: 442356 - RNA, 20 nt, Artificial Sequence
  Synthetic
aggaagaccaaaaucaucaa

SEQ ID NO: 442357 - RNA, 21 nt, Artificial Sequence
  Synthetic
aaggaagaccaaaaucaucaa

SEQ ID NO: 442358 - RNA, 22 nt, Artificial Sequence
  Synthetic
aaaggaagaccaaaaucaucaa

SEQ ID NO: 442359 - RNA, 23 nt, Artificial Sequence
  Synthetic
aaaaggaagaccaaaaucaucaa

SEQ ID NO: 442360 - RNA, 24 nt, Artificial Sequence
  Synthetic
aaaaaggaagaccaaaaucaucaa

SEQ ID NO: 442361 - RNA, 18 nt, Artificial Sequence
  Synthetic
caaugugaaaaucaucaa

SEQ ID NO: 442362 - RNA, 19 nt, Artificial Sequence
  Synthetic
acaaugugaaaaucaucaa

SEQ ID NO: 442363 - RNA, 20 nt, Artificial Sequence
  Synthetic
uacaaugugaaaaucaucaa

SEQ ID NO: 442364 - RNA, 21 nt, Artificial Sequence
  Synthetic
uuacaaugugaaaaucaucaa

SEQ ID NO: 442365 - RNA, 22 nt, Artificial Sequence
  Synthetic
auuacaaugugaaaaucaucaa

SEQ ID NO: 442366 - RNA, 23 nt, Artificial Sequence
  Synthetic
aauuacaaugugaaaaucaucaa

SEQ ID NO: 442367 - RNA, 24 nt, Artificial Sequence
  Synthetic
aaauuacaaugugaaaaucaucaa

SEQ ID NO: 442368 - RNA, 18 nt, Artificial Sequence
  Synthetic
aaacugccuguucaucaa

SEQ ID NO: 442369 - RNA, 19 nt, Artificial Sequence
  Synthetic
aaaacugccuguucaucaa

SEQ ID NO: 442370 - RNA, 20 nt, Artificial Sequence
  Synthetic
caaaacugccuguucaucaa

SEQ ID NO: 442371 - RNA, 21 nt, Artificial Sequence
  Synthetic
ccaaaacugccuguucaucaa

SEQ ID NO: 442372 - RNA, 22 nt, Artificial Sequence
  Synthetic
uccaaaacugccuguucaucaa

SEQ ID NO: 442373 - RNA, 23 nt, Artificial Sequence
  Synthetic
auccaaaacugccuguucaucaa

SEQ ID NO: 442374 - RNA, 24 nt, Artificial Sequence
  Synthetic
gauccaaaacugccuguucaucaa

SEQ ID NO: 442375 - RNA, 18 nt, Artificial Sequence
  Synthetic
ucaucuccauuucaucaa

SEQ ID NO: 442376 - RNA, 19 nt, Artificial Sequence
  Synthetic
cucaucuccauuucaucaa

SEQ ID NO: 442377 - RNA, 20 nt, Artificial Sequence
  Synthetic
ccucaucuccauuucaucaa

SEQ ID NO: 442378 - RNA, 21 nt, Artificial Sequence
  Synthetic
gccucaucuccauuucaucaa

SEQ ID NO: 442379 - RNA, 22 nt, Artificial Sequence
  Synthetic
ugccucaucuccauuucaucaa

SEQ ID NO: 442380 - RNA, 23 nt, Artificial Sequence
  Synthetic
uugccucaucuccauuucaucaa

SEQ ID NO: 442381 - RNA, 24 nt, Artificial Sequence
  Synthetic
guugccucaucuccauuucaucaa

SEQ ID NO: 442382 - RNA, 18 nt, Artificial Sequence
  Synthetic
uaaagguuauuucaucaa

SEQ ID NO: 442383 - RNA, 19 nt, Artificial Sequence
  Synthetic
auaaagguuauuucaucaa

SEQ ID NO: 442384 - RNA, 20 nt, Artificial Sequence
  Synthetic
gauaaagguuauuucaucaa

SEQ ID NO: 442385 - RNA, 21 nt, Artificial Sequence
  Synthetic
ugauaaagguuauuucaucaa

SEQ ID NO: 442386 - RNA, 22 nt, Artificial Sequence
  Synthetic
uugauaaagguuauuucaucaa

SEQ ID NO: 442387 - RNA, 23 nt, Artificial Sequence
  Synthetic
auugauaaagguuauuucaucaa

SEQ ID NO: 442388 - RNA, 24 nt, Artificial Sequence
  Synthetic
uauugauaaagguuauuucaucaa

SEQ ID NO: 442389 - RNA, 18 nt, Artificial Sequence
  Synthetic
uaaaccaacaaagaucaa

SEQ ID NO: 442390 - RNA, 19 nt, Artificial Sequence
  Synthetic
uuaaaccaacaaagaucaa

SEQ ID NO: 442391 - RNA, 20 nt, Artificial Sequence
  Synthetic
uuuaaaccaacaaagaucaa

SEQ ID NO: 442392 - RNA, 21 nt, Artificial Sequence
  Synthetic
cuuuaaaccaacaaagaucaa

SEQ ID NO: 442393 - RNA, 22 nt, Artificial Sequence
  Synthetic
acuuuaaaccaacaaagaucaa

SEQ ID NO: 442394 - RNA, 23 nt, Artificial Sequence
  Synthetic
gacuuuaaaccaacaaagaucaa

SEQ ID NO: 442395 - RNA, 24 nt, Artificial Sequence
  Synthetic
agacuuuaaaccaacaaagaucaa

SEQ ID NO: 442396 - RNA, 18 nt, Artificial Sequence
  Synthetic
cgucaacaccaagaucaa

SEQ ID NO: 442397 - RNA, 19 nt, Artificial Sequence
  Synthetic
ccgucaacaccaagaucaa

SEQ ID NO: 442398 - RNA, 20 nt, Artificial Sequence
  Synthetic
accgucaacaccaagaucaa

SEQ ID NO: 442399 - RNA, 21 nt, Artificial Sequence
  Synthetic
aaccgucaacaccaagaucaa

SEQ ID NO: 442400 - RNA, 22 nt, Artificial Sequence
  Synthetic
aaaccgucaacaccaagaucaa

SEQ ID NO: 442401 - RNA, 23 nt, Artificial Sequence
  Synthetic
aaaaccgucaacaccaagaucaa

SEQ ID NO: 442402 - RNA, 24 nt, Artificial Sequence
  Synthetic
caaaaccgucaacaccaagaucaa

SEQ ID NO: 442403 - RNA, 18 nt, Artificial Sequence
  Synthetic
gaaacaguucaagaucaa

SEQ ID NO: 442404 - RNA, 19 nt, Artificial Sequence
  Synthetic
ggaaacaguucaagaucaa

SEQ ID NO: 442405 - RNA, 20 nt, Artificial Sequence
  Synthetic
gggaaacaguucaagaucaa

SEQ ID NO: 442406 - RNA, 21 nt, Artificial Sequence
  Synthetic
agggaaacaguucaagaucaa

SEQ ID NO: 442407 - RNA, 22 nt, Artificial Sequence
  Synthetic
cagggaaacaguucaagaucaa

SEQ ID NO: 442408 - RNA, 23 nt, Artificial Sequence
  Synthetic
ccagggaaacaguucaagaucaa

SEQ ID NO: 442409 - RNA, 24 nt, Artificial Sequence
  Synthetic
cccagggaaacaguucaagaucaa

SEQ ID NO: 442410 - RNA, 18 nt, Artificial Sequence
  Synthetic
uucugguucucagaucaa

SEQ ID NO: 442411 - RNA, 19 nt, Artificial Sequence
  Synthetic
uuucugguucucagaucaa

SEQ ID NO: 442412 - RNA, 20 nt, Artificial Sequence
  Synthetic
uuuucugguucucagaucaa

SEQ ID NO: 442413 - RNA, 21 nt, Artificial Sequence
  Synthetic
guuuucugguucucagaucaa

SEQ ID NO: 442414 - RNA, 22 nt, Artificial Sequence
  Synthetic
uguuuucugguucucagaucaa

SEQ ID NO: 442415 - RNA, 23 nt, Artificial Sequence
  Synthetic
guguuuucugguucucagaucaa

SEQ ID NO: 442416 - RNA, 24 nt, Artificial Sequence
  Synthetic
uguguuuucugguucucagaucaa

SEQ ID NO: 442417 - RNA, 18 nt, Artificial Sequence
  Synthetic
uagccaacaagagaucaa

SEQ ID NO: 442418 - RNA, 19 nt, Artificial Sequence
  Synthetic
auagccaacaagagaucaa

SEQ ID NO: 442419 - RNA, 20 nt, Artificial Sequence
  Synthetic
cauagccaacaagagaucaa

SEQ ID NO: 442420 - RNA, 21 nt, Artificial Sequence
  Synthetic
ccauagccaacaagagaucaa

SEQ ID NO: 442421 - RNA, 22 nt, Artificial Sequence
  Synthetic
accauagccaacaagagaucaa

SEQ ID NO: 442422 - RNA, 23 nt, Artificial Sequence
  Synthetic
aaccauagccaacaagagaucaa

SEQ ID NO: 442423 - RNA, 24 nt, Artificial Sequence
  Synthetic
aaaccauagccaacaagagaucaa

SEQ ID NO: 442424 - RNA, 18 nt, Artificial Sequence
  Synthetic
uugggaaagagagaucaa

SEQ ID NO: 442425 - RNA, 19 nt, Artificial Sequence
  Synthetic
auugggaaagagagaucaa

SEQ ID NO: 442426 - RNA, 20 nt, Artificial Sequence
  Synthetic
gauugggaaagagagaucaa

SEQ ID NO: 442427 - RNA, 21 nt, Artificial Sequence
  Synthetic
agauugggaaagagagaucaa

SEQ ID NO: 442428 - RNA, 22 nt, Artificial Sequence
  Synthetic
uagauugggaaagagagaucaa

SEQ ID NO: 442429 - RNA, 23 nt, Artificial Sequence
  Synthetic
guagauugggaaagagagaucaa

SEQ ID NO: 442430 - RNA, 24 nt, Artificial Sequence
  Synthetic
aguagauugggaaagagagaucaa

SEQ ID NO: 442431 - RNA, 18 nt, Artificial Sequence
  Synthetic
aagggacugagagaucaa

SEQ ID NO: 442432 - RNA, 19 nt, Artificial Sequence
  Synthetic
caagggacugagagaucaa

SEQ ID NO: 442433 - RNA, 20 nt, Artificial Sequence
  Synthetic
ucaagggacugagagaucaa

SEQ ID NO: 442434 - RNA, 21 nt, Artificial Sequence
  Synthetic
cucaagggacugagagaucaa

SEQ ID NO: 442435 - RNA, 22 nt, Artificial Sequence
  Synthetic
ccucaagggacugagagaucaa

SEQ ID NO: 442436 - RNA, 23 nt, Artificial Sequence
  Synthetic
accucaagggacugagagaucaa

SEQ ID NO: 442437 - RNA, 24 nt, Artificial Sequence
  Synthetic
aaccucaagggacugagagaucaa

SEQ ID NO: 442438 - RNA, 18 nt, Artificial Sequence
  Synthetic
aaaagcacuagagaucaa

SEQ ID NO: 442439 - RNA, 19 nt, Artificial Sequence
  Synthetic
aaaaagcacuagagaucaa

SEQ ID NO: 442440 - RNA, 20 nt, Artificial Sequence
  Synthetic
aaaaaagcacuagagaucaa

SEQ ID NO: 442441 - RNA, 21 nt, Artificial Sequence
  Synthetic
gaaaaaagcacuagagaucaa

SEQ ID NO: 442442 - RNA, 22 nt, Artificial Sequence
  Synthetic
ugaaaaaagcacuagagaucaa

SEQ ID NO: 442443 - RNA, 23 nt, Artificial Sequence
  Synthetic
gugaaaaaagcacuagagaucaa

SEQ ID NO: 442444 - RNA, 24 nt, Artificial Sequence
  Synthetic
agugaaaaaagcacuagagaucaa

SEQ ID NO: 442445 - RNA, 18 nt, Artificial Sequence
  Synthetic
auagagucuguagaucaa

SEQ ID NO: 442446 - RNA, 19 nt, Artificial Sequence
  Synthetic
cauagagucuguagaucaa

SEQ ID NO: 442447 - RNA, 20 nt, Artificial Sequence
  Synthetic
ccauagagucuguagaucaa

SEQ ID NO: 442448 - RNA, 21 nt, Artificial Sequence
  Synthetic
uccauagagucuguagaucaa

SEQ ID NO: 442449 - RNA, 22 nt, Artificial Sequence
  Synthetic
uuccauagagucuguagaucaa

SEQ ID NO: 442450 - RNA, 23 nt, Artificial Sequence
  Synthetic
auuccauagagucuguagaucaa

SEQ ID NO: 442451 - RNA, 24 nt, Artificial Sequence
  Synthetic
gauuccauagagucuguagaucaa

SEQ ID NO: 442452 - RNA, 18 nt, Artificial Sequence
  Synthetic
aggagccgaugcgaucaa

SEQ ID NO: 442453 - RNA, 19 nt, Artificial Sequence
  Synthetic
caggagccgaugcgaucaa

SEQ ID NO: 442454 - RNA, 20 nt, Artificial Sequence
  Synthetic
ucaggagccgaugcgaucaa

SEQ ID NO: 442455 - RNA, 21 nt, Artificial Sequence
  Synthetic
cucaggagccgaugcgaucaa

SEQ ID NO: 442456 - RNA, 22 nt, Artificial Sequence
  Synthetic
ccucaggagccgaugcgaucaa

SEQ ID NO: 442457 - RNA, 23 nt, Artificial Sequence
  Synthetic
gccucaggagccgaugcgaucaa

SEQ ID NO: 442458 - RNA, 24 nt, Artificial Sequence
  Synthetic
agccucaggagccgaugcgaucaa

SEQ ID NO: 442459 - RNA, 18 nt, Artificial Sequence
  Synthetic
cuuuauccaggggaucaa

SEQ ID NO: 442460 - RNA, 19 nt, Artificial Sequence
  Synthetic
ccuuuauccaggggaucaa

SEQ ID NO: 442461 - RNA, 20 nt, Artificial Sequence
  Synthetic
uccuuuauccaggggaucaa

SEQ ID NO: 442462 - RNA, 21 nt, Artificial Sequence
  Synthetic
uuccuuuauccaggggaucaa

SEQ ID NO: 442463 - RNA, 22 nt, Artificial Sequence
  Synthetic
cuuccuuuauccaggggaucaa

SEQ ID NO: 442464 - RNA, 23 nt, Artificial Sequence
  Synthetic
ucuuccuuuauccaggggaucaa

SEQ ID NO: 442465 - RNA, 24 nt, Artificial Sequence
  Synthetic
aucuuccuuuauccaggggaucaa

SEQ ID NO: 442466 - RNA, 21 nt, Artificial Sequence
  Synthetic
aagcuuauccaccaugaucaa

SEQ ID NO: 442467 - RNA, 22 nt, Artificial Sequence
  Synthetic
aaagcuuauccaccaugaucaa

SEQ ID NO: 442468 - RNA, 23 nt, Artificial Sequence
  Synthetic
aaaagcuuauccaccaugaucaa

SEQ ID NO: 442469 - RNA, 24 nt, Artificial Sequence
  Synthetic
aaaaagcuuauccaccaugaucaa

SEQ ID NO: 442470 - RNA, 18 nt, Artificial Sequence
  Synthetic
cuauugacuaaauaucaa

SEQ ID NO: 442471 - RNA, 19 nt, Artificial Sequence
  Synthetic
acuauugacuaaauaucaa

SEQ ID NO: 442472 - RNA, 20 nt, Artificial Sequence
  Synthetic
aacuauugacuaaauaucaa

SEQ ID NO: 442473 - RNA, 21 nt, Artificial Sequence
  Synthetic
uaacuauugacuaaauaucaa

SEQ ID NO: 442474 - RNA, 22 nt, Artificial Sequence
  Synthetic
guaacuauugacuaaauaucaa

SEQ ID NO: 442475 - RNA, 23 nt, Artificial Sequence
  Synthetic
aguaacuauugacuaaauaucaa

SEQ ID NO: 442476 - RNA, 24 nt, Artificial Sequence
  Synthetic
caguaacuauugacuaaauaucaa

SEQ ID NO: 442477 - RNA, 18 nt, Artificial Sequence
  Synthetic
uaccccaacugauaucaa

SEQ ID NO: 442478 - RNA, 19 nt, Artificial Sequence
  Synthetic
cuaccccaacugauaucaa

SEQ ID NO: 442479 - RNA, 20 nt, Artificial Sequence
  Synthetic
ucuaccccaacugauaucaa

SEQ ID NO: 442480 - RNA, 21 nt, Artificial Sequence
  Synthetic
aucuaccccaacugauaucaa

SEQ ID NO: 442481 - RNA, 22 nt, Artificial Sequence
  Synthetic
aaucuaccccaacugauaucaa

SEQ ID NO: 442482 - RNA, 23 nt, Artificial Sequence
  Synthetic
caaucuaccccaacugauaucaa

SEQ ID NO: 442483 - RNA, 24 nt, Artificial Sequence
  Synthetic
gcaaucuaccccaacugauaucaa

SEQ ID NO: 442484 - RNA, 18 nt, Artificial Sequence
  Synthetic
ugaaaucaaagcuaucaa

SEQ ID NO: 442485 - RNA, 19 nt, Artificial Sequence
  Synthetic
uugaaaucaaagcuaucaa

SEQ ID NO: 442486 - RNA, 20 nt, Artificial Sequence
  Synthetic
uuugaaaucaaagcuaucaa

SEQ ID NO: 442487 - RNA, 21 nt, Artificial Sequence
  Synthetic
guuugaaaucaaagcuaucaa

SEQ ID NO: 442488 - RNA, 22 nt, Artificial Sequence
  Synthetic
cguuugaaaucaaagcuaucaa

SEQ ID NO: 442489 - RNA, 23 nt, Artificial Sequence
  Synthetic
ccguuugaaaucaaagcuaucaa

SEQ ID NO: 442490 - RNA, 24 nt, Artificial Sequence
  Synthetic
cccguuugaaaucaaagcuaucaa

SEQ ID NO: 442491 - RNA, 18 nt, Artificial Sequence
  Synthetic
auuuaguaguucuaucaa

SEQ ID NO: 442492 - RNA, 19 nt, Artificial Sequence
  Synthetic
cauuuaguaguucuaucaa

SEQ ID NO: 442493 - RNA, 20 nt, Artificial Sequence
  Synthetic
ccauuuaguaguucuaucaa

SEQ ID NO: 442494 - RNA, 21 nt, Artificial Sequence
  Synthetic
uccauuuaguaguucuaucaa

SEQ ID NO: 442495 - RNA, 22 nt, Artificial Sequence
  Synthetic
uuccauuuaguaguucuaucaa

SEQ ID NO: 442496 - RNA, 23 nt, Artificial Sequence
  Synthetic
uuuccauuuaguaguucuaucaa

SEQ ID NO: 442497 - RNA, 24 nt, Artificial Sequence
  Synthetic
uuuuccauuuaguaguucuaucaa

SEQ ID NO: 442498 - RNA, 18 nt, Artificial Sequence
  Synthetic
augaauugaauguaucaa

SEQ ID NO: 442499 - RNA, 19 nt, Artificial Sequence
  Synthetic
uaugaauugaauguaucaa

SEQ ID NO: 442500 - RNA, 20 nt, Artificial Sequence
  Synthetic
auaugaauugaauguaucaa

SEQ ID NO: 442501 - RNA, 21 nt, Artificial Sequence
  Synthetic
uauaugaauugaauguaucaa

SEQ ID NO: 442502 - RNA, 22 nt, Artificial Sequence
  Synthetic
auauaugaauugaauguaucaa

SEQ ID NO: 442503 - RNA, 23 nt, Artificial Sequence
  Synthetic
uauauaugaauugaauguaucaa

SEQ ID NO: 442504 - RNA, 24 nt, Artificial Sequence
  Synthetic
auauauaugaauugaauguaucaa

SEQ ID NO: 442505 - RNA, 18 nt, Artificial Sequence
  Synthetic
gaccuggggauguaucaa

SEQ ID NO: 442506 - RNA, 19 nt, Artificial Sequence
  Synthetic
ggaccuggggauguaucaa

SEQ ID NO: 442507 - RNA, 20 nt, Artificial Sequence
  Synthetic
aggaccuggggauguaucaa

SEQ ID NO: 442508 - RNA, 21 nt, Artificial Sequence
  Synthetic
caggaccuggggauguaucaa

SEQ ID NO: 442509 - RNA, 22 nt, Artificial Sequence
  Synthetic
ucaggaccuggggauguaucaa

SEQ ID NO: 442510 - RNA, 23 nt, Artificial Sequence
  Synthetic
uucaggaccuggggauguaucaa

SEQ ID NO: 442511 - RNA, 24 nt, Artificial Sequence
  Synthetic
guucaggaccuggggauguaucaa

SEQ ID NO: 442512 - RNA, 18 nt, Artificial Sequence
  Synthetic
auuuucuaaaauuaucaa

SEQ ID NO: 442513 - RNA, 19 nt, Artificial Sequence
  Synthetic
cauuuucuaaaauuaucaa

SEQ ID NO: 442514 - RNA, 20 nt, Artificial Sequence
  Synthetic
acauuuucuaaaauuaucaa

SEQ ID NO: 442515 - RNA, 21 nt, Artificial Sequence
  Synthetic
aacauuuucuaaaauuaucaa

SEQ ID NO: 442516 - RNA, 22 nt, Artificial Sequence
  Synthetic
uaacauuuucuaaaauuaucaa

SEQ ID NO: 442517 - RNA, 23 nt, Artificial Sequence
  Synthetic
auaacauuuucuaaaauuaucaa

SEQ ID NO: 442518 - RNA, 24 nt, Artificial Sequence
  Synthetic
cauaacauuuucuaaaauuaucaa

SEQ ID NO: 442519 - RNA, 18 nt, Artificial Sequence
  Synthetic
gaaucuaaacauuaucaa

SEQ ID NO: 442520 - RNA, 19 nt, Artificial Sequence
  Synthetic
agaaucuaaacauuaucaa

SEQ ID NO: 442521 - RNA, 20 nt, Artificial Sequence
  Synthetic
aagaaucuaaacauuaucaa

SEQ ID NO: 442522 - RNA, 21 nt, Artificial Sequence
  Synthetic
uaagaaucuaaacauuaucaa

SEQ ID NO: 442523 - RNA, 22 nt, Artificial Sequence
  Synthetic
uuaagaaucuaaacauuaucaa

SEQ ID NO: 442524 - RNA, 23 nt, Artificial Sequence
  Synthetic
guuaagaaucuaaacauuaucaa

SEQ ID NO: 442525 - RNA, 24 nt, Artificial Sequence
  Synthetic
uguuaagaaucuaaacauuaucaa

SEQ ID NO: 442526 - RNA, 18 nt, Artificial Sequence
  Synthetic
uaauaguagaaaacucaa

SEQ ID NO: 442527 - RNA, 19 nt, Artificial Sequence
  Synthetic
auaauaguagaaaacucaa

SEQ ID NO: 442528 - RNA, 20 nt, Artificial Sequence
  Synthetic
aauaauaguagaaaacucaa

SEQ ID NO: 442529 - RNA, 21 nt, Artificial Sequence
  Synthetic
uaauaauaguagaaaacucaa

SEQ ID NO: 442530 - RNA, 22 nt, Artificial Sequence
  Synthetic
auaauaauaguagaaaacucaa

SEQ ID NO: 442531 - RNA, 23 nt, Artificial Sequence
  Synthetic
uauaauaauaguagaaaacucaa

SEQ ID NO: 442532 - RNA, 24 nt, Artificial Sequence
  Synthetic
auauaauaauaguagaaaacucaa

SEQ ID NO: 442533 - RNA, 18 nt, Artificial Sequence
  Synthetic
cacuaagaauaaacucaa

SEQ ID NO: 442534 - RNA, 19 nt, Artificial Sequence
  Synthetic
acacuaagaauaaacucaa

SEQ ID NO: 442535 - RNA, 20 nt, Artificial Sequence
  Synthetic
gacacuaagaauaaacucaa

SEQ ID NO: 442536 - RNA, 21 nt, Artificial Sequence
  Synthetic
ugacacuaagaauaaacucaa

SEQ ID NO: 442537 - RNA, 22 nt, Artificial Sequence
  Synthetic
augacacuaagaauaaacucaa

SEQ ID NO: 442538 - RNA, 23 nt, Artificial Sequence
  Synthetic
aaugacacuaagaauaaacucaa

SEQ ID NO: 442539 - RNA, 24 nt, Artificial Sequence
  Synthetic
gaaugacacuaagaauaaacucaa

SEQ ID NO: 442540 - RNA, 18 nt, Artificial Sequence
  Synthetic
acuagauuuuaaacucaa

SEQ ID NO: 442541 - RNA, 19 nt, Artificial Sequence
  Synthetic
cacuagauuuuaaacucaa

SEQ ID NO: 442542 - RNA, 20 nt, Artificial Sequence
  Synthetic
ccacuagauuuuaaacucaa

SEQ ID NO: 442543 - RNA, 21 nt, Artificial Sequence
  Synthetic
cccacuagauuuuaaacucaa

SEQ ID NO: 442544 - RNA, 22 nt, Artificial Sequence
  Synthetic
ccccacuagauuuuaaacucaa

SEQ ID NO: 442545 - RNA, 23 nt, Artificial Sequence
  Synthetic
uccccacuagauuuuaaacucaa

SEQ ID NO: 442546 - RNA, 24 nt, Artificial Sequence
  Synthetic
auccccacuagauuuuaaacucaa

SEQ ID NO: 442547 - RNA, 18 nt, Artificial Sequence
  Synthetic
ugacccucucgaacucaa

SEQ ID NO: 442548 - RNA, 19 nt, Artificial Sequence
  Synthetic
cugacccucucgaacucaa

SEQ ID NO: 442549 - RNA, 20 nt, Artificial Sequence
  Synthetic
acugacccucucgaacucaa

SEQ ID NO: 442550 - RNA, 21 nt, Artificial Sequence
  Synthetic
aacugacccucucgaacucaa

SEQ ID NO: 442551 - RNA, 22 nt, Artificial Sequence
  Synthetic
aaacugacccucucgaacucaa

SEQ ID NO: 442552 - RNA, 23 nt, Artificial Sequence
  Synthetic
gaaacugacccucucgaacucaa

SEQ ID NO: 442553 - RNA, 24 nt, Artificial Sequence
  Synthetic
agaaacugacccucucgaacucaa

SEQ ID NO: 442554 - RNA, 18 nt, Artificial Sequence
  Synthetic
aagguuugaggaacucaa

SEQ ID NO: 442555 - RNA, 19 nt, Artificial Sequence
  Synthetic
aaagguuugaggaacucaa

SEQ ID NO: 442556 - RNA, 20 nt, Artificial Sequence
  Synthetic
uaaagguuugaggaacucaa

SEQ ID NO: 442557 - RNA, 21 nt, Artificial Sequence
  Synthetic
uuaaagguuugaggaacucaa

SEQ ID NO: 442558 - RNA, 22 nt, Artificial Sequence
  Synthetic
uuuaaagguuugaggaacucaa

SEQ ID NO: 442559 - RNA, 23 nt, Artificial Sequence
  Synthetic
uuuuaaagguuugaggaacucaa

SEQ ID NO: 442560 - RNA, 24 nt, Artificial Sequence
  Synthetic
uuuuuaaagguuugaggaacucaa

SEQ ID NO: 442561 - RNA, 18 nt, Artificial Sequence
  Synthetic
caaaaaaccugaacucaa

SEQ ID NO: 442562 - RNA, 19 nt, Artificial Sequence
  Synthetic
gcaaaaaaccugaacucaa

SEQ ID NO: 442563 - RNA, 20 nt, Artificial Sequence
  Synthetic
ugcaaaaaaccugaacucaa

SEQ ID NO: 442564 - RNA, 21 nt, Artificial Sequence
  Synthetic
augcaaaaaaccugaacucaa

SEQ ID NO: 442565 - RNA, 22 nt, Artificial Sequence
  Synthetic
aaugcaaaaaaccugaacucaa

SEQ ID NO: 442566 - RNA, 23 nt, Artificial Sequence
  Synthetic
caaugcaaaaaaccugaacucaa

SEQ ID NO: 442567 - RNA, 24 nt, Artificial Sequence
  Synthetic
gcaaugcaaaaaaccugaacucaa

SEQ ID NO: 442568 - RNA, 18 nt, Artificial Sequence
  Synthetic
uuacuccuacccacucaa

SEQ ID NO: 442569 - RNA, 19 nt, Artificial Sequence
  Synthetic
cuuacuccuacccacucaa

SEQ ID NO: 442570 - RNA, 20 nt, Artificial Sequence
  Synthetic
gcuuacuccuacccacucaa

SEQ ID NO: 442571 - RNA, 21 nt, Artificial Sequence
  Synthetic
ugcuuacuccuacccacucaa

SEQ ID NO: 442572 - RNA, 22 nt, Artificial Sequence
  Synthetic
cugcuuacuccuacccacucaa

SEQ ID NO: 442573 - RNA, 23 nt, Artificial Sequence
  Synthetic
ucugcuuacuccuacccacucaa

SEQ ID NO: 442574 - RNA, 24 nt, Artificial Sequence
  Synthetic
uucugcuuacuccuacccacucaa

SEQ ID NO: 442575 - RNA, 18 nt, Artificial Sequence
  Synthetic
gaaaaugguugcacucaa

SEQ ID NO: 442576 - RNA, 19 nt, Artificial Sequence
  Synthetic
agaaaaugguugcacucaa

SEQ ID NO: 442577 - RNA, 20 nt, Artificial Sequence
  Synthetic
gagaaaaugguugcacucaa

SEQ ID NO: 442578 - RNA, 21 nt, Artificial Sequence
  Synthetic
cgagaaaaugguugcacucaa

SEQ ID NO: 442579 - RNA, 22 nt, Artificial Sequence
  Synthetic
ccgagaaaaugguugcacucaa

SEQ ID NO: 442580 - RNA, 23 nt, Artificial Sequence
  Synthetic
cccgagaaaaugguugcacucaa

SEQ ID NO: 442581 - RNA, 24 nt, Artificial Sequence
  Synthetic
gcccgagaaaaugguugcacucaa

SEQ ID NO: 442582 - RNA, 18 nt, Artificial Sequence
  Synthetic
agaguaucugggacucaa

SEQ ID NO: 442583 - RNA, 19 nt, Artificial Sequence
  Synthetic
cagaguaucugggacucaa

SEQ ID NO: 442584 - RNA, 20 nt, Artificial Sequence
  Synthetic
acagaguaucugggacucaa

SEQ ID NO: 442585 - RNA, 21 nt, Artificial Sequence
  Synthetic
cacagaguaucugggacucaa

SEQ ID NO: 442586 - RNA, 22 nt, Artificial Sequence
  Synthetic
acacagaguaucugggacucaa

SEQ ID NO: 442587 - RNA, 23 nt, Artificial Sequence
  Synthetic
gacacagaguaucugggacucaa

SEQ ID NO: 442588 - RNA, 24 nt, Artificial Sequence
  Synthetic
ggacacagaguaucugggacucaa

SEQ ID NO: 442589 - RNA, 18 nt, Artificial Sequence
  Synthetic
auaacuucugugacucaa

SEQ ID NO: 442590 - RNA, 19 nt, Artificial Sequence
  Synthetic
uauaacuucugugacucaa

SEQ ID NO: 442591 - RNA, 20 nt, Artificial Sequence
  Synthetic
cuauaacuucugugacucaa

SEQ ID NO: 442592 - RNA, 21 nt, Artificial Sequence
  Synthetic
ccuauaacuucugugacucaa

SEQ ID NO: 442593 - RNA, 22 nt, Artificial Sequence
  Synthetic
uccuauaacuucugugacucaa

SEQ ID NO: 442594 - RNA, 23 nt, Artificial Sequence
  Synthetic
cuccuauaacuucugugacucaa

SEQ ID NO: 442595 - RNA, 24 nt, Artificial Sequence
  Synthetic
ccuccuauaacuucugugacucaa

SEQ ID NO: 442596 - RNA, 18 nt, Artificial Sequence
  Synthetic
uucuggguacauacucaa

SEQ ID NO: 442597 - RNA, 19 nt, Artificial Sequence
  Synthetic
cuucuggguacauacucaa

SEQ ID NO: 442598 - RNA, 20 nt, Artificial Sequence
  Synthetic
acuucuggguacauacucaa

SEQ ID NO: 442599 - RNA, 21 nt, Artificial Sequence
  Synthetic
cacuucuggguacauacucaa

SEQ ID NO: 442600 - RNA, 22 nt, Artificial Sequence
  Synthetic
ccacuucuggguacauacucaa

SEQ ID NO: 442601 - RNA, 23 nt, Artificial Sequence
  Synthetic
cccacuucuggguacauacucaa

SEQ ID NO: 442602 - RNA, 24 nt, Artificial Sequence
  Synthetic
ucccacuucuggguacauacucaa

SEQ ID NO: 442603 - RNA, 18 nt, Artificial Sequence
  Synthetic
agugcacaagauacucaa

SEQ ID NO: 442604 - RNA, 19 nt, Artificial Sequence
  Synthetic
uagugcacaagauacucaa

SEQ ID NO: 442605 - RNA, 20 nt, Artificial Sequence
  Synthetic
auagugcacaagauacucaa

SEQ ID NO: 442606 - RNA, 21 nt, Artificial Sequence
  Synthetic
uauagugcacaagauacucaa

SEQ ID NO: 442607 - RNA, 22 nt, Artificial Sequence
  Synthetic
guauagugcacaagauacucaa

SEQ ID NO: 442608 - RNA, 23 nt, Artificial Sequence
  Synthetic
cguauagugcacaagauacucaa

SEQ ID NO: 442609 - RNA, 24 nt, Artificial Sequence
  Synthetic
gcguauagugcacaagauacucaa

SEQ ID NO: 442610 - RNA, 18 nt, Artificial Sequence
  Synthetic
uaaacagacacuacucaa

SEQ ID NO: 442611 - RNA, 19 nt, Artificial Sequence
  Synthetic
auaaacagacacuacucaa

SEQ ID NO: 442612 - RNA, 20 nt, Artificial Sequence
  Synthetic
cauaaacagacacuacucaa

SEQ ID NO: 442613 - RNA, 21 nt, Artificial Sequence
  Synthetic
acauaaacagacacuacucaa

SEQ ID NO: 442614 - RNA, 22 nt, Artificial Sequence
  Synthetic
gacauaaacagacacuacucaa

SEQ ID NO: 442615 - RNA, 23 nt, Artificial Sequence
  Synthetic
agacauaaacagacacuacucaa

SEQ ID NO: 442616 - RNA, 24 nt, Artificial Sequence
  Synthetic
aagacauaaacagacacuacucaa

SEQ ID NO: 442617 - RNA, 18 nt, Artificial Sequence
  Synthetic
cuuagaacauuuacucaa

SEQ ID NO: 442618 - RNA, 19 nt, Artificial Sequence
  Synthetic
ucuuagaacauuuacucaa

SEQ ID NO: 442619 - RNA, 20 nt, Artificial Sequence
  Synthetic
uucuuagaacauuuacucaa

SEQ ID NO: 442620 - RNA, 21 nt, Artificial Sequence
  Synthetic
uuucuuagaacauuuacucaa

SEQ ID NO: 442621 - RNA, 22 nt, Artificial Sequence
  Synthetic
guuucuuagaacauuuacucaa

SEQ ID NO: 442622 - RNA, 23 nt, Artificial Sequence
  Synthetic
cguuucuuagaacauuuacucaa

SEQ ID NO: 442623 - RNA, 24 nt, Artificial Sequence
  Synthetic
ccguuucuuagaacauuuacucaa

SEQ ID NO: 442624 - RNA, 18 nt, Artificial Sequence
  Synthetic
auuugacugaaaccucaa

SEQ ID NO: 442625 - RNA, 19 nt, Artificial Sequence
  Synthetic
cauuugacugaaaccucaa

SEQ ID NO: 442626 - RNA, 20 nt, Artificial Sequence
  Synthetic
ucauuugacugaaaccucaa

SEQ ID NO: 442627 - RNA, 21 nt, Artificial Sequence
  Synthetic
uucauuugacugaaaccucaa

SEQ ID NO: 442628 - RNA, 22 nt, Artificial Sequence
  Synthetic
uuucauuugacugaaaccucaa

SEQ ID NO: 442629 - RNA, 23 nt, Artificial Sequence
  Synthetic
uuuucauuugacugaaaccucaa

SEQ ID NO: 442630 - RNA, 24 nt, Artificial Sequence
  Synthetic
cuuuucauuugacugaaaccucaa

SEQ ID NO: 442631 - RNA, 18 nt, Artificial Sequence
  Synthetic
agccuguggcaaccucaa

SEQ ID NO: 442632 - RNA, 19 nt, Artificial Sequence
  Synthetic
cagccuguggcaaccucaa

SEQ ID NO: 442633 - RNA, 20 nt, Artificial Sequence
  Synthetic
ucagccuguggcaaccucaa

SEQ ID NO: 442634 - RNA, 21 nt, Artificial Sequence
  Synthetic
gucagccuguggcaaccucaa

SEQ ID NO: 442635 - RNA, 22 nt, Artificial Sequence
  Synthetic
agucagccuguggcaaccucaa

SEQ ID NO: 442636 - RNA, 23 nt, Artificial Sequence
  Synthetic
uagucagccuguggcaaccucaa

SEQ ID NO: 442637 - RNA, 24 nt, Artificial Sequence
  Synthetic
auagucagccuguggcaaccucaa

SEQ ID NO: 442638 - RNA, 18 nt, Artificial Sequence
  Synthetic
aggucgaguuacccucaa

SEQ ID NO: 442639 - RNA, 19 nt, Artificial Sequence
  Synthetic
aaggucgaguuacccucaa

SEQ ID NO: 442640 - RNA, 20 nt, Artificial Sequence
  Synthetic
aaaggucgaguuacccucaa

SEQ ID NO: 442641 - RNA, 21 nt, Artificial Sequence
  Synthetic
gaaaggucgaguuacccucaa

SEQ ID NO: 442642 - RNA, 22 nt, Artificial Sequence
  Synthetic
agaaaggucgaguuacccucaa

SEQ ID NO: 442643 - RNA, 23 nt, Artificial Sequence
  Synthetic
gagaaaggucgaguuacccucaa

SEQ ID NO: 442644 - RNA, 24 nt, Artificial Sequence
  Synthetic
agagaaaggucgaguuacccucaa

SEQ ID NO: 442645 - RNA, 18 nt, Artificial Sequence
  Synthetic
cguaaaauaaagccucaa

SEQ ID NO: 442646 - RNA, 19 nt, Artificial Sequence
  Synthetic
acguaaaauaaagccucaa

SEQ ID NO: 442647 - RNA, 20 nt, Artificial Sequence
  Synthetic
aacguaaaauaaagccucaa

SEQ ID NO: 442648 - RNA, 21 nt, Artificial Sequence
  Synthetic
gaacguaaaauaaagccucaa

SEQ ID NO: 442649 - RNA, 22 nt, Artificial Sequence
  Synthetic
ugaacguaaaauaaagccucaa

SEQ ID NO: 442650 - RNA, 23 nt, Artificial Sequence
  Synthetic
augaacguaaaauaaagccucaa

SEQ ID NO: 442651 - RNA, 24 nt, Artificial Sequence
  Synthetic
caugaacguaaaauaaagccucaa

SEQ ID NO: 442652 - RNA, 18 nt, Artificial Sequence
  Synthetic
auagcacuaaugccucaa

SEQ ID NO: 442653 - RNA, 19 nt, Artificial Sequence
  Synthetic
aauagcacuaaugccucaa

SEQ ID NO: 442654 - RNA, 20 nt, Artificial Sequence
  Synthetic
caauagcacuaaugccucaa

SEQ ID NO: 442655 - RNA, 21 nt, Artificial Sequence
  Synthetic
gcaauagcacuaaugccucaa

SEQ ID NO: 442656 - RNA, 22 nt, Artificial Sequence
  Synthetic
ugcaauagcacuaaugccucaa

SEQ ID NO: 442657 - RNA, 23 nt, Artificial Sequence
  Synthetic
augcaauagcacuaaugccucaa

SEQ ID NO: 442658 - RNA, 24 nt, Artificial Sequence
  Synthetic
aaugcaauagcacuaaugccucaa

SEQ ID NO: 442659 - RNA, 18 nt, Artificial Sequence
  Synthetic
agcagaaaaucuccucaa

SEQ ID NO: 442660 - RNA, 19 nt, Artificial Sequence
  Synthetic
cagcagaaaaucuccucaa

SEQ ID NO: 442661 - RNA, 20 nt, Artificial Sequence
  Synthetic
acagcagaaaaucuccucaa

SEQ ID NO: 442662 - RNA, 21 nt, Artificial Sequence
  Synthetic
aacagcagaaaaucuccucaa

SEQ ID NO: 442663 - RNA, 22 nt, Artificial Sequence
  Synthetic
uaacagcagaaaaucuccucaa

SEQ ID NO: 442664 - RNA, 23 nt, Artificial Sequence
  Synthetic
auaacagcagaaaaucuccucaa

SEQ ID NO: 442665 - RNA, 24 nt, Artificial Sequence
  Synthetic
aauaacagcagaaaaucuccucaa

SEQ ID NO: 442666 - RNA, 18 nt, Artificial Sequence
  Synthetic
ugauauguugguccucaa

SEQ ID NO: 442667 - RNA, 19 nt, Artificial Sequence
  Synthetic
cugauauguugguccucaa

SEQ ID NO: 442668 - RNA, 20 nt, Artificial Sequence
  Synthetic
ucugauauguugguccucaa

SEQ ID NO: 442669 - RNA, 21 nt, Artificial Sequence
  Synthetic
aucugauauguugguccucaa

SEQ ID NO: 442670 - RNA, 22 nt, Artificial Sequence
  Synthetic
aaucugauauguugguccucaa

SEQ ID NO: 442671 - RNA, 23 nt, Artificial Sequence
  Synthetic
caaucugauauguugguccucaa

SEQ ID NO: 442672 - RNA, 24 nt, Artificial Sequence
  Synthetic
ucaaucugauauguugguccucaa

SEQ ID NO: 442673 - RNA, 18 nt, Artificial Sequence
  Synthetic
cugauuaucuuuccucaa

SEQ ID NO: 442674 - RNA, 19 nt, Artificial Sequence
  Synthetic
ucugauuaucuuuccucaa

SEQ ID NO: 442675 - RNA, 20 nt, Artificial Sequence
  Synthetic
aucugauuaucuuuccucaa

SEQ ID NO: 442676 - RNA, 21 nt, Artificial Sequence
  Synthetic
uaucugauuaucuuuccucaa

SEQ ID NO: 442677 - RNA, 22 nt, Artificial Sequence
  Synthetic
guaucugauuaucuuuccucaa

SEQ ID NO: 442678 - RNA, 23 nt, Artificial Sequence
  Synthetic
uguaucugauuaucuuuccucaa

SEQ ID NO: 442679 - RNA, 24 nt, Artificial Sequence
  Synthetic
uuguaucugauuaucuuuccucaa

SEQ ID NO: 442680 - RNA, 18 nt, Artificial Sequence
  Synthetic
uacuuaguggcagcucaa

SEQ ID NO: 442681 - RNA, 19 nt, Artificial Sequence
  Synthetic
guacuuaguggcagcucaa

SEQ ID NO: 442682 - RNA, 20 nt, Artificial Sequence
  Synthetic
gguacuuaguggcagcucaa

SEQ ID NO: 442683 - RNA, 21 nt, Artificial Sequence
  Synthetic
agguacuuaguggcagcucaa

SEQ ID NO: 442684 - RNA, 22 nt, Artificial Sequence
  Synthetic
cagguacuuaguggcagcucaa

SEQ ID NO: 442685 - RNA, 23 nt, Artificial Sequence
  Synthetic
ccagguacuuaguggcagcucaa

SEQ ID NO: 442686 - RNA, 24 nt, Artificial Sequence
  Synthetic
cccagguacuuaguggcagcucaa

SEQ ID NO: 442687 - RNA, 18 nt, Artificial Sequence
  Synthetic
auaacaugcucagcucaa

SEQ ID NO: 442688 - RNA, 19 nt, Artificial Sequence
  Synthetic
cauaacaugcucagcucaa

SEQ ID NO: 442689 - RNA, 20 nt, Artificial Sequence
  Synthetic
ucauaacaugcucagcucaa

SEQ ID NO: 442690 - RNA, 21 nt, Artificial Sequence
  Synthetic
gucauaacaugcucagcucaa

SEQ ID NO: 442691 - RNA, 22 nt, Artificial Sequence
  Synthetic
ugucauaacaugcucagcucaa

SEQ ID NO: 442692 - RNA, 23 nt, Artificial Sequence
  Synthetic
augucauaacaugcucagcucaa

SEQ ID NO: 442693 - RNA, 24 nt, Artificial Sequence
  Synthetic
gaugucauaacaugcucagcucaa

SEQ ID NO: 442694 - RNA, 18 nt, Artificial Sequence
  Synthetic
ggugugaucucagcucaa

SEQ ID NO: 442695 - RNA, 19 nt, Artificial Sequence
  Synthetic
uggugugaucucagcucaa

SEQ ID NO: 442696 - RNA, 20 nt, Artificial Sequence
  Synthetic
auggugugaucucagcucaa

SEQ ID NO: 442697 - RNA, 21 nt, Artificial Sequence
  Synthetic
aauggugugaucucagcucaa

SEQ ID NO: 442698 - RNA, 22 nt, Artificial Sequence
  Synthetic
caauggugugaucucagcucaa

SEQ ID NO: 442699 - RNA, 23 nt, Artificial Sequence
  Synthetic
gcaauggugugaucucagcucaa

SEQ ID NO: 442700 - RNA, 24 nt, Artificial Sequence
  Synthetic
ugcaauggugugaucucagcucaa

SEQ ID NO: 442701 - RNA, 18 nt, Artificial Sequence
  Synthetic
cagggucauucagcucaa

SEQ ID NO: 442702 - RNA, 19 nt, Artificial Sequence
  Synthetic
ucagggucauucagcucaa

SEQ ID NO: 442703 - RNA, 20 nt, Artificial Sequence
  Synthetic
uucagggucauucagcucaa

SEQ ID NO: 442704 - RNA, 21 nt, Artificial Sequence
  Synthetic
auucagggucauucagcucaa

SEQ ID NO: 442705 - RNA, 22 nt, Artificial Sequence
  Synthetic
uauucagggucauucagcucaa

SEQ ID NO: 442706 - RNA, 23 nt, Artificial Sequence
  Synthetic
auauucagggucauucagcucaa

SEQ ID NO: 442707 - RNA, 24 nt, Artificial Sequence
  Synthetic
cauauucagggucauucagcucaa

SEQ ID NO: 442708 - RNA, 18 nt, Artificial Sequence
  Synthetic
uaccuucuaagagcucaa

SEQ ID NO: 442709 - RNA, 19 nt, Artificial Sequence
  Synthetic
cuaccuucuaagagcucaa

SEQ ID NO: 442710 - RNA, 20 nt, Artificial Sequence
  Synthetic
acuaccuucuaagagcucaa

SEQ ID NO: 442711 - RNA, 21 nt, Artificial Sequence
  Synthetic
uacuaccuucuaagagcucaa

SEQ ID NO: 442712 - RNA, 22 nt, Artificial Sequence
  Synthetic
uuacuaccuucuaagagcucaa

SEQ ID NO: 442713 - RNA, 23 nt, Artificial Sequence
  Synthetic
cuuacuaccuucuaagagcucaa

SEQ ID NO: 442714 - RNA, 24 nt, Artificial Sequence
  Synthetic
gcuuacuaccuucuaagagcucaa

SEQ ID NO: 442715 - RNA, 18 nt, Artificial Sequence
  Synthetic
aucagaaaaauagcucaa

SEQ ID NO: 442716 - RNA, 19 nt, Artificial Sequence
  Synthetic
uaucagaaaaauagcucaa

SEQ ID NO: 442717 - RNA, 20 nt, Artificial Sequence
  Synthetic
guaucagaaaaauagcucaa

SEQ ID NO: 442718 - RNA, 21 nt, Artificial Sequence
  Synthetic
aguaucagaaaaauagcucaa

SEQ ID NO: 442719 - RNA, 22 nt, Artificial Sequence
  Synthetic
aaguaucagaaaaauagcucaa

SEQ ID NO: 442720 - RNA, 23 nt, Artificial Sequence
  Synthetic
aaaguaucagaaaaauagcucaa

SEQ ID NO: 442721 - RNA, 24 nt, Artificial Sequence
  Synthetic
uaaaguaucagaaaaauagcucaa

SEQ ID NO: 442722 - RNA, 18 nt, Artificial Sequence
  Synthetic
cuucauuuaaaggcucaa

SEQ ID NO: 442723 - RNA, 19 nt, Artificial Sequence
  Synthetic
ucuucauuuaaaggcucaa

SEQ ID NO: 442724 - RNA, 20 nt, Artificial Sequence
  Synthetic
uucuucauuuaaaggcucaa

SEQ ID NO: 442725 - RNA, 21 nt, Artificial Sequence
  Synthetic
uuucuucauuuaaaggcucaa

SEQ ID NO: 442726 - RNA, 22 nt, Artificial Sequence
  Synthetic
uuuucuucauuuaaaggcucaa

SEQ ID NO: 442727 - RNA, 23 nt, Artificial Sequence
  Synthetic
auuuucuucauuuaaaggcucaa

SEQ ID NO: 442728 - RNA, 24 nt, Artificial Sequence
  Synthetic
gauuuucuucauuuaaaggcucaa

SEQ ID NO: 442729 - RNA, 18 nt, Artificial Sequence
  Synthetic
aauuuaagcagugcucaa

SEQ ID NO: 442730 - RNA, 19 nt, Artificial Sequence
  Synthetic
aaauuuaagcagugcucaa

SEQ ID NO: 442731 - RNA, 20 nt, Artificial Sequence
  Synthetic
aaaauuuaagcagugcucaa

SEQ ID NO: 442732 - RNA, 21 nt, Artificial Sequence
  Synthetic
uaaaauuuaagcagugcucaa

SEQ ID NO: 442733 - RNA, 22 nt, Artificial Sequence
  Synthetic
auaaaauuuaagcagugcucaa

SEQ ID NO: 442734 - RNA, 23 nt, Artificial Sequence
  Synthetic
aauaaaauuuaagcagugcucaa

SEQ ID NO: 442735 - RNA, 24 nt, Artificial Sequence
  Synthetic
uaauaaaauuuaagcagugcucaa

SEQ ID NO: 442736 - RNA, 18 nt, Artificial Sequence
  Synthetic
acugacacuauugcucaa

SEQ ID NO: 442737 - RNA, 19 nt, Artificial Sequence
  Synthetic
cacugacacuauugcucaa

SEQ ID NO: 442738 - RNA, 20 nt, Artificial Sequence
  Synthetic
ccacugacacuauugcucaa

SEQ ID NO: 442739 - RNA, 21 nt, Artificial Sequence
  Synthetic
cccacugacacuauugcucaa

SEQ ID NO: 442740 - RNA, 22 nt, Artificial Sequence
  Synthetic
ucccacugacacuauugcucaa

SEQ ID NO: 442741 - RNA, 23 nt, Artificial Sequence
  Synthetic
aucccacugacacuauugcucaa

SEQ ID NO: 442742 - RNA, 24 nt, Artificial Sequence
  Synthetic
aaucccacugacacuauugcucaa

SEQ ID NO: 442743 - RNA, 18 nt, Artificial Sequence
  Synthetic
gugcccacaaaaucucaa

SEQ ID NO: 442744 - RNA, 19 nt, Artificial Sequence
  Synthetic
ugugcccacaaaaucucaa

SEQ ID NO: 442745 - RNA, 20 nt, Artificial Sequence
  Synthetic
uugugcccacaaaaucucaa

SEQ ID NO: 442746 - RNA, 21 nt, Artificial Sequence
  Synthetic
cuugugcccacaaaaucucaa

SEQ ID NO: 442747 - RNA, 22 nt, Artificial Sequence
  Synthetic
ucuugugcccacaaaaucucaa

SEQ ID NO: 442748 - RNA, 23 nt, Artificial Sequence
  Synthetic
aucuugugcccacaaaaucucaa

SEQ ID NO: 442749 - RNA, 24 nt, Artificial Sequence
  Synthetic
aaucuugugcccacaaaaucucaa

SEQ ID NO: 442750 - RNA, 18 nt, Artificial Sequence
  Synthetic
ccgccacucaaaucucaa

SEQ ID NO: 442751 - RNA, 19 nt, Artificial Sequence
  Synthetic
gccgccacucaaaucucaa

SEQ ID NO: 442752 - RNA, 20 nt, Artificial Sequence
  Synthetic
ugccgccacucaaaucucaa

SEQ ID NO: 442753 - RNA, 21 nt, Artificial Sequence
  Synthetic
uugccgccacucaaaucucaa

SEQ ID NO: 442754 - RNA, 22 nt, Artificial Sequence
  Synthetic
uuugccgccacucaaaucucaa

SEQ ID NO: 442755 - RNA, 23 nt, Artificial Sequence
  Synthetic
auuugccgccacucaaaucucaa

SEQ ID NO: 442756 - RNA, 24 nt, Artificial Sequence
  Synthetic
uauuugccgccacucaaaucucaa

SEQ ID NO: 442757 - RNA, 18 nt, Artificial Sequence
  Synthetic
uggaaguugcaaucucaa

SEQ ID NO: 442758 - RNA, 19 nt, Artificial Sequence
  Synthetic
auggaaguugcaaucucaa

SEQ ID NO: 442759 - RNA, 20 nt, Artificial Sequence
  Synthetic
cauggaaguugcaaucucaa

SEQ ID NO: 442760 - RNA, 21 nt, Artificial Sequence
  Synthetic
acauggaaguugcaaucucaa

SEQ ID NO: 442761 - RNA, 22 nt, Artificial Sequence
  Synthetic
cacauggaaguugcaaucucaa

SEQ ID NO: 442762 - RNA, 23 nt, Artificial Sequence
  Synthetic
ccacauggaaguugcaaucucaa

SEQ ID NO: 442763 - RNA, 24 nt, Artificial Sequence
  Synthetic
gccacauggaaguugcaaucucaa

SEQ ID NO: 442764 - RNA, 18 nt, Artificial Sequence
  Synthetic
gccacuggggaaucucaa

SEQ ID NO: 442765 - RNA, 19 nt, Artificial Sequence
  Synthetic
agccacuggggaaucucaa

SEQ ID NO: 442766 - RNA, 20 nt, Artificial Sequence
  Synthetic
gagccacuggggaaucucaa

SEQ ID NO: 442767 - RNA, 21 nt, Artificial Sequence
  Synthetic
agagccacuggggaaucucaa

SEQ ID NO: 442768 - RNA, 22 nt, Artificial Sequence
  Synthetic
cagagccacuggggaaucucaa

SEQ ID NO: 442769 - RNA, 23 nt, Artificial Sequence
  Synthetic
acagagccacuggggaaucucaa

SEQ ID NO: 442770 - RNA, 24 nt, Artificial Sequence
  Synthetic
uacagagccacuggggaaucucaa

SEQ ID NO: 442771 - RNA, 18 nt, Artificial Sequence
  Synthetic
augugcuuugaaucucaa

SEQ ID NO: 442772 - RNA, 19 nt, Artificial Sequence
  Synthetic
aaugugcuuugaaucucaa

SEQ ID NO: 442773 - RNA, 20 nt, Artificial Sequence
  Synthetic
uaaugugcuuugaaucucaa

SEQ ID NO: 442774 - RNA, 21 nt, Artificial Sequence
  Synthetic
auaaugugcuuugaaucucaa

SEQ ID NO: 442775 - RNA, 22 nt, Artificial Sequence
  Synthetic
aauaaugugcuuugaaucucaa

SEQ ID NO: 442776 - RNA, 23 nt, Artificial Sequence
  Synthetic
caauaaugugcuuugaaucucaa

SEQ ID NO: 442777 - RNA, 24 nt, Artificial Sequence
  Synthetic
ucaauaaugugcuuugaaucucaa

SEQ ID NO: 442778 - RNA, 18 nt, Artificial Sequence
  Synthetic
cugcaaaagacaucucaa

SEQ ID NO: 442779 - RNA, 19 nt, Artificial Sequence
  Synthetic
gcugcaaaagacaucucaa

SEQ ID NO: 442780 - RNA, 20 nt, Artificial Sequence
  Synthetic
agcugcaaaagacaucucaa

SEQ ID NO: 442781 - RNA, 21 nt, Artificial Sequence
  Synthetic
aagcugcaaaagacaucucaa

SEQ ID NO: 442782 - RNA, 22 nt, Artificial Sequence
  Synthetic
aaagcugcaaaagacaucucaa

SEQ ID NO: 442783 - RNA, 23 nt, Artificial Sequence
  Synthetic
gaaagcugcaaaagacaucucaa

SEQ ID NO: 442784 - RNA, 24 nt, Artificial Sequence
  Synthetic
ggaaagcugcaaaagacaucucaa

SEQ ID NO: 442785 - RNA, 18 nt, Artificial Sequence
  Synthetic
ggagagcacugaucucaa

SEQ ID NO: 442786 - RNA, 19 nt, Artificial Sequence
  Synthetic
uggagagcacugaucucaa

SEQ ID NO: 442787 - RNA, 20 nt, Artificial Sequence
  Synthetic
uuggagagcacugaucucaa

SEQ ID NO: 442788 - RNA, 21 nt, Artificial Sequence
  Synthetic
auuggagagcacugaucucaa

SEQ ID NO: 442789 - RNA, 22 nt, Artificial Sequence
  Synthetic
cauuggagagcacugaucucaa

SEQ ID NO: 442790 - RNA, 23 nt, Artificial Sequence
  Synthetic
acauuggagagcacugaucucaa

SEQ ID NO: 442791 - RNA, 24 nt, Artificial Sequence
  Synthetic
cacauuggagagcacugaucucaa

SEQ ID NO: 442792 - RNA, 18 nt, Artificial Sequence
  Synthetic
aaagaagaaauaucucaa

SEQ ID NO: 442793 - RNA, 19 nt, Artificial Sequence
  Synthetic
aaaagaagaaauaucucaa

SEQ ID NO: 442794 - RNA, 20 nt, Artificial Sequence
  Synthetic
aaaaagaagaaauaucucaa

SEQ ID NO: 442795 - RNA, 21 nt, Artificial Sequence
  Synthetic
aaaaaagaagaaauaucucaa

SEQ ID NO: 442796 - RNA, 22 nt, Artificial Sequence
  Synthetic
caaaaaagaagaaauaucucaa

SEQ ID NO: 442797 - RNA, 23 nt, Artificial Sequence
  Synthetic
ucaaaaaagaagaaauaucucaa

SEQ ID NO: 442798 - RNA, 24 nt, Artificial Sequence
  Synthetic
aucaaaaaagaagaaauaucucaa

SEQ ID NO: 442799 - RNA, 18 nt, Artificial Sequence
  Synthetic
ucugucuuucuaucucaa

SEQ ID NO: 442800 - RNA, 19 nt, Artificial Sequence
  Synthetic
aucugucuuucuaucucaa

SEQ ID NO: 442801 - RNA, 20 nt, Artificial Sequence
  Synthetic
caucugucuuucuaucucaa

SEQ ID NO: 442802 - RNA, 21 nt, Artificial Sequence
  Synthetic
acaucugucuuucuaucucaa

SEQ ID NO: 442803 - RNA, 22 nt, Artificial Sequence
  Synthetic
aacaucugucuuucuaucucaa

SEQ ID NO: 442804 - RNA, 23 nt, Artificial Sequence
  Synthetic
uaacaucugucuuucuaucucaa

SEQ ID NO: 442805 - RNA, 24 nt, Artificial Sequence
  Synthetic
cuaacaucugucuuucuaucucaa

SEQ ID NO: 442806 - RNA, 18 nt, Artificial Sequence
  Synthetic
cgucugaacaccucucaa

SEQ ID NO: 442807 - RNA, 19 nt, Artificial Sequence
  Synthetic
ucgucugaacaccucucaa

SEQ ID NO: 442808 - RNA, 20 nt, Artificial Sequence
  Synthetic
gucgucugaacaccucucaa

SEQ ID NO: 442809 - RNA, 21 nt, Artificial Sequence
  Synthetic
ugucgucugaacaccucucaa

SEQ ID NO: 442810 - RNA, 22 nt, Artificial Sequence
  Synthetic
cugucgucugaacaccucucaa

SEQ ID NO: 442811 - RNA, 23 nt, Artificial Sequence
  Synthetic
ucugucgucugaacaccucucaa

SEQ ID NO: 442812 - RNA, 24 nt, Artificial Sequence
  Synthetic
cucugucgucugaacaccucucaa

SEQ ID NO: 442813 - RNA, 18 nt, Artificial Sequence
  Synthetic
auacuguacuucucucaa

SEQ ID NO: 442814 - RNA, 19 nt, Artificial Sequence
  Synthetic
uauacuguacuucucucaa

SEQ ID NO: 442815 - RNA, 20 nt, Artificial Sequence
  Synthetic
cuauacuguacuucucucaa

SEQ ID NO: 442816 - RNA, 21 nt, Artificial Sequence
  Synthetic
ccuauacuguacuucucucaa

SEQ ID NO: 442817 - RNA, 22 nt, Artificial Sequence
  Synthetic
gccuauacuguacuucucucaa

SEQ ID NO: 442818 - RNA, 23 nt, Artificial Sequence
  Synthetic
ugccuauacuguacuucucucaa

SEQ ID NO: 442819 - RNA, 24 nt, Artificial Sequence
  Synthetic
cugccuauacuguacuucucucaa

SEQ ID NO: 442820 - RNA, 18 nt, Artificial Sequence
  Synthetic
cuccuuuccuucucucaa

SEQ ID NO: 442821 - RNA, 19 nt, Artificial Sequence
  Synthetic
ucuccuuuccuucucucaa

SEQ ID NO: 442822 - RNA, 20 nt, Artificial Sequence
  Synthetic
gucuccuuuccuucucucaa

SEQ ID NO: 442823 - RNA, 21 nt, Artificial Sequence
  Synthetic
ugucuccuuuccuucucucaa

SEQ ID NO: 442824 - RNA, 22 nt, Artificial Sequence
  Synthetic
augucuccuuuccuucucucaa

SEQ ID NO: 442825 - RNA, 23 nt, Artificial Sequence
  Synthetic
aaugucuccuuuccuucucucaa

SEQ ID NO: 442826 - RNA, 24 nt, Artificial Sequence
  Synthetic
aaaugucuccuuuccuucucucaa

SEQ ID NO: 442827 - RNA, 18 nt, Artificial Sequence
  Synthetic
aacugugucuucucucaa

SEQ ID NO: 442828 - RNA, 19 nt, Artificial Sequence
  Synthetic
aaacugugucuucucucaa

SEQ ID NO: 442829 - RNA, 20 nt, Artificial Sequence
  Synthetic
aaaacugugucuucucucaa

SEQ ID NO: 442830 - RNA, 21 nt, Artificial Sequence
  Synthetic
gaaaacugugucuucucucaa

SEQ ID NO: 442831 - RNA, 22 nt, Artificial Sequence
  Synthetic
agaaaacugugucuucucucaa

SEQ ID NO: 442832 - RNA, 23 nt, Artificial Sequence
  Synthetic
uagaaaacugugucuucucucaa

SEQ ID NO: 442833 - RNA, 24 nt, Artificial Sequence
  Synthetic
cuagaaaacugugucuucucucaa

SEQ ID NO: 442834 - RNA, 18 nt, Artificial Sequence
  Synthetic
uugagaaguaggucucaa

SEQ ID NO: 442835 - RNA, 19 nt, Artificial Sequence
  Synthetic
uuugagaaguaggucucaa

SEQ ID NO: 442836 - RNA, 20 nt, Artificial Sequence
  Synthetic
uuuugagaaguaggucucaa

SEQ ID NO: 442837 - RNA, 21 nt, Artificial Sequence
  Synthetic
uuuuugagaaguaggucucaa

SEQ ID NO: 442838 - RNA, 22 nt, Artificial Sequence
  Synthetic
uuuuuugagaaguaggucucaa

SEQ ID NO: 442839 - RNA, 23 nt, Artificial Sequence
  Synthetic
uuuuuuugagaaguaggucucaa

SEQ ID NO: 442840 - RNA, 24 nt, Artificial Sequence
  Synthetic
auuuuuuugagaaguaggucucaa

SEQ ID NO: 442841 - RNA, 18 nt, Artificial Sequence
  Synthetic
acuucaacugggucucaa

SEQ ID NO: 442842 - RNA, 19 nt, Artificial Sequence
  Synthetic
cacuucaacugggucucaa

SEQ ID NO: 442843 - RNA, 20 nt, Artificial Sequence
  Synthetic
ccacuucaacugggucucaa

SEQ ID NO: 442844 - RNA, 21 nt, Artificial Sequence
  Synthetic
accacuucaacugggucucaa

SEQ ID NO: 442845 - RNA, 22 nt, Artificial Sequence
  Synthetic
aaccacuucaacugggucucaa

SEQ ID NO: 442846 - RNA, 23 nt, Artificial Sequence
  Synthetic
uaaccacuucaacugggucucaa

SEQ ID NO: 442847 - RNA, 24 nt, Artificial Sequence
  Synthetic
uuaaccacuucaacugggucucaa

SEQ ID NO: 442848 - RNA, 18 nt, Artificial Sequence
  Synthetic
uuaaugacugugucucaa

SEQ ID NO: 442849 - RNA, 19 nt, Artificial Sequence
  Synthetic
uuuaaugacugugucucaa

SEQ ID NO: 442850 - RNA, 20 nt, Artificial Sequence
  Synthetic
uuuuaaugacugugucucaa

SEQ ID NO: 442851 - RNA, 21 nt, Artificial Sequence
  Synthetic
uuuuuaaugacugugucucaa

SEQ ID NO: 442852 - RNA, 22 nt, Artificial Sequence
  Synthetic
auuuuuaaugacugugucucaa

SEQ ID NO: 442853 - RNA, 23 nt, Artificial Sequence
  Synthetic
aauuuuuaaugacugugucucaa

SEQ ID NO: 442854 - RNA, 24 nt, Artificial Sequence
  Synthetic
aaauuuuuaaugacugugucucaa

SEQ ID NO: 442855 - RNA, 18 nt, Artificial Sequence
  Synthetic
ggaacagacacuucucaa

SEQ ID NO: 442856 - RNA, 19 nt, Artificial Sequence
  Synthetic
aggaacagacacuucucaa

SEQ ID NO: 442857 - RNA, 20 nt, Artificial Sequence
  Synthetic
uaggaacagacacuucucaa

SEQ ID NO: 442858 - RNA, 21 nt, Artificial Sequence
  Synthetic
auaggaacagacacuucucaa

SEQ ID NO: 442859 - RNA, 22 nt, Artificial Sequence
  Synthetic
gauaggaacagacacuucucaa

SEQ ID NO: 442860 - RNA, 23 nt, Artificial Sequence
  Synthetic
ggauaggaacagacacuucucaa

SEQ ID NO: 442861 - RNA, 24 nt, Artificial Sequence
  Synthetic
aggauaggaacagacacuucucaa

SEQ ID NO: 442862 - RNA, 18 nt, Artificial Sequence
  Synthetic
ugaacagacacuucucaa

SEQ ID NO: 442863 - RNA, 19 nt, Artificial Sequence
  Synthetic
augaacagacacuucucaa

SEQ ID NO: 442864 - RNA, 20 nt, Artificial Sequence
  Synthetic
uaugaacagacacuucucaa

SEQ ID NO: 442865 - RNA, 21 nt, Artificial Sequence
  Synthetic
auaugaacagacacuucucaa

SEQ ID NO: 442866 - RNA, 22 nt, Artificial Sequence
  Synthetic
gauaugaacagacacuucucaa

SEQ ID NO: 442867 - RNA, 23 nt, Artificial Sequence
  Synthetic
ggauaugaacagacacuucucaa

SEQ ID NO: 442868 - RNA, 24 nt, Artificial Sequence
  Synthetic
aggauaugaacagacacuucucaa

SEQ ID NO: 442869 - RNA, 18 nt, Artificial Sequence
  Synthetic
uuuauagaaucuucucaa

SEQ ID NO: 442870 - RNA, 19 nt, Artificial Sequence
  Synthetic
uuuuauagaaucuucucaa

SEQ ID NO: 442871 - RNA, 20 nt, Artificial Sequence
  Synthetic
guuuuauagaaucuucucaa

SEQ ID NO: 442872 - RNA, 21 nt, Artificial Sequence
  Synthetic
aguuuuauagaaucuucucaa

SEQ ID NO: 442873 - RNA, 22 nt, Artificial Sequence
  Synthetic
uaguuuuauagaaucuucucaa

SEQ ID NO: 442874 - RNA, 23 nt, Artificial Sequence
  Synthetic
auaguuuuauagaaucuucucaa

SEQ ID NO: 442875 - RNA, 24 nt, Artificial Sequence
  Synthetic
uauaguuuuauagaaucuucucaa

SEQ ID NO: 442876 - RNA, 18 nt, Artificial Sequence
  Synthetic
caauuuuauucuucucaa

SEQ ID NO: 442877 - RNA, 19 nt, Artificial Sequence
  Synthetic
ccaauuuuauucuucucaa

SEQ ID NO: 442878 - RNA, 20 nt, Artificial Sequence
  Synthetic
uccaauuuuauucuucucaa

SEQ ID NO: 442879 - RNA, 21 nt, Artificial Sequence
  Synthetic
cuccaauuuuauucuucucaa

SEQ ID NO: 442880 - RNA, 22 nt, Artificial Sequence
  Synthetic
ucuccaauuuuauucuucucaa

SEQ ID NO: 442881 - RNA, 23 nt, Artificial Sequence
  Synthetic
cucuccaauuuuauucuucucaa

SEQ ID NO: 442882 - RNA, 24 nt, Artificial Sequence
  Synthetic
ccucuccaauuuuauucuucucaa

SEQ ID NO: 442883 - RNA, 18 nt, Artificial Sequence
  Synthetic
cgaauaggcauuucucaa

SEQ ID NO: 442884 - RNA, 19 nt, Artificial Sequence
  Synthetic
ucgaauaggcauuucucaa

SEQ ID NO: 442885 - RNA, 20 nt, Artificial Sequence
  Synthetic
uucgaauaggcauuucucaa

SEQ ID NO: 442886 - RNA, 21 nt, Artificial Sequence
  Synthetic
auucgaauaggcauuucucaa

SEQ ID NO: 442887 - RNA, 22 nt, Artificial Sequence
  Synthetic
gauucgaauaggcauuucucaa

SEQ ID NO: 442888 - RNA, 23 nt, Artificial Sequence
  Synthetic
agauucgaauaggcauuucucaa

SEQ ID NO: 442889 - RNA, 24 nt, Artificial Sequence
  Synthetic
aagauucgaauaggcauuucucaa

SEQ ID NO: 442890 - RNA, 18 nt, Artificial Sequence
  Synthetic
ucuguaaaggaaagucaa

SEQ ID NO: 442891 - RNA, 19 nt, Artificial Sequence
  Synthetic
aucuguaaaggaaagucaa

SEQ ID NO: 442892 - RNA, 20 nt, Artificial Sequence
  Synthetic
uaucuguaaaggaaagucaa

SEQ ID NO: 442893 - RNA, 21 nt, Artificial Sequence
  Synthetic
uuaucuguaaaggaaagucaa

SEQ ID NO: 442894 - RNA, 22 nt, Artificial Sequence
  Synthetic
guuaucuguaaaggaaagucaa

SEQ ID NO: 442895 - RNA, 23 nt, Artificial Sequence
  Synthetic
gguuaucuguaaaggaaagucaa

SEQ ID NO: 442896 - RNA, 24 nt, Artificial Sequence
  Synthetic
ggguuaucuguaaaggaaagucaa

SEQ ID NO: 442897 - RNA, 18 nt, Artificial Sequence
  Synthetic
ucaacuacuuaaagucaa

SEQ ID NO: 442898 - RNA, 19 nt, Artificial Sequence
  Synthetic
uucaacuacuuaaagucaa

SEQ ID NO: 442899 - RNA, 20 nt, Artificial Sequence
  Synthetic
guucaacuacuuaaagucaa

SEQ ID NO: 442900 - RNA, 21 nt, Artificial Sequence
  Synthetic
uguucaacuacuuaaagucaa

SEQ ID NO: 442901 - RNA, 22 nt, Artificial Sequence
  Synthetic
auguucaacuacuuaaagucaa

SEQ ID NO: 442902 - RNA, 23 nt, Artificial Sequence
  Synthetic
gauguucaacuacuuaaagucaa

SEQ ID NO: 442903 - RNA, 24 nt, Artificial Sequence
  Synthetic
ggauguucaacuacuuaaagucaa

SEQ ID NO: 442904 - RNA, 18 nt, Artificial Sequence
  Synthetic
aauagaggcccaagucaa

SEQ ID NO: 442905 - RNA, 19 nt, Artificial Sequence
  Synthetic
aaauagaggcccaagucaa

SEQ ID NO: 442906 - RNA, 20 nt, Artificial Sequence
  Synthetic
gaaauagaggcccaagucaa

SEQ ID NO: 442907 - RNA, 21 nt, Artificial Sequence
  Synthetic
agaaauagaggcccaagucaa

SEQ ID NO: 442908 - RNA, 22 nt, Artificial Sequence
  Synthetic
cagaaauagaggcccaagucaa

SEQ ID NO: 442909 - RNA, 23 nt, Artificial Sequence
  Synthetic
ccagaaauagaggcccaagucaa

SEQ ID NO: 442910 - RNA, 24 nt, Artificial Sequence
  Synthetic
uccagaaauagaggcccaagucaa

SEQ ID NO: 442911 - RNA, 18 nt, Artificial Sequence
  Synthetic
gggacagaggacagucaa

SEQ ID NO: 442912 - RNA, 19 nt, Artificial Sequence
  Synthetic
agggacagaggacagucaa

SEQ ID NO: 442913 - RNA, 20 nt, Artificial Sequence
  Synthetic
cagggacagaggacagucaa

SEQ ID NO: 442914 - RNA, 21 nt, Artificial Sequence
  Synthetic
ccagggacagaggacagucaa

SEQ ID NO: 442915 - RNA, 22 nt, Artificial Sequence
  Synthetic
gccagggacagaggacagucaa

SEQ ID NO: 442916 - RNA, 23 nt, Artificial Sequence
  Synthetic
agccagggacagaggacagucaa

SEQ ID NO: 442917 - RNA, 24 nt, Artificial Sequence
  Synthetic
aagccagggacagaggacagucaa

SEQ ID NO: 442918 - RNA, 18 nt, Artificial Sequence
  Synthetic
cucuugagggucagucaa

SEQ ID NO: 442919 - RNA, 19 nt, Artificial Sequence
  Synthetic
ccucuugagggucagucaa

SEQ ID NO: 442920 - RNA, 20 nt, Artificial Sequence
  Synthetic
cccucuugagggucagucaa

SEQ ID NO: 442921 - RNA, 21 nt, Artificial Sequence
  Synthetic
acccucuugagggucagucaa

SEQ ID NO: 442922 - RNA, 22 nt, Artificial Sequence
  Synthetic
gacccucuugagggucagucaa

SEQ ID NO: 442923 - RNA, 23 nt, Artificial Sequence
  Synthetic
agacccucuugagggucagucaa

SEQ ID NO: 442924 - RNA, 24 nt, Artificial Sequence
  Synthetic
uagacccucuugagggucagucaa

SEQ ID NO: 442925 - RNA, 18 nt, Artificial Sequence
  Synthetic
gauugugguaagagucaa

SEQ ID NO: 442926 - RNA, 19 nt, Artificial Sequence
  Synthetic
agauugugguaagagucaa

SEQ ID NO: 442927 - RNA, 20 nt, Artificial Sequence
  Synthetic
uagauugugguaagagucaa

SEQ ID NO: 442928 - RNA, 21 nt, Artificial Sequence
  Synthetic
auagauugugguaagagucaa

SEQ ID NO: 442929 - RNA, 22 nt, Artificial Sequence
  Synthetic
cauagauugugguaagagucaa

SEQ ID NO: 442930 - RNA, 23 nt, Artificial Sequence
  Synthetic
ucauagauugugguaagagucaa

SEQ ID NO: 442931 - RNA, 24 nt, Artificial Sequence
  Synthetic
cucauagauugugguaagagucaa

SEQ ID NO: 442932 - RNA, 18 nt, Artificial Sequence
  Synthetic
ugugagacacagagucaa

SEQ ID NO: 442933 - RNA, 19 nt, Artificial Sequence
  Synthetic
augugagacacagagucaa

SEQ ID NO: 442934 - RNA, 20 nt, Artificial Sequence
  Synthetic
gaugugagacacagagucaa

SEQ ID NO: 442935 - RNA, 21 nt, Artificial Sequence
  Synthetic
ggaugugagacacagagucaa

SEQ ID NO: 442936 - RNA, 22 nt, Artificial Sequence
  Synthetic
uggaugugagacacagagucaa

SEQ ID NO: 442937 - RNA, 23 nt, Artificial Sequence
  Synthetic
cuggaugugagacacagagucaa

SEQ ID NO: 442938 - RNA, 24 nt, Artificial Sequence
  Synthetic
ccuggaugugagacacagagucaa

SEQ ID NO: 442939 - RNA, 18 nt, Artificial Sequence
  Synthetic
uagaaggauuagagucaa

SEQ ID NO: 442940 - RNA, 19 nt, Artificial Sequence
  Synthetic
uuagaaggauuagagucaa

SEQ ID NO: 442941 - RNA, 20 nt, Artificial Sequence
  Synthetic
uuuagaaggauuagagucaa

SEQ ID NO: 442942 - RNA, 21 nt, Artificial Sequence
  Synthetic
cuuuagaaggauuagagucaa

SEQ ID NO: 442943 - RNA, 22 nt, Artificial Sequence
  Synthetic
acuuuagaaggauuagagucaa

SEQ ID NO: 442944 - RNA, 23 nt, Artificial Sequence
  Synthetic
gacuuuagaaggauuagagucaa

SEQ ID NO: 442945 - RNA, 24 nt, Artificial Sequence
  Synthetic
ugacuuuagaaggauuagagucaa

SEQ ID NO: 442946 - RNA, 18 nt, Artificial Sequence
  Synthetic
ugugagaaauggagucaa

SEQ ID NO: 442947 - RNA, 19 nt, Artificial Sequence
  Synthetic
augugagaaauggagucaa

SEQ ID NO: 442948 - RNA, 20 nt, Artificial Sequence
  Synthetic
gaugugagaaauggagucaa

SEQ ID NO: 442949 - RNA, 21 nt, Artificial Sequence
  Synthetic
ggaugugagaaauggagucaa

SEQ ID NO: 442950 - RNA, 22 nt, Artificial Sequence
  Synthetic
uggaugugagaaauggagucaa

SEQ ID NO: 442951 - RNA, 23 nt, Artificial Sequence
  Synthetic
cuggaugugagaaauggagucaa

SEQ ID NO: 442952 - RNA, 24 nt, Artificial Sequence
  Synthetic
ccuggaugugagaaauggagucaa

SEQ ID NO: 442953 - RNA, 18 nt, Artificial Sequence
  Synthetic
gcuugaaucugacgucaa

SEQ ID NO: 442954 - RNA, 19 nt, Artificial Sequence
  Synthetic
agcuugaaucugacgucaa

SEQ ID NO: 442955 - RNA, 20 nt, Artificial Sequence
  Synthetic
cagcuugaaucugacgucaa

SEQ ID NO: 442956 - RNA, 21 nt, Artificial Sequence
  Synthetic
gcagcuugaaucugacgucaa

SEQ ID NO: 442957 - RNA, 22 nt, Artificial Sequence
  Synthetic
ugcagcuugaaucugacgucaa

SEQ ID NO: 442958 - RNA, 23 nt, Artificial Sequence
  Synthetic
uugcagcuugaaucugacgucaa

SEQ ID NO: 442959 - RNA, 24 nt, Artificial Sequence
  Synthetic
uuugcagcuugaaucugacgucaa

SEQ ID NO: 442960 - RNA, 18 nt, Artificial Sequence
  Synthetic
ccuauccaugcgggucaa

SEQ ID NO: 442961 - RNA, 19 nt, Artificial Sequence
  Synthetic
uccuauccaugcgggucaa

SEQ ID NO: 442962 - RNA, 20 nt, Artificial Sequence
  Synthetic
uuccuauccaugcgggucaa

SEQ ID NO: 442963 - RNA, 21 nt, Artificial Sequence
  Synthetic
auuccuauccaugcgggucaa

SEQ ID NO: 442964 - RNA, 22 nt, Artificial Sequence
  Synthetic
uauuccuauccaugcgggucaa

SEQ ID NO: 442965 - RNA, 23 nt, Artificial Sequence
  Synthetic
guauuccuauccaugcgggucaa

SEQ ID NO: 442966 - RNA, 24 nt, Artificial Sequence
  Synthetic
cguauuccuauccaugcgggucaa

SEQ ID NO: 442967 - RNA, 18 nt, Artificial Sequence
  Synthetic
aaacaauuauugggucaa

SEQ ID NO: 442968 - RNA, 19 nt, Artificial Sequence
  Synthetic
uaaacaauuauugggucaa

SEQ ID NO: 442969 - RNA, 20 nt, Artificial Sequence
  Synthetic
cuaaacaauuauugggucaa

SEQ ID NO: 442970 - RNA, 21 nt, Artificial Sequence
  Synthetic
ccuaaacaauuauugggucaa

SEQ ID NO: 442971 - RNA, 22 nt, Artificial Sequence
  Synthetic
uccuaaacaauuauugggucaa

SEQ ID NO: 442972 - RNA, 23 nt, Artificial Sequence
  Synthetic
cuccuaaacaauuauugggucaa

SEQ ID NO: 442973 - RNA, 24 nt, Artificial Sequence
  Synthetic
gcuccuaaacaauuauugggucaa

SEQ ID NO: 442974 - RNA, 18 nt, Artificial Sequence
  Synthetic
gcagccagcaguggucaa

SEQ ID NO: 442975 - RNA, 19 nt, Artificial Sequence
  Synthetic
ugcagccagcaguggucaa

SEQ ID NO: 442976 - RNA, 20 nt, Artificial Sequence
  Synthetic
cugcagccagcaguggucaa

SEQ ID NO: 442977 - RNA, 21 nt, Artificial Sequence
  Synthetic
ccugcagccagcaguggucaa

SEQ ID NO: 442978 - RNA, 22 nt, Artificial Sequence
  Synthetic
gccugcagccagcaguggucaa

SEQ ID NO: 442979 - RNA, 23 nt, Artificial Sequence
  Synthetic
ugccugcagccagcaguggucaa

SEQ ID NO: 442980 - RNA, 24 nt, Artificial Sequence
  Synthetic
augccugcagccagcaguggucaa

SEQ ID NO: 442981 - RNA, 18 nt, Artificial Sequence
  Synthetic
aguuuacugauuggucaa

SEQ ID NO: 442982 - RNA, 19 nt, Artificial Sequence
  Synthetic
gaguuuacugauuggucaa

SEQ ID NO: 442983 - RNA, 20 nt, Artificial Sequence
  Synthetic
cgaguuuacugauuggucaa

SEQ ID NO: 442984 - RNA, 21 nt, Artificial Sequence
  Synthetic
ccgaguuuacugauuggucaa

SEQ ID NO: 442985 - RNA, 22 nt, Artificial Sequence
  Synthetic
accgaguuuacugauuggucaa

SEQ ID NO: 442986 - RNA, 23 nt, Artificial Sequence
  Synthetic
aaccgaguuuacugauuggucaa

SEQ ID NO: 442987 - RNA, 24 nt, Artificial Sequence
  Synthetic
uaaccgaguuuacugauuggucaa

SEQ ID NO: 442988 - RNA, 18 nt, Artificial Sequence
  Synthetic
uccuuauggguuggucaa

SEQ ID NO: 442989 - RNA, 19 nt, Artificial Sequence
  Synthetic
cuccuuauggguuggucaa

SEQ ID NO: 442990 - RNA, 20 nt, Artificial Sequence
  Synthetic
ucuccuuauggguuggucaa

SEQ ID NO: 442991 - RNA, 21 nt, Artificial Sequence
  Synthetic
aucuccuuauggguuggucaa

SEQ ID NO: 442992 - RNA, 22 nt, Artificial Sequence
  Synthetic
caucuccuuauggguuggucaa

SEQ ID NO: 442993 - RNA, 23 nt, Artificial Sequence
  Synthetic
ucaucuccuuauggguuggucaa

SEQ ID NO: 442994 - RNA, 24 nt, Artificial Sequence
  Synthetic
aucaucuccuuauggguuggucaa

SEQ ID NO: 442995 - RNA, 18 nt, Artificial Sequence
  Synthetic
ucccauauguuuggucaa

SEQ ID NO: 442996 - RNA, 19 nt, Artificial Sequence
  Synthetic
uucccauauguuuggucaa

SEQ ID NO: 442997 - RNA, 20 nt, Artificial Sequence
  Synthetic
cuucccauauguuuggucaa

SEQ ID NO: 442998 - RNA, 21 nt, Artificial Sequence
  Synthetic
gcuucccauauguuuggucaa

SEQ ID NO: 442999 - RNA, 22 nt, Artificial Sequence
  Synthetic
agcuucccauauguuuggucaa

SEQ ID NO: 443000 - RNA, 23 nt, Artificial Sequence
  Synthetic
aagcuucccauauguuuggucaa

SEQ ID NO: 443001 - RNA, 24 nt, Artificial Sequence
  Synthetic
gaagcuucccauauguuuggucaa

SEQ ID NO: 443002 - RNA, 18 nt, Artificial Sequence
  Synthetic
ugucuuuuaaaaugucaa

SEQ ID NO: 443003 - RNA, 19 nt, Artificial Sequence
  Synthetic
gugucuuuuaaaaugucaa

SEQ ID NO: 443004 - RNA, 20 nt, Artificial Sequence
  Synthetic
ugugucuuuuaaaaugucaa

SEQ ID NO: 443005 - RNA, 21 nt, Artificial Sequence
  Synthetic
augugucuuuuaaaaugucaa

SEQ ID NO: 443006 - RNA, 22 nt, Artificial Sequence
  Synthetic
gaugugucuuuuaaaaugucaa

SEQ ID NO: 443007 - RNA, 23 nt, Artificial Sequence
  Synthetic
ugaugugucuuuuaaaaugucaa

SEQ ID NO: 443008 - RNA, 24 nt, Artificial Sequence
  Synthetic
augaugugucuuuuaaaaugucaa

SEQ ID NO: 443009 - RNA, 18 nt, Artificial Sequence
  Synthetic
uuccugaauaaaugucaa

SEQ ID NO: 443010 - RNA, 19 nt, Artificial Sequence
  Synthetic
cuuccugaauaaaugucaa

SEQ ID NO: 443011 - RNA, 20 nt, Artificial Sequence
  Synthetic
ccuuccugaauaaaugucaa

SEQ ID NO: 443012 - RNA, 21 nt, Artificial Sequence
  Synthetic
uccuuccugaauaaaugucaa

SEQ ID NO: 443013 - RNA, 22 nt, Artificial Sequence
  Synthetic
uuccuuccugaauaaaugucaa

SEQ ID NO: 443014 - RNA, 23 nt, Artificial Sequence
  Synthetic
uuuccuuccugaauaaaugucaa

SEQ ID NO: 443015 - RNA, 24 nt, Artificial Sequence
  Synthetic
uuuuccuuccugaauaaaugucaa

SEQ ID NO: 443016 - RNA, 18 nt, Artificial Sequence
  Synthetic
agauuucuuaaaugucaa

SEQ ID NO: 443017 - RNA, 19 nt, Artificial Sequence
  Synthetic
cagauuucuuaaaugucaa

SEQ ID NO: 443018 - RNA, 20 nt, Artificial Sequence
  Synthetic
acagauuucuuaaaugucaa

SEQ ID NO: 443019 - RNA, 21 nt, Artificial Sequence
  Synthetic
aacagauuucuuaaaugucaa

SEQ ID NO: 443020 - RNA, 22 nt, Artificial Sequence
  Synthetic
aaacagauuucuuaaaugucaa

SEQ ID NO: 443021 - RNA, 23 nt, Artificial Sequence
  Synthetic
aaaacagauuucuuaaaugucaa

SEQ ID NO: 443022 - RNA, 24 nt, Artificial Sequence
  Synthetic
gaaaacagauuucuuaaaugucaa

SEQ ID NO: 443023 - RNA, 18 nt, Artificial Sequence
  Synthetic
auuccuauagaaugucaa

SEQ ID NO: 443024 - RNA, 19 nt, Artificial Sequence
  Synthetic
aauuccuauagaaugucaa

SEQ ID NO: 443025 - RNA, 20 nt, Artificial Sequence
  Synthetic
caauuccuauagaaugucaa

SEQ ID NO: 443026 - RNA, 21 nt, Artificial Sequence
  Synthetic
ccaauuccuauagaaugucaa

SEQ ID NO: 443027 - RNA, 22 nt, Artificial Sequence
  Synthetic
accaauuccuauagaaugucaa

SEQ ID NO: 443028 - RNA, 23 nt, Artificial Sequence
  Synthetic
gaccaauuccuauagaaugucaa

SEQ ID NO: 443029 - RNA, 24 nt, Artificial Sequence
  Synthetic
ugaccaauuccuauagaaugucaa

SEQ ID NO: 443030 - RNA, 18 nt, Artificial Sequence
  Synthetic
ggcuguugugaaugucaa

SEQ ID NO: 443031 - RNA, 19 nt, Artificial Sequence
  Synthetic
aggcuguugugaaugucaa

SEQ ID NO: 443032 - RNA, 20 nt, Artificial Sequence
  Synthetic
aaggcuguugugaaugucaa

SEQ ID NO: 443033 - RNA, 21 nt, Artificial Sequence
  Synthetic
caaggcuguugugaaugucaa

SEQ ID NO: 443034 - RNA, 22 nt, Artificial Sequence
  Synthetic
ccaaggcuguugugaaugucaa

SEQ ID NO: 443035 - RNA, 23 nt, Artificial Sequence
  Synthetic
uccaaggcuguugugaaugucaa

SEQ ID NO: 443036 - RNA, 24 nt, Artificial Sequence
  Synthetic
auccaaggcuguugugaaugucaa

SEQ ID NO: 443037 - RNA, 18 nt, Artificial Sequence
  Synthetic
cuuaucauuccaugucaa

SEQ ID NO: 443038 - RNA, 19 nt, Artificial Sequence
  Synthetic
ccuuaucauuccaugucaa

SEQ ID NO: 443039 - RNA, 20 nt, Artificial Sequence
  Synthetic
uccuuaucauuccaugucaa

SEQ ID NO: 443040 - RNA, 21 nt, Artificial Sequence
  Synthetic
cuccuuaucauuccaugucaa

SEQ ID NO: 443041 - RNA, 22 nt, Artificial Sequence
  Synthetic
ccuccuuaucauuccaugucaa

SEQ ID NO: 443042 - RNA, 23 nt, Artificial Sequence
  Synthetic
uccuccuuaucauuccaugucaa

SEQ ID NO: 443043 - RNA, 24 nt, Artificial Sequence
  Synthetic
uuccuccuuaucauuccaugucaa

SEQ ID NO: 443044 - RNA, 18 nt, Artificial Sequence
  Synthetic
gcaggugcuagaugucaa

SEQ ID NO: 443045 - RNA, 19 nt, Artificial Sequence
  Synthetic
agcaggugcuagaugucaa

SEQ ID NO: 443046 - RNA, 20 nt, Artificial Sequence
  Synthetic
cagcaggugcuagaugucaa

SEQ ID NO: 443047 - RNA, 21 nt, Artificial Sequence
  Synthetic
acagcaggugcuagaugucaa

SEQ ID NO: 443048 - RNA, 22 nt, Artificial Sequence
  Synthetic
gacagcaggugcuagaugucaa

SEQ ID NO: 443049 - RNA, 23 nt, Artificial Sequence
  Synthetic
ugacagcaggugcuagaugucaa

SEQ ID NO: 443050 - RNA, 24 nt, Artificial Sequence
  Synthetic
uugacagcaggugcuagaugucaa

SEQ ID NO: 443051 - RNA, 18 nt, Artificial Sequence
  Synthetic
uggaagacaugaugucaa

SEQ ID NO: 443052 - RNA, 19 nt, Artificial Sequence
  Synthetic
cuggaagacaugaugucaa

SEQ ID NO: 443053 - RNA, 20 nt, Artificial Sequence
  Synthetic
acuggaagacaugaugucaa

SEQ ID NO: 443054 - RNA, 21 nt, Artificial Sequence
  Synthetic
aacuggaagacaugaugucaa

SEQ ID NO: 443055 - RNA, 22 nt, Artificial Sequence
  Synthetic
gaacuggaagacaugaugucaa

SEQ ID NO: 443056 - RNA, 23 nt, Artificial Sequence
  Synthetic
ugaacuggaagacaugaugucaa

SEQ ID NO: 443057 - RNA, 24 nt, Artificial Sequence
  Synthetic
uugaacuggaagacaugaugucaa

SEQ ID NO: 443058 - RNA, 18 nt, Artificial Sequence
  Synthetic
uugacauaaauaugucaa

SEQ ID NO: 443059 - RNA, 19 nt, Artificial Sequence
  Synthetic
auugacauaaauaugucaa

SEQ ID NO: 443060 - RNA, 20 nt, Artificial Sequence
  Synthetic
aauugacauaaauaugucaa

SEQ ID NO: 443061 - RNA, 21 nt, Artificial Sequence
  Synthetic
aaauugacauaaauaugucaa

SEQ ID NO: 443062 - RNA, 22 nt, Artificial Sequence
  Synthetic
uaaauugacauaaauaugucaa

SEQ ID NO: 443063 - RNA, 23 nt, Artificial Sequence
  Synthetic
uuaaauugacauaaauaugucaa

SEQ ID NO: 443064 - RNA, 24 nt, Artificial Sequence
  Synthetic
guuaaauugacauaaauaugucaa

SEQ ID NO: 443065 - RNA, 18 nt, Artificial Sequence
  Synthetic
uuguuucuuguaugucaa

SEQ ID NO: 443066 - RNA, 19 nt, Artificial Sequence
  Synthetic
uuuguuucuuguaugucaa

SEQ ID NO: 443067 - RNA, 20 nt, Artificial Sequence
  Synthetic
guuuguuucuuguaugucaa

SEQ ID NO: 443068 - RNA, 21 nt, Artificial Sequence
  Synthetic
gguuuguuucuuguaugucaa

SEQ ID NO: 443069 - RNA, 22 nt, Artificial Sequence
  Synthetic
ggguuuguuucuuguaugucaa

SEQ ID NO: 443070 - RNA, 23 nt, Artificial Sequence
  Synthetic
uggguuuguuucuuguaugucaa

SEQ ID NO: 443071 - RNA, 24 nt, Artificial Sequence
  Synthetic
uuggguuuguuucuuguaugucaa

SEQ ID NO: 443072 - RNA, 18 nt, Artificial Sequence
  Synthetic
ucugagcucaacugucaa

SEQ ID NO: 443073 - RNA, 19 nt, Artificial Sequence
  Synthetic
cucugagcucaacugucaa

SEQ ID NO: 443074 - RNA, 20 nt, Artificial Sequence
  Synthetic
acucugagcucaacugucaa

SEQ ID NO: 443075 - RNA, 21 nt, Artificial Sequence
  Synthetic
cacucugagcucaacugucaa

SEQ ID NO: 443076 - RNA, 22 nt, Artificial Sequence
  Synthetic
ucacucugagcucaacugucaa

SEQ ID NO: 443077 - RNA, 23 nt, Artificial Sequence
  Synthetic
uucacucugagcucaacugucaa

SEQ ID NO: 443078 - RNA, 24 nt, Artificial Sequence
  Synthetic
uuucacucugagcucaacugucaa

SEQ ID NO: 443079 - RNA, 18 nt, Artificial Sequence
  Synthetic
agauuucucaccugucaa

SEQ ID NO: 443080 - RNA, 19 nt, Artificial Sequence
  Synthetic
gagauuucucaccugucaa

SEQ ID NO: 443081 - RNA, 20 nt, Artificial Sequence
  Synthetic
ugagauuucucaccugucaa

SEQ ID NO: 443082 - RNA, 21 nt, Artificial Sequence
  Synthetic
cugagauuucucaccugucaa

SEQ ID NO: 443083 - RNA, 22 nt, Artificial Sequence
  Synthetic
ccugagauuucucaccugucaa

SEQ ID NO: 443084 - RNA, 23 nt, Artificial Sequence
  Synthetic
cccugagauuucucaccugucaa

SEQ ID NO: 443085 - RNA, 24 nt, Artificial Sequence
  Synthetic
ccccugagauuucucaccugucaa

SEQ ID NO: 443086 - RNA, 18 nt, Artificial Sequence
  Synthetic
caugaauucaccugucaa

SEQ ID NO: 443087 - RNA, 19 nt, Artificial Sequence
  Synthetic
ucaugaauucaccugucaa

SEQ ID NO: 443088 - RNA, 20 nt, Artificial Sequence
  Synthetic
uucaugaauucaccugucaa

SEQ ID NO: 443089 - RNA, 21 nt, Artificial Sequence
  Synthetic
cuucaugaauucaccugucaa

SEQ ID NO: 443090 - RNA, 22 nt, Artificial Sequence
  Synthetic
ccuucaugaauucaccugucaa

SEQ ID NO: 443091 - RNA, 23 nt, Artificial Sequence
  Synthetic
gccuucaugaauucaccugucaa

SEQ ID NO: 443092 - RNA, 24 nt, Artificial Sequence
  Synthetic
agccuucaugaauucaccugucaa

SEQ ID NO: 443093 - RNA, 18 nt, Artificial Sequence
  Synthetic
auaauccccacgugucaa

SEQ ID NO: 443094 - RNA, 19 nt, Artificial Sequence
  Synthetic
cauaauccccacgugucaa

SEQ ID NO: 443095 - RNA, 20 nt, Artificial Sequence
  Synthetic
ccauaauccccacgugucaa

SEQ ID NO: 443096 - RNA, 21 nt, Artificial Sequence
  Synthetic
uccauaauccccacgugucaa

SEQ ID NO: 443097 - RNA, 22 nt, Artificial Sequence
  Synthetic
cuccauaauccccacgugucaa

SEQ ID NO: 443098 - RNA, 23 nt, Artificial Sequence
  Synthetic
ccuccauaauccccacgugucaa

SEQ ID NO: 443099 - RNA, 24 nt, Artificial Sequence
  Synthetic
accuccauaauccccacgugucaa

SEQ ID NO: 443100 - RNA, 18 nt, Artificial Sequence
  Synthetic
auaauccccaggugucaa

SEQ ID NO: 443101 - RNA, 19 nt, Artificial Sequence
  Synthetic
cauaauccccaggugucaa

SEQ ID NO: 443102 - RNA, 20 nt, Artificial Sequence
  Synthetic
ccauaauccccaggugucaa

SEQ ID NO: 443103 - RNA, 21 nt, Artificial Sequence
  Synthetic
cccauaauccccaggugucaa

SEQ ID NO: 443104 - RNA, 22 nt, Artificial Sequence
  Synthetic
ccccauaauccccaggugucaa

SEQ ID NO: 443105 - RNA, 23 nt, Artificial Sequence
  Synthetic
uccccauaauccccaggugucaa

SEQ ID NO: 443106 - RNA, 24 nt, Artificial Sequence
  Synthetic
auccccauaauccccaggugucaa

SEQ ID NO: 443107 - RNA, 18 nt, Artificial Sequence
  Synthetic
aggggaguuuggugucaa

SEQ ID NO: 443108 - RNA, 19 nt, Artificial Sequence
  Synthetic
gaggggaguuuggugucaa

SEQ ID NO: 443109 - RNA, 20 nt, Artificial Sequence
  Synthetic
agaggggaguuuggugucaa

SEQ ID NO: 443110 - RNA, 21 nt, Artificial Sequence
  Synthetic
cagaggggaguuuggugucaa

SEQ ID NO: 443111 - RNA, 22 nt, Artificial Sequence
  Synthetic
ucagaggggaguuuggugucaa

SEQ ID NO: 443112 - RNA, 23 nt, Artificial Sequence
  Synthetic
gucagaggggaguuuggugucaa

SEQ ID NO: 443113 - RNA, 24 nt, Artificial Sequence
  Synthetic
agucagaggggaguuuggugucaa

SEQ ID NO: 443114 - RNA, 18 nt, Artificial Sequence
  Synthetic
uccuucuucuauugucaa

SEQ ID NO: 443115 - RNA, 19 nt, Artificial Sequence
  Synthetic
uuccuucuucuauugucaa

SEQ ID NO: 443116 - RNA, 20 nt, Artificial Sequence
  Synthetic
uuuccuucuucuauugucaa

SEQ ID NO: 443117 - RNA, 21 nt, Artificial Sequence
  Synthetic
auuuccuucuucuauugucaa

SEQ ID NO: 443118 - RNA, 22 nt, Artificial Sequence
  Synthetic
cauuuccuucuucuauugucaa

SEQ ID NO: 443119 - RNA, 23 nt, Artificial Sequence
  Synthetic
ucauuuccuucuucuauugucaa

SEQ ID NO: 443120 - RNA, 24 nt, Artificial Sequence
  Synthetic
aucauuuccuucuucuauugucaa

SEQ ID NO: 443121 - RNA, 18 nt, Artificial Sequence
  Synthetic
uuacaaguuacuugucaa

SEQ ID NO: 443122 - RNA, 19 nt, Artificial Sequence
  Synthetic
uuuacaaguuacuugucaa

SEQ ID NO: 443123 - RNA, 20 nt, Artificial Sequence
  Synthetic
uuuuacaaguuacuugucaa

SEQ ID NO: 443124 - RNA, 21 nt, Artificial Sequence
  Synthetic
uuuuuacaaguuacuugucaa

SEQ ID NO: 443125 - RNA, 22 nt, Artificial Sequence
  Synthetic
auuuuuacaaguuacuugucaa

SEQ ID NO: 443126 - RNA, 23 nt, Artificial Sequence
  Synthetic
uauuuuuacaaguuacuugucaa

SEQ ID NO: 443127 - RNA, 24 nt, Artificial Sequence
  Synthetic
auauuuuuacaaguuacuugucaa

SEQ ID NO: 443128 - RNA, 18 nt, Artificial Sequence
  Synthetic
agacuucaaaaaauucaa

SEQ ID NO: 443129 - RNA, 19 nt, Artificial Sequence
  Synthetic
gagacuucaaaaaauucaa

SEQ ID NO: 443130 - RNA, 20 nt, Artificial Sequence
  Synthetic
agagacuucaaaaaauucaa

SEQ ID NO: 443131 - RNA, 21 nt, Artificial Sequence
  Synthetic
uagagacuucaaaaaauucaa

SEQ ID NO: 443132 - RNA, 22 nt, Artificial Sequence
  Synthetic
auagagacuucaaaaaauucaa

SEQ ID NO: 443133 - RNA, 23 nt, Artificial Sequence
  Synthetic
aauagagacuucaaaaaauucaa

SEQ ID NO: 443134 - RNA, 24 nt, Artificial Sequence
  Synthetic
aaauagagacuucaaaaaauucaa

SEQ ID NO: 443135 - RNA, 18 nt, Artificial Sequence
  Synthetic
ucaaaagaagaaauucaa

SEQ ID NO: 443136 - RNA, 19 nt, Artificial Sequence
  Synthetic
gucaaaagaagaaauucaa

SEQ ID NO: 443137 - RNA, 20 nt, Artificial Sequence
  Synthetic
ggucaaaagaagaaauucaa

SEQ ID NO: 443138 - RNA, 21 nt, Artificial Sequence
  Synthetic
gggucaaaagaagaaauucaa

SEQ ID NO: 443139 - RNA, 22 nt, Artificial Sequence
  Synthetic
ugggucaaaagaagaaauucaa

SEQ ID NO: 443140 - RNA, 23 nt, Artificial Sequence
  Synthetic
uugggucaaaagaagaaauucaa

SEQ ID NO: 443141 - RNA, 24 nt, Artificial Sequence
  Synthetic
auugggucaaaagaagaaauucaa

SEQ ID NO: 443142 - RNA, 18 nt, Artificial Sequence
  Synthetic
acucuuccugaaauucaa

SEQ ID NO: 443143 - RNA, 19 nt, Artificial Sequence
  Synthetic
aacucuuccugaaauucaa

SEQ ID NO: 443144 - RNA, 20 nt, Artificial Sequence
  Synthetic
uaacucuuccugaaauucaa

SEQ ID NO: 443145 - RNA, 21 nt, Artificial Sequence
  Synthetic
uuaacucuuccugaaauucaa

SEQ ID NO: 443146 - RNA, 22 nt, Artificial Sequence
  Synthetic
auuaacucuuccugaaauucaa

SEQ ID NO: 443147 - RNA, 23 nt, Artificial Sequence
  Synthetic
cauuaacucuuccugaaauucaa

SEQ ID NO: 443148 - RNA, 24 nt, Artificial Sequence
  Synthetic
ccauuaacucuuccugaaauucaa

SEQ ID NO: 443149 - RNA, 18 nt, Artificial Sequence
  Synthetic
cagcuauuuacaauucaa

SEQ ID NO: 443150 - RNA, 19 nt, Artificial Sequence
  Synthetic
acagcuauuuacaauucaa

SEQ ID NO: 443151 - RNA, 20 nt, Artificial Sequence
  Synthetic
cacagcuauuuacaauucaa

SEQ ID NO: 443152 - RNA, 21 nt, Artificial Sequence
  Synthetic
ccacagcuauuuacaauucaa

SEQ ID NO: 443153 - RNA, 22 nt, Artificial Sequence
  Synthetic
uccacagcuauuuacaauucaa

SEQ ID NO: 443154 - RNA, 23 nt, Artificial Sequence
  Synthetic
auccacagcuauuuacaauucaa

SEQ ID NO: 443155 - RNA, 24 nt, Artificial Sequence
  Synthetic
cauccacagcuauuuacaauucaa

SEQ ID NO: 443156 - RNA, 18 nt, Artificial Sequence
  Synthetic
aauuccguaagaauucaa

SEQ ID NO: 443157 - RNA, 19 nt, Artificial Sequence
  Synthetic
gaauuccguaagaauucaa

SEQ ID NO: 443158 - RNA, 20 nt, Artificial Sequence
  Synthetic
ugaauuccguaagaauucaa

SEQ ID NO: 443159 - RNA, 21 nt, Artificial Sequence
  Synthetic
augaauuccguaagaauucaa

SEQ ID NO: 443160 - RNA, 22 nt, Artificial Sequence
  Synthetic
aaugaauuccguaagaauucaa

SEQ ID NO: 443161 - RNA, 23 nt, Artificial Sequence
  Synthetic
uaaugaauuccguaagaauucaa

SEQ ID NO: 443162 - RNA, 24 nt, Artificial Sequence
  Synthetic
uuaaugaauuccguaagaauucaa

SEQ ID NO: 443163 - RNA, 18 nt, Artificial Sequence
  Synthetic
uaaauacaaauaauucaa

SEQ ID NO: 443164 - RNA, 19 nt, Artificial Sequence
  Synthetic
uuaaauacaaauaauucaa

SEQ ID NO: 443165 - RNA, 20 nt, Artificial Sequence
  Synthetic
uuuaaauacaaauaauucaa

SEQ ID NO: 443166 - RNA, 21 nt, Artificial Sequence
  Synthetic
auuuaaauacaaauaauucaa

SEQ ID NO: 443167 - RNA, 22 nt, Artificial Sequence
  Synthetic
gauuuaaauacaaauaauucaa

SEQ ID NO: 443168 - RNA, 23 nt, Artificial Sequence
  Synthetic
ggauuuaaauacaaauaauucaa

SEQ ID NO: 443169 - RNA, 24 nt, Artificial Sequence
  Synthetic
aggauuuaaauacaaauaauucaa

SEQ ID NO: 443170 - RNA, 18 nt, Artificial Sequence
  Synthetic
auggagaaaaacauucaa

SEQ ID NO: 443171 - RNA, 19 nt, Artificial Sequence
  Synthetic
cauggagaaaaacauucaa

SEQ ID NO: 443172 - RNA, 20 nt, Artificial Sequence
  Synthetic
ccauggagaaaaacauucaa

SEQ ID NO: 443173 - RNA, 21 nt, Artificial Sequence
  Synthetic
cccauggagaaaaacauucaa

SEQ ID NO: 443174 - RNA, 22 nt, Artificial Sequence
  Synthetic
acccauggagaaaaacauucaa

SEQ ID NO: 443175 - RNA, 23 nt, Artificial Sequence
  Synthetic
cacccauggagaaaaacauucaa

SEQ ID NO: 443176 - RNA, 24 nt, Artificial Sequence
  Synthetic
gcacccauggagaaaaacauucaa

SEQ ID NO: 443177 - RNA, 18 nt, Artificial Sequence
  Synthetic
uauaagacuagcauucaa

SEQ ID NO: 443178 - RNA, 19 nt, Artificial Sequence
  Synthetic
auauaagacuagcauucaa

SEQ ID NO: 443179 - RNA, 20 nt, Artificial Sequence
  Synthetic
uauauaagacuagcauucaa

SEQ ID NO: 443180 - RNA, 21 nt, Artificial Sequence
  Synthetic
guauauaagacuagcauucaa

SEQ ID NO: 443181 - RNA, 22 nt, Artificial Sequence
  Synthetic
uguauauaagacuagcauucaa

SEQ ID NO: 443182 - RNA, 23 nt, Artificial Sequence
  Synthetic
auguauauaagacuagcauucaa

SEQ ID NO: 443183 - RNA, 24 nt, Artificial Sequence
  Synthetic
uauguauauaagacuagcauucaa

SEQ ID NO: 443184 - RNA, 18 nt, Artificial Sequence
  Synthetic
auauuuuaacucauucaa

SEQ ID NO: 443185 - RNA, 19 nt, Artificial Sequence
  Synthetic
uauauuuuaacucauucaa

SEQ ID NO: 443186 - RNA, 20 nt, Artificial Sequence
  Synthetic
auauauuuuaacucauucaa

SEQ ID NO: 443187 - RNA, 21 nt, Artificial Sequence
  Synthetic
aauauauuuuaacucauucaa

SEQ ID NO: 443188 - RNA, 22 nt, Artificial Sequence
  Synthetic
uaauauauuuuaacucauucaa

SEQ ID NO: 443189 - RNA, 23 nt, Artificial Sequence
  Synthetic
uuaauauauuuuaacucauucaa

SEQ ID NO: 443190 - RNA, 24 nt, Artificial Sequence
  Synthetic
guuaauauauuuuaacucauucaa

SEQ ID NO: 443191 - RNA, 18 nt, Artificial Sequence
  Synthetic
acuaugaagaagauucaa

SEQ ID NO: 443192 - RNA, 19 nt, Artificial Sequence
  Synthetic
aacuaugaagaagauucaa

SEQ ID NO: 443193 - RNA, 20 nt, Artificial Sequence
  Synthetic
uaacuaugaagaagauucaa

SEQ ID NO: 443194 - RNA, 21 nt, Artificial Sequence
  Synthetic
cuaacuaugaagaagauucaa

SEQ ID NO: 443195 - RNA, 22 nt, Artificial Sequence
  Synthetic
acuaacuaugaagaagauucaa

SEQ ID NO: 443196 - RNA, 23 nt, Artificial Sequence
  Synthetic
gacuaacuaugaagaagauucaa

SEQ ID NO: 443197 - RNA, 24 nt, Artificial Sequence
  Synthetic
ugacuaacuaugaagaagauucaa

SEQ ID NO: 443198 - RNA, 18 nt, Artificial Sequence
  Synthetic
auagcuguagagauucaa

SEQ ID NO: 443199 - RNA, 19 nt, Artificial Sequence
  Synthetic
aauagcuguagagauucaa

SEQ ID NO: 443200 - RNA, 20 nt, Artificial Sequence
  Synthetic
aaauagcuguagagauucaa

SEQ ID NO: 443201 - RNA, 21 nt, Artificial Sequence
  Synthetic
uaaauagcuguagagauucaa

SEQ ID NO: 443202 - RNA, 22 nt, Artificial Sequence
  Synthetic
uuaaauagcuguagagauucaa

SEQ ID NO: 443203 - RNA, 23 nt, Artificial Sequence
  Synthetic
uuuaaauagcuguagagauucaa

SEQ ID NO: 443204 - RNA, 24 nt, Artificial Sequence
  Synthetic
uuuuaaauagcuguagagauucaa

SEQ ID NO: 443205 - RNA, 18 nt, Artificial Sequence
  Synthetic
uaguuuauauagauucaa

SEQ ID NO: 443206 - RNA, 19 nt, Artificial Sequence
  Synthetic
auaguuuauauagauucaa

SEQ ID NO: 443207 - RNA, 20 nt, Artificial Sequence
  Synthetic
uauaguuuauauagauucaa

SEQ ID NO: 443208 - RNA, 21 nt, Artificial Sequence
  Synthetic
uuauaguuuauauagauucaa

SEQ ID NO: 443209 - RNA, 22 nt, Artificial Sequence
  Synthetic
uuuauaguuuauauagauucaa

SEQ ID NO: 443210 - RNA, 23 nt, Artificial Sequence
  Synthetic
cuuuauaguuuauauagauucaa

SEQ ID NO: 443211 - RNA, 24 nt, Artificial Sequence
  Synthetic
ucuuuauaguuuauauagauucaa

SEQ ID NO: 443212 - RNA, 18 nt, Artificial Sequence
  Synthetic
cagguggugccgauucaa

SEQ ID NO: 443213 - RNA, 19 nt, Artificial Sequence
  Synthetic
ccagguggugccgauucaa

SEQ ID NO: 443214 - RNA, 20 nt, Artificial Sequence
  Synthetic
gccagguggugccgauucaa

SEQ ID NO: 443215 - RNA, 21 nt, Artificial Sequence
  Synthetic
ugccagguggugccgauucaa

SEQ ID NO: 443216 - RNA, 22 nt, Artificial Sequence
  Synthetic
cugccagguggugccgauucaa

SEQ ID NO: 443217 - RNA, 23 nt, Artificial Sequence
  Synthetic
acugccagguggugccgauucaa

SEQ ID NO: 443218 - RNA, 24 nt, Artificial Sequence
  Synthetic
uacugccagguggugccgauucaa

SEQ ID NO: 443219 - RNA, 18 nt, Artificial Sequence
  Synthetic
cuccuuccauugauucaa

SEQ ID NO: 443220 - RNA, 19 nt, Artificial Sequence
  Synthetic
ccuccuuccauugauucaa

SEQ ID NO: 443221 - RNA, 20 nt, Artificial Sequence
  Synthetic
gccuccuuccauugauucaa

SEQ ID NO: 443222 - RNA, 21 nt, Artificial Sequence
  Synthetic
agccuccuuccauugauucaa

SEQ ID NO: 443223 - RNA, 22 nt, Artificial Sequence
  Synthetic
uagccuccuuccauugauucaa

SEQ ID NO: 443224 - RNA, 23 nt, Artificial Sequence
  Synthetic
auagccuccuuccauugauucaa

SEQ ID NO: 443225 - RNA, 24 nt, Artificial Sequence
  Synthetic
uauagccuccuuccauugauucaa

SEQ ID NO: 443226 - RNA, 18 nt, Artificial Sequence
  Synthetic
auagaauuguauauucaa

SEQ ID NO: 443227 - RNA, 19 nt, Artificial Sequence
  Synthetic
uauagaauuguauauucaa

SEQ ID NO: 443228 - RNA, 20 nt, Artificial Sequence
  Synthetic
auauagaauuguauauucaa

SEQ ID NO: 443229 - RNA, 21 nt, Artificial Sequence
  Synthetic
uauauagaauuguauauucaa

SEQ ID NO: 443230 - RNA, 22 nt, Artificial Sequence
  Synthetic
guauauagaauuguauauucaa

SEQ ID NO: 443231 - RNA, 23 nt, Artificial Sequence
  Synthetic
aguauauagaauuguauauucaa

SEQ ID NO: 443232 - RNA, 24 nt, Artificial Sequence
  Synthetic
caguauauagaauuguauauucaa

SEQ ID NO: 443233 - RNA, 18 nt, Artificial Sequence
  Synthetic
uaagcccuuccuauucaa

SEQ ID NO: 443234 - RNA, 19 nt, Artificial Sequence
  Synthetic
uuaagcccuuccuauucaa

SEQ ID NO: 443235 - RNA, 20 nt, Artificial Sequence
  Synthetic
cuuaagcccuuccuauucaa

SEQ ID NO: 443236 - RNA, 21 nt, Artificial Sequence
  Synthetic
acuuaagcccuuccuauucaa

SEQ ID NO: 443237 - RNA, 22 nt, Artificial Sequence
  Synthetic
aacuuaagcccuuccuauucaa

SEQ ID NO: 443238 - RNA, 23 nt, Artificial Sequence
  Synthetic
uaacuuaagcccuuccuauucaa

SEQ ID NO: 443239 - RNA, 24 nt, Artificial Sequence
  Synthetic
uuaacuuaagcccuuccuauucaa

SEQ ID NO: 443240 - RNA, 18 nt, Artificial Sequence
  Synthetic
gaagagaacuguauucaa

SEQ ID NO: 443241 - RNA, 19 nt, Artificial Sequence
  Synthetic
cgaagagaacuguauucaa

SEQ ID NO: 443242 - RNA, 20 nt, Artificial Sequence
  Synthetic
ccgaagagaacuguauucaa

SEQ ID NO: 443243 - RNA, 21 nt, Artificial Sequence
  Synthetic
gccgaagagaacuguauucaa

SEQ ID NO: 443244 - RNA, 22 nt, Artificial Sequence
  Synthetic
agccgaagagaacuguauucaa

SEQ ID NO: 443245 - RNA, 23 nt, Artificial Sequence
  Synthetic
aagccgaagagaacuguauucaa

SEQ ID NO: 443246 - RNA, 24 nt, Artificial Sequence
  Synthetic
aaagccgaagagaacuguauucaa

SEQ ID NO: 443247 - RNA, 18 nt, Artificial Sequence
  Synthetic
auccacuuaauuauucaa

SEQ ID NO: 443248 - RNA, 19 nt, Artificial Sequence
  Synthetic
aauccacuuaauuauucaa

SEQ ID NO: 443249 - RNA, 20 nt, Artificial Sequence
  Synthetic
uaauccacuuaauuauucaa

SEQ ID NO: 443250 - RNA, 21 nt, Artificial Sequence
  Synthetic
uuaauccacuuaauuauucaa

SEQ ID NO: 443251 - RNA, 22 nt, Artificial Sequence
  Synthetic
uuuaauccacuuaauuauucaa

SEQ ID NO: 443252 - RNA, 23 nt, Artificial Sequence
  Synthetic
uuuuaauccacuuaauuauucaa

SEQ ID NO: 443253 - RNA, 24 nt, Artificial Sequence
  Synthetic
auuuuaauccacuuaauuauucaa

SEQ ID NO: 443254 - RNA, 18 nt, Artificial Sequence
  Synthetic
aaaacagauguuauucaa

SEQ ID NO: 443255 - RNA, 19 nt, Artificial Sequence
  Synthetic
aaaaacagauguuauucaa

SEQ ID NO: 443256 - RNA, 20 nt, Artificial Sequence
  Synthetic
uaaaaacagauguuauucaa

SEQ ID NO: 443257 - RNA, 21 nt, Artificial Sequence
  Synthetic
guaaaaacagauguuauucaa

SEQ ID NO: 443258 - RNA, 22 nt, Artificial Sequence
  Synthetic
uguaaaaacagauguuauucaa

SEQ ID NO: 443259 - RNA, 23 nt, Artificial Sequence
  Synthetic
cuguaaaaacagauguuauucaa

SEQ ID NO: 443260 - RNA, 24 nt, Artificial Sequence
  Synthetic
acuguaaaaacagauguuauucaa

SEQ ID NO: 443261 - RNA, 18 nt, Artificial Sequence
  Synthetic
cucaugaacaaacuucaa

SEQ ID NO: 443262 - RNA, 19 nt, Artificial Sequence
  Synthetic
ccucaugaacaaacuucaa

SEQ ID NO: 443263 - RNA, 20 nt, Artificial Sequence
  Synthetic
gccucaugaacaaacuucaa

SEQ ID NO: 443264 - RNA, 21 nt, Artificial Sequence
  Synthetic
ugccucaugaacaaacuucaa

SEQ ID NO: 443265 - RNA, 22 nt, Artificial Sequence
  Synthetic
gugccucaugaacaaacuucaa

SEQ ID NO: 443266 - RNA, 23 nt, Artificial Sequence
  Synthetic
ggugccucaugaacaaacuucaa

SEQ ID NO: 443267 - RNA, 24 nt, Artificial Sequence
  Synthetic
uggugccucaugaacaaacuucaa

SEQ ID NO: 443268 - RNA, 18 nt, Artificial Sequence
  Synthetic
guuacaaauacacuucaa

SEQ ID NO: 443269 - RNA, 19 nt, Artificial Sequence
  Synthetic
uguuacaaauacacuucaa

SEQ ID NO: 443270 - RNA, 20 nt, Artificial Sequence
  Synthetic
guguuacaaauacacuucaa

SEQ ID NO: 443271 - RNA, 21 nt, Artificial Sequence
  Synthetic
uguguuacaaauacacuucaa

SEQ ID NO: 443272 - RNA, 22 nt, Artificial Sequence
  Synthetic
cuguguuacaaauacacuucaa

SEQ ID NO: 443273 - RNA, 23 nt, Artificial Sequence
  Synthetic
acuguguuacaaauacacuucaa

SEQ ID NO: 443274 - RNA, 24 nt, Artificial Sequence
  Synthetic
aacuguguuacaaauacacuucaa

SEQ ID NO: 443275 - RNA, 18 nt, Artificial Sequence
  Synthetic
uguaguuccaaccuucaa

SEQ ID NO: 443276 - RNA, 19 nt, Artificial Sequence
  Synthetic
cuguaguuccaaccuucaa

SEQ ID NO: 443277 - RNA, 20 nt, Artificial Sequence
  Synthetic
acuguaguuccaaccuucaa

SEQ ID NO: 443278 - RNA, 21 nt, Artificial Sequence
  Synthetic
uacuguaguuccaaccuucaa

SEQ ID NO: 443279 - RNA, 22 nt, Artificial Sequence
  Synthetic
auacuguaguuccaaccuucaa

SEQ ID NO: 443280 - RNA, 23 nt, Artificial Sequence
  Synthetic
gauacuguaguuccaaccuucaa

SEQ ID NO: 443281 - RNA, 24 nt, Artificial Sequence
  Synthetic
ggauacuguaguuccaaccuucaa

SEQ ID NO: 443282 - RNA, 18 nt, Artificial Sequence
  Synthetic
accuagcaucaccuucaa

SEQ ID NO: 443283 - RNA, 19 nt, Artificial Sequence
  Synthetic
aaccuagcaucaccuucaa

SEQ ID NO: 443284 - RNA, 20 nt, Artificial Sequence
  Synthetic
aaaccuagcaucaccuucaa

SEQ ID NO: 443285 - RNA, 21 nt, Artificial Sequence
  Synthetic
uaaaccuagcaucaccuucaa

SEQ ID NO: 443286 - RNA, 22 nt, Artificial Sequence
  Synthetic
auaaaccuagcaucaccuucaa

SEQ ID NO: 443287 - RNA, 23 nt, Artificial Sequence
  Synthetic
aauaaaccuagcaucaccuucaa

SEQ ID NO: 443288 - RNA, 24 nt, Artificial Sequence
  Synthetic
aaauaaaccuagcaucaccuucaa

SEQ ID NO: 443289 - RNA, 18 nt, Artificial Sequence
  Synthetic
gaagccagugagcuucaa

SEQ ID NO: 443290 - RNA, 19 nt, Artificial Sequence
  Synthetic
agaagccagugagcuucaa

SEQ ID NO: 443291 - RNA, 20 nt, Artificial Sequence
  Synthetic
aagaagccagugagcuucaa

SEQ ID NO: 443292 - RNA, 21 nt, Artificial Sequence
  Synthetic
aaagaagccagugagcuucaa

SEQ ID NO: 443293 - RNA, 22 nt, Artificial Sequence
  Synthetic
aaaagaagccagugagcuucaa

SEQ ID NO: 443294 - RNA, 23 nt, Artificial Sequence
  Synthetic
gaaaagaagccagugagcuucaa

SEQ ID NO: 443295 - RNA, 24 nt, Artificial Sequence
  Synthetic
ugaaaagaagccagugagcuucaa

SEQ ID NO: 443296 - RNA, 18 nt, Artificial Sequence
  Synthetic
caaggaaaagggcuucaa

SEQ ID NO: 443297 - RNA, 19 nt, Artificial Sequence
  Synthetic
ccaaggaaaagggcuucaa

SEQ ID NO: 443298 - RNA, 20 nt, Artificial Sequence
  Synthetic
gccaaggaaaagggcuucaa

SEQ ID NO: 443299 - RNA, 21 nt, Artificial Sequence
  Synthetic
agccaaggaaaagggcuucaa

SEQ ID NO: 443300 - RNA, 22 nt, Artificial Sequence
  Synthetic
aagccaaggaaaagggcuucaa

SEQ ID NO: 443301 - RNA, 23 nt, Artificial Sequence
  Synthetic
caagccaaggaaaagggcuucaa

SEQ ID NO: 443302 - RNA, 24 nt, Artificial Sequence
  Synthetic
ccaagccaaggaaaagggcuucaa

SEQ ID NO: 443303 - RNA, 18 nt, Artificial Sequence
  Synthetic
aacgagcacuggcuucaa

SEQ ID NO: 443304 - RNA, 19 nt, Artificial Sequence
  Synthetic
aaacgagcacuggcuucaa

SEQ ID NO: 443305 - RNA, 20 nt, Artificial Sequence
  Synthetic
uaaacgagcacuggcuucaa

SEQ ID NO: 443306 - RNA, 21 nt, Artificial Sequence
  Synthetic
guaaacgagcacuggcuucaa

SEQ ID NO: 443307 - RNA, 22 nt, Artificial Sequence
  Synthetic
gguaaacgagcacuggcuucaa

SEQ ID NO: 443308 - RNA, 23 nt, Artificial Sequence
  Synthetic
ugguaaacgagcacuggcuucaa

SEQ ID NO: 443309 - RNA, 24 nt, Artificial Sequence
  Synthetic
augguaaacgagcacuggcuucaa

SEQ ID NO: 443310 - RNA, 18 nt, Artificial Sequence
  Synthetic
cauucacaacugcuucaa

SEQ ID NO: 443311 - RNA, 19 nt, Artificial Sequence
  Synthetic
acauucacaacugcuucaa

SEQ ID NO: 443312 - RNA, 20 nt, Artificial Sequence
  Synthetic
uacauucacaacugcuucaa

SEQ ID NO: 443313 - RNA, 21 nt, Artificial Sequence
  Synthetic
uuacauucacaacugcuucaa

SEQ ID NO: 443314 - RNA, 22 nt, Artificial Sequence
  Synthetic
uuuacauucacaacugcuucaa

SEQ ID NO: 443315 - RNA, 23 nt, Artificial Sequence
  Synthetic
auuuacauucacaacugcuucaa

SEQ ID NO: 443316 - RNA, 24 nt, Artificial Sequence
  Synthetic
gauuuacauucacaacugcuucaa

SEQ ID NO: 443317 - RNA, 18 nt, Artificial Sequence
  Synthetic
uccuauaaaaaucuucaa

SEQ ID NO: 443318 - RNA, 19 nt, Artificial Sequence
  Synthetic
uuccuauaaaaaucuucaa

SEQ ID NO: 443319 - RNA, 20 nt, Artificial Sequence
  Synthetic
uuuccuauaaaaaucuucaa

SEQ ID NO: 443320 - RNA, 21 nt, Artificial Sequence
  Synthetic
uuuuccuauaaaaaucuucaa

SEQ ID NO: 443321 - RNA, 22 nt, Artificial Sequence
  Synthetic
uuuuuccuauaaaaaucuucaa

SEQ ID NO: 443322 - RNA, 23 nt, Artificial Sequence
  Synthetic
guuuuuccuauaaaaaucuucaa

SEQ ID NO: 443323 - RNA, 24 nt, Artificial Sequence
  Synthetic
uguuuuuccuauaaaaaucuucaa

SEQ ID NO: 443324 - RNA, 18 nt, Artificial Sequence
  Synthetic
uccugauaaaaucuucaa

SEQ ID NO: 443325 - RNA, 19 nt, Artificial Sequence
  Synthetic
auccugauaaaaucuucaa

SEQ ID NO: 443326 - RNA, 20 nt, Artificial Sequence
  Synthetic
uauccugauaaaaucuucaa

SEQ ID NO: 443327 - RNA, 21 nt, Artificial Sequence
  Synthetic
uuauccugauaaaaucuucaa

SEQ ID NO: 443328 - RNA, 22 nt, Artificial Sequence
  Synthetic
uuuauccugauaaaaucuucaa

SEQ ID NO: 443329 - RNA, 23 nt, Artificial Sequence
  Synthetic
cuuuauccugauaaaaucuucaa

SEQ ID NO: 443330 - RNA, 24 nt, Artificial Sequence
  Synthetic
acuuuauccugauaaaaucuucaa

SEQ ID NO: 443331 - RNA, 18 nt, Artificial Sequence
  Synthetic
augauaacaucucuucaa

SEQ ID NO: 443332 - RNA, 19 nt, Artificial Sequence
  Synthetic
aaugauaacaucucuucaa

SEQ ID NO: 443333 - RNA, 20 nt, Artificial Sequence
  Synthetic
uaaugauaacaucucuucaa

SEQ ID NO: 443334 - RNA, 21 nt, Artificial Sequence
  Synthetic
auaaugauaacaucucuucaa

SEQ ID NO: 443335 - RNA, 22 nt, Artificial Sequence
  Synthetic
cauaaugauaacaucucuucaa

SEQ ID NO: 443336 - RNA, 23 nt, Artificial Sequence
  Synthetic
ccauaaugauaacaucucuucaa

SEQ ID NO: 443337 - RNA, 24 nt, Artificial Sequence
  Synthetic
uccauaaugauaacaucucuucaa

SEQ ID NO: 443338 - RNA, 18 nt, Artificial Sequence
  Synthetic
uuagaaaaaagucuucaa

SEQ ID NO: 443339 - RNA, 19 nt, Artificial Sequence
  Synthetic
auuagaaaaaagucuucaa

SEQ ID NO: 443340 - RNA, 20 nt, Artificial Sequence
  Synthetic
aauuagaaaaaagucuucaa

SEQ ID NO: 443341 - RNA, 21 nt, Artificial Sequence
  Synthetic
caauuagaaaaaagucuucaa

SEQ ID NO: 443342 - RNA, 22 nt, Artificial Sequence
  Synthetic
ucaauuagaaaaaagucuucaa

SEQ ID NO: 443343 - RNA, 23 nt, Artificial Sequence
  Synthetic
uucaauuagaaaaaagucuucaa

SEQ ID NO: 443344 - RNA, 24 nt, Artificial Sequence
  Synthetic
uuucaauuagaaaaaagucuucaa

SEQ ID NO: 443345 - RNA, 18 nt, Artificial Sequence
  Synthetic
gguguggcaggucuucaa

SEQ ID NO: 443346 - RNA, 19 nt, Artificial Sequence
  Synthetic
agguguggcaggucuucaa

SEQ ID NO: 443347 - RNA, 20 nt, Artificial Sequence
  Synthetic
uagguguggcaggucuucaa

SEQ ID NO: 443348 - RNA, 21 nt, Artificial Sequence
  Synthetic
guagguguggcaggucuucaa

SEQ ID NO: 443349 - RNA, 22 nt, Artificial Sequence
  Synthetic
aguagguguggcaggucuucaa

SEQ ID NO: 443350 - RNA, 23 nt, Artificial Sequence
  Synthetic
gaguagguguggcaggucuucaa

SEQ ID NO: 443351 - RNA, 24 nt, Artificial Sequence
  Synthetic
agaguagguguggcaggucuucaa

SEQ ID NO: 443352 - RNA, 18 nt, Artificial Sequence
  Synthetic
uucuauagaauucuucaa

SEQ ID NO: 443353 - RNA, 19 nt, Artificial Sequence
  Synthetic
auucuauagaauucuucaa

SEQ ID NO: 443354 - RNA, 20 nt, Artificial Sequence
  Synthetic
aauucuauagaauucuucaa

SEQ ID NO: 443355 - RNA, 21 nt, Artificial Sequence
  Synthetic
aaauucuauagaauucuucaa

SEQ ID NO: 443356 - RNA, 22 nt, Artificial Sequence
  Synthetic
aaaauucuauagaauucuucaa

SEQ ID NO: 443357 - RNA, 23 nt, Artificial Sequence
  Synthetic
aaaaauucuauagaauucuucaa

SEQ ID NO: 443358 - RNA, 24 nt, Artificial Sequence
  Synthetic
caaaaauucuauagaauucuucaa

SEQ ID NO: 443359 - RNA, 18 nt, Artificial Sequence
  Synthetic
ugcuaccagcuucuucaa

SEQ ID NO: 443360 - RNA, 19 nt, Artificial Sequence
  Synthetic
augcuaccagcuucuucaa

SEQ ID NO: 443361 - RNA, 20 nt, Artificial Sequence
  Synthetic
aaugcuaccagcuucuucaa

SEQ ID NO: 443362 - RNA, 21 nt, Artificial Sequence
  Synthetic
caaugcuaccagcuucuucaa

SEQ ID NO: 443363 - RNA, 22 nt, Artificial Sequence
  Synthetic
acaaugcuaccagcuucuucaa

SEQ ID NO: 443364 - RNA, 23 nt, Artificial Sequence
  Synthetic
uacaaugcuaccagcuucuucaa

SEQ ID NO: 443365 - RNA, 24 nt, Artificial Sequence
  Synthetic
auacaaugcuaccagcuucuucaa

SEQ ID NO: 443366 - RNA, 18 nt, Artificial Sequence
  Synthetic
cuccuuggaguucuucaa

SEQ ID NO: 443367 - RNA, 19 nt, Artificial Sequence
  Synthetic
gcuccuuggaguucuucaa

SEQ ID NO: 443368 - RNA, 20 nt, Artificial Sequence
  Synthetic
ggcuccuuggaguucuucaa

SEQ ID NO: 443369 - RNA, 21 nt, Artificial Sequence
  Synthetic
aggcuccuuggaguucuucaa

SEQ ID NO: 443370 - RNA, 22 nt, Artificial Sequence
  Synthetic
gaggcuccuuggaguucuucaa

SEQ ID NO: 443371 - RNA, 23 nt, Artificial Sequence
  Synthetic
agaggcuccuuggaguucuucaa

SEQ ID NO: 443372 - RNA, 24 nt, Artificial Sequence
  Synthetic
uagaggcuccuuggaguucuucaa

SEQ ID NO: 443373 - RNA, 18 nt, Artificial Sequence
  Synthetic
uugaaaguuguucuucaa

SEQ ID NO: 443374 - RNA, 19 nt, Artificial Sequence
  Synthetic
uuugaaaguuguucuucaa

SEQ ID NO: 443375 - RNA, 20 nt, Artificial Sequence
  Synthetic
guuugaaaguuguucuucaa

SEQ ID NO: 443376 - RNA, 21 nt, Artificial Sequence
  Synthetic
uguuugaaaguuguucuucaa

SEQ ID NO: 443377 - RNA, 22 nt, Artificial Sequence
  Synthetic
uuguuugaaaguuguucuucaa

SEQ ID NO: 443378 - RNA, 23 nt, Artificial Sequence
  Synthetic
uuuguuugaaaguuguucuucaa

SEQ ID NO: 443379 - RNA, 24 nt, Artificial Sequence
  Synthetic
guuuguuugaaaguuguucuucaa

SEQ ID NO: 443380 - RNA, 18 nt, Artificial Sequence
  Synthetic
caauauaaaccaguucaa

SEQ ID NO: 443381 - RNA, 19 nt, Artificial Sequence
  Synthetic
acaauauaaaccaguucaa

SEQ ID NO: 443382 - RNA, 20 nt, Artificial Sequence
  Synthetic
uacaauauaaaccaguucaa

SEQ ID NO: 443383 - RNA, 21 nt, Artificial Sequence
  Synthetic
auacaauauaaaccaguucaa

SEQ ID NO: 443384 - RNA, 22 nt, Artificial Sequence
  Synthetic
aauacaauauaaaccaguucaa

SEQ ID NO: 443385 - RNA, 23 nt, Artificial Sequence
  Synthetic
aaauacaauauaaaccaguucaa

SEQ ID NO: 443386 - RNA, 24 nt, Artificial Sequence
  Synthetic
uaaauacaauauaaaccaguucaa

SEQ ID NO: 443387 - RNA, 18 nt, Artificial Sequence
  Synthetic
uauucuuaauuaguucaa

SEQ ID NO: 443388 - RNA, 19 nt, Artificial Sequence
  Synthetic
auauucuuaauuaguucaa

SEQ ID NO: 443389 - RNA, 20 nt, Artificial Sequence
  Synthetic
uauauucuuaauuaguucaa

SEQ ID NO: 443390 - RNA, 21 nt, Artificial Sequence
  Synthetic
cuauauucuuaauuaguucaa

SEQ ID NO: 443391 - RNA, 22 nt, Artificial Sequence
  Synthetic
acuauauucuuaauuaguucaa

SEQ ID NO: 443392 - RNA, 23 nt, Artificial Sequence
  Synthetic
uacuauauucuuaauuaguucaa

SEQ ID NO: 443393 - RNA, 24 nt, Artificial Sequence
  Synthetic
uuacuauauucuuaauuaguucaa

SEQ ID NO: 443394 - RNA, 18 nt, Artificial Sequence
  Synthetic
gagaagcaguuaguucaa

SEQ ID NO: 443395 - RNA, 19 nt, Artificial Sequence
  Synthetic
ugagaagcaguuaguucaa

SEQ ID NO: 443396 - RNA, 20 nt, Artificial Sequence
  Synthetic
uugagaagcaguuaguucaa

SEQ ID NO: 443397 - RNA, 21 nt, Artificial Sequence
  Synthetic
auugagaagcaguuaguucaa

SEQ ID NO: 443398 - RNA, 22 nt, Artificial Sequence
  Synthetic
uauugagaagcaguuaguucaa

SEQ ID NO: 443399 - RNA, 23 nt, Artificial Sequence
  Synthetic
uuauugagaagcaguuaguucaa

SEQ ID NO: 443400 - RNA, 24 nt, Artificial Sequence
  Synthetic
cuuauugagaagcaguuaguucaa

SEQ ID NO: 443401 - RNA, 18 nt, Artificial Sequence
  Synthetic
agaacaugcuacguucaa

SEQ ID NO: 443402 - RNA, 19 nt, Artificial Sequence
  Synthetic
uagaacaugcuacguucaa

SEQ ID NO: 443403 - RNA, 20 nt, Artificial Sequence
  Synthetic
guagaacaugcuacguucaa

SEQ ID NO: 443404 - RNA, 21 nt, Artificial Sequence
  Synthetic
gguagaacaugcuacguucaa

SEQ ID NO: 443405 - RNA, 22 nt, Artificial Sequence
  Synthetic
ggguagaacaugcuacguucaa

SEQ ID NO: 443406 - RNA, 23 nt, Artificial Sequence
  Synthetic
uggguagaacaugcuacguucaa

SEQ ID NO: 443407 - RNA, 24 nt, Artificial Sequence
  Synthetic
auggguagaacaugcuacguucaa

SEQ ID NO: 443408 - RNA, 18 nt, Artificial Sequence
  Synthetic
ugacaacuuaccguucaa

SEQ ID NO: 443409 - RNA, 19 nt, Artificial Sequence
  Synthetic
cugacaacuuaccguucaa

SEQ ID NO: 443410 - RNA, 20 nt, Artificial Sequence
  Synthetic
acugacaacuuaccguucaa

SEQ ID NO: 443411 - RNA, 21 nt, Artificial Sequence
  Synthetic
gacugacaacuuaccguucaa

SEQ ID NO: 443412 - RNA, 22 nt, Artificial Sequence
  Synthetic
agacugacaacuuaccguucaa

SEQ ID NO: 443413 - RNA, 23 nt, Artificial Sequence
  Synthetic
uagacugacaacuuaccguucaa

SEQ ID NO: 443414 - RNA, 24 nt, Artificial Sequence
  Synthetic
uuagacugacaacuuaccguucaa

SEQ ID NO: 443415 - RNA, 18 nt, Artificial Sequence
  Synthetic
agauaugaggccguucaa

SEQ ID NO: 443416 - RNA, 19 nt, Artificial Sequence
  Synthetic
aagauaugaggccguucaa

SEQ ID NO: 443417 - RNA, 20 nt, Artificial Sequence
  Synthetic
gaagauaugaggccguucaa

SEQ ID NO: 443418 - RNA, 21 nt, Artificial Sequence
  Synthetic
agaagauaugaggccguucaa

SEQ ID NO: 443419 - RNA, 22 nt, Artificial Sequence
  Synthetic
gagaagauaugaggccguucaa

SEQ ID NO: 443420 - RNA, 23 nt, Artificial Sequence
  Synthetic
agagaagauaugaggccguucaa

SEQ ID NO: 443421 - RNA, 24 nt, Artificial Sequence
  Synthetic
cagagaagauaugaggccguucaa

SEQ ID NO: 443422 - RNA, 18 nt, Artificial Sequence
  Synthetic
aacagugugcagguucaa

SEQ ID NO: 443423 - RNA, 19 nt, Artificial Sequence
  Synthetic
aaacagugugcagguucaa

SEQ ID NO: 443424 - RNA, 20 nt, Artificial Sequence
  Synthetic
uaaacagugugcagguucaa

SEQ ID NO: 443425 - RNA, 21 nt, Artificial Sequence
  Synthetic
uuaaacagugugcagguucaa

SEQ ID NO: 443426 - RNA, 22 nt, Artificial Sequence
  Synthetic
guuaaacagugugcagguucaa

SEQ ID NO: 443427 - RNA, 23 nt, Artificial Sequence
  Synthetic
uguuaaacagugugcagguucaa

SEQ ID NO: 443428 - RNA, 24 nt, Artificial Sequence
  Synthetic
uuguuaaacagugugcagguucaa

SEQ ID NO: 443429 - RNA, 18 nt, Artificial Sequence
  Synthetic
aagacagcugggguucaa

SEQ ID NO: 443430 - RNA, 19 nt, Artificial Sequence
  Synthetic
gaagacagcugggguucaa

SEQ ID NO: 443431 - RNA, 20 nt, Artificial Sequence
  Synthetic
ugaagacagcugggguucaa

SEQ ID NO: 443432 - RNA, 21 nt, Artificial Sequence
  Synthetic
gugaagacagcugggguucaa

SEQ ID NO: 443433 - RNA, 22 nt, Artificial Sequence
  Synthetic
ggugaagacagcugggguucaa

SEQ ID NO: 443434 - RNA, 23 nt, Artificial Sequence
  Synthetic
cggugaagacagcugggguucaa

SEQ ID NO: 443435 - RNA, 24 nt, Artificial Sequence
  Synthetic
ucggugaagacagcugggguucaa

SEQ ID NO: 443436 - RNA, 18 nt, Artificial Sequence
  Synthetic
auaaaagaggugguucaa

SEQ ID NO: 443437 - RNA, 19 nt, Artificial Sequence
  Synthetic
aauaaaagaggugguucaa

SEQ ID NO: 443438 - RNA, 20 nt, Artificial Sequence
  Synthetic
aaauaaaagaggugguucaa

SEQ ID NO: 443439 - RNA, 21 nt, Artificial Sequence
  Synthetic
aaaauaaaagaggugguucaa

SEQ ID NO: 443440 - RNA, 22 nt, Artificial Sequence
  Synthetic
gaaaauaaaagaggugguucaa

SEQ ID NO: 443441 - RNA, 23 nt, Artificial Sequence
  Synthetic
ggaaaauaaaagaggugguucaa

SEQ ID NO: 443442 - RNA, 24 nt, Artificial Sequence
  Synthetic
cggaaaauaaaagaggugguucaa

SEQ ID NO: 443443 - RNA, 18 nt, Artificial Sequence
  Synthetic
uggccucuaaauguucaa

SEQ ID NO: 443444 - RNA, 19 nt, Artificial Sequence
  Synthetic
auggccucuaaauguucaa

SEQ ID NO: 443445 - RNA, 20 nt, Artificial Sequence
  Synthetic
uauggccucuaaauguucaa

SEQ ID NO: 443446 - RNA, 21 nt, Artificial Sequence
  Synthetic
cuauggccucuaaauguucaa

SEQ ID NO: 443447 - RNA, 22 nt, Artificial Sequence
  Synthetic
acuauggccucuaaauguucaa

SEQ ID NO: 443448 - RNA, 23 nt, Artificial Sequence
  Synthetic
uacuauggccucuaaauguucaa

SEQ ID NO: 443449 - RNA, 24 nt, Artificial Sequence
  Synthetic
guacuauggccucuaaauguucaa

SEQ ID NO: 443450 - RNA, 18 nt, Artificial Sequence
  Synthetic
aaagaaaugacuguucaa

SEQ ID NO: 443451 - RNA, 19 nt, Artificial Sequence
  Synthetic
uaaagaaaugacuguucaa

SEQ ID NO: 443452 - RNA, 20 nt, Artificial Sequence
  Synthetic
guaaagaaaugacuguucaa

SEQ ID NO: 443453 - RNA, 21 nt, Artificial Sequence
  Synthetic
gguaaagaaaugacuguucaa

SEQ ID NO: 443454 - RNA, 22 nt, Artificial Sequence
  Synthetic
agguaaagaaaugacuguucaa

SEQ ID NO: 443455 - RNA, 23 nt, Artificial Sequence
  Synthetic
cagguaaagaaaugacuguucaa

SEQ ID NO: 443456 - RNA, 24 nt, Artificial Sequence
  Synthetic
ccagguaaagaaaugacuguucaa

SEQ ID NO: 443457 - RNA, 18 nt, Artificial Sequence
  Synthetic
agccaccaguguguucaa

SEQ ID NO: 443458 - RNA, 19 nt, Artificial Sequence
  Synthetic
aagccaccaguguguucaa

SEQ ID NO: 443459 - RNA, 20 nt, Artificial Sequence
  Synthetic
uaagccaccaguguguucaa

SEQ ID NO: 443460 - RNA, 21 nt, Artificial Sequence
  Synthetic
uuaagccaccaguguguucaa

SEQ ID NO: 443461 - RNA, 22 nt, Artificial Sequence
  Synthetic
uuuaagccaccaguguguucaa

SEQ ID NO: 443462 - RNA, 23 nt, Artificial Sequence
  Synthetic
guuuaagccaccaguguguucaa

SEQ ID NO: 443463 - RNA, 24 nt, Artificial Sequence
  Synthetic
aguuuaagccaccaguguguucaa

SEQ ID NO: 443464 - RNA, 18 nt, Artificial Sequence
  Synthetic
aacgaucuugaauuucaa

SEQ ID NO: 443465 - RNA, 19 nt, Artificial Sequence
  Synthetic
caacgaucuugaauuucaa

SEQ ID NO: 443466 - RNA, 20 nt, Artificial Sequence
  Synthetic
ucaacgaucuugaauuucaa

SEQ ID NO: 443467 - RNA, 21 nt, Artificial Sequence
  Synthetic
uucaacgaucuugaauuucaa

SEQ ID NO: 443468 - RNA, 22 nt, Artificial Sequence
  Synthetic
auucaacgaucuugaauuucaa

SEQ ID NO: 443469 - RNA, 23 nt, Artificial Sequence
  Synthetic
gauucaacgaucuugaauuucaa

SEQ ID NO: 443470 - RNA, 24 nt, Artificial Sequence
  Synthetic
agauucaacgaucuugaauuucaa

SEQ ID NO: 443471 - RNA, 18 nt, Artificial Sequence
  Synthetic
gucuuucaauaauuucaa

SEQ ID NO: 443472 - RNA, 19 nt, Artificial Sequence
  Synthetic
ugucuuucaauaauuucaa

SEQ ID NO: 443473 - RNA, 20 nt, Artificial Sequence
  Synthetic
uugucuuucaauaauuucaa

SEQ ID NO: 443474 - RNA, 21 nt, Artificial Sequence
  Synthetic
uuugucuuucaauaauuucaa

SEQ ID NO: 443475 - RNA, 22 nt, Artificial Sequence
  Synthetic
auuugucuuucaauaauuucaa

SEQ ID NO: 443476 - RNA, 23 nt, Artificial Sequence
  Synthetic
cauuugucuuucaauaauuucaa

SEQ ID NO: 443477 - RNA, 24 nt, Artificial Sequence
  Synthetic
ccauuugucuuucaauaauuucaa

SEQ ID NO: 443478 - RNA, 18 nt, Artificial Sequence
  Synthetic
gccauaaccccauuucaa

SEQ ID NO: 443479 - RNA, 19 nt, Artificial Sequence
  Synthetic
ugccauaaccccauuucaa

SEQ ID NO: 443480 - RNA, 20 nt, Artificial Sequence
  Synthetic
uugccauaaccccauuucaa

SEQ ID NO: 443481 - RNA, 21 nt, Artificial Sequence
  Synthetic
guugccauaaccccauuucaa

SEQ ID NO: 443482 - RNA, 22 nt, Artificial Sequence
  Synthetic
uguugccauaaccccauuucaa

SEQ ID NO: 443483 - RNA, 23 nt, Artificial Sequence
  Synthetic
uuguugccauaaccccauuucaa

SEQ ID NO: 443484 - RNA, 24 nt, Artificial Sequence
  Synthetic
auuguugccauaaccccauuucaa

SEQ ID NO: 443485 - RNA, 18 nt, Artificial Sequence
  Synthetic
auuauuuucccauuucaa

SEQ ID NO: 443486 - RNA, 19 nt, Artificial Sequence
  Synthetic
uauuauuuucccauuucaa

SEQ ID NO: 443487 - RNA, 20 nt, Artificial Sequence
  Synthetic
uuauuauuuucccauuucaa

SEQ ID NO: 443488 - RNA, 21 nt, Artificial Sequence
  Synthetic
cuuauuauuuucccauuucaa

SEQ ID NO: 443489 - RNA, 22 nt, Artificial Sequence
  Synthetic
acuuauuauuuucccauuucaa

SEQ ID NO: 443490 - RNA, 23 nt, Artificial Sequence
  Synthetic
cacuuauuauuuucccauuucaa

SEQ ID NO: 443491 - RNA, 24 nt, Artificial Sequence
  Synthetic
ucacuuauuauuuucccauuucaa

SEQ ID NO: 443492 - RNA, 18 nt, Artificial Sequence
  Synthetic
uccaacucagcauuucaa

SEQ ID NO: 443493 - RNA, 19 nt, Artificial Sequence
  Synthetic
uuccaacucagcauuucaa

SEQ ID NO: 443494 - RNA, 20 nt, Artificial Sequence
  Synthetic
uuuccaacucagcauuucaa

SEQ ID NO: 443495 - RNA, 21 nt, Artificial Sequence
  Synthetic
uuuuccaacucagcauuucaa

SEQ ID NO: 443496 - RNA, 22 nt, Artificial Sequence
  Synthetic
cuuuuccaacucagcauuucaa

SEQ ID NO: 443497 - RNA, 23 nt, Artificial Sequence
  Synthetic
ucuuuuccaacucagcauuucaa

SEQ ID NO: 443498 - RNA, 24 nt, Artificial Sequence
  Synthetic
aucuuuuccaacucagcauuucaa

SEQ ID NO: 443499 - RNA, 18 nt, Artificial Sequence
  Synthetic
acaucccuugcauuucaa

SEQ ID NO: 443500 - RNA, 19 nt, Artificial Sequence
  Synthetic
uacaucccuugcauuucaa

SEQ ID NO: 443501 - RNA, 20 nt, Artificial Sequence
  Synthetic
cuacaucccuugcauuucaa

SEQ ID NO: 443502 - RNA, 21 nt, Artificial Sequence
  Synthetic
ucuacaucccuugcauuucaa

SEQ ID NO: 443503 - RNA, 22 nt, Artificial Sequence
  Synthetic
uucuacaucccuugcauuucaa

SEQ ID NO: 443504 - RNA, 23 nt, Artificial Sequence
  Synthetic
auucuacaucccuugcauuucaa

SEQ ID NO: 443505 - RNA, 24 nt, Artificial Sequence
  Synthetic
uauucuacaucccuugcauuucaa

SEQ ID NO: 443506 - RNA, 18 nt, Artificial Sequence
  Synthetic
uccuacaguucauuucaa

SEQ ID NO: 443507 - RNA, 19 nt, Artificial Sequence
  Synthetic
auccuacaguucauuucaa

SEQ ID NO: 443508 - RNA, 20 nt, Artificial Sequence
  Synthetic
cauccuacaguucauuucaa

SEQ ID NO: 443509 - RNA, 21 nt, Artificial Sequence
  Synthetic
acauccuacaguucauuucaa

SEQ ID NO: 443510 - RNA, 22 nt, Artificial Sequence
  Synthetic
uacauccuacaguucauuucaa

SEQ ID NO: 443511 - RNA, 23 nt, Artificial Sequence
  Synthetic
guacauccuacaguucauuucaa

SEQ ID NO: 443512 - RNA, 24 nt, Artificial Sequence
  Synthetic
uguacauccuacaguucauuucaa

SEQ ID NO: 443513 - RNA, 18 nt, Artificial Sequence
  Synthetic
ccauuuuauagauuucaa

SEQ ID NO: 443514 - RNA, 19 nt, Artificial Sequence
  Synthetic
cccauuuuauagauuucaa

SEQ ID NO: 443515 - RNA, 20 nt, Artificial Sequence
  Synthetic
ucccauuuuauagauuucaa

SEQ ID NO: 443516 - RNA, 21 nt, Artificial Sequence
  Synthetic
aucccauuuuauagauuucaa

SEQ ID NO: 443517 - RNA, 22 nt, Artificial Sequence
  Synthetic
caucccauuuuauagauuucaa

SEQ ID NO: 443518 - RNA, 23 nt, Artificial Sequence
  Synthetic
ccaucccauuuuauagauuucaa

SEQ ID NO: 443519 - RNA, 24 nt, Artificial Sequence
  Synthetic
uccaucccauuuuauagauuucaa

SEQ ID NO: 443520 - RNA, 18 nt, Artificial Sequence
  Synthetic
ucuuaaggucgauuucaa

SEQ ID NO: 443521 - RNA, 19 nt, Artificial Sequence
  Synthetic
gucuuaaggucgauuucaa

SEQ ID NO: 443522 - RNA, 20 nt, Artificial Sequence
  Synthetic
ugucuuaaggucgauuucaa

SEQ ID NO: 443523 - RNA, 21 nt, Artificial Sequence
  Synthetic
augucuuaaggucgauuucaa

SEQ ID NO: 443524 - RNA, 22 nt, Artificial Sequence
  Synthetic
aaugucuuaaggucgauuucaa

SEQ ID NO: 443525 - RNA, 23 nt, Artificial Sequence
  Synthetic
uaaugucuuaaggucgauuucaa

SEQ ID NO: 443526 - RNA, 24 nt, Artificial Sequence
  Synthetic
uuaaugucuuaaggucgauuucaa

SEQ ID NO: 443527 - RNA, 18 nt, Artificial Sequence
  Synthetic
auaucaaaaauauuucaa

SEQ ID NO: 443528 - RNA, 19 nt, Artificial Sequence
  Synthetic
gauaucaaaaauauuucaa

SEQ ID NO: 443529 - RNA, 20 nt, Artificial Sequence
  Synthetic
agauaucaaaaauauuucaa

SEQ ID NO: 443530 - RNA, 21 nt, Artificial Sequence
  Synthetic
uagauaucaaaaauauuucaa

SEQ ID NO: 443531 - RNA, 22 nt, Artificial Sequence
  Synthetic
uuagauaucaaaaauauuucaa

SEQ ID NO: 443532 - RNA, 23 nt, Artificial Sequence
  Synthetic
cuuagauaucaaaaauauuucaa

SEQ ID NO: 443533 - RNA, 24 nt, Artificial Sequence
  Synthetic
ucuuagauaucaaaaauauuucaa

SEQ ID NO: 443534 - RNA, 18 nt, Artificial Sequence
  Synthetic
aaggaguagguauuucaa

SEQ ID NO: 443535 - RNA, 19 nt, Artificial Sequence
  Synthetic
gaaggaguagguauuucaa

SEQ ID NO: 443536 - RNA, 20 nt, Artificial Sequence
  Synthetic
agaaggaguagguauuucaa

SEQ ID NO: 443537 - RNA, 21 nt, Artificial Sequence
  Synthetic
aagaaggaguagguauuucaa

SEQ ID NO: 443538 - RNA, 22 nt, Artificial Sequence
  Synthetic
gaagaaggaguagguauuucaa

SEQ ID NO: 443539 - RNA, 23 nt, Artificial Sequence
  Synthetic
ggaagaaggaguagguauuucaa

SEQ ID NO: 443540 - RNA, 24 nt, Artificial Sequence
  Synthetic
uggaagaaggaguagguauuucaa

SEQ ID NO: 443541 - RNA, 18 nt, Artificial Sequence
  Synthetic
guauguaaguuauuucaa

SEQ ID NO: 443542 - RNA, 19 nt, Artificial Sequence
  Synthetic
uguauguaaguuauuucaa

SEQ ID NO: 443543 - RNA, 20 nt, Artificial Sequence
  Synthetic
auguauguaaguuauuucaa

SEQ ID NO: 443544 - RNA, 21 nt, Artificial Sequence
  Synthetic
cauguauguaaguuauuucaa

SEQ ID NO: 443545 - RNA, 22 nt, Artificial Sequence
  Synthetic
acauguauguaaguuauuucaa

SEQ ID NO: 443546 - RNA, 23 nt, Artificial Sequence
  Synthetic
cacauguauguaaguuauuucaa

SEQ ID NO: 443547 - RNA, 24 nt, Artificial Sequence
  Synthetic
acacauguauguaaguuauuucaa

SEQ ID NO: 443548 - RNA, 18 nt, Artificial Sequence
  Synthetic
gcaauugaugacuuucaa

SEQ ID NO: 443549 - RNA, 19 nt, Artificial Sequence
  Synthetic
ugcaauugaugacuuucaa

SEQ ID NO: 443550 - RNA, 20 nt, Artificial Sequence
  Synthetic
augcaauugaugacuuucaa

SEQ ID NO: 443551 - RNA, 21 nt, Artificial Sequence
  Synthetic
aaugcaauugaugacuuucaa

SEQ ID NO: 443552 - RNA, 22 nt, Artificial Sequence
  Synthetic
uaaugcaauugaugacuuucaa

SEQ ID NO: 443553 - RNA, 23 nt, Artificial Sequence
  Synthetic
cuaaugcaauugaugacuuucaa

SEQ ID NO: 443554 - RNA, 24 nt, Artificial Sequence
  Synthetic
gcuaaugcaauugaugacuuucaa

SEQ ID NO: 443555 - RNA, 18 nt, Artificial Sequence
  Synthetic
caacucuacuacuuucaa

SEQ ID NO: 443556 - RNA, 19 nt, Artificial Sequence
  Synthetic
acaacucuacuacuuucaa

SEQ ID NO: 443557 - RNA, 20 nt, Artificial Sequence
  Synthetic
cacaacucuacuacuuucaa

SEQ ID NO: 443558 - RNA, 21 nt, Artificial Sequence
  Synthetic
ucacaacucuacuacuuucaa

SEQ ID NO: 443559 - RNA, 22 nt, Artificial Sequence
  Synthetic
aucacaacucuacuacuuucaa

SEQ ID NO: 443560 - RNA, 23 nt, Artificial Sequence
  Synthetic
caucacaacucuacuacuuucaa

SEQ ID NO: 443561 - RNA, 24 nt, Artificial Sequence
  Synthetic
gcaucacaacucuacuacuuucaa

SEQ ID NO: 443562 - RNA, 18 nt, Artificial Sequence
  Synthetic
uccaaggcaagcuuucaa

SEQ ID NO: 443563 - RNA, 19 nt, Artificial Sequence
  Synthetic
uuccaaggcaagcuuucaa

SEQ ID NO: 443564 - RNA, 20 nt, Artificial Sequence
  Synthetic
cuuccaaggcaagcuuucaa

SEQ ID NO: 443565 - RNA, 21 nt, Artificial Sequence
  Synthetic
ccuuccaaggcaagcuuucaa

SEQ ID NO: 443566 - RNA, 22 nt, Artificial Sequence
  Synthetic
uccuuccaaggcaagcuuucaa

SEQ ID NO: 443567 - RNA, 23 nt, Artificial Sequence
  Synthetic
guccuuccaaggcaagcuuucaa

SEQ ID NO: 443568 - RNA, 24 nt, Artificial Sequence
  Synthetic
gguccuuccaaggcaagcuuucaa

SEQ ID NO: 443569 - RNA, 18 nt, Artificial Sequence
  Synthetic
aaagguuaacucuuucaa

SEQ ID NO: 443570 - RNA, 19 nt, Artificial Sequence
  Synthetic
gaaagguuaacucuuucaa

SEQ ID NO: 443571 - RNA, 20 nt, Artificial Sequence
  Synthetic
agaaagguuaacucuuucaa

SEQ ID NO: 443572 - RNA, 21 nt, Artificial Sequence
  Synthetic
cagaaagguuaacucuuucaa

SEQ ID NO: 443573 - RNA, 22 nt, Artificial Sequence
  Synthetic
ucagaaagguuaacucuuucaa

SEQ ID NO: 443574 - RNA, 23 nt, Artificial Sequence
  Synthetic
uucagaaagguuaacucuuucaa

SEQ ID NO: 443575 - RNA, 24 nt, Artificial Sequence
  Synthetic
cuucagaaagguuaacucuuucaa

SEQ ID NO: 443576 - RNA, 18 nt, Artificial Sequence
  Synthetic
agaugcaguauguuucaa

SEQ ID NO: 443577 - RNA, 19 nt, Artificial Sequence
  Synthetic
cagaugcaguauguuucaa

SEQ ID NO: 443578 - RNA, 20 nt, Artificial Sequence
  Synthetic
acagaugcaguauguuucaa

SEQ ID NO: 443579 - RNA, 21 nt, Artificial Sequence
  Synthetic
aacagaugcaguauguuucaa

SEQ ID NO: 443580 - RNA, 22 nt, Artificial Sequence
  Synthetic
aaacagaugcaguauguuucaa

SEQ ID NO: 443581 - RNA, 23 nt, Artificial Sequence
  Synthetic
caaacagaugcaguauguuucaa

SEQ ID NO: 443582 - RNA, 24 nt, Artificial Sequence
  Synthetic
ccaaacagaugcaguauguuucaa

SEQ ID NO: 443583 - RNA, 18 nt, Artificial Sequence
  Synthetic
agaggaugaaauuuucaa

SEQ ID NO: 443584 - RNA, 19 nt, Artificial Sequence
  Synthetic
uagaggaugaaauuuucaa

SEQ ID NO: 443585 - RNA, 20 nt, Artificial Sequence
  Synthetic
uuagaggaugaaauuuucaa

SEQ ID NO: 443586 - RNA, 21 nt, Artificial Sequence
  Synthetic
uuuagaggaugaaauuuucaa

SEQ ID NO: 443587 - RNA, 22 nt, Artificial Sequence
  Synthetic
uuuuagaggaugaaauuuucaa

SEQ ID NO: 443588 - RNA, 23 nt, Artificial Sequence
  Synthetic
auuuuagaggaugaaauuuucaa

SEQ ID NO: 443589 - RNA, 24 nt, Artificial Sequence
  Synthetic
uauuuuagaggaugaaauuuucaa

SEQ ID NO: 443590 - RNA, 18 nt, Artificial Sequence
  Synthetic
ccagaucuaaauuuucaa

SEQ ID NO: 443591 - RNA, 19 nt, Artificial Sequence
  Synthetic
gccagaucuaaauuuucaa

SEQ ID NO: 443592 - RNA, 20 nt, Artificial Sequence
  Synthetic
agccagaucuaaauuuucaa

SEQ ID NO: 443593 - RNA, 21 nt, Artificial Sequence
  Synthetic
uagccagaucuaaauuuucaa

SEQ ID NO: 443594 - RNA, 22 nt, Artificial Sequence
  Synthetic
guagccagaucuaaauuuucaa

SEQ ID NO: 443595 - RNA, 23 nt, Artificial Sequence
  Synthetic
aguagccagaucuaaauuuucaa

SEQ ID NO: 443596 - RNA, 24 nt, Artificial Sequence
  Synthetic
uaguagccagaucuaaauuuucaa

SEQ ID NO: 443597 - RNA, 18 nt, Artificial Sequence
  Synthetic
auuuuccagaauuuucaa

SEQ ID NO: 443598 - RNA, 19 nt, Artificial Sequence
  Synthetic
cauuuuccagaauuuucaa

SEQ ID NO: 443599 - RNA, 20 nt, Artificial Sequence
  Synthetic
acauuuuccagaauuuucaa

SEQ ID NO: 443600 - RNA, 21 nt, Artificial Sequence
  Synthetic
uacauuuuccagaauuuucaa

SEQ ID NO: 443601 - RNA, 22 nt, Artificial Sequence
  Synthetic
cuacauuuuccagaauuuucaa

SEQ ID NO: 443602 - RNA, 23 nt, Artificial Sequence
  Synthetic
acuacauuuuccagaauuuucaa

SEQ ID NO: 443603 - RNA, 24 nt, Artificial Sequence
  Synthetic
uacuacauuuuccagaauuuucaa

SEQ ID NO: 443604 - RNA, 18 nt, Artificial Sequence
  Synthetic
gaacacugauauuuucaa

SEQ ID NO: 443605 - RNA, 19 nt, Artificial Sequence
  Synthetic
agaacacugauauuuucaa

SEQ ID NO: 443606 - RNA, 20 nt, Artificial Sequence
  Synthetic
gagaacacugauauuuucaa

SEQ ID NO: 443607 - RNA, 21 nt, Artificial Sequence
  Synthetic
ugagaacacugauauuuucaa

SEQ ID NO: 443608 - RNA, 22 nt, Artificial Sequence
  Synthetic
uugagaacacugauauuuucaa

SEQ ID NO: 443609 - RNA, 23 nt, Artificial Sequence
  Synthetic
cuugagaacacugauauuuucaa

SEQ ID NO: 443610 - RNA, 24 nt, Artificial Sequence
  Synthetic
ccuugagaacacugauauuuucaa

SEQ ID NO: 443611 - RNA, 18 nt, Artificial Sequence
  Synthetic
uagaauuuuuauuuucaa

SEQ ID NO: 443612 - RNA, 19 nt, Artificial Sequence
  Synthetic
auagaauuuuuauuuucaa

SEQ ID NO: 443613 - RNA, 20 nt, Artificial Sequence
  Synthetic
gauagaauuuuuauuuucaa

SEQ ID NO: 443614 - RNA, 21 nt, Artificial Sequence
  Synthetic
ugauagaauuuuuauuuucaa

SEQ ID NO: 443615 - RNA, 22 nt, Artificial Sequence
  Synthetic
augauagaauuuuuauuuucaa

SEQ ID NO: 443616 - RNA, 23 nt, Artificial Sequence
  Synthetic
uaugauagaauuuuuauuuucaa

SEQ ID NO: 443617 - RNA, 24 nt, Artificial Sequence
  Synthetic
uuaugauagaauuuuuauuuucaa

SEQ ID NO: 443618 - RNA, 18 nt, Artificial Sequence
  Synthetic
aaaaacaaaccuuuucaa

SEQ ID NO: 443619 - RNA, 19 nt, Artificial Sequence
  Synthetic
aaaaaacaaaccuuuucaa

SEQ ID NO: 443620 - RNA, 20 nt, Artificial Sequence
  Synthetic
uaaaaaacaaaccuuuucaa

SEQ ID NO: 443621 - RNA, 21 nt, Artificial Sequence
  Synthetic
guaaaaaacaaaccuuuucaa

SEQ ID NO: 443622 - RNA, 22 nt, Artificial Sequence
  Synthetic
uguaaaaaacaaaccuuuucaa

SEQ ID NO: 443623 - RNA, 23 nt, Artificial Sequence
  Synthetic
auguaaaaaacaaaccuuuucaa

SEQ ID NO: 443624 - RNA, 24 nt, Artificial Sequence
  Synthetic
aauguaaaaaacaaaccuuuucaa

SEQ ID NO: 443625 - RNA, 18 nt, Artificial Sequence
  Synthetic
ccgcaaugcucuuuucaa

SEQ ID NO: 443626 - RNA, 19 nt, Artificial Sequence
  Synthetic
gccgcaaugcucuuuucaa

SEQ ID NO: 443627 - RNA, 20 nt, Artificial Sequence
  Synthetic
ggccgcaaugcucuuuucaa

SEQ ID NO: 443628 - RNA, 21 nt, Artificial Sequence
  Synthetic
cggccgcaaugcucuuuucaa

SEQ ID NO: 443629 - RNA, 22 nt, Artificial Sequence
  Synthetic
ccggccgcaaugcucuuuucaa

SEQ ID NO: 443630 - RNA, 23 nt, Artificial Sequence
  Synthetic
cccggccgcaaugcucuuuucaa

SEQ ID NO: 443631 - RNA, 24 nt, Artificial Sequence
  Synthetic
gcccggccgcaaugcucuuuucaa

SEQ ID NO: 443632 - RNA, 18 nt, Artificial Sequence
  Synthetic
aaaaaauaaaguuuucaa

SEQ ID NO: 443633 - RNA, 19 nt, Artificial Sequence
  Synthetic
aaaaaaauaaaguuuucaa

SEQ ID NO: 443634 - RNA, 20 nt, Artificial Sequence
  Synthetic
caaaaaaauaaaguuuucaa

SEQ ID NO: 443635 - RNA, 21 nt, Artificial Sequence
  Synthetic
gcaaaaaaauaaaguuuucaa

SEQ ID NO: 443636 - RNA, 22 nt, Artificial Sequence
  Synthetic
ggcaaaaaaauaaaguuuucaa

SEQ ID NO: 443637 - RNA, 23 nt, Artificial Sequence
  Synthetic
aggcaaaaaaauaaaguuuucaa

SEQ ID NO: 443638 - RNA, 24 nt, Artificial Sequence
  Synthetic
aaggcaaaaaaauaaaguuuucaa

SEQ ID NO: 443639 - RNA, 21 nt, Artificial Sequence
  Synthetic
cugucuugugccaguuuucaa

SEQ ID NO: 443640 - RNA, 22 nt, Artificial Sequence
  Synthetic
ccugucuugugccaguuuucaa

SEQ ID NO: 443641 - RNA, 23 nt, Artificial Sequence
  Synthetic
cccugucuugugccaguuuucaa

SEQ ID NO: 443642 - RNA, 24 nt, Artificial Sequence
  Synthetic
ucccugucuugugccaguuuucaa

SEQ ID NO: 443643 - RNA, 18 nt, Artificial Sequence
  Synthetic
acccccuagaguuuucaa

SEQ ID NO: 443644 - RNA, 19 nt, Artificial Sequence
  Synthetic
cacccccuagaguuuucaa

SEQ ID NO: 443645 - RNA, 20 nt, Artificial Sequence
  Synthetic
acacccccuagaguuuucaa

SEQ ID NO: 443646 - RNA, 21 nt, Artificial Sequence
  Synthetic
uacacccccuagaguuuucaa

SEQ ID NO: 443647 - RNA, 22 nt, Artificial Sequence
  Synthetic
cuacacccccuagaguuuucaa

SEQ ID NO: 443648 - RNA, 23 nt, Artificial Sequence
  Synthetic
gcuacacccccuagaguuuucaa

SEQ ID NO: 443649 - RNA, 24 nt, Artificial Sequence
  Synthetic
ggcuacacccccuagaguuuucaa

SEQ ID NO: 443650 - RNA, 18 nt, Artificial Sequence
  Synthetic
guaacuuaaauuuuucaa

SEQ ID NO: 443651 - RNA, 19 nt, Artificial Sequence
  Synthetic
aguaacuuaaauuuuucaa

SEQ ID NO: 443652 - RNA, 20 nt, Artificial Sequence
  Synthetic
uaguaacuuaaauuuuucaa

SEQ ID NO: 443653 - RNA, 21 nt, Artificial Sequence
  Synthetic
auaguaacuuaaauuuuucaa

SEQ ID NO: 443654 - RNA, 22 nt, Artificial Sequence
  Synthetic
aauaguaacuuaaauuuuucaa

SEQ ID NO: 443655 - RNA, 23 nt, Artificial Sequence
  Synthetic
uaauaguaacuuaaauuuuucaa

SEQ ID NO: 443656 - RNA, 24 nt, Artificial Sequence
  Synthetic
auaauaguaacuuaaauuuuucaa

SEQ ID NO: 443657 - RNA, 18 nt, Artificial Sequence
  Synthetic
uauuacuugauuuuucaa

SEQ ID NO: 443658 - RNA, 19 nt, Artificial Sequence
  Synthetic
guauuacuugauuuuucaa

SEQ ID NO: 443659 - RNA, 20 nt, Artificial Sequence
  Synthetic
aguauuacuugauuuuucaa

SEQ ID NO: 443660 - RNA, 21 nt, Artificial Sequence
  Synthetic
uaguauuacuugauuuuucaa

SEQ ID NO: 443661 - RNA, 22 nt, Artificial Sequence
  Synthetic
uuaguauuacuugauuuuucaa

SEQ ID NO: 443662 - RNA, 23 nt, Artificial Sequence
  Synthetic
uuuaguauuacuugauuuuucaa

SEQ ID NO: 443663 - RNA, 24 nt, Artificial Sequence
  Synthetic
guuuaguauuacuugauuuuucaa

SEQ ID NO: 443664 - RNA, 18 nt, Artificial Sequence
  Synthetic
guucaagaaguuuuucaa

SEQ ID NO: 443665 - RNA, 19 nt, Artificial Sequence
  Synthetic
gguucaagaaguuuuucaa

SEQ ID NO: 443666 - RNA, 20 nt, Artificial Sequence
  Synthetic
ugguucaagaaguuuuucaa

SEQ ID NO: 443667 - RNA, 21 nt, Artificial Sequence
  Synthetic
gugguucaagaaguuuuucaa

SEQ ID NO: 443668 - RNA, 22 nt, Artificial Sequence
  Synthetic
ggugguucaagaaguuuuucaa

SEQ ID NO: 443669 - RNA, 23 nt, Artificial Sequence
  Synthetic
uggugguucaagaaguuuuucaa

SEQ ID NO: 443670 - RNA, 24 nt, Artificial Sequence
  Synthetic
guggugguucaagaaguuuuucaa

SEQ ID NO: 443671 - RNA, 18 nt, Artificial Sequence
  Synthetic
cguuccuaaguuuuucaa

SEQ ID NO: 443672 - RNA, 19 nt, Artificial Sequence
  Synthetic
gcguuccuaaguuuuucaa

SEQ ID NO: 443673 - RNA, 20 nt, Artificial Sequence
  Synthetic
ggcguuccuaaguuuuucaa

SEQ ID NO: 443674 - RNA, 21 nt, Artificial Sequence
  Synthetic
uggcguuccuaaguuuuucaa

SEQ ID NO: 443675 - RNA, 22 nt, Artificial Sequence
  Synthetic
cuggcguuccuaaguuuuucaa

SEQ ID NO: 443676 - RNA, 23 nt, Artificial Sequence
  Synthetic
acuggcguuccuaaguuuuucaa

SEQ ID NO: 443677 - RNA, 24 nt, Artificial Sequence
  Synthetic
aacuggcguuccuaaguuuuucaa

SEQ ID NO: 443678 - RNA, 18 nt, Artificial Sequence
  Synthetic
auacaacccuuuuuucaa

SEQ ID NO: 443679 - RNA, 19 nt, Artificial Sequence
  Synthetic
cauacaacccuuuuuucaa

SEQ ID NO: 443680 - RNA, 20 nt, Artificial Sequence
  Synthetic
gcauacaacccuuuuuucaa

SEQ ID NO: 443681 - RNA, 21 nt, Artificial Sequence
  Synthetic
agcauacaacccuuuuuucaa

SEQ ID NO: 443682 - RNA, 22 nt, Artificial Sequence
  Synthetic
aagcauacaacccuuuuuucaa

SEQ ID NO: 443683 - RNA, 23 nt, Artificial Sequence
  Synthetic
aaagcauacaacccuuuuuucaa

SEQ ID NO: 443684 - RNA, 24 nt, Artificial Sequence
  Synthetic
uaaagcauacaacccuuuuuucaa

SEQ ID NO: 443685 - RNA, 18 nt, Artificial Sequence
  Synthetic
uuacugauuuuuuuucaa

SEQ ID NO: 443686 - RNA, 19 nt, Artificial Sequence
  Synthetic
auuacugauuuuuuuucaa

SEQ ID NO: 443687 - RNA, 20 nt, Artificial Sequence
  Synthetic
aauuacugauuuuuuuucaa

SEQ ID NO: 443688 - RNA, 21 nt, Artificial Sequence
  Synthetic
caauuacugauuuuuuuucaa

SEQ ID NO: 443689 - RNA, 22 nt, Artificial Sequence
  Synthetic
acaauuacugauuuuuuuucaa

SEQ ID NO: 443690 - RNA, 23 nt, Artificial Sequence
  Synthetic
cacaauuacugauuuuuuuucaa

SEQ ID NO: 443691 - RNA, 24 nt, Artificial Sequence
  Synthetic
ccacaauuacugauuuuuuuucaa

SEQ ID NO: 443692 - RNA, 18 nt, Artificial Sequence
  Synthetic
gaggagccaaaaaaagaa

SEQ ID NO: 443693 - RNA, 19 nt, Artificial Sequence
  Synthetic
agaggagccaaaaaaagaa

SEQ ID NO: 443694 - RNA, 20 nt, Artificial Sequence
  Synthetic
uagaggagccaaaaaaagaa

SEQ ID NO: 443695 - RNA, 21 nt, Artificial Sequence
  Synthetic
cuagaggagccaaaaaaagaa

SEQ ID NO: 443696 - RNA, 22 nt, Artificial Sequence
  Synthetic
ucuagaggagccaaaaaaagaa

SEQ ID NO: 443697 - RNA, 23 nt, Artificial Sequence
  Synthetic
uucuagaggagccaaaaaaagaa

SEQ ID NO: 443698 - RNA, 24 nt, Artificial Sequence
  Synthetic
auucuagaggagccaaaaaaagaa

SEQ ID NO: 443699 - RNA, 18 nt, Artificial Sequence
  Synthetic
agauacacuaaaaaagaa

SEQ ID NO: 443700 - RNA, 19 nt, Artificial Sequence
  Synthetic
gagauacacuaaaaaagaa

SEQ ID NO: 443701 - RNA, 20 nt, Artificial Sequence
  Synthetic
agagauacacuaaaaaagaa

SEQ ID NO: 443702 - RNA, 21 nt, Artificial Sequence
  Synthetic
aagagauacacuaaaaaagaa

SEQ ID NO: 443703 - RNA, 22 nt, Artificial Sequence
  Synthetic
aaagagauacacuaaaaaagaa

SEQ ID NO: 443704 - RNA, 23 nt, Artificial Sequence
  Synthetic
gaaagagauacacuaaaaaagaa

SEQ ID NO: 443705 - RNA, 24 nt, Artificial Sequence
  Synthetic
ugaaagagauacacuaaaaaagaa

SEQ ID NO: 443706 - RNA, 18 nt, Artificial Sequence
  Synthetic
uuguuauuuaaaaaagaa

SEQ ID NO: 443707 - RNA, 19 nt, Artificial Sequence
  Synthetic
uuuguuauuuaaaaaagaa

SEQ ID NO: 443708 - RNA, 20 nt, Artificial Sequence
  Synthetic
auuuguuauuuaaaaaagaa

SEQ ID NO: 443709 - RNA, 21 nt, Artificial Sequence
  Synthetic
uauuuguuauuuaaaaaagaa

SEQ ID NO: 443710 - RNA, 22 nt, Artificial Sequence
  Synthetic
guauuuguuauuuaaaaaagaa

SEQ ID NO: 443711 - RNA, 23 nt, Artificial Sequence
  Synthetic
aguauuuguuauuuaaaaaagaa

SEQ ID NO: 443712 - RNA, 24 nt, Artificial Sequence
  Synthetic
aaguauuuguuauuuaaaaaagaa

SEQ ID NO: 443713 - RNA, 18 nt, Artificial Sequence
  Synthetic
aguuucauacaaaaagaa

SEQ ID NO: 443714 - RNA, 19 nt, Artificial Sequence
  Synthetic
aaguuucauacaaaaagaa

SEQ ID NO: 443715 - RNA, 20 nt, Artificial Sequence
  Synthetic
uaaguuucauacaaaaagaa

SEQ ID NO: 443716 - RNA, 21 nt, Artificial Sequence
  Synthetic
auaaguuucauacaaaaagaa

SEQ ID NO: 443717 - RNA, 22 nt, Artificial Sequence
  Synthetic
aauaaguuucauacaaaaagaa

SEQ ID NO: 443718 - RNA, 23 nt, Artificial Sequence
  Synthetic
gaauaaguuucauacaaaaagaa

SEQ ID NO: 443719 - RNA, 24 nt, Artificial Sequence
  Synthetic
ggaauaaguuucauacaaaaagaa

SEQ ID NO: 443720 - RNA, 18 nt, Artificial Sequence
  Synthetic
agggacuggcaaaaagaa

SEQ ID NO: 443721 - RNA, 19 nt, Artificial Sequence
  Synthetic
gagggacuggcaaaaagaa

SEQ ID NO: 443722 - RNA, 20 nt, Artificial Sequence
  Synthetic
ugagggacuggcaaaaagaa

SEQ ID NO: 443723 - RNA, 21 nt, Artificial Sequence
  Synthetic
cugagggacuggcaaaaagaa

SEQ ID NO: 443724 - RNA, 22 nt, Artificial Sequence
  Synthetic
acugagggacuggcaaaaagaa

SEQ ID NO: 443725 - RNA, 23 nt, Artificial Sequence
  Synthetic
uacugagggacuggcaaaaagaa

SEQ ID NO: 443726 - RNA, 24 nt, Artificial Sequence
  Synthetic
auacugagggacuggcaaaaagaa

SEQ ID NO: 443727 - RNA, 18 nt, Artificial Sequence
  Synthetic
cuggaggcagaaaaagaa

SEQ ID NO: 443728 - RNA, 19 nt, Artificial Sequence
  Synthetic
acuggaggcagaaaaagaa

SEQ ID NO: 443729 - RNA, 20 nt, Artificial Sequence
  Synthetic
aacuggaggcagaaaaagaa

SEQ ID NO: 443730 - RNA, 21 nt, Artificial Sequence
  Synthetic
gaacuggaggcagaaaaagaa

SEQ ID NO: 443731 - RNA, 22 nt, Artificial Sequence
  Synthetic
ggaacuggaggcagaaaaagaa

SEQ ID NO: 443732 - RNA, 23 nt, Artificial Sequence
  Synthetic
aggaacuggaggcagaaaaagaa

SEQ ID NO: 443733 - RNA, 24 nt, Artificial Sequence
  Synthetic
aaggaacuggaggcagaaaaagaa

SEQ ID NO: 443734 - RNA, 18 nt, Artificial Sequence
  Synthetic
aaaaauaaauaaaaagaa

SEQ ID NO: 443735 - RNA, 19 nt, Artificial Sequence
  Synthetic
aaaaaauaaauaaaaagaa

SEQ ID NO: 443736 - RNA, 20 nt, Artificial Sequence
  Synthetic
gaaaaaauaaauaaaaagaa

SEQ ID NO: 443737 - RNA, 21 nt, Artificial Sequence
  Synthetic
agaaaaaauaaauaaaaagaa

SEQ ID NO: 443738 - RNA, 22 nt, Artificial Sequence
  Synthetic
aagaaaaaauaaauaaaaagaa

SEQ ID NO: 443739 - RNA, 23 nt, Artificial Sequence
  Synthetic
aaagaaaaaauaaauaaaaagaa

SEQ ID NO: 443740 - RNA, 24 nt, Artificial Sequence
  Synthetic
uaaagaaaaaauaaauaaaaagaa

SEQ ID NO: 443741 - RNA, 18 nt, Artificial Sequence
  Synthetic
aaaaaagaauaaaaagaa

SEQ ID NO: 443742 - RNA, 19 nt, Artificial Sequence
  Synthetic
gaaaaaagaauaaaaagaa

SEQ ID NO: 443743 - RNA, 20 nt, Artificial Sequence
  Synthetic
agaaaaaagaauaaaaagaa

SEQ ID NO: 443744 - RNA, 21 nt, Artificial Sequence
  Synthetic
gagaaaaaagaauaaaaagaa

SEQ ID NO: 443745 - RNA, 22 nt, Artificial Sequence
  Synthetic
agagaaaaaagaauaaaaagaa

SEQ ID NO: 443746 - RNA, 23 nt, Artificial Sequence
  Synthetic
uagagaaaaaagaauaaaaagaa

SEQ ID NO: 443747 - RNA, 24 nt, Artificial Sequence
  Synthetic
uuagagaaaaaagaauaaaaagaa

SEQ ID NO: 443748 - RNA, 18 nt, Artificial Sequence
  Synthetic
uggugcuccuaaaaagaa

SEQ ID NO: 443749 - RNA, 19 nt, Artificial Sequence
  Synthetic
auggugcuccuaaaaagaa

SEQ ID NO: 443750 - RNA, 20 nt, Artificial Sequence
  Synthetic
aauggugcuccuaaaaagaa

SEQ ID NO: 443751 - RNA, 21 nt, Artificial Sequence
  Synthetic
gaauggugcuccuaaaaagaa

SEQ ID NO: 443752 - RNA, 22 nt, Artificial Sequence
  Synthetic
agaauggugcuccuaaaaagaa

SEQ ID NO: 443753 - RNA, 23 nt, Artificial Sequence
  Synthetic
gagaauggugcuccuaaaaagaa

SEQ ID NO: 443754 - RNA, 24 nt, Artificial Sequence
  Synthetic
agagaauggugcuccuaaaaagaa

SEQ ID NO: 443755 - RNA, 18 nt, Artificial Sequence
  Synthetic
cagauaaaguaaaaagaa

SEQ ID NO: 443756 - RNA, 19 nt, Artificial Sequence
  Synthetic
ucagauaaaguaaaaagaa

SEQ ID NO: 443757 - RNA, 20 nt, Artificial Sequence
  Synthetic
uucagauaaaguaaaaagaa

SEQ ID NO: 443758 - RNA, 21 nt, Artificial Sequence
  Synthetic
cuucagauaaaguaaaaagaa

SEQ ID NO: 443759 - RNA, 22 nt, Artificial Sequence
  Synthetic
ucuucagauaaaguaaaaagaa

SEQ ID NO: 443760 - RNA, 23 nt, Artificial Sequence
  Synthetic
cucuucagauaaaguaaaaagaa

SEQ ID NO: 443761 - RNA, 24 nt, Artificial Sequence
  Synthetic
acucuucagauaaaguaaaaagaa

SEQ ID NO: 443762 - RNA, 18 nt, Artificial Sequence
  Synthetic
cauuuucauuaaaaagaa

SEQ ID NO: 443763 - RNA, 19 nt, Artificial Sequence
  Synthetic
acauuuucauuaaaaagaa

SEQ ID NO: 443764 - RNA, 20 nt, Artificial Sequence
  Synthetic
uacauuuucauuaaaaagaa

SEQ ID NO: 443765 - RNA, 21 nt, Artificial Sequence
  Synthetic
guacauuuucauuaaaaagaa

SEQ ID NO: 443766 - RNA, 22 nt, Artificial Sequence
  Synthetic
uguacauuuucauuaaaaagaa

SEQ ID NO: 443767 - RNA, 23 nt, Artificial Sequence
  Synthetic
auguacauuuucauuaaaaagaa

SEQ ID NO: 443768 - RNA, 24 nt, Artificial Sequence
  Synthetic
aauguacauuuucauuaaaaagaa

SEQ ID NO: 443769 - RNA, 18 nt, Artificial Sequence
  Synthetic
ugggugcuuuaaaaagaa

SEQ ID NO: 443770 - RNA, 19 nt, Artificial Sequence
  Synthetic
cugggugcuuuaaaaagaa

SEQ ID NO: 443771 - RNA, 20 nt, Artificial Sequence
  Synthetic
acugggugcuuuaaaaagaa

SEQ ID NO: 443772 - RNA, 21 nt, Artificial Sequence
  Synthetic
aacugggugcuuuaaaaagaa

SEQ ID NO: 443773 - RNA, 22 nt, Artificial Sequence
  Synthetic
aaacugggugcuuuaaaaagaa

SEQ ID NO: 443774 - RNA, 23 nt, Artificial Sequence
  Synthetic
gaaacugggugcuuuaaaaagaa

SEQ ID NO: 443775 - RNA, 24 nt, Artificial Sequence
  Synthetic
ugaaacugggugcuuuaaaaagaa

SEQ ID NO: 443776 - RNA, 18 nt, Artificial Sequence
  Synthetic
auauuaguuuaaaaagaa

SEQ ID NO: 443777 - RNA, 19 nt, Artificial Sequence
  Synthetic
aauauuaguuuaaaaagaa

SEQ ID NO: 443778 - RNA, 20 nt, Artificial Sequence
  Synthetic
aaauauuaguuuaaaaagaa

SEQ ID NO: 443779 - RNA, 21 nt, Artificial Sequence
  Synthetic
aaaauauuaguuuaaaaagaa

SEQ ID NO: 443780 - RNA, 22 nt, Artificial Sequence
  Synthetic
aaaaauauuaguuuaaaaagaa

SEQ ID NO: 443781 - RNA, 23 nt, Artificial Sequence
  Synthetic
uaaaaauauuaguuuaaaaagaa

SEQ ID NO: 443782 - RNA, 24 nt, Artificial Sequence
  Synthetic
auaaaaauauuaguuuaaaaagaa

SEQ ID NO: 443783 - RNA, 18 nt, Artificial Sequence
  Synthetic
aaggaagaaacaaaagaa

SEQ ID NO: 443784 - RNA, 19 nt, Artificial Sequence
  Synthetic
gaaggaagaaacaaaagaa

SEQ ID NO: 443785 - RNA, 20 nt, Artificial Sequence
  Synthetic
ggaaggaagaaacaaaagaa

SEQ ID NO: 443786 - RNA, 21 nt, Artificial Sequence
  Synthetic
aggaaggaagaaacaaaagaa

SEQ ID NO: 443787 - RNA, 22 nt, Artificial Sequence
  Synthetic
aaggaaggaagaaacaaaagaa

SEQ ID NO: 443788 - RNA, 23 nt, Artificial Sequence
  Synthetic
gaaggaaggaagaaacaaaagaa

SEQ ID NO: 443789 - RNA, 24 nt, Artificial Sequence
  Synthetic
ggaaggaaggaagaaacaaaagaa

SEQ ID NO: 443790 - RNA, 18 nt, Artificial Sequence
  Synthetic
ggcauauauccaaaagaa

SEQ ID NO: 443791 - RNA, 19 nt, Artificial Sequence
  Synthetic
gggcauauauccaaaagaa

SEQ ID NO: 443792 - RNA, 20 nt, Artificial Sequence
  Synthetic
ugggcauauauccaaaagaa

SEQ ID NO: 443793 - RNA, 21 nt, Artificial Sequence
  Synthetic
cugggcauauauccaaaagaa

SEQ ID NO: 443794 - RNA, 22 nt, Artificial Sequence
  Synthetic
ucugggcauauauccaaaagaa

SEQ ID NO: 443795 - RNA, 23 nt, Artificial Sequence
  Synthetic
cucugggcauauauccaaaagaa

SEQ ID NO: 443796 - RNA, 24 nt, Artificial Sequence
  Synthetic
ucucugggcauauauccaaaagaa

SEQ ID NO: 443797 - RNA, 18 nt, Artificial Sequence
  Synthetic
gguacauacucaaaagaa

SEQ ID NO: 443798 - RNA, 19 nt, Artificial Sequence
  Synthetic
ggguacauacucaaaagaa

SEQ ID NO: 443799 - RNA, 20 nt, Artificial Sequence
  Synthetic
uggguacauacucaaaagaa

SEQ ID NO: 443800 - RNA, 21 nt, Artificial Sequence
  Synthetic
cuggguacauacucaaaagaa

SEQ ID NO: 443801 - RNA, 22 nt, Artificial Sequence
  Synthetic
ucuggguacauacucaaaagaa

SEQ ID NO: 443802 - RNA, 23 nt, Artificial Sequence
  Synthetic
uucuggguacauacucaaaagaa

SEQ ID NO: 443803 - RNA, 24 nt, Artificial Sequence
  Synthetic
cuucuggguacauacucaaaagaa

SEQ ID NO: 443804 - RNA, 18 nt, Artificial Sequence
  Synthetic
gccaaaaaaagaaaagaa

SEQ ID NO: 443805 - RNA, 19 nt, Artificial Sequence
  Synthetic
agccaaaaaaagaaaagaa

SEQ ID NO: 443806 - RNA, 20 nt, Artificial Sequence
  Synthetic
gagccaaaaaaagaaaagaa

SEQ ID NO: 443807 - RNA, 21 nt, Artificial Sequence
  Synthetic
ggagccaaaaaaagaaaagaa

SEQ ID NO: 443808 - RNA, 22 nt, Artificial Sequence
  Synthetic
aggagccaaaaaaagaaaagaa

SEQ ID NO: 443809 - RNA, 23 nt, Artificial Sequence
  Synthetic
gaggagccaaaaaaagaaaagaa

SEQ ID NO: 443810 - RNA, 24 nt, Artificial Sequence
  Synthetic
agaggagccaaaaaaagaaaagaa

SEQ ID NO: 443811 - RNA, 18 nt, Artificial Sequence
  Synthetic
aaaaagaaaagaaaagaa

SEQ ID NO: 443812 - RNA, 19 nt, Artificial Sequence
  Synthetic
aaaaaagaaaagaaaagaa

SEQ ID NO: 443813 - RNA, 20 nt, Artificial Sequence
  Synthetic
aaaaaaagaaaagaaaagaa

SEQ ID NO: 443814 - RNA, 21 nt, Artificial Sequence
  Synthetic
caaaaaaagaaaagaaaagaa

SEQ ID NO: 443815 - RNA, 22 nt, Artificial Sequence
  Synthetic
ccaaaaaaagaaaagaaaagaa

SEQ ID NO: 443816 - RNA, 23 nt, Artificial Sequence
  Synthetic
gccaaaaaaagaaaagaaaagaa

SEQ ID NO: 443817 - RNA, 24 nt, Artificial Sequence
  Synthetic
agccaaaaaaagaaaagaaaagaa

SEQ ID NO: 443818 - RNA, 18 nt, Artificial Sequence
  Synthetic
gaaaagaaaagaaaagaa

SEQ ID NO: 443819 - RNA, 19 nt, Artificial Sequence
  Synthetic
agaaaagaaaagaaaagaa

SEQ ID NO: 443820 - RNA, 20 nt, Artificial Sequence
  Synthetic
aagaaaagaaaagaaaagaa

SEQ ID NO: 443821 - RNA, 21 nt, Artificial Sequence
  Synthetic
aaagaaaagaaaagaaaagaa

SEQ ID NO: 443822 - RNA, 22 nt, Artificial Sequence
  Synthetic
aaaagaaaagaaaagaaaagaa

SEQ ID NO: 443823 - RNA, 23 nt, Artificial Sequence
  Synthetic
aaaaagaaaagaaaagaaaagaa

SEQ ID NO: 443824 - RNA, 24 nt, Artificial Sequence
  Synthetic
aaaaaagaaaagaaaagaaaagaa

SEQ ID NO: 443825 - RNA, 18 nt, Artificial Sequence
  Synthetic
ucucaagaaagaaaagaa

SEQ ID NO: 443826 - RNA, 19 nt, Artificial Sequence
  Synthetic
gucucaagaaagaaaagaa

SEQ ID NO: 443827 - RNA, 20 nt, Artificial Sequence
  Synthetic
ugucucaagaaagaaaagaa

SEQ ID NO: 443828 - RNA, 21 nt, Artificial Sequence
  Synthetic
cugucucaagaaagaaaagaa

SEQ ID NO: 443829 - RNA, 22 nt, Artificial Sequence
  Synthetic
gcugucucaagaaagaaaagaa

SEQ ID NO: 443830 - RNA, 23 nt, Artificial Sequence
  Synthetic
ugcugucucaagaaagaaaagaa

SEQ ID NO: 443831 - RNA, 24 nt, Artificial Sequence
  Synthetic
augcugucucaagaaagaaaagaa

SEQ ID NO: 443832 - RNA, 18 nt, Artificial Sequence
  Synthetic
agagagagaagaaaagaa

SEQ ID NO: 443833 - RNA, 19 nt, Artificial Sequence
  Synthetic
aagagagagaagaaaagaa

SEQ ID NO: 443834 - RNA, 20 nt, Artificial Sequence
  Synthetic
aaagagagagaagaaaagaa

SEQ ID NO: 443835 - RNA, 21 nt, Artificial Sequence
  Synthetic
aaaagagagagaagaaaagaa

SEQ ID NO: 443836 - RNA, 22 nt, Artificial Sequence
  Synthetic
aaaaagagagagaagaaaagaa

SEQ ID NO: 443837 - RNA, 23 nt, Artificial Sequence
  Synthetic
aaaaaagagagagaagaaaagaa

SEQ ID NO: 443838 - RNA, 24 nt, Artificial Sequence
  Synthetic
aaaaaaagagagagaagaaaagaa

SEQ ID NO: 443839 - RNA, 18 nt, Artificial Sequence
  Synthetic
aauggaggaagaaaagaa

SEQ ID NO: 443840 - RNA, 19 nt, Artificial Sequence
  Synthetic
gaauggaggaagaaaagaa

SEQ ID NO: 443841 - RNA, 20 nt, Artificial Sequence
  Synthetic
ggaauggaggaagaaaagaa

SEQ ID NO: 443842 - RNA, 21 nt, Artificial Sequence
  Synthetic
aggaauggaggaagaaaagaa

SEQ ID NO: 443843 - RNA, 22 nt, Artificial Sequence
  Synthetic
aaggaauggaggaagaaaagaa

SEQ ID NO: 443844 - RNA, 23 nt, Artificial Sequence
  Synthetic
gaaggaauggaggaagaaaagaa

SEQ ID NO: 443845 - RNA, 24 nt, Artificial Sequence
  Synthetic
ggaaggaauggaggaagaaaagaa

SEQ ID NO: 443846 - RNA, 18 nt, Artificial Sequence
  Synthetic
ugugaagugagaaaagaa

SEQ ID NO: 443847 - RNA, 19 nt, Artificial Sequence
  Synthetic
augugaagugagaaaagaa

SEQ ID NO: 443848 - RNA, 20 nt, Artificial Sequence
  Synthetic
caugugaagugagaaaagaa

SEQ ID NO: 443849 - RNA, 21 nt, Artificial Sequence
  Synthetic
acaugugaagugagaaaagaa

SEQ ID NO: 443850 - RNA, 22 nt, Artificial Sequence
  Synthetic
uacaugugaagugagaaaagaa

SEQ ID NO: 443851 - RNA, 23 nt, Artificial Sequence
  Synthetic
guacaugugaagugagaaaagaa

SEQ ID NO: 443852 - RNA, 24 nt, Artificial Sequence
  Synthetic
aguacaugugaagugagaaaagaa

SEQ ID NO: 443853 - RNA, 18 nt, Artificial Sequence
  Synthetic
augcaaaacggaaaagaa

SEQ ID NO: 443854 - RNA, 19 nt, Artificial Sequence
  Synthetic
caugcaaaacggaaaagaa

SEQ ID NO: 443855 - RNA, 20 nt, Artificial Sequence
  Synthetic
ucaugcaaaacggaaaagaa

SEQ ID NO: 443856 - RNA, 21 nt, Artificial Sequence
  Synthetic
gucaugcaaaacggaaaagaa

SEQ ID NO: 443857 - RNA, 22 nt, Artificial Sequence
  Synthetic
ugucaugcaaaacggaaaagaa

SEQ ID NO: 443858 - RNA, 23 nt, Artificial Sequence
  Synthetic
augucaugcaaaacggaaaagaa

SEQ ID NO: 443859 - RNA, 24 nt, Artificial Sequence
  Synthetic
gaugucaugcaaaacggaaaagaa

SEQ ID NO: 443860 - RNA, 18 nt, Artificial Sequence
  Synthetic
uuaaaaaaaugaaaagaa

SEQ ID NO: 443861 - RNA, 19 nt, Artificial Sequence
  Synthetic
guuaaaaaaaugaaaagaa

SEQ ID NO: 443862 - RNA, 20 nt, Artificial Sequence
  Synthetic
aguuaaaaaaaugaaaagaa

SEQ ID NO: 443863 - RNA, 21 nt, Artificial Sequence
  Synthetic
aaguuaaaaaaaugaaaagaa

SEQ ID NO: 443864 - RNA, 22 nt, Artificial Sequence
  Synthetic
aaaguuaaaaaaaugaaaagaa

SEQ ID NO: 443865 - RNA, 23 nt, Artificial Sequence
  Synthetic
aaaaguuaaaaaaaugaaaagaa

SEQ ID NO: 443866 - RNA, 24 nt, Artificial Sequence
  Synthetic
uaaaaguuaaaaaaaugaaaagaa

SEQ ID NO: 443867 - RNA, 18 nt, Artificial Sequence
  Synthetic
auguucagaauaaaagaa

SEQ ID NO: 443868 - RNA, 19 nt, Artificial Sequence
  Synthetic
uauguucagaauaaaagaa

SEQ ID NO: 443869 - RNA, 20 nt, Artificial Sequence
  Synthetic
guauguucagaauaaaagaa

SEQ ID NO: 443870 - RNA, 21 nt, Artificial Sequence
  Synthetic
uguauguucagaauaaaagaa

SEQ ID NO: 443871 - RNA, 22 nt, Artificial Sequence
  Synthetic
uuguauguucagaauaaaagaa

SEQ ID NO: 443872 - RNA, 23 nt, Artificial Sequence
  Synthetic
auuguauguucagaauaaaagaa

SEQ ID NO: 443873 - RNA, 24 nt, Artificial Sequence
  Synthetic
cauuguauguucagaauaaaagaa

SEQ ID NO: 443874 - RNA, 18 nt, Artificial Sequence
  Synthetic
ucagcaaauguaaaagaa

SEQ ID NO: 443875 - RNA, 19 nt, Artificial Sequence
  Synthetic
cucagcaaauguaaaagaa

SEQ ID NO: 443876 - RNA, 20 nt, Artificial Sequence
  Synthetic
ccucagcaaauguaaaagaa

SEQ ID NO: 443877 - RNA, 21 nt, Artificial Sequence
  Synthetic
uccucagcaaauguaaaagaa

SEQ ID NO: 443878 - RNA, 22 nt, Artificial Sequence
  Synthetic
cuccucagcaaauguaaaagaa

SEQ ID NO: 443879 - RNA, 23 nt, Artificial Sequence
  Synthetic
ucuccucagcaaauguaaaagaa

SEQ ID NO: 443880 - RNA, 24 nt, Artificial Sequence
  Synthetic
cucuccucagcaaauguaaaagaa

SEQ ID NO: 443881 - RNA, 18 nt, Artificial Sequence
  Synthetic
ugcuaugaaaacaaagaa

SEQ ID NO: 443882 - RNA, 19 nt, Artificial Sequence
  Synthetic
gugcuaugaaaacaaagaa

SEQ ID NO: 443883 - RNA, 20 nt, Artificial Sequence
  Synthetic
ggugcuaugaaaacaaagaa

SEQ ID NO: 443884 - RNA, 21 nt, Artificial Sequence
  Synthetic
uggugcuaugaaaacaaagaa

SEQ ID NO: 443885 - RNA, 22 nt, Artificial Sequence
  Synthetic
auggugcuaugaaaacaaagaa

SEQ ID NO: 443886 - RNA, 23 nt, Artificial Sequence
  Synthetic
aauggugcuaugaaaacaaagaa

SEQ ID NO: 443887 - RNA, 24 nt, Artificial Sequence
  Synthetic
uaauggugcuaugaaaacaaagaa

SEQ ID NO: 443888 - RNA, 18 nt, Artificial Sequence
  Synthetic
agaaagagcaacaaagaa

SEQ ID NO: 443889 - RNA, 19 nt, Artificial Sequence
  Synthetic
aagaaagagcaacaaagaa

SEQ ID NO: 443890 - RNA, 20 nt, Artificial Sequence
  Synthetic
uaagaaagagcaacaaagaa

SEQ ID NO: 443891 - RNA, 21 nt, Artificial Sequence
  Synthetic
auaagaaagagcaacaaagaa

SEQ ID NO: 443892 - RNA, 22 nt, Artificial Sequence
  Synthetic
uauaagaaagagcaacaaagaa

SEQ ID NO: 443893 - RNA, 23 nt, Artificial Sequence
  Synthetic
uuauaagaaagagcaacaaagaa

SEQ ID NO: 443894 - RNA, 24 nt, Artificial Sequence
  Synthetic
uuuauaagaaagagcaacaaagaa

SEQ ID NO: 443895 - RNA, 18 nt, Artificial Sequence
  Synthetic
acauaugaacacaaagaa

SEQ ID NO: 443896 - RNA, 19 nt, Artificial Sequence
  Synthetic
uacauaugaacacaaagaa

SEQ ID NO: 443897 - RNA, 20 nt, Artificial Sequence
  Synthetic
guacauaugaacacaaagaa

SEQ ID NO: 443898 - RNA, 21 nt, Artificial Sequence
  Synthetic
aguacauaugaacacaaagaa

SEQ ID NO: 443899 - RNA, 22 nt, Artificial Sequence
  Synthetic
gaguacauaugaacacaaagaa

SEQ ID NO: 443900 - RNA, 23 nt, Artificial Sequence
  Synthetic
ugaguacauaugaacacaaagaa

SEQ ID NO: 443901 - RNA, 24 nt, Artificial Sequence
  Synthetic
cugaguacauaugaacacaaagaa

SEQ ID NO: 443902 - RNA, 18 nt, Artificial Sequence
  Synthetic
gagauugaagacaaagaa

SEQ ID NO: 443903 - RNA, 19 nt, Artificial Sequence
  Synthetic
agagauugaagacaaagaa

SEQ ID NO: 443904 - RNA, 20 nt, Artificial Sequence
  Synthetic
cagagauugaagacaaagaa

SEQ ID NO: 443905 - RNA, 21 nt, Artificial Sequence
  Synthetic
acagagauugaagacaaagaa

SEQ ID NO: 443906 - RNA, 22 nt, Artificial Sequence
  Synthetic
cacagagauugaagacaaagaa

SEQ ID NO: 443907 - RNA, 23 nt, Artificial Sequence
  Synthetic
ucacagagauugaagacaaagaa

SEQ ID NO: 443908 - RNA, 24 nt, Artificial Sequence
  Synthetic
uucacagagauugaagacaaagaa

SEQ ID NO: 443909 - RNA, 18 nt, Artificial Sequence
  Synthetic
ggguauauacccaaagaa

SEQ ID NO: 443910 - RNA, 19 nt, Artificial Sequence
  Synthetic
uggguauauacccaaagaa

SEQ ID NO: 443911 - RNA, 20 nt, Artificial Sequence
  Synthetic
cuggguauauacccaaagaa

SEQ ID NO: 443912 - RNA, 21 nt, Artificial Sequence
  Synthetic
gcuggguauauacccaaagaa

SEQ ID NO: 443913 - RNA, 22 nt, Artificial Sequence
  Synthetic
ugcuggguauauacccaaagaa

SEQ ID NO: 443914 - RNA, 23 nt, Artificial Sequence
  Synthetic
cugcuggguauauacccaaagaa

SEQ ID NO: 443915 - RNA, 24 nt, Artificial Sequence
  Synthetic
acugcuggguauauacccaaagaa

SEQ ID NO: 443916 - RNA, 18 nt, Artificial Sequence
  Synthetic
guuucuagauccaaagaa

SEQ ID NO: 443917 - RNA, 19 nt, Artificial Sequence
  Synthetic
aguuucuagauccaaagaa

SEQ ID NO: 443918 - RNA, 20 nt, Artificial Sequence
  Synthetic
aaguuucuagauccaaagaa

SEQ ID NO: 443919 - RNA, 21 nt, Artificial Sequence
  Synthetic
aaaguuucuagauccaaagaa

SEQ ID NO: 443920 - RNA, 22 nt, Artificial Sequence
  Synthetic
aaaaguuucuagauccaaagaa

SEQ ID NO: 443921 - RNA, 23 nt, Artificial Sequence
  Synthetic
aaaaaguuucuagauccaaagaa

SEQ ID NO: 443922 - RNA, 24 nt, Artificial Sequence
  Synthetic
caaaaaguuucuagauccaaagaa

SEQ ID NO: 443923 - RNA, 18 nt, Artificial Sequence
  Synthetic
uucauuaaaagcaaagaa

SEQ ID NO: 443924 - RNA, 19 nt, Artificial Sequence
  Synthetic
uuucauuaaaagcaaagaa

SEQ ID NO: 443925 - RNA, 20 nt, Artificial Sequence
  Synthetic
uuuucauuaaaagcaaagaa

SEQ ID NO: 443926 - RNA, 21 nt, Artificial Sequence
  Synthetic
auuuucauuaaaagcaaagaa

SEQ ID NO: 443927 - RNA, 22 nt, Artificial Sequence
  Synthetic
aauuuucauuaaaagcaaagaa

SEQ ID NO: 443928 - RNA, 23 nt, Artificial Sequence
  Synthetic
uaauuuucauuaaaagcaaagaa

SEQ ID NO: 443929 - RNA, 24 nt, Artificial Sequence
  Synthetic
cuaauuuucauuaaaagcaaagaa

SEQ ID NO: 443930 - RNA, 18 nt, Artificial Sequence
  Synthetic
ugaauugggagcaaagaa

SEQ ID NO: 443931 - RNA, 19 nt, Artificial Sequence
  Synthetic
uugaauugggagcaaagaa

SEQ ID NO: 443932 - RNA, 20 nt, Artificial Sequence
  Synthetic
guugaauugggagcaaagaa

SEQ ID NO: 443933 - RNA, 21 nt, Artificial Sequence
  Synthetic
uguugaauugggagcaaagaa

SEQ ID NO: 443934 - RNA, 22 nt, Artificial Sequence
  Synthetic
uuguugaauugggagcaaagaa

SEQ ID NO: 443935 - RNA, 23 nt, Artificial Sequence
  Synthetic
auuguugaauugggagcaaagaa

SEQ ID NO: 443936 - RNA, 24 nt, Artificial Sequence
  Synthetic
aauuguugaauugggagcaaagaa

SEQ ID NO: 443937 - RNA, 18 nt, Artificial Sequence
  Synthetic
auacuagaagucaaagaa

SEQ ID NO: 443938 - RNA, 19 nt, Artificial Sequence
  Synthetic
cauacuagaagucaaagaa

SEQ ID NO: 443939 - RNA, 20 nt, Artificial Sequence
  Synthetic
acauacuagaagucaaagaa

SEQ ID NO: 443940 - RNA, 21 nt, Artificial Sequence
  Synthetic
gacauacuagaagucaaagaa

SEQ ID NO: 443941 - RNA, 22 nt, Artificial Sequence
  Synthetic
agacauacuagaagucaaagaa

SEQ ID NO: 443942 - RNA, 23 nt, Artificial Sequence
  Synthetic
uagacauacuagaagucaaagaa

SEQ ID NO: 443943 - RNA, 24 nt, Artificial Sequence
  Synthetic
uuagacauacuagaagucaaagaa

SEQ ID NO: 443944 - RNA, 18 nt, Artificial Sequence
  Synthetic
aguuacuguuucaaagaa

SEQ ID NO: 443945 - RNA, 19 nt, Artificial Sequence
  Synthetic
gaguuacuguuucaaagaa

SEQ ID NO: 443946 - RNA, 20 nt, Artificial Sequence
  Synthetic
ugaguuacuguuucaaagaa

SEQ ID NO: 443947 - RNA, 21 nt, Artificial Sequence
  Synthetic
augaguuacuguuucaaagaa

SEQ ID NO: 443948 - RNA, 22 nt, Artificial Sequence
  Synthetic
aaugaguuacuguuucaaagaa

SEQ ID NO: 443949 - RNA, 23 nt, Artificial Sequence
  Synthetic
gaaugaguuacuguuucaaagaa

SEQ ID NO: 443950 - RNA, 24 nt, Artificial Sequence
  Synthetic
ugaaugaguuacuguuucaaagaa

SEQ ID NO: 443951 - RNA, 18 nt, Artificial Sequence
  Synthetic
augauuuuuuucaaagaa

SEQ ID NO: 443952 - RNA, 19 nt, Artificial Sequence
  Synthetic
gaugauuuuuuucaaagaa

SEQ ID NO: 443953 - RNA, 20 nt, Artificial Sequence
  Synthetic
agaugauuuuuuucaaagaa

SEQ ID NO: 443954 - RNA, 21 nt, Artificial Sequence
  Synthetic
cagaugauuuuuuucaaagaa

SEQ ID NO: 443955 - RNA, 22 nt, Artificial Sequence
  Synthetic
gcagaugauuuuuuucaaagaa

SEQ ID NO: 443956 - RNA, 23 nt, Artificial Sequence
  Synthetic
agcagaugauuuuuuucaaagaa

SEQ ID NO: 443957 - RNA, 24 nt, Artificial Sequence
  Synthetic
cagcagaugauuuuuuucaaagaa

SEQ ID NO: 443958 - RNA, 18 nt, Artificial Sequence
  Synthetic
aaaaaaaaaaagaaagaa

SEQ ID NO: 443959 - RNA, 19 nt, Artificial Sequence
  Synthetic
aaaaaaaaaaaagaaagaa

SEQ ID NO: 443960 - RNA, 20 nt, Artificial Sequence
  Synthetic
aaaaaaaaaaaaagaaagaa

SEQ ID NO: 443961 - RNA, 21 nt, Artificial Sequence
  Synthetic
aaaaaaaaaaaaaagaaagaa

SEQ ID NO: 443962 - RNA, 22 nt, Artificial Sequence
  Synthetic
aaaaaaaaaaaaaaagaaagaa

SEQ ID NO: 443963 - RNA, 23 nt, Artificial Sequence
  Synthetic
aaaaaaaaaaaaaaaagaaagaa

SEQ ID NO: 443964 - RNA, 24 nt, Artificial Sequence
  Synthetic
uaaaaaaaaaaaaaaaagaaagaa

SEQ ID NO: 443965 - RNA, 18 nt, Artificial Sequence
  Synthetic
aaggaaaaaaagaaagaa

SEQ ID NO: 443966 - RNA, 19 nt, Artificial Sequence
  Synthetic
aaaggaaaaaaagaaagaa

SEQ ID NO: 443967 - RNA, 20 nt, Artificial Sequence
  Synthetic
aaaaggaaaaaaagaaagaa

SEQ ID NO: 443968 - RNA, 21 nt, Artificial Sequence
  Synthetic
aaaaaggaaaaaaagaaagaa

SEQ ID NO: 443969 - RNA, 22 nt, Artificial Sequence
  Synthetic
aaaaaaggaaaaaaagaaagaa

SEQ ID NO: 443970 - RNA, 23 nt, Artificial Sequence
  Synthetic
aaaaaaaggaaaaaaagaaagaa

SEQ ID NO: 443971 - RNA, 24 nt, Artificial Sequence
  Synthetic
caaaaaaaggaaaaaaagaaagaa

SEQ ID NO: 443972 - RNA, 18 nt, Artificial Sequence
  Synthetic
aauuuaaaaaagaaagaa

SEQ ID NO: 443973 - RNA, 19 nt, Artificial Sequence
  Synthetic
aaauuuaaaaaagaaagaa

SEQ ID NO: 443974 - RNA, 20 nt, Artificial Sequence
  Synthetic
aaaauuuaaaaaagaaagaa

SEQ ID NO: 443975 - RNA, 21 nt, Artificial Sequence
  Synthetic
aaaaauuuaaaaaagaaagaa

SEQ ID NO: 443976 - RNA, 22 nt, Artificial Sequence
  Synthetic
aaaaaauuuaaaaaagaaagaa

SEQ ID NO: 443977 - RNA, 23 nt, Artificial Sequence
  Synthetic
uaaaaaauuuaaaaaagaaagaa

SEQ ID NO: 443978 - RNA, 24 nt, Artificial Sequence
  Synthetic
uuaaaaaauuuaaaaaagaaagaa

SEQ ID NO: 443979 - RNA, 18 nt, Artificial Sequence
  Synthetic
agaaagaaaaagaaagaa

SEQ ID NO: 443980 - RNA, 19 nt, Artificial Sequence
  Synthetic
cagaaagaaaaagaaagaa

SEQ ID NO: 443981 - RNA, 20 nt, Artificial Sequence
  Synthetic
gcagaaagaaaaagaaagaa

SEQ ID NO: 443982 - RNA, 21 nt, Artificial Sequence
  Synthetic
ggcagaaagaaaaagaaagaa

SEQ ID NO: 443983 - RNA, 22 nt, Artificial Sequence
  Synthetic
aggcagaaagaaaaagaaagaa

SEQ ID NO: 443984 - RNA, 23 nt, Artificial Sequence
  Synthetic
aaggcagaaagaaaaagaaagaa

SEQ ID NO: 443985 - RNA, 24 nt, Artificial Sequence
  Synthetic
aaaggcagaaagaaaaagaaagaa

SEQ ID NO: 443986 - RNA, 18 nt, Artificial Sequence
  Synthetic
gaaaaaagaaagaaagaa

SEQ ID NO: 443987 - RNA, 19 nt, Artificial Sequence
  Synthetic
agaaaaaagaaagaaagaa

SEQ ID NO: 443988 - RNA, 20 nt, Artificial Sequence
  Synthetic
aagaaaaaagaaagaaagaa

SEQ ID NO: 443989 - RNA, 21 nt, Artificial Sequence
  Synthetic
aaagaaaaaagaaagaaagaa

SEQ ID NO: 443990 - RNA, 22 nt, Artificial Sequence
  Synthetic
caaagaaaaaagaaagaaagaa

SEQ ID NO: 443991 - RNA, 23 nt, Artificial Sequence
  Synthetic
acaaagaaaaaagaaagaaagaa

SEQ ID NO: 443992 - RNA, 24 nt, Artificial Sequence
  Synthetic
cacaaagaaaaaagaaagaaagaa

SEQ ID NO: 443993 - RNA, 18 nt, Artificial Sequence
  Synthetic
gaagaaagaaagaaagaa

SEQ ID NO: 443994 - RNA, 19 nt, Artificial Sequence
  Synthetic
agaagaaagaaagaaagaa

SEQ ID NO: 443995 - RNA, 20 nt, Artificial Sequence
  Synthetic
aagaagaaagaaagaaagaa

SEQ ID NO: 443996 - RNA, 21 nt, Artificial Sequence
  Synthetic
aaagaagaaagaaagaaagaa

SEQ ID NO: 443997 - RNA, 22 nt, Artificial Sequence
  Synthetic
gaaagaagaaagaaagaaagaa

SEQ ID NO: 443998 - RNA, 23 nt, Artificial Sequence
  Synthetic
agaaagaagaaagaaagaaagaa

SEQ ID NO: 443999 - RNA, 24 nt, Artificial Sequence
  Synthetic
aagaaagaagaaagaaagaaagaa

SEQ ID NO: 444000 - RNA, 18 nt, Artificial Sequence
  Synthetic
gucccuuccaagaaagaa

SEQ ID NO: 444001 - RNA, 19 nt, Artificial Sequence
  Synthetic
ugucccuuccaagaaagaa

SEQ ID NO: 444002 - RNA, 20 nt, Artificial Sequence
  Synthetic
augucccuuccaagaaagaa

SEQ ID NO: 444003 - RNA, 21 nt, Artificial Sequence
  Synthetic
aaugucccuuccaagaaagaa

SEQ ID NO: 444004 - RNA, 22 nt, Artificial Sequence
  Synthetic
caaugucccuuccaagaaagaa

SEQ ID NO: 444005 - RNA, 23 nt, Artificial Sequence
  Synthetic
ccaaugucccuuccaagaaagaa

SEQ ID NO: 444006 - RNA, 24 nt, Artificial Sequence
  Synthetic
uccaaugucccuuccaagaaagaa

SEQ ID NO: 444007 - RNA, 18 nt, Artificial Sequence
  Synthetic
ugcugucucaagaaagaa

SEQ ID NO: 444008 - RNA, 19 nt, Artificial Sequence
  Synthetic
augcugucucaagaaagaa

SEQ ID NO: 444009 - RNA, 20 nt, Artificial Sequence
  Synthetic
gaugcugucucaagaaagaa

SEQ ID NO: 444010 - RNA, 21 nt, Artificial Sequence
  Synthetic
agaugcugucucaagaaagaa

SEQ ID NO: 444011 - RNA, 22 nt, Artificial Sequence
  Synthetic
gagaugcugucucaagaaagaa

SEQ ID NO: 444012 - RNA, 23 nt, Artificial Sequence
  Synthetic
ugagaugcugucucaagaaagaa

SEQ ID NO: 444013 - RNA, 24 nt, Artificial Sequence
  Synthetic
gugagaugcugucucaagaaagaa

SEQ ID NO: 444014 - RNA, 18 nt, Artificial Sequence
  Synthetic
gucauuuagcagaaagaa

SEQ ID NO: 444015 - RNA, 19 nt, Artificial Sequence
  Synthetic
ugucauuuagcagaaagaa

SEQ ID NO: 444016 - RNA, 20 nt, Artificial Sequence
  Synthetic
gugucauuuagcagaaagaa

SEQ ID NO: 444017 - RNA, 21 nt, Artificial Sequence
  Synthetic
agugucauuuagcagaaagaa

SEQ ID NO: 444018 - RNA, 22 nt, Artificial Sequence
  Synthetic
gagugucauuuagcagaaagaa

SEQ ID NO: 444019 - RNA, 23 nt, Artificial Sequence
  Synthetic
ugagugucauuuagcagaaagaa

SEQ ID NO: 444020 - RNA, 24 nt, Artificial Sequence
  Synthetic
uugagugucauuuagcagaaagaa

SEQ ID NO: 444021 - RNA, 18 nt, Artificial Sequence
  Synthetic
uuaaacaugcagaaagaa

SEQ ID NO: 444022 - RNA, 19 nt, Artificial Sequence
  Synthetic
cuuaaacaugcagaaagaa

SEQ ID NO: 444023 - RNA, 20 nt, Artificial Sequence
  Synthetic
acuuaaacaugcagaaagaa

SEQ ID NO: 444024 - RNA, 21 nt, Artificial Sequence
  Synthetic
cacuuaaacaugcagaaagaa

SEQ ID NO: 444025 - RNA, 22 nt, Artificial Sequence
  Synthetic
gcacuuaaacaugcagaaagaa

SEQ ID NO: 444026 - RNA, 23 nt, Artificial Sequence
  Synthetic
agcacuuaaacaugcagaaagaa

SEQ ID NO: 444027 - RNA, 24 nt, Artificial Sequence
  Synthetic
uagcacuuaaacaugcagaaagaa

SEQ ID NO: 444028 - RNA, 18 nt, Artificial Sequence
  Synthetic
cagaggaaagagaaagaa

SEQ ID NO: 444029 - RNA, 19 nt, Artificial Sequence
  Synthetic
ucagaggaaagagaaagaa

SEQ ID NO: 444030 - RNA, 20 nt, Artificial Sequence
  Synthetic
uucagaggaaagagaaagaa

SEQ ID NO: 444031 - RNA, 21 nt, Artificial Sequence
  Synthetic
uuucagaggaaagagaaagaa

SEQ ID NO: 444032 - RNA, 22 nt, Artificial Sequence
  Synthetic
auuucagaggaaagagaaagaa

SEQ ID NO: 444033 - RNA, 23 nt, Artificial Sequence
  Synthetic
aauuucagaggaaagagaaagaa

SEQ ID NO: 444034 - RNA, 24 nt, Artificial Sequence
  Synthetic
aaauuucagaggaaagagaaagaa

SEQ ID NO: 444035 - RNA, 18 nt, Artificial Sequence
  Synthetic
gugagagaagagaaagaa

SEQ ID NO: 444036 - RNA, 19 nt, Artificial Sequence
  Synthetic
ugugagagaagagaaagaa

SEQ ID NO: 444037 - RNA, 20 nt, Artificial Sequence
  Synthetic
cugugagagaagagaaagaa

SEQ ID NO: 444038 - RNA, 21 nt, Artificial Sequence
  Synthetic
ccugugagagaagagaaagaa

SEQ ID NO: 444039 - RNA, 22 nt, Artificial Sequence
  Synthetic
gccugugagagaagagaaagaa

SEQ ID NO: 444040 - RNA, 23 nt, Artificial Sequence
  Synthetic
ggccugugagagaagagaaagaa

SEQ ID NO: 444041 - RNA, 24 nt, Artificial Sequence
  Synthetic
uggccugugagagaagagaaagaa

SEQ ID NO: 444042 - RNA, 18 nt, Artificial Sequence
  Synthetic
augugcagagagaaagaa

SEQ ID NO: 444043 - RNA, 19 nt, Artificial Sequence
  Synthetic
aaugugcagagagaaagaa

SEQ ID NO: 444044 - RNA, 20 nt, Artificial Sequence
  Synthetic
aaaugugcagagagaaagaa

SEQ ID NO: 444045 - RNA, 21 nt, Artificial Sequence
  Synthetic
aaaaugugcagagagaaagaa

SEQ ID NO: 444046 - RNA, 22 nt, Artificial Sequence
  Synthetic
caaaaugugcagagagaaagaa

SEQ ID NO: 444047 - RNA, 23 nt, Artificial Sequence
  Synthetic
ucaaaaugugcagagagaaagaa

SEQ ID NO: 444048 - RNA, 24 nt, Artificial Sequence
  Synthetic
cucaaaaugugcagagagaaagaa

SEQ ID NO: 444049 - RNA, 18 nt, Artificial Sequence
  Synthetic
gggaaaauagagaaagaa

SEQ ID NO: 444050 - RNA, 19 nt, Artificial Sequence
  Synthetic
agggaaaauagagaaagaa

SEQ ID NO: 444051 - RNA, 20 nt, Artificial Sequence
  Synthetic
aagggaaaauagagaaagaa

SEQ ID NO: 444052 - RNA, 21 nt, Artificial Sequence
  Synthetic
uaagggaaaauagagaaagaa

SEQ ID NO: 444053 - RNA, 22 nt, Artificial Sequence
  Synthetic
guaagggaaaauagagaaagaa

SEQ ID NO: 444054 - RNA, 23 nt, Artificial Sequence
  Synthetic
uguaagggaaaauagagaaagaa

SEQ ID NO: 444055 - RNA, 24 nt, Artificial Sequence
  Synthetic
cuguaagggaaaauagagaaagaa

SEQ ID NO: 444056 - RNA, 18 nt, Artificial Sequence
  Synthetic
ugucuccuggagaaagaa

SEQ ID NO: 444057 - RNA, 19 nt, Artificial Sequence
  Synthetic
cugucuccuggagaaagaa

SEQ ID NO: 444058 - RNA, 20 nt, Artificial Sequence
  Synthetic
ucugucuccuggagaaagaa

SEQ ID NO: 444059 - RNA, 21 nt, Artificial Sequence
  Synthetic
cucugucuccuggagaaagaa

SEQ ID NO: 444060 - RNA, 22 nt, Artificial Sequence
  Synthetic
ccucugucuccuggagaaagaa

SEQ ID NO: 444061 - RNA, 23 nt, Artificial Sequence
  Synthetic
gccucugucuccuggagaaagaa

SEQ ID NO: 444062 - RNA, 24 nt, Artificial Sequence
  Synthetic
ggccucugucuccuggagaaagaa

SEQ ID NO: 444063 - RNA, 18 nt, Artificial Sequence
  Synthetic
auaggugaguagaaagaa

SEQ ID NO: 444064 - RNA, 19 nt, Artificial Sequence
  Synthetic
aauaggugaguagaaagaa

SEQ ID NO: 444065 - RNA, 20 nt, Artificial Sequence
  Synthetic
aaauaggugaguagaaagaa

SEQ ID NO: 444066 - RNA, 21 nt, Artificial Sequence
  Synthetic
caaauaggugaguagaaagaa

SEQ ID NO: 444067 - RNA, 22 nt, Artificial Sequence
  Synthetic
ucaaauaggugaguagaaagaa

SEQ ID NO: 444068 - RNA, 23 nt, Artificial Sequence
  Synthetic
uucaaauaggugaguagaaagaa

SEQ ID NO: 444069 - RNA, 24 nt, Artificial Sequence
  Synthetic
auucaaauaggugaguagaaagaa

SEQ ID NO: 444070 - RNA, 18 nt, Artificial Sequence
  Synthetic
ggagagagguagaaagaa

SEQ ID NO: 444071 - RNA, 19 nt, Artificial Sequence
  Synthetic
aggagagagguagaaagaa

SEQ ID NO: 444072 - RNA, 20 nt, Artificial Sequence
  Synthetic
aaggagagagguagaaagaa

SEQ ID NO: 444073 - RNA, 21 nt, Artificial Sequence
  Synthetic
aaaggagagagguagaaagaa

SEQ ID NO: 444074 - RNA, 22 nt, Artificial Sequence
  Synthetic
gaaaggagagagguagaaagaa

SEQ ID NO: 444075 - RNA, 23 nt, Artificial Sequence
  Synthetic
ggaaaggagagagguagaaagaa

SEQ ID NO: 444076 - RNA, 24 nt, Artificial Sequence
  Synthetic
aggaaaggagagagguagaaagaa

SEQ ID NO: 444077 - RNA, 18 nt, Artificial Sequence
  Synthetic
gugggaggguagaaagaa

SEQ ID NO: 444078 - RNA, 19 nt, Artificial Sequence
  Synthetic
ggugggaggguagaaagaa

SEQ ID NO: 444079 - RNA, 20 nt, Artificial Sequence
  Synthetic
gggugggaggguagaaagaa

SEQ ID NO: 444080 - RNA, 21 nt, Artificial Sequence
  Synthetic
ggggugggaggguagaaagaa

SEQ ID NO: 444081 - RNA, 22 nt, Artificial Sequence
  Synthetic
cggggugggaggguagaaagaa

SEQ ID NO: 444082 - RNA, 23 nt, Artificial Sequence
  Synthetic
acggggugggaggguagaaagaa

SEQ ID NO: 444083 - RNA, 24 nt, Artificial Sequence
  Synthetic
aacggggugggaggguagaaagaa

SEQ ID NO: 444084 - RNA, 18 nt, Artificial Sequence
  Synthetic
gauuaaccaaggaaagaa

SEQ ID NO: 444085 - RNA, 19 nt, Artificial Sequence
  Synthetic
agauuaaccaaggaaagaa

SEQ ID NO: 444086 - RNA, 20 nt, Artificial Sequence
  Synthetic
aagauuaaccaaggaaagaa

SEQ ID NO: 444087 - RNA, 21 nt, Artificial Sequence
  Synthetic
caagauuaaccaaggaaagaa

SEQ ID NO: 444088 - RNA, 22 nt, Artificial Sequence
  Synthetic
gcaagauuaaccaaggaaagaa

SEQ ID NO: 444089 - RNA, 23 nt, Artificial Sequence
  Synthetic
agcaagauuaaccaaggaaagaa

SEQ ID NO: 444090 - RNA, 24 nt, Artificial Sequence
  Synthetic
uagcaagauuaaccaaggaaagaa

SEQ ID NO: 444091 - RNA, 18 nt, Artificial Sequence
  Synthetic
uuucagggggggaaagaa

SEQ ID NO: 444092 - RNA, 19 nt, Artificial Sequence
  Synthetic
auuucagggggggaaagaa

SEQ ID NO: 444093 - RNA, 20 nt, Artificial Sequence
  Synthetic
gauuucagggggggaaagaa

SEQ ID NO: 444094 - RNA, 21 nt, Artificial Sequence
  Synthetic
ggauuucagggggggaaagaa

SEQ ID NO: 444095 - RNA, 22 nt, Artificial Sequence
  Synthetic
uggauuucagggggggaaagaa

SEQ ID NO: 444096 - RNA, 23 nt, Artificial Sequence
  Synthetic
auggauuucagggggggaaagaa

SEQ ID NO: 444097 - RNA, 24 nt, Artificial Sequence
  Synthetic
uauggauuucagggggggaaagaa

SEQ ID NO: 444098 - RNA, 18 nt, Artificial Sequence
  Synthetic
gaaagacaagugaaagaa

SEQ ID NO: 444099 - RNA, 19 nt, Artificial Sequence
  Synthetic
agaaagacaagugaaagaa

SEQ ID NO: 444100 - RNA, 20 nt, Artificial Sequence
  Synthetic
cagaaagacaagugaaagaa

SEQ ID NO: 444101 - RNA, 21 nt, Artificial Sequence
  Synthetic
acagaaagacaagugaaagaa

SEQ ID NO: 444102 - RNA, 22 nt, Artificial Sequence
  Synthetic
uacagaaagacaagugaaagaa

SEQ ID NO: 444103 - RNA, 23 nt, Artificial Sequence
  Synthetic
uuacagaaagacaagugaaagaa

SEQ ID NO: 444104 - RNA, 24 nt, Artificial Sequence
  Synthetic
auuacagaaagacaagugaaagaa

SEQ ID NO: 444105 - RNA, 18 nt, Artificial Sequence
  Synthetic
ccuagauaauugaaagaa

SEQ ID NO: 444106 - RNA, 19 nt, Artificial Sequence
  Synthetic
uccuagauaauugaaagaa

SEQ ID NO: 444107 - RNA, 20 nt, Artificial Sequence
  Synthetic
auccuagauaauugaaagaa

SEQ ID NO: 444108 - RNA, 21 nt, Artificial Sequence
  Synthetic
aauccuagauaauugaaagaa

SEQ ID NO: 444109 - RNA, 22 nt, Artificial Sequence
  Synthetic
gaauccuagauaauugaaagaa

SEQ ID NO: 444110 - RNA, 23 nt, Artificial Sequence
  Synthetic
ggaauccuagauaauugaaagaa

SEQ ID NO: 444111 - RNA, 24 nt, Artificial Sequence
  Synthetic
aggaauccuagauaauugaaagaa

SEQ ID NO: 444112 - RNA, 18 nt, Artificial Sequence
  Synthetic
aacauaugcuugaaagaa

SEQ ID NO: 444113 - RNA, 19 nt, Artificial Sequence
  Synthetic
caacauaugcuugaaagaa

SEQ ID NO: 444114 - RNA, 20 nt, Artificial Sequence
  Synthetic
acaacauaugcuugaaagaa

SEQ ID NO: 444115 - RNA, 21 nt, Artificial Sequence
  Synthetic
cacaacauaugcuugaaagaa

SEQ ID NO: 444116 - RNA, 22 nt, Artificial Sequence
  Synthetic
ccacaacauaugcuugaaagaa

SEQ ID NO: 444117 - RNA, 23 nt, Artificial Sequence
  Synthetic
gccacaacauaugcuugaaagaa

SEQ ID NO: 444118 - RNA, 24 nt, Artificial Sequence
  Synthetic
ugccacaacauaugcuugaaagaa

SEQ ID NO: 444119 - RNA, 18 nt, Artificial Sequence
  Synthetic
caucagaaguugaaagaa

SEQ ID NO: 444120 - RNA, 19 nt, Artificial Sequence
  Synthetic
acaucagaaguugaaagaa

SEQ ID NO: 444121 - RNA, 20 nt, Artificial Sequence
  Synthetic
cacaucagaaguugaaagaa

SEQ ID NO: 444122 - RNA, 21 nt, Artificial Sequence
  Synthetic
ucacaucagaaguugaaagaa

SEQ ID NO: 444123 - RNA, 22 nt, Artificial Sequence
  Synthetic
aucacaucagaaguugaaagaa

SEQ ID NO: 444124 - RNA, 23 nt, Artificial Sequence
  Synthetic
aaucacaucagaaguugaaagaa

SEQ ID NO: 444125 - RNA, 24 nt, Artificial Sequence
  Synthetic
gaaucacaucagaaguugaaagaa

SEQ ID NO: 444126 - RNA, 18 nt, Artificial Sequence
  Synthetic
uaauguauuuugaaagaa

SEQ ID NO: 444127 - RNA, 19 nt, Artificial Sequence
  Synthetic
guaauguauuuugaaagaa

SEQ ID NO: 444128 - RNA, 20 nt, Artificial Sequence
  Synthetic
gguaauguauuuugaaagaa

SEQ ID NO: 444129 - RNA, 21 nt, Artificial Sequence
  Synthetic
agguaauguauuuugaaagaa

SEQ ID NO: 444130 - RNA, 22 nt, Artificial Sequence
  Synthetic
uagguaauguauuuugaaagaa

SEQ ID NO: 444131 - RNA, 23 nt, Artificial Sequence
  Synthetic
uuagguaauguauuuugaaagaa

SEQ ID NO: 444132 - RNA, 24 nt, Artificial Sequence
  Synthetic
uuuagguaauguauuuugaaagaa

SEQ ID NO: 444133 - RNA, 18 nt, Artificial Sequence
  Synthetic
uagaagaaaaauaaagaa

SEQ ID NO: 444134 - RNA, 19 nt, Artificial Sequence
  Synthetic
cuagaagaaaaauaaagaa

SEQ ID NO: 444135 - RNA, 20 nt, Artificial Sequence
  Synthetic
acuagaagaaaaauaaagaa

SEQ ID NO: 444136 - RNA, 21 nt, Artificial Sequence
  Synthetic
uacuagaagaaaaauaaagaa

SEQ ID NO: 444137 - RNA, 22 nt, Artificial Sequence
  Synthetic
uuacuagaagaaaaauaaagaa

SEQ ID NO: 444138 - RNA, 23 nt, Artificial Sequence
  Synthetic
uuuacuagaagaaaaauaaagaa

SEQ ID NO: 444139 - RNA, 24 nt, Artificial Sequence
  Synthetic
uuuuacuagaagaaaaauaaagaa

SEQ ID NO: 444140 - RNA, 18 nt, Artificial Sequence
  Synthetic
ccuacuacaaauaaagaa

SEQ ID NO: 444141 - RNA, 19 nt, Artificial Sequence
  Synthetic
accuacuacaaauaaagaa

SEQ ID NO: 444142 - RNA, 20 nt, Artificial Sequence
  Synthetic
uaccuacuacaaauaaagaa

SEQ ID NO: 444143 - RNA, 21 nt, Artificial Sequence
  Synthetic
auaccuacuacaaauaaagaa

SEQ ID NO: 444144 - RNA, 22 nt, Artificial Sequence
  Synthetic
uauaccuacuacaaauaaagaa

SEQ ID NO: 444145 - RNA, 23 nt, Artificial Sequence
  Synthetic
uuauaccuacuacaaauaaagaa

SEQ ID NO: 444146 - RNA, 24 nt, Artificial Sequence
  Synthetic
uuuauaccuacuacaaauaaagaa

SEQ ID NO: 444147 - RNA, 18 nt, Artificial Sequence
  Synthetic
agaaaagcaaauaaagaa

SEQ ID NO: 444148 - RNA, 19 nt, Artificial Sequence
  Synthetic
aagaaaagcaaauaaagaa

SEQ ID NO: 444149 - RNA, 20 nt, Artificial Sequence
  Synthetic
aaagaaaagcaaauaaagaa

SEQ ID NO: 444150 - RNA, 21 nt, Artificial Sequence
  Synthetic
caaagaaaagcaaauaaagaa

SEQ ID NO: 444151 - RNA, 22 nt, Artificial Sequence
  Synthetic
acaaagaaaagcaaauaaagaa

SEQ ID NO: 444152 - RNA, 23 nt, Artificial Sequence
  Synthetic
gacaaagaaaagcaaauaaagaa

SEQ ID NO: 444153 - RNA, 24 nt, Artificial Sequence
  Synthetic
agacaaagaaaagcaaauaaagaa

SEQ ID NO: 444154 - RNA, 18 nt, Artificial Sequence
  Synthetic
uaauauagaaauaaagaa

SEQ ID NO: 444155 - RNA, 19 nt, Artificial Sequence
  Synthetic
guaauauagaaauaaagaa

SEQ ID NO: 444156 - RNA, 20 nt, Artificial Sequence
  Synthetic
gguaauauagaaauaaagaa

SEQ ID NO: 444157 - RNA, 21 nt, Artificial Sequence
  Synthetic
agguaauauagaaauaaagaa

SEQ ID NO: 444158 - RNA, 22 nt, Artificial Sequence
  Synthetic
uagguaauauagaaauaaagaa

SEQ ID NO: 444159 - RNA, 23 nt, Artificial Sequence
  Synthetic
auagguaauauagaaauaaagaa

SEQ ID NO: 444160 - RNA, 24 nt, Artificial Sequence
  Synthetic
gauagguaauauagaaauaaagaa

SEQ ID NO: 444161 - RNA, 18 nt, Artificial Sequence
  Synthetic
uauuugucccauaaagaa

SEQ ID NO: 444162 - RNA, 19 nt, Artificial Sequence
  Synthetic
uuauuugucccauaaagaa

SEQ ID NO: 444163 - RNA, 20 nt, Artificial Sequence
  Synthetic
uuuauuugucccauaaagaa

SEQ ID NO: 444164 - RNA, 21 nt, Artificial Sequence
  Synthetic
uuuuauuugucccauaaagaa

SEQ ID NO: 444165 - RNA, 22 nt, Artificial Sequence
  Synthetic
auuuuauuugucccauaaagaa

SEQ ID NO: 444166 - RNA, 23 nt, Artificial Sequence
  Synthetic
gauuuuauuugucccauaaagaa

SEQ ID NO: 444167 - RNA, 24 nt, Artificial Sequence
  Synthetic
agauuuuauuugucccauaaagaa

SEQ ID NO: 444168 - RNA, 18 nt, Artificial Sequence
  Synthetic
aaacaguauuauaaagaa

SEQ ID NO: 444169 - RNA, 19 nt, Artificial Sequence
  Synthetic
aaaacaguauuauaaagaa

SEQ ID NO: 444170 - RNA, 20 nt, Artificial Sequence
  Synthetic
caaaacaguauuauaaagaa

SEQ ID NO: 444171 - RNA, 21 nt, Artificial Sequence
  Synthetic
acaaaacaguauuauaaagaa

SEQ ID NO: 444172 - RNA, 22 nt, Artificial Sequence
  Synthetic
uacaaaacaguauuauaaagaa

SEQ ID NO: 444173 - RNA, 23 nt, Artificial Sequence
  Synthetic
auacaaaacaguauuauaaagaa

SEQ ID NO: 444174 - RNA, 24 nt, Artificial Sequence
  Synthetic
aauacaaaacaguauuauaaagaa

SEQ ID NO: 444175 - RNA, 18 nt, Artificial Sequence
  Synthetic
cggguaauuuauaaagaa

SEQ ID NO: 444176 - RNA, 19 nt, Artificial Sequence
  Synthetic
ccggguaauuuauaaagaa

SEQ ID NO: 444177 - RNA, 20 nt, Artificial Sequence
  Synthetic
accggguaauuuauaaagaa

SEQ ID NO: 444178 - RNA, 21 nt, Artificial Sequence
  Synthetic
gaccggguaauuuauaaagaa

SEQ ID NO: 444179 - RNA, 22 nt, Artificial Sequence
  Synthetic
agaccggguaauuuauaaagaa

SEQ ID NO: 444180 - RNA, 23 nt, Artificial Sequence
  Synthetic
aagaccggguaauuuauaaagaa

SEQ ID NO: 444181 - RNA, 24 nt, Artificial Sequence
  Synthetic
caagaccggguaauuuauaaagaa

SEQ ID NO: 444182 - RNA, 18 nt, Artificial Sequence
  Synthetic
caacuaguagcuaaagaa

SEQ ID NO: 444183 - RNA, 19 nt, Artificial Sequence
  Synthetic
acaacuaguagcuaaagaa

SEQ ID NO: 444184 - RNA, 20 nt, Artificial Sequence
  Synthetic
uacaacuaguagcuaaagaa

SEQ ID NO: 444185 - RNA, 21 nt, Artificial Sequence
  Synthetic
guacaacuaguagcuaaagaa

SEQ ID NO: 444186 - RNA, 22 nt, Artificial Sequence
  Synthetic
aguacaacuaguagcuaaagaa

SEQ ID NO: 444187 - RNA, 23 nt, Artificial Sequence
  Synthetic
aaguacaacuaguagcuaaagaa

SEQ ID NO: 444188 - RNA, 24 nt, Artificial Sequence
  Synthetic
aaaguacaacuaguagcuaaagaa

SEQ ID NO: 444189 - RNA, 18 nt, Artificial Sequence
  Synthetic
gaaagcagaaguaaagaa

SEQ ID NO: 444190 - RNA, 19 nt, Artificial Sequence
  Synthetic
ggaaagcagaaguaaagaa

SEQ ID NO: 444191 - RNA, 20 nt, Artificial Sequence
  Synthetic
aggaaagcagaaguaaagaa

SEQ ID NO: 444192 - RNA, 21 nt, Artificial Sequence
  Synthetic
aaggaaagcagaaguaaagaa

SEQ ID NO: 444193 - RNA, 22 nt, Artificial Sequence
  Synthetic
aaaggaaagcagaaguaaagaa

SEQ ID NO: 444194 - RNA, 23 nt, Artificial Sequence
  Synthetic
gaaaggaaagcagaaguaaagaa

SEQ ID NO: 444195 - RNA, 24 nt, Artificial Sequence
  Synthetic
ggaaaggaaagcagaaguaaagaa

SEQ ID NO: 444196 - RNA, 18 nt, Artificial Sequence
  Synthetic
cagagagaagguaaagaa

SEQ ID NO: 444197 - RNA, 19 nt, Artificial Sequence
  Synthetic
ucagagagaagguaaagaa

SEQ ID NO: 444198 - RNA, 20 nt, Artificial Sequence
  Synthetic
aucagagagaagguaaagaa

SEQ ID NO: 444199 - RNA, 21 nt, Artificial Sequence
  Synthetic
aaucagagagaagguaaagaa

SEQ ID NO: 444200 - RNA, 22 nt, Artificial Sequence
  Synthetic
gaaucagagagaagguaaagaa

SEQ ID NO: 444201 - RNA, 23 nt, Artificial Sequence
  Synthetic
agaaucagagagaagguaaagaa

SEQ ID NO: 444202 - RNA, 24 nt, Artificial Sequence
  Synthetic
cagaaucagagagaagguaaagaa

SEQ ID NO: 444203 - RNA, 18 nt, Artificial Sequence
  Synthetic
uagggcuaggguaaagaa

SEQ ID NO: 444204 - RNA, 19 nt, Artificial Sequence
  Synthetic
cuagggcuaggguaaagaa

SEQ ID NO: 444205 - RNA, 20 nt, Artificial Sequence
  Synthetic
ccuagggcuaggguaaagaa

SEQ ID NO: 444206 - RNA, 21 nt, Artificial Sequence
  Synthetic
uccuagggcuaggguaaagaa

SEQ ID NO: 444207 - RNA, 22 nt, Artificial Sequence
  Synthetic
auccuagggcuaggguaaagaa

SEQ ID NO: 444208 - RNA, 23 nt, Artificial Sequence
  Synthetic
gauccuagggcuaggguaaagaa

SEQ ID NO: 444209 - RNA, 24 nt, Artificial Sequence
  Synthetic
ugauccuagggcuaggguaaagaa

SEQ ID NO: 444210 - RNA, 18 nt, Artificial Sequence
  Synthetic
ucaugaaaucuuaaagaa

SEQ ID NO: 444211 - RNA, 19 nt, Artificial Sequence
  Synthetic
gucaugaaaucuuaaagaa

SEQ ID NO: 444212 - RNA, 20 nt, Artificial Sequence
  Synthetic
agucaugaaaucuuaaagaa

SEQ ID NO: 444213 - RNA, 21 nt, Artificial Sequence
  Synthetic
cagucaugaaaucuuaaagaa

SEQ ID NO: 444214 - RNA, 22 nt, Artificial Sequence
  Synthetic
gcagucaugaaaucuuaaagaa

SEQ ID NO: 444215 - RNA, 23 nt, Artificial Sequence
  Synthetic
ugcagucaugaaaucuuaaagaa

SEQ ID NO: 444216 - RNA, 24 nt, Artificial Sequence
  Synthetic
cugcagucaugaaaucuuaaagaa

SEQ ID NO: 444217 - RNA, 18 nt, Artificial Sequence
  Synthetic
gaauucauucuuaaagaa

SEQ ID NO: 444218 - RNA, 19 nt, Artificial Sequence
  Synthetic
ugaauucauucuuaaagaa

SEQ ID NO: 444219 - RNA, 20 nt, Artificial Sequence
  Synthetic
uugaauucauucuuaaagaa

SEQ ID NO: 444220 - RNA, 21 nt, Artificial Sequence
  Synthetic
uuugaauucauucuuaaagaa

SEQ ID NO: 444221 - RNA, 22 nt, Artificial Sequence
  Synthetic
cuuugaauucauucuuaaagaa

SEQ ID NO: 444222 - RNA, 23 nt, Artificial Sequence
  Synthetic
acuuugaauucauucuuaaagaa

SEQ ID NO: 444223 - RNA, 24 nt, Artificial Sequence
  Synthetic
gacuuugaauucauucuuaaagaa

SEQ ID NO: 444224 - RNA, 18 nt, Artificial Sequence
  Synthetic
uucagggcauuuaaagaa

SEQ ID NO: 444225 - RNA, 19 nt, Artificial Sequence
  Synthetic
cuucagggcauuuaaagaa

SEQ ID NO: 444226 - RNA, 20 nt, Artificial Sequence
  Synthetic
gcuucagggcauuuaaagaa

SEQ ID NO: 444227 - RNA, 21 nt, Artificial Sequence
  Synthetic
agcuucagggcauuuaaagaa

SEQ ID NO: 444228 - RNA, 22 nt, Artificial Sequence
  Synthetic
uagcuucagggcauuuaaagaa

SEQ ID NO: 444229 - RNA, 23 nt, Artificial Sequence
  Synthetic
cuagcuucagggcauuuaaagaa

SEQ ID NO: 444230 - RNA, 24 nt, Artificial Sequence
  Synthetic
gcuagcuucagggcauuuaaagaa

SEQ ID NO: 444231 - RNA, 18 nt, Artificial Sequence
  Synthetic
aagaagucauuuaaagaa

SEQ ID NO: 444232 - RNA, 19 nt, Artificial Sequence
  Synthetic
aaagaagucauuuaaagaa

SEQ ID NO: 444233 - RNA, 20 nt, Artificial Sequence
  Synthetic
gaaagaagucauuuaaagaa

SEQ ID NO: 444234 - RNA, 21 nt, Artificial Sequence
  Synthetic
ugaaagaagucauuuaaagaa

SEQ ID NO: 444235 - RNA, 22 nt, Artificial Sequence
  Synthetic
cugaaagaagucauuuaaagaa

SEQ ID NO: 444236 - RNA, 23 nt, Artificial Sequence
  Synthetic
acugaaagaagucauuuaaagaa

SEQ ID NO: 444237 - RNA, 24 nt, Artificial Sequence
  Synthetic
aacugaaagaagucauuuaaagaa

SEQ ID NO: 444238 - RNA, 18 nt, Artificial Sequence
  Synthetic
cuuggcaaguuuaaagaa

SEQ ID NO: 444239 - RNA, 19 nt, Artificial Sequence
  Synthetic
ucuuggcaaguuuaaagaa

SEQ ID NO: 444240 - RNA, 20 nt, Artificial Sequence
  Synthetic
aucuuggcaaguuuaaagaa

SEQ ID NO: 444241 - RNA, 21 nt, Artificial Sequence
  Synthetic
caucuuggcaaguuuaaagaa

SEQ ID NO: 444242 - RNA, 22 nt, Artificial Sequence
  Synthetic
acaucuuggcaaguuuaaagaa

SEQ ID NO: 444243 - RNA, 23 nt, Artificial Sequence
  Synthetic
gacaucuuggcaaguuuaaagaa

SEQ ID NO: 444244 - RNA, 24 nt, Artificial Sequence
  Synthetic
agacaucuuggcaaguuuaaagaa

SEQ ID NO: 444245 - RNA, 18 nt, Artificial Sequence
  Synthetic
ccugacaaaaaacaagaa

SEQ ID NO: 444246 - RNA, 19 nt, Artificial Sequence
  Synthetic
accugacaaaaaacaagaa

SEQ ID NO: 444247 - RNA, 20 nt, Artificial Sequence
  Synthetic
aaccugacaaaaaacaagaa

SEQ ID NO: 444248 - RNA, 21 nt, Artificial Sequence
  Synthetic
aaaccugacaaaaaacaagaa

SEQ ID NO: 444249 - RNA, 22 nt, Artificial Sequence
  Synthetic
caaaccugacaaaaaacaagaa

SEQ ID NO: 444250 - RNA, 23 nt, Artificial Sequence
  Synthetic
acaaaccugacaaaaaacaagaa

SEQ ID NO: 444251 - RNA, 24 nt, Artificial Sequence
  Synthetic
gacaaaccugacaaaaaacaagaa

SEQ ID NO: 444252 - RNA, 18 nt, Artificial Sequence
  Synthetic
acaaauaaaaaacaagaa

SEQ ID NO: 444253 - RNA, 19 nt, Artificial Sequence
  Synthetic
uacaaauaaaaaacaagaa

SEQ ID NO: 444254 - RNA, 20 nt, Artificial Sequence
  Synthetic
auacaaauaaaaaacaagaa

SEQ ID NO: 444255 - RNA, 21 nt, Artificial Sequence
  Synthetic
aauacaaauaaaaaacaagaa

SEQ ID NO: 444256 - RNA, 22 nt, Artificial Sequence
  Synthetic
aaauacaaauaaaaaacaagaa

SEQ ID NO: 444257 - RNA, 23 nt, Artificial Sequence
  Synthetic
aaaauacaaauaaaaaacaagaa

SEQ ID NO: 444258 - RNA, 24 nt, Artificial Sequence
  Synthetic
aaaaauacaaauaaaaaacaagaa

SEQ ID NO: 444259 - RNA, 18 nt, Artificial Sequence
  Synthetic
accugacaaaaacaagaa

SEQ ID NO: 444260 - RNA, 19 nt, Artificial Sequence
  Synthetic
aaccugacaaaaacaagaa

SEQ ID NO: 444261 - RNA, 20 nt, Artificial Sequence
  Synthetic
aaaccugacaaaaacaagaa

SEQ ID NO: 444262 - RNA, 21 nt, Artificial Sequence
  Synthetic
caaaccugacaaaaacaagaa

SEQ ID NO: 444263 - RNA, 22 nt, Artificial Sequence
  Synthetic
acaaaccugacaaaaacaagaa

SEQ ID NO: 444264 - RNA, 23 nt, Artificial Sequence
  Synthetic
gacaaaccugacaaaaacaagaa

SEQ ID NO: 444265 - RNA, 24 nt, Artificial Sequence
  Synthetic
ugacaaaccugacaaaaacaagaa

SEQ ID NO: 444266 - RNA, 18 nt, Artificial Sequence
  Synthetic
gccaucagccaacaagaa

SEQ ID NO: 444267 - RNA, 19 nt, Artificial Sequence
  Synthetic
ggccaucagccaacaagaa

SEQ ID NO: 444268 - RNA, 20 nt, Artificial Sequence
  Synthetic
uggccaucagccaacaagaa

SEQ ID NO: 444269 - RNA, 21 nt, Artificial Sequence
  Synthetic
guggccaucagccaacaagaa

SEQ ID NO: 444270 - RNA, 22 nt, Artificial Sequence
  Synthetic
cguggccaucagccaacaagaa

SEQ ID NO: 444271 - RNA, 23 nt, Artificial Sequence
  Synthetic
acguggccaucagccaacaagaa

SEQ ID NO: 444272 - RNA, 24 nt, Artificial Sequence
  Synthetic
aacguggccaucagccaacaagaa

SEQ ID NO: 444273 - RNA, 18 nt, Artificial Sequence
  Synthetic
ugggaauaauaacaagaa

SEQ ID NO: 444274 - RNA, 19 nt, Artificial Sequence
  Synthetic
augggaauaauaacaagaa

SEQ ID NO: 444275 - RNA, 20 nt, Artificial Sequence
  Synthetic
aaugggaauaauaacaagaa

SEQ ID NO: 444276 - RNA, 21 nt, Artificial Sequence
  Synthetic
aaaugggaauaauaacaagaa

SEQ ID NO: 444277 - RNA, 22 nt, Artificial Sequence
  Synthetic
caaaugggaauaauaacaagaa

SEQ ID NO: 444278 - RNA, 23 nt, Artificial Sequence
  Synthetic
ucaaaugggaauaauaacaagaa

SEQ ID NO: 444279 - RNA, 24 nt, Artificial Sequence
  Synthetic
uucaaaugggaauaauaacaagaa

SEQ ID NO: 444280 - RNA, 18 nt, Artificial Sequence
  Synthetic
uuuauuuuuauacaagaa

SEQ ID NO: 444281 - RNA, 19 nt, Artificial Sequence
  Synthetic
cuuuauuuuuauacaagaa

SEQ ID NO: 444282 - RNA, 20 nt, Artificial Sequence
  Synthetic
ucuuuauuuuuauacaagaa

SEQ ID NO: 444283 - RNA, 21 nt, Artificial Sequence
  Synthetic
uucuuuauuuuuauacaagaa

SEQ ID NO: 444284 - RNA, 22 nt, Artificial Sequence
  Synthetic
uuucuuuauuuuuauacaagaa

SEQ ID NO: 444285 - RNA, 23 nt, Artificial Sequence
  Synthetic
uuuucuuuauuuuuauacaagaa

SEQ ID NO: 444286 - RNA, 24 nt, Artificial Sequence
  Synthetic
guuuucuuuauuuuuauacaagaa

SEQ ID NO: 444287 - RNA, 18 nt, Artificial Sequence
  Synthetic
gucuccuuucuacaagaa

SEQ ID NO: 444288 - RNA, 19 nt, Artificial Sequence
  Synthetic
ggucuccuuucuacaagaa

SEQ ID NO: 444289 - RNA, 20 nt, Artificial Sequence
  Synthetic
gggucuccuuucuacaagaa

SEQ ID NO: 444290 - RNA, 21 nt, Artificial Sequence
  Synthetic
ugggucuccuuucuacaagaa

SEQ ID NO: 444291 - RNA, 22 nt, Artificial Sequence
  Synthetic
augggucuccuuucuacaagaa

SEQ ID NO: 444292 - RNA, 23 nt, Artificial Sequence
  Synthetic
aaugggucuccuuucuacaagaa

SEQ ID NO: 444293 - RNA, 24 nt, Artificial Sequence
  Synthetic
caaugggucuccuuucuacaagaa

SEQ ID NO: 444294 - RNA, 18 nt, Artificial Sequence
  Synthetic
ccuaacuagauccaagaa

SEQ ID NO: 444295 - RNA, 19 nt, Artificial Sequence
  Synthetic
cccuaacuagauccaagaa

SEQ ID NO: 444296 - RNA, 20 nt, Artificial Sequence
  Synthetic
gcccuaacuagauccaagaa

SEQ ID NO: 444297 - RNA, 21 nt, Artificial Sequence
  Synthetic
agcccuaacuagauccaagaa

SEQ ID NO: 444298 - RNA, 22 nt, Artificial Sequence
  Synthetic
gagcccuaacuagauccaagaa

SEQ ID NO: 444299 - RNA, 23 nt, Artificial Sequence
  Synthetic
ggagcccuaacuagauccaagaa

SEQ ID NO: 444300 - RNA, 24 nt, Artificial Sequence
  Synthetic
aggagcccuaacuagauccaagaa

SEQ ID NO: 444301 - RNA, 18 nt, Artificial Sequence
  Synthetic
uagagaacauuccaagaa

SEQ ID NO: 444302 - RNA, 19 nt, Artificial Sequence
  Synthetic
cuagagaacauuccaagaa

SEQ ID NO: 444303 - RNA, 20 nt, Artificial Sequence
  Synthetic
gcuagagaacauuccaagaa

SEQ ID NO: 444304 - RNA, 21 nt, Artificial Sequence
  Synthetic
ugcuagagaacauuccaagaa

SEQ ID NO: 444305 - RNA, 22 nt, Artificial Sequence
  Synthetic
augcuagagaacauuccaagaa

SEQ ID NO: 444306 - RNA, 23 nt, Artificial Sequence
  Synthetic
uaugcuagagaacauuccaagaa

SEQ ID NO: 444307 - RNA, 24 nt, Artificial Sequence
  Synthetic
guaugcuagagaacauuccaagaa

SEQ ID NO: 444308 - RNA, 18 nt, Artificial Sequence
  Synthetic
ucuuggguuuuccaagaa

SEQ ID NO: 444309 - RNA, 19 nt, Artificial Sequence
  Synthetic
uucuuggguuuuccaagaa

SEQ ID NO: 444310 - RNA, 20 nt, Artificial Sequence
  Synthetic
auucuuggguuuuccaagaa

SEQ ID NO: 444311 - RNA, 21 nt, Artificial Sequence
  Synthetic
aauucuuggguuuuccaagaa

SEQ ID NO: 444312 - RNA, 22 nt, Artificial Sequence
  Synthetic
aaauucuuggguuuuccaagaa

SEQ ID NO: 444313 - RNA, 23 nt, Artificial Sequence
  Synthetic
gaaauucuuggguuuuccaagaa

SEQ ID NO: 444314 - RNA, 24 nt, Artificial Sequence
  Synthetic
ugaaauucuuggguuuuccaagaa

SEQ ID NO: 444315 - RNA, 18 nt, Artificial Sequence
  Synthetic
uccaauuucaagcaagaa

SEQ ID NO: 444316 - RNA, 19 nt, Artificial Sequence
  Synthetic
uuccaauuucaagcaagaa

SEQ ID NO: 444317 - RNA, 20 nt, Artificial Sequence
  Synthetic
cuuccaauuucaagcaagaa

SEQ ID NO: 444318 - RNA, 21 nt, Artificial Sequence
  Synthetic
gcuuccaauuucaagcaagaa

SEQ ID NO: 444319 - RNA, 22 nt, Artificial Sequence
  Synthetic
agcuuccaauuucaagcaagaa

SEQ ID NO: 444320 - RNA, 23 nt, Artificial Sequence
  Synthetic
gagcuuccaauuucaagcaagaa

SEQ ID NO: 444321 - RNA, 24 nt, Artificial Sequence
  Synthetic
ggagcuuccaauuucaagcaagaa

SEQ ID NO: 444322 - RNA, 18 nt, Artificial Sequence
  Synthetic
guaucuacgaagcaagaa

SEQ ID NO: 444323 - RNA, 19 nt, Artificial Sequence
  Synthetic
uguaucuacgaagcaagaa

SEQ ID NO: 444324 - RNA, 20 nt, Artificial Sequence
  Synthetic
guguaucuacgaagcaagaa

SEQ ID NO: 444325 - RNA, 21 nt, Artificial Sequence
  Synthetic
aguguaucuacgaagcaagaa

SEQ ID NO: 444326 - RNA, 22 nt, Artificial Sequence
  Synthetic
gaguguaucuacgaagcaagaa

SEQ ID NO: 444327 - RNA, 23 nt, Artificial Sequence
  Synthetic
cgaguguaucuacgaagcaagaa

SEQ ID NO: 444328 - RNA, 24 nt, Artificial Sequence
  Synthetic
ucgaguguaucuacgaagcaagaa

SEQ ID NO: 444329 - RNA, 18 nt, Artificial Sequence
  Synthetic
uuuuaagaagagcaagaa

SEQ ID NO: 444330 - RNA, 19 nt, Artificial Sequence
  Synthetic
cuuuuaagaagagcaagaa

SEQ ID NO: 444331 - RNA, 20 nt, Artificial Sequence
  Synthetic
ccuuuuaagaagagcaagaa

SEQ ID NO: 444332 - RNA, 21 nt, Artificial Sequence
  Synthetic
uccuuuuaagaagagcaagaa

SEQ ID NO: 444333 - RNA, 22 nt, Artificial Sequence
  Synthetic
guccuuuuaagaagagcaagaa

SEQ ID NO: 444334 - RNA, 23 nt, Artificial Sequence
  Synthetic
uguccuuuuaagaagagcaagaa

SEQ ID NO: 444335 - RNA, 24 nt, Artificial Sequence
  Synthetic
guguccuuuuaagaagagcaagaa

SEQ ID NO: 444336 - RNA, 18 nt, Artificial Sequence
  Synthetic
aaauugaaggagcaagaa

SEQ ID NO: 444337 - RNA, 19 nt, Artificial Sequence
  Synthetic
uaaauugaaggagcaagaa

SEQ ID NO: 444338 - RNA, 20 nt, Artificial Sequence
  Synthetic
auaaauugaaggagcaagaa

SEQ ID NO: 444339 - RNA, 21 nt, Artificial Sequence
  Synthetic
aauaaauugaaggagcaagaa

SEQ ID NO: 444340 - RNA, 22 nt, Artificial Sequence
  Synthetic
gaauaaauugaaggagcaagaa

SEQ ID NO: 444341 - RNA, 23 nt, Artificial Sequence
  Synthetic
agaauaaauugaaggagcaagaa

SEQ ID NO: 444342 - RNA, 24 nt, Artificial Sequence
  Synthetic
gagaauaaauugaaggagcaagaa

SEQ ID NO: 444343 - RNA, 18 nt, Artificial Sequence
  Synthetic
uugucaugugagcaagaa

SEQ ID NO: 444344 - RNA, 19 nt, Artificial Sequence
  Synthetic
guugucaugugagcaagaa

SEQ ID NO: 444345 - RNA, 20 nt, Artificial Sequence
  Synthetic
gguugucaugugagcaagaa

SEQ ID NO: 444346 - RNA, 21 nt, Artificial Sequence
  Synthetic
ggguugucaugugagcaagaa

SEQ ID NO: 444347 - RNA, 22 nt, Artificial Sequence
  Synthetic
uggguugucaugugagcaagaa

SEQ ID NO: 444348 - RNA, 23 nt, Artificial Sequence
  Synthetic
cuggguugucaugugagcaagaa

SEQ ID NO: 444349 - RNA, 24 nt, Artificial Sequence
  Synthetic
gcuggguugucaugugagcaagaa

SEQ ID NO: 444350 - RNA, 18 nt, Artificial Sequence
  Synthetic
uauuacuuguggcaagaa

SEQ ID NO: 444351 - RNA, 19 nt, Artificial Sequence
  Synthetic
uuauuacuuguggcaagaa

SEQ ID NO: 444352 - RNA, 20 nt, Artificial Sequence
  Synthetic
guuauuacuuguggcaagaa

SEQ ID NO: 444353 - RNA, 21 nt, Artificial Sequence
  Synthetic
uguuauuacuuguggcaagaa

SEQ ID NO: 444354 - RNA, 22 nt, Artificial Sequence
  Synthetic
uuguuauuacuuguggcaagaa

SEQ ID NO: 444355 - RNA, 23 nt, Artificial Sequence
  Synthetic
auuguuauuacuuguggcaagaa

SEQ ID NO: 444356 - RNA, 24 nt, Artificial Sequence
  Synthetic
aauuguuauuacuuguggcaagaa

SEQ ID NO: 444357 - RNA, 18 nt, Artificial Sequence
  Synthetic
uaauccagaaaucaagaa

SEQ ID NO: 444358 - RNA, 19 nt, Artificial Sequence
  Synthetic
cuaauccagaaaucaagaa

SEQ ID NO: 444359 - RNA, 20 nt, Artificial Sequence
  Synthetic
ucuaauccagaaaucaagaa

SEQ ID NO: 444360 - RNA, 21 nt, Artificial Sequence
  Synthetic
cucuaauccagaaaucaagaa

SEQ ID NO: 444361 - RNA, 22 nt, Artificial Sequence
  Synthetic
ccucuaauccagaaaucaagaa

SEQ ID NO: 444362 - RNA, 23 nt, Artificial Sequence
  Synthetic
uccucuaauccagaaaucaagaa

SEQ ID NO: 444363 - RNA, 24 nt, Artificial Sequence
  Synthetic
uuccucuaauccagaaaucaagaa

SEQ ID NO: 444364 - RNA, 18 nt, Artificial Sequence
  Synthetic
ggaauaauugaucaagaa

SEQ ID NO: 444365 - RNA, 19 nt, Artificial Sequence
  Synthetic
uggaauaauugaucaagaa

SEQ ID NO: 444366 - RNA, 20 nt, Artificial Sequence
  Synthetic
auggaauaauugaucaagaa

SEQ ID NO: 444367 - RNA, 21 nt, Artificial Sequence
  Synthetic
aauggaauaauugaucaagaa

SEQ ID NO: 444368 - RNA, 22 nt, Artificial Sequence
  Synthetic
caauggaauaauugaucaagaa

SEQ ID NO: 444369 - RNA, 23 nt, Artificial Sequence
  Synthetic
acaauggaauaauugaucaagaa

SEQ ID NO: 444370 - RNA, 24 nt, Artificial Sequence
  Synthetic
gacaauggaauaauugaucaagaa

SEQ ID NO: 444371 - RNA, 18 nt, Artificial Sequence
  Synthetic
guacacagaagucaagaa

SEQ ID NO: 444372 - RNA, 19 nt, Artificial Sequence
  Synthetic
gguacacagaagucaagaa

SEQ ID NO: 444373 - RNA, 20 nt, Artificial Sequence
  Synthetic
ggguacacagaagucaagaa

SEQ ID NO: 444374 - RNA, 21 nt, Artificial Sequence
  Synthetic
uggguacacagaagucaagaa

SEQ ID NO: 444375 - RNA, 22 nt, Artificial Sequence
  Synthetic
guggguacacagaagucaagaa

SEQ ID NO: 444376 - RNA, 23 nt, Artificial Sequence
  Synthetic
uguggguacacagaagucaagaa

SEQ ID NO: 444377 - RNA, 24 nt, Artificial Sequence
  Synthetic
cuguggguacacagaagucaagaa

SEQ ID NO: 444378 - RNA, 18 nt, Artificial Sequence
  Synthetic
aaaccacacugucaagaa

SEQ ID NO: 444379 - RNA, 19 nt, Artificial Sequence
  Synthetic
uaaaccacacugucaagaa

SEQ ID NO: 444380 - RNA, 20 nt, Artificial Sequence
  Synthetic
cuaaaccacacugucaagaa

SEQ ID NO: 444381 - RNA, 21 nt, Artificial Sequence
  Synthetic
acuaaaccacacugucaagaa

SEQ ID NO: 444382 - RNA, 22 nt, Artificial Sequence
  Synthetic
aacuaaaccacacugucaagaa

SEQ ID NO: 444383 - RNA, 23 nt, Artificial Sequence
  Synthetic
caacuaaaccacacugucaagaa

SEQ ID NO: 444384 - RNA, 24 nt, Artificial Sequence
  Synthetic
ucaacuaaaccacacugucaagaa

SEQ ID NO: 444385 - RNA, 18 nt, Artificial Sequence
  Synthetic
auacacagaauucaagaa

SEQ ID NO: 444386 - RNA, 19 nt, Artificial Sequence
  Synthetic
gauacacagaauucaagaa

SEQ ID NO: 444387 - RNA, 20 nt, Artificial Sequence
  Synthetic
ggauacacagaauucaagaa

SEQ ID NO: 444388 - RNA, 21 nt, Artificial Sequence
  Synthetic
uggauacacagaauucaagaa

SEQ ID NO: 444389 - RNA, 22 nt, Artificial Sequence
  Synthetic
guggauacacagaauucaagaa

SEQ ID NO: 444390 - RNA, 23 nt, Artificial Sequence
  Synthetic
uguggauacacagaauucaagaa

SEQ ID NO: 444391 - RNA, 24 nt, Artificial Sequence
  Synthetic
cuguggauacacagaauucaagaa

SEQ ID NO: 444392 - RNA, 18 nt, Artificial Sequence
  Synthetic
auaauaggccuucaagaa

SEQ ID NO: 444393 - RNA, 19 nt, Artificial Sequence
  Synthetic
uauaauaggccuucaagaa

SEQ ID NO: 444394 - RNA, 20 nt, Artificial Sequence
  Synthetic
guauaauaggccuucaagaa

SEQ ID NO: 444395 - RNA, 21 nt, Artificial Sequence
  Synthetic
uguauaauaggccuucaagaa

SEQ ID NO: 444396 - RNA, 22 nt, Artificial Sequence
  Synthetic
guguauaauaggccuucaagaa

SEQ ID NO: 444397 - RNA, 23 nt, Artificial Sequence
  Synthetic
aguguauaauaggccuucaagaa

SEQ ID NO: 444398 - RNA, 24 nt, Artificial Sequence
  Synthetic
aaguguauaauaggccuucaagaa

SEQ ID NO: 444399 - RNA, 18 nt, Artificial Sequence
  Synthetic
aauggagacuuucaagaa

SEQ ID NO: 444400 - RNA, 19 nt, Artificial Sequence
  Synthetic
uaauggagacuuucaagaa

SEQ ID NO: 444401 - RNA, 20 nt, Artificial Sequence
  Synthetic
cuaauggagacuuucaagaa

SEQ ID NO: 444402 - RNA, 21 nt, Artificial Sequence
  Synthetic
gcuaauggagacuuucaagaa

SEQ ID NO: 444403 - RNA, 22 nt, Artificial Sequence
  Synthetic
ugcuaauggagacuuucaagaa

SEQ ID NO: 444404 - RNA, 23 nt, Artificial Sequence
  Synthetic
uugcuaauggagacuuucaagaa

SEQ ID NO: 444405 - RNA, 24 nt, Artificial Sequence
  Synthetic
auugcuaauggagacuuucaagaa

SEQ ID NO: 444406 - RNA, 18 nt, Artificial Sequence
  Synthetic
uguucauugaaagaagaa

SEQ ID NO: 444407 - RNA, 19 nt, Artificial Sequence
  Synthetic
guguucauugaaagaagaa

SEQ ID NO: 444408 - RNA, 20 nt, Artificial Sequence
  Synthetic
aguguucauugaaagaagaa

SEQ ID NO: 444409 - RNA, 21 nt, Artificial Sequence
  Synthetic
aaguguucauugaaagaagaa

SEQ ID NO: 444410 - RNA, 22 nt, Artificial Sequence
  Synthetic
uaaguguucauugaaagaagaa

SEQ ID NO: 444411 - RNA, 23 nt, Artificial Sequence
  Synthetic
uuaaguguucauugaaagaagaa

SEQ ID NO: 444412 - RNA, 24 nt, Artificial Sequence
  Synthetic
cuuaaguguucauugaaagaagaa

SEQ ID NO: 444413 - RNA, 18 nt, Artificial Sequence
  Synthetic
aagacuaauaaagaagaa

SEQ ID NO: 444414 - RNA, 19 nt, Artificial Sequence
  Synthetic
uaagacuaauaaagaagaa

SEQ ID NO: 444415 - RNA, 20 nt, Artificial Sequence
  Synthetic
guaagacuaauaaagaagaa

SEQ ID NO: 444416 - RNA, 21 nt, Artificial Sequence
  Synthetic
aguaagacuaauaaagaagaa

SEQ ID NO: 444417 - RNA, 22 nt, Artificial Sequence
  Synthetic
uaguaagacuaauaaagaagaa

SEQ ID NO: 444418 - RNA, 23 nt, Artificial Sequence
  Synthetic
cuaguaagacuaauaaagaagaa

SEQ ID NO: 444419 - RNA, 24 nt, Artificial Sequence
  Synthetic
gcuaguaagacuaauaaagaagaa

SEQ ID NO: 444420 - RNA, 21 nt, Artificial Sequence
  Synthetic
agccagacuaauaaagaagaa

SEQ ID NO: 444421 - RNA, 22 nt, Artificial Sequence
  Synthetic
uagccagacuaauaaagaagaa

SEQ ID NO: 444422 - RNA, 23 nt, Artificial Sequence
  Synthetic
cuagccagacuaauaaagaagaa

SEQ ID NO: 444423 - RNA, 24 nt, Artificial Sequence
  Synthetic
acuagccagacuaauaaagaagaa

SEQ ID NO: 444424 - RNA, 18 nt, Artificial Sequence
  Synthetic
uuauuguuucaagaagaa

SEQ ID NO: 444425 - RNA, 19 nt, Artificial Sequence
  Synthetic
guuauuguuucaagaagaa

SEQ ID NO: 444426 - RNA, 20 nt, Artificial Sequence
  Synthetic
aguuauuguuucaagaagaa

SEQ ID NO: 444427 - RNA, 21 nt, Artificial Sequence
  Synthetic
aaguuauuguuucaagaagaa

SEQ ID NO: 444428 - RNA, 22 nt, Artificial Sequence
  Synthetic
gaaguuauuguuucaagaagaa

SEQ ID NO: 444429 - RNA, 23 nt, Artificial Sequence
  Synthetic
agaaguuauuguuucaagaagaa

SEQ ID NO: 444430 - RNA, 24 nt, Artificial Sequence
  Synthetic
cagaaguuauuguuucaagaagaa

SEQ ID NO: 444431 - RNA, 18 nt, Artificial Sequence
  Synthetic
uaaaaauaguaagaagaa

SEQ ID NO: 444432 - RNA, 19 nt, Artificial Sequence
  Synthetic
auaaaaauaguaagaagaa

SEQ ID NO: 444433 - RNA, 20 nt, Artificial Sequence
  Synthetic
cauaaaaauaguaagaagaa

SEQ ID NO: 444434 - RNA, 21 nt, Artificial Sequence
  Synthetic
gcauaaaaauaguaagaagaa

SEQ ID NO: 444435 - RNA, 22 nt, Artificial Sequence
  Synthetic
agcauaaaaauaguaagaagaa

SEQ ID NO: 444436 - RNA, 23 nt, Artificial Sequence
  Synthetic
aagcauaaaaauaguaagaagaa

SEQ ID NO: 444437 - RNA, 24 nt, Artificial Sequence
  Synthetic
uaagcauaaaaauaguaagaagaa

SEQ ID NO: 444438 - RNA, 18 nt, Artificial Sequence
  Synthetic
uagaauacuccagaagaa

SEQ ID NO: 444439 - RNA, 19 nt, Artificial Sequence
  Synthetic
cuagaauacuccagaagaa

SEQ ID NO: 444440 - RNA, 20 nt, Artificial Sequence
  Synthetic
ccuagaauacuccagaagaa

SEQ ID NO: 444441 - RNA, 21 nt, Artificial Sequence
  Synthetic
uccuagaauacuccagaagaa

SEQ ID NO: 444442 - RNA, 22 nt, Artificial Sequence
  Synthetic
cuccuagaauacuccagaagaa

SEQ ID NO: 444443 - RNA, 23 nt, Artificial Sequence
  Synthetic
ucuccuagaauacuccagaagaa

SEQ ID NO: 444444 - RNA, 24 nt, Artificial Sequence
  Synthetic
uucuccuagaauacuccagaagaa

SEQ ID NO: 444445 - RNA, 18 nt, Artificial Sequence
  Synthetic
cacaaagcuccagaagaa

SEQ ID NO: 444446 - RNA, 19 nt, Artificial Sequence
  Synthetic
acacaaagcuccagaagaa

SEQ ID NO: 444447 - RNA, 20 nt, Artificial Sequence
  Synthetic
aacacaaagcuccagaagaa

SEQ ID NO: 444448 - RNA, 21 nt, Artificial Sequence
  Synthetic
caacacaaagcuccagaagaa

SEQ ID NO: 444449 - RNA, 22 nt, Artificial Sequence
  Synthetic
ccaacacaaagcuccagaagaa

SEQ ID NO: 444450 - RNA, 23 nt, Artificial Sequence
  Synthetic
gccaacacaaagcuccagaagaa

SEQ ID NO: 444451 - RNA, 24 nt, Artificial Sequence
  Synthetic
agccaacacaaagcuccagaagaa

SEQ ID NO: 444452 - RNA, 18 nt, Artificial Sequence
  Synthetic
ucaaauccagcagaagaa

SEQ ID NO: 444453 - RNA, 19 nt, Artificial Sequence
  Synthetic
cucaaauccagcagaagaa

SEQ ID NO: 444454 - RNA, 20 nt, Artificial Sequence
  Synthetic
acucaaauccagcagaagaa

SEQ ID NO: 444455 - RNA, 21 nt, Artificial Sequence
  Synthetic
aacucaaauccagcagaagaa

SEQ ID NO: 444456 - RNA, 22 nt, Artificial Sequence
  Synthetic
aaacucaaauccagcagaagaa

SEQ ID NO: 444457 - RNA, 23 nt, Artificial Sequence
  Synthetic
uaaacucaaauccagcagaagaa

SEQ ID NO: 444458 - RNA, 24 nt, Artificial Sequence
  Synthetic
cuaaacucaaauccagcagaagaa

SEQ ID NO: 444459 - RNA, 18 nt, Artificial Sequence
  Synthetic
uuggagggcucagaagaa

SEQ ID NO: 444460 - RNA, 19 nt, Artificial Sequence
  Synthetic
uuuggagggcucagaagaa

SEQ ID NO: 444461 - RNA, 20 nt, Artificial Sequence
  Synthetic
guuuggagggcucagaagaa

SEQ ID NO: 444462 - RNA, 21 nt, Artificial Sequence
  Synthetic
aguuuggagggcucagaagaa

SEQ ID NO: 444463 - RNA, 22 nt, Artificial Sequence
  Synthetic
caguuuggagggcucagaagaa

SEQ ID NO: 444464 - RNA, 23 nt, Artificial Sequence
  Synthetic
acaguuuggagggcucagaagaa

SEQ ID NO: 444465 - RNA, 24 nt, Artificial Sequence
  Synthetic
uacaguuuggagggcucagaagaa

SEQ ID NO: 444466 - RNA, 18 nt, Artificial Sequence
  Synthetic
aaaaaagagagagaagaa

SEQ ID NO: 444467 - RNA, 19 nt, Artificial Sequence
  Synthetic
aaaaaaagagagagaagaa

SEQ ID NO: 444468 - RNA, 20 nt, Artificial Sequence
  Synthetic
aaaaaaaagagagagaagaa

SEQ ID NO: 444469 - RNA, 21 nt, Artificial Sequence
  Synthetic
gaaaaaaaagagagagaagaa

SEQ ID NO: 444470 - RNA, 22 nt, Artificial Sequence
  Synthetic
agaaaaaaaagagagagaagaa

SEQ ID NO: 444471 - RNA, 23 nt, Artificial Sequence
  Synthetic
uagaaaaaaaagagagagaagaa

SEQ ID NO: 444472 - RNA, 24 nt, Artificial Sequence
  Synthetic
auagaaaaaaaagagagagaagaa

SEQ ID NO: 444473 - RNA, 18 nt, Artificial Sequence
  Synthetic
uuaagagagggagaagaa

SEQ ID NO: 444474 - RNA, 19 nt, Artificial Sequence
  Synthetic
guuaagagagggagaagaa

SEQ ID NO: 444475 - RNA, 20 nt, Artificial Sequence
  Synthetic
gguuaagagagggagaagaa

SEQ ID NO: 444476 - RNA, 21 nt, Artificial Sequence
  Synthetic
agguuaagagagggagaagaa

SEQ ID NO: 444477 - RNA, 22 nt, Artificial Sequence
  Synthetic
aagguuaagagagggagaagaa

SEQ ID NO: 444478 - RNA, 23 nt, Artificial Sequence
  Synthetic
aaagguuaagagagggagaagaa

SEQ ID NO: 444479 - RNA, 24 nt, Artificial Sequence
  Synthetic
aaaagguuaagagagggagaagaa

SEQ ID NO: 444480 - RNA, 18 nt, Artificial Sequence
  Synthetic
gcagaagguggagaagaa

SEQ ID NO: 444481 - RNA, 19 nt, Artificial Sequence
  Synthetic
ugcagaagguggagaagaa

SEQ ID NO: 444482 - RNA, 20 nt, Artificial Sequence
  Synthetic
uugcagaagguggagaagaa

SEQ ID NO: 444483 - RNA, 21 nt, Artificial Sequence
  Synthetic
auugcagaagguggagaagaa

SEQ ID NO: 444484 - RNA, 22 nt, Artificial Sequence
  Synthetic
gauugcagaagguggagaagaa

SEQ ID NO: 444485 - RNA, 23 nt, Artificial Sequence
  Synthetic
ugauugcagaagguggagaagaa

SEQ ID NO: 444486 - RNA, 24 nt, Artificial Sequence
  Synthetic
gugauugcagaagguggagaagaa

SEQ ID NO: 444487 - RNA, 18 nt, Artificial Sequence
  Synthetic
cguauagaaugagaagaa

SEQ ID NO: 444488 - RNA, 19 nt, Artificial Sequence
  Synthetic
ccguauagaaugagaagaa

SEQ ID NO: 444489 - RNA, 20 nt, Artificial Sequence
  Synthetic
accguauagaaugagaagaa

SEQ ID NO: 444490 - RNA, 21 nt, Artificial Sequence
  Synthetic
aaccguauagaaugagaagaa

SEQ ID NO: 444491 - RNA, 22 nt, Artificial Sequence
  Synthetic
aaaccguauagaaugagaagaa

SEQ ID NO: 444492 - RNA, 23 nt, Artificial Sequence
  Synthetic
gaaaccguauagaaugagaagaa

SEQ ID NO: 444493 - RNA, 24 nt, Artificial Sequence
  Synthetic
ggaaaccguauagaaugagaagaa

SEQ ID NO: 444494 - RNA, 18 nt, Artificial Sequence
  Synthetic
ucaacagggugagaagaa

SEQ ID NO: 444495 - RNA, 19 nt, Artificial Sequence
  Synthetic
aucaacagggugagaagaa

SEQ ID NO: 444496 - RNA, 20 nt, Artificial Sequence
  Synthetic
caucaacagggugagaagaa

SEQ ID NO: 444497 - RNA, 21 nt, Artificial Sequence
  Synthetic
acaucaacagggugagaagaa

SEQ ID NO: 444498 - RNA, 22 nt, Artificial Sequence
  Synthetic
cacaucaacagggugagaagaa

SEQ ID NO: 444499 - RNA, 23 nt, Artificial Sequence
  Synthetic
acacaucaacagggugagaagaa

SEQ ID NO: 444500 - RNA, 24 nt, Artificial Sequence
  Synthetic
gacacaucaacagggugagaagaa

SEQ ID NO: 444501 - RNA, 18 nt, Artificial Sequence
  Synthetic
guauguauuugagaagaa

SEQ ID NO: 444502 - RNA, 19 nt, Artificial Sequence
  Synthetic
aguauguauuugagaagaa

SEQ ID NO: 444503 - RNA, 20 nt, Artificial Sequence
  Synthetic
gaguauguauuugagaagaa

SEQ ID NO: 444504 - RNA, 21 nt, Artificial Sequence
  Synthetic
agaguauguauuugagaagaa

SEQ ID NO: 444505 - RNA, 22 nt, Artificial Sequence
  Synthetic
cagaguauguauuugagaagaa

SEQ ID NO: 444506 - RNA, 23 nt, Artificial Sequence
  Synthetic
acagaguauguauuugagaagaa

SEQ ID NO: 444507 - RNA, 24 nt, Artificial Sequence
  Synthetic
uacagaguauguauuugagaagaa

SEQ ID NO: 444508 - RNA, 18 nt, Artificial Sequence
  Synthetic
ccuaaaaacagcgaagaa

SEQ ID NO: 444509 - RNA, 19 nt, Artificial Sequence
  Synthetic
uccuaaaaacagcgaagaa

SEQ ID NO: 444510 - RNA, 20 nt, Artificial Sequence
  Synthetic
guccuaaaaacagcgaagaa

SEQ ID NO: 444511 - RNA, 21 nt, Artificial Sequence
  Synthetic
cguccuaaaaacagcgaagaa

SEQ ID NO: 444512 - RNA, 22 nt, Artificial Sequence
  Synthetic
acguccuaaaaacagcgaagaa

SEQ ID NO: 444513 - RNA, 23 nt, Artificial Sequence
  Synthetic
aacguccuaaaaacagcgaagaa

SEQ ID NO: 444514 - RNA, 24 nt, Artificial Sequence
  Synthetic
gaacguccuaaaaacagcgaagaa

SEQ ID NO: 444515 - RNA, 18 nt, Artificial Sequence
  Synthetic
aaagcagggaaggaagaa

SEQ ID NO: 444516 - RNA, 19 nt, Artificial Sequence
  Synthetic
uaaagcagggaaggaagaa

SEQ ID NO: 444517 - RNA, 20 nt, Artificial Sequence
  Synthetic
cuaaagcagggaaggaagaa

SEQ ID NO: 444518 - RNA, 21 nt, Artificial Sequence
  Synthetic
acuaaagcagggaaggaagaa

SEQ ID NO: 444519 - RNA, 22 nt, Artificial Sequence
  Synthetic
aacuaaagcagggaaggaagaa

SEQ ID NO: 444520 - RNA, 23 nt, Artificial Sequence
  Synthetic
aaacuaaagcagggaaggaagaa

SEQ ID NO: 444521 - RNA, 24 nt, Artificial Sequence
  Synthetic
aaaacuaaagcagggaaggaagaa

SEQ ID NO: 444522 - RNA, 18 nt, Artificial Sequence
  Synthetic
uccacaacuaaggaagaa

SEQ ID NO: 444523 - RNA, 19 nt, Artificial Sequence
  Synthetic
cuccacaacuaaggaagaa

SEQ ID NO: 444524 - RNA, 20 nt, Artificial Sequence
  Synthetic
acuccacaacuaaggaagaa

SEQ ID NO: 444525 - RNA, 21 nt, Artificial Sequence
  Synthetic
uacuccacaacuaaggaagaa

SEQ ID NO: 444526 - RNA, 22 nt, Artificial Sequence
  Synthetic
guacuccacaacuaaggaagaa

SEQ ID NO: 444527 - RNA, 23 nt, Artificial Sequence
  Synthetic
aguacuccacaacuaaggaagaa

SEQ ID NO: 444528 - RNA, 24 nt, Artificial Sequence
  Synthetic
aaguacuccacaacuaaggaagaa

SEQ ID NO: 444529 - RNA, 18 nt, Artificial Sequence
  Synthetic
caagcaugacaggaagaa

SEQ ID NO: 444530 - RNA, 19 nt, Artificial Sequence
  Synthetic
ucaagcaugacaggaagaa

SEQ ID NO: 444531 - RNA, 20 nt, Artificial Sequence
  Synthetic
gucaagcaugacaggaagaa

SEQ ID NO: 444532 - RNA, 21 nt, Artificial Sequence
  Synthetic
ugucaagcaugacaggaagaa

SEQ ID NO: 444533 - RNA, 22 nt, Artificial Sequence
  Synthetic
uugucaagcaugacaggaagaa

SEQ ID NO: 444534 - RNA, 23 nt, Artificial Sequence
  Synthetic
auugucaagcaugacaggaagaa

SEQ ID NO: 444535 - RNA, 24 nt, Artificial Sequence
  Synthetic
aauugucaagcaugacaggaagaa

SEQ ID NO: 444536 - RNA, 18 nt, Artificial Sequence
  Synthetic
aaggagggucaggaagaa

SEQ ID NO: 444537 - RNA, 19 nt, Artificial Sequence
  Synthetic
aaaggagggucaggaagaa

SEQ ID NO: 444538 - RNA, 20 nt, Artificial Sequence
  Synthetic
caaaggagggucaggaagaa

SEQ ID NO: 444539 - RNA, 21 nt, Artificial Sequence
  Synthetic
ucaaaggagggucaggaagaa

SEQ ID NO: 444540 - RNA, 22 nt, Artificial Sequence
  Synthetic
cucaaaggagggucaggaagaa

SEQ ID NO: 444541 - RNA, 23 nt, Artificial Sequence
  Synthetic
gcucaaaggagggucaggaagaa

SEQ ID NO: 444542 - RNA, 24 nt, Artificial Sequence
  Synthetic
ugcucaaaggagggucaggaagaa

SEQ ID NO: 444543 - RNA, 18 nt, Artificial Sequence
  Synthetic
acagcaauagaggaagaa

SEQ ID NO: 444544 - RNA, 19 nt, Artificial Sequence
  Synthetic
gacagcaauagaggaagaa

SEQ ID NO: 444545 - RNA, 20 nt, Artificial Sequence
  Synthetic
agacagcaauagaggaagaa

SEQ ID NO: 444546 - RNA, 21 nt, Artificial Sequence
  Synthetic
aagacagcaauagaggaagaa

SEQ ID NO: 444547 - RNA, 22 nt, Artificial Sequence
  Synthetic
gaagacagcaauagaggaagaa

SEQ ID NO: 444548 - RNA, 23 nt, Artificial Sequence
  Synthetic
ggaagacagcaauagaggaagaa

SEQ ID NO: 444549 - RNA, 24 nt, Artificial Sequence
  Synthetic
aggaagacagcaauagaggaagaa

SEQ ID NO: 444550 - RNA, 18 nt, Artificial Sequence
  Synthetic
gaaggaauggaggaagaa

SEQ ID NO: 444551 - RNA, 19 nt, Artificial Sequence
  Synthetic
ggaaggaauggaggaagaa

SEQ ID NO: 444552 - RNA, 20 nt, Artificial Sequence
  Synthetic
aggaaggaauggaggaagaa

SEQ ID NO: 444553 - RNA, 21 nt, Artificial Sequence
  Synthetic
gaggaaggaauggaggaagaa

SEQ ID NO: 444554 - RNA, 22 nt, Artificial Sequence
  Synthetic
agaggaaggaauggaggaagaa

SEQ ID NO: 444555 - RNA, 23 nt, Artificial Sequence
  Synthetic
gagaggaaggaauggaggaagaa

SEQ ID NO: 444556 - RNA, 24 nt, Artificial Sequence
  Synthetic
agagaggaaggaauggaggaagaa

SEQ ID NO: 444557 - RNA, 18 nt, Artificial Sequence
  Synthetic
agucaaggcuaggaagaa

SEQ ID NO: 444558 - RNA, 19 nt, Artificial Sequence
  Synthetic
aagucaaggcuaggaagaa

SEQ ID NO: 444559 - RNA, 20 nt, Artificial Sequence
  Synthetic
uaagucaaggcuaggaagaa

SEQ ID NO: 444560 - RNA, 21 nt, Artificial Sequence
  Synthetic
guaagucaaggcuaggaagaa

SEQ ID NO: 444561 - RNA, 22 nt, Artificial Sequence
  Synthetic
gguaagucaaggcuaggaagaa

SEQ ID NO: 444562 - RNA, 23 nt, Artificial Sequence
  Synthetic
agguaagucaaggcuaggaagaa

SEQ ID NO: 444563 - RNA, 24 nt, Artificial Sequence
  Synthetic
aagguaagucaaggcuaggaagaa

SEQ ID NO: 444564 - RNA, 18 nt, Artificial Sequence
  Synthetic
ccuaccccaagggaagaa

SEQ ID NO: 444565 - RNA, 19 nt, Artificial Sequence
  Synthetic
cccuaccccaagggaagaa

SEQ ID NO: 444566 - RNA, 20 nt, Artificial Sequence
  Synthetic
ccccuaccccaagggaagaa

SEQ ID NO: 444567 - RNA, 21 nt, Artificial Sequence
  Synthetic
cccccuaccccaagggaagaa

SEQ ID NO: 444568 - RNA, 22 nt, Artificial Sequence
  Synthetic
gcccccuaccccaagggaagaa

SEQ ID NO: 444569 - RNA, 23 nt, Artificial Sequence
  Synthetic
agcccccuaccccaagggaagaa

SEQ ID NO: 444570 - RNA, 24 nt, Artificial Sequence
  Synthetic
uagcccccuaccccaagggaagaa

SEQ ID NO: 444571 - RNA, 18 nt, Artificial Sequence
  Synthetic
aauacaacuggggaagaa

SEQ ID NO: 444572 - RNA, 19 nt, Artificial Sequence
  Synthetic
uaauacaacuggggaagaa

SEQ ID NO: 444573 - RNA, 20 nt, Artificial Sequence
  Synthetic
auaauacaacuggggaagaa

SEQ ID NO: 444574 - RNA, 21 nt, Artificial Sequence
  Synthetic
aauaauacaacuggggaagaa

SEQ ID NO: 444575 - RNA, 22 nt, Artificial Sequence
  Synthetic
uaauaauacaacuggggaagaa

SEQ ID NO: 444576 - RNA, 23 nt, Artificial Sequence
  Synthetic
guaauaauacaacuggggaagaa

SEQ ID NO: 444577 - RNA, 24 nt, Artificial Sequence
  Synthetic
aguaauaauacaacuggggaagaa

SEQ ID NO: 444578 - RNA, 18 nt, Artificial Sequence
  Synthetic
aagggaaguggggaagaa

SEQ ID NO: 444579 - RNA, 19 nt, Artificial Sequence
  Synthetic
uaagggaaguggggaagaa

SEQ ID NO: 444580 - RNA, 20 nt, Artificial Sequence
  Synthetic
auaagggaaguggggaagaa

SEQ ID NO: 444581 - RNA, 21 nt, Artificial Sequence
  Synthetic
aauaagggaaguggggaagaa

SEQ ID NO: 444582 - RNA, 22 nt, Artificial Sequence
  Synthetic
gaauaagggaaguggggaagaa

SEQ ID NO: 444583 - RNA, 23 nt, Artificial Sequence
  Synthetic
ugaauaagggaaguggggaagaa

SEQ ID NO: 444584 - RNA, 24 nt, Artificial Sequence
  Synthetic
augaauaagggaaguggggaagaa

SEQ ID NO: 444585 - RNA, 18 nt, Artificial Sequence
  Synthetic
guaugaacaugggaagaa

SEQ ID NO: 444586 - RNA, 19 nt, Artificial Sequence
  Synthetic
aguaugaacaugggaagaa

SEQ ID NO: 444587 - RNA, 20 nt, Artificial Sequence
  Synthetic
gaguaugaacaugggaagaa

SEQ ID NO: 444588 - RNA, 21 nt, Artificial Sequence
  Synthetic
agaguaugaacaugggaagaa

SEQ ID NO: 444589 - RNA, 22 nt, Artificial Sequence
  Synthetic
uagaguaugaacaugggaagaa

SEQ ID NO: 444590 - RNA, 23 nt, Artificial Sequence
  Synthetic
auagaguaugaacaugggaagaa

SEQ ID NO: 444591 - RNA, 24 nt, Artificial Sequence
  Synthetic
aauagaguaugaacaugggaagaa

SEQ ID NO: 444592 - RNA, 18 nt, Artificial Sequence
  Synthetic
cccauuagaauggaagaa

SEQ ID NO: 444593 - RNA, 19 nt, Artificial Sequence
  Synthetic
acccauuagaauggaagaa

SEQ ID NO: 444594 - RNA, 20 nt, Artificial Sequence
  Synthetic
cacccauuagaauggaagaa

SEQ ID NO: 444595 - RNA, 21 nt, Artificial Sequence
  Synthetic
ccacccauuagaauggaagaa

SEQ ID NO: 444596 - RNA, 22 nt, Artificial Sequence
  Synthetic
gccacccauuagaauggaagaa

SEQ ID NO: 444597 - RNA, 23 nt, Artificial Sequence
  Synthetic
agccacccauuagaauggaagaa

SEQ ID NO: 444598 - RNA, 24 nt, Artificial Sequence
  Synthetic
cagccacccauuagaauggaagaa

SEQ ID NO: 444599 - RNA, 18 nt, Artificial Sequence
  Synthetic
ucaaggagaguggaagaa

SEQ ID NO: 444600 - RNA, 19 nt, Artificial Sequence
  Synthetic
cucaaggagaguggaagaa

SEQ ID NO: 444601 - RNA, 20 nt, Artificial Sequence
  Synthetic
acucaaggagaguggaagaa

SEQ ID NO: 444602 - RNA, 21 nt, Artificial Sequence
  Synthetic
cacucaaggagaguggaagaa

SEQ ID NO: 444603 - RNA, 22 nt, Artificial Sequence
  Synthetic
ucacucaaggagaguggaagaa

SEQ ID NO: 444604 - RNA, 23 nt, Artificial Sequence
  Synthetic
aucacucaaggagaguggaagaa

SEQ ID NO: 444605 - RNA, 24 nt, Artificial Sequence
  Synthetic
uaucacucaaggagaguggaagaa

SEQ ID NO: 444606 - RNA, 18 nt, Artificial Sequence
  Synthetic
cgcaugaagguggaagaa

SEQ ID NO: 444607 - RNA, 19 nt, Artificial Sequence
  Synthetic
acgcaugaagguggaagaa

SEQ ID NO: 444608 - RNA, 20 nt, Artificial Sequence
  Synthetic
aacgcaugaagguggaagaa

SEQ ID NO: 444609 - RNA, 21 nt, Artificial Sequence
  Synthetic
caacgcaugaagguggaagaa

SEQ ID NO: 444610 - RNA, 22 nt, Artificial Sequence
  Synthetic
ucaacgcaugaagguggaagaa

SEQ ID NO: 444611 - RNA, 23 nt, Artificial Sequence
  Synthetic
cucaacgcaugaagguggaagaa

SEQ ID NO: 444612 - RNA, 24 nt, Artificial Sequence
  Synthetic
acucaacgcaugaagguggaagaa

SEQ ID NO: 444613 - RNA, 18 nt, Artificial Sequence
  Synthetic
aaugugacaaaugaagaa

SEQ ID NO: 444614 - RNA, 19 nt, Artificial Sequence
  Synthetic
gaaugugacaaaugaagaa

SEQ ID NO: 444615 - RNA, 20 nt, Artificial Sequence
  Synthetic
agaaugugacaaaugaagaa

SEQ ID NO: 444616 - RNA, 21 nt, Artificial Sequence
  Synthetic
uagaaugugacaaaugaagaa

SEQ ID NO: 444617 - RNA, 22 nt, Artificial Sequence
  Synthetic
auagaaugugacaaaugaagaa

SEQ ID NO: 444618 - RNA, 23 nt, Artificial Sequence
  Synthetic
aauagaaugugacaaaugaagaa

SEQ ID NO: 444619 - RNA, 24 nt, Artificial Sequence
  Synthetic
aaauagaaugugacaaaugaagaa

SEQ ID NO: 444620 - RNA, 18 nt, Artificial Sequence
  Synthetic
aaucagcagaaugaagaa

SEQ ID NO: 444621 - RNA, 19 nt, Artificial Sequence
  Synthetic
gaaucagcagaaugaagaa

SEQ ID NO: 444622 - RNA, 20 nt, Artificial Sequence
  Synthetic
ggaaucagcagaaugaagaa

SEQ ID NO: 444623 - RNA, 21 nt, Artificial Sequence
  Synthetic
aggaaucagcagaaugaagaa

SEQ ID NO: 444624 - RNA, 22 nt, Artificial Sequence
  Synthetic
gaggaaucagcagaaugaagaa

SEQ ID NO: 444625 - RNA, 23 nt, Artificial Sequence
  Synthetic
ggaggaaucagcagaaugaagaa

SEQ ID NO: 444626 - RNA, 24 nt, Artificial Sequence
  Synthetic
gggaggaaucagcagaaugaagaa

SEQ ID NO: 444627 - RNA, 18 nt, Artificial Sequence
  Synthetic
uuucugcuuuaugaagaa

SEQ ID NO: 444628 - RNA, 19 nt, Artificial Sequence
  Synthetic
auuucugcuuuaugaagaa

SEQ ID NO: 444629 - RNA, 20 nt, Artificial Sequence
  Synthetic
aauuucugcuuuaugaagaa

SEQ ID NO: 444630 - RNA, 21 nt, Artificial Sequence
  Synthetic
aaauuucugcuuuaugaagaa

SEQ ID NO: 444631 - RNA, 22 nt, Artificial Sequence
  Synthetic
gaaauuucugcuuuaugaagaa

SEQ ID NO: 444632 - RNA, 23 nt, Artificial Sequence
  Synthetic
ugaaauuucugcuuuaugaagaa

SEQ ID NO: 444633 - RNA, 24 nt, Artificial Sequence
  Synthetic
augaaauuucugcuuuaugaagaa

SEQ ID NO: 444634 - RNA, 18 nt, Artificial Sequence
  Synthetic
caaggcaagacugaagaa

SEQ ID NO: 444635 - RNA, 19 nt, Artificial Sequence
  Synthetic
ucaaggcaagacugaagaa

SEQ ID NO: 444636 - RNA, 20 nt, Artificial Sequence
  Synthetic
uucaaggcaagacugaagaa

SEQ ID NO: 444637 - RNA, 21 nt, Artificial Sequence
  Synthetic
cuucaaggcaagacugaagaa

SEQ ID NO: 444638 - RNA, 22 nt, Artificial Sequence
  Synthetic
acuucaaggcaagacugaagaa

SEQ ID NO: 444639 - RNA, 23 nt, Artificial Sequence
  Synthetic
uacuucaaggcaagacugaagaa

SEQ ID NO: 444640 - RNA, 24 nt, Artificial Sequence
  Synthetic
cuacuucaaggcaagacugaagaa

SEQ ID NO: 444641 - RNA, 18 nt, Artificial Sequence
  Synthetic
uuugcaaaagcugaagaa

SEQ ID NO: 444642 - RNA, 19 nt, Artificial Sequence
  Synthetic
uuuugcaaaagcugaagaa

SEQ ID NO: 444643 - RNA, 20 nt, Artificial Sequence
  Synthetic
uuuuugcaaaagcugaagaa

SEQ ID NO: 444644 - RNA, 21 nt, Artificial Sequence
  Synthetic
uuuuuugcaaaagcugaagaa

SEQ ID NO: 444645 - RNA, 22 nt, Artificial Sequence
  Synthetic
uuuuuuugcaaaagcugaagaa

SEQ ID NO: 444646 - RNA, 23 nt, Artificial Sequence
  Synthetic
uuuuuuuugcaaaagcugaagaa

SEQ ID NO: 444647 - RNA, 24 nt, Artificial Sequence
  Synthetic
uuuuuuuuugcaaaagcugaagaa

SEQ ID NO: 444648 - RNA, 18 nt, Artificial Sequence
  Synthetic
agaagacaaagugaagaa

SEQ ID NO: 444649 - RNA, 19 nt, Artificial Sequence
  Synthetic
cagaagacaaagugaagaa

SEQ ID NO: 444650 - RNA, 20 nt, Artificial Sequence
  Synthetic
acagaagacaaagugaagaa

SEQ ID NO: 444651 - RNA, 21 nt, Artificial Sequence
  Synthetic
gacagaagacaaagugaagaa

SEQ ID NO: 444652 - RNA, 22 nt, Artificial Sequence
  Synthetic
ggacagaagacaaagugaagaa

SEQ ID NO: 444653 - RNA, 23 nt, Artificial Sequence
  Synthetic
gggacagaagacaaagugaagaa

SEQ ID NO: 444654 - RNA, 24 nt, Artificial Sequence
  Synthetic
agggacagaagacaaagugaagaa

SEQ ID NO: 444655 - RNA, 18 nt, Artificial Sequence
  Synthetic
uuaugccuacgugaagaa

SEQ ID NO: 444656 - RNA, 19 nt, Artificial Sequence
  Synthetic
cuuaugccuacgugaagaa

SEQ ID NO: 444657 - RNA, 20 nt, Artificial Sequence
  Synthetic
gcuuaugccuacgugaagaa

SEQ ID NO: 444658 - RNA, 21 nt, Artificial Sequence
  Synthetic
ggcuuaugccuacgugaagaa

SEQ ID NO: 444659 - RNA, 22 nt, Artificial Sequence
  Synthetic
aggcuuaugccuacgugaagaa

SEQ ID NO: 444660 - RNA, 23 nt, Artificial Sequence
  Synthetic
uaggcuuaugccuacgugaagaa

SEQ ID NO: 444661 - RNA, 24 nt, Artificial Sequence
  Synthetic
auaggcuuaugccuacgugaagaa

SEQ ID NO: 444662 - RNA, 18 nt, Artificial Sequence
  Synthetic
uguguguugggugaagaa

SEQ ID NO: 444663 - RNA, 19 nt, Artificial Sequence
  Synthetic
cuguguguugggugaagaa

SEQ ID NO: 444664 - RNA, 20 nt, Artificial Sequence
  Synthetic
acuguguguugggugaagaa

SEQ ID NO: 444665 - RNA, 21 nt, Artificial Sequence
  Synthetic
gacuguguguugggugaagaa

SEQ ID NO: 444666 - RNA, 22 nt, Artificial Sequence
  Synthetic
ugacuguguguugggugaagaa

SEQ ID NO: 444667 - RNA, 23 nt, Artificial Sequence
  Synthetic
gugacuguguguugggugaagaa

SEQ ID NO: 444668 - RNA, 24 nt, Artificial Sequence
  Synthetic
agugacuguguguugggugaagaa

SEQ ID NO: 444669 - RNA, 18 nt, Artificial Sequence
  Synthetic
uggagagagugugaagaa

SEQ ID NO: 444670 - RNA, 19 nt, Artificial Sequence
  Synthetic
cuggagagagugugaagaa

SEQ ID NO: 444671 - RNA, 20 nt, Artificial Sequence
  Synthetic
gcuggagagagugugaagaa

SEQ ID NO: 444672 - RNA, 21 nt, Artificial Sequence
  Synthetic
ugcuggagagagugugaagaa

SEQ ID NO: 444673 - RNA, 22 nt, Artificial Sequence
  Synthetic
augcuggagagagugugaagaa

SEQ ID NO: 444674 - RNA, 23 nt, Artificial Sequence
  Synthetic
aaugcuggagagagugugaagaa

SEQ ID NO: 444675 - RNA, 24 nt, Artificial Sequence
  Synthetic
aaaugcuggagagagugugaagaa

SEQ ID NO: 444676 - RNA, 18 nt, Artificial Sequence
  Synthetic
uggugagguugugaagaa

SEQ ID NO: 444677 - RNA, 19 nt, Artificial Sequence
  Synthetic
cuggugagguugugaagaa

SEQ ID NO: 444678 - RNA, 20 nt, Artificial Sequence
  Synthetic
gcuggugagguugugaagaa

SEQ ID NO: 444679 - RNA, 21 nt, Artificial Sequence
  Synthetic
ugcuggugagguugugaagaa

SEQ ID NO: 444680 - RNA, 22 nt, Artificial Sequence
  Synthetic
augcuggugagguugugaagaa

SEQ ID NO: 444681 - RNA, 23 nt, Artificial Sequence
  Synthetic
gaugcuggugagguugugaagaa

SEQ ID NO: 444682 - RNA, 24 nt, Artificial Sequence
  Synthetic
agaugcuggugagguugugaagaa

SEQ ID NO: 444683 - RNA, 18 nt, Artificial Sequence
  Synthetic
cuaaagagguuugaagaa

SEQ ID NO: 444684 - RNA, 19 nt, Artificial Sequence
  Synthetic
gcuaaagagguuugaagaa

SEQ ID NO: 444685 - RNA, 20 nt, Artificial Sequence
  Synthetic
agcuaaagagguuugaagaa

SEQ ID NO: 444686 - RNA, 21 nt, Artificial Sequence
  Synthetic
aagcuaaagagguuugaagaa

SEQ ID NO: 444687 - RNA, 22 nt, Artificial Sequence
  Synthetic
aaagcuaaagagguuugaagaa

SEQ ID NO: 444688 - RNA, 23 nt, Artificial Sequence
  Synthetic
aaaagcuaaagagguuugaagaa

SEQ ID NO: 444689 - RNA, 24 nt, Artificial Sequence
  Synthetic
aaaaagcuaaagagguuugaagaa

SEQ ID NO: 444690 - RNA, 18 nt, Artificial Sequence
  Synthetic
aggauaugguuugaagaa

SEQ ID NO: 444691 - RNA, 19 nt, Artificial Sequence
  Synthetic
aaggauaugguuugaagaa

SEQ ID NO: 444692 - RNA, 20 nt, Artificial Sequence
  Synthetic
aaaggauaugguuugaagaa

SEQ ID NO: 444693 - RNA, 21 nt, Artificial Sequence
  Synthetic
gaaaggauaugguuugaagaa

SEQ ID NO: 444694 - RNA, 22 nt, Artificial Sequence
  Synthetic
agaaaggauaugguuugaagaa

SEQ ID NO: 444695 - RNA, 23 nt, Artificial Sequence
  Synthetic
aagaaaggauaugguuugaagaa

SEQ ID NO: 444696 - RNA, 24 nt, Artificial Sequence
  Synthetic
uaagaaaggauaugguuugaagaa

SEQ ID NO: 444697 - RNA, 18 nt, Artificial Sequence
  Synthetic
auuaugaagacauaagaa

SEQ ID NO: 444698 - RNA, 19 nt, Artificial Sequence
  Synthetic
uauuaugaagacauaagaa

SEQ ID NO: 444699 - RNA, 20 nt, Artificial Sequence
  Synthetic
cuauuaugaagacauaagaa

SEQ ID NO: 444700 - RNA, 21 nt, Artificial Sequence
  Synthetic
ucuauuaugaagacauaagaa

SEQ ID NO: 444701 - RNA, 22 nt, Artificial Sequence
  Synthetic
uucuauuaugaagacauaagaa

SEQ ID NO: 444702 - RNA, 23 nt, Artificial Sequence
  Synthetic
auucuauuaugaagacauaagaa

SEQ ID NO: 444703 - RNA, 24 nt, Artificial Sequence
  Synthetic
uauucuauuaugaagacauaagaa

SEQ ID NO: 444704 - RNA, 18 nt, Artificial Sequence
  Synthetic
uccccucccucauaagaa

SEQ ID NO: 444705 - RNA, 19 nt, Artificial Sequence
  Synthetic
cuccccucccucauaagaa

SEQ ID NO: 444706 - RNA, 20 nt, Artificial Sequence
  Synthetic
ucuccccucccucauaagaa

SEQ ID NO: 444707 - RNA, 21 nt, Artificial Sequence
  Synthetic
uucuccccucccucauaagaa

SEQ ID NO: 444708 - RNA, 22 nt, Artificial Sequence
  Synthetic
cuucuccccucccucauaagaa

SEQ ID NO: 444709 - RNA, 23 nt, Artificial Sequence
  Synthetic
ucuucuccccucccucauaagaa

SEQ ID NO: 444710 - RNA, 24 nt, Artificial Sequence
  Synthetic
cucuucuccccucccucauaagaa

SEQ ID NO: 444711 - RNA, 18 nt, Artificial Sequence
  Synthetic
caagaauuuagauaagaa

SEQ ID NO: 444712 - RNA, 19 nt, Artificial Sequence
  Synthetic
ucaagaauuuagauaagaa

SEQ ID NO: 444713 - RNA, 20 nt, Artificial Sequence
  Synthetic
cucaagaauuuagauaagaa

SEQ ID NO: 444714 - RNA, 21 nt, Artificial Sequence
  Synthetic
ccucaagaauuuagauaagaa

SEQ ID NO: 444715 - RNA, 22 nt, Artificial Sequence
  Synthetic
cccucaagaauuuagauaagaa

SEQ ID NO: 444716 - RNA, 23 nt, Artificial Sequence
  Synthetic
acccucaagaauuuagauaagaa

SEQ ID NO: 444717 - RNA, 24 nt, Artificial Sequence
  Synthetic
gacccucaagaauuuagauaagaa

SEQ ID NO: 444718 - RNA, 18 nt, Artificial Sequence
  Synthetic
uccauguuuauauaagaa

SEQ ID NO: 444719 - RNA, 19 nt, Artificial Sequence
  Synthetic
uuccauguuuauauaagaa

SEQ ID NO: 444720 - RNA, 20 nt, Artificial Sequence
  Synthetic
uuuccauguuuauauaagaa

SEQ ID NO: 444721 - RNA, 21 nt, Artificial Sequence
  Synthetic
auuuccauguuuauauaagaa

SEQ ID NO: 444722 - RNA, 22 nt, Artificial Sequence
  Synthetic
aauuuccauguuuauauaagaa

SEQ ID NO: 444723 - RNA, 23 nt, Artificial Sequence
  Synthetic
aaauuuccauguuuauauaagaa

SEQ ID NO: 444724 - RNA, 24 nt, Artificial Sequence
  Synthetic
aaaauuuccauguuuauauaagaa

SEQ ID NO: 444725 - RNA, 18 nt, Artificial Sequence
  Synthetic
aaugaagugcuauaagaa

SEQ ID NO: 444726 - RNA, 19 nt, Artificial Sequence
  Synthetic
aaaugaagugcuauaagaa

SEQ ID NO: 444727 - RNA, 20 nt, Artificial Sequence
  Synthetic
aaaaugaagugcuauaagaa

SEQ ID NO: 444728 - RNA, 21 nt, Artificial Sequence
  Synthetic
aaaaaugaagugcuauaagaa

SEQ ID NO: 444729 - RNA, 22 nt, Artificial Sequence
  Synthetic
aaaaaaugaagugcuauaagaa

SEQ ID NO: 444730 - RNA, 23 nt, Artificial Sequence
  Synthetic
uaaaaaaugaagugcuauaagaa

SEQ ID NO: 444731 - RNA, 24 nt, Artificial Sequence
  Synthetic
uuaaaaaaugaagugcuauaagaa

SEQ ID NO: 444732 - RNA, 18 nt, Artificial Sequence
  Synthetic
acucugucucuauaagaa

SEQ ID NO: 444733 - RNA, 19 nt, Artificial Sequence
  Synthetic
gacucugucucuauaagaa

SEQ ID NO: 444734 - RNA, 20 nt, Artificial Sequence
  Synthetic
agacucugucucuauaagaa

SEQ ID NO: 444735 - RNA, 21 nt, Artificial Sequence
  Synthetic
gagacucugucucuauaagaa

SEQ ID NO: 444736 - RNA, 22 nt, Artificial Sequence
  Synthetic
ugagacucugucucuauaagaa

SEQ ID NO: 444737 - RNA, 23 nt, Artificial Sequence
  Synthetic
gugagacucugucucuauaagaa

SEQ ID NO: 444738 - RNA, 24 nt, Artificial Sequence
  Synthetic
agugagacucugucucuauaagaa

SEQ ID NO: 444739 - RNA, 18 nt, Artificial Sequence
  Synthetic
uucaugauuuuauaagaa

SEQ ID NO: 444740 - RNA, 19 nt, Artificial Sequence
  Synthetic
auucaugauuuuauaagaa

SEQ ID NO: 444741 - RNA, 20 nt, Artificial Sequence
  Synthetic
gauucaugauuuuauaagaa

SEQ ID NO: 444742 - RNA, 21 nt, Artificial Sequence
  Synthetic
ggauucaugauuuuauaagaa

SEQ ID NO: 444743 - RNA, 22 nt, Artificial Sequence
  Synthetic
aggauucaugauuuuauaagaa

SEQ ID NO: 444744 - RNA, 23 nt, Artificial Sequence
  Synthetic
uaggauucaugauuuuauaagaa

SEQ ID NO: 444745 - RNA, 24 nt, Artificial Sequence
  Synthetic
guaggauucaugauuuuauaagaa

SEQ ID NO: 444746 - RNA, 18 nt, Artificial Sequence
  Synthetic
uaguacuagaccuaagaa

SEQ ID NO: 444747 - RNA, 19 nt, Artificial Sequence
  Synthetic
auaguacuagaccuaagaa

SEQ ID NO: 444748 - RNA, 20 nt, Artificial Sequence
  Synthetic
aauaguacuagaccuaagaa

SEQ ID NO: 444749 - RNA, 21 nt, Artificial Sequence
  Synthetic
caauaguacuagaccuaagaa

SEQ ID NO: 444750 - RNA, 22 nt, Artificial Sequence
  Synthetic
acaauaguacuagaccuaagaa

SEQ ID NO: 444751 - RNA, 23 nt, Artificial Sequence
  Synthetic
aacaauaguacuagaccuaagaa

SEQ ID NO: 444752 - RNA, 24 nt, Artificial Sequence
  Synthetic
aaacaauaguacuagaccuaagaa

SEQ ID NO: 444753 - RNA, 18 nt, Artificial Sequence
  Synthetic
gguaggcuguccuaagaa

SEQ ID NO: 444754 - RNA, 19 nt, Artificial Sequence
  Synthetic
ugguaggcuguccuaagaa

SEQ ID NO: 444755 - RNA, 20 nt, Artificial Sequence
  Synthetic
augguaggcuguccuaagaa

SEQ ID NO: 444756 - RNA, 21 nt, Artificial Sequence
  Synthetic
aaugguaggcuguccuaagaa

SEQ ID NO: 444757 - RNA, 22 nt, Artificial Sequence
  Synthetic
aaaugguaggcuguccuaagaa

SEQ ID NO: 444758 - RNA, 23 nt, Artificial Sequence
  Synthetic
uaaaugguaggcuguccuaagaa

SEQ ID NO: 444759 - RNA, 24 nt, Artificial Sequence
  Synthetic
cuaaaugguaggcuguccuaagaa

SEQ ID NO: 444760 - RNA, 18 nt, Artificial Sequence
  Synthetic
uuuccacuaugcuaagaa

SEQ ID NO: 444761 - RNA, 19 nt, Artificial Sequence
  Synthetic
auuuccacuaugcuaagaa

SEQ ID NO: 444762 - RNA, 20 nt, Artificial Sequence
  Synthetic
cauuuccacuaugcuaagaa

SEQ ID NO: 444763 - RNA, 21 nt, Artificial Sequence
  Synthetic
ucauuuccacuaugcuaagaa

SEQ ID NO: 444764 - RNA, 22 nt, Artificial Sequence
  Synthetic
aucauuuccacuaugcuaagaa

SEQ ID NO: 444765 - RNA, 23 nt, Artificial Sequence
  Synthetic
aaucauuuccacuaugcuaagaa

SEQ ID NO: 444766 - RNA, 24 nt, Artificial Sequence
  Synthetic
uaaucauuuccacuaugcuaagaa

SEQ ID NO: 444767 - RNA, 18 nt, Artificial Sequence
  Synthetic
aauuucaugcucuaagaa

SEQ ID NO: 444768 - RNA, 19 nt, Artificial Sequence
  Synthetic
uaauuucaugcucuaagaa

SEQ ID NO: 444769 - RNA, 20 nt, Artificial Sequence
  Synthetic
auaauuucaugcucuaagaa

SEQ ID NO: 444770 - RNA, 21 nt, Artificial Sequence
  Synthetic
gauaauuucaugcucuaagaa

SEQ ID NO: 444771 - RNA, 22 nt, Artificial Sequence
  Synthetic
ugauaauuucaugcucuaagaa

SEQ ID NO: 444772 - RNA, 23 nt, Artificial Sequence
  Synthetic
uugauaauuucaugcucuaagaa

SEQ ID NO: 444773 - RNA, 24 nt, Artificial Sequence
  Synthetic
cuugauaauuucaugcucuaagaa

SEQ ID NO: 444774 - RNA, 18 nt, Artificial Sequence
  Synthetic
gcauucugggucuaagaa

SEQ ID NO: 444775 - RNA, 19 nt, Artificial Sequence
  Synthetic
agcauucugggucuaagaa

SEQ ID NO: 444776 - RNA, 20 nt, Artificial Sequence
  Synthetic
gagcauucugggucuaagaa

SEQ ID NO: 444777 - RNA, 21 nt, Artificial Sequence
  Synthetic
agagcauucugggucuaagaa

SEQ ID NO: 444778 - RNA, 22 nt, Artificial Sequence
  Synthetic
aagagcauucugggucuaagaa

SEQ ID NO: 444779 - RNA, 23 nt, Artificial Sequence
  Synthetic
gaagagcauucugggucuaagaa

SEQ ID NO: 444780 - RNA, 24 nt, Artificial Sequence
  Synthetic
ggaagagcauucugggucuaagaa

SEQ ID NO: 444781 - RNA, 18 nt, Artificial Sequence
  Synthetic
ggauuuuuaaaguaagaa

SEQ ID NO: 444782 - RNA, 19 nt, Artificial Sequence
  Synthetic
gggauuuuuaaaguaagaa

SEQ ID NO: 444783 - RNA, 20 nt, Artificial Sequence
  Synthetic
ugggauuuuuaaaguaagaa

SEQ ID NO: 444784 - RNA, 21 nt, Artificial Sequence
  Synthetic
uugggauuuuuaaaguaagaa

SEQ ID NO: 444785 - RNA, 22 nt, Artificial Sequence
  Synthetic
auugggauuuuuaaaguaagaa

SEQ ID NO: 444786 - RNA, 23 nt, Artificial Sequence
  Synthetic
aauugggauuuuuaaaguaagaa

SEQ ID NO: 444787 - RNA, 24 nt, Artificial Sequence
  Synthetic
gaauugggauuuuuaaaguaagaa

SEQ ID NO: 444788 - RNA, 18 nt, Artificial Sequence
  Synthetic
gagaacacugaguaagaa

SEQ ID NO: 444789 - RNA, 19 nt, Artificial Sequence
  Synthetic
agagaacacugaguaagaa

SEQ ID NO: 444790 - RNA, 20 nt, Artificial Sequence
  Synthetic
cagagaacacugaguaagaa

SEQ ID NO: 444791 - RNA, 21 nt, Artificial Sequence
  Synthetic
acagagaacacugaguaagaa

SEQ ID NO: 444792 - RNA, 22 nt, Artificial Sequence
  Synthetic
gacagagaacacugaguaagaa

SEQ ID NO: 444793 - RNA, 23 nt, Artificial Sequence
  Synthetic
ggacagagaacacugaguaagaa

SEQ ID NO: 444794 - RNA, 24 nt, Artificial Sequence
  Synthetic
aggacagagaacacugaguaagaa

SEQ ID NO: 444795 - RNA, 18 nt, Artificial Sequence
  Synthetic
uaacacccugaguaagaa

SEQ ID NO: 444796 - RNA, 19 nt, Artificial Sequence
  Synthetic
auaacacccugaguaagaa

SEQ ID NO: 444797 - RNA, 20 nt, Artificial Sequence
  Synthetic
cauaacacccugaguaagaa

SEQ ID NO: 444798 - RNA, 21 nt, Artificial Sequence
  Synthetic
ucauaacacccugaguaagaa

SEQ ID NO: 444799 - RNA, 22 nt, Artificial Sequence
  Synthetic
uucauaacacccugaguaagaa

SEQ ID NO: 444800 - RNA, 23 nt, Artificial Sequence
  Synthetic
cuucauaacacccugaguaagaa

SEQ ID NO: 444801 - RNA, 24 nt, Artificial Sequence
  Synthetic
gcuucauaacacccugaguaagaa

SEQ ID NO: 444802 - RNA, 18 nt, Artificial Sequence
  Synthetic
gacucuagggcguaagaa

SEQ ID NO: 444803 - RNA, 19 nt, Artificial Sequence
  Synthetic
ugacucuagggcguaagaa

SEQ ID NO: 444804 - RNA, 20 nt, Artificial Sequence
  Synthetic
augacucuagggcguaagaa

SEQ ID NO: 444805 - RNA, 21 nt, Artificial Sequence
  Synthetic
aaugacucuagggcguaagaa

SEQ ID NO: 444806 - RNA, 22 nt, Artificial Sequence
  Synthetic
aaaugacucuagggcguaagaa

SEQ ID NO: 444807 - RNA, 23 nt, Artificial Sequence
  Synthetic
caaaugacucuagggcguaagaa

SEQ ID NO: 444808 - RNA, 24 nt, Artificial Sequence
  Synthetic
acaaaugacucuagggcguaagaa

SEQ ID NO: 444809 - RNA, 18 nt, Artificial Sequence
  Synthetic
acccagccaagguaagaa

SEQ ID NO: 444810 - RNA, 19 nt, Artificial Sequence
  Synthetic
aacccagccaagguaagaa

SEQ ID NO: 444811 - RNA, 20 nt, Artificial Sequence
  Synthetic
aaacccagccaagguaagaa

SEQ ID NO: 444812 - RNA, 21 nt, Artificial Sequence
  Synthetic
aaaacccagccaagguaagaa

SEQ ID NO: 444813 - RNA, 22 nt, Artificial Sequence
  Synthetic
aaaaacccagccaagguaagaa

SEQ ID NO: 444814 - RNA, 23 nt, Artificial Sequence
  Synthetic
uaaaaacccagccaagguaagaa

SEQ ID NO: 444815 - RNA, 24 nt, Artificial Sequence
  Synthetic
uuaaaaacccagccaagguaagaa

SEQ ID NO: 444816 - RNA, 18 nt, Artificial Sequence
  Synthetic
auuuauaggugguaagaa

SEQ ID NO: 444817 - RNA, 19 nt, Artificial Sequence
  Synthetic
gauuuauaggugguaagaa

SEQ ID NO: 444818 - RNA, 20 nt, Artificial Sequence
  Synthetic
agauuuauaggugguaagaa

SEQ ID NO: 444819 - RNA, 21 nt, Artificial Sequence
  Synthetic
aagauuuauaggugguaagaa

SEQ ID NO: 444820 - RNA, 22 nt, Artificial Sequence
  Synthetic
gaagauuuauaggugguaagaa

SEQ ID NO: 444821 - RNA, 23 nt, Artificial Sequence
  Synthetic
ggaagauuuauaggugguaagaa

SEQ ID NO: 444822 - RNA, 24 nt, Artificial Sequence
  Synthetic
aggaagauuuauaggugguaagaa

SEQ ID NO: 444823 - RNA, 18 nt, Artificial Sequence
  Synthetic
guugccugaaauuaagaa

SEQ ID NO: 444824 - RNA, 19 nt, Artificial Sequence
  Synthetic
uguugccugaaauuaagaa

SEQ ID NO: 444825 - RNA, 20 nt, Artificial Sequence
  Synthetic
uuguugccugaaauuaagaa

SEQ ID NO: 444826 - RNA, 21 nt, Artificial Sequence
  Synthetic
auuguugccugaaauuaagaa

SEQ ID NO: 444827 - RNA, 22 nt, Artificial Sequence
  Synthetic
cauuguugccugaaauuaagaa

SEQ ID NO: 444828 - RNA, 23 nt, Artificial Sequence
  Synthetic
acauuguugccugaaauuaagaa

SEQ ID NO: 444829 - RNA, 24 nt, Artificial Sequence
  Synthetic
cacauuguugccugaaauuaagaa

SEQ ID NO: 444830 - RNA, 18 nt, Artificial Sequence
  Synthetic
aagagagacaauuaagaa

SEQ ID NO: 444831 - RNA, 19 nt, Artificial Sequence
  Synthetic
gaagagagacaauuaagaa

SEQ ID NO: 444832 - RNA, 20 nt, Artificial Sequence
  Synthetic
agaagagagacaauuaagaa

SEQ ID NO: 444833 - RNA, 21 nt, Artificial Sequence
  Synthetic
aagaagagagacaauuaagaa

SEQ ID NO: 444834 - RNA, 22 nt, Artificial Sequence
  Synthetic
aaagaagagagacaauuaagaa

SEQ ID NO: 444835 - RNA, 23 nt, Artificial Sequence
  Synthetic
gaaagaagagagacaauuaagaa

SEQ ID NO: 444836 - RNA, 24 nt, Artificial Sequence
  Synthetic
agaaagaagagagacaauuaagaa

SEQ ID NO: 444837 - RNA, 18 nt, Artificial Sequence
  Synthetic
auuuuaguggcuuaagaa

SEQ ID NO: 444838 - RNA, 19 nt, Artificial Sequence
  Synthetic
aauuuuaguggcuuaagaa

SEQ ID NO: 444839 - RNA, 20 nt, Artificial Sequence
  Synthetic
caauuuuaguggcuuaagaa

SEQ ID NO: 444840 - RNA, 21 nt, Artificial Sequence
  Synthetic
acaauuuuaguggcuuaagaa

SEQ ID NO: 444841 - RNA, 22 nt, Artificial Sequence
  Synthetic
cacaauuuuaguggcuuaagaa

SEQ ID NO: 444842 - RNA, 23 nt, Artificial Sequence
  Synthetic
ccacaauuuuaguggcuuaagaa

SEQ ID NO: 444843 - RNA, 24 nt, Artificial Sequence
  Synthetic
cccacaauuuuaguggcuuaagaa

SEQ ID NO: 444844 - RNA, 18 nt, Artificial Sequence
  Synthetic
uaaggccugaguuaagaa

SEQ ID NO: 444845 - RNA, 19 nt, Artificial Sequence
  Synthetic
auaaggccugaguuaagaa

SEQ ID NO: 444846 - RNA, 20 nt, Artificial Sequence
  Synthetic
gauaaggccugaguuaagaa

SEQ ID NO: 444847 - RNA, 21 nt, Artificial Sequence
  Synthetic
agauaaggccugaguuaagaa

SEQ ID NO: 444848 - RNA, 22 nt, Artificial Sequence
  Synthetic
gagauaaggccugaguuaagaa

SEQ ID NO: 444849 - RNA, 23 nt, Artificial Sequence
  Synthetic
agagauaaggccugaguuaagaa

SEQ ID NO: 444850 - RNA, 24 nt, Artificial Sequence
  Synthetic
aagagauaaggccugaguuaagaa

SEQ ID NO: 444851 - RNA, 18 nt, Artificial Sequence
  Synthetic
uagaaccaagguuaagaa

SEQ ID NO: 444852 - RNA, 19 nt, Artificial Sequence
  Synthetic
uuagaaccaagguuaagaa

SEQ ID NO: 444853 - RNA, 20 nt, Artificial Sequence
  Synthetic
uuuagaaccaagguuaagaa

SEQ ID NO: 444854 - RNA, 21 nt, Artificial Sequence
  Synthetic
cuuuagaaccaagguuaagaa

SEQ ID NO: 444855 - RNA, 22 nt, Artificial Sequence
  Synthetic
acuuuagaaccaagguuaagaa

SEQ ID NO: 444856 - RNA, 23 nt, Artificial Sequence
  Synthetic
aacuuuagaaccaagguuaagaa

SEQ ID NO: 444857 - RNA, 24 nt, Artificial Sequence
  Synthetic
aaacuuuagaaccaagguuaagaa

SEQ ID NO: 444858 - RNA, 18 nt, Artificial Sequence
  Synthetic
gguuuuugauguuaagaa

SEQ ID NO: 444859 - RNA, 19 nt, Artificial Sequence
  Synthetic
agguuuuugauguuaagaa

SEQ ID NO: 444860 - RNA, 20 nt, Artificial Sequence
  Synthetic
aagguuuuugauguuaagaa

SEQ ID NO: 444861 - RNA, 21 nt, Artificial Sequence
  Synthetic
uaagguuuuugauguuaagaa

SEQ ID NO: 444862 - RNA, 22 nt, Artificial Sequence
  Synthetic
uuaagguuuuugauguuaagaa

SEQ ID NO: 444863 - RNA, 23 nt, Artificial Sequence
  Synthetic
guuaagguuuuugauguuaagaa

SEQ ID NO: 444864 - RNA, 24 nt, Artificial Sequence
  Synthetic
uguuaagguuuuugauguuaagaa

SEQ ID NO: 444865 - RNA, 18 nt, Artificial Sequence
  Synthetic
gauaguuaaauuuaagaa

SEQ ID NO: 444866 - RNA, 19 nt, Artificial Sequence
  Synthetic
agauaguuaaauuuaagaa

SEQ ID NO: 444867 - RNA, 20 nt, Artificial Sequence
  Synthetic
cagauaguuaaauuuaagaa

SEQ ID NO: 444868 - RNA, 21 nt, Artificial Sequence
  Synthetic
ccagauaguuaaauuuaagaa

SEQ ID NO: 444869 - RNA, 22 nt, Artificial Sequence
  Synthetic
accagauaguuaaauuuaagaa

SEQ ID NO: 444870 - RNA, 23 nt, Artificial Sequence
  Synthetic
aaccagauaguuaaauuuaagaa

SEQ ID NO: 444871 - RNA, 24 nt, Artificial Sequence
  Synthetic
caaccagauaguuaaauuuaagaa

SEQ ID NO: 444872 - RNA, 18 nt, Artificial Sequence
  Synthetic
guaaaaaugauuuaagaa

SEQ ID NO: 444873 - RNA, 19 nt, Artificial Sequence
  Synthetic
gguaaaaaugauuuaagaa

SEQ ID NO: 444874 - RNA, 20 nt, Artificial Sequence
  Synthetic
agguaaaaaugauuuaagaa

SEQ ID NO: 444875 - RNA, 21 nt, Artificial Sequence
  Synthetic
aagguaaaaaugauuuaagaa

SEQ ID NO: 444876 - RNA, 22 nt, Artificial Sequence
  Synthetic
caagguaaaaaugauuuaagaa

SEQ ID NO: 444877 - RNA, 23 nt, Artificial Sequence
  Synthetic
gcaagguaaaaaugauuuaagaa

SEQ ID NO: 444878 - RNA, 24 nt, Artificial Sequence
  Synthetic
agcaagguaaaaaugauuuaagaa

SEQ ID NO: 444879 - RNA, 18 nt, Artificial Sequence
  Synthetic
acuaguuagguuuaagaa

SEQ ID NO: 444880 - RNA, 19 nt, Artificial Sequence
  Synthetic
aacuaguuagguuuaagaa

SEQ ID NO: 444881 - RNA, 20 nt, Artificial Sequence
  Synthetic
caacuaguuagguuuaagaa

SEQ ID NO: 444882 - RNA, 21 nt, Artificial Sequence
  Synthetic
gcaacuaguuagguuuaagaa

SEQ ID NO: 444883 - RNA, 22 nt, Artificial Sequence
  Synthetic
ugcaacuaguuagguuuaagaa

SEQ ID NO: 444884 - RNA, 23 nt, Artificial Sequence
  Synthetic
cugcaacuaguuagguuuaagaa

SEQ ID NO: 444885 - RNA, 24 nt, Artificial Sequence
  Synthetic
ucugcaacuaguuagguuuaagaa

SEQ ID NO: 444886 - RNA, 18 nt, Artificial Sequence
  Synthetic
acugaaggauuuuaagaa

SEQ ID NO: 444887 - RNA, 19 nt, Artificial Sequence
  Synthetic
uacugaaggauuuuaagaa

SEQ ID NO: 444888 - RNA, 20 nt, Artificial Sequence
  Synthetic
cuacugaaggauuuuaagaa

SEQ ID NO: 444889 - RNA, 21 nt, Artificial Sequence
  Synthetic
gcuacugaaggauuuuaagaa

SEQ ID NO: 444890 - RNA, 22 nt, Artificial Sequence
  Synthetic
agcuacugaaggauuuuaagaa

SEQ ID NO: 444891 - RNA, 23 nt, Artificial Sequence
  Synthetic
aagcuacugaaggauuuuaagaa

SEQ ID NO: 444892 - RNA, 24 nt, Artificial Sequence
  Synthetic
gaagcuacugaaggauuuuaagaa

SEQ ID NO: 444893 - RNA, 18 nt, Artificial Sequence
  Synthetic
aaacuacagaaaacagaa

SEQ ID NO: 444894 - RNA, 19 nt, Artificial Sequence
  Synthetic
caaacuacagaaaacagaa

SEQ ID NO: 444895 - RNA, 20 nt, Artificial Sequence
  Synthetic
ucaaacuacagaaaacagaa

SEQ ID NO: 444896 - RNA, 21 nt, Artificial Sequence
  Synthetic
aucaaacuacagaaaacagaa

SEQ ID NO: 444897 - RNA, 22 nt, Artificial Sequence
  Synthetic
uaucaaacuacagaaaacagaa

SEQ ID NO: 444898 - RNA, 23 nt, Artificial Sequence
  Synthetic
uuaucaaacuacagaaaacagaa

SEQ ID NO: 444899 - RNA, 24 nt, Artificial Sequence
  Synthetic
uuuaucaaacuacagaaaacagaa

SEQ ID NO: 444900 - RNA, 18 nt, Artificial Sequence
  Synthetic
acucaguagaaaacagaa

SEQ ID NO: 444901 - RNA, 19 nt, Artificial Sequence
  Synthetic
cacucaguagaaaacagaa

SEQ ID NO: 444902 - RNA, 20 nt, Artificial Sequence
  Synthetic
ucacucaguagaaaacagaa

SEQ ID NO: 444903 - RNA, 21 nt, Artificial Sequence
  Synthetic
cucacucaguagaaaacagaa

SEQ ID NO: 444904 - RNA, 22 nt, Artificial Sequence
  Synthetic
acucacucaguagaaaacagaa

SEQ ID NO: 444905 - RNA, 23 nt, Artificial Sequence
  Synthetic
aacucacucaguagaaaacagaa

SEQ ID NO: 444906 - RNA, 24 nt, Artificial Sequence
  Synthetic
uaacucacucaguagaaaacagaa

SEQ ID NO: 444907 - RNA, 18 nt, Artificial Sequence
  Synthetic
uucgcuaauaaaacagaa

SEQ ID NO: 444908 - RNA, 19 nt, Artificial Sequence
  Synthetic
auucgcuaauaaaacagaa

SEQ ID NO: 444909 - RNA, 20 nt, Artificial Sequence
  Synthetic
cauucgcuaauaaaacagaa

SEQ ID NO: 444910 - RNA, 21 nt, Artificial Sequence
  Synthetic
ucauucgcuaauaaaacagaa

SEQ ID NO: 444911 - RNA, 22 nt, Artificial Sequence
  Synthetic
aucauucgcuaauaaaacagaa

SEQ ID NO: 444912 - RNA, 23 nt, Artificial Sequence
  Synthetic
aaucauucgcuaauaaaacagaa

SEQ ID NO: 444913 - RNA, 24 nt, Artificial Sequence
  Synthetic
caaucauucgcuaauaaaacagaa

SEQ ID NO: 444914 - RNA, 18 nt, Artificial Sequence
  Synthetic
gucuugagacaaacagaa

SEQ ID NO: 444915 - RNA, 19 nt, Artificial Sequence
  Synthetic
agucuugagacaaacagaa

SEQ ID NO: 444916 - RNA, 20 nt, Artificial Sequence
  Synthetic
aagucuugagacaaacagaa

SEQ ID NO: 444917 - RNA, 21 nt, Artificial Sequence
  Synthetic
aaagucuugagacaaacagaa

SEQ ID NO: 444918 - RNA, 22 nt, Artificial Sequence
  Synthetic
aaaagucuugagacaaacagaa

SEQ ID NO: 444919 - RNA, 23 nt, Artificial Sequence
  Synthetic
uaaaagucuugagacaaacagaa

SEQ ID NO: 444920 - RNA, 24 nt, Artificial Sequence
  Synthetic
uuaaaagucuugagacaaacagaa

SEQ ID NO: 444921 - RNA, 18 nt, Artificial Sequence
  Synthetic
aagagacaaccaacagaa

SEQ ID NO: 444922 - RNA, 19 nt, Artificial Sequence
  Synthetic
gaagagacaaccaacagaa

SEQ ID NO: 444923 - RNA, 20 nt, Artificial Sequence
  Synthetic
ugaagagacaaccaacagaa

SEQ ID NO: 444924 - RNA, 21 nt, Artificial Sequence
  Synthetic
gugaagagacaaccaacagaa

SEQ ID NO: 444925 - RNA, 22 nt, Artificial Sequence
  Synthetic
agugaagagacaaccaacagaa

SEQ ID NO: 444926 - RNA, 23 nt, Artificial Sequence
  Synthetic
aagugaagagacaaccaacagaa

SEQ ID NO: 444927 - RNA, 24 nt, Artificial Sequence
  Synthetic
aaagugaagagacaaccaacagaa

SEQ ID NO: 444928 - RNA, 18 nt, Artificial Sequence
  Synthetic
uauuugagaagaacagaa

SEQ ID NO: 444929 - RNA, 19 nt, Artificial Sequence
  Synthetic
guauuugagaagaacagaa

SEQ ID NO: 444930 - RNA, 20 nt, Artificial Sequence
  Synthetic
uguauuugagaagaacagaa

SEQ ID NO: 444931 - RNA, 21 nt, Artificial Sequence
  Synthetic
auguauuugagaagaacagaa

SEQ ID NO: 444932 - RNA, 22 nt, Artificial Sequence
  Synthetic
uauguauuugagaagaacagaa

SEQ ID NO: 444933 - RNA, 23 nt, Artificial Sequence
  Synthetic
guauguauuugagaagaacagaa

SEQ ID NO: 444934 - RNA, 24 nt, Artificial Sequence
  Synthetic
aguauguauuugagaagaacagaa

SEQ ID NO: 444935 - RNA, 18 nt, Artificial Sequence
  Synthetic
ugacagaauagaacagaa

SEQ ID NO: 444936 - RNA, 19 nt, Artificial Sequence
  Synthetic
gugacagaauagaacagaa

SEQ ID NO: 444937 - RNA, 20 nt, Artificial Sequence
  Synthetic
agugacagaauagaacagaa

SEQ ID NO: 444938 - RNA, 21 nt, Artificial Sequence
  Synthetic
uagugacagaauagaacagaa

SEQ ID NO: 444939 - RNA, 22 nt, Artificial Sequence
  Synthetic
uuagugacagaauagaacagaa

SEQ ID NO: 444940 - RNA, 23 nt, Artificial Sequence
  Synthetic
guuagugacagaauagaacagaa

SEQ ID NO: 444941 - RNA, 24 nt, Artificial Sequence
  Synthetic
aguuagugacagaauagaacagaa

SEQ ID NO: 444942 - RNA, 18 nt, Artificial Sequence
  Synthetic
uagaccaacggaacagaa

SEQ ID NO: 444943 - RNA, 19 nt, Artificial Sequence
  Synthetic
auagaccaacggaacagaa

SEQ ID NO: 444944 - RNA, 20 nt, Artificial Sequence
  Synthetic
uauagaccaacggaacagaa

SEQ ID NO: 444945 - RNA, 21 nt, Artificial Sequence
  Synthetic
auauagaccaacggaacagaa

SEQ ID NO: 444946 - RNA, 22 nt, Artificial Sequence
  Synthetic
uauauagaccaacggaacagaa

SEQ ID NO: 444947 - RNA, 23 nt, Artificial Sequence
  Synthetic
auauauagaccaacggaacagaa

SEQ ID NO: 444948 - RNA, 24 nt, Artificial Sequence
  Synthetic
gauauauagaccaacggaacagaa

SEQ ID NO: 444949 - RNA, 18 nt, Artificial Sequence
  Synthetic
uacaccaauggaacagaa

SEQ ID NO: 444950 - RNA, 19 nt, Artificial Sequence
  Synthetic
auacaccaauggaacagaa

SEQ ID NO: 444951 - RNA, 20 nt, Artificial Sequence
  Synthetic
uauacaccaauggaacagaa

SEQ ID NO: 444952 - RNA, 21 nt, Artificial Sequence
  Synthetic
auauacaccaauggaacagaa

SEQ ID NO: 444953 - RNA, 22 nt, Artificial Sequence
  Synthetic
gauauacaccaauggaacagaa

SEQ ID NO: 444954 - RNA, 23 nt, Artificial Sequence
  Synthetic
agauauacaccaauggaacagaa

SEQ ID NO: 444955 - RNA, 24 nt, Artificial Sequence
  Synthetic
gagauauacaccaauggaacagaa

SEQ ID NO: 444956 - RNA, 21 nt, Artificial Sequence
  Synthetic
auauagaccaauggaacagaa

SEQ ID NO: 444957 - RNA, 22 nt, Artificial Sequence
  Synthetic
cauauagaccaauggaacagaa

SEQ ID NO: 444958 - RNA, 23 nt, Artificial Sequence
  Synthetic
acauauagaccaauggaacagaa

SEQ ID NO: 444959 - RNA, 24 nt, Artificial Sequence
  Synthetic
gacauauagaccaauggaacagaa

SEQ ID NO: 444960 - RNA, 22 nt, Artificial Sequence
  Synthetic
gauauagaccaauggaacagaa

SEQ ID NO: 444961 - RNA, 23 nt, Artificial Sequence
  Synthetic
agauauagaccaauggaacagaa

SEQ ID NO: 444962 - RNA, 24 nt, Artificial Sequence
  Synthetic
gagauauagaccaauggaacagaa

SEQ ID NO: 444963 - RNA, 22 nt, Artificial Sequence
  Synthetic
uauauagaccaauggaacagaa

SEQ ID NO: 444964 - RNA, 23 nt, Artificial Sequence
  Synthetic
auauauagaccaauggaacagaa

SEQ ID NO: 444965 - RNA, 24 nt, Artificial Sequence
  Synthetic
gauauauagaccaauggaacagaa

SEQ ID NO: 444966 - RNA, 21 nt, Artificial Sequence
  Synthetic
auauagaucaauggaacagaa

SEQ ID NO: 444967 - RNA, 22 nt, Artificial Sequence
  Synthetic
gauauagaucaauggaacagaa

SEQ ID NO: 444968 - RNA, 23 nt, Artificial Sequence
  Synthetic
agauauagaucaauggaacagaa

SEQ ID NO: 444969 - RNA, 24 nt, Artificial Sequence
  Synthetic
gagauauagaucaauggaacagaa

SEQ ID NO: 444970 - RNA, 18 nt, Artificial Sequence
  Synthetic
uuguaagaaguaacagaa

SEQ ID NO: 444971 - RNA, 19 nt, Artificial Sequence
  Synthetic
uuuguaagaaguaacagaa

SEQ ID NO: 444972 - RNA, 20 nt, Artificial Sequence
  Synthetic
uuuuguaagaaguaacagaa

SEQ ID NO: 444973 - RNA, 21 nt, Artificial Sequence
  Synthetic
auuuuguaagaaguaacagaa

SEQ ID NO: 444974 - RNA, 22 nt, Artificial Sequence
  Synthetic
uauuuuguaagaaguaacagaa

SEQ ID NO: 444975 - RNA, 23 nt, Artificial Sequence
  Synthetic
uuauuuuguaagaaguaacagaa

SEQ ID NO: 444976 - RNA, 24 nt, Artificial Sequence
  Synthetic
uuuauuuuguaagaaguaacagaa

SEQ ID NO: 444977 - RNA, 18 nt, Artificial Sequence
  Synthetic
uaaaaauaauacacagaa

SEQ ID NO: 444978 - RNA, 19 nt, Artificial Sequence
  Synthetic
auaaaaauaauacacagaa

SEQ ID NO: 444979 - RNA, 20 nt, Artificial Sequence
  Synthetic
gauaaaaauaauacacagaa

SEQ ID NO: 444980 - RNA, 21 nt, Artificial Sequence
  Synthetic
ugauaaaaauaauacacagaa

SEQ ID NO: 444981 - RNA, 22 nt, Artificial Sequence
  Synthetic
gugauaaaaauaauacacagaa

SEQ ID NO: 444982 - RNA, 23 nt, Artificial Sequence
  Synthetic
agugauaaaaauaauacacagaa

SEQ ID NO: 444983 - RNA, 24 nt, Artificial Sequence
  Synthetic
cagugauaaaaauaauacacagaa

SEQ ID NO: 444984 - RNA, 18 nt, Artificial Sequence
  Synthetic
gaugugugauacacagaa

SEQ ID NO: 444985 - RNA, 19 nt, Artificial Sequence
  Synthetic
ggaugugugauacacagaa

SEQ ID NO: 444986 - RNA, 20 nt, Artificial Sequence
  Synthetic
aggaugugugauacacagaa

SEQ ID NO: 444987 - RNA, 21 nt, Artificial Sequence
  Synthetic
caggaugugugauacacagaa

SEQ ID NO: 444988 - RNA, 22 nt, Artificial Sequence
  Synthetic
acaggaugugugauacacagaa

SEQ ID NO: 444989 - RNA, 23 nt, Artificial Sequence
  Synthetic
cacaggaugugugauacacagaa

SEQ ID NO: 444990 - RNA, 24 nt, Artificial Sequence
  Synthetic
ccacaggaugugugauacacagaa

SEQ ID NO: 444991 - RNA, 18 nt, Artificial Sequence
  Synthetic
ugcaggcaaggcacagaa

SEQ ID NO: 444992 - RNA, 19 nt, Artificial Sequence
  Synthetic
cugcaggcaaggcacagaa

SEQ ID NO: 444993 - RNA, 20 nt, Artificial Sequence
  Synthetic
acugcaggcaaggcacagaa

SEQ ID NO: 444994 - RNA, 21 nt, Artificial Sequence
  Synthetic
uacugcaggcaaggcacagaa

SEQ ID NO: 444995 - RNA, 22 nt, Artificial Sequence
  Synthetic
cuacugcaggcaaggcacagaa

SEQ ID NO: 444996 - RNA, 23 nt, Artificial Sequence
  Synthetic
ucuacugcaggcaaggcacagaa

SEQ ID NO: 444997 - RNA, 24 nt, Artificial Sequence
  Synthetic
uucuacugcaggcaaggcacagaa

SEQ ID NO: 444998 - RNA, 18 nt, Artificial Sequence
  Synthetic
cacuuacaagucacagaa

SEQ ID NO: 444999 - RNA, 19 nt, Artificial Sequence
  Synthetic
ucacuuacaagucacagaa

SEQ ID NO: 445000 - RNA, 20 nt, Artificial Sequence
  Synthetic
gucacuuacaagucacagaa

SEQ ID NO: 445001 - RNA, 21 nt, Artificial Sequence
  Synthetic
ggucacuuacaagucacagaa

SEQ ID NO: 445002 - RNA, 22 nt, Artificial Sequence
  Synthetic
aggucacuuacaagucacagaa

SEQ ID NO: 445003 - RNA, 23 nt, Artificial Sequence
  Synthetic
uaggucacuuacaagucacagaa

SEQ ID NO: 445004 - RNA, 24 nt, Artificial Sequence
  Synthetic
uuaggucacuuacaagucacagaa

SEQ ID NO: 445005 - RNA, 18 nt, Artificial Sequence
  Synthetic
uuuuagugagucacagaa

SEQ ID NO: 445006 - RNA, 19 nt, Artificial Sequence
  Synthetic
uuuuuagugagucacagaa

SEQ ID NO: 445007 - RNA, 20 nt, Artificial Sequence
  Synthetic
uuuuuuagugagucacagaa

SEQ ID NO: 445008 - RNA, 21 nt, Artificial Sequence
  Synthetic
uuuuuuuagugagucacagaa

SEQ ID NO: 445009 - RNA, 22 nt, Artificial Sequence
  Synthetic
uuuuuuuuagugagucacagaa

SEQ ID NO: 445010 - RNA, 23 nt, Artificial Sequence
  Synthetic
uuuuuuuuuagugagucacagaa

SEQ ID NO: 445011 - RNA, 24 nt, Artificial Sequence
  Synthetic
uuuuuuuuuuagugagucacagaa

SEQ ID NO: 445012 - RNA, 18 nt, Artificial Sequence
  Synthetic
augacuuucuucacagaa

SEQ ID NO: 445013 - RNA, 19 nt, Artificial Sequence
  Synthetic
aaugacuuucuucacagaa

SEQ ID NO: 445014 - RNA, 20 nt, Artificial Sequence
  Synthetic
caaugacuuucuucacagaa

SEQ ID NO: 445015 - RNA, 21 nt, Artificial Sequence
  Synthetic
ccaaugacuuucuucacagaa

SEQ ID NO: 445016 - RNA, 22 nt, Artificial Sequence
  Synthetic
accaaugacuuucuucacagaa

SEQ ID NO: 445017 - RNA, 23 nt, Artificial Sequence
  Synthetic
uaccaaugacuuucuucacagaa

SEQ ID NO: 445018 - RNA, 24 nt, Artificial Sequence
  Synthetic
cuaccaaugacuuucuucacagaa

SEQ ID NO: 445019 - RNA, 21 nt, Artificial Sequence
  Synthetic
ccaaugccuuucuucacagaa

SEQ ID NO: 445020 - RNA, 22 nt, Artificial Sequence
  Synthetic
accaaugccuuucuucacagaa

SEQ ID NO: 445021 - RNA, 23 nt, Artificial Sequence
  Synthetic
uaccaaugccuuucuucacagaa

SEQ ID NO: 445022 - RNA, 24 nt, Artificial Sequence
  Synthetic
cuaccaaugccuuucuucacagaa

SEQ ID NO: 445023 - RNA, 18 nt, Artificial Sequence
  Synthetic
uaaggacaguucacagaa

SEQ ID NO: 445024 - RNA, 19 nt, Artificial Sequence
  Synthetic
auaaggacaguucacagaa

SEQ ID NO: 445025 - RNA, 20 nt, Artificial Sequence
  Synthetic
gauaaggacaguucacagaa

SEQ ID NO: 445026 - RNA, 21 nt, Artificial Sequence
  Synthetic
agauaaggacaguucacagaa

SEQ ID NO: 445027 - RNA, 22 nt, Artificial Sequence
  Synthetic
aagauaaggacaguucacagaa

SEQ ID NO: 445028 - RNA, 23 nt, Artificial Sequence
  Synthetic
aaagauaaggacaguucacagaa

SEQ ID NO: 445029 - RNA, 24 nt, Artificial Sequence
  Synthetic
aaaagauaaggacaguucacagaa

SEQ ID NO: 445030 - RNA, 18 nt, Artificial Sequence
  Synthetic
guuuggaaaaagacagaa

SEQ ID NO: 445031 - RNA, 19 nt, Artificial Sequence
  Synthetic
cguuuggaaaaagacagaa

SEQ ID NO: 445032 - RNA, 20 nt, Artificial Sequence
  Synthetic
acguuuggaaaaagacagaa

SEQ ID NO: 445033 - RNA, 21 nt, Artificial Sequence
  Synthetic
cacguuuggaaaaagacagaa

SEQ ID NO: 445034 - RNA, 22 nt, Artificial Sequence
  Synthetic
gcacguuuggaaaaagacagaa

SEQ ID NO: 445035 - RNA, 23 nt, Artificial Sequence
  Synthetic
agcacguuuggaaaaagacagaa

SEQ ID NO: 445036 - RNA, 24 nt, Artificial Sequence
  Synthetic
aagcacguuuggaaaaagacagaa

SEQ ID NO: 445037 - RNA, 18 nt, Artificial Sequence
  Synthetic
gggguaaacgagacagaa

SEQ ID NO: 445038 - RNA, 19 nt, Artificial Sequence
  Synthetic
agggguaaacgagacagaa

SEQ ID NO: 445039 - RNA, 20 nt, Artificial Sequence
  Synthetic
cagggguaaacgagacagaa

SEQ ID NO: 445040 - RNA, 21 nt, Artificial Sequence
  Synthetic
ucagggguaaacgagacagaa

SEQ ID NO: 445041 - RNA, 22 nt, Artificial Sequence
  Synthetic
uucagggguaaacgagacagaa

SEQ ID NO: 445042 - RNA, 23 nt, Artificial Sequence
  Synthetic
uuucagggguaaacgagacagaa

SEQ ID NO: 445043 - RNA, 24 nt, Artificial Sequence
  Synthetic
cuuucagggguaaacgagacagaa

SEQ ID NO: 445044 - RNA, 18 nt, Artificial Sequence
  Synthetic
aaugcauuggagacagaa

SEQ ID NO: 445045 - RNA, 19 nt, Artificial Sequence
  Synthetic
uaaugcauuggagacagaa

SEQ ID NO: 445046 - RNA, 20 nt, Artificial Sequence
  Synthetic
uuaaugcauuggagacagaa

SEQ ID NO: 445047 - RNA, 21 nt, Artificial Sequence
  Synthetic
cuuaaugcauuggagacagaa

SEQ ID NO: 445048 - RNA, 22 nt, Artificial Sequence
  Synthetic
acuuaaugcauuggagacagaa

SEQ ID NO: 445049 - RNA, 23 nt, Artificial Sequence
  Synthetic
gacuuaaugcauuggagacagaa

SEQ ID NO: 445050 - RNA, 24 nt, Artificial Sequence
  Synthetic
ggacuuaaugcauuggagacagaa

SEQ ID NO: 445051 - RNA, 18 nt, Artificial Sequence
  Synthetic
cacucugauaggacagaa

SEQ ID NO: 445052 - RNA, 19 nt, Artificial Sequence
  Synthetic
gcacucugauaggacagaa

SEQ ID NO: 445053 - RNA, 20 nt, Artificial Sequence
  Synthetic
ggcacucugauaggacagaa

SEQ ID NO: 445054 - RNA, 21 nt, Artificial Sequence
  Synthetic
gggcacucugauaggacagaa

SEQ ID NO: 445055 - RNA, 22 nt, Artificial Sequence
  Synthetic
agggcacucugauaggacagaa

SEQ ID NO: 445056 - RNA, 23 nt, Artificial Sequence
  Synthetic
aagggcacucugauaggacagaa

SEQ ID NO: 445057 - RNA, 24 nt, Artificial Sequence
  Synthetic
aaagggcacucugauaggacagaa

SEQ ID NO: 445058 - RNA, 18 nt, Artificial Sequence
  Synthetic
auauuucuaaugacagaa

SEQ ID NO: 445059 - RNA, 19 nt, Artificial Sequence
  Synthetic
uauauuucuaaugacagaa

SEQ ID NO: 445060 - RNA, 20 nt, Artificial Sequence
  Synthetic
auauauuucuaaugacagaa

SEQ ID NO: 445061 - RNA, 21 nt, Artificial Sequence
  Synthetic
aauauauuucuaaugacagaa

SEQ ID NO: 445062 - RNA, 22 nt, Artificial Sequence
  Synthetic
caauauauuucuaaugacagaa

SEQ ID NO: 445063 - RNA, 23 nt, Artificial Sequence
  Synthetic
acaauauauuucuaaugacagaa

SEQ ID NO: 445064 - RNA, 24 nt, Artificial Sequence
  Synthetic
cacaauauauuucuaaugacagaa

SEQ ID NO: 445065 - RNA, 18 nt, Artificial Sequence
  Synthetic
agacaguuagugacagaa

SEQ ID NO: 445066 - RNA, 19 nt, Artificial Sequence
  Synthetic
aagacaguuagugacagaa

SEQ ID NO: 445067 - RNA, 20 nt, Artificial Sequence
  Synthetic
uaagacaguuagugacagaa

SEQ ID NO: 445068 - RNA, 21 nt, Artificial Sequence
  Synthetic
cuaagacaguuagugacagaa

SEQ ID NO: 445069 - RNA, 22 nt, Artificial Sequence
  Synthetic
gcuaagacaguuagugacagaa

SEQ ID NO: 445070 - RNA, 23 nt, Artificial Sequence
  Synthetic
ugcuaagacaguuagugacagaa

SEQ ID NO: 445071 - RNA, 24 nt, Artificial Sequence
  Synthetic
augcuaagacaguuagugacagaa

SEQ ID NO: 445072 - RNA, 18 nt, Artificial Sequence
  Synthetic
guuaauauauauacagaa

SEQ ID NO: 445073 - RNA, 19 nt, Artificial Sequence
  Synthetic
uguuaauauauauacagaa

SEQ ID NO: 445074 - RNA, 20 nt, Artificial Sequence
  Synthetic
auguuaauauauauacagaa

SEQ ID NO: 445075 - RNA, 21 nt, Artificial Sequence
  Synthetic
aauguuaauauauauacagaa

SEQ ID NO: 445076 - RNA, 22 nt, Artificial Sequence
  Synthetic
caauguuaauauauauacagaa

SEQ ID NO: 445077 - RNA, 23 nt, Artificial Sequence
  Synthetic
ccaauguuaauauauauacagaa

SEQ ID NO: 445078 - RNA, 24 nt, Artificial Sequence
  Synthetic
uccaauguuaauauauauacagaa

SEQ ID NO: 445079 - RNA, 18 nt, Artificial Sequence
  Synthetic
aagaaauguuauacagaa

SEQ ID NO: 445080 - RNA, 19 nt, Artificial Sequence
  Synthetic
caagaaauguuauacagaa

SEQ ID NO: 445081 - RNA, 20 nt, Artificial Sequence
  Synthetic
ucaagaaauguuauacagaa

SEQ ID NO: 445082 - RNA, 21 nt, Artificial Sequence
  Synthetic
gucaagaaauguuauacagaa

SEQ ID NO: 445083 - RNA, 22 nt, Artificial Sequence
  Synthetic
agucaagaaauguuauacagaa

SEQ ID NO: 445084 - RNA, 23 nt, Artificial Sequence
  Synthetic
cagucaagaaauguuauacagaa

SEQ ID NO: 445085 - RNA, 24 nt, Artificial Sequence
  Synthetic
acagucaagaaauguuauacagaa

SEQ ID NO: 445086 - RNA, 18 nt, Artificial Sequence
  Synthetic
aacaggcagccuacagaa

SEQ ID NO: 445087 - RNA, 19 nt, Artificial Sequence
  Synthetic
gaacaggcagccuacagaa

SEQ ID NO: 445088 - RNA, 20 nt, Artificial Sequence
  Synthetic
ugaacaggcagccuacagaa

SEQ ID NO: 445089 - RNA, 21 nt, Artificial Sequence
  Synthetic
gugaacaggcagccuacagaa

SEQ ID NO: 445090 - RNA, 22 nt, Artificial Sequence
  Synthetic
agugaacaggcagccuacagaa

SEQ ID NO: 445091 - RNA, 23 nt, Artificial Sequence
  Synthetic
gagugaacaggcagccuacagaa

SEQ ID NO: 445092 - RNA, 24 nt, Artificial Sequence
  Synthetic
agagugaacaggcagccuacagaa

SEQ ID NO: 445093 - RNA, 18 nt, Artificial Sequence
  Synthetic
guagacuaggcuacagaa

SEQ ID NO: 445094 - RNA, 19 nt, Artificial Sequence
  Synthetic
gguagacuaggcuacagaa

SEQ ID NO: 445095 - RNA, 20 nt, Artificial Sequence
  Synthetic
ugguagacuaggcuacagaa

SEQ ID NO: 445096 - RNA, 21 nt, Artificial Sequence
  Synthetic
augguagacuaggcuacagaa

SEQ ID NO: 445097 - RNA, 22 nt, Artificial Sequence
  Synthetic
aaugguagacuaggcuacagaa

SEQ ID NO: 445098 - RNA, 23 nt, Artificial Sequence
  Synthetic
caaugguagacuaggcuacagaa

SEQ ID NO: 445099 - RNA, 24 nt, Artificial Sequence
  Synthetic
ucaaugguagacuaggcuacagaa

SEQ ID NO: 445100 - RNA, 18 nt, Artificial Sequence
  Synthetic
uuguuacaaaguacagaa

SEQ ID NO: 445101 - RNA, 19 nt, Artificial Sequence
  Synthetic
guuguuacaaaguacagaa

SEQ ID NO: 445102 - RNA, 20 nt, Artificial Sequence
  Synthetic
uguuguuacaaaguacagaa

SEQ ID NO: 445103 - RNA, 21 nt, Artificial Sequence
  Synthetic
cuguuguuacaaaguacagaa

SEQ ID NO: 445104 - RNA, 22 nt, Artificial Sequence
  Synthetic
acuguuguuacaaaguacagaa

SEQ ID NO: 445105 - RNA, 23 nt, Artificial Sequence
  Synthetic
aacuguuguuacaaaguacagaa

SEQ ID NO: 445106 - RNA, 24 nt, Artificial Sequence
  Synthetic
aaacuguuguuacaaaguacagaa

SEQ ID NO: 445107 - RNA, 18 nt, Artificial Sequence
  Synthetic
aaguccuuuuguacagaa

SEQ ID NO: 445108 - RNA, 19 nt, Artificial Sequence
  Synthetic
uaaguccuuuuguacagaa

SEQ ID NO: 445109 - RNA, 20 nt, Artificial Sequence
  Synthetic
uuaaguccuuuuguacagaa

SEQ ID NO: 445110 - RNA, 21 nt, Artificial Sequence
  Synthetic
uuuaaguccuuuuguacagaa

SEQ ID NO: 445111 - RNA, 22 nt, Artificial Sequence
  Synthetic
auuuaaguccuuuuguacagaa

SEQ ID NO: 445112 - RNA, 23 nt, Artificial Sequence
  Synthetic
gauuuaaguccuuuuguacagaa

SEQ ID NO: 445113 - RNA, 24 nt, Artificial Sequence
  Synthetic
ggauuuaaguccuuuuguacagaa

SEQ ID NO: 445114 - RNA, 18 nt, Artificial Sequence
  Synthetic
ugaggguaaaaaccagaa

SEQ ID NO: 445115 - RNA, 19 nt, Artificial Sequence
  Synthetic
uugaggguaaaaaccagaa

SEQ ID NO: 445116 - RNA, 20 nt, Artificial Sequence
  Synthetic
cuugaggguaaaaaccagaa

SEQ ID NO: 445117 - RNA, 21 nt, Artificial Sequence
  Synthetic
ucuugaggguaaaaaccagaa

SEQ ID NO: 445118 - RNA, 22 nt, Artificial Sequence
  Synthetic
aucuugaggguaaaaaccagaa

SEQ ID NO: 445119 - RNA, 23 nt, Artificial Sequence
  Synthetic
gaucuugaggguaaaaaccagaa

SEQ ID NO: 445120 - RNA, 24 nt, Artificial Sequence
  Synthetic
agaucuugaggguaaaaaccagaa

SEQ ID NO: 445121 - RNA, 18 nt, Artificial Sequence
  Synthetic
cuaauaccaaaaccagaa

SEQ ID NO: 445122 - RNA, 19 nt, Artificial Sequence
  Synthetic
ccuaauaccaaaaccagaa

SEQ ID NO: 445123 - RNA, 20 nt, Artificial Sequence
  Synthetic
cccuaauaccaaaaccagaa

SEQ ID NO: 445124 - RNA, 21 nt, Artificial Sequence
  Synthetic
acccuaauaccaaaaccagaa

SEQ ID NO: 445125 - RNA, 22 nt, Artificial Sequence
  Synthetic
cacccuaauaccaaaaccagaa

SEQ ID NO: 445126 - RNA, 23 nt, Artificial Sequence
  Synthetic
ucacccuaauaccaaaaccagaa

SEQ ID NO: 445127 - RNA, 24 nt, Artificial Sequence
  Synthetic
aucacccuaauaccaaaaccagaa

SEQ ID NO: 445128 - RNA, 18 nt, Artificial Sequence
  Synthetic
auucuccuaauaccagaa

SEQ ID NO: 445129 - RNA, 19 nt, Artificial Sequence
  Synthetic
aauucuccuaauaccagaa

SEQ ID NO: 445130 - RNA, 20 nt, Artificial Sequence
  Synthetic
uaauucuccuaauaccagaa

SEQ ID NO: 445131 - RNA, 21 nt, Artificial Sequence
  Synthetic
cuaauucuccuaauaccagaa

SEQ ID NO: 445132 - RNA, 22 nt, Artificial Sequence
  Synthetic
ucuaauucuccuaauaccagaa

SEQ ID NO: 445133 - RNA, 23 nt, Artificial Sequence
  Synthetic
aucuaauucuccuaauaccagaa

SEQ ID NO: 445134 - RNA, 24 nt, Artificial Sequence
  Synthetic
uaucuaauucuccuaauaccagaa

SEQ ID NO: 445135 - RNA, 18 nt, Artificial Sequence
  Synthetic
uuggguauauacccagaa

SEQ ID NO: 445136 - RNA, 19 nt, Artificial Sequence
  Synthetic
uuuggguauauacccagaa

SEQ ID NO: 445137 - RNA, 20 nt, Artificial Sequence
  Synthetic
uuuuggguauauacccagaa

SEQ ID NO: 445138 - RNA, 21 nt, Artificial Sequence
  Synthetic
auuuuggguauauacccagaa

SEQ ID NO: 445139 - RNA, 22 nt, Artificial Sequence
  Synthetic
uauuuuggguauauacccagaa

SEQ ID NO: 445140 - RNA, 23 nt, Artificial Sequence
  Synthetic
uuauuuuggguauauacccagaa

SEQ ID NO: 445141 - RNA, 24 nt, Artificial Sequence
  Synthetic
auuauuuuggguauauacccagaa

SEQ ID NO: 445142 - RNA, 18 nt, Artificial Sequence
  Synthetic
uaaguuccagccccagaa

SEQ ID NO: 445143 - RNA, 19 nt, Artificial Sequence
  Synthetic
uuaaguuccagccccagaa

SEQ ID NO: 445144 - RNA, 20 nt, Artificial Sequence
  Synthetic
guuaaguuccagccccagaa

SEQ ID NO: 445145 - RNA, 21 nt, Artificial Sequence
  Synthetic
cguuaaguuccagccccagaa

SEQ ID NO: 445146 - RNA, 22 nt, Artificial Sequence
  Synthetic
acguuaaguuccagccccagaa

SEQ ID NO: 445147 - RNA, 23 nt, Artificial Sequence
  Synthetic
gacguuaaguuccagccccagaa

SEQ ID NO: 445148 - RNA, 24 nt, Artificial Sequence
  Synthetic
ugacguuaaguuccagccccagaa

SEQ ID NO: 445149 - RNA, 18 nt, Artificial Sequence
  Synthetic
agacugaaguccccagaa

SEQ ID NO: 445150 - RNA, 19 nt, Artificial Sequence
  Synthetic
aagacugaaguccccagaa

SEQ ID NO: 445151 - RNA, 20 nt, Artificial Sequence
  Synthetic
aaagacugaaguccccagaa

SEQ ID NO: 445152 - RNA, 21 nt, Artificial Sequence
  Synthetic
aaaagacugaaguccccagaa

SEQ ID NO: 445153 - RNA, 22 nt, Artificial Sequence
  Synthetic
gaaaagacugaaguccccagaa

SEQ ID NO: 445154 - RNA, 23 nt, Artificial Sequence
  Synthetic
agaaaagacugaaguccccagaa

SEQ ID NO: 445155 - RNA, 24 nt, Artificial Sequence
  Synthetic
gagaaaagacugaaguccccagaa

SEQ ID NO: 445156 - RNA, 18 nt, Artificial Sequence
  Synthetic
augaaaagaagcccagaa

SEQ ID NO: 445157 - RNA, 19 nt, Artificial Sequence
  Synthetic
aaugaaaagaagcccagaa

SEQ ID NO: 445158 - RNA, 20 nt, Artificial Sequence
  Synthetic
aaaugaaaagaagcccagaa

SEQ ID NO: 445159 - RNA, 21 nt, Artificial Sequence
  Synthetic
caaaugaaaagaagcccagaa

SEQ ID NO: 445160 - RNA, 22 nt, Artificial Sequence
  Synthetic
ccaaaugaaaagaagcccagaa

SEQ ID NO: 445161 - RNA, 23 nt, Artificial Sequence
  Synthetic
uccaaaugaaaagaagcccagaa

SEQ ID NO: 445162 - RNA, 24 nt, Artificial Sequence
  Synthetic
uuccaaaugaaaagaagcccagaa

SEQ ID NO: 445163 - RNA, 18 nt, Artificial Sequence
  Synthetic
uauaggggaaagccagaa

SEQ ID NO: 445164 - RNA, 19 nt, Artificial Sequence
  Synthetic
auauaggggaaagccagaa

SEQ ID NO: 445165 - RNA, 20 nt, Artificial Sequence
  Synthetic
uauauaggggaaagccagaa

SEQ ID NO: 445166 - RNA, 21 nt, Artificial Sequence
  Synthetic
auauauaggggaaagccagaa

SEQ ID NO: 445167 - RNA, 22 nt, Artificial Sequence
  Synthetic
gauauauaggggaaagccagaa

SEQ ID NO: 445168 - RNA, 23 nt, Artificial Sequence
  Synthetic
ugauauauaggggaaagccagaa

SEQ ID NO: 445169 - RNA, 24 nt, Artificial Sequence
  Synthetic
cugauauauaggggaaagccagaa

SEQ ID NO: 445170 - RNA, 18 nt, Artificial Sequence
  Synthetic
gugaggaaacagccagaa

SEQ ID NO: 445171 - RNA, 19 nt, Artificial Sequence
  Synthetic
agugaggaaacagccagaa

SEQ ID NO: 445172 - RNA, 20 nt, Artificial Sequence
  Synthetic
uagugaggaaacagccagaa

SEQ ID NO: 445173 - RNA, 21 nt, Artificial Sequence
  Synthetic
cuagugaggaaacagccagaa

SEQ ID NO: 445174 - RNA, 22 nt, Artificial Sequence
  Synthetic
ccuagugaggaaacagccagaa

SEQ ID NO: 445175 - RNA, 23 nt, Artificial Sequence
  Synthetic
accuagugaggaaacagccagaa

SEQ ID NO: 445176 - RNA, 24 nt, Artificial Sequence
  Synthetic
gaccuagugaggaaacagccagaa

SEQ ID NO: 445177 - RNA, 18 nt, Artificial Sequence
  Synthetic
acaaaugguaggccagaa

SEQ ID NO: 445178 - RNA, 19 nt, Artificial Sequence
  Synthetic
aacaaaugguaggccagaa

SEQ ID NO: 445179 - RNA, 20 nt, Artificial Sequence
  Synthetic
caacaaaugguaggccagaa

SEQ ID NO: 445180 - RNA, 21 nt, Artificial Sequence
  Synthetic
ucaacaaaugguaggccagaa

SEQ ID NO: 445181 - RNA, 22 nt, Artificial Sequence
  Synthetic
aucaacaaaugguaggccagaa

SEQ ID NO: 445182 - RNA, 23 nt, Artificial Sequence
  Synthetic
gaucaacaaaugguaggccagaa

SEQ ID NO: 445183 - RNA, 24 nt, Artificial Sequence
  Synthetic
ugaucaacaaaugguaggccagaa

SEQ ID NO: 445184 - RNA, 18 nt, Artificial Sequence
  Synthetic
ucuuccugcuggccagaa

SEQ ID NO: 445185 - RNA, 19 nt, Artificial Sequence
  Synthetic
cucuuccugcuggccagaa

SEQ ID NO: 445186 - RNA, 20 nt, Artificial Sequence
  Synthetic
ucucuuccugcuggccagaa

SEQ ID NO: 445187 - RNA, 21 nt, Artificial Sequence
  Synthetic
gucucuuccugcuggccagaa

SEQ ID NO: 445188 - RNA, 22 nt, Artificial Sequence
  Synthetic
ggucucuuccugcuggccagaa

SEQ ID NO: 445189 - RNA, 23 nt, Artificial Sequence
  Synthetic
uggucucuuccugcuggccagaa

SEQ ID NO: 445190 - RNA, 24 nt, Artificial Sequence
  Synthetic
uuggucucuuccugcuggccagaa

SEQ ID NO: 445191 - RNA, 18 nt, Artificial Sequence
  Synthetic
auuucccuguugccagaa

SEQ ID NO: 445192 - RNA, 19 nt, Artificial Sequence
  Synthetic
aauuucccuguugccagaa

SEQ ID NO: 445193 - RNA, 20 nt, Artificial Sequence
  Synthetic
aaauuucccuguugccagaa

SEQ ID NO: 445194 - RNA, 21 nt, Artificial Sequence
  Synthetic
caaauuucccuguugccagaa

SEQ ID NO: 445195 - RNA, 22 nt, Artificial Sequence
  Synthetic
gcaaauuucccuguugccagaa

SEQ ID NO: 445196 - RNA, 23 nt, Artificial Sequence
  Synthetic
ugcaaauuucccuguugccagaa

SEQ ID NO: 445197 - RNA, 24 nt, Artificial Sequence
  Synthetic
cugcaaauuucccuguugccagaa

SEQ ID NO: 445198 - RNA, 18 nt, Artificial Sequence
  Synthetic
ugcucuaaaaauccagaa

SEQ ID NO: 445199 - RNA, 19 nt, Artificial Sequence
  Synthetic
cugcucuaaaaauccagaa

SEQ ID NO: 445200 - RNA, 20 nt, Artificial Sequence
  Synthetic
ucugcucuaaaaauccagaa

SEQ ID NO: 445201 - RNA, 21 nt, Artificial Sequence
  Synthetic
aucugcucuaaaaauccagaa

SEQ ID NO: 445202 - RNA, 22 nt, Artificial Sequence
  Synthetic
aaucugcucuaaaaauccagaa

SEQ ID NO: 445203 - RNA, 23 nt, Artificial Sequence
  Synthetic
aaaucugcucuaaaaauccagaa

SEQ ID NO: 445204 - RNA, 24 nt, Artificial Sequence
  Synthetic
aaaaucugcucuaaaaauccagaa

SEQ ID NO: 445205 - RNA, 18 nt, Artificial Sequence
  Synthetic
aggauucagaauccagaa

SEQ ID NO: 445206 - RNA, 19 nt, Artificial Sequence
  Synthetic
gaggauucagaauccagaa

SEQ ID NO: 445207 - RNA, 20 nt, Artificial Sequence
  Synthetic
ugaggauucagaauccagaa

SEQ ID NO: 445208 - RNA, 21 nt, Artificial Sequence
  Synthetic
augaggauucagaauccagaa

SEQ ID NO: 445209 - RNA, 22 nt, Artificial Sequence
  Synthetic
aaugaggauucagaauccagaa

SEQ ID NO: 445210 - RNA, 23 nt, Artificial Sequence
  Synthetic
uaaugaggauucagaauccagaa

SEQ ID NO: 445211 - RNA, 24 nt, Artificial Sequence
  Synthetic
cuaaugaggauucagaauccagaa

SEQ ID NO: 445212 - RNA, 18 nt, Artificial Sequence
  Synthetic
uaauuacaaaguccagaa

SEQ ID NO: 445213 - RNA, 19 nt, Artificial Sequence
  Synthetic
uuaauuacaaaguccagaa

SEQ ID NO: 445214 - RNA, 20 nt, Artificial Sequence
  Synthetic
guuaauuacaaaguccagaa

SEQ ID NO: 445215 - RNA, 21 nt, Artificial Sequence
  Synthetic
aguuaauuacaaaguccagaa

SEQ ID NO: 445216 - RNA, 22 nt, Artificial Sequence
  Synthetic
aaguuaauuacaaaguccagaa

SEQ ID NO: 445217 - RNA, 23 nt, Artificial Sequence
  Synthetic
aaaguuaauuacaaaguccagaa

SEQ ID NO: 445218 - RNA, 24 nt, Artificial Sequence
  Synthetic
uaaaguuaauuacaaaguccagaa

SEQ ID NO: 445219 - RNA, 18 nt, Artificial Sequence
  Synthetic
ccuuaaguaguuccagaa

SEQ ID NO: 445220 - RNA, 19 nt, Artificial Sequence
  Synthetic
uccuuaaguaguuccagaa

SEQ ID NO: 445221 - RNA, 20 nt, Artificial Sequence
  Synthetic
guccuuaaguaguuccagaa

SEQ ID NO: 445222 - RNA, 21 nt, Artificial Sequence
  Synthetic
aguccuuaaguaguuccagaa

SEQ ID NO: 445223 - RNA, 22 nt, Artificial Sequence
  Synthetic
caguccuuaaguaguuccagaa

SEQ ID NO: 445224 - RNA, 23 nt, Artificial Sequence
  Synthetic
acaguccuuaaguaguuccagaa

SEQ ID NO: 445225 - RNA, 24 nt, Artificial Sequence
  Synthetic
aacaguccuuaaguaguuccagaa

SEQ ID NO: 445226 - RNA, 18 nt, Artificial Sequence
  Synthetic
aaacauuauguuccagaa

SEQ ID NO: 445227 - RNA, 19 nt, Artificial Sequence
  Synthetic
caaacauuauguuccagaa

SEQ ID NO: 445228 - RNA, 20 nt, Artificial Sequence
  Synthetic
ucaaacauuauguuccagaa

SEQ ID NO: 445229 - RNA, 21 nt, Artificial Sequence
  Synthetic
uucaaacauuauguuccagaa

SEQ ID NO: 445230 - RNA, 22 nt, Artificial Sequence
  Synthetic
guucaaacauuauguuccagaa

SEQ ID NO: 445231 - RNA, 23 nt, Artificial Sequence
  Synthetic
aguucaaacauuauguuccagaa

SEQ ID NO: 445232 - RNA, 24 nt, Artificial Sequence
  Synthetic
caguucaaacauuauguuccagaa

SEQ ID NO: 445233 - RNA, 18 nt, Artificial Sequence
  Synthetic
acuucacauuuuccagaa

SEQ ID NO: 445234 - RNA, 19 nt, Artificial Sequence
  Synthetic
cacuucacauuuuccagaa

SEQ ID NO: 445235 - RNA, 20 nt, Artificial Sequence
  Synthetic
acacuucacauuuuccagaa

SEQ ID NO: 445236 - RNA, 21 nt, Artificial Sequence
  Synthetic
uacacuucacauuuuccagaa

SEQ ID NO: 445237 - RNA, 22 nt, Artificial Sequence
  Synthetic
auacacuucacauuuuccagaa

SEQ ID NO: 445238 - RNA, 23 nt, Artificial Sequence
  Synthetic
cauacacuucacauuuuccagaa

SEQ ID NO: 445239 - RNA, 24 nt, Artificial Sequence
  Synthetic
ucauacacuucacauuuuccagaa

SEQ ID NO: 445240 - RNA, 18 nt, Artificial Sequence
  Synthetic
ucuauucauuuuccagaa

SEQ ID NO: 445241 - RNA, 19 nt, Artificial Sequence
  Synthetic
aucuauucauuuuccagaa

SEQ ID NO: 445242 - RNA, 20 nt, Artificial Sequence
  Synthetic
aaucuauucauuuuccagaa

SEQ ID NO: 445243 - RNA, 21 nt, Artificial Sequence
  Synthetic
uaaucuauucauuuuccagaa

SEQ ID NO: 445244 - RNA, 22 nt, Artificial Sequence
  Synthetic
uuaaucuauucauuuuccagaa

SEQ ID NO: 445245 - RNA, 23 nt, Artificial Sequence
  Synthetic
guuaaucuauucauuuuccagaa

SEQ ID NO: 445246 - RNA, 24 nt, Artificial Sequence
  Synthetic
aguuaaucuauucauuuuccagaa

SEQ ID NO: 445247 - RNA, 18 nt, Artificial Sequence
  Synthetic
ugauuuuaaaaagcagaa

SEQ ID NO: 445248 - RNA, 19 nt, Artificial Sequence
  Synthetic
augauuuuaaaaagcagaa

SEQ ID NO: 445249 - RNA, 20 nt, Artificial Sequence
  Synthetic
caugauuuuaaaaagcagaa

SEQ ID NO: 445250 - RNA, 21 nt, Artificial Sequence
  Synthetic
ucaugauuuuaaaaagcagaa

SEQ ID NO: 445251 - RNA, 22 nt, Artificial Sequence
  Synthetic
aucaugauuuuaaaaagcagaa

SEQ ID NO: 445252 - RNA, 23 nt, Artificial Sequence
  Synthetic
aaucaugauuuuaaaaagcagaa

SEQ ID NO: 445253 - RNA, 24 nt, Artificial Sequence
  Synthetic
aaaucaugauuuuaaaaagcagaa

SEQ ID NO: 445254 - RNA, 18 nt, Artificial Sequence
  Synthetic
uuuugaacagaagcagaa

SEQ ID NO: 445255 - RNA, 19 nt, Artificial Sequence
  Synthetic
guuuugaacagaagcagaa

SEQ ID NO: 445256 - RNA, 20 nt, Artificial Sequence
  Synthetic
gguuuugaacagaagcagaa

SEQ ID NO: 445257 - RNA, 21 nt, Artificial Sequence
  Synthetic
ggguuuugaacagaagcagaa

SEQ ID NO: 445258 - RNA, 22 nt, Artificial Sequence
  Synthetic
gggguuuugaacagaagcagaa

SEQ ID NO: 445259 - RNA, 23 nt, Artificial Sequence
  Synthetic
ggggguuuugaacagaagcagaa

SEQ ID NO: 445260 - RNA, 24 nt, Artificial Sequence
  Synthetic
uggggguuuugaacagaagcagaa

SEQ ID NO: 445261 - RNA, 18 nt, Artificial Sequence
  Synthetic
ucuuacauggaagcagaa

SEQ ID NO: 445262 - RNA, 19 nt, Artificial Sequence
  Synthetic
uucuuacauggaagcagaa

SEQ ID NO: 445263 - RNA, 20 nt, Artificial Sequence
  Synthetic
cuucuuacauggaagcagaa

SEQ ID NO: 445264 - RNA, 21 nt, Artificial Sequence
  Synthetic
acuucuuacauggaagcagaa

SEQ ID NO: 445265 - RNA, 22 nt, Artificial Sequence
  Synthetic
cacuucuuacauggaagcagaa

SEQ ID NO: 445266 - RNA, 23 nt, Artificial Sequence
  Synthetic
gcacuucuuacauggaagcagaa

SEQ ID NO: 445267 - RNA, 24 nt, Artificial Sequence
  Synthetic
ggcacuucuuacauggaagcagaa

SEQ ID NO: 445268 - RNA, 18 nt, Artificial Sequence
  Synthetic
uuccucaauucagcagaa

SEQ ID NO: 445269 - RNA, 19 nt, Artificial Sequence
  Synthetic
cuuccucaauucagcagaa

SEQ ID NO: 445270 - RNA, 20 nt, Artificial Sequence
  Synthetic
ucuuccucaauucagcagaa

SEQ ID NO: 445271 - RNA, 21 nt, Artificial Sequence
  Synthetic
aucuuccucaauucagcagaa

SEQ ID NO: 445272 - RNA, 22 nt, Artificial Sequence
  Synthetic
uaucuuccucaauucagcagaa

SEQ ID NO: 445273 - RNA, 23 nt, Artificial Sequence
  Synthetic
guaucuuccucaauucagcagaa

SEQ ID NO: 445274 - RNA, 24 nt, Artificial Sequence
  Synthetic
gguaucuuccucaauucagcagaa

SEQ ID NO: 445275 - RNA, 18 nt, Artificial Sequence
  Synthetic
acuaaaaucagagcagaa

SEQ ID NO: 445276 - RNA, 19 nt, Artificial Sequence
  Synthetic
aacuaaaaucagagcagaa

SEQ ID NO: 445277 - RNA, 20 nt, Artificial Sequence
  Synthetic
uaacuaaaaucagagcagaa

SEQ ID NO: 445278 - RNA, 21 nt, Artificial Sequence
  Synthetic
auaacuaaaaucagagcagaa

SEQ ID NO: 445279 - RNA, 22 nt, Artificial Sequence
  Synthetic
aauaacuaaaaucagagcagaa

SEQ ID NO: 445280 - RNA, 23 nt, Artificial Sequence
  Synthetic
aaauaacuaaaaucagagcagaa

SEQ ID NO: 445281 - RNA, 24 nt, Artificial Sequence
  Synthetic
gaaauaacuaaaaucagagcagaa

SEQ ID NO: 445282 - RNA, 18 nt, Artificial Sequence
  Synthetic
ucuuuuaguauagcagaa

SEQ ID NO: 445283 - RNA, 19 nt, Artificial Sequence
  Synthetic
gucuuuuaguauagcagaa

SEQ ID NO: 445284 - RNA, 20 nt, Artificial Sequence
  Synthetic
ggucuuuuaguauagcagaa

SEQ ID NO: 445285 - RNA, 21 nt, Artificial Sequence
  Synthetic
uggucuuuuaguauagcagaa

SEQ ID NO: 445286 - RNA, 22 nt, Artificial Sequence
  Synthetic
guggucuuuuaguauagcagaa

SEQ ID NO: 445287 - RNA, 23 nt, Artificial Sequence
  Synthetic
aguggucuuuuaguauagcagaa

SEQ ID NO: 445288 - RNA, 24 nt, Artificial Sequence
  Synthetic
uaguggucuuuuaguauagcagaa

SEQ ID NO: 445289 - RNA, 18 nt, Artificial Sequence
  Synthetic
acugagccacuagcagaa

SEQ ID NO: 445290 - RNA, 19 nt, Artificial Sequence
  Synthetic
uacugagccacuagcagaa

SEQ ID NO: 445291 - RNA, 20 nt, Artificial Sequence
  Synthetic
guacugagccacuagcagaa

SEQ ID NO: 445292 - RNA, 21 nt, Artificial Sequence
  Synthetic
gguacugagccacuagcagaa

SEQ ID NO: 445293 - RNA, 22 nt, Artificial Sequence
  Synthetic
ggguacugagccacuagcagaa

SEQ ID NO: 445294 - RNA, 23 nt, Artificial Sequence
  Synthetic
uggguacugagccacuagcagaa

SEQ ID NO: 445295 - RNA, 24 nt, Artificial Sequence
  Synthetic
uuggguacugagccacuagcagaa

SEQ ID NO: 445296 - RNA, 18 nt, Artificial Sequence
  Synthetic
acaccuuuaaacgcagaa

SEQ ID NO: 445297 - RNA, 19 nt, Artificial Sequence
  Synthetic
aacaccuuuaaacgcagaa

SEQ ID NO: 445298 - RNA, 20 nt, Artificial Sequence
  Synthetic
aaacaccuuuaaacgcagaa

SEQ ID NO: 445299 - RNA, 21 nt, Artificial Sequence
  Synthetic
aaaacaccuuuaaacgcagaa

SEQ ID NO: 445300 - RNA, 22 nt, Artificial Sequence
  Synthetic
aaaaacaccuuuaaacgcagaa

SEQ ID NO: 445301 - RNA, 23 nt, Artificial Sequence
  Synthetic
aaaaaacaccuuuaaacgcagaa

SEQ ID NO: 445302 - RNA, 24 nt, Artificial Sequence
  Synthetic
uaaaaaacaccuuuaaacgcagaa

SEQ ID NO: 445303 - RNA, 18 nt, Artificial Sequence
  Synthetic
uaagagggacacgcagaa

SEQ ID NO: 445304 - RNA, 19 nt, Artificial Sequence
  Synthetic
auaagagggacacgcagaa

SEQ ID NO: 445305 - RNA, 20 nt, Artificial Sequence
  Synthetic
cauaagagggacacgcagaa

SEQ ID NO: 445306 - RNA, 21 nt, Artificial Sequence
  Synthetic
acauaagagggacacgcagaa

SEQ ID NO: 445307 - RNA, 22 nt, Artificial Sequence
  Synthetic
cacauaagagggacacgcagaa

SEQ ID NO: 445308 - RNA, 23 nt, Artificial Sequence
  Synthetic
ccacauaagagggacacgcagaa

SEQ ID NO: 445309 - RNA, 24 nt, Artificial Sequence
  Synthetic
cccacauaagagggacacgcagaa

SEQ ID NO: 445310 - RNA, 18 nt, Artificial Sequence
  Synthetic
auuuccuuauccgcagaa

SEQ ID NO: 445311 - RNA, 19 nt, Artificial Sequence
  Synthetic
uauuuccuuauccgcagaa

SEQ ID NO: 445312 - RNA, 20 nt, Artificial Sequence
  Synthetic
cuauuuccuuauccgcagaa

SEQ ID NO: 445313 - RNA, 21 nt, Artificial Sequence
  Synthetic
ucuauuuccuuauccgcagaa

SEQ ID NO: 445314 - RNA, 22 nt, Artificial Sequence
  Synthetic
aucuauuuccuuauccgcagaa

SEQ ID NO: 445315 - RNA, 23 nt, Artificial Sequence
  Synthetic
uaucuauuuccuuauccgcagaa

SEQ ID NO: 445316 - RNA, 24 nt, Artificial Sequence
  Synthetic
uuaucuauuuccuuauccgcagaa

SEQ ID NO: 445317 - RNA, 18 nt, Artificial Sequence
  Synthetic
agaaauacuaaggcagaa

SEQ ID NO: 445318 - RNA, 19 nt, Artificial Sequence
  Synthetic
uagaaauacuaaggcagaa

SEQ ID NO: 445319 - RNA, 20 nt, Artificial Sequence
  Synthetic
uuagaaauacuaaggcagaa

SEQ ID NO: 445320 - RNA, 21 nt, Artificial Sequence
  Synthetic
cuuagaaauacuaaggcagaa

SEQ ID NO: 445321 - RNA, 22 nt, Artificial Sequence
  Synthetic
acuuagaaauacuaaggcagaa

SEQ ID NO: 445322 - RNA, 23 nt, Artificial Sequence
  Synthetic
aacuuagaaauacuaaggcagaa

SEQ ID NO: 445323 - RNA, 24 nt, Artificial Sequence
  Synthetic
uaacuuagaaauacuaaggcagaa

SEQ ID NO: 445324 - RNA, 18 nt, Artificial Sequence
  Synthetic
aaagaaguuaaggcagaa

SEQ ID NO: 445325 - RNA, 19 nt, Artificial Sequence
  Synthetic
uaaagaaguuaaggcagaa

SEQ ID NO: 445326 - RNA, 20 nt, Artificial Sequence
  Synthetic
guaaagaaguuaaggcagaa

SEQ ID NO: 445327 - RNA, 21 nt, Artificial Sequence
  Synthetic
aguaaagaaguuaaggcagaa

SEQ ID NO: 445328 - RNA, 22 nt, Artificial Sequence
  Synthetic
gaguaaagaaguuaaggcagaa

SEQ ID NO: 445329 - RNA, 23 nt, Artificial Sequence
  Synthetic
ugaguaaagaaguuaaggcagaa

SEQ ID NO: 445330 - RNA, 24 nt, Artificial Sequence
  Synthetic
uugaguaaagaaguuaaggcagaa

SEQ ID NO: 445331 - RNA, 18 nt, Artificial Sequence
  Synthetic
gguggagcucaggcagaa

SEQ ID NO: 445332 - RNA, 19 nt, Artificial Sequence
  Synthetic
agguggagcucaggcagaa

SEQ ID NO: 445333 - RNA, 20 nt, Artificial Sequence
  Synthetic
gagguggagcucaggcagaa

SEQ ID NO: 445334 - RNA, 21 nt, Artificial Sequence
  Synthetic
ggagguggagcucaggcagaa

SEQ ID NO: 445335 - RNA, 22 nt, Artificial Sequence
  Synthetic
aggagguggagcucaggcagaa

SEQ ID NO: 445336 - RNA, 23 nt, Artificial Sequence
  Synthetic
caggagguggagcucaggcagaa

SEQ ID NO: 445337 - RNA, 24 nt, Artificial Sequence
  Synthetic
acaggagguggagcucaggcagaa

SEQ ID NO: 445338 - RNA, 18 nt, Artificial Sequence
  Synthetic
gacugaaaaggggcagaa

SEQ ID NO: 445339 - RNA, 19 nt, Artificial Sequence
  Synthetic
agacugaaaaggggcagaa

SEQ ID NO: 445340 - RNA, 20 nt, Artificial Sequence
  Synthetic
gagacugaaaaggggcagaa

SEQ ID NO: 445341 - RNA, 21 nt, Artificial Sequence
  Synthetic
agagacugaaaaggggcagaa

SEQ ID NO: 445342 - RNA, 22 nt, Artificial Sequence
  Synthetic
gagagacugaaaaggggcagaa

SEQ ID NO: 445343 - RNA, 23 nt, Artificial Sequence
  Synthetic
ggagagacugaaaaggggcagaa

SEQ ID NO: 445344 - RNA, 24 nt, Artificial Sequence
  Synthetic
cggagagacugaaaaggggcagaa

SEQ ID NO: 445345 - RNA, 18 nt, Artificial Sequence
  Synthetic
ucacugauuggggcagaa

SEQ ID NO: 445346 - RNA, 19 nt, Artificial Sequence
  Synthetic
uucacugauuggggcagaa

SEQ ID NO: 445347 - RNA, 20 nt, Artificial Sequence
  Synthetic
guucacugauuggggcagaa

SEQ ID NO: 445348 - RNA, 21 nt, Artificial Sequence
  Synthetic
gguucacugauuggggcagaa

SEQ ID NO: 445349 - RNA, 22 nt, Artificial Sequence
  Synthetic
agguucacugauuggggcagaa

SEQ ID NO: 445350 - RNA, 23 nt, Artificial Sequence
  Synthetic
aagguucacugauuggggcagaa

SEQ ID NO: 445351 - RNA, 24 nt, Artificial Sequence
  Synthetic
gaagguucacugauuggggcagaa

SEQ ID NO: 445352 - RNA, 18 nt, Artificial Sequence
  Synthetic
acuugauaacuggcagaa

SEQ ID NO: 445353 - RNA, 19 nt, Artificial Sequence
  Synthetic
gacuugauaacuggcagaa

SEQ ID NO: 445354 - RNA, 20 nt, Artificial Sequence
  Synthetic
agacuugauaacuggcagaa

SEQ ID NO: 445355 - RNA, 21 nt, Artificial Sequence
  Synthetic
aagacuugauaacuggcagaa

SEQ ID NO: 445356 - RNA, 22 nt, Artificial Sequence
  Synthetic
aaagacuugauaacuggcagaa

SEQ ID NO: 445357 - RNA, 23 nt, Artificial Sequence
  Synthetic
uaaagacuugauaacuggcagaa

SEQ ID NO: 445358 - RNA, 24 nt, Artificial Sequence
  Synthetic
guaaagacuugauaacuggcagaa

SEQ ID NO: 445359 - RNA, 18 nt, Artificial Sequence
  Synthetic
gaggagucaguggcagaa

SEQ ID NO: 445360 - RNA, 19 nt, Artificial Sequence
  Synthetic
ggaggagucaguggcagaa

SEQ ID NO: 445361 - RNA, 20 nt, Artificial Sequence
  Synthetic
aggaggagucaguggcagaa

SEQ ID NO: 445362 - RNA, 21 nt, Artificial Sequence
  Synthetic
gaggaggagucaguggcagaa

SEQ ID NO: 445363 - RNA, 22 nt, Artificial Sequence
  Synthetic
ugaggaggagucaguggcagaa

SEQ ID NO: 445364 - RNA, 23 nt, Artificial Sequence
  Synthetic
uugaggaggagucaguggcagaa

SEQ ID NO: 445365 - RNA, 24 nt, Artificial Sequence
  Synthetic
auugaggaggagucaguggcagaa

SEQ ID NO: 445366 - RNA, 18 nt, Artificial Sequence
  Synthetic
ucauugaaaacugcagaa

SEQ ID NO: 445367 - RNA, 19 nt, Artificial Sequence
  Synthetic
gucauugaaaacugcagaa

SEQ ID NO: 445368 - RNA, 20 nt, Artificial Sequence
  Synthetic
cgucauugaaaacugcagaa

SEQ ID NO: 445369 - RNA, 21 nt, Artificial Sequence
  Synthetic
acgucauugaaaacugcagaa

SEQ ID NO: 445370 - RNA, 22 nt, Artificial Sequence
  Synthetic
cacgucauugaaaacugcagaa

SEQ ID NO: 445371 - RNA, 23 nt, Artificial Sequence
  Synthetic
ucacgucauugaaaacugcagaa

SEQ ID NO: 445372 - RNA, 24 nt, Artificial Sequence
  Synthetic
uucacgucauugaaaacugcagaa

SEQ ID NO: 445373 - RNA, 18 nt, Artificial Sequence
  Synthetic
auaggccaagcugcagaa

SEQ ID NO: 445374 - RNA, 19 nt, Artificial Sequence
  Synthetic
uauaggccaagcugcagaa

SEQ ID NO: 445375 - RNA, 20 nt, Artificial Sequence
  Synthetic
cuauaggccaagcugcagaa

SEQ ID NO: 445376 - RNA, 21 nt, Artificial Sequence
  Synthetic
ucuauaggccaagcugcagaa

SEQ ID NO: 445377 - RNA, 22 nt, Artificial Sequence
  Synthetic
aucuauaggccaagcugcagaa

SEQ ID NO: 445378 - RNA, 23 nt, Artificial Sequence
  Synthetic
aaucuauaggccaagcugcagaa

SEQ ID NO: 445379 - RNA, 24 nt, Artificial Sequence
  Synthetic
gaaucuauaggccaagcugcagaa

SEQ ID NO: 445380 - RNA, 18 nt, Artificial Sequence
  Synthetic
uacuaggucagugcagaa

SEQ ID NO: 445381 - RNA, 19 nt, Artificial Sequence
  Synthetic
cuacuaggucagugcagaa

SEQ ID NO: 445382 - RNA, 20 nt, Artificial Sequence
  Synthetic
ucuacuaggucagugcagaa

SEQ ID NO: 445383 - RNA, 21 nt, Artificial Sequence
  Synthetic
cucuacuaggucagugcagaa

SEQ ID NO: 445384 - RNA, 22 nt, Artificial Sequence
  Synthetic
ccucuacuaggucagugcagaa

SEQ ID NO: 445385 - RNA, 23 nt, Artificial Sequence
  Synthetic
accucuacuaggucagugcagaa

SEQ ID NO: 445386 - RNA, 24 nt, Artificial Sequence
  Synthetic
aaccucuacuaggucagugcagaa

SEQ ID NO: 445387 - RNA, 18 nt, Artificial Sequence
  Synthetic
aaacaaguuugugcagaa

SEQ ID NO: 445388 - RNA, 19 nt, Artificial Sequence
  Synthetic
uaaacaaguuugugcagaa

SEQ ID NO: 445389 - RNA, 20 nt, Artificial Sequence
  Synthetic
uuaaacaaguuugugcagaa

SEQ ID NO: 445390 - RNA, 21 nt, Artificial Sequence
  Synthetic
cuuaaacaaguuugugcagaa

SEQ ID NO: 445391 - RNA, 22 nt, Artificial Sequence
  Synthetic
ucuuaaacaaguuugugcagaa

SEQ ID NO: 445392 - RNA, 23 nt, Artificial Sequence
  Synthetic
uucuuaaacaaguuugugcagaa

SEQ ID NO: 445393 - RNA, 24 nt, Artificial Sequence
  Synthetic
uuucuuaaacaaguuugugcagaa

SEQ ID NO: 445394 - RNA, 18 nt, Artificial Sequence
  Synthetic
aaugaaaauauugcagaa

SEQ ID NO: 445395 - RNA, 19 nt, Artificial Sequence
  Synthetic
gaaugaaaauauugcagaa

SEQ ID NO: 445396 - RNA, 20 nt, Artificial Sequence
  Synthetic
agaaugaaaauauugcagaa

SEQ ID NO: 445397 - RNA, 21 nt, Artificial Sequence
  Synthetic
uagaaugaaaauauugcagaa

SEQ ID NO: 445398 - RNA, 22 nt, Artificial Sequence
  Synthetic
cuagaaugaaaauauugcagaa

SEQ ID NO: 445399 - RNA, 23 nt, Artificial Sequence
  Synthetic
ucuagaaugaaaauauugcagaa

SEQ ID NO: 445400 - RNA, 24 nt, Artificial Sequence
  Synthetic
uucuagaaugaaaauauugcagaa

SEQ ID NO: 445401 - RNA, 18 nt, Artificial Sequence
  Synthetic
auuuugguauuugcagaa

SEQ ID NO: 445402 - RNA, 19 nt, Artificial Sequence
  Synthetic
uauuuugguauuugcagaa

SEQ ID NO: 445403 - RNA, 20 nt, Artificial Sequence
  Synthetic
cuauuuugguauuugcagaa

SEQ ID NO: 445404 - RNA, 21 nt, Artificial Sequence
  Synthetic
acuauuuugguauuugcagaa

SEQ ID NO: 445405 - RNA, 22 nt, Artificial Sequence
  Synthetic
gacuauuuugguauuugcagaa

SEQ ID NO: 445406 - RNA, 23 nt, Artificial Sequence
  Synthetic
ugacuauuuugguauuugcagaa

SEQ ID NO: 445407 - RNA, 24 nt, Artificial Sequence
  Synthetic
uugacuauuuugguauuugcagaa

SEQ ID NO: 445408 - RNA, 18 nt, Artificial Sequence
  Synthetic
aaauaaguaaaaucagaa

SEQ ID NO: 445409 - RNA, 19 nt, Artificial Sequence
  Synthetic
caaauaaguaaaaucagaa

SEQ ID NO: 445410 - RNA, 20 nt, Artificial Sequence
  Synthetic
ccaaauaaguaaaaucagaa

SEQ ID NO: 445411 - RNA, 21 nt, Artificial Sequence
  Synthetic
cccaaauaaguaaaaucagaa

SEQ ID NO: 445412 - RNA, 22 nt, Artificial Sequence
  Synthetic
acccaaauaaguaaaaucagaa

SEQ ID NO: 445413 - RNA, 23 nt, Artificial Sequence
  Synthetic
gacccaaauaaguaaaaucagaa

SEQ ID NO: 445414 - RNA, 24 nt, Artificial Sequence
  Synthetic
agacccaaauaaguaaaaucagaa

SEQ ID NO: 445415 - RNA, 20 nt, Artificial Sequence
  Synthetic
ucaaauaaguaaaaucagaa

SEQ ID NO: 445416 - RNA, 21 nt, Artificial Sequence
  Synthetic
uucaaauaaguaaaaucagaa

SEQ ID NO: 445417 - RNA, 22 nt, Artificial Sequence
  Synthetic
auucaaauaaguaaaaucagaa

SEQ ID NO: 445418 - RNA, 23 nt, Artificial Sequence
  Synthetic
aauucaaauaaguaaaaucagaa

SEQ ID NO: 445419 - RNA, 24 nt, Artificial Sequence
  Synthetic
aaauucaaauaaguaaaaucagaa

SEQ ID NO: 445420 - RNA, 18 nt, Artificial Sequence
  Synthetic
aacaccuaagaaucagaa

SEQ ID NO: 445421 - RNA, 19 nt, Artificial Sequence
  Synthetic
gaacaccuaagaaucagaa

SEQ ID NO: 445422 - RNA, 20 nt, Artificial Sequence
  Synthetic
ggaacaccuaagaaucagaa

SEQ ID NO: 445423 - RNA, 21 nt, Artificial Sequence
  Synthetic
aggaacaccuaagaaucagaa

SEQ ID NO: 445424 - RNA, 22 nt, Artificial Sequence
  Synthetic
aaggaacaccuaagaaucagaa

SEQ ID NO: 445425 - RNA, 23 nt, Artificial Sequence
  Synthetic
uaaggaacaccuaagaaucagaa

SEQ ID NO: 445426 - RNA, 24 nt, Artificial Sequence
  Synthetic
auaaggaacaccuaagaaucagaa

SEQ ID NO: 445427 - RNA, 18 nt, Artificial Sequence
  Synthetic
agauuugcauaaucagaa

SEQ ID NO: 445428 - RNA, 19 nt, Artificial Sequence
  Synthetic
gagauuugcauaaucagaa

SEQ ID NO: 445429 - RNA, 20 nt, Artificial Sequence
  Synthetic
agagauuugcauaaucagaa

SEQ ID NO: 445430 - RNA, 21 nt, Artificial Sequence
  Synthetic
gagagauuugcauaaucagaa

SEQ ID NO: 445431 - RNA, 22 nt, Artificial Sequence
  Synthetic
ugagagauuugcauaaucagaa

SEQ ID NO: 445432 - RNA, 23 nt, Artificial Sequence
  Synthetic
gugagagauuugcauaaucagaa

SEQ ID NO: 445433 - RNA, 24 nt, Artificial Sequence
  Synthetic
ggugagagauuugcauaaucagaa

SEQ ID NO: 445434 - RNA, 18 nt, Artificial Sequence
  Synthetic
aaaguuuggccaucagaa

SEQ ID NO: 445435 - RNA, 19 nt, Artificial Sequence
  Synthetic
caaaguuuggccaucagaa

SEQ ID NO: 445436 - RNA, 20 nt, Artificial Sequence
  Synthetic
acaaaguuuggccaucagaa

SEQ ID NO: 445437 - RNA, 21 nt, Artificial Sequence
  Synthetic
cacaaaguuuggccaucagaa

SEQ ID NO: 445438 - RNA, 22 nt, Artificial Sequence
  Synthetic
ucacaaaguuuggccaucagaa

SEQ ID NO: 445439 - RNA, 23 nt, Artificial Sequence
  Synthetic
uucacaaaguuuggccaucagaa

SEQ ID NO: 445440 - RNA, 24 nt, Artificial Sequence
  Synthetic
uuucacaaaguuuggccaucagaa

SEQ ID NO: 445441 - RNA, 18 nt, Artificial Sequence
  Synthetic
cacgcuccugcaucagaa

SEQ ID NO: 445442 - RNA, 19 nt, Artificial Sequence
  Synthetic
acacgcuccugcaucagaa

SEQ ID NO: 445443 - RNA, 20 nt, Artificial Sequence
  Synthetic
cacacgcuccugcaucagaa

SEQ ID NO: 445444 - RNA, 21 nt, Artificial Sequence
  Synthetic
ucacacgcuccugcaucagaa

SEQ ID NO: 445445 - RNA, 22 nt, Artificial Sequence
  Synthetic
cucacacgcuccugcaucagaa

SEQ ID NO: 445446 - RNA, 23 nt, Artificial Sequence
  Synthetic
gcucacacgcuccugcaucagaa

SEQ ID NO: 445447 - RNA, 24 nt, Artificial Sequence
  Synthetic
ugcucacacgcuccugcaucagaa

SEQ ID NO: 445448 - RNA, 18 nt, Artificial Sequence
  Synthetic
aguugggagucaucagaa

SEQ ID NO: 445449 - RNA, 19 nt, Artificial Sequence
  Synthetic
uaguugggagucaucagaa

SEQ ID NO: 445450 - RNA, 20 nt, Artificial Sequence
  Synthetic
cuaguugggagucaucagaa

SEQ ID NO: 445451 - RNA, 21 nt, Artificial Sequence
  Synthetic
ccuaguugggagucaucagaa

SEQ ID NO: 445452 - RNA, 22 nt, Artificial Sequence
  Synthetic
uccuaguugggagucaucagaa

SEQ ID NO: 445453 - RNA, 23 nt, Artificial Sequence
  Synthetic
cuccuaguugggagucaucagaa

SEQ ID NO: 445454 - RNA, 24 nt, Artificial Sequence
  Synthetic
acuccuaguugggagucaucagaa

SEQ ID NO: 445455 - RNA, 18 nt, Artificial Sequence
  Synthetic
uaacacauaagaucagaa

SEQ ID NO: 445456 - RNA, 19 nt, Artificial Sequence
  Synthetic
uuaacacauaagaucagaa

SEQ ID NO: 445457 - RNA, 20 nt, Artificial Sequence
  Synthetic
uuuaacacauaagaucagaa

SEQ ID NO: 445458 - RNA, 21 nt, Artificial Sequence
  Synthetic
auuuaacacauaagaucagaa

SEQ ID NO: 445459 - RNA, 22 nt, Artificial Sequence
  Synthetic
uauuuaacacauaagaucagaa

SEQ ID NO: 445460 - RNA, 23 nt, Artificial Sequence
  Synthetic
uuauuuaacacauaagaucagaa

SEQ ID NO: 445461 - RNA, 24 nt, Artificial Sequence
  Synthetic
guuauuuaacacauaagaucagaa

SEQ ID NO: 445462 - RNA, 18 nt, Artificial Sequence
  Synthetic
uggauucagagaucagaa

SEQ ID NO: 445463 - RNA, 19 nt, Artificial Sequence
  Synthetic
auggauucagagaucagaa

SEQ ID NO: 445464 - RNA, 20 nt, Artificial Sequence
  Synthetic
cauggauucagagaucagaa

SEQ ID NO: 445465 - RNA, 21 nt, Artificial Sequence
  Synthetic
acauggauucagagaucagaa

SEQ ID NO: 445466 - RNA, 22 nt, Artificial Sequence
  Synthetic
cacauggauucagagaucagaa

SEQ ID NO: 445467 - RNA, 23 nt, Artificial Sequence
  Synthetic
ccacauggauucagagaucagaa

SEQ ID NO: 445468 - RNA, 24 nt, Artificial Sequence
  Synthetic
gccacauggauucagagaucagaa

SEQ ID NO: 445469 - RNA, 18 nt, Artificial Sequence
  Synthetic
ucaagauaaggaucagaa

SEQ ID NO: 445470 - RNA, 19 nt, Artificial Sequence
  Synthetic
aucaagauaaggaucagaa

SEQ ID NO: 445471 - RNA, 20 nt, Artificial Sequence
  Synthetic
gaucaagauaaggaucagaa

SEQ ID NO: 445472 - RNA, 21 nt, Artificial Sequence
  Synthetic
agaucaagauaaggaucagaa

SEQ ID NO: 445473 - RNA, 22 nt, Artificial Sequence
  Synthetic
aagaucaagauaaggaucagaa

SEQ ID NO: 445474 - RNA, 23 nt, Artificial Sequence
  Synthetic
aaagaucaagauaaggaucagaa

SEQ ID NO: 445475 - RNA, 24 nt, Artificial Sequence
  Synthetic
caaagaucaagauaaggaucagaa

SEQ ID NO: 445476 - RNA, 18 nt, Artificial Sequence
  Synthetic
gauuuuugcaacucagaa

SEQ ID NO: 445477 - RNA, 19 nt, Artificial Sequence
  Synthetic
ggauuuuugcaacucagaa

SEQ ID NO: 445478 - RNA, 20 nt, Artificial Sequence
  Synthetic
aggauuuuugcaacucagaa

SEQ ID NO: 445479 - RNA, 21 nt, Artificial Sequence
  Synthetic
gaggauuuuugcaacucagaa

SEQ ID NO: 445480 - RNA, 22 nt, Artificial Sequence
  Synthetic
agaggauuuuugcaacucagaa

SEQ ID NO: 445481 - RNA, 23 nt, Artificial Sequence
  Synthetic
gagaggauuuuugcaacucagaa

SEQ ID NO: 445482 - RNA, 24 nt, Artificial Sequence
  Synthetic
agagaggauuuuugcaacucagaa

SEQ ID NO: 445483 - RNA, 18 nt, Artificial Sequence
  Synthetic
uaugcucuguacucagaa

SEQ ID NO: 445484 - RNA, 19 nt, Artificial Sequence
  Synthetic
guaugcucuguacucagaa

SEQ ID NO: 445485 - RNA, 20 nt, Artificial Sequence
  Synthetic
uguaugcucuguacucagaa

SEQ ID NO: 445486 - RNA, 21 nt, Artificial Sequence
  Synthetic
cuguaugcucuguacucagaa

SEQ ID NO: 445487 - RNA, 22 nt, Artificial Sequence
  Synthetic
ucuguaugcucuguacucagaa

SEQ ID NO: 445488 - RNA, 23 nt, Artificial Sequence
  Synthetic
cucuguaugcucuguacucagaa

SEQ ID NO: 445489 - RNA, 24 nt, Artificial Sequence
  Synthetic
acucuguaugcucuguacucagaa

SEQ ID NO: 445490 - RNA, 18 nt, Artificial Sequence
  Synthetic
uacgauaauuacucagaa

SEQ ID NO: 445491 - RNA, 19 nt, Artificial Sequence
  Synthetic
uuacgauaauuacucagaa

SEQ ID NO: 445492 - RNA, 20 nt, Artificial Sequence
  Synthetic
uuuacgauaauuacucagaa

SEQ ID NO: 445493 - RNA, 21 nt, Artificial Sequence
  Synthetic
uuuuacgauaauuacucagaa

SEQ ID NO: 445494 - RNA, 22 nt, Artificial Sequence
  Synthetic
auuuuacgauaauuacucagaa

SEQ ID NO: 445495 - RNA, 23 nt, Artificial Sequence
  Synthetic
cauuuuacgauaauuacucagaa

SEQ ID NO: 445496 - RNA, 24 nt, Artificial Sequence
  Synthetic
ccauuuuacgauaauuacucagaa

SEQ ID NO: 445497 - RNA, 18 nt, Artificial Sequence
  Synthetic
gaauccuacggcucagaa

SEQ ID NO: 445498 - RNA, 19 nt, Artificial Sequence
  Synthetic
ugaauccuacggcucagaa

SEQ ID NO: 445499 - RNA, 20 nt, Artificial Sequence
  Synthetic
augaauccuacggcucagaa

SEQ ID NO: 445500 - RNA, 21 nt, Artificial Sequence
  Synthetic
gaugaauccuacggcucagaa

SEQ ID NO: 445501 - RNA, 22 nt, Artificial Sequence
  Synthetic
ugaugaauccuacggcucagaa

SEQ ID NO: 445502 - RNA, 23 nt, Artificial Sequence
  Synthetic
uugaugaauccuacggcucagaa

SEQ ID NO: 445503 - RNA, 24 nt, Artificial Sequence
  Synthetic
uuugaugaauccuacggcucagaa

SEQ ID NO: 445504 - RNA, 18 nt, Artificial Sequence
  Synthetic
gauucuuugaucucagaa

SEQ ID NO: 445505 - RNA, 19 nt, Artificial Sequence
  Synthetic
agauucuuugaucucagaa

SEQ ID NO: 445506 - RNA, 20 nt, Artificial Sequence
  Synthetic
cagauucuuugaucucagaa

SEQ ID NO: 445507 - RNA, 21 nt, Artificial Sequence
  Synthetic
ccagauucuuugaucucagaa

SEQ ID NO: 445508 - RNA, 22 nt, Artificial Sequence
  Synthetic
cccagauucuuugaucucagaa

SEQ ID NO: 445509 - RNA, 23 nt, Artificial Sequence
  Synthetic
acccagauucuuugaucucagaa

SEQ ID NO: 445510 - RNA, 24 nt, Artificial Sequence
  Synthetic
gacccagauucuuugaucucagaa

SEQ ID NO: 445511 - RNA, 18 nt, Artificial Sequence
  Synthetic
ucaaauauucucucagaa

SEQ ID NO: 445512 - RNA, 19 nt, Artificial Sequence
  Synthetic
cucaaauauucucucagaa

SEQ ID NO: 445513 - RNA, 20 nt, Artificial Sequence
  Synthetic
acucaaauauucucucagaa

SEQ ID NO: 445514 - RNA, 21 nt, Artificial Sequence
  Synthetic
cacucaaauauucucucagaa

SEQ ID NO: 445515 - RNA, 22 nt, Artificial Sequence
  Synthetic
ucacucaaauauucucucagaa

SEQ ID NO: 445516 - RNA, 23 nt, Artificial Sequence
  Synthetic
uucacucaaauauucucucagaa

SEQ ID NO: 445517 - RNA, 24 nt, Artificial Sequence
  Synthetic
uuucacucaaauauucucucagaa

SEQ ID NO: 445518 - RNA, 18 nt, Artificial Sequence
  Synthetic
uaguauugauucucagaa

SEQ ID NO: 445519 - RNA, 19 nt, Artificial Sequence
  Synthetic
guaguauugauucucagaa

SEQ ID NO: 445520 - RNA, 20 nt, Artificial Sequence
  Synthetic
uguaguauugauucucagaa

SEQ ID NO: 445521 - RNA, 21 nt, Artificial Sequence
  Synthetic
cuguaguauugauucucagaa

SEQ ID NO: 445522 - RNA, 22 nt, Artificial Sequence
  Synthetic
ucuguaguauugauucucagaa

SEQ ID NO: 445523 - RNA, 23 nt, Artificial Sequence
  Synthetic
uucuguaguauugauucucagaa

SEQ ID NO: 445524 - RNA, 24 nt, Artificial Sequence
  Synthetic
uuucuguaguauugauucucagaa

SEQ ID NO: 445525 - RNA, 18 nt, Artificial Sequence
  Synthetic
gcagcuuuuaagucagaa

SEQ ID NO: 445526 - RNA, 19 nt, Artificial Sequence
  Synthetic
ugcagcuuuuaagucagaa

SEQ ID NO: 445527 - RNA, 20 nt, Artificial Sequence
  Synthetic
uugcagcuuuuaagucagaa

SEQ ID NO: 445528 - RNA, 21 nt, Artificial Sequence
  Synthetic
uuugcagcuuuuaagucagaa

SEQ ID NO: 445529 - RNA, 22 nt, Artificial Sequence
  Synthetic
uuuugcagcuuuuaagucagaa

SEQ ID NO: 445530 - RNA, 23 nt, Artificial Sequence
  Synthetic
auuuugcagcuuuuaagucagaa

SEQ ID NO: 445531 - RNA, 24 nt, Artificial Sequence
  Synthetic
cauuuugcagcuuuuaagucagaa

SEQ ID NO: 445532 - RNA, 18 nt, Artificial Sequence
  Synthetic
ugucacaugaggucagaa

SEQ ID NO: 445533 - RNA, 19 nt, Artificial Sequence
  Synthetic
uugucacaugaggucagaa

SEQ ID NO: 445534 - RNA, 20 nt, Artificial Sequence
  Synthetic
cuugucacaugaggucagaa

SEQ ID NO: 445535 - RNA, 21 nt, Artificial Sequence
  Synthetic
acuugucacaugaggucagaa

SEQ ID NO: 445536 - RNA, 22 nt, Artificial Sequence
  Synthetic
gacuugucacaugaggucagaa

SEQ ID NO: 445537 - RNA, 23 nt, Artificial Sequence
  Synthetic
ugacuugucacaugaggucagaa

SEQ ID NO: 445538 - RNA, 24 nt, Artificial Sequence
  Synthetic
gugacuugucacaugaggucagaa

SEQ ID NO: 445539 - RNA, 18 nt, Artificial Sequence
  Synthetic
uggugcaagaugucagaa

SEQ ID NO: 445540 - RNA, 19 nt, Artificial Sequence
  Synthetic
guggugcaagaugucagaa

SEQ ID NO: 445541 - RNA, 20 nt, Artificial Sequence
  Synthetic
aguggugcaagaugucagaa

SEQ ID NO: 445542 - RNA, 21 nt, Artificial Sequence
  Synthetic
gaguggugcaagaugucagaa

SEQ ID NO: 445543 - RNA, 22 nt, Artificial Sequence
  Synthetic
ggaguggugcaagaugucagaa

SEQ ID NO: 445544 - RNA, 23 nt, Artificial Sequence
  Synthetic
cggaguggugcaagaugucagaa

SEQ ID NO: 445545 - RNA, 24 nt, Artificial Sequence
  Synthetic
acggaguggugcaagaugucagaa

SEQ ID NO: 445546 - RNA, 18 nt, Artificial Sequence
  Synthetic
cuaagacaaaauucagaa

SEQ ID NO: 445547 - RNA, 19 nt, Artificial Sequence
  Synthetic
acuaagacaaaauucagaa

SEQ ID NO: 445548 - RNA, 20 nt, Artificial Sequence
  Synthetic
gacuaagacaaaauucagaa

SEQ ID NO: 445549 - RNA, 21 nt, Artificial Sequence
  Synthetic
agacuaagacaaaauucagaa

SEQ ID NO: 445550 - RNA, 22 nt, Artificial Sequence
  Synthetic
uagacuaagacaaaauucagaa

SEQ ID NO: 445551 - RNA, 23 nt, Artificial Sequence
  Synthetic
auagacuaagacaaaauucagaa

SEQ ID NO: 445552 - RNA, 24 nt, Artificial Sequence
  Synthetic
cauagacuaagacaaaauucagaa

SEQ ID NO: 445553 - RNA, 18 nt, Artificial Sequence
  Synthetic
caauauauacauucagaa

SEQ ID NO: 445554 - RNA, 19 nt, Artificial Sequence
  Synthetic
acaauauauacauucagaa

SEQ ID NO: 445555 - RNA, 20 nt, Artificial Sequence
  Synthetic
uacaauauauacauucagaa

SEQ ID NO: 445556 - RNA, 21 nt, Artificial Sequence
  Synthetic
uuacaauauauacauucagaa

SEQ ID NO: 445557 - RNA, 22 nt, Artificial Sequence
  Synthetic
auuacaauauauacauucagaa

SEQ ID NO: 445558 - RNA, 23 nt, Artificial Sequence
  Synthetic
aauuacaauauauacauucagaa

SEQ ID NO: 445559 - RNA, 24 nt, Artificial Sequence
  Synthetic
gaauuacaauauauacauucagaa

SEQ ID NO: 445560 - RNA, 18 nt, Artificial Sequence
  Synthetic
gcaaauucuacuucagaa

SEQ ID NO: 445561 - RNA, 19 nt, Artificial Sequence
  Synthetic
ugcaaauucuacuucagaa

SEQ ID NO: 445562 - RNA, 20 nt, Artificial Sequence
  Synthetic
cugcaaauucuacuucagaa

SEQ ID NO: 445563 - RNA, 21 nt, Artificial Sequence
  Synthetic
acugcaaauucuacuucagaa

SEQ ID NO: 445564 - RNA, 22 nt, Artificial Sequence
  Synthetic
uacugcaaauucuacuucagaa

SEQ ID NO: 445565 - RNA, 23 nt, Artificial Sequence
  Synthetic
guacugcaaauucuacuucagaa

SEQ ID NO: 445566 - RNA, 24 nt, Artificial Sequence
  Synthetic
aguacugcaaauucuacuucagaa

SEQ ID NO: 445567 - RNA, 18 nt, Artificial Sequence
  Synthetic
ugaacaagaaguucagaa

SEQ ID NO: 445568 - RNA, 19 nt, Artificial Sequence
  Synthetic
gugaacaagaaguucagaa

SEQ ID NO: 445569 - RNA, 20 nt, Artificial Sequence
  Synthetic
agugaacaagaaguucagaa

SEQ ID NO: 445570 - RNA, 21 nt, Artificial Sequence
  Synthetic
aagugaacaagaaguucagaa

SEQ ID NO: 445571 - RNA, 22 nt, Artificial Sequence
  Synthetic
gaagugaacaagaaguucagaa

SEQ ID NO: 445572 - RNA, 23 nt, Artificial Sequence
  Synthetic
agaagugaacaagaaguucagaa

SEQ ID NO: 445573 - RNA, 24 nt, Artificial Sequence
  Synthetic
aagaagugaacaagaaguucagaa

SEQ ID NO: 445574 - RNA, 18 nt, Artificial Sequence
  Synthetic
uauggaaagcuuucagaa

SEQ ID NO: 445575 - RNA, 19 nt, Artificial Sequence
  Synthetic
guauggaaagcuuucagaa

SEQ ID NO: 445576 - RNA, 20 nt, Artificial Sequence
  Synthetic
aguauggaaagcuuucagaa

SEQ ID NO: 445577 - RNA, 21 nt, Artificial Sequence
  Synthetic
gaguauggaaagcuuucagaa

SEQ ID NO: 445578 - RNA, 22 nt, Artificial Sequence
  Synthetic
ugaguauggaaagcuuucagaa

SEQ ID NO: 445579 - RNA, 23 nt, Artificial Sequence
  Synthetic
augaguauggaaagcuuucagaa

SEQ ID NO: 445580 - RNA, 24 nt, Artificial Sequence
  Synthetic
aaugaguauggaaagcuuucagaa

SEQ ID NO: 445581 - RNA, 18 nt, Artificial Sequence
  Synthetic
aagggaguuguuucagaa

SEQ ID NO: 445582 - RNA, 19 nt, Artificial Sequence
  Synthetic
caagggaguuguuucagaa

SEQ ID NO: 445583 - RNA, 20 nt, Artificial Sequence
  Synthetic
ucaagggaguuguuucagaa

SEQ ID NO: 445584 - RNA, 21 nt, Artificial Sequence
  Synthetic
aucaagggaguuguuucagaa

SEQ ID NO: 445585 - RNA, 22 nt, Artificial Sequence
  Synthetic
aaucaagggaguuguuucagaa

SEQ ID NO: 445586 - RNA, 23 nt, Artificial Sequence
  Synthetic
uaaucaagggaguuguuucagaa

SEQ ID NO: 445587 - RNA, 24 nt, Artificial Sequence
  Synthetic
uuaaucaagggaguuguuucagaa

SEQ ID NO: 445588 - RNA, 18 nt, Artificial Sequence
  Synthetic
uagagauucaaaagagaa

SEQ ID NO: 445589 - RNA, 19 nt, Artificial Sequence
  Synthetic
guagagauucaaaagagaa

SEQ ID NO: 445590 - RNA, 20 nt, Artificial Sequence
  Synthetic
uguagagauucaaaagagaa

SEQ ID NO: 445591 - RNA, 21 nt, Artificial Sequence
  Synthetic
cuguagagauucaaaagagaa

SEQ ID NO: 445592 - RNA, 22 nt, Artificial Sequence
  Synthetic
gcuguagagauucaaaagagaa

SEQ ID NO: 445593 - RNA, 23 nt, Artificial Sequence
  Synthetic
agcuguagagauucaaaagagaa

SEQ ID NO: 445594 - RNA, 24 nt, Artificial Sequence
  Synthetic
uagcuguagagauucaaaagagaa

SEQ ID NO: 445595 - RNA, 18 nt, Artificial Sequence
  Synthetic
cagaaaaagaaaagagaa

SEQ ID NO: 445596 - RNA, 19 nt, Artificial Sequence
  Synthetic
gcagaaaaagaaaagagaa

SEQ ID NO: 445597 - RNA, 20 nt, Artificial Sequence
  Synthetic
ggcagaaaaagaaaagagaa

SEQ ID NO: 445598 - RNA, 21 nt, Artificial Sequence
  Synthetic
aggcagaaaaagaaaagagaa

SEQ ID NO: 445599 - RNA, 22 nt, Artificial Sequence
  Synthetic
gaggcagaaaaagaaaagagaa

SEQ ID NO: 445600 - RNA, 23 nt, Artificial Sequence
  Synthetic
ggaggcagaaaaagaaaagagaa

SEQ ID NO: 445601 - RNA, 24 nt, Artificial Sequence
  Synthetic
uggaggcagaaaaagaaaagagaa

SEQ ID NO: 445602 - RNA, 18 nt, Artificial Sequence
  Synthetic
auaugugugaaaagagaa

SEQ ID NO: 445603 - RNA, 19 nt, Artificial Sequence
  Synthetic
uauaugugugaaaagagaa

SEQ ID NO: 445604 - RNA, 20 nt, Artificial Sequence
  Synthetic
auauaugugugaaaagagaa

SEQ ID NO: 445605 - RNA, 21 nt, Artificial Sequence
  Synthetic
uauauaugugugaaaagagaa

SEQ ID NO: 445606 - RNA, 22 nt, Artificial Sequence
  Synthetic
guauauaugugugaaaagagaa

SEQ ID NO: 445607 - RNA, 23 nt, Artificial Sequence
  Synthetic
uguauauaugugugaaaagagaa

SEQ ID NO: 445608 - RNA, 24 nt, Artificial Sequence
  Synthetic
guguauauaugugugaaaagagaa

SEQ ID NO: 445609 - RNA, 18 nt, Artificial Sequence
  Synthetic
auuucagguaaaagagaa

SEQ ID NO: 445610 - RNA, 19 nt, Artificial Sequence
  Synthetic
gauuucagguaaaagagaa

SEQ ID NO: 445611 - RNA, 20 nt, Artificial Sequence
  Synthetic
agauuucagguaaaagagaa

SEQ ID NO: 445612 - RNA, 21 nt, Artificial Sequence
  Synthetic
gagauuucagguaaaagagaa

SEQ ID NO: 445613 - RNA, 22 nt, Artificial Sequence
  Synthetic
ggagauuucagguaaaagagaa

SEQ ID NO: 445614 - RNA, 23 nt, Artificial Sequence
  Synthetic
gggagauuucagguaaaagagaa

SEQ ID NO: 445615 - RNA, 24 nt, Artificial Sequence
  Synthetic
agggagauuucagguaaaagagaa

SEQ ID NO: 445616 - RNA, 18 nt, Artificial Sequence
  Synthetic
cuagcuacacaaagagaa

SEQ ID NO: 445617 - RNA, 19 nt, Artificial Sequence
  Synthetic
ccuagcuacacaaagagaa

SEQ ID NO: 445618 - RNA, 20 nt, Artificial Sequence
  Synthetic
accuagcuacacaaagagaa

SEQ ID NO: 445619 - RNA, 21 nt, Artificial Sequence
  Synthetic
caccuagcuacacaaagagaa

SEQ ID NO: 445620 - RNA, 22 nt, Artificial Sequence
  Synthetic
gcaccuagcuacacaaagagaa

SEQ ID NO: 445621 - RNA, 23 nt, Artificial Sequence
  Synthetic
agcaccuagcuacacaaagagaa

SEQ ID NO: 445622 - RNA, 24 nt, Artificial Sequence
  Synthetic
aagcaccuagcuacacaaagagaa

SEQ ID NO: 445623 - RNA, 18 nt, Artificial Sequence
  Synthetic
gccaggggagaaagagaa

SEQ ID NO: 445624 - RNA, 19 nt, Artificial Sequence
  Synthetic
ggccaggggagaaagagaa

SEQ ID NO: 445625 - RNA, 20 nt, Artificial Sequence
  Synthetic
uggccaggggagaaagagaa

SEQ ID NO: 445626 - RNA, 21 nt, Artificial Sequence
  Synthetic
guggccaggggagaaagagaa

SEQ ID NO: 445627 - RNA, 22 nt, Artificial Sequence
  Synthetic
gguggccaggggagaaagagaa

SEQ ID NO: 445628 - RNA, 23 nt, Artificial Sequence
  Synthetic
ggguggccaggggagaaagagaa

SEQ ID NO: 445629 - RNA, 24 nt, Artificial Sequence
  Synthetic
aggguggccaggggagaaagagaa

SEQ ID NO: 445630 - RNA, 18 nt, Artificial Sequence
  Synthetic
gugagcucauaaagagaa

SEQ ID NO: 445631 - RNA, 19 nt, Artificial Sequence
  Synthetic
ugugagcucauaaagagaa

SEQ ID NO: 445632 - RNA, 20 nt, Artificial Sequence
  Synthetic
cugugagcucauaaagagaa

SEQ ID NO: 445633 - RNA, 21 nt, Artificial Sequence
  Synthetic
acugugagcucauaaagagaa

SEQ ID NO: 445634 - RNA, 22 nt, Artificial Sequence
  Synthetic
gacugugagcucauaaagagaa

SEQ ID NO: 445635 - RNA, 23 nt, Artificial Sequence
  Synthetic
agacugugagcucauaaagagaa

SEQ ID NO: 445636 - RNA, 24 nt, Artificial Sequence
  Synthetic
gagacugugagcucauaaagagaa

SEQ ID NO: 445637 - RNA, 18 nt, Artificial Sequence
  Synthetic
cagaaaaauuaaagagaa

SEQ ID NO: 445638 - RNA, 19 nt, Artificial Sequence
  Synthetic
ucagaaaaauuaaagagaa

SEQ ID NO: 445639 - RNA, 20 nt, Artificial Sequence
  Synthetic
uucagaaaaauuaaagagaa

SEQ ID NO: 445640 - RNA, 21 nt, Artificial Sequence
  Synthetic
cuucagaaaaauuaaagagaa

SEQ ID NO: 445641 - RNA, 22 nt, Artificial Sequence
  Synthetic
ucuucagaaaaauuaaagagaa

SEQ ID NO: 445642 - RNA, 23 nt, Artificial Sequence
  Synthetic
uucuucagaaaaauuaaagagaa

SEQ ID NO: 445643 - RNA, 24 nt, Artificial Sequence
  Synthetic
auucuucagaaaaauuaaagagaa

SEQ ID NO: 445644 - RNA, 18 nt, Artificial Sequence
  Synthetic
auucagcaagcaagagaa

SEQ ID NO: 445645 - RNA, 19 nt, Artificial Sequence
  Synthetic
uauucagcaagcaagagaa

SEQ ID NO: 445646 - RNA, 20 nt, Artificial Sequence
  Synthetic
cuauucagcaagcaagagaa

SEQ ID NO: 445647 - RNA, 21 nt, Artificial Sequence
  Synthetic
ccuauucagcaagcaagagaa

SEQ ID NO: 445648 - RNA, 22 nt, Artificial Sequence
  Synthetic
cccuauucagcaagcaagagaa

SEQ ID NO: 445649 - RNA, 23 nt, Artificial Sequence
  Synthetic
ccccuauucagcaagcaagagaa

SEQ ID NO: 445650 - RNA, 24 nt, Artificial Sequence
  Synthetic
cccccuauucagcaagcaagagaa

SEQ ID NO: 445651 - RNA, 18 nt, Artificial Sequence
  Synthetic
uguacgauugcaagagaa

SEQ ID NO: 445652 - RNA, 19 nt, Artificial Sequence
  Synthetic
uuguacgauugcaagagaa

SEQ ID NO: 445653 - RNA, 20 nt, Artificial Sequence
  Synthetic
auuguacgauugcaagagaa

SEQ ID NO: 445654 - RNA, 21 nt, Artificial Sequence
  Synthetic
aauuguacgauugcaagagaa

SEQ ID NO: 445655 - RNA, 22 nt, Artificial Sequence
  Synthetic
aaauuguacgauugcaagagaa

SEQ ID NO: 445656 - RNA, 23 nt, Artificial Sequence
  Synthetic
aaaauuguacgauugcaagagaa

SEQ ID NO: 445657 - RNA, 24 nt, Artificial Sequence
  Synthetic
uaaaauuguacgauugcaagagaa

SEQ ID NO: 445658 - RNA, 18 nt, Artificial Sequence
  Synthetic
uuuuuucaaagaagagaa

SEQ ID NO: 445659 - RNA, 19 nt, Artificial Sequence
  Synthetic
uuuuuuucaaagaagagaa

SEQ ID NO: 445660 - RNA, 20 nt, Artificial Sequence
  Synthetic
auuuuuuucaaagaagagaa

SEQ ID NO: 445661 - RNA, 21 nt, Artificial Sequence
  Synthetic
gauuuuuuucaaagaagagaa

SEQ ID NO: 445662 - RNA, 22 nt, Artificial Sequence
  Synthetic
ugauuuuuuucaaagaagagaa

SEQ ID NO: 445663 - RNA, 23 nt, Artificial Sequence
  Synthetic
augauuuuuuucaaagaagagaa

SEQ ID NO: 445664 - RNA, 24 nt, Artificial Sequence
  Synthetic
gaugauuuuuuucaaagaagagaa

SEQ ID NO: 445665 - RNA, 18 nt, Artificial Sequence
  Synthetic
cugcuggccagaagagaa

SEQ ID NO: 445666 - RNA, 19 nt, Artificial Sequence
  Synthetic
ccugcuggccagaagagaa

SEQ ID NO: 445667 - RNA, 20 nt, Artificial Sequence
  Synthetic
uccugcuggccagaagagaa

SEQ ID NO: 445668 - RNA, 21 nt, Artificial Sequence
  Synthetic
uuccugcuggccagaagagaa

SEQ ID NO: 445669 - RNA, 22 nt, Artificial Sequence
  Synthetic
cuuccugcuggccagaagagaa

SEQ ID NO: 445670 - RNA, 23 nt, Artificial Sequence
  Synthetic
ucuuccugcuggccagaagagaa

SEQ ID NO: 445671 - RNA, 24 nt, Artificial Sequence
  Synthetic
cucuuccugcuggccagaagagaa

SEQ ID NO: 445672 - RNA, 18 nt, Artificial Sequence
  Synthetic
gacaggaggagaagagaa

SEQ ID NO: 445673 - RNA, 19 nt, Artificial Sequence
  Synthetic
agacaggaggagaagagaa

SEQ ID NO: 445674 - RNA, 20 nt, Artificial Sequence
  Synthetic
gagacaggaggagaagagaa

SEQ ID NO: 445675 - RNA, 21 nt, Artificial Sequence
  Synthetic
agagacaggaggagaagagaa

SEQ ID NO: 445676 - RNA, 22 nt, Artificial Sequence
  Synthetic
gagagacaggaggagaagagaa

SEQ ID NO: 445677 - RNA, 23 nt, Artificial Sequence
  Synthetic
agagagacaggaggagaagagaa

SEQ ID NO: 445678 - RNA, 24 nt, Artificial Sequence
  Synthetic
aagagagacaggaggagaagagaa

SEQ ID NO: 445679 - RNA, 18 nt, Artificial Sequence
  Synthetic
cuggagguaggaagagaa

SEQ ID NO: 445680 - RNA, 19 nt, Artificial Sequence
  Synthetic
gcuggagguaggaagagaa

SEQ ID NO: 445681 - RNA, 20 nt, Artificial Sequence
  Synthetic
agcuggagguaggaagagaa

SEQ ID NO: 445682 - RNA, 21 nt, Artificial Sequence
  Synthetic
gagcuggagguaggaagagaa

SEQ ID NO: 445683 - RNA, 22 nt, Artificial Sequence
  Synthetic
agagcuggagguaggaagagaa

SEQ ID NO: 445684 - RNA, 23 nt, Artificial Sequence
  Synthetic
cagagcuggagguaggaagagaa

SEQ ID NO: 445685 - RNA, 24 nt, Artificial Sequence
  Synthetic
acagagcuggagguaggaagagaa

SEQ ID NO: 445686 - RNA, 18 nt, Artificial Sequence
  Synthetic
cuguguagaugaagagaa

SEQ ID NO: 445687 - RNA, 19 nt, Artificial Sequence
  Synthetic
acuguguagaugaagagaa

SEQ ID NO: 445688 - RNA, 20 nt, Artificial Sequence
  Synthetic
cacuguguagaugaagagaa

SEQ ID NO: 445689 - RNA, 21 nt, Artificial Sequence
  Synthetic
ucacuguguagaugaagagaa

SEQ ID NO: 445690 - RNA, 22 nt, Artificial Sequence
  Synthetic
cucacuguguagaugaagagaa

SEQ ID NO: 445691 - RNA, 23 nt, Artificial Sequence
  Synthetic
acucacuguguagaugaagagaa

SEQ ID NO: 445692 - RNA, 24 nt, Artificial Sequence
  Synthetic
cacucacuguguagaugaagagaa

SEQ ID NO: 445693 - RNA, 18 nt, Artificial Sequence
  Synthetic
guggagcuuugaagagaa

SEQ ID NO: 445694 - RNA, 19 nt, Artificial Sequence
  Synthetic
uguggagcuuugaagagaa

SEQ ID NO: 445695 - RNA, 20 nt, Artificial Sequence
  Synthetic
uuguggagcuuugaagagaa

SEQ ID NO: 445696 - RNA, 21 nt, Artificial Sequence
  Synthetic
auuguggagcuuugaagagaa

SEQ ID NO: 445697 - RNA, 22 nt, Artificial Sequence
  Synthetic
aauuguggagcuuugaagagaa

SEQ ID NO: 445698 - RNA, 23 nt, Artificial Sequence
  Synthetic
gaauuguggagcuuugaagagaa

SEQ ID NO: 445699 - RNA, 24 nt, Artificial Sequence
  Synthetic
agaauuguggagcuuugaagagaa

SEQ ID NO: 445700 - RNA, 18 nt, Artificial Sequence
  Synthetic
cuaucgacacuaagagaa

SEQ ID NO: 445701 - RNA, 19 nt, Artificial Sequence
  Synthetic
ccuaucgacacuaagagaa

SEQ ID NO: 445702 - RNA, 20 nt, Artificial Sequence
  Synthetic
cccuaucgacacuaagagaa

SEQ ID NO: 445703 - RNA, 21 nt, Artificial Sequence
  Synthetic
acccuaucgacacuaagagaa

SEQ ID NO: 445704 - RNA, 22 nt, Artificial Sequence
  Synthetic
aacccuaucgacacuaagagaa

SEQ ID NO: 445705 - RNA, 23 nt, Artificial Sequence
  Synthetic
uaacccuaucgacacuaagagaa

SEQ ID NO: 445706 - RNA, 24 nt, Artificial Sequence
  Synthetic
uuaacccuaucgacacuaagagaa

SEQ ID NO: 445707 - RNA, 18 nt, Artificial Sequence
  Synthetic
gggcuggagguaagagaa

SEQ ID NO: 445708 - RNA, 19 nt, Artificial Sequence
  Synthetic
ugggcuggagguaagagaa

SEQ ID NO: 445709 - RNA, 20 nt, Artificial Sequence
  Synthetic
cugggcuggagguaagagaa

SEQ ID NO: 445710 - RNA, 21 nt, Artificial Sequence
  Synthetic
gcugggcuggagguaagagaa

SEQ ID NO: 445711 - RNA, 22 nt, Artificial Sequence
  Synthetic
agcugggcuggagguaagagaa

SEQ ID NO: 445712 - RNA, 23 nt, Artificial Sequence
  Synthetic
gagcugggcuggagguaagagaa

SEQ ID NO: 445713 - RNA, 24 nt, Artificial Sequence
  Synthetic
ugagcugggcuggagguaagagaa

SEQ ID NO: 445714 - RNA, 18 nt, Artificial Sequence
  Synthetic
cuccaauggguaagagaa

SEQ ID NO: 445715 - RNA, 19 nt, Artificial Sequence
  Synthetic
gcuccaauggguaagagaa

SEQ ID NO: 445716 - RNA, 20 nt, Artificial Sequence
  Synthetic
ugcuccaauggguaagagaa

SEQ ID NO: 445717 - RNA, 21 nt, Artificial Sequence
  Synthetic
augcuccaauggguaagagaa

SEQ ID NO: 445718 - RNA, 22 nt, Artificial Sequence
  Synthetic
uaugcuccaauggguaagagaa

SEQ ID NO: 445719 - RNA, 23 nt, Artificial Sequence
  Synthetic
auaugcuccaauggguaagagaa

SEQ ID NO: 445720 - RNA, 24 nt, Artificial Sequence
  Synthetic
cauaugcuccaauggguaagagaa

SEQ ID NO: 445721 - RNA, 18 nt, Artificial Sequence
  Synthetic
auggaauuccacagagaa

SEQ ID NO: 445722 - RNA, 19 nt, Artificial Sequence
  Synthetic
aauggaauuccacagagaa

SEQ ID NO: 445723 - RNA, 20 nt, Artificial Sequence
  Synthetic
gaauggaauuccacagagaa

SEQ ID NO: 445724 - RNA, 21 nt, Artificial Sequence
  Synthetic
ggaauggaauuccacagagaa

SEQ ID NO: 445725 - RNA, 22 nt, Artificial Sequence
  Synthetic
uggaauggaauuccacagagaa

SEQ ID NO: 445726 - RNA, 23 nt, Artificial Sequence
  Synthetic
guggaauggaauuccacagagaa

SEQ ID NO: 445727 - RNA, 24 nt, Artificial Sequence
  Synthetic
uguggaauggaauuccacagagaa

SEQ ID NO: 445728 - RNA, 18 nt, Artificial Sequence
  Synthetic
uaccaggcagacagagaa

SEQ ID NO: 445729 - RNA, 19 nt, Artificial Sequence
  Synthetic
uuaccaggcagacagagaa

SEQ ID NO: 445730 - RNA, 20 nt, Artificial Sequence
  Synthetic
cuuaccaggcagacagagaa

SEQ ID NO: 445731 - RNA, 21 nt, Artificial Sequence
  Synthetic
ucuuaccaggcagacagagaa

SEQ ID NO: 445732 - RNA, 22 nt, Artificial Sequence
  Synthetic
uucuuaccaggcagacagagaa

SEQ ID NO: 445733 - RNA, 23 nt, Artificial Sequence
  Synthetic
cuucuuaccaggcagacagagaa

SEQ ID NO: 445734 - RNA, 24 nt, Artificial Sequence
  Synthetic
gcuucuuaccaggcagacagagaa

SEQ ID NO: 445735 - RNA, 18 nt, Artificial Sequence
  Synthetic
gaaacgagggacagagaa

SEQ ID NO: 445736 - RNA, 19 nt, Artificial Sequence
  Synthetic
agaaacgagggacagagaa

SEQ ID NO: 445737 - RNA, 20 nt, Artificial Sequence
  Synthetic
aagaaacgagggacagagaa

SEQ ID NO: 445738 - RNA, 21 nt, Artificial Sequence
  Synthetic
gaagaaacgagggacagagaa

SEQ ID NO: 445739 - RNA, 22 nt, Artificial Sequence
  Synthetic
ggaagaaacgagggacagagaa

SEQ ID NO: 445740 - RNA, 23 nt, Artificial Sequence
  Synthetic
gggaagaaacgagggacagagaa

SEQ ID NO: 445741 - RNA, 24 nt, Artificial Sequence
  Synthetic
ugggaagaaacgagggacagagaa

SEQ ID NO: 445742 - RNA, 18 nt, Artificial Sequence
  Synthetic
aaaacaaauuacagagaa

SEQ ID NO: 445743 - RNA, 19 nt, Artificial Sequence
  Synthetic
uaaaacaaauuacagagaa

SEQ ID NO: 445744 - RNA, 20 nt, Artificial Sequence
  Synthetic
auaaaacaaauuacagagaa

SEQ ID NO: 445745 - RNA, 21 nt, Artificial Sequence
  Synthetic
uauaaaacaaauuacagagaa

SEQ ID NO: 445746 - RNA, 22 nt, Artificial Sequence
  Synthetic
auauaaaacaaauuacagagaa

SEQ ID NO: 445747 - RNA, 23 nt, Artificial Sequence
  Synthetic
uauauaaaacaaauuacagagaa

SEQ ID NO: 445748 - RNA, 24 nt, Artificial Sequence
  Synthetic
uuauauaaaacaaauuacagagaa

SEQ ID NO: 445749 - RNA, 18 nt, Artificial Sequence
  Synthetic
ucauugauaaccagagaa

SEQ ID NO: 445750 - RNA, 19 nt, Artificial Sequence
  Synthetic
aucauugauaaccagagaa

SEQ ID NO: 445751 - RNA, 20 nt, Artificial Sequence
  Synthetic
aaucauugauaaccagagaa

SEQ ID NO: 445752 - RNA, 21 nt, Artificial Sequence
  Synthetic
gaaucauugauaaccagagaa

SEQ ID NO: 445753 - RNA, 22 nt, Artificial Sequence
  Synthetic
ugaaucauugauaaccagagaa

SEQ ID NO: 445754 - RNA, 23 nt, Artificial Sequence
  Synthetic
cugaaucauugauaaccagagaa

SEQ ID NO: 445755 - RNA, 24 nt, Artificial Sequence
  Synthetic
acugaaucauugauaaccagagaa

SEQ ID NO: 445756 - RNA, 18 nt, Artificial Sequence
  Synthetic
aaagcaaaagccagagaa

SEQ ID NO: 445757 - RNA, 19 nt, Artificial Sequence
  Synthetic
gaaagcaaaagccagagaa

SEQ ID NO: 445758 - RNA, 20 nt, Artificial Sequence
  Synthetic
agaaagcaaaagccagagaa

SEQ ID NO: 445759 - RNA, 21 nt, Artificial Sequence
  Synthetic
uagaaagcaaaagccagagaa

SEQ ID NO: 445760 - RNA, 22 nt, Artificial Sequence
  Synthetic
auagaaagcaaaagccagagaa

SEQ ID NO: 445761 - RNA, 23 nt, Artificial Sequence
  Synthetic
aauagaaagcaaaagccagagaa

SEQ ID NO: 445762 - RNA, 24 nt, Artificial Sequence
  Synthetic
aaauagaaagcaaaagccagagaa

SEQ ID NO: 445763 - RNA, 18 nt, Artificial Sequence
  Synthetic
ggagcuaaguccagagaa

SEQ ID NO: 445764 - RNA, 19 nt, Artificial Sequence
  Synthetic
aggagcuaaguccagagaa

SEQ ID NO: 445765 - RNA, 20 nt, Artificial Sequence
  Synthetic
caggagcuaaguccagagaa

SEQ ID NO: 445766 - RNA, 21 nt, Artificial Sequence
  Synthetic
gcaggagcuaaguccagagaa

SEQ ID NO: 445767 - RNA, 22 nt, Artificial Sequence
  Synthetic
ugcaggagcuaaguccagagaa

SEQ ID NO: 445768 - RNA, 23 nt, Artificial Sequence
  Synthetic
uugcaggagcuaaguccagagaa

SEQ ID NO: 445769 - RNA, 24 nt, Artificial Sequence
  Synthetic
guugcaggagcuaaguccagagaa

SEQ ID NO: 445770 - RNA, 18 nt, Artificial Sequence
  Synthetic
guggccaaaagcagagaa

SEQ ID NO: 445771 - RNA, 19 nt, Artificial Sequence
  Synthetic
aguggccaaaagcagagaa

SEQ ID NO: 445772 - RNA, 20 nt, Artificial Sequence
  Synthetic
aaguggccaaaagcagagaa

SEQ ID NO: 445773 - RNA, 21 nt, Artificial Sequence
  Synthetic
aaaguggccaaaagcagagaa

SEQ ID NO: 445774 - RNA, 22 nt, Artificial Sequence
  Synthetic
aaaaguggccaaaagcagagaa

SEQ ID NO: 445775 - RNA, 23 nt, Artificial Sequence
  Synthetic
gaaaaguggccaaaagcagagaa

SEQ ID NO: 445776 - RNA, 24 nt, Artificial Sequence
  Synthetic
ggaaaaguggccaaaagcagagaa

SEQ ID NO: 445777 - RNA, 18 nt, Artificial Sequence
  Synthetic
gcaaaccacugcagagaa

SEQ ID NO: 445778 - RNA, 19 nt, Artificial Sequence
  Synthetic
agcaaaccacugcagagaa

SEQ ID NO: 445779 - RNA, 20 nt, Artificial Sequence
  Synthetic
uagcaaaccacugcagagaa

SEQ ID NO: 445780 - RNA, 21 nt, Artificial Sequence
  Synthetic
cuagcaaaccacugcagagaa

SEQ ID NO: 445781 - RNA, 22 nt, Artificial Sequence
  Synthetic
acuagcaaaccacugcagagaa

SEQ ID NO: 445782 - RNA, 23 nt, Artificial Sequence
  Synthetic
gacuagcaaaccacugcagagaa

SEQ ID NO: 445783 - RNA, 24 nt, Artificial Sequence
  Synthetic
ggacuagcaaaccacugcagagaa

SEQ ID NO: 445784 - RNA, 18 nt, Artificial Sequence
  Synthetic
agcuuuuggugcagagaa

SEQ ID NO: 445785 - RNA, 19 nt, Artificial Sequence
  Synthetic
uagcuuuuggugcagagaa

SEQ ID NO: 445786 - RNA, 20 nt, Artificial Sequence
  Synthetic
guagcuuuuggugcagagaa

SEQ ID NO: 445787 - RNA, 21 nt, Artificial Sequence
  Synthetic
uguagcuuuuggugcagagaa

SEQ ID NO: 445788 - RNA, 22 nt, Artificial Sequence
  Synthetic
auguagcuuuuggugcagagaa

SEQ ID NO: 445789 - RNA, 23 nt, Artificial Sequence
  Synthetic
aauguagcuuuuggugcagagaa

SEQ ID NO: 445790 - RNA, 24 nt, Artificial Sequence
  Synthetic
aaauguagcuuuuggugcagagaa

SEQ ID NO: 445791 - RNA, 18 nt, Artificial Sequence
  Synthetic
ugguauggagucagagaa

SEQ ID NO: 445792 - RNA, 19 nt, Artificial Sequence
  Synthetic
uugguauggagucagagaa

SEQ ID NO: 445793 - RNA, 20 nt, Artificial Sequence
  Synthetic
auugguauggagucagagaa

SEQ ID NO: 445794 - RNA, 21 nt, Artificial Sequence
  Synthetic
uauugguauggagucagagaa

SEQ ID NO: 445795 - RNA, 22 nt, Artificial Sequence
  Synthetic
guauugguauggagucagagaa

SEQ ID NO: 445796 - RNA, 23 nt, Artificial Sequence
  Synthetic
aguauugguauggagucagagaa

SEQ ID NO: 445797 - RNA, 24 nt, Artificial Sequence
  Synthetic
aaguauugguauggagucagagaa

SEQ ID NO: 445798 - RNA, 18 nt, Artificial Sequence
  Synthetic
guguguguaaagagagaa

SEQ ID NO: 445799 - RNA, 19 nt, Artificial Sequence
  Synthetic
uguguguguaaagagagaa

SEQ ID NO: 445800 - RNA, 20 nt, Artificial Sequence
  Synthetic
guguguguguaaagagagaa

SEQ ID NO: 445801 - RNA, 21 nt, Artificial Sequence
  Synthetic
uguguguguguaaagagagaa

SEQ ID NO: 445802 - RNA, 22 nt, Artificial Sequence
  Synthetic
guguguguguguaaagagagaa

SEQ ID NO: 445803 - RNA, 23 nt, Artificial Sequence
  Synthetic
uguguguguguguaaagagagaa

SEQ ID NO: 445804 - RNA, 24 nt, Artificial Sequence
  Synthetic
guguguguguguguaaagagagaa

SEQ ID NO: 445805 - RNA, 18 nt, Artificial Sequence
  Synthetic
ggaugggaagagagagaa

SEQ ID NO: 445806 - RNA, 19 nt, Artificial Sequence
  Synthetic
cggaugggaagagagagaa

SEQ ID NO: 445807 - RNA, 20 nt, Artificial Sequence
  Synthetic
gcggaugggaagagagagaa

SEQ ID NO: 445808 - RNA, 21 nt, Artificial Sequence
  Synthetic
agcggaugggaagagagagaa

SEQ ID NO: 445809 - RNA, 22 nt, Artificial Sequence
  Synthetic
uagcggaugggaagagagagaa

SEQ ID NO: 445810 - RNA, 23 nt, Artificial Sequence
  Synthetic
cuagcggaugggaagagagagaa

SEQ ID NO: 445811 - RNA, 24 nt, Artificial Sequence
  Synthetic
acuagcggaugggaagagagagaa

SEQ ID NO: 445812 - RNA, 18 nt, Artificial Sequence
  Synthetic
gugcugagauagagagaa

SEQ ID NO: 445813 - RNA, 19 nt, Artificial Sequence
  Synthetic
ugugcugagauagagagaa

SEQ ID NO: 445814 - RNA, 20 nt, Artificial Sequence
  Synthetic
augugcugagauagagagaa

SEQ ID NO: 445815 - RNA, 21 nt, Artificial Sequence
  Synthetic
uaugugcugagauagagagaa

SEQ ID NO: 445816 - RNA, 22 nt, Artificial Sequence
  Synthetic
auaugugcugagauagagagaa

SEQ ID NO: 445817 - RNA, 23 nt, Artificial Sequence
  Synthetic
uauaugugcugagauagagagaa

SEQ ID NO: 445818 - RNA, 24 nt, Artificial Sequence
  Synthetic
cuauaugugcugagauagagagaa

SEQ ID NO: 445819 - RNA, 18 nt, Artificial Sequence
  Synthetic
gaaggaagguagagagaa

SEQ ID NO: 445820 - RNA, 19 nt, Artificial Sequence
  Synthetic
ggaaggaagguagagagaa

SEQ ID NO: 445821 - RNA, 20 nt, Artificial Sequence
  Synthetic
gggaaggaagguagagagaa

SEQ ID NO: 445822 - RNA, 21 nt, Artificial Sequence
  Synthetic
agggaaggaagguagagagaa

SEQ ID NO: 445823 - RNA, 22 nt, Artificial Sequence
  Synthetic
gagggaaggaagguagagagaa

SEQ ID NO: 445824 - RNA, 23 nt, Artificial Sequence
  Synthetic
ggagggaaggaagguagagagaa

SEQ ID NO: 445825 - RNA, 24 nt, Artificial Sequence
  Synthetic
uggagggaaggaagguagagagaa

SEQ ID NO: 445826 - RNA, 18 nt, Artificial Sequence
  Synthetic
aauagaugcuggagagaa

SEQ ID NO: 445827 - RNA, 19 nt, Artificial Sequence
  Synthetic
gaauagaugcuggagagaa

SEQ ID NO: 445828 - RNA, 20 nt, Artificial Sequence
  Synthetic
ugaauagaugcuggagagaa

SEQ ID NO: 445829 - RNA, 21 nt, Artificial Sequence
  Synthetic
cugaauagaugcuggagagaa

SEQ ID NO: 445830 - RNA, 22 nt, Artificial Sequence
  Synthetic
acugaauagaugcuggagagaa

SEQ ID NO: 445831 - RNA, 23 nt, Artificial Sequence
  Synthetic
gacugaauagaugcuggagagaa

SEQ ID NO: 445832 - RNA, 24 nt, Artificial Sequence
  Synthetic
ugacugaauagaugcuggagagaa

SEQ ID NO: 445833 - RNA, 18 nt, Artificial Sequence
  Synthetic
uugguaauaaugagagaa

SEQ ID NO: 445834 - RNA, 19 nt, Artificial Sequence
  Synthetic
cuugguaauaaugagagaa

SEQ ID NO: 445835 - RNA, 20 nt, Artificial Sequence
  Synthetic
ccuugguaauaaugagagaa

SEQ ID NO: 445836 - RNA, 21 nt, Artificial Sequence
  Synthetic
gccuugguaauaaugagagaa

SEQ ID NO: 445837 - RNA, 22 nt, Artificial Sequence
  Synthetic
agccuugguaauaaugagagaa

SEQ ID NO: 445838 - RNA, 23 nt, Artificial Sequence
  Synthetic
uagccuugguaauaaugagagaa

SEQ ID NO: 445839 - RNA, 24 nt, Artificial Sequence
  Synthetic
uuagccuugguaauaaugagagaa

SEQ ID NO: 445840 - RNA, 18 nt, Artificial Sequence
  Synthetic
ugaauugggaugagagaa

SEQ ID NO: 445841 - RNA, 19 nt, Artificial Sequence
  Synthetic
uugaauugggaugagagaa

SEQ ID NO: 445842 - RNA, 20 nt, Artificial Sequence
  Synthetic
uuugaauugggaugagagaa

SEQ ID NO: 445843 - RNA, 21 nt, Artificial Sequence
  Synthetic
uuuugaauugggaugagagaa

SEQ ID NO: 445844 - RNA, 22 nt, Artificial Sequence
  Synthetic
cuuuugaauugggaugagagaa

SEQ ID NO: 445845 - RNA, 23 nt, Artificial Sequence
  Synthetic
acuuuugaauugggaugagagaa

SEQ ID NO: 445846 - RNA, 24 nt, Artificial Sequence
  Synthetic
cacuuuugaauugggaugagagaa

SEQ ID NO: 445847 - RNA, 18 nt, Artificial Sequence
  Synthetic
guauggccugugagagaa

SEQ ID NO: 445848 - RNA, 19 nt, Artificial Sequence
  Synthetic
aguauggccugugagagaa

SEQ ID NO: 445849 - RNA, 20 nt, Artificial Sequence
  Synthetic
aaguauggccugugagagaa

SEQ ID NO: 445850 - RNA, 21 nt, Artificial Sequence
  Synthetic
uaaguauggccugugagagaa

SEQ ID NO: 445851 - RNA, 22 nt, Artificial Sequence
  Synthetic
cuaaguauggccugugagagaa

SEQ ID NO: 445852 - RNA, 23 nt, Artificial Sequence
  Synthetic
acuaaguauggccugugagagaa

SEQ ID NO: 445853 - RNA, 24 nt, Artificial Sequence
  Synthetic
cacuaaguauggccugugagagaa

SEQ ID NO: 445854 - RNA, 18 nt, Artificial Sequence
  Synthetic
aucuucugaaauagagaa

SEQ ID NO: 445855 - RNA, 19 nt, Artificial Sequence
  Synthetic
caucuucugaaauagagaa

SEQ ID NO: 445856 - RNA, 20 nt, Artificial Sequence
  Synthetic
ccaucuucugaaauagagaa

SEQ ID NO: 445857 - RNA, 21 nt, Artificial Sequence
  Synthetic
gccaucuucugaaauagagaa

SEQ ID NO: 445858 - RNA, 22 nt, Artificial Sequence
  Synthetic
ugccaucuucugaaauagagaa

SEQ ID NO: 445859 - RNA, 23 nt, Artificial Sequence
  Synthetic
gugccaucuucugaaauagagaa

SEQ ID NO: 445860 - RNA, 24 nt, Artificial Sequence
  Synthetic
ggugccaucuucugaaauagagaa

SEQ ID NO: 445861 - RNA, 18 nt, Artificial Sequence
  Synthetic
uuacaauucaauagagaa

SEQ ID NO: 445862 - RNA, 19 nt, Artificial Sequence
  Synthetic
uuuacaauucaauagagaa

SEQ ID NO: 445863 - RNA, 20 nt, Artificial Sequence
  Synthetic
auuuacaauucaauagagaa

SEQ ID NO: 445864 - RNA, 21 nt, Artificial Sequence
  Synthetic
uauuuacaauucaauagagaa

SEQ ID NO: 445865 - RNA, 22 nt, Artificial Sequence
  Synthetic
cuauuuacaauucaauagagaa

SEQ ID NO: 445866 - RNA, 23 nt, Artificial Sequence
  Synthetic
gcuauuuacaauucaauagagaa

SEQ ID NO: 445867 - RNA, 24 nt, Artificial Sequence
  Synthetic
agcuauuuacaauucaauagagaa

SEQ ID NO: 445868 - RNA, 18 nt, Artificial Sequence
  Synthetic
aaaaacauauauagagaa

SEQ ID NO: 445869 - RNA, 19 nt, Artificial Sequence
  Synthetic
caaaaacauauauagagaa

SEQ ID NO: 445870 - RNA, 20 nt, Artificial Sequence
  Synthetic
acaaaaacauauauagagaa

SEQ ID NO: 445871 - RNA, 21 nt, Artificial Sequence
  Synthetic
gacaaaaacauauauagagaa

SEQ ID NO: 445872 - RNA, 22 nt, Artificial Sequence
  Synthetic
agacaaaaacauauauagagaa

SEQ ID NO: 445873 - RNA, 23 nt, Artificial Sequence
  Synthetic
aagacaaaaacauauauagagaa

SEQ ID NO: 445874 - RNA, 24 nt, Artificial Sequence
  Synthetic
gaagacaaaaacauauauagagaa

SEQ ID NO: 445875 - RNA, 18 nt, Artificial Sequence
  Synthetic
cuggaacuuccuagagaa

SEQ ID NO: 445876 - RNA, 19 nt, Artificial Sequence
  Synthetic
ucuggaacuuccuagagaa

SEQ ID NO: 445877 - RNA, 20 nt, Artificial Sequence
  Synthetic
cucuggaacuuccuagagaa

SEQ ID NO: 445878 - RNA, 21 nt, Artificial Sequence
  Synthetic
acucuggaacuuccuagagaa

SEQ ID NO: 445879 - RNA, 22 nt, Artificial Sequence
  Synthetic
aacucuggaacuuccuagagaa

SEQ ID NO: 445880 - RNA, 23 nt, Artificial Sequence
  Synthetic
aaacucuggaacuuccuagagaa

SEQ ID NO: 445881 - RNA, 24 nt, Artificial Sequence
  Synthetic
gaaacucuggaacuuccuagagaa

SEQ ID NO: 445882 - RNA, 18 nt, Artificial Sequence
  Synthetic
uucuaaggaaguagagaa

SEQ ID NO: 445883 - RNA, 19 nt, Artificial Sequence
  Synthetic
auucuaaggaaguagagaa

SEQ ID NO: 445884 - RNA, 20 nt, Artificial Sequence
  Synthetic
uauucuaaggaaguagagaa

SEQ ID NO: 445885 - RNA, 21 nt, Artificial Sequence
  Synthetic
uuauucuaaggaaguagagaa

SEQ ID NO: 445886 - RNA, 22 nt, Artificial Sequence
  Synthetic
auuauucuaaggaaguagagaa

SEQ ID NO: 445887 - RNA, 23 nt, Artificial Sequence
  Synthetic
uauuauucuaaggaaguagagaa

SEQ ID NO: 445888 - RNA, 24 nt, Artificial Sequence
  Synthetic
auauuauucuaaggaaguagagaa

SEQ ID NO: 445889 - RNA, 18 nt, Artificial Sequence
  Synthetic
uuacauuuuaguagagaa

SEQ ID NO: 445890 - RNA, 19 nt, Artificial Sequence
  Synthetic
guuacauuuuaguagagaa

SEQ ID NO: 445891 - RNA, 20 nt, Artificial Sequence
  Synthetic
gguuacauuuuaguagagaa

SEQ ID NO: 445892 - RNA, 21 nt, Artificial Sequence
  Synthetic
ugguuacauuuuaguagagaa

SEQ ID NO: 445893 - RNA, 22 nt, Artificial Sequence
  Synthetic
uugguuacauuuuaguagagaa

SEQ ID NO: 445894 - RNA, 23 nt, Artificial Sequence
  Synthetic
guugguuacauuuuaguagagaa

SEQ ID NO: 445895 - RNA, 24 nt, Artificial Sequence
  Synthetic
gguugguuacauuuuaguagagaa

SEQ ID NO: 445896 - RNA, 18 nt, Artificial Sequence
  Synthetic
ugcugacgcuguagagaa

SEQ ID NO: 445897 - RNA, 19 nt, Artificial Sequence
  Synthetic
cugcugacgcuguagagaa

SEQ ID NO: 445898 - RNA, 20 nt, Artificial Sequence
  Synthetic
gcugcugacgcuguagagaa

SEQ ID NO: 445899 - RNA, 21 nt, Artificial Sequence
  Synthetic
ugcugcugacgcuguagagaa

SEQ ID NO: 445900 - RNA, 22 nt, Artificial Sequence
  Synthetic
augcugcugacgcuguagagaa

SEQ ID NO: 445901 - RNA, 23 nt, Artificial Sequence
  Synthetic
gaugcugcugacgcuguagagaa

SEQ ID NO: 445902 - RNA, 24 nt, Artificial Sequence
  Synthetic
agaugcugcugacgcuguagagaa

SEQ ID NO: 445903 - RNA, 18 nt, Artificial Sequence
  Synthetic
aaugccuguuguagagaa

SEQ ID NO: 445904 - RNA, 19 nt, Artificial Sequence
  Synthetic
caaugccuguuguagagaa

SEQ ID NO: 445905 - RNA, 20 nt, Artificial Sequence
  Synthetic
acaaugccuguuguagagaa

SEQ ID NO: 445906 - RNA, 21 nt, Artificial Sequence
  Synthetic
gacaaugccuguuguagagaa

SEQ ID NO: 445907 - RNA, 22 nt, Artificial Sequence
  Synthetic
agacaaugccuguuguagagaa

SEQ ID NO: 445908 - RNA, 23 nt, Artificial Sequence
  Synthetic
gagacaaugccuguuguagagaa

SEQ ID NO: 445909 - RNA, 24 nt, Artificial Sequence
  Synthetic
ugagacaaugccuguuguagagaa

SEQ ID NO: 445910 - RNA, 18 nt, Artificial Sequence
  Synthetic
uauuauaugauuagagaa

SEQ ID NO: 445911 - RNA, 19 nt, Artificial Sequence
  Synthetic
uuauuauaugauuagagaa

SEQ ID NO: 445912 - RNA, 20 nt, Artificial Sequence
  Synthetic
auuauuauaugauuagagaa

SEQ ID NO: 445913 - RNA, 21 nt, Artificial Sequence
  Synthetic
aauuauuauaugauuagagaa

SEQ ID NO: 445914 - RNA, 22 nt, Artificial Sequence
  Synthetic
caauuauuauaugauuagagaa

SEQ ID NO: 445915 - RNA, 23 nt, Artificial Sequence
  Synthetic
acaauuauuauaugauuagagaa

SEQ ID NO: 445916 - RNA, 24 nt, Artificial Sequence
  Synthetic
cacaauuauuauaugauuagagaa

SEQ ID NO: 445917 - RNA, 18 nt, Artificial Sequence
  Synthetic
aauuaaugauuuagagaa

SEQ ID NO: 445918 - RNA, 19 nt, Artificial Sequence
  Synthetic
gaauuaaugauuuagagaa

SEQ ID NO: 445919 - RNA, 20 nt, Artificial Sequence
  Synthetic
ugaauuaaugauuuagagaa

SEQ ID NO: 445920 - RNA, 21 nt, Artificial Sequence
  Synthetic
uugaauuaaugauuuagagaa

SEQ ID NO: 445921 - RNA, 22 nt, Artificial Sequence
  Synthetic
uuugaauuaaugauuuagagaa

SEQ ID NO: 445922 - RNA, 23 nt, Artificial Sequence
  Synthetic
auuugaauuaaugauuuagagaa

SEQ ID NO: 445923 - RNA, 24 nt, Artificial Sequence
  Synthetic
cauuugaauuaaugauuuagagaa

SEQ ID NO: 445924 - RNA, 18 nt, Artificial Sequence
  Synthetic
aaagagugauuuagagaa

SEQ ID NO: 445925 - RNA, 19 nt, Artificial Sequence
  Synthetic
gaaagagugauuuagagaa

SEQ ID NO: 445926 - RNA, 20 nt, Artificial Sequence
  Synthetic
cgaaagagugauuuagagaa

SEQ ID NO: 445927 - RNA, 21 nt, Artificial Sequence
  Synthetic
gcgaaagagugauuuagagaa

SEQ ID NO: 445928 - RNA, 22 nt, Artificial Sequence
  Synthetic
agcgaaagagugauuuagagaa

SEQ ID NO: 445929 - RNA, 23 nt, Artificial Sequence
  Synthetic
cagcgaaagagugauuuagagaa

SEQ ID NO: 445930 - RNA, 24 nt, Artificial Sequence
  Synthetic
ccagcgaaagagugauuuagagaa

SEQ ID NO: 445931 - RNA, 18 nt, Artificial Sequence
  Synthetic
aaaugcauauuuagagaa

SEQ ID NO: 445932 - RNA, 19 nt, Artificial Sequence
  Synthetic
aaaaugcauauuuagagaa

SEQ ID NO: 445933 - RNA, 20 nt, Artificial Sequence
  Synthetic
aaaaaugcauauuuagagaa

SEQ ID NO: 445934 - RNA, 21 nt, Artificial Sequence
  Synthetic
aaaaaaugcauauuuagagaa

SEQ ID NO: 445935 - RNA, 22 nt, Artificial Sequence
  Synthetic
gaaaaaaugcauauuuagagaa

SEQ ID NO: 445936 - RNA, 23 nt, Artificial Sequence
  Synthetic
agaaaaaaugcauauuuagagaa

SEQ ID NO: 445937 - RNA, 24 nt, Artificial Sequence
  Synthetic
gagaaaaaaugcauauuuagagaa

SEQ ID NO: 445938 - RNA, 18 nt, Artificial Sequence
  Synthetic
aguaaaaucuuuagagaa

SEQ ID NO: 445939 - RNA, 19 nt, Artificial Sequence
  Synthetic
aaguaaaaucuuuagagaa

SEQ ID NO: 445940 - RNA, 20 nt, Artificial Sequence
  Synthetic
aaaguaaaaucuuuagagaa

SEQ ID NO: 445941 - RNA, 21 nt, Artificial Sequence
  Synthetic
aaaaguaaaaucuuuagagaa

SEQ ID NO: 445942 - RNA, 22 nt, Artificial Sequence
  Synthetic
aaaaaguaaaaucuuuagagaa

SEQ ID NO: 445943 - RNA, 23 nt, Artificial Sequence
  Synthetic
gaaaaaguaaaaucuuuagagaa

SEQ ID NO: 445944 - RNA, 24 nt, Artificial Sequence
  Synthetic
ggaaaaaguaaaaucuuuagagaa

SEQ ID NO: 445945 - RNA, 18 nt, Artificial Sequence
  Synthetic
uauuuccauuuuagagaa

SEQ ID NO: 445946 - RNA, 19 nt, Artificial Sequence
  Synthetic
auauuuccauuuuagagaa

SEQ ID NO: 445947 - RNA, 20 nt, Artificial Sequence
  Synthetic
uauauuuccauuuuagagaa

SEQ ID NO: 445948 - RNA, 21 nt, Artificial Sequence
  Synthetic
uuauauuuccauuuuagagaa

SEQ ID NO: 445949 - RNA, 22 nt, Artificial Sequence
  Synthetic
uuuauauuuccauuuuagagaa

SEQ ID NO: 445950 - RNA, 23 nt, Artificial Sequence
  Synthetic
auuuauauuuccauuuuagagaa

SEQ ID NO: 445951 - RNA, 24 nt, Artificial Sequence
  Synthetic
cauuuauauuuccauuuuagagaa

SEQ ID NO: 445952 - RNA, 18 nt, Artificial Sequence
  Synthetic
cugaaacacuaacgagaa

SEQ ID NO: 445953 - RNA, 19 nt, Artificial Sequence
  Synthetic
gcugaaacacuaacgagaa

SEQ ID NO: 445954 - RNA, 20 nt, Artificial Sequence
  Synthetic
ugcugaaacacuaacgagaa

SEQ ID NO: 445955 - RNA, 21 nt, Artificial Sequence
  Synthetic
cugcugaaacacuaacgagaa

SEQ ID NO: 445956 - RNA, 22 nt, Artificial Sequence
  Synthetic
gcugcugaaacacuaacgagaa

SEQ ID NO: 445957 - RNA, 23 nt, Artificial Sequence
  Synthetic
agcugcugaaacacuaacgagaa

SEQ ID NO: 445958 - RNA, 24 nt, Artificial Sequence
  Synthetic
cagcugcugaaacacuaacgagaa

SEQ ID NO: 445959 - RNA, 18 nt, Artificial Sequence
  Synthetic
ggggcugcuccccgagaa

SEQ ID NO: 445960 - RNA, 19 nt, Artificial Sequence
  Synthetic
uggggcugcuccccgagaa

SEQ ID NO: 445961 - RNA, 20 nt, Artificial Sequence
  Synthetic
auggggcugcuccccgagaa

SEQ ID NO: 445962 - RNA, 21 nt, Artificial Sequence
  Synthetic
cauggggcugcuccccgagaa

SEQ ID NO: 445963 - RNA, 22 nt, Artificial Sequence
  Synthetic
gcauggggcugcuccccgagaa

SEQ ID NO: 445964 - RNA, 23 nt, Artificial Sequence
  Synthetic
agcauggggcugcuccccgagaa

SEQ ID NO: 445965 - RNA, 24 nt, Artificial Sequence
  Synthetic
aagcauggggcugcuccccgagaa

SEQ ID NO: 445966 - RNA, 18 nt, Artificial Sequence
  Synthetic
aaugaaaugaagcgagaa

SEQ ID NO: 445967 - RNA, 19 nt, Artificial Sequence
  Synthetic
gaaugaaaugaagcgagaa

SEQ ID NO: 445968 - RNA, 20 nt, Artificial Sequence
  Synthetic
ugaaugaaaugaagcgagaa

SEQ ID NO: 445969 - RNA, 21 nt, Artificial Sequence
  Synthetic
augaaugaaaugaagcgagaa

SEQ ID NO: 445970 - RNA, 22 nt, Artificial Sequence
  Synthetic
aaugaaugaaaugaagcgagaa

SEQ ID NO: 445971 - RNA, 23 nt, Artificial Sequence
  Synthetic
aaaugaaugaaaugaagcgagaa

SEQ ID NO: 445972 - RNA, 24 nt, Artificial Sequence
  Synthetic
gaaaugaaugaaaugaagcgagaa

SEQ ID NO: 445973 - RNA, 18 nt, Artificial Sequence
  Synthetic
ugcacaugacaucgagaa

SEQ ID NO: 445974 - RNA, 19 nt, Artificial Sequence
  Synthetic
uugcacaugacaucgagaa

SEQ ID NO: 445975 - RNA, 20 nt, Artificial Sequence
  Synthetic
auugcacaugacaucgagaa

SEQ ID NO: 445976 - RNA, 21 nt, Artificial Sequence
  Synthetic
uauugcacaugacaucgagaa

SEQ ID NO: 445977 - RNA, 22 nt, Artificial Sequence
  Synthetic
guauugcacaugacaucgagaa

SEQ ID NO: 445978 - RNA, 23 nt, Artificial Sequence
  Synthetic
uguauugcacaugacaucgagaa

SEQ ID NO: 445979 - RNA, 24 nt, Artificial Sequence
  Synthetic
guguauugcacaugacaucgagaa

SEQ ID NO: 445980 - RNA, 18 nt, Artificial Sequence
  Synthetic
acuucucguuaaggagaa

SEQ ID NO: 445981 - RNA, 19 nt, Artificial Sequence
  Synthetic
uacuucucguuaaggagaa

SEQ ID NO: 445982 - RNA, 20 nt, Artificial Sequence
  Synthetic
uuacuucucguuaaggagaa

SEQ ID NO: 445983 - RNA, 21 nt, Artificial Sequence
  Synthetic
cuuacuucucguuaaggagaa

SEQ ID NO: 445984 - RNA, 22 nt, Artificial Sequence
  Synthetic
ccuuacuucucguuaaggagaa

SEQ ID NO: 445985 - RNA, 23 nt, Artificial Sequence
  Synthetic
uccuuacuucucguuaaggagaa

SEQ ID NO: 445986 - RNA, 24 nt, Artificial Sequence
  Synthetic
cuccuuacuucucguuaaggagaa

SEQ ID NO: 445987 - RNA, 18 nt, Artificial Sequence
  Synthetic
agagagacaggaggagaa

SEQ ID NO: 445988 - RNA, 19 nt, Artificial Sequence
  Synthetic
aagagagacaggaggagaa

SEQ ID NO: 445989 - RNA, 20 nt, Artificial Sequence
  Synthetic
uaagagagacaggaggagaa

SEQ ID NO: 445990 - RNA, 21 nt, Artificial Sequence
  Synthetic
auaagagagacaggaggagaa

SEQ ID NO: 445991 - RNA, 22 nt, Artificial Sequence
  Synthetic
aauaagagagacaggaggagaa

SEQ ID NO: 445992 - RNA, 23 nt, Artificial Sequence
  Synthetic
aaauaagagagacaggaggagaa

SEQ ID NO: 445993 - RNA, 24 nt, Artificial Sequence
  Synthetic
gaaauaagagagacaggaggagaa

SEQ ID NO: 445994 - RNA, 18 nt, Artificial Sequence
  Synthetic
ggcaaagugugaggagaa

SEQ ID NO: 445995 - RNA, 19 nt, Artificial Sequence
  Synthetic
aggcaaagugugaggagaa

SEQ ID NO: 445996 - RNA, 20 nt, Artificial Sequence
  Synthetic
gaggcaaagugugaggagaa

SEQ ID NO: 445997 - RNA, 21 nt, Artificial Sequence
  Synthetic
ggaggcaaagugugaggagaa

SEQ ID NO: 445998 - RNA, 22 nt, Artificial Sequence
  Synthetic
uggaggcaaagugugaggagaa

SEQ ID NO: 445999 - RNA, 23 nt, Artificial Sequence
  Synthetic
uuggaggcaaagugugaggagaa

SEQ ID NO: 446000 - RNA, 24 nt, Artificial Sequence
  Synthetic
guuggaggcaaagugugaggagaa

SEQ ID NO: 446001 - RNA, 18 nt, Artificial Sequence
  Synthetic
gguauucaauuaggagaa

SEQ ID NO: 446002 - RNA, 19 nt, Artificial Sequence
  Synthetic
ggguauucaauuaggagaa

SEQ ID NO: 446003 - RNA, 20 nt, Artificial Sequence
  Synthetic
aggguauucaauuaggagaa

SEQ ID NO: 446004 - RNA, 21 nt, Artificial Sequence
  Synthetic
aaggguauucaauuaggagaa

SEQ ID NO: 446005 - RNA, 22 nt, Artificial Sequence
  Synthetic
aaaggguauucaauuaggagaa

SEQ ID NO: 446006 - RNA, 23 nt, Artificial Sequence
  Synthetic
uaaaggguauucaauuaggagaa

SEQ ID NO: 446007 - RNA, 24 nt, Artificial Sequence
  Synthetic
auaaaggguauucaauuaggagaa

SEQ ID NO: 446008 - RNA, 18 nt, Artificial Sequence
  Synthetic
auuccuugaaagggagaa

SEQ ID NO: 446009 - RNA, 19 nt, Artificial Sequence
  Synthetic
gauuccuugaaagggagaa

SEQ ID NO: 446010 - RNA, 20 nt, Artificial Sequence
  Synthetic
agauuccuugaaagggagaa

SEQ ID NO: 446011 - RNA, 21 nt, Artificial Sequence
  Synthetic
uagauuccuugaaagggagaa

SEQ ID NO: 446012 - RNA, 22 nt, Artificial Sequence
  Synthetic
auagauuccuugaaagggagaa

SEQ ID NO: 446013 - RNA, 23 nt, Artificial Sequence
  Synthetic
aauagauuccuugaaagggagaa

SEQ ID NO: 446014 - RNA, 24 nt, Artificial Sequence
  Synthetic
gaauagauuccuugaaagggagaa

SEQ ID NO: 446015 - RNA, 18 nt, Artificial Sequence
  Synthetic
uccaaauccaagggagaa

SEQ ID NO: 446016 - RNA, 19 nt, Artificial Sequence
  Synthetic
cuccaaauccaagggagaa

SEQ ID NO: 446017 - RNA, 20 nt, Artificial Sequence
  Synthetic
ucuccaaauccaagggagaa

SEQ ID NO: 446018 - RNA, 21 nt, Artificial Sequence
  Synthetic
uucuccaaauccaagggagaa

SEQ ID NO: 446019 - RNA, 22 nt, Artificial Sequence
  Synthetic
uuucuccaaauccaagggagaa

SEQ ID NO: 446020 - RNA, 23 nt, Artificial Sequence
  Synthetic
uuuucuccaaauccaagggagaa

SEQ ID NO: 446021 - RNA, 24 nt, Artificial Sequence
  Synthetic
uuuuucuccaaauccaagggagaa

SEQ ID NO: 446022 - RNA, 18 nt, Artificial Sequence
  Synthetic
accaagauuaagggagaa

SEQ ID NO: 446023 - RNA, 19 nt, Artificial Sequence
  Synthetic
aaccaagauuaagggagaa

SEQ ID NO: 446024 - RNA, 20 nt, Artificial Sequence
  Synthetic
uaaccaagauuaagggagaa

SEQ ID NO: 446025 - RNA, 21 nt, Artificial Sequence
  Synthetic
uuaaccaagauuaagggagaa

SEQ ID NO: 446026 - RNA, 22 nt, Artificial Sequence
  Synthetic
auuaaccaagauuaagggagaa

SEQ ID NO: 446027 - RNA, 23 nt, Artificial Sequence
  Synthetic
cauuaaccaagauuaagggagaa

SEQ ID NO: 446028 - RNA, 24 nt, Artificial Sequence
  Synthetic
acauuaaccaagauuaagggagaa

SEQ ID NO: 446029 - RNA, 18 nt, Artificial Sequence
  Synthetic
cagcuggccaggggagaa

SEQ ID NO: 446030 - RNA, 19 nt, Artificial Sequence
  Synthetic
gcagcuggccaggggagaa

SEQ ID NO: 446031 - RNA, 20 nt, Artificial Sequence
  Synthetic
agcagcuggccaggggagaa

SEQ ID NO: 446032 - RNA, 21 nt, Artificial Sequence
  Synthetic
uagcagcuggccaggggagaa

SEQ ID NO: 446033 - RNA, 22 nt, Artificial Sequence
  Synthetic
guagcagcuggccaggggagaa

SEQ ID NO: 446034 - RNA, 23 nt, Artificial Sequence
  Synthetic
aguagcagcuggccaggggagaa

SEQ ID NO: 446035 - RNA, 24 nt, Artificial Sequence
  Synthetic
gaguagcagcuggccaggggagaa

SEQ ID NO: 446036 - RNA, 18 nt, Artificial Sequence
  Synthetic
acagugcugcugggagaa

SEQ ID NO: 446037 - RNA, 19 nt, Artificial Sequence
  Synthetic
aacagugcugcugggagaa

SEQ ID NO: 446038 - RNA, 20 nt, Artificial Sequence
  Synthetic
aaacagugcugcugggagaa

SEQ ID NO: 446039 - RNA, 21 nt, Artificial Sequence
  Synthetic
aaaacagugcugcugggagaa

SEQ ID NO: 446040 - RNA, 22 nt, Artificial Sequence
  Synthetic
gaaaacagugcugcugggagaa

SEQ ID NO: 446041 - RNA, 23 nt, Artificial Sequence
  Synthetic
ugaaaacagugcugcugggagaa

SEQ ID NO: 446042 - RNA, 24 nt, Artificial Sequence
  Synthetic
augaaaacagugcugcugggagaa

SEQ ID NO: 446043 - RNA, 18 nt, Artificial Sequence
  Synthetic
caacauccgaauggagaa

SEQ ID NO: 446044 - RNA, 19 nt, Artificial Sequence
  Synthetic
acaacauccgaauggagaa

SEQ ID NO: 446045 - RNA, 20 nt, Artificial Sequence
  Synthetic
gacaacauccgaauggagaa

SEQ ID NO: 446046 - RNA, 21 nt, Artificial Sequence
  Synthetic
agacaacauccgaauggagaa

SEQ ID NO: 446047 - RNA, 22 nt, Artificial Sequence
  Synthetic
cagacaacauccgaauggagaa

SEQ ID NO: 446048 - RNA, 23 nt, Artificial Sequence
  Synthetic
acagacaacauccgaauggagaa

SEQ ID NO: 446049 - RNA, 24 nt, Artificial Sequence
  Synthetic
cacagacaacauccgaauggagaa

SEQ ID NO: 446050 - RNA, 18 nt, Artificial Sequence
  Synthetic
aaagagccacauggagaa

SEQ ID NO: 446051 - RNA, 19 nt, Artificial Sequence
  Synthetic
aaaagagccacauggagaa

SEQ ID NO: 446052 - RNA, 20 nt, Artificial Sequence
  Synthetic
gaaaagagccacauggagaa

SEQ ID NO: 446053 - RNA, 21 nt, Artificial Sequence
  Synthetic
cgaaaagagccacauggagaa

SEQ ID NO: 446054 - RNA, 22 nt, Artificial Sequence
  Synthetic
acgaaaagagccacauggagaa

SEQ ID NO: 446055 - RNA, 23 nt, Artificial Sequence
  Synthetic
aacgaaaagagccacauggagaa

SEQ ID NO: 446056 - RNA, 24 nt, Artificial Sequence
  Synthetic
aaacgaaaagagccacauggagaa

SEQ ID NO: 446057 - RNA, 18 nt, Artificial Sequence
  Synthetic
uacacacaggauggagaa

SEQ ID NO: 446058 - RNA, 19 nt, Artificial Sequence
  Synthetic
uuacacacaggauggagaa

SEQ ID NO: 446059 - RNA, 20 nt, Artificial Sequence
  Synthetic
guuacacacaggauggagaa

SEQ ID NO: 446060 - RNA, 21 nt, Artificial Sequence
  Synthetic
aguuacacacaggauggagaa

SEQ ID NO: 446061 - RNA, 22 nt, Artificial Sequence
  Synthetic
gaguuacacacaggauggagaa

SEQ ID NO: 446062 - RNA, 23 nt, Artificial Sequence
  Synthetic
agaguuacacacaggauggagaa

SEQ ID NO: 446063 - RNA, 24 nt, Artificial Sequence
  Synthetic
cagaguuacacacaggauggagaa

SEQ ID NO: 446064 - RNA, 18 nt, Artificial Sequence
  Synthetic
uauaauuuggauggagaa

SEQ ID NO: 446065 - RNA, 19 nt, Artificial Sequence
  Synthetic
uuauaauuuggauggagaa

SEQ ID NO: 446066 - RNA, 20 nt, Artificial Sequence
  Synthetic
guuauaauuuggauggagaa

SEQ ID NO: 446067 - RNA, 21 nt, Artificial Sequence
  Synthetic
uguuauaauuuggauggagaa

SEQ ID NO: 446068 - RNA, 22 nt, Artificial Sequence
  Synthetic
uuguuauaauuuggauggagaa

SEQ ID NO: 446069 - RNA, 23 nt, Artificial Sequence
  Synthetic
uuuguuauaauuuggauggagaa

SEQ ID NO: 446070 - RNA, 24 nt, Artificial Sequence
  Synthetic
uuuuguuauaauuuggauggagaa

SEQ ID NO: 446071 - RNA, 18 nt, Artificial Sequence
  Synthetic
uaacugagugauggagaa

SEQ ID NO: 446072 - RNA, 19 nt, Artificial Sequence
  Synthetic
uuaacugagugauggagaa

SEQ ID NO: 446073 - RNA, 20 nt, Artificial Sequence
  Synthetic
cuuaacugagugauggagaa

SEQ ID NO: 446074 - RNA, 21 nt, Artificial Sequence
  Synthetic
ucuuaacugagugauggagaa

SEQ ID NO: 446075 - RNA, 22 nt, Artificial Sequence
  Synthetic
cucuuaacugagugauggagaa

SEQ ID NO: 446076 - RNA, 23 nt, Artificial Sequence
  Synthetic
gcucuuaacugagugauggagaa

SEQ ID NO: 446077 - RNA, 24 nt, Artificial Sequence
  Synthetic
agcucuuaacugagugauggagaa

SEQ ID NO: 446078 - RNA, 18 nt, Artificial Sequence
  Synthetic
uggcaagaauauggagaa

SEQ ID NO: 446079 - RNA, 19 nt, Artificial Sequence
  Synthetic
uuggcaagaauauggagaa

SEQ ID NO: 446080 - RNA, 20 nt, Artificial Sequence
  Synthetic
guuggcaagaauauggagaa

SEQ ID NO: 446081 - RNA, 21 nt, Artificial Sequence
  Synthetic
uguuggcaagaauauggagaa

SEQ ID NO: 446082 - RNA, 22 nt, Artificial Sequence
  Synthetic
guguuggcaagaauauggagaa

SEQ ID NO: 446083 - RNA, 23 nt, Artificial Sequence
  Synthetic
aguguuggcaagaauauggagaa

SEQ ID NO: 446084 - RNA, 24 nt, Artificial Sequence
  Synthetic
aaguguuggcaagaauauggagaa

SEQ ID NO: 446085 - RNA, 18 nt, Artificial Sequence
  Synthetic
gaggugaacacuggagaa

SEQ ID NO: 446086 - RNA, 19 nt, Artificial Sequence
  Synthetic
ugaggugaacacuggagaa

SEQ ID NO: 446087 - RNA, 20 nt, Artificial Sequence
  Synthetic
gugaggugaacacuggagaa

SEQ ID NO: 446088 - RNA, 21 nt, Artificial Sequence
  Synthetic
ugugaggugaacacuggagaa

SEQ ID NO: 446089 - RNA, 22 nt, Artificial Sequence
  Synthetic
gugugaggugaacacuggagaa

SEQ ID NO: 446090 - RNA, 23 nt, Artificial Sequence
  Synthetic
cgugugaggugaacacuggagaa

SEQ ID NO: 446091 - RNA, 24 nt, Artificial Sequence
  Synthetic
acgugugaggugaacacuggagaa

SEQ ID NO: 446092 - RNA, 18 nt, Artificial Sequence
  Synthetic
aagcuauacacuggagaa

SEQ ID NO: 446093 - RNA, 19 nt, Artificial Sequence
  Synthetic
caagcuauacacuggagaa

SEQ ID NO: 446094 - RNA, 20 nt, Artificial Sequence
  Synthetic
gcaagcuauacacuggagaa

SEQ ID NO: 446095 - RNA, 21 nt, Artificial Sequence
  Synthetic
ugcaagcuauacacuggagaa

SEQ ID NO: 446096 - RNA, 22 nt, Artificial Sequence
  Synthetic
uugcaagcuauacacuggagaa

SEQ ID NO: 446097 - RNA, 23 nt, Artificial Sequence
  Synthetic
cuugcaagcuauacacuggagaa

SEQ ID NO: 446098 - RNA, 24 nt, Artificial Sequence
  Synthetic
gcuugcaagcuauacacuggagaa

SEQ ID NO: 446099 - RNA, 18 nt, Artificial Sequence
  Synthetic
auuaaauggucuggagaa

SEQ ID NO: 446100 - RNA, 19 nt, Artificial Sequence
  Synthetic
uauuaaauggucuggagaa

SEQ ID NO: 446101 - RNA, 20 nt, Artificial Sequence
  Synthetic
guauuaaauggucuggagaa

SEQ ID NO: 446102 - RNA, 21 nt, Artificial Sequence
  Synthetic
uguauuaaauggucuggagaa

SEQ ID NO: 446103 - RNA, 22 nt, Artificial Sequence
  Synthetic
guguauuaaauggucuggagaa

SEQ ID NO: 446104 - RNA, 23 nt, Artificial Sequence
  Synthetic
aguguauuaaauggucuggagaa

SEQ ID NO: 446105 - RNA, 24 nt, Artificial Sequence
  Synthetic
gaguguauuaaauggucuggagaa

SEQ ID NO: 446106 - RNA, 18 nt, Artificial Sequence
  Synthetic
uggccagaauguggagaa

SEQ ID NO: 446107 - RNA, 19 nt, Artificial Sequence
  Synthetic
uuggccagaauguggagaa

SEQ ID NO: 446108 - RNA, 20 nt, Artificial Sequence
  Synthetic
guuggccagaauguggagaa

SEQ ID NO: 446109 - RNA, 21 nt, Artificial Sequence
  Synthetic
uguuggccagaauguggagaa

SEQ ID NO: 446110 - RNA, 22 nt, Artificial Sequence
  Synthetic
guguuggccagaauguggagaa

SEQ ID NO: 446111 - RNA, 23 nt, Artificial Sequence
  Synthetic
aguguuggccagaauguggagaa

SEQ ID NO: 446112 - RNA, 24 nt, Artificial Sequence
  Synthetic
aaguguuggccagaauguggagaa

SEQ ID NO: 446113 - RNA, 18 nt, Artificial Sequence
  Synthetic
uggagagaauguggagaa

SEQ ID NO: 446114 - RNA, 19 nt, Artificial Sequence
  Synthetic
cuggagagaauguggagaa

SEQ ID NO: 446115 - RNA, 20 nt, Artificial Sequence
  Synthetic
gcuggagagaauguggagaa

SEQ ID NO: 446116 - RNA, 21 nt, Artificial Sequence
  Synthetic
ggcuggagagaauguggagaa

SEQ ID NO: 446117 - RNA, 22 nt, Artificial Sequence
  Synthetic
gggcuggagagaauguggagaa

SEQ ID NO: 446118 - RNA, 23 nt, Artificial Sequence
  Synthetic
ugggcuggagagaauguggagaa

SEQ ID NO: 446119 - RNA, 24 nt, Artificial Sequence
  Synthetic
cugggcuggagagaauguggagaa

SEQ ID NO: 446120 - RNA, 18 nt, Artificial Sequence
  Synthetic
ugaaagugauguggagaa

SEQ ID NO: 446121 - RNA, 19 nt, Artificial Sequence
  Synthetic
cugaaagugauguggagaa

SEQ ID NO: 446122 - RNA, 20 nt, Artificial Sequence
  Synthetic
ccugaaagugauguggagaa

SEQ ID NO: 446123 - RNA, 21 nt, Artificial Sequence
  Synthetic
accugaaagugauguggagaa

SEQ ID NO: 446124 - RNA, 22 nt, Artificial Sequence
  Synthetic
uaccugaaagugauguggagaa

SEQ ID NO: 446125 - RNA, 23 nt, Artificial Sequence
  Synthetic
guaccugaaagugauguggagaa

SEQ ID NO: 446126 - RNA, 24 nt, Artificial Sequence
  Synthetic
uguaccugaaagugauguggagaa

SEQ ID NO: 446127 - RNA, 18 nt, Artificial Sequence
  Synthetic
uggcacauuuuuggagaa

SEQ ID NO: 446128 - RNA, 19 nt, Artificial Sequence
  Synthetic
uuggcacauuuuuggagaa

SEQ ID NO: 446129 - RNA, 20 nt, Artificial Sequence
  Synthetic
cuuggcacauuuuuggagaa

SEQ ID NO: 446130 - RNA, 21 nt, Artificial Sequence
  Synthetic
ccuuggcacauuuuuggagaa

SEQ ID NO: 446131 - RNA, 22 nt, Artificial Sequence
  Synthetic
uccuuggcacauuuuuggagaa

SEQ ID NO: 446132 - RNA, 23 nt, Artificial Sequence
  Synthetic
uuccuuggcacauuuuuggagaa

SEQ ID NO: 446133 - RNA, 24 nt, Artificial Sequence
  Synthetic
uuuccuuggcacauuuuuggagaa

SEQ ID NO: 446134 - RNA, 18 nt, Artificial Sequence
  Synthetic
uaaaaucagaaaugagaa

SEQ ID NO: 446135 - RNA, 19 nt, Artificial Sequence
  Synthetic
guaaaaucagaaaugagaa

SEQ ID NO: 446136 - RNA, 20 nt, Artificial Sequence
  Synthetic
aguaaaaucagaaaugagaa

SEQ ID NO: 446137 - RNA, 21 nt, Artificial Sequence
  Synthetic
aaguaaaaucagaaaugagaa

SEQ ID NO: 446138 - RNA, 22 nt, Artificial Sequence
  Synthetic
uaaguaaaaucagaaaugagaa

SEQ ID NO: 446139 - RNA, 23 nt, Artificial Sequence
  Synthetic
auaaguaaaaucagaaaugagaa

SEQ ID NO: 446140 - RNA, 24 nt, Artificial Sequence
  Synthetic
aauaaguaaaaucagaaaugagaa

SEQ ID NO: 446141 - RNA, 18 nt, Artificial Sequence
  Synthetic
ucaaaagacacaugagaa

SEQ ID NO: 446142 - RNA, 19 nt, Artificial Sequence
  Synthetic
gucaaaagacacaugagaa

SEQ ID NO: 446143 - RNA, 20 nt, Artificial Sequence
  Synthetic
ugucaaaagacacaugagaa

SEQ ID NO: 446144 - RNA, 21 nt, Artificial Sequence
  Synthetic
augucaaaagacacaugagaa

SEQ ID NO: 446145 - RNA, 22 nt, Artificial Sequence
  Synthetic
uaugucaaaagacacaugagaa

SEQ ID NO: 446146 - RNA, 23 nt, Artificial Sequence
  Synthetic
auaugucaaaagacacaugagaa

SEQ ID NO: 446147 - RNA, 24 nt, Artificial Sequence
  Synthetic
aauaugucaaaagacacaugagaa

SEQ ID NO: 446148 - RNA, 18 nt, Artificial Sequence
  Synthetic
cauuacacugcaugagaa

SEQ ID NO: 446149 - RNA, 19 nt, Artificial Sequence
  Synthetic
ucauuacacugcaugagaa

SEQ ID NO: 446150 - RNA, 20 nt, Artificial Sequence
  Synthetic
cucauuacacugcaugagaa

SEQ ID NO: 446151 - RNA, 21 nt, Artificial Sequence
  Synthetic
acucauuacacugcaugagaa

SEQ ID NO: 446152 - RNA, 22 nt, Artificial Sequence
  Synthetic
uacucauuacacugcaugagaa

SEQ ID NO: 446153 - RNA, 23 nt, Artificial Sequence
  Synthetic
guacucauuacacugcaugagaa

SEQ ID NO: 446154 - RNA, 24 nt, Artificial Sequence
  Synthetic
gguacucauuacacugcaugagaa

SEQ ID NO: 446155 - RNA, 18 nt, Artificial Sequence
  Synthetic
cuagcggagcuaugagaa

SEQ ID NO: 446156 - RNA, 19 nt, Artificial Sequence
  Synthetic
ccuagcggagcuaugagaa

SEQ ID NO: 446157 - RNA, 20 nt, Artificial Sequence
  Synthetic
gccuagcggagcuaugagaa

SEQ ID NO: 446158 - RNA, 21 nt, Artificial Sequence
  Synthetic
ugccuagcggagcuaugagaa

SEQ ID NO: 446159 - RNA, 22 nt, Artificial Sequence
  Synthetic
cugccuagcggagcuaugagaa

SEQ ID NO: 446160 - RNA, 23 nt, Artificial Sequence
  Synthetic
acugccuagcggagcuaugagaa

SEQ ID NO: 446161 - RNA, 24 nt, Artificial Sequence
  Synthetic
cacugccuagcggagcuaugagaa

SEQ ID NO: 446162 - RNA, 18 nt, Artificial Sequence
  Synthetic
ggcuuacugcuaugagaa

SEQ ID NO: 446163 - RNA, 19 nt, Artificial Sequence
  Synthetic
aggcuuacugcuaugagaa

SEQ ID NO: 446164 - RNA, 20 nt, Artificial Sequence
  Synthetic
caggcuuacugcuaugagaa

SEQ ID NO: 446165 - RNA, 21 nt, Artificial Sequence
  Synthetic
gcaggcuuacugcuaugagaa

SEQ ID NO: 446166 - RNA, 22 nt, Artificial Sequence
  Synthetic
ugcaggcuuacugcuaugagaa

SEQ ID NO: 446167 - RNA, 23 nt, Artificial Sequence
  Synthetic
cugcaggcuuacugcuaugagaa

SEQ ID NO: 446168 - RNA, 24 nt, Artificial Sequence
  Synthetic
gcugcaggcuuacugcuaugagaa

SEQ ID NO: 446169 - RNA, 18 nt, Artificial Sequence
  Synthetic
augaguuugcacugagaa

SEQ ID NO: 446170 - RNA, 19 nt, Artificial Sequence
  Synthetic
aaugaguuugcacugagaa

SEQ ID NO: 446171 - RNA, 20 nt, Artificial Sequence
  Synthetic
uaaugaguuugcacugagaa

SEQ ID NO: 446172 - RNA, 21 nt, Artificial Sequence
  Synthetic
uuaaugaguuugcacugagaa

SEQ ID NO: 446173 - RNA, 22 nt, Artificial Sequence
  Synthetic
uuuaaugaguuugcacugagaa

SEQ ID NO: 446174 - RNA, 23 nt, Artificial Sequence
  Synthetic
uuuuaaugaguuugcacugagaa

SEQ ID NO: 446175 - RNA, 24 nt, Artificial Sequence
  Synthetic
uuuuuaaugaguuugcacugagaa

SEQ ID NO: 446176 - RNA, 18 nt, Artificial Sequence
  Synthetic
guacaugugaagugagaa

SEQ ID NO: 446177 - RNA, 19 nt, Artificial Sequence
  Synthetic
aguacaugugaagugagaa

SEQ ID NO: 446178 - RNA, 20 nt, Artificial Sequence
  Synthetic
gaguacaugugaagugagaa

SEQ ID NO: 446179 - RNA, 21 nt, Artificial Sequence
  Synthetic
agaguacaugugaagugagaa

SEQ ID NO: 446180 - RNA, 22 nt, Artificial Sequence
  Synthetic
aagaguacaugugaagugagaa

SEQ ID NO: 446181 - RNA, 23 nt, Artificial Sequence
  Synthetic
aaagaguacaugugaagugagaa

SEQ ID NO: 446182 - RNA, 24 nt, Artificial Sequence
  Synthetic
caaagaguacaugugaagugagaa

SEQ ID NO: 446183 - RNA, 18 nt, Artificial Sequence
  Synthetic
ugcaaaguucagugagaa

SEQ ID NO: 446184 - RNA, 19 nt, Artificial Sequence
  Synthetic
augcaaaguucagugagaa

SEQ ID NO: 446185 - RNA, 20 nt, Artificial Sequence
  Synthetic
uaugcaaaguucagugagaa

SEQ ID NO: 446186 - RNA, 21 nt, Artificial Sequence
  Synthetic
auaugcaaaguucagugagaa

SEQ ID NO: 446187 - RNA, 22 nt, Artificial Sequence
  Synthetic
gauaugcaaaguucagugagaa

SEQ ID NO: 446188 - RNA, 23 nt, Artificial Sequence
  Synthetic
ugauaugcaaaguucagugagaa

SEQ ID NO: 446189 - RNA, 24 nt, Artificial Sequence
  Synthetic
uugauaugcaaaguucagugagaa

SEQ ID NO: 446190 - RNA, 18 nt, Artificial Sequence
  Synthetic
ccuagcgaugggugagaa

SEQ ID NO: 446191 - RNA, 19 nt, Artificial Sequence
  Synthetic
accuagcgaugggugagaa

SEQ ID NO: 446192 - RNA, 20 nt, Artificial Sequence
  Synthetic
aaccuagcgaugggugagaa

SEQ ID NO: 446193 - RNA, 21 nt, Artificial Sequence
  Synthetic
gaaccuagcgaugggugagaa

SEQ ID NO: 446194 - RNA, 22 nt, Artificial Sequence
  Synthetic
ugaaccuagcgaugggugagaa

SEQ ID NO: 446195 - RNA, 23 nt, Artificial Sequence
  Synthetic
augaaccuagcgaugggugagaa

SEQ ID NO: 446196 - RNA, 24 nt, Artificial Sequence
  Synthetic
caugaaccuagcgaugggugagaa

SEQ ID NO: 446197 - RNA, 18 nt, Artificial Sequence
  Synthetic
aaugaugcuuggugagaa

SEQ ID NO: 446198 - RNA, 19 nt, Artificial Sequence
  Synthetic
gaaugaugcuuggugagaa

SEQ ID NO: 446199 - RNA, 20 nt, Artificial Sequence
  Synthetic
agaaugaugcuuggugagaa

SEQ ID NO: 446200 - RNA, 21 nt, Artificial Sequence
  Synthetic
cagaaugaugcuuggugagaa

SEQ ID NO: 446201 - RNA, 22 nt, Artificial Sequence
  Synthetic
acagaaugaugcuuggugagaa

SEQ ID NO: 446202 - RNA, 23 nt, Artificial Sequence
  Synthetic
aacagaaugaugcuuggugagaa

SEQ ID NO: 446203 - RNA, 24 nt, Artificial Sequence
  Synthetic
uaacagaaugaugcuuggugagaa

SEQ ID NO: 446204 - RNA, 18 nt, Artificial Sequence
  Synthetic
guuaccuggaugugagaa

SEQ ID NO: 446205 - RNA, 19 nt, Artificial Sequence
  Synthetic
uguuaccuggaugugagaa

SEQ ID NO: 446206 - RNA, 20 nt, Artificial Sequence
  Synthetic
guguuaccuggaugugagaa

SEQ ID NO: 446207 - RNA, 21 nt, Artificial Sequence
  Synthetic
aguguuaccuggaugugagaa

SEQ ID NO: 446208 - RNA, 22 nt, Artificial Sequence
  Synthetic
caguguuaccuggaugugagaa

SEQ ID NO: 446209 - RNA, 23 nt, Artificial Sequence
  Synthetic
ucaguguuaccuggaugugagaa

SEQ ID NO: 446210 - RNA, 24 nt, Artificial Sequence
  Synthetic
aucaguguuaccuggaugugagaa

SEQ ID NO: 446211 - RNA, 18 nt, Artificial Sequence
  Synthetic
cuaguagagcugugagaa

SEQ ID NO: 446212 - RNA, 19 nt, Artificial Sequence
  Synthetic
ccuaguagagcugugagaa

SEQ ID NO: 446213 - RNA, 20 nt, Artificial Sequence
  Synthetic
gccuaguagagcugugagaa

SEQ ID NO: 446214 - RNA, 21 nt, Artificial Sequence
  Synthetic
ugccuaguagagcugugagaa

SEQ ID NO: 446215 - RNA, 22 nt, Artificial Sequence
  Synthetic
cugccuaguagagcugugagaa

SEQ ID NO: 446216 - RNA, 23 nt, Artificial Sequence
  Synthetic
acugccuaguagagcugugagaa

SEQ ID NO: 446217 - RNA, 24 nt, Artificial Sequence
  Synthetic
cacugccuaguagagcugugagaa

SEQ ID NO: 446218 - RNA, 18 nt, Artificial Sequence
  Synthetic
aaauugaggccuugagaa

SEQ ID NO: 446219 - RNA, 19 nt, Artificial Sequence
  Synthetic
gaaauugaggccuugagaa

SEQ ID NO: 446220 - RNA, 20 nt, Artificial Sequence
  Synthetic
agaaauugaggccuugagaa

SEQ ID NO: 446221 - RNA, 21 nt, Artificial Sequence
  Synthetic
aagaaauugaggccuugagaa

SEQ ID NO: 446222 - RNA, 22 nt, Artificial Sequence
  Synthetic
caagaaauugaggccuugagaa

SEQ ID NO: 446223 - RNA, 23 nt, Artificial Sequence
  Synthetic
ucaagaaauugaggccuugagaa

SEQ ID NO: 446224 - RNA, 24 nt, Artificial Sequence
  Synthetic
cucaagaaauugaggccuugagaa

SEQ ID NO: 446225 - RNA, 18 nt, Artificial Sequence
  Synthetic
uucuuuuugccuugagaa

SEQ ID NO: 446226 - RNA, 19 nt, Artificial Sequence
  Synthetic
auucuuuuugccuugagaa

SEQ ID NO: 446227 - RNA, 20 nt, Artificial Sequence
  Synthetic
aauucuuuuugccuugagaa

SEQ ID NO: 446228 - RNA, 21 nt, Artificial Sequence
  Synthetic
gaauucuuuuugccuugagaa

SEQ ID NO: 446229 - RNA, 22 nt, Artificial Sequence
  Synthetic
ggaauucuuuuugccuugagaa

SEQ ID NO: 446230 - RNA, 23 nt, Artificial Sequence
  Synthetic
uggaauucuuuuugccuugagaa

SEQ ID NO: 446231 - RNA, 24 nt, Artificial Sequence
  Synthetic
cuggaauucuuuuugccuugagaa

SEQ ID NO: 446232 - RNA, 18 nt, Artificial Sequence
  Synthetic
uucucaggcucuugagaa

SEQ ID NO: 446233 - RNA, 19 nt, Artificial Sequence
  Synthetic
uuucucaggcucuugagaa

SEQ ID NO: 446234 - RNA, 20 nt, Artificial Sequence
  Synthetic
guuucucaggcucuugagaa

SEQ ID NO: 446235 - RNA, 21 nt, Artificial Sequence
  Synthetic
cguuucucaggcucuugagaa

SEQ ID NO: 446236 - RNA, 22 nt, Artificial Sequence
  Synthetic
ucguuucucaggcucuugagaa

SEQ ID NO: 446237 - RNA, 23 nt, Artificial Sequence
  Synthetic
gucguuucucaggcucuugagaa

SEQ ID NO: 446238 - RNA, 24 nt, Artificial Sequence
  Synthetic
ugucguuucucaggcucuugagaa

SEQ ID NO: 446239 - RNA, 18 nt, Artificial Sequence
  Synthetic
cugugaucaaguugagaa

SEQ ID NO: 446240 - RNA, 19 nt, Artificial Sequence
  Synthetic
gcugugaucaaguugagaa

SEQ ID NO: 446241 - RNA, 20 nt, Artificial Sequence
  Synthetic
ggcugugaucaaguugagaa

SEQ ID NO: 446242 - RNA, 21 nt, Artificial Sequence
  Synthetic
uggcugugaucaaguugagaa

SEQ ID NO: 446243 - RNA, 22 nt, Artificial Sequence
  Synthetic
auggcugugaucaaguugagaa

SEQ ID NO: 446244 - RNA, 23 nt, Artificial Sequence
  Synthetic
gauggcugugaucaaguugagaa

SEQ ID NO: 446245 - RNA, 24 nt, Artificial Sequence
  Synthetic
cgauggcugugaucaaguugagaa

SEQ ID NO: 446246 - RNA, 18 nt, Artificial Sequence
  Synthetic
gugugucaggguugagaa

SEQ ID NO: 446247 - RNA, 19 nt, Artificial Sequence
  Synthetic
agugugucaggguugagaa

SEQ ID NO: 446248 - RNA, 20 nt, Artificial Sequence
  Synthetic
cagugugucaggguugagaa

SEQ ID NO: 446249 - RNA, 21 nt, Artificial Sequence
  Synthetic
ccagugugucaggguugagaa

SEQ ID NO: 446250 - RNA, 22 nt, Artificial Sequence
  Synthetic
uccagugugucaggguugagaa

SEQ ID NO: 446251 - RNA, 23 nt, Artificial Sequence
  Synthetic
auccagugugucaggguugagaa

SEQ ID NO: 446252 - RNA, 24 nt, Artificial Sequence
  Synthetic
cauccagugugucaggguugagaa

SEQ ID NO: 446253 - RNA, 18 nt, Artificial Sequence
  Synthetic
acauuucacauuugagaa

SEQ ID NO: 446254 - RNA, 19 nt, Artificial Sequence
  Synthetic
gacauuucacauuugagaa

SEQ ID NO: 446255 - RNA, 20 nt, Artificial Sequence
  Synthetic
ggacauuucacauuugagaa

SEQ ID NO: 446256 - RNA, 21 nt, Artificial Sequence
  Synthetic
uggacauuucacauuugagaa

SEQ ID NO: 446257 - RNA, 22 nt, Artificial Sequence
  Synthetic
cuggacauuucacauuugagaa

SEQ ID NO: 446258 - RNA, 23 nt, Artificial Sequence
  Synthetic
ucuggacauuucacauuugagaa

SEQ ID NO: 446259 - RNA, 24 nt, Artificial Sequence
  Synthetic
cucuggacauuucacauuugagaa

SEQ ID NO: 446260 - RNA, 18 nt, Artificial Sequence
  Synthetic
gaaaucagauuuugagaa

SEQ ID NO: 446261 - RNA, 19 nt, Artificial Sequence
  Synthetic
ugaaaucagauuuugagaa

SEQ ID NO: 446262 - RNA, 20 nt, Artificial Sequence
  Synthetic
uugaaaucagauuuugagaa

SEQ ID NO: 446263 - RNA, 21 nt, Artificial Sequence
  Synthetic
guugaaaucagauuuugagaa

SEQ ID NO: 446264 - RNA, 22 nt, Artificial Sequence
  Synthetic
aguugaaaucagauuuugagaa

SEQ ID NO: 446265 - RNA, 23 nt, Artificial Sequence
  Synthetic
caguugaaaucagauuuugagaa

SEQ ID NO: 446266 - RNA, 24 nt, Artificial Sequence
  Synthetic
gcaguugaaaucagauuuugagaa

SEQ ID NO: 446267 - RNA, 18 nt, Artificial Sequence
  Synthetic
uaaaaacccaaaauagaa

SEQ ID NO: 446268 - RNA, 19 nt, Artificial Sequence
  Synthetic
guaaaaacccaaaauagaa

SEQ ID NO: 446269 - RNA, 20 nt, Artificial Sequence
  Synthetic
uguaaaaacccaaaauagaa

SEQ ID NO: 446270 - RNA, 21 nt, Artificial Sequence
  Synthetic
auguaaaaacccaaaauagaa

SEQ ID NO: 446271 - RNA, 22 nt, Artificial Sequence
  Synthetic
cauguaaaaacccaaaauagaa

SEQ ID NO: 446272 - RNA, 23 nt, Artificial Sequence
  Synthetic
acauguaaaaacccaaaauagaa

SEQ ID NO: 446273 - RNA, 24 nt, Artificial Sequence
  Synthetic
aacauguaaaaacccaaaauagaa

SEQ ID NO: 446274 - RNA, 18 nt, Artificial Sequence
  Synthetic
guggcugaggaaauagaa

SEQ ID NO: 446275 - RNA, 19 nt, Artificial Sequence
  Synthetic
gguggcugaggaaauagaa

SEQ ID NO: 446276 - RNA, 20 nt, Artificial Sequence
  Synthetic
ggguggcugaggaaauagaa

SEQ ID NO: 446277 - RNA, 21 nt, Artificial Sequence
  Synthetic
gggguggcugaggaaauagaa

SEQ ID NO: 446278 - RNA, 22 nt, Artificial Sequence
  Synthetic
ggggguggcugaggaaauagaa

SEQ ID NO: 446279 - RNA, 23 nt, Artificial Sequence
  Synthetic
gggggguggcugaggaaauagaa

SEQ ID NO: 446280 - RNA, 24 nt, Artificial Sequence
  Synthetic
agggggguggcugaggaaauagaa

SEQ ID NO: 446281 - RNA, 18 nt, Artificial Sequence
  Synthetic
augauggcaacaauagaa

SEQ ID NO: 446282 - RNA, 19 nt, Artificial Sequence
  Synthetic
aaugauggcaacaauagaa

SEQ ID NO: 446283 - RNA, 20 nt, Artificial Sequence
  Synthetic
uaaugauggcaacaauagaa

SEQ ID NO: 446284 - RNA, 21 nt, Artificial Sequence
  Synthetic
auaaugauggcaacaauagaa

SEQ ID NO: 446285 - RNA, 22 nt, Artificial Sequence
  Synthetic
cauaaugauggcaacaauagaa

SEQ ID NO: 446286 - RNA, 23 nt, Artificial Sequence
  Synthetic
acauaaugauggcaacaauagaa

SEQ ID NO: 446287 - RNA, 24 nt, Artificial Sequence
  Synthetic
gacauaaugauggcaacaauagaa

SEQ ID NO: 446288 - RNA, 18 nt, Artificial Sequence
  Synthetic
agcuuagccacaauagaa

SEQ ID NO: 446289 - RNA, 19 nt, Artificial Sequence
  Synthetic
uagcuuagccacaauagaa

SEQ ID NO: 446290 - RNA, 20 nt, Artificial Sequence
  Synthetic
cuagcuuagccacaauagaa

SEQ ID NO: 446291 - RNA, 21 nt, Artificial Sequence
  Synthetic
gcuagcuuagccacaauagaa

SEQ ID NO: 446292 - RNA, 22 nt, Artificial Sequence
  Synthetic
ugcuagcuuagccacaauagaa

SEQ ID NO: 446293 - RNA, 23 nt, Artificial Sequence
  Synthetic
gugcuagcuuagccacaauagaa

SEQ ID NO: 446294 - RNA, 24 nt, Artificial Sequence
  Synthetic
agugcuagcuuagccacaauagaa

SEQ ID NO: 446295 - RNA, 18 nt, Artificial Sequence
  Synthetic
agauaaugagcaauagaa

SEQ ID NO: 446296 - RNA, 19 nt, Artificial Sequence
  Synthetic
aagauaaugagcaauagaa

SEQ ID NO: 446297 - RNA, 20 nt, Artificial Sequence
  Synthetic
caagauaaugagcaauagaa

SEQ ID NO: 446298 - RNA, 21 nt, Artificial Sequence
  Synthetic
gcaagauaaugagcaauagaa

SEQ ID NO: 446299 - RNA, 22 nt, Artificial Sequence
  Synthetic
agcaagauaaugagcaauagaa

SEQ ID NO: 446300 - RNA, 23 nt, Artificial Sequence
  Synthetic
cagcaagauaaugagcaauagaa

SEQ ID NO: 446301 - RNA, 24 nt, Artificial Sequence
  Synthetic
acagcaagauaaugagcaauagaa

SEQ ID NO: 446302 - RNA, 18 nt, Artificial Sequence
  Synthetic
ccugaagaugcaauagaa

SEQ ID NO: 446303 - RNA, 19 nt, Artificial Sequence
  Synthetic
gccugaagaugcaauagaa

SEQ ID NO: 446304 - RNA, 20 nt, Artificial Sequence
  Synthetic
agccugaagaugcaauagaa

SEQ ID NO: 446305 - RNA, 21 nt, Artificial Sequence
  Synthetic
cagccugaagaugcaauagaa

SEQ ID NO: 446306 - RNA, 22 nt, Artificial Sequence
  Synthetic
gcagccugaagaugcaauagaa

SEQ ID NO: 446307 - RNA, 23 nt, Artificial Sequence
  Synthetic
ugcagccugaagaugcaauagaa

SEQ ID NO: 446308 - RNA, 24 nt, Artificial Sequence
  Synthetic
uugcagccugaagaugcaauagaa

SEQ ID NO: 446309 - RNA, 18 nt, Artificial Sequence
  Synthetic
guuagugacagaauagaa

SEQ ID NO: 446310 - RNA, 19 nt, Artificial Sequence
  Synthetic
aguuagugacagaauagaa

SEQ ID NO: 446311 - RNA, 20 nt, Artificial Sequence
  Synthetic
caguuagugacagaauagaa

SEQ ID NO: 446312 - RNA, 21 nt, Artificial Sequence
  Synthetic
acaguuagugacagaauagaa

SEQ ID NO: 446313 - RNA, 22 nt, Artificial Sequence
  Synthetic
gacaguuagugacagaauagaa

SEQ ID NO: 446314 - RNA, 23 nt, Artificial Sequence
  Synthetic
agacaguuagugacagaauagaa

SEQ ID NO: 446315 - RNA, 24 nt, Artificial Sequence
  Synthetic
aagacaguuagugacagaauagaa

SEQ ID NO: 446316 - RNA, 18 nt, Artificial Sequence
  Synthetic
uccugggaaaacauagaa

SEQ ID NO: 446317 - RNA, 19 nt, Artificial Sequence
  Synthetic
guccugggaaaacauagaa

SEQ ID NO: 446318 - RNA, 20 nt, Artificial Sequence
  Synthetic
aguccugggaaaacauagaa

SEQ ID NO: 446319 - RNA, 21 nt, Artificial Sequence
  Synthetic
gaguccugggaaaacauagaa

SEQ ID NO: 446320 - RNA, 22 nt, Artificial Sequence
  Synthetic
agaguccugggaaaacauagaa

SEQ ID NO: 446321 - RNA, 23 nt, Artificial Sequence
  Synthetic
gagaguccugggaaaacauagaa

SEQ ID NO: 446322 - RNA, 24 nt, Artificial Sequence
  Synthetic
ugagaguccugggaaaacauagaa

SEQ ID NO: 446323 - RNA, 18 nt, Artificial Sequence
  Synthetic
gaaagcuggcacauagaa

SEQ ID NO: 446324 - RNA, 19 nt, Artificial Sequence
  Synthetic
agaaagcuggcacauagaa

SEQ ID NO: 446325 - RNA, 20 nt, Artificial Sequence
  Synthetic
aagaaagcuggcacauagaa

SEQ ID NO: 446326 - RNA, 21 nt, Artificial Sequence
  Synthetic
aaagaaagcuggcacauagaa

SEQ ID NO: 446327 - RNA, 22 nt, Artificial Sequence
  Synthetic
caaagaaagcuggcacauagaa

SEQ ID NO: 446328 - RNA, 23 nt, Artificial Sequence
  Synthetic
ccaaagaaagcuggcacauagaa

SEQ ID NO: 446329 - RNA, 24 nt, Artificial Sequence
  Synthetic
uccaaagaaagcuggcacauagaa

SEQ ID NO: 446330 - RNA, 18 nt, Artificial Sequence
  Synthetic
uggcuuugagacauagaa

SEQ ID NO: 446331 - RNA, 19 nt, Artificial Sequence
  Synthetic
auggcuuugagacauagaa

SEQ ID NO: 446332 - RNA, 20 nt, Artificial Sequence
  Synthetic
gauggcuuugagacauagaa

SEQ ID NO: 446333 - RNA, 21 nt, Artificial Sequence
  Synthetic
agauggcuuugagacauagaa

SEQ ID NO: 446334 - RNA, 22 nt, Artificial Sequence
  Synthetic
gagauggcuuugagacauagaa

SEQ ID NO: 446335 - RNA, 23 nt, Artificial Sequence
  Synthetic
ugagauggcuuugagacauagaa

SEQ ID NO: 446336 - RNA, 24 nt, Artificial Sequence
  Synthetic
uugagauggcuuugagacauagaa

SEQ ID NO: 446337 - RNA, 18 nt, Artificial Sequence
  Synthetic
ccuaucuaugacauagaa

SEQ ID NO: 446338 - RNA, 19 nt, Artificial Sequence
  Synthetic
cccuaucuaugacauagaa

SEQ ID NO: 446339 - RNA, 20 nt, Artificial Sequence
  Synthetic
ccccuaucuaugacauagaa

SEQ ID NO: 446340 - RNA, 21 nt, Artificial Sequence
  Synthetic
cccccuaucuaugacauagaa

SEQ ID NO: 446341 - RNA, 22 nt, Artificial Sequence
  Synthetic
gcccccuaucuaugacauagaa

SEQ ID NO: 446342 - RNA, 23 nt, Artificial Sequence
  Synthetic
agcccccuaucuaugacauagaa

SEQ ID NO: 446343 - RNA, 24 nt, Artificial Sequence
  Synthetic
uagcccccuaucuaugacauagaa

SEQ ID NO: 446344 - RNA, 18 nt, Artificial Sequence
  Synthetic
agcaaacagugcauagaa

SEQ ID NO: 446345 - RNA, 19 nt, Artificial Sequence
  Synthetic
uagcaaacagugcauagaa

SEQ ID NO: 446346 - RNA, 20 nt, Artificial Sequence
  Synthetic
guagcaaacagugcauagaa

SEQ ID NO: 446347 - RNA, 21 nt, Artificial Sequence
  Synthetic
aguagcaaacagugcauagaa

SEQ ID NO: 446348 - RNA, 22 nt, Artificial Sequence
  Synthetic
aaguagcaaacagugcauagaa

SEQ ID NO: 446349 - RNA, 23 nt, Artificial Sequence
  Synthetic
aaaguagcaaacagugcauagaa

SEQ ID NO: 446350 - RNA, 24 nt, Artificial Sequence
  Synthetic
aaaaguagcaaacagugcauagaa

SEQ ID NO: 446351 - RNA, 18 nt, Artificial Sequence
  Synthetic
aaaguugaacucauagaa

SEQ ID NO: 446352 - RNA, 19 nt, Artificial Sequence
  Synthetic
aaaaguugaacucauagaa

SEQ ID NO: 446353 - RNA, 20 nt, Artificial Sequence
  Synthetic
aaaaaguugaacucauagaa

SEQ ID NO: 446354 - RNA, 21 nt, Artificial Sequence
  Synthetic
aaaaaaguugaacucauagaa

SEQ ID NO: 446355 - RNA, 22 nt, Artificial Sequence
  Synthetic
aaaaaaaguugaacucauagaa

SEQ ID NO: 446356 - RNA, 23 nt, Artificial Sequence
  Synthetic
uaaaaaaaguugaacucauagaa

SEQ ID NO: 446357 - RNA, 24 nt, Artificial Sequence
  Synthetic
uuaaaaaaaguugaacucauagaa

SEQ ID NO: 446358 - RNA, 18 nt, Artificial Sequence
  Synthetic
uugcuaaaauucauagaa

SEQ ID NO: 446359 - RNA, 19 nt, Artificial Sequence
  Synthetic
guugcuaaaauucauagaa

SEQ ID NO: 446360 - RNA, 20 nt, Artificial Sequence
  Synthetic
uguugcuaaaauucauagaa

SEQ ID NO: 446361 - RNA, 21 nt, Artificial Sequence
  Synthetic
guguugcuaaaauucauagaa

SEQ ID NO: 446362 - RNA, 22 nt, Artificial Sequence
  Synthetic
aguguugcuaaaauucauagaa

SEQ ID NO: 446363 - RNA, 23 nt, Artificial Sequence
  Synthetic
aaguguugcuaaaauucauagaa

SEQ ID NO: 446364 - RNA, 24 nt, Artificial Sequence
  Synthetic
uaaguguugcuaaaauucauagaa

SEQ ID NO: 446365 - RNA, 18 nt, Artificial Sequence
  Synthetic
aucugauuuaagauagaa

SEQ ID NO: 446366 - RNA, 19 nt, Artificial Sequence
  Synthetic
caucugauuuaagauagaa

SEQ ID NO: 446367 - RNA, 20 nt, Artificial Sequence
  Synthetic
ucaucugauuuaagauagaa

SEQ ID NO: 446368 - RNA, 21 nt, Artificial Sequence
  Synthetic
cucaucugauuuaagauagaa

SEQ ID NO: 446369 - RNA, 22 nt, Artificial Sequence
  Synthetic
acucaucugauuuaagauagaa

SEQ ID NO: 446370 - RNA, 23 nt, Artificial Sequence
  Synthetic
gacucaucugauuuaagauagaa

SEQ ID NO: 446371 - RNA, 24 nt, Artificial Sequence
  Synthetic
ggacucaucugauuuaagauagaa

SEQ ID NO: 446372 - RNA, 18 nt, Artificial Sequence
  Synthetic
cccaaauaagagauagaa

SEQ ID NO: 446373 - RNA, 19 nt, Artificial Sequence
  Synthetic
ucccaaauaagagauagaa

SEQ ID NO: 446374 - RNA, 20 nt, Artificial Sequence
  Synthetic
uucccaaauaagagauagaa

SEQ ID NO: 446375 - RNA, 21 nt, Artificial Sequence
  Synthetic
uuucccaaauaagagauagaa

SEQ ID NO: 446376 - RNA, 22 nt, Artificial Sequence
  Synthetic
guuucccaaauaagagauagaa

SEQ ID NO: 446377 - RNA, 23 nt, Artificial Sequence
  Synthetic
gguuucccaaauaagagauagaa

SEQ ID NO: 446378 - RNA, 24 nt, Artificial Sequence
  Synthetic
cgguuucccaaauaagagauagaa

SEQ ID NO: 446379 - RNA, 18 nt, Artificial Sequence
  Synthetic
aucucuugagagauagaa

SEQ ID NO: 446380 - RNA, 19 nt, Artificial Sequence
  Synthetic
gaucucuugagagauagaa

SEQ ID NO: 446381 - RNA, 20 nt, Artificial Sequence
  Synthetic
ggaucucuugagagauagaa

SEQ ID NO: 446382 - RNA, 21 nt, Artificial Sequence
  Synthetic
aggaucucuugagagauagaa

SEQ ID NO: 446383 - RNA, 22 nt, Artificial Sequence
  Synthetic
caggaucucuugagagauagaa

SEQ ID NO: 446384 - RNA, 23 nt, Artificial Sequence
  Synthetic
acaggaucucuugagagauagaa

SEQ ID NO: 446385 - RNA, 24 nt, Artificial Sequence
  Synthetic
aacaggaucucuugagagauagaa

SEQ ID NO: 446386 - RNA, 18 nt, Artificial Sequence
  Synthetic
cgugaaaugaggauagaa

SEQ ID NO: 446387 - RNA, 19 nt, Artificial Sequence
  Synthetic
ccgugaaaugaggauagaa

SEQ ID NO: 446388 - RNA, 20 nt, Artificial Sequence
  Synthetic
uccgugaaaugaggauagaa

SEQ ID NO: 446389 - RNA, 21 nt, Artificial Sequence
  Synthetic
guccgugaaaugaggauagaa

SEQ ID NO: 446390 - RNA, 22 nt, Artificial Sequence
  Synthetic
gguccgugaaaugaggauagaa

SEQ ID NO: 446391 - RNA, 23 nt, Artificial Sequence
  Synthetic
ggguccgugaaaugaggauagaa

SEQ ID NO: 446392 - RNA, 24 nt, Artificial Sequence
  Synthetic
uggguccgugaaaugaggauagaa

SEQ ID NO: 446393 - RNA, 18 nt, Artificial Sequence
  Synthetic
gcagcaacguggauagaa

SEQ ID NO: 446394 - RNA, 19 nt, Artificial Sequence
  Synthetic
ugcagcaacguggauagaa

SEQ ID NO: 446395 - RNA, 20 nt, Artificial Sequence
  Synthetic
uugcagcaacguggauagaa

SEQ ID NO: 446396 - RNA, 21 nt, Artificial Sequence
  Synthetic
uuugcagcaacguggauagaa

SEQ ID NO: 446397 - RNA, 22 nt, Artificial Sequence
  Synthetic
auuugcagcaacguggauagaa

SEQ ID NO: 446398 - RNA, 23 nt, Artificial Sequence
  Synthetic
cauuugcagcaacguggauagaa

SEQ ID NO: 446399 - RNA, 24 nt, Artificial Sequence
  Synthetic
ucauuugcagcaacguggauagaa

SEQ ID NO: 446400 - RNA, 18 nt, Artificial Sequence
  Synthetic
cugguaacuaugauagaa

SEQ ID NO: 446401 - RNA, 19 nt, Artificial Sequence
  Synthetic
ccugguaacuaugauagaa

SEQ ID NO: 446402 - RNA, 20 nt, Artificial Sequence
  Synthetic
uccugguaacuaugauagaa

SEQ ID NO: 446403 - RNA, 21 nt, Artificial Sequence
  Synthetic
auccugguaacuaugauagaa

SEQ ID NO: 446404 - RNA, 22 nt, Artificial Sequence
  Synthetic
aauccugguaacuaugauagaa

SEQ ID NO: 446405 - RNA, 23 nt, Artificial Sequence
  Synthetic
gaauccugguaacuaugauagaa

SEQ ID NO: 446406 - RNA, 24 nt, Artificial Sequence
  Synthetic
ugaauccugguaacuaugauagaa

SEQ ID NO: 446407 - RNA, 18 nt, Artificial Sequence
  Synthetic
caucuuuaauugauagaa

SEQ ID NO: 446408 - RNA, 19 nt, Artificial Sequence
  Synthetic
ucaucuuuaauugauagaa

SEQ ID NO: 446409 - RNA, 20 nt, Artificial Sequence
  Synthetic
uucaucuuuaauugauagaa

SEQ ID NO: 446410 - RNA, 21 nt, Artificial Sequence
  Synthetic
uuucaucuuuaauugauagaa

SEQ ID NO: 446411 - RNA, 22 nt, Artificial Sequence
  Synthetic
uuuucaucuuuaauugauagaa

SEQ ID NO: 446412 - RNA, 23 nt, Artificial Sequence
  Synthetic
guuuucaucuuuaauugauagaa

SEQ ID NO: 446413 - RNA, 24 nt, Artificial Sequence
  Synthetic
gguuuucaucuuuaauugauagaa

SEQ ID NO: 446414 - RNA, 18 nt, Artificial Sequence
  Synthetic
uuucacuuagauauagaa

SEQ ID NO: 446415 - RNA, 19 nt, Artificial Sequence
  Synthetic
uuuucacuuagauauagaa

SEQ ID NO: 446416 - RNA, 20 nt, Artificial Sequence
  Synthetic
uuuuucacuuagauauagaa

SEQ ID NO: 446417 - RNA, 21 nt, Artificial Sequence
  Synthetic
uuuuuucacuuagauauagaa

SEQ ID NO: 446418 - RNA, 22 nt, Artificial Sequence
  Synthetic
uuuuuuucacuuagauauagaa

SEQ ID NO: 446419 - RNA, 23 nt, Artificial Sequence
  Synthetic
uuuuuuuucacuuagauauagaa

SEQ ID NO: 446420 - RNA, 24 nt, Artificial Sequence
  Synthetic
auuuuuuuucacuuagauauagaa

SEQ ID NO: 446421 - RNA, 18 nt, Artificial Sequence
  Synthetic
uuauauugugauauagaa

SEQ ID NO: 446422 - RNA, 19 nt, Artificial Sequence
  Synthetic
uuuauauugugauauagaa

SEQ ID NO: 446423 - RNA, 20 nt, Artificial Sequence
  Synthetic
auuuauauugugauauagaa

SEQ ID NO: 446424 - RNA, 21 nt, Artificial Sequence
  Synthetic
aauuuauauugugauauagaa

SEQ ID NO: 446425 - RNA, 22 nt, Artificial Sequence
  Synthetic
gaauuuauauugugauauagaa

SEQ ID NO: 446426 - RNA, 23 nt, Artificial Sequence
  Synthetic
ggaauuuauauugugauauagaa

SEQ ID NO: 446427 - RNA, 24 nt, Artificial Sequence
  Synthetic
uggaauuuauauugugauauagaa

SEQ ID NO: 446428 - RNA, 18 nt, Artificial Sequence
  Synthetic
uagaguguauauauagaa

SEQ ID NO: 446429 - RNA, 19 nt, Artificial Sequence
  Synthetic
guagaguguauauauagaa

SEQ ID NO: 446430 - RNA, 20 nt, Artificial Sequence
  Synthetic
uguagaguguauauauagaa

SEQ ID NO: 446431 - RNA, 21 nt, Artificial Sequence
  Synthetic
cuguagaguguauauauagaa

SEQ ID NO: 446432 - RNA, 22 nt, Artificial Sequence
  Synthetic
ucuguagaguguauauauagaa

SEQ ID NO: 446433 - RNA, 23 nt, Artificial Sequence
  Synthetic
uucuguagaguguauauauagaa

SEQ ID NO: 446434 - RNA, 24 nt, Artificial Sequence
  Synthetic
uuucuguagaguguauauauagaa

SEQ ID NO: 446435 - RNA, 18 nt, Artificial Sequence
  Synthetic
uuguguuuaaguauagaa

SEQ ID NO: 446436 - RNA, 19 nt, Artificial Sequence
  Synthetic
guuguguuuaaguauagaa

SEQ ID NO: 446437 - RNA, 20 nt, Artificial Sequence
  Synthetic
gguuguguuuaaguauagaa

SEQ ID NO: 446438 - RNA, 21 nt, Artificial Sequence
  Synthetic
ugguuguguuuaaguauagaa

SEQ ID NO: 446439 - RNA, 22 nt, Artificial Sequence
  Synthetic
uugguuguguuuaaguauagaa

SEQ ID NO: 446440 - RNA, 23 nt, Artificial Sequence
  Synthetic
auugguuguguuuaaguauagaa

SEQ ID NO: 446441 - RNA, 24 nt, Artificial Sequence
  Synthetic
aauugguuguguuuaaguauagaa

SEQ ID NO: 446442 - RNA, 18 nt, Artificial Sequence
  Synthetic
uuuuagcugaguauagaa

SEQ ID NO: 446443 - RNA, 19 nt, Artificial Sequence
  Synthetic
auuuuagcugaguauagaa

SEQ ID NO: 446444 - RNA, 20 nt, Artificial Sequence
  Synthetic
cauuuuagcugaguauagaa

SEQ ID NO: 446445 - RNA, 21 nt, Artificial Sequence
  Synthetic
acauuuuagcugaguauagaa

SEQ ID NO: 446446 - RNA, 22 nt, Artificial Sequence
  Synthetic
gacauuuuagcugaguauagaa

SEQ ID NO: 446447 - RNA, 23 nt, Artificial Sequence
  Synthetic
ugacauuuuagcugaguauagaa

SEQ ID NO: 446448 - RNA, 24 nt, Artificial Sequence
  Synthetic
gugacauuuuagcugaguauagaa

SEQ ID NO: 446449 - RNA, 18 nt, Artificial Sequence
  Synthetic
uacuaucaauuuauagaa

SEQ ID NO: 446450 - RNA, 19 nt, Artificial Sequence
  Synthetic
uuacuaucaauuuauagaa

SEQ ID NO: 446451 - RNA, 20 nt, Artificial Sequence
  Synthetic
auuacuaucaauuuauagaa

SEQ ID NO: 446452 - RNA, 21 nt, Artificial Sequence
  Synthetic
gauuacuaucaauuuauagaa

SEQ ID NO: 446453 - RNA, 22 nt, Artificial Sequence
  Synthetic
ugauuacuaucaauuuauagaa

SEQ ID NO: 446454 - RNA, 23 nt, Artificial Sequence
  Synthetic
augauuacuaucaauuuauagaa

SEQ ID NO: 446455 - RNA, 24 nt, Artificial Sequence
  Synthetic
caugauuacuaucaauuuauagaa

SEQ ID NO: 446456 - RNA, 18 nt, Artificial Sequence
  Synthetic
uaaguuacugaacuagaa

SEQ ID NO: 446457 - RNA, 19 nt, Artificial Sequence
  Synthetic
uuaaguuacugaacuagaa

SEQ ID NO: 446458 - RNA, 20 nt, Artificial Sequence
  Synthetic
uuuaaguuacugaacuagaa

SEQ ID NO: 446459 - RNA, 21 nt, Artificial Sequence
  Synthetic
uuuuaaguuacugaacuagaa

SEQ ID NO: 446460 - RNA, 22 nt, Artificial Sequence
  Synthetic
guuuuaaguuacugaacuagaa

SEQ ID NO: 446461 - RNA, 23 nt, Artificial Sequence
  Synthetic
gguuuuaaguuacugaacuagaa

SEQ ID NO: 446462 - RNA, 24 nt, Artificial Sequence
  Synthetic
ggguuuuaaguuacugaacuagaa

SEQ ID NO: 446463 - RNA, 18 nt, Artificial Sequence
  Synthetic
auaauggaagcacuagaa

SEQ ID NO: 446464 - RNA, 19 nt, Artificial Sequence
  Synthetic
aauaauggaagcacuagaa

SEQ ID NO: 446465 - RNA, 20 nt, Artificial Sequence
  Synthetic
caauaauggaagcacuagaa

SEQ ID NO: 446466 - RNA, 21 nt, Artificial Sequence
  Synthetic
ucaauaauggaagcacuagaa

SEQ ID NO: 446467 - RNA, 22 nt, Artificial Sequence
  Synthetic
uucaauaauggaagcacuagaa

SEQ ID NO: 446468 - RNA, 23 nt, Artificial Sequence
  Synthetic
uuucaauaauggaagcacuagaa

SEQ ID NO: 446469 - RNA, 24 nt, Artificial Sequence
  Synthetic
uuuucaauaauggaagcacuagaa

SEQ ID NO: 446470 - RNA, 18 nt, Artificial Sequence
  Synthetic
cuagaguuuggacuagaa

SEQ ID NO: 446471 - RNA, 19 nt, Artificial Sequence
  Synthetic
acuagaguuuggacuagaa

SEQ ID NO: 446472 - RNA, 20 nt, Artificial Sequence
  Synthetic
aacuagaguuuggacuagaa

SEQ ID NO: 446473 - RNA, 21 nt, Artificial Sequence
  Synthetic
uaacuagaguuuggacuagaa

SEQ ID NO: 446474 - RNA, 22 nt, Artificial Sequence
  Synthetic
auaacuagaguuuggacuagaa

SEQ ID NO: 446475 - RNA, 23 nt, Artificial Sequence
  Synthetic
gauaacuagaguuuggacuagaa

SEQ ID NO: 446476 - RNA, 24 nt, Artificial Sequence
  Synthetic
agauaacuagaguuuggacuagaa

SEQ ID NO: 446477 - RNA, 18 nt, Artificial Sequence
  Synthetic
cucucaaaauaccuagaa

SEQ ID NO: 446478 - RNA, 19 nt, Artificial Sequence
  Synthetic
ucucucaaaauaccuagaa

SEQ ID NO: 446479 - RNA, 20 nt, Artificial Sequence
  Synthetic
aucucucaaaauaccuagaa

SEQ ID NO: 446480 - RNA, 21 nt, Artificial Sequence
  Synthetic
uaucucucaaaauaccuagaa

SEQ ID NO: 446481 - RNA, 22 nt, Artificial Sequence
  Synthetic
guaucucucaaaauaccuagaa

SEQ ID NO: 446482 - RNA, 23 nt, Artificial Sequence
  Synthetic
uguaucucucaaaauaccuagaa

SEQ ID NO: 446483 - RNA, 24 nt, Artificial Sequence
  Synthetic
uuguaucucucaaaauaccuagaa

SEQ ID NO: 446484 - RNA, 18 nt, Artificial Sequence
  Synthetic
uuagcuuuuauccuagaa

SEQ ID NO: 446485 - RNA, 19 nt, Artificial Sequence
  Synthetic
uuuagcuuuuauccuagaa

SEQ ID NO: 446486 - RNA, 20 nt, Artificial Sequence
  Synthetic
auuuagcuuuuauccuagaa

SEQ ID NO: 446487 - RNA, 21 nt, Artificial Sequence
  Synthetic
aauuuagcuuuuauccuagaa

SEQ ID NO: 446488 - RNA, 22 nt, Artificial Sequence
  Synthetic
aaauuuagcuuuuauccuagaa

SEQ ID NO: 446489 - RNA, 23 nt, Artificial Sequence
  Synthetic
aaaauuuagcuuuuauccuagaa

SEQ ID NO: 446490 - RNA, 24 nt, Artificial Sequence
  Synthetic
aaaaauuuagcuuuuauccuagaa

SEQ ID NO: 446491 - RNA, 18 nt, Artificial Sequence
  Synthetic
acaaacauccuccuagaa

SEQ ID NO: 446492 - RNA, 19 nt, Artificial Sequence
  Synthetic
gacaaacauccuccuagaa

SEQ ID NO: 446493 - RNA, 20 nt, Artificial Sequence
  Synthetic
ugacaaacauccuccuagaa

SEQ ID NO: 446494 - RNA, 21 nt, Artificial Sequence
  Synthetic
gugacaaacauccuccuagaa

SEQ ID NO: 446495 - RNA, 22 nt, Artificial Sequence
  Synthetic
ugugacaaacauccuccuagaa

SEQ ID NO: 446496 - RNA, 23 nt, Artificial Sequence
  Synthetic
uugugacaaacauccuccuagaa

SEQ ID NO: 446497 - RNA, 24 nt, Artificial Sequence
  Synthetic
auugugacaaacauccuccuagaa

SEQ ID NO: 446498 - RNA, 18 nt, Artificial Sequence
  Synthetic
uaaaaugaugagcuagaa

SEQ ID NO: 446499 - RNA, 19 nt, Artificial Sequence
  Synthetic
cuaaaaugaugagcuagaa

SEQ ID NO: 446500 - RNA, 20 nt, Artificial Sequence
  Synthetic
acuaaaaugaugagcuagaa

SEQ ID NO: 446501 - RNA, 21 nt, Artificial Sequence
  Synthetic
cacuaaaaugaugagcuagaa

SEQ ID NO: 446502 - RNA, 22 nt, Artificial Sequence
  Synthetic
ucacuaaaaugaugagcuagaa

SEQ ID NO: 446503 - RNA, 23 nt, Artificial Sequence
  Synthetic
gucacuaaaaugaugagcuagaa

SEQ ID NO: 446504 - RNA, 24 nt, Artificial Sequence
  Synthetic
ugucacuaaaaugaugagcuagaa

SEQ ID NO: 446505 - RNA, 18 nt, Artificial Sequence
  Synthetic
agaaauuugaaucuagaa

SEQ ID NO: 446506 - RNA, 19 nt, Artificial Sequence
  Synthetic
uagaaauuugaaucuagaa

SEQ ID NO: 446507 - RNA, 20 nt, Artificial Sequence
  Synthetic
uuagaaauuugaaucuagaa

SEQ ID NO: 446508 - RNA, 21 nt, Artificial Sequence
  Synthetic
uuuagaaauuugaaucuagaa

SEQ ID NO: 446509 - RNA, 22 nt, Artificial Sequence
  Synthetic
auuuagaaauuugaaucuagaa

SEQ ID NO: 446510 - RNA, 23 nt, Artificial Sequence
  Synthetic
cauuuagaaauuugaaucuagaa

SEQ ID NO: 446511 - RNA, 24 nt, Artificial Sequence
  Synthetic
acauuuagaaauuugaaucuagaa

SEQ ID NO: 446512 - RNA, 18 nt, Artificial Sequence
  Synthetic
aagucuugcauucuagaa

SEQ ID NO: 446513 - RNA, 19 nt, Artificial Sequence
  Synthetic
caagucuugcauucuagaa

SEQ ID NO: 446514 - RNA, 20 nt, Artificial Sequence
  Synthetic
ccaagucuugcauucuagaa

SEQ ID NO: 446515 - RNA, 21 nt, Artificial Sequence
  Synthetic
cccaagucuugcauucuagaa

SEQ ID NO: 446516 - RNA, 22 nt, Artificial Sequence
  Synthetic
gcccaagucuugcauucuagaa

SEQ ID NO: 446517 - RNA, 23 nt, Artificial Sequence
  Synthetic
agcccaagucuugcauucuagaa

SEQ ID NO: 446518 - RNA, 24 nt, Artificial Sequence
  Synthetic
uagcccaagucuugcauucuagaa

SEQ ID NO: 446519 - RNA, 18 nt, Artificial Sequence
  Synthetic
acaaacaaucuucuagaa

SEQ ID NO: 446520 - RNA, 19 nt, Artificial Sequence
  Synthetic
aacaaacaaucuucuagaa

SEQ ID NO: 446521 - RNA, 20 nt, Artificial Sequence
  Synthetic
aaacaaacaaucuucuagaa

SEQ ID NO: 446522 - RNA, 21 nt, Artificial Sequence
  Synthetic
aaaacaaacaaucuucuagaa

SEQ ID NO: 446523 - RNA, 22 nt, Artificial Sequence
  Synthetic
gaaaacaaacaaucuucuagaa

SEQ ID NO: 446524 - RNA, 23 nt, Artificial Sequence
  Synthetic
ggaaaacaaacaaucuucuagaa

SEQ ID NO: 446525 - RNA, 24 nt, Artificial Sequence
  Synthetic
aggaaaacaaacaaucuucuagaa

SEQ ID NO: 446526 - RNA, 18 nt, Artificial Sequence
  Synthetic
agucaauaucaaguagaa

SEQ ID NO: 446527 - RNA, 19 nt, Artificial Sequence
  Synthetic
aagucaauaucaaguagaa

SEQ ID NO: 446528 - RNA, 20 nt, Artificial Sequence
  Synthetic
caagucaauaucaaguagaa

SEQ ID NO: 446529 - RNA, 21 nt, Artificial Sequence
  Synthetic
gcaagucaauaucaaguagaa

SEQ ID NO: 446530 - RNA, 22 nt, Artificial Sequence
  Synthetic
agcaagucaauaucaaguagaa

SEQ ID NO: 446531 - RNA, 23 nt, Artificial Sequence
  Synthetic
aagcaagucaauaucaaguagaa

SEQ ID NO: 446532 - RNA, 24 nt, Artificial Sequence
  Synthetic
gaagcaagucaauaucaaguagaa

SEQ ID NO: 446533 - RNA, 18 nt, Artificial Sequence
  Synthetic
aaauaagcucaaguagaa

SEQ ID NO: 446534 - RNA, 19 nt, Artificial Sequence
  Synthetic
caaauaagcucaaguagaa

SEQ ID NO: 446535 - RNA, 20 nt, Artificial Sequence
  Synthetic
ucaaauaagcucaaguagaa

SEQ ID NO: 446536 - RNA, 21 nt, Artificial Sequence
  Synthetic
uucaaauaagcucaaguagaa

SEQ ID NO: 446537 - RNA, 22 nt, Artificial Sequence
  Synthetic
auucaaauaagcucaaguagaa

SEQ ID NO: 446538 - RNA, 23 nt, Artificial Sequence
  Synthetic
gauucaaauaagcucaaguagaa

SEQ ID NO: 446539 - RNA, 24 nt, Artificial Sequence
  Synthetic
agauucaaauaagcucaaguagaa

SEQ ID NO: 446540 - RNA, 18 nt, Artificial Sequence
  Synthetic
gugauucaggaaguagaa

SEQ ID NO: 446541 - RNA, 19 nt, Artificial Sequence
  Synthetic
agugauucaggaaguagaa

SEQ ID NO: 446542 - RNA, 20 nt, Artificial Sequence
  Synthetic
uagugauucaggaaguagaa

SEQ ID NO: 446543 - RNA, 21 nt, Artificial Sequence
  Synthetic
cuagugauucaggaaguagaa

SEQ ID NO: 446544 - RNA, 22 nt, Artificial Sequence
  Synthetic
gcuagugauucaggaaguagaa

SEQ ID NO: 446545 - RNA, 23 nt, Artificial Sequence
  Synthetic
ugcuagugauucaggaaguagaa

SEQ ID NO: 446546 - RNA, 24 nt, Artificial Sequence
  Synthetic
uugcuagugauucaggaaguagaa

SEQ ID NO: 446547 - RNA, 18 nt, Artificial Sequence
  Synthetic
ccugacaaugcaguagaa

SEQ ID NO: 446548 - RNA, 19 nt, Artificial Sequence
  Synthetic
accugacaaugcaguagaa

SEQ ID NO: 446549 - RNA, 20 nt, Artificial Sequence
  Synthetic
aaccugacaaugcaguagaa

SEQ ID NO: 446550 - RNA, 21 nt, Artificial Sequence
  Synthetic
caaccugacaaugcaguagaa

SEQ ID NO: 446551 - RNA, 22 nt, Artificial Sequence
  Synthetic
gcaaccugacaaugcaguagaa

SEQ ID NO: 446552 - RNA, 23 nt, Artificial Sequence
  Synthetic
ugcaaccugacaaugcaguagaa

SEQ ID NO: 446553 - RNA, 24 nt, Artificial Sequence
  Synthetic
uugcaaccugacaaugcaguagaa

SEQ ID NO: 446554 - RNA, 18 nt, Artificial Sequence
  Synthetic
auccuccaaagaguagaa

SEQ ID NO: 446555 - RNA, 19 nt, Artificial Sequence
  Synthetic
uauccuccaaagaguagaa

SEQ ID NO: 446556 - RNA, 20 nt, Artificial Sequence
  Synthetic
cuauccuccaaagaguagaa

SEQ ID NO: 446557 - RNA, 21 nt, Artificial Sequence
  Synthetic
acuauccuccaaagaguagaa

SEQ ID NO: 446558 - RNA, 22 nt, Artificial Sequence
  Synthetic
aacuauccuccaaagaguagaa

SEQ ID NO: 446559 - RNA, 23 nt, Artificial Sequence
  Synthetic
caacuauccuccaaagaguagaa

SEQ ID NO: 446560 - RNA, 24 nt, Artificial Sequence
  Synthetic
acaacuauccuccaaagaguagaa

SEQ ID NO: 446561 - RNA, 18 nt, Artificial Sequence
  Synthetic
agaagaagaugaguagaa

SEQ ID NO: 446562 - RNA, 19 nt, Artificial Sequence
  Synthetic
gagaagaagaugaguagaa

SEQ ID NO: 446563 - RNA, 20 nt, Artificial Sequence
  Synthetic
agagaagaagaugaguagaa

SEQ ID NO: 446564 - RNA, 21 nt, Artificial Sequence
  Synthetic
uagagaagaagaugaguagaa

SEQ ID NO: 446565 - RNA, 22 nt, Artificial Sequence
  Synthetic
uuagagaagaagaugaguagaa

SEQ ID NO: 446566 - RNA, 23 nt, Artificial Sequence
  Synthetic
auuagagaagaagaugaguagaa

SEQ ID NO: 446567 - RNA, 24 nt, Artificial Sequence
  Synthetic
cauuagagaagaagaugaguagaa

SEQ ID NO: 446568 - RNA, 18 nt, Artificial Sequence
  Synthetic
cauaucugaguaguagaa

SEQ ID NO: 446569 - RNA, 19 nt, Artificial Sequence
  Synthetic
acauaucugaguaguagaa

SEQ ID NO: 446570 - RNA, 20 nt, Artificial Sequence
  Synthetic
gacauaucugaguaguagaa

SEQ ID NO: 446571 - RNA, 21 nt, Artificial Sequence
  Synthetic
agacauaucugaguaguagaa

SEQ ID NO: 446572 - RNA, 22 nt, Artificial Sequence
  Synthetic
uagacauaucugaguaguagaa

SEQ ID NO: 446573 - RNA, 23 nt, Artificial Sequence
  Synthetic
guagacauaucugaguaguagaa

SEQ ID NO: 446574 - RNA, 24 nt, Artificial Sequence
  Synthetic
aguagacauaucugaguaguagaa

SEQ ID NO: 446575 - RNA, 18 nt, Artificial Sequence
  Synthetic
ggguagaguguaguagaa

SEQ ID NO: 446576 - RNA, 19 nt, Artificial Sequence
  Synthetic
aggguagaguguaguagaa

SEQ ID NO: 446577 - RNA, 20 nt, Artificial Sequence
  Synthetic
aaggguagaguguaguagaa

SEQ ID NO: 446578 - RNA, 21 nt, Artificial Sequence
  Synthetic
aaaggguagaguguaguagaa

SEQ ID NO: 446579 - RNA, 22 nt, Artificial Sequence
  Synthetic
gaaaggguagaguguaguagaa

SEQ ID NO: 446580 - RNA, 23 nt, Artificial Sequence
  Synthetic
agaaaggguagaguguaguagaa

SEQ ID NO: 446581 - RNA, 24 nt, Artificial Sequence
  Synthetic
gagaaaggguagaguguaguagaa

SEQ ID NO: 446582 - RNA, 18 nt, Artificial Sequence
  Synthetic
aaugcuaugaggguagaa

SEQ ID NO: 446583 - RNA, 19 nt, Artificial Sequence
  Synthetic
uaaugcuaugaggguagaa

SEQ ID NO: 446584 - RNA, 20 nt, Artificial Sequence
  Synthetic
cuaaugcuaugaggguagaa

SEQ ID NO: 446585 - RNA, 21 nt, Artificial Sequence
  Synthetic
ucuaaugcuaugaggguagaa

SEQ ID NO: 446586 - RNA, 22 nt, Artificial Sequence
  Synthetic
cucuaaugcuaugaggguagaa

SEQ ID NO: 446587 - RNA, 23 nt, Artificial Sequence
  Synthetic
ucucuaaugcuaugaggguagaa

SEQ ID NO: 446588 - RNA, 24 nt, Artificial Sequence
  Synthetic
gucucuaaugcuaugaggguagaa

SEQ ID NO: 446589 - RNA, 18 nt, Artificial Sequence
  Synthetic
gagacuugggggguagaa

SEQ ID NO: 446590 - RNA, 19 nt, Artificial Sequence
  Synthetic
ggagacuugggggguagaa

SEQ ID NO: 446591 - RNA, 20 nt, Artificial Sequence
  Synthetic
uggagacuugggggguagaa

SEQ ID NO: 446592 - RNA, 21 nt, Artificial Sequence
  Synthetic
uuggagacuugggggguagaa

SEQ ID NO: 446593 - RNA, 22 nt, Artificial Sequence
  Synthetic
uuuggagacuugggggguagaa

SEQ ID NO: 446594 - RNA, 23 nt, Artificial Sequence
  Synthetic
cuuuggagacuugggggguagaa

SEQ ID NO: 446595 - RNA, 24 nt, Artificial Sequence
  Synthetic
gcuuuggagacuugggggguagaa

SEQ ID NO: 446596 - RNA, 18 nt, Artificial Sequence
  Synthetic
ugacccuacaugguagaa

SEQ ID NO: 446597 - RNA, 19 nt, Artificial Sequence
  Synthetic
uugacccuacaugguagaa

SEQ ID NO: 446598 - RNA, 20 nt, Artificial Sequence
  Synthetic
auugacccuacaugguagaa

SEQ ID NO: 446599 - RNA, 21 nt, Artificial Sequence
  Synthetic
uauugacccuacaugguagaa

SEQ ID NO: 446600 - RNA, 22 nt, Artificial Sequence
  Synthetic
auauugacccuacaugguagaa

SEQ ID NO: 446601 - RNA, 23 nt, Artificial Sequence
  Synthetic
gauauugacccuacaugguagaa

SEQ ID NO: 446602 - RNA, 24 nt, Artificial Sequence
  Synthetic
ugauauugacccuacaugguagaa

SEQ ID NO: 446603 - RNA, 18 nt, Artificial Sequence
  Synthetic
cagaaagccaugguagaa

SEQ ID NO: 446604 - RNA, 19 nt, Artificial Sequence
  Synthetic
ccagaaagccaugguagaa

SEQ ID NO: 446605 - RNA, 20 nt, Artificial Sequence
  Synthetic
cccagaaagccaugguagaa

SEQ ID NO: 446606 - RNA, 21 nt, Artificial Sequence
  Synthetic
ucccagaaagccaugguagaa

SEQ ID NO: 446607 - RNA, 22 nt, Artificial Sequence
  Synthetic
aucccagaaagccaugguagaa

SEQ ID NO: 446608 - RNA, 23 nt, Artificial Sequence
  Synthetic
gaucccagaaagccaugguagaa

SEQ ID NO: 446609 - RNA, 24 nt, Artificial Sequence
  Synthetic
ugaucccagaaagccaugguagaa

SEQ ID NO: 446610 - RNA, 18 nt, Artificial Sequence
  Synthetic
ugacuuuuagcuguagaa

SEQ ID NO: 446611 - RNA, 19 nt, Artificial Sequence
  Synthetic
augacuuuuagcuguagaa

SEQ ID NO: 446612 - RNA, 20 nt, Artificial Sequence
  Synthetic
aaugacuuuuagcuguagaa

SEQ ID NO: 446613 - RNA, 21 nt, Artificial Sequence
  Synthetic
uaaugacuuuuagcuguagaa

SEQ ID NO: 446614 - RNA, 22 nt, Artificial Sequence
  Synthetic
uuaaugacuuuuagcuguagaa

SEQ ID NO: 446615 - RNA, 23 nt, Artificial Sequence
  Synthetic
uuuaaugacuuuuagcuguagaa

SEQ ID NO: 446616 - RNA, 24 nt, Artificial Sequence
  Synthetic
auuuaaugacuuuuagcuguagaa

SEQ ID NO: 446617 - RNA, 18 nt, Artificial Sequence
  Synthetic
uuuuccacuuguguagaa

SEQ ID NO: 446618 - RNA, 19 nt, Artificial Sequence
  Synthetic
auuuuccacuuguguagaa

SEQ ID NO: 446619 - RNA, 20 nt, Artificial Sequence
  Synthetic
uauuuuccacuuguguagaa

SEQ ID NO: 446620 - RNA, 21 nt, Artificial Sequence
  Synthetic
auauuuuccacuuguguagaa

SEQ ID NO: 446621 - RNA, 22 nt, Artificial Sequence
  Synthetic
aauauuuuccacuuguguagaa

SEQ ID NO: 446622 - RNA, 23 nt, Artificial Sequence
  Synthetic
aaauauuuuccacuuguguagaa

SEQ ID NO: 446623 - RNA, 24 nt, Artificial Sequence
  Synthetic
caaauauuuuccacuuguguagaa

SEQ ID NO: 446624 - RNA, 18 nt, Artificial Sequence
  Synthetic
auuucuucuuuuguagaa

SEQ ID NO: 446625 - RNA, 19 nt, Artificial Sequence
  Synthetic
cauuucuucuuuuguagaa

SEQ ID NO: 446626 - RNA, 20 nt, Artificial Sequence
  Synthetic
ccauuucuucuuuuguagaa

SEQ ID NO: 446627 - RNA, 21 nt, Artificial Sequence
  Synthetic
cccauuucuucuuuuguagaa

SEQ ID NO: 446628 - RNA, 22 nt, Artificial Sequence
  Synthetic
gcccauuucuucuuuuguagaa

SEQ ID NO: 446629 - RNA, 23 nt, Artificial Sequence
  Synthetic
agcccauuucuucuuuuguagaa

SEQ ID NO: 446630 - RNA, 24 nt, Artificial Sequence
  Synthetic
aagcccauuucuucuuuuguagaa

SEQ ID NO: 446631 - RNA, 18 nt, Artificial Sequence
  Synthetic
uugaaagagaaauuagaa

SEQ ID NO: 446632 - RNA, 19 nt, Artificial Sequence
  Synthetic
cuugaaagagaaauuagaa

SEQ ID NO: 446633 - RNA, 20 nt, Artificial Sequence
  Synthetic
acuugaaagagaaauuagaa

SEQ ID NO: 446634 - RNA, 21 nt, Artificial Sequence
  Synthetic
aacuugaaagagaaauuagaa

SEQ ID NO: 446635 - RNA, 22 nt, Artificial Sequence
  Synthetic
aaacuugaaagagaaauuagaa

SEQ ID NO: 446636 - RNA, 23 nt, Artificial Sequence
  Synthetic
aaaacuugaaagagaaauuagaa

SEQ ID NO: 446637 - RNA, 24 nt, Artificial Sequence
  Synthetic
gaaaacuugaaagagaaauuagaa

SEQ ID NO: 446638 - RNA, 18 nt, Artificial Sequence
  Synthetic
cauguaaguaaauuagaa

SEQ ID NO: 446639 - RNA, 19 nt, Artificial Sequence
  Synthetic
acauguaaguaaauuagaa

SEQ ID NO: 446640 - RNA, 20 nt, Artificial Sequence
  Synthetic
gacauguaaguaaauuagaa

SEQ ID NO: 446641 - RNA, 21 nt, Artificial Sequence
  Synthetic
agacauguaaguaaauuagaa

SEQ ID NO: 446642 - RNA, 22 nt, Artificial Sequence
  Synthetic
cagacauguaaguaaauuagaa

SEQ ID NO: 446643 - RNA, 23 nt, Artificial Sequence
  Synthetic
acagacauguaaguaaauuagaa

SEQ ID NO: 446644 - RNA, 24 nt, Artificial Sequence
  Synthetic
cacagacauguaaguaaauuagaa

SEQ ID NO: 446645 - RNA, 18 nt, Artificial Sequence
  Synthetic
uguuaaacacaauuagaa

SEQ ID NO: 446646 - RNA, 19 nt, Artificial Sequence
  Synthetic
auguuaaacacaauuagaa

SEQ ID NO: 446647 - RNA, 20 nt, Artificial Sequence
  Synthetic
aauguuaaacacaauuagaa

SEQ ID NO: 446648 - RNA, 21 nt, Artificial Sequence
  Synthetic
aaauguuaaacacaauuagaa

SEQ ID NO: 446649 - RNA, 22 nt, Artificial Sequence
  Synthetic
gaaauguuaaacacaauuagaa

SEQ ID NO: 446650 - RNA, 23 nt, Artificial Sequence
  Synthetic
agaaauguuaaacacaauuagaa

SEQ ID NO: 446651 - RNA, 24 nt, Artificial Sequence
  Synthetic
aagaaauguuaaacacaauuagaa

SEQ ID NO: 446652 - RNA, 18 nt, Artificial Sequence
  Synthetic
aacagccacccauuagaa

SEQ ID NO: 446653 - RNA, 19 nt, Artificial Sequence
  Synthetic
uaacagccacccauuagaa

SEQ ID NO: 446654 - RNA, 20 nt, Artificial Sequence
  Synthetic
uuaacagccacccauuagaa

SEQ ID NO: 446655 - RNA, 21 nt, Artificial Sequence
  Synthetic
uuuaacagccacccauuagaa

SEQ ID NO: 446656 - RNA, 22 nt, Artificial Sequence
  Synthetic
auuuaacagccacccauuagaa

SEQ ID NO: 446657 - RNA, 23 nt, Artificial Sequence
  Synthetic
aauuuaacagccacccauuagaa

SEQ ID NO: 446658 - RNA, 24 nt, Artificial Sequence
  Synthetic
aaauuuaacagccacccauuagaa

SEQ ID NO: 446659 - RNA, 18 nt, Artificial Sequence
  Synthetic
ggcucuaugggauuagaa

SEQ ID NO: 446660 - RNA, 19 nt, Artificial Sequence
  Synthetic
aggcucuaugggauuagaa

SEQ ID NO: 446661 - RNA, 20 nt, Artificial Sequence
  Synthetic
caggcucuaugggauuagaa

SEQ ID NO: 446662 - RNA, 21 nt, Artificial Sequence
  Synthetic
gcaggcucuaugggauuagaa

SEQ ID NO: 446663 - RNA, 22 nt, Artificial Sequence
  Synthetic
ggcaggcucuaugggauuagaa

SEQ ID NO: 446664 - RNA, 23 nt, Artificial Sequence
  Synthetic
aggcaggcucuaugggauuagaa

SEQ ID NO: 446665 - RNA, 24 nt, Artificial Sequence
  Synthetic
aaggcaggcucuaugggauuagaa

SEQ ID NO: 446666 - RNA, 18 nt, Artificial Sequence
  Synthetic
uugcaguaaauauuagaa

SEQ ID NO: 446667 - RNA, 19 nt, Artificial Sequence
  Synthetic
auugcaguaaauauuagaa

SEQ ID NO: 446668 - RNA, 20 nt, Artificial Sequence
  Synthetic
gauugcaguaaauauuagaa

SEQ ID NO: 446669 - RNA, 21 nt, Artificial Sequence
  Synthetic
agauugcaguaaauauuagaa

SEQ ID NO: 446670 - RNA, 22 nt, Artificial Sequence
  Synthetic
cagauugcaguaaauauuagaa

SEQ ID NO: 446671 - RNA, 23 nt, Artificial Sequence
  Synthetic
gcagauugcaguaaauauuagaa

SEQ ID NO: 446672 - RNA, 24 nt, Artificial Sequence
  Synthetic
ugcagauugcaguaaauauuagaa

SEQ ID NO: 446673 - RNA, 18 nt, Artificial Sequence
  Synthetic
gcguuaaaaguauuagaa

SEQ ID NO: 446674 - RNA, 19 nt, Artificial Sequence
  Synthetic
ugcguuaaaaguauuagaa

SEQ ID NO: 446675 - RNA, 20 nt, Artificial Sequence
  Synthetic
uugcguuaaaaguauuagaa

SEQ ID NO: 446676 - RNA, 21 nt, Artificial Sequence
  Synthetic
guugcguuaaaaguauuagaa

SEQ ID NO: 446677 - RNA, 22 nt, Artificial Sequence
  Synthetic
uguugcguuaaaaguauuagaa

SEQ ID NO: 446678 - RNA, 23 nt, Artificial Sequence
  Synthetic
uuguugcguuaaaaguauuagaa

SEQ ID NO: 446679 - RNA, 24 nt, Artificial Sequence
  Synthetic
uuuguugcguuaaaaguauuagaa

SEQ ID NO: 446680 - RNA, 18 nt, Artificial Sequence
  Synthetic
auuauuaaauuauuagaa

SEQ ID NO: 446681 - RNA, 19 nt, Artificial Sequence
  Synthetic
gauuauuaaauuauuagaa

SEQ ID NO: 446682 - RNA, 20 nt, Artificial Sequence
  Synthetic
cgauuauuaaauuauuagaa

SEQ ID NO: 446683 - RNA, 21 nt, Artificial Sequence
  Synthetic
acgauuauuaaauuauuagaa

SEQ ID NO: 446684 - RNA, 22 nt, Artificial Sequence
  Synthetic
cacgauuauuaaauuauuagaa

SEQ ID NO: 446685 - RNA, 23 nt, Artificial Sequence
  Synthetic
ucacgauuauuaaauuauuagaa

SEQ ID NO: 446686 - RNA, 24 nt, Artificial Sequence
  Synthetic
uucacgauuauuaaauuauuagaa

SEQ ID NO: 446687 - RNA, 18 nt, Artificial Sequence
  Synthetic
acaauagacaacuuagaa

SEQ ID NO: 446688 - RNA, 19 nt, Artificial Sequence
  Synthetic
aacaauagacaacuuagaa

SEQ ID NO: 446689 - RNA, 20 nt, Artificial Sequence
  Synthetic
uaacaauagacaacuuagaa

SEQ ID NO: 446690 - RNA, 21 nt, Artificial Sequence
  Synthetic
auaacaauagacaacuuagaa

SEQ ID NO: 446691 - RNA, 22 nt, Artificial Sequence
  Synthetic
aauaacaauagacaacuuagaa

SEQ ID NO: 446692 - RNA, 23 nt, Artificial Sequence
  Synthetic
aaauaacaauagacaacuuagaa

SEQ ID NO: 446693 - RNA, 24 nt, Artificial Sequence
  Synthetic
uaaauaacaauagacaacuuagaa

SEQ ID NO: 446694 - RNA, 18 nt, Artificial Sequence
  Synthetic
gauuucaaagacuuagaa

SEQ ID NO: 446695 - RNA, 19 nt, Artificial Sequence
  Synthetic
agauuucaaagacuuagaa

SEQ ID NO: 446696 - RNA, 20 nt, Artificial Sequence
  Synthetic
cagauuucaaagacuuagaa

SEQ ID NO: 446697 - RNA, 21 nt, Artificial Sequence
  Synthetic
ccagauuucaaagacuuagaa

SEQ ID NO: 446698 - RNA, 22 nt, Artificial Sequence
  Synthetic
gccagauuucaaagacuuagaa

SEQ ID NO: 446699 - RNA, 23 nt, Artificial Sequence
  Synthetic
ugccagauuucaaagacuuagaa

SEQ ID NO: 446700 - RNA, 24 nt, Artificial Sequence
  Synthetic
augccagauuucaaagacuuagaa

SEQ ID NO: 446701 - RNA, 18 nt, Artificial Sequence
  Synthetic
gcuugucuggacuuagaa

SEQ ID NO: 446702 - RNA, 19 nt, Artificial Sequence
  Synthetic
agcuugucuggacuuagaa

SEQ ID NO: 446703 - RNA, 20 nt, Artificial Sequence
  Synthetic
cagcuugucuggacuuagaa

SEQ ID NO: 446704 - RNA, 21 nt, Artificial Sequence
  Synthetic
gcagcuugucuggacuuagaa

SEQ ID NO: 446705 - RNA, 22 nt, Artificial Sequence
  Synthetic
agcagcuugucuggacuuagaa

SEQ ID NO: 446706 - RNA, 23 nt, Artificial Sequence
  Synthetic
cagcagcuugucuggacuuagaa

SEQ ID NO: 446707 - RNA, 24 nt, Artificial Sequence
  Synthetic
acagcagcuugucuggacuuagaa

SEQ ID NO: 446708 - RNA, 18 nt, Artificial Sequence
  Synthetic
aaagacaaaagcuuagaa

SEQ ID NO: 446709 - RNA, 19 nt, Artificial Sequence
  Synthetic
aaaagacaaaagcuuagaa

SEQ ID NO: 446710 - RNA, 20 nt, Artificial Sequence
  Synthetic
uaaaagacaaaagcuuagaa

SEQ ID NO: 446711 - RNA, 21 nt, Artificial Sequence
  Synthetic
cuaaaagacaaaagcuuagaa

SEQ ID NO: 446712 - RNA, 22 nt, Artificial Sequence
  Synthetic
ccuaaaagacaaaagcuuagaa

SEQ ID NO: 446713 - RNA, 23 nt, Artificial Sequence
  Synthetic
uccuaaaagacaaaagcuuagaa

SEQ ID NO: 446714 - RNA, 24 nt, Artificial Sequence
  Synthetic
uuccuaaaagacaaaagcuuagaa

SEQ ID NO: 446715 - RNA, 18 nt, Artificial Sequence
  Synthetic
uauaauaauagcuuagaa

SEQ ID NO: 446716 - RNA, 19 nt, Artificial Sequence
  Synthetic
auauaauaauagcuuagaa

SEQ ID NO: 446717 - RNA, 20 nt, Artificial Sequence
  Synthetic
uauauaauaauagcuuagaa

SEQ ID NO: 446718 - RNA, 21 nt, Artificial Sequence
  Synthetic
cuauauaauaauagcuuagaa

SEQ ID NO: 446719 - RNA, 22 nt, Artificial Sequence
  Synthetic
ucuauauaauaauagcuuagaa

SEQ ID NO: 446720 - RNA, 23 nt, Artificial Sequence
  Synthetic
aucuauauaauaauagcuuagaa

SEQ ID NO: 446721 - RNA, 24 nt, Artificial Sequence
  Synthetic
uaucuauauaauaauagcuuagaa

SEQ ID NO: 446722 - RNA, 18 nt, Artificial Sequence
  Synthetic
cauucauggaucuuagaa

SEQ ID NO: 446723 - RNA, 19 nt, Artificial Sequence
  Synthetic
gcauucauggaucuuagaa

SEQ ID NO: 446724 - RNA, 20 nt, Artificial Sequence
  Synthetic
cgcauucauggaucuuagaa

SEQ ID NO: 446725 - RNA, 21 nt, Artificial Sequence
  Synthetic
acgcauucauggaucuuagaa

SEQ ID NO: 446726 - RNA, 22 nt, Artificial Sequence
  Synthetic
cacgcauucauggaucuuagaa

SEQ ID NO: 446727 - RNA, 23 nt, Artificial Sequence
  Synthetic
ucacgcauucauggaucuuagaa

SEQ ID NO: 446728 - RNA, 24 nt, Artificial Sequence
  Synthetic
gucacgcauucauggaucuuagaa

SEQ ID NO: 446729 - RNA, 18 nt, Artificial Sequence
  Synthetic
gaguaaagaugguuagaa

SEQ ID NO: 446730 - RNA, 19 nt, Artificial Sequence
  Synthetic
ggaguaaagaugguuagaa

SEQ ID NO: 446731 - RNA, 20 nt, Artificial Sequence
  Synthetic
aggaguaaagaugguuagaa

SEQ ID NO: 446732 - RNA, 21 nt, Artificial Sequence
  Synthetic
uaggaguaaagaugguuagaa

SEQ ID NO: 446733 - RNA, 22 nt, Artificial Sequence
  Synthetic
auaggaguaaagaugguuagaa

SEQ ID NO: 446734 - RNA, 23 nt, Artificial Sequence
  Synthetic
aauaggaguaaagaugguuagaa

SEQ ID NO: 446735 - RNA, 24 nt, Artificial Sequence
  Synthetic
aaauaggaguaaagaugguuagaa

SEQ ID NO: 446736 - RNA, 18 nt, Artificial Sequence
  Synthetic
aaaggcaagugguuagaa

SEQ ID NO: 446737 - RNA, 19 nt, Artificial Sequence
  Synthetic
aaaaggcaagugguuagaa

SEQ ID NO: 446738 - RNA, 20 nt, Artificial Sequence
  Synthetic
gaaaaggcaagugguuagaa

SEQ ID NO: 446739 - RNA, 21 nt, Artificial Sequence
  Synthetic
agaaaaggcaagugguuagaa

SEQ ID NO: 446740 - RNA, 22 nt, Artificial Sequence
  Synthetic
uagaaaaggcaagugguuagaa

SEQ ID NO: 446741 - RNA, 23 nt, Artificial Sequence
  Synthetic
uuagaaaaggcaagugguuagaa

SEQ ID NO: 446742 - RNA, 24 nt, Artificial Sequence
  Synthetic
guuagaaaaggcaagugguuagaa

SEQ ID NO: 446743 - RNA, 18 nt, Artificial Sequence
  Synthetic
agcugauaaguguuagaa

SEQ ID NO: 446744 - RNA, 19 nt, Artificial Sequence
  Synthetic
uagcugauaaguguuagaa

SEQ ID NO: 446745 - RNA, 20 nt, Artificial Sequence
  Synthetic
auagcugauaaguguuagaa

SEQ ID NO: 446746 - RNA, 21 nt, Artificial Sequence
  Synthetic
uauagcugauaaguguuagaa

SEQ ID NO: 446747 - RNA, 22 nt, Artificial Sequence
  Synthetic
auauagcugauaaguguuagaa

SEQ ID NO: 446748 - RNA, 23 nt, Artificial Sequence
  Synthetic
cauauagcugauaaguguuagaa

SEQ ID NO: 446749 - RNA, 24 nt, Artificial Sequence
  Synthetic
ccauauagcugauaaguguuagaa

SEQ ID NO: 446750 - RNA, 18 nt, Artificial Sequence
  Synthetic
gauauuaauaauuuagaa

SEQ ID NO: 446751 - RNA, 19 nt, Artificial Sequence
  Synthetic
ggauauuaauaauuuagaa

SEQ ID NO: 446752 - RNA, 20 nt, Artificial Sequence
  Synthetic
aggauauuaauaauuuagaa

SEQ ID NO: 446753 - RNA, 21 nt, Artificial Sequence
  Synthetic
aaggauauuaauaauuuagaa

SEQ ID NO: 446754 - RNA, 22 nt, Artificial Sequence
  Synthetic
aaaggauauuaauaauuuagaa

SEQ ID NO: 446755 - RNA, 23 nt, Artificial Sequence
  Synthetic
caaaggauauuaauaauuuagaa

SEQ ID NO: 446756 - RNA, 24 nt, Artificial Sequence
  Synthetic
gcaaaggauauuaauaauuuagaa

SEQ ID NO: 446757 - RNA, 18 nt, Artificial Sequence
  Synthetic
cacaagugagauuuagaa

SEQ ID NO: 446758 - RNA, 19 nt, Artificial Sequence
  Synthetic
ccacaagugagauuuagaa

SEQ ID NO: 446759 - RNA, 20 nt, Artificial Sequence
  Synthetic
uccacaagugagauuuagaa

SEQ ID NO: 446760 - RNA, 21 nt, Artificial Sequence
  Synthetic
uuccacaagugagauuuagaa

SEQ ID NO: 446761 - RNA, 22 nt, Artificial Sequence
  Synthetic
cuuccacaagugagauuuagaa

SEQ ID NO: 446762 - RNA, 23 nt, Artificial Sequence
  Synthetic
ucuuccacaagugagauuuagaa

SEQ ID NO: 446763 - RNA, 24 nt, Artificial Sequence
  Synthetic
gucuuccacaagugagauuuagaa

SEQ ID NO: 446764 - RNA, 18 nt, Artificial Sequence
  Synthetic
acaaauuuagcuuuagaa

SEQ ID NO: 446765 - RNA, 19 nt, Artificial Sequence
  Synthetic
aacaaauuuagcuuuagaa

SEQ ID NO: 446766 - RNA, 20 nt, Artificial Sequence
  Synthetic
caacaaauuuagcuuuagaa

SEQ ID NO: 446767 - RNA, 21 nt, Artificial Sequence
  Synthetic
acaacaaauuuagcuuuagaa

SEQ ID NO: 446768 - RNA, 22 nt, Artificial Sequence
  Synthetic
aacaacaaauuuagcuuuagaa

SEQ ID NO: 446769 - RNA, 23 nt, Artificial Sequence
  Synthetic
aaacaacaaauuuagcuuuagaa

SEQ ID NO: 446770 - RNA, 24 nt, Artificial Sequence
  Synthetic
caaacaacaaauuuagcuuuagaa

SEQ ID NO: 446771 - RNA, 18 nt, Artificial Sequence
  Synthetic
uuaucucuaucuuuagaa

SEQ ID NO: 446772 - RNA, 19 nt, Artificial Sequence
  Synthetic
uuuaucucuaucuuuagaa

SEQ ID NO: 446773 - RNA, 20 nt, Artificial Sequence
  Synthetic
guuuaucucuaucuuuagaa

SEQ ID NO: 446774 - RNA, 21 nt, Artificial Sequence
  Synthetic
gguuuaucucuaucuuuagaa

SEQ ID NO: 446775 - RNA, 22 nt, Artificial Sequence
  Synthetic
agguuuaucucuaucuuuagaa

SEQ ID NO: 446776 - RNA, 23 nt, Artificial Sequence
  Synthetic
aagguuuaucucuaucuuuagaa

SEQ ID NO: 446777 - RNA, 24 nt, Artificial Sequence
  Synthetic
aaagguuuaucucuaucuuuagaa

SEQ ID NO: 446778 - RNA, 18 nt, Artificial Sequence
  Synthetic
acaauacacaguuuagaa

SEQ ID NO: 446779 - RNA, 19 nt, Artificial Sequence
  Synthetic
cacaauacacaguuuagaa

SEQ ID NO: 446780 - RNA, 20 nt, Artificial Sequence
  Synthetic
ucacaauacacaguuuagaa

SEQ ID NO: 446781 - RNA, 21 nt, Artificial Sequence
  Synthetic
aucacaauacacaguuuagaa

SEQ ID NO: 446782 - RNA, 22 nt, Artificial Sequence
  Synthetic
uaucacaauacacaguuuagaa

SEQ ID NO: 446783 - RNA, 23 nt, Artificial Sequence
  Synthetic
auaucacaauacacaguuuagaa

SEQ ID NO: 446784 - RNA, 24 nt, Artificial Sequence
  Synthetic
uauaucacaauacacaguuuagaa

SEQ ID NO: 446785 - RNA, 18 nt, Artificial Sequence
  Synthetic
uauuuuacuauuuuagaa

SEQ ID NO: 446786 - RNA, 19 nt, Artificial Sequence
  Synthetic
uuauuuuacuauuuuagaa

SEQ ID NO: 446787 - RNA, 20 nt, Artificial Sequence
  Synthetic
auuauuuuacuauuuuagaa

SEQ ID NO: 446788 - RNA, 21 nt, Artificial Sequence
  Synthetic
uauuauuuuacuauuuuagaa

SEQ ID NO: 446789 - RNA, 22 nt, Artificial Sequence
  Synthetic
auauuauuuuacuauuuuagaa

SEQ ID NO: 446790 - RNA, 23 nt, Artificial Sequence
  Synthetic
uauauuauuuuacuauuuuagaa

SEQ ID NO: 446791 - RNA, 24 nt, Artificial Sequence
  Synthetic
auauauuauuuuacuauuuuagaa

SEQ ID NO: 446792 - RNA, 18 nt, Artificial Sequence
  Synthetic
uuuuauucuuuuuuagaa

SEQ ID NO: 446793 - RNA, 19 nt, Artificial Sequence
  Synthetic
auuuuauucuuuuuuagaa

SEQ ID NO: 446794 - RNA, 20 nt, Artificial Sequence
  Synthetic
uauuuuauucuuuuuuagaa

SEQ ID NO: 446795 - RNA, 21 nt, Artificial Sequence
  Synthetic
auauuuuauucuuuuuuagaa

SEQ ID NO: 446796 - RNA, 22 nt, Artificial Sequence
  Synthetic
uauauuuuauucuuuuuuagaa

SEQ ID NO: 446797 - RNA, 23 nt, Artificial Sequence
  Synthetic
uuauauuuuauucuuuuuuagaa

SEQ ID NO: 446798 - RNA, 24 nt, Artificial Sequence
  Synthetic
uuuauauuuuauucuuuuuuagaa

SEQ ID NO: 446799 - RNA, 18 nt, Artificial Sequence
  Synthetic
ucugaaaggacaaacgaa

SEQ ID NO: 446800 - RNA, 19 nt, Artificial Sequence
  Synthetic
cucugaaaggacaaacgaa

SEQ ID NO: 446801 - RNA, 20 nt, Artificial Sequence
  Synthetic
acucugaaaggacaaacgaa

SEQ ID NO: 446802 - RNA, 21 nt, Artificial Sequence
  Synthetic
aacucugaaaggacaaacgaa

SEQ ID NO: 446803 - RNA, 22 nt, Artificial Sequence
  Synthetic
aaacucugaaaggacaaacgaa

SEQ ID NO: 446804 - RNA, 23 nt, Artificial Sequence
  Synthetic
gaaacucugaaaggacaaacgaa

SEQ ID NO: 446805 - RNA, 24 nt, Artificial Sequence
  Synthetic
ugaaacucugaaaggacaaacgaa

SEQ ID NO: 446806 - RNA, 18 nt, Artificial Sequence
  Synthetic
uacuuaaagucaaacgaa

SEQ ID NO: 446807 - RNA, 19 nt, Artificial Sequence
  Synthetic
cuacuuaaagucaaacgaa

SEQ ID NO: 446808 - RNA, 20 nt, Artificial Sequence
  Synthetic
acuacuuaaagucaaacgaa

SEQ ID NO: 446809 - RNA, 21 nt, Artificial Sequence
  Synthetic
aacuacuuaaagucaaacgaa

SEQ ID NO: 446810 - RNA, 22 nt, Artificial Sequence
  Synthetic
caacuacuuaaagucaaacgaa

SEQ ID NO: 446811 - RNA, 23 nt, Artificial Sequence
  Synthetic
ucaacuacuuaaagucaaacgaa

SEQ ID NO: 446812 - RNA, 24 nt, Artificial Sequence
  Synthetic
uucaacuacuuaaagucaaacgaa

SEQ ID NO: 446813 - RNA, 18 nt, Artificial Sequence
  Synthetic
aguuaaggcagaaacgaa

SEQ ID NO: 446814 - RNA, 19 nt, Artificial Sequence
  Synthetic
aaguuaaggcagaaacgaa

SEQ ID NO: 446815 - RNA, 20 nt, Artificial Sequence
  Synthetic
gaaguuaaggcagaaacgaa

SEQ ID NO: 446816 - RNA, 21 nt, Artificial Sequence
  Synthetic
agaaguuaaggcagaaacgaa

SEQ ID NO: 446817 - RNA, 22 nt, Artificial Sequence
  Synthetic
aagaaguuaaggcagaaacgaa

SEQ ID NO: 446818 - RNA, 23 nt, Artificial Sequence
  Synthetic
aaagaaguuaaggcagaaacgaa

SEQ ID NO: 446819 - RNA, 24 nt, Artificial Sequence
  Synthetic
uaaagaaguuaaggcagaaacgaa

SEQ ID NO: 446820 - RNA, 18 nt, Artificial Sequence
  Synthetic
cguaacacuaucaacgaa

SEQ ID NO: 446821 - RNA, 19 nt, Artificial Sequence
  Synthetic
acguaacacuaucaacgaa

SEQ ID NO: 446822 - RNA, 20 nt, Artificial Sequence
  Synthetic
uacguaacacuaucaacgaa

SEQ ID NO: 446823 - RNA, 21 nt, Artificial Sequence
  Synthetic
uuacguaacacuaucaacgaa

SEQ ID NO: 446824 - RNA, 22 nt, Artificial Sequence
  Synthetic
cuuacguaacacuaucaacgaa

SEQ ID NO: 446825 - RNA, 23 nt, Artificial Sequence
  Synthetic
acuuacguaacacuaucaacgaa

SEQ ID NO: 446826 - RNA, 24 nt, Artificial Sequence
  Synthetic
uacuuacguaacacuaucaacgaa

SEQ ID NO: 446827 - RNA, 18 nt, Artificial Sequence
  Synthetic
uacuggguacauaacgaa

SEQ ID NO: 446828 - RNA, 19 nt, Artificial Sequence
  Synthetic
cuacuggguacauaacgaa

SEQ ID NO: 446829 - RNA, 20 nt, Artificial Sequence
  Synthetic
acuacuggguacauaacgaa

SEQ ID NO: 446830 - RNA, 21 nt, Artificial Sequence
  Synthetic
gacuacuggguacauaacgaa

SEQ ID NO: 446831 - RNA, 22 nt, Artificial Sequence
  Synthetic
ugacuacuggguacauaacgaa

SEQ ID NO: 446832 - RNA, 23 nt, Artificial Sequence
  Synthetic
augacuacuggguacauaacgaa

SEQ ID NO: 446833 - RNA, 24 nt, Artificial Sequence
  Synthetic
aaugacuacuggguacauaacgaa

SEQ ID NO: 446834 - RNA, 18 nt, Artificial Sequence
  Synthetic
aauuccugacaacacgaa

SEQ ID NO: 446835 - RNA, 19 nt, Artificial Sequence
  Synthetic
uaauuccugacaacacgaa

SEQ ID NO: 446836 - RNA, 20 nt, Artificial Sequence
  Synthetic
cuaauuccugacaacacgaa

SEQ ID NO: 446837 - RNA, 21 nt, Artificial Sequence
  Synthetic
acuaauuccugacaacacgaa

SEQ ID NO: 446838 - RNA, 22 nt, Artificial Sequence
  Synthetic
gacuaauuccugacaacacgaa

SEQ ID NO: 446839 - RNA, 23 nt, Artificial Sequence
  Synthetic
agacuaauuccugacaacacgaa

SEQ ID NO: 446840 - RNA, 24 nt, Artificial Sequence
  Synthetic
cagacuaauuccugacaacacgaa

SEQ ID NO: 446841 - RNA, 18 nt, Artificial Sequence
  Synthetic
ucaugagcugaacacgaa

SEQ ID NO: 446842 - RNA, 19 nt, Artificial Sequence
  Synthetic
aucaugagcugaacacgaa

SEQ ID NO: 446843 - RNA, 20 nt, Artificial Sequence
  Synthetic
aaucaugagcugaacacgaa

SEQ ID NO: 446844 - RNA, 21 nt, Artificial Sequence
  Synthetic
uaaucaugagcugaacacgaa

SEQ ID NO: 446845 - RNA, 22 nt, Artificial Sequence
  Synthetic
auaaucaugagcugaacacgaa

SEQ ID NO: 446846 - RNA, 23 nt, Artificial Sequence
  Synthetic
cauaaucaugagcugaacacgaa

SEQ ID NO: 446847 - RNA, 24 nt, Artificial Sequence
  Synthetic
acauaaucaugagcugaacacgaa

SEQ ID NO: 446848 - RNA, 18 nt, Artificial Sequence
  Synthetic
uuguuacggaagcacgaa

SEQ ID NO: 446849 - RNA, 19 nt, Artificial Sequence
  Synthetic
uuuguuacggaagcacgaa

SEQ ID NO: 446850 - RNA, 20 nt, Artificial Sequence
  Synthetic
uuuuguuacggaagcacgaa

SEQ ID NO: 446851 - RNA, 21 nt, Artificial Sequence
  Synthetic
auuuuguuacggaagcacgaa

SEQ ID NO: 446852 - RNA, 22 nt, Artificial Sequence
  Synthetic
uauuuuguuacggaagcacgaa

SEQ ID NO: 446853 - RNA, 23 nt, Artificial Sequence
  Synthetic
guauuuuguuacggaagcacgaa

SEQ ID NO: 446854 - RNA, 24 nt, Artificial Sequence
  Synthetic
gguauuuuguuacggaagcacgaa

SEQ ID NO: 446855 - RNA, 18 nt, Artificial Sequence
  Synthetic
acagagucagaagacgaa

SEQ ID NO: 446856 - RNA, 19 nt, Artificial Sequence
  Synthetic
uacagagucagaagacgaa

SEQ ID NO: 446857 - RNA, 20 nt, Artificial Sequence
  Synthetic
auacagagucagaagacgaa

SEQ ID NO: 446858 - RNA, 21 nt, Artificial Sequence
  Synthetic
gauacagagucagaagacgaa

SEQ ID NO: 446859 - RNA, 22 nt, Artificial Sequence
  Synthetic
agauacagagucagaagacgaa

SEQ ID NO: 446860 - RNA, 23 nt, Artificial Sequence
  Synthetic
aagauacagagucagaagacgaa

SEQ ID NO: 446861 - RNA, 24 nt, Artificial Sequence
  Synthetic
gaagauacagagucagaagacgaa

SEQ ID NO: 446862 - RNA, 18 nt, Artificial Sequence
  Synthetic
gagcugguaaacgacgaa

SEQ ID NO: 446863 - RNA, 19 nt, Artificial Sequence
  Synthetic
ugagcugguaaacgacgaa

SEQ ID NO: 446864 - RNA, 20 nt, Artificial Sequence
  Synthetic
uugagcugguaaacgacgaa

SEQ ID NO: 446865 - RNA, 21 nt, Artificial Sequence
  Synthetic
uuugagcugguaaacgacgaa

SEQ ID NO: 446866 - RNA, 22 nt, Artificial Sequence
  Synthetic
uuuugagcugguaaacgacgaa

SEQ ID NO: 446867 - RNA, 23 nt, Artificial Sequence
  Synthetic
auuuugagcugguaaacgacgaa

SEQ ID NO: 446868 - RNA, 24 nt, Artificial Sequence
  Synthetic
gauuuugagcugguaaacgacgaa

SEQ ID NO: 446869 - RNA, 18 nt, Artificial Sequence
  Synthetic
cuucaaaagcuggacgaa

SEQ ID NO: 446870 - RNA, 19 nt, Artificial Sequence
  Synthetic
acuucaaaagcuggacgaa

SEQ ID NO: 446871 - RNA, 20 nt, Artificial Sequence
  Synthetic
gacuucaaaagcuggacgaa

SEQ ID NO: 446872 - RNA, 21 nt, Artificial Sequence
  Synthetic
agacuucaaaagcuggacgaa

SEQ ID NO: 446873 - RNA, 22 nt, Artificial Sequence
  Synthetic
aagacuucaaaagcuggacgaa

SEQ ID NO: 446874 - RNA, 23 nt, Artificial Sequence
  Synthetic
gaagacuucaaaagcuggacgaa

SEQ ID NO: 446875 - RNA, 24 nt, Artificial Sequence
  Synthetic
ggaagacuucaaaagcuggacgaa

SEQ ID NO: 446876 - RNA, 18 nt, Artificial Sequence
  Synthetic
cuuaaagaaguugacgaa

SEQ ID NO: 446877 - RNA, 19 nt, Artificial Sequence
  Synthetic
ucuuaaagaaguugacgaa

SEQ ID NO: 446878 - RNA, 20 nt, Artificial Sequence
  Synthetic
aucuuaaagaaguugacgaa

SEQ ID NO: 446879 - RNA, 21 nt, Artificial Sequence
  Synthetic
aaucuuaaagaaguugacgaa

SEQ ID NO: 446880 - RNA, 22 nt, Artificial Sequence
  Synthetic
aaaucuuaaagaaguugacgaa

SEQ ID NO: 446881 - RNA, 23 nt, Artificial Sequence
  Synthetic
gaaaucuuaaagaaguugacgaa

SEQ ID NO: 446882 - RNA, 24 nt, Artificial Sequence
  Synthetic
agaaaucuuaaagaaguugacgaa

SEQ ID NO: 446883 - RNA, 18 nt, Artificial Sequence
  Synthetic
auggacuaggaauacgaa

SEQ ID NO: 446884 - RNA, 19 nt, Artificial Sequence
  Synthetic
aauggacuaggaauacgaa

SEQ ID NO: 446885 - RNA, 20 nt, Artificial Sequence
  Synthetic
aaauggacuaggaauacgaa

SEQ ID NO: 446886 - RNA, 21 nt, Artificial Sequence
  Synthetic
aaaauggacuaggaauacgaa

SEQ ID NO: 446887 - RNA, 22 nt, Artificial Sequence
  Synthetic
aaaaauggacuaggaauacgaa

SEQ ID NO: 446888 - RNA, 23 nt, Artificial Sequence
  Synthetic
gaaaaauggacuaggaauacgaa

SEQ ID NO: 446889 - RNA, 24 nt, Artificial Sequence
  Synthetic
agaaaaauggacuaggaauacgaa

SEQ ID NO: 446890 - RNA, 18 nt, Artificial Sequence
  Synthetic
aaaacaaaaagauacgaa

SEQ ID NO: 446891 - RNA, 19 nt, Artificial Sequence
  Synthetic
uaaaacaaaaagauacgaa

SEQ ID NO: 446892 - RNA, 20 nt, Artificial Sequence
  Synthetic
uuaaaacaaaaagauacgaa

SEQ ID NO: 446893 - RNA, 21 nt, Artificial Sequence
  Synthetic
uuuaaaacaaaaagauacgaa

SEQ ID NO: 446894 - RNA, 22 nt, Artificial Sequence
  Synthetic
uuuuaaaacaaaaagauacgaa

SEQ ID NO: 446895 - RNA, 23 nt, Artificial Sequence
  Synthetic
auuuuaaaacaaaaagauacgaa

SEQ ID NO: 446896 - RNA, 24 nt, Artificial Sequence
  Synthetic
uauuuuaaaacaaaaagauacgaa

SEQ ID NO: 446897 - RNA, 18 nt, Artificial Sequence
  Synthetic
cgacaacaacaaaccgaa

SEQ ID NO: 446898 - RNA, 19 nt, Artificial Sequence
  Synthetic
acgacaacaacaaaccgaa

SEQ ID NO: 446899 - RNA, 20 nt, Artificial Sequence
  Synthetic
aacgacaacaacaaaccgaa

SEQ ID NO: 446900 - RNA, 21 nt, Artificial Sequence
  Synthetic
caacgacaacaacaaaccgaa

SEQ ID NO: 446901 - RNA, 22 nt, Artificial Sequence
  Synthetic
acaacgacaacaacaaaccgaa

SEQ ID NO: 446902 - RNA, 23 nt, Artificial Sequence
  Synthetic
aacaacgacaacaacaaaccgaa

SEQ ID NO: 446903 - RNA, 24 nt, Artificial Sequence
  Synthetic
caacaacgacaacaacaaaccgaa

SEQ ID NO: 446904 - RNA, 18 nt, Artificial Sequence
  Synthetic
uaaagaagagcuaccgaa

SEQ ID NO: 446905 - RNA, 19 nt, Artificial Sequence
  Synthetic
uuaaagaagagcuaccgaa

SEQ ID NO: 446906 - RNA, 20 nt, Artificial Sequence
  Synthetic
auuaaagaagagcuaccgaa

SEQ ID NO: 446907 - RNA, 21 nt, Artificial Sequence
  Synthetic
aauuaaagaagagcuaccgaa

SEQ ID NO: 446908 - RNA, 22 nt, Artificial Sequence
  Synthetic
aaauuaaagaagagcuaccgaa

SEQ ID NO: 446909 - RNA, 23 nt, Artificial Sequence
  Synthetic
aaaauuaaagaagagcuaccgaa

SEQ ID NO: 446910 - RNA, 24 nt, Artificial Sequence
  Synthetic
caaaauuaaagaagagcuaccgaa

SEQ ID NO: 446911 - RNA, 18 nt, Artificial Sequence
  Synthetic
augugguauagacccgaa

SEQ ID NO: 446912 - RNA, 19 nt, Artificial Sequence
  Synthetic
uaugugguauagacccgaa

SEQ ID NO: 446913 - RNA, 20 nt, Artificial Sequence
  Synthetic
auaugugguauagacccgaa

SEQ ID NO: 446914 - RNA, 21 nt, Artificial Sequence
  Synthetic
aauaugugguauagacccgaa

SEQ ID NO: 446915 - RNA, 22 nt, Artificial Sequence
  Synthetic
aaauaugugguauagacccgaa

SEQ ID NO: 446916 - RNA, 23 nt, Artificial Sequence
  Synthetic
aaaauaugugguauagacccgaa

SEQ ID NO: 446917 - RNA, 24 nt, Artificial Sequence
  Synthetic
gaaaauaugugguauagacccgaa

SEQ ID NO: 446918 - RNA, 18 nt, Artificial Sequence
  Synthetic
agagcugguaaagccgaa

SEQ ID NO: 446919 - RNA, 19 nt, Artificial Sequence
  Synthetic
uagagcugguaaagccgaa

SEQ ID NO: 446920 - RNA, 20 nt, Artificial Sequence
  Synthetic
guagagcugguaaagccgaa

SEQ ID NO: 446921 - RNA, 21 nt, Artificial Sequence
  Synthetic
aguagagcugguaaagccgaa

SEQ ID NO: 446922 - RNA, 22 nt, Artificial Sequence
  Synthetic
gaguagagcugguaaagccgaa

SEQ ID NO: 446923 - RNA, 23 nt, Artificial Sequence
  Synthetic
agaguagagcugguaaagccgaa

SEQ ID NO: 446924 - RNA, 24 nt, Artificial Sequence
  Synthetic
cagaguagagcugguaaagccgaa

SEQ ID NO: 446925 - RNA, 18 nt, Artificial Sequence
  Synthetic
gcacuuugggaggccgaa

SEQ ID NO: 446926 - RNA, 19 nt, Artificial Sequence
  Synthetic
agcacuuugggaggccgaa

SEQ ID NO: 446927 - RNA, 20 nt, Artificial Sequence
  Synthetic
cagcacuuugggaggccgaa

SEQ ID NO: 446928 - RNA, 21 nt, Artificial Sequence
  Synthetic
ucagcacuuugggaggccgaa

SEQ ID NO: 446929 - RNA, 22 nt, Artificial Sequence
  Synthetic
cucagcacuuugggaggccgaa

SEQ ID NO: 446930 - RNA, 23 nt, Artificial Sequence
  Synthetic
gcucagcacuuugggaggccgaa

SEQ ID NO: 446931 - RNA, 24 nt, Artificial Sequence
  Synthetic
ggcucagcacuuugggaggccgaa

SEQ ID NO: 446932 - RNA, 18 nt, Artificial Sequence
  Synthetic
acccuuuugacggccgaa

SEQ ID NO: 446933 - RNA, 19 nt, Artificial Sequence
  Synthetic
uacccuuuugacggccgaa

SEQ ID NO: 446934 - RNA, 20 nt, Artificial Sequence
  Synthetic
cuacccuuuugacggccgaa

SEQ ID NO: 446935 - RNA, 21 nt, Artificial Sequence
  Synthetic
ucuacccuuuugacggccgaa

SEQ ID NO: 446936 - RNA, 22 nt, Artificial Sequence
  Synthetic
cucuacccuuuugacggccgaa

SEQ ID NO: 446937 - RNA, 23 nt, Artificial Sequence
  Synthetic
acucuacccuuuugacggccgaa

SEQ ID NO: 446938 - RNA, 24 nt, Artificial Sequence
  Synthetic
aacucuacccuuuugacggccgaa

SEQ ID NO: 446939 - RNA, 18 nt, Artificial Sequence
  Synthetic
guugcagguccugccgaa

SEQ ID NO: 446940 - RNA, 19 nt, Artificial Sequence
  Synthetic
gguugcagguccugccgaa

SEQ ID NO: 446941 - RNA, 20 nt, Artificial Sequence
  Synthetic
ugguugcagguccugccgaa

SEQ ID NO: 446942 - RNA, 21 nt, Artificial Sequence
  Synthetic
gugguugcagguccugccgaa

SEQ ID NO: 446943 - RNA, 22 nt, Artificial Sequence
  Synthetic
ugugguugcagguccugccgaa

SEQ ID NO: 446944 - RNA, 23 nt, Artificial Sequence
  Synthetic
cugugguugcagguccugccgaa

SEQ ID NO: 446945 - RNA, 24 nt, Artificial Sequence
  Synthetic
ccugugguugcagguccugccgaa

SEQ ID NO: 446946 - RNA, 18 nt, Artificial Sequence
  Synthetic
acacagacaacauccgaa

SEQ ID NO: 446947 - RNA, 19 nt, Artificial Sequence
  Synthetic
cacacagacaacauccgaa

SEQ ID NO: 446948 - RNA, 20 nt, Artificial Sequence
  Synthetic
ucacacagacaacauccgaa

SEQ ID NO: 446949 - RNA, 21 nt, Artificial Sequence
  Synthetic
cucacacagacaacauccgaa

SEQ ID NO: 446950 - RNA, 22 nt, Artificial Sequence
  Synthetic
acucacacagacaacauccgaa

SEQ ID NO: 446951 - RNA, 23 nt, Artificial Sequence
  Synthetic
cacucacacagacaacauccgaa

SEQ ID NO: 446952 - RNA, 24 nt, Artificial Sequence
  Synthetic
gcacucacacagacaacauccgaa

SEQ ID NO: 446953 - RNA, 18 nt, Artificial Sequence
  Synthetic
aauguuauaaauuccgaa

SEQ ID NO: 446954 - RNA, 19 nt, Artificial Sequence
  Synthetic
caauguuauaaauuccgaa

SEQ ID NO: 446955 - RNA, 20 nt, Artificial Sequence
  Synthetic
acaauguuauaaauuccgaa

SEQ ID NO: 446956 - RNA, 21 nt, Artificial Sequence
  Synthetic
uacaauguuauaaauuccgaa

SEQ ID NO: 446957 - RNA, 22 nt, Artificial Sequence
  Synthetic
auacaauguuauaaauuccgaa

SEQ ID NO: 446958 - RNA, 23 nt, Artificial Sequence
  Synthetic
gauacaauguuauaaauuccgaa

SEQ ID NO: 446959 - RNA, 24 nt, Artificial Sequence
  Synthetic
agauacaauguuauaaauuccgaa

SEQ ID NO: 446960 - RNA, 18 nt, Artificial Sequence
  Synthetic
aggagggagucuuccgaa

SEQ ID NO: 446961 - RNA, 19 nt, Artificial Sequence
  Synthetic
caggagggagucuuccgaa

SEQ ID NO: 446962 - RNA, 20 nt, Artificial Sequence
  Synthetic
acaggagggagucuuccgaa

SEQ ID NO: 446963 - RNA, 21 nt, Artificial Sequence
  Synthetic
cacaggagggagucuuccgaa

SEQ ID NO: 446964 - RNA, 22 nt, Artificial Sequence
  Synthetic
acacaggagggagucuuccgaa

SEQ ID NO: 446965 - RNA, 23 nt, Artificial Sequence
  Synthetic
uacacaggagggagucuuccgaa

SEQ ID NO: 446966 - RNA, 24 nt, Artificial Sequence
  Synthetic
cuacacaggagggagucuuccgaa

SEQ ID NO: 446967 - RNA, 18 nt, Artificial Sequence
  Synthetic
aaauacaccuguuccgaa

SEQ ID NO: 446968 - RNA, 19 nt, Artificial Sequence
  Synthetic
uaaauacaccuguuccgaa

SEQ ID NO: 446969 - RNA, 20 nt, Artificial Sequence
  Synthetic
guaaauacaccuguuccgaa

SEQ ID NO: 446970 - RNA, 21 nt, Artificial Sequence
  Synthetic
gguaaauacaccuguuccgaa

SEQ ID NO: 446971 - RNA, 22 nt, Artificial Sequence
  Synthetic
ggguaaauacaccuguuccgaa

SEQ ID NO: 446972 - RNA, 23 nt, Artificial Sequence
  Synthetic
uggguaaauacaccuguuccgaa

SEQ ID NO: 446973 - RNA, 24 nt, Artificial Sequence
  Synthetic
uuggguaaauacaccuguuccgaa

SEQ ID NO: 446974 - RNA, 18 nt, Artificial Sequence
  Synthetic
ugcuuguagguuuccgaa

SEQ ID NO: 446975 - RNA, 19 nt, Artificial Sequence
  Synthetic
augcuuguagguuuccgaa

SEQ ID NO: 446976 - RNA, 20 nt, Artificial Sequence
  Synthetic
gaugcuuguagguuuccgaa

SEQ ID NO: 446977 - RNA, 21 nt, Artificial Sequence
  Synthetic
agaugcuuguagguuuccgaa

SEQ ID NO: 446978 - RNA, 22 nt, Artificial Sequence
  Synthetic
uagaugcuuguagguuuccgaa

SEQ ID NO: 446979 - RNA, 23 nt, Artificial Sequence
  Synthetic
uuagaugcuuguagguuuccgaa

SEQ ID NO: 446980 - RNA, 24 nt, Artificial Sequence
  Synthetic
auuagaugcuuguagguuuccgaa

SEQ ID NO: 446981 - RNA, 18 nt, Artificial Sequence
  Synthetic
ggcggagguugcagcgaa

SEQ ID NO: 446982 - RNA, 19 nt, Artificial Sequence
  Synthetic
aggcggagguugcagcgaa

SEQ ID NO: 446983 - RNA, 20 nt, Artificial Sequence
  Synthetic
gaggcggagguugcagcgaa

SEQ ID NO: 446984 - RNA, 21 nt, Artificial Sequence
  Synthetic
ggaggcggagguugcagcgaa

SEQ ID NO: 446985 - RNA, 22 nt, Artificial Sequence
  Synthetic
aggaggcggagguugcagcgaa

SEQ ID NO: 446986 - RNA, 23 nt, Artificial Sequence
  Synthetic
caggaggcggagguugcagcgaa

SEQ ID NO: 446987 - RNA, 24 nt, Artificial Sequence
  Synthetic
ccaggaggcggagguugcagcgaa

SEQ ID NO: 446988 - RNA, 18 nt, Artificial Sequence
  Synthetic
ugaccuuaguauagcgaa

SEQ ID NO: 446989 - RNA, 19 nt, Artificial Sequence
  Synthetic
uugaccuuaguauagcgaa

SEQ ID NO: 446990 - RNA, 20 nt, Artificial Sequence
  Synthetic
uuugaccuuaguauagcgaa

SEQ ID NO: 446991 - RNA, 21 nt, Artificial Sequence
  Synthetic
auuugaccuuaguauagcgaa

SEQ ID NO: 446992 - RNA, 22 nt, Artificial Sequence
  Synthetic
gauuugaccuuaguauagcgaa

SEQ ID NO: 446993 - RNA, 23 nt, Artificial Sequence
  Synthetic
ugauuugaccuuaguauagcgaa

SEQ ID NO: 446994 - RNA, 24 nt, Artificial Sequence
  Synthetic
augauuugaccuuaguauagcgaa

SEQ ID NO: 446995 - RNA, 18 nt, Artificial Sequence
  Synthetic
gaauuaaccacacgcgaa

SEQ ID NO: 446996 - RNA, 19 nt, Artificial Sequence
  Synthetic
ggaauuaaccacacgcgaa

SEQ ID NO: 446997 - RNA, 20 nt, Artificial Sequence
  Synthetic
gggaauuaaccacacgcgaa

SEQ ID NO: 446998 - RNA, 21 nt, Artificial Sequence
  Synthetic
ugggaauuaaccacacgcgaa

SEQ ID NO: 446999 - RNA, 22 nt, Artificial Sequence
  Synthetic
uugggaauuaaccacacgcgaa

SEQ ID NO: 447000 - RNA, 23 nt, Artificial Sequence
  Synthetic
guugggaauuaaccacacgcgaa

SEQ ID NO: 447001 - RNA, 24 nt, Artificial Sequence
  Synthetic
cguugggaauuaaccacacgcgaa

SEQ ID NO: 447002 - RNA, 18 nt, Artificial Sequence
  Synthetic
augaggguaaauggcgaa

SEQ ID NO: 447003 - RNA, 19 nt, Artificial Sequence
  Synthetic
caugaggguaaauggcgaa

SEQ ID NO: 447004 - RNA, 20 nt, Artificial Sequence
  Synthetic
gcaugaggguaaauggcgaa

SEQ ID NO: 447005 - RNA, 21 nt, Artificial Sequence
  Synthetic
ugcaugaggguaaauggcgaa

SEQ ID NO: 447006 - RNA, 22 nt, Artificial Sequence
  Synthetic
uugcaugaggguaaauggcgaa

SEQ ID NO: 447007 - RNA, 23 nt, Artificial Sequence
  Synthetic
cuugcaugaggguaaauggcgaa

SEQ ID NO: 447008 - RNA, 24 nt, Artificial Sequence
  Synthetic
ccuugcaugaggguaaauggcgaa

SEQ ID NO: 447009 - RNA, 18 nt, Artificial Sequence
  Synthetic
cugcggggccacugcgaa

SEQ ID NO: 447010 - RNA, 19 nt, Artificial Sequence
  Synthetic
gcugcggggccacugcgaa

SEQ ID NO: 447011 - RNA, 20 nt, Artificial Sequence
  Synthetic
ugcugcggggccacugcgaa

SEQ ID NO: 447012 - RNA, 21 nt, Artificial Sequence
  Synthetic
gugcugcggggccacugcgaa

SEQ ID NO: 447013 - RNA, 22 nt, Artificial Sequence
  Synthetic
agugcugcggggccacugcgaa

SEQ ID NO: 447014 - RNA, 23 nt, Artificial Sequence
  Synthetic
cagugcugcggggccacugcgaa

SEQ ID NO: 447015 - RNA, 24 nt, Artificial Sequence
  Synthetic
gcagugcugcggggccacugcgaa

SEQ ID NO: 447016 - RNA, 18 nt, Artificial Sequence
  Synthetic
uuauagacauagugcgaa

SEQ ID NO: 447017 - RNA, 19 nt, Artificial Sequence
  Synthetic
auuauagacauagugcgaa

SEQ ID NO: 447018 - RNA, 20 nt, Artificial Sequence
  Synthetic
aauuauagacauagugcgaa

SEQ ID NO: 447019 - RNA, 21 nt, Artificial Sequence
  Synthetic
aaauuauagacauagugcgaa

SEQ ID NO: 447020 - RNA, 22 nt, Artificial Sequence
  Synthetic
caaauuauagacauagugcgaa

SEQ ID NO: 447021 - RNA, 23 nt, Artificial Sequence
  Synthetic
acaaauuauagacauagugcgaa

SEQ ID NO: 447022 - RNA, 24 nt, Artificial Sequence
  Synthetic
cacaaauuauagacauagugcgaa

SEQ ID NO: 447023 - RNA, 18 nt, Artificial Sequence
  Synthetic
cuagggggaauaaucgaa

SEQ ID NO: 447024 - RNA, 19 nt, Artificial Sequence
  Synthetic
gcuagggggaauaaucgaa

SEQ ID NO: 447025 - RNA, 20 nt, Artificial Sequence
  Synthetic
agcuagggggaauaaucgaa

SEQ ID NO: 447026 - RNA, 21 nt, Artificial Sequence
  Synthetic
aagcuagggggaauaaucgaa

SEQ ID NO: 447027 - RNA, 22 nt, Artificial Sequence
  Synthetic
aaagcuagggggaauaaucgaa

SEQ ID NO: 447028 - RNA, 23 nt, Artificial Sequence
  Synthetic
aaaagcuagggggaauaaucgaa

SEQ ID NO: 447029 - RNA, 24 nt, Artificial Sequence
  Synthetic
caaaagcuagggggaauaaucgaa

SEQ ID NO: 447030 - RNA, 18 nt, Artificial Sequence
  Synthetic
uuauaacaaagcaucgaa

SEQ ID NO: 447031 - RNA, 19 nt, Artificial Sequence
  Synthetic
uuuauaacaaagcaucgaa

SEQ ID NO: 447032 - RNA, 20 nt, Artificial Sequence
  Synthetic
cuuuauaacaaagcaucgaa

SEQ ID NO: 447033 - RNA, 21 nt, Artificial Sequence
  Synthetic
ucuuuauaacaaagcaucgaa

SEQ ID NO: 447034 - RNA, 22 nt, Artificial Sequence
  Synthetic
aucuuuauaacaaagcaucgaa

SEQ ID NO: 447035 - RNA, 23 nt, Artificial Sequence
  Synthetic
aaucuuuauaacaaagcaucgaa

SEQ ID NO: 447036 - RNA, 24 nt, Artificial Sequence
  Synthetic
aaaucuuuauaacaaagcaucgaa

SEQ ID NO: 447037 - RNA, 18 nt, Artificial Sequence
  Synthetic
cauuaaugacauaucgaa

SEQ ID NO: 447038 - RNA, 19 nt, Artificial Sequence
  Synthetic
acauuaaugacauaucgaa

SEQ ID NO: 447039 - RNA, 20 nt, Artificial Sequence
  Synthetic
uacauuaaugacauaucgaa

SEQ ID NO: 447040 - RNA, 21 nt, Artificial Sequence
  Synthetic
cuacauuaaugacauaucgaa

SEQ ID NO: 447041 - RNA, 22 nt, Artificial Sequence
  Synthetic
acuacauuaaugacauaucgaa

SEQ ID NO: 447042 - RNA, 23 nt, Artificial Sequence
  Synthetic
cacuacauuaaugacauaucgaa

SEQ ID NO: 447043 - RNA, 24 nt, Artificial Sequence
  Synthetic
gcacuacauuaaugacauaucgaa

SEQ ID NO: 447044 - RNA, 18 nt, Artificial Sequence
  Synthetic
auuuuuuuuccuaucgaa

SEQ ID NO: 447045 - RNA, 19 nt, Artificial Sequence
  Synthetic
cauuuuuuuuccuaucgaa

SEQ ID NO: 447046 - RNA, 20 nt, Artificial Sequence
  Synthetic
acauuuuuuuuccuaucgaa

SEQ ID NO: 447047 - RNA, 21 nt, Artificial Sequence
  Synthetic
uacauuuuuuuuccuaucgaa

SEQ ID NO: 447048 - RNA, 22 nt, Artificial Sequence
  Synthetic
auacauuuuuuuuccuaucgaa

SEQ ID NO: 447049 - RNA, 23 nt, Artificial Sequence
  Synthetic
cauacauuuuuuuuccuaucgaa

SEQ ID NO: 447050 - RNA, 24 nt, Artificial Sequence
  Synthetic
acauacauuuuuuuuccuaucgaa

SEQ ID NO: 447051 - RNA, 18 nt, Artificial Sequence
  Synthetic
caggacgugauauucgaa

SEQ ID NO: 447052 - RNA, 19 nt, Artificial Sequence
  Synthetic
ucaggacgugauauucgaa

SEQ ID NO: 447053 - RNA, 20 nt, Artificial Sequence
  Synthetic
cucaggacgugauauucgaa

SEQ ID NO: 447054 - RNA, 21 nt, Artificial Sequence
  Synthetic
ucucaggacgugauauucgaa

SEQ ID NO: 447055 - RNA, 22 nt, Artificial Sequence
  Synthetic
gucucaggacgugauauucgaa

SEQ ID NO: 447056 - RNA, 23 nt, Artificial Sequence
  Synthetic
ugucucaggacgugauauucgaa

SEQ ID NO: 447057 - RNA, 24 nt, Artificial Sequence
  Synthetic
cugucucaggacgugauauucgaa

SEQ ID NO: 447058 - RNA, 18 nt, Artificial Sequence
  Synthetic
aaaaaaaaaaaaaaggaa

SEQ ID NO: 447059 - RNA, 19 nt, Artificial Sequence
  Synthetic
aaaaaaaaaaaaaaaggaa

SEQ ID NO: 447060 - RNA, 20 nt, Artificial Sequence
  Synthetic
aaaaaaaaaaaaaaaaggaa

SEQ ID NO: 447061 - RNA, 21 nt, Artificial Sequence
  Synthetic
aaaaaaaaaaaaaaaaaggaa

SEQ ID NO: 447062 - RNA, 22 nt, Artificial Sequence
  Synthetic
aaaaaaaaaaaaaaaaaaggaa

SEQ ID NO: 447063 - RNA, 23 nt, Artificial Sequence
  Synthetic
aaaaaaaaaaaaaaaaaaaggaa

SEQ ID NO: 447064 - RNA, 24 nt, Artificial Sequence
  Synthetic
aaaaaaaaaaaaaaaaaaaaggaa

SEQ ID NO: 447065 - RNA, 20 nt, Artificial Sequence
  Synthetic
uaaaaaaaaaaaaaaaggaa

SEQ ID NO: 447066 - RNA, 21 nt, Artificial Sequence
  Synthetic
uuaaaaaaaaaaaaaaaggaa

SEQ ID NO: 447067 - RNA, 22 nt, Artificial Sequence
  Synthetic
uuuaaaaaaaaaaaaaaaggaa

SEQ ID NO: 447068 - RNA, 23 nt, Artificial Sequence
  Synthetic
cuuuaaaaaaaaaaaaaaaggaa

SEQ ID NO: 447069 - RNA, 24 nt, Artificial Sequence
  Synthetic
acuuuaaaaaaaaaaaaaaaggaa

SEQ ID NO: 447070 - RNA, 18 nt, Artificial Sequence
  Synthetic
aaauuaaaaaaaaaggaa

SEQ ID NO: 447071 - RNA, 19 nt, Artificial Sequence
  Synthetic
gaaauuaaaaaaaaaggaa

SEQ ID NO: 447072 - RNA, 20 nt, Artificial Sequence
  Synthetic
agaaauuaaaaaaaaaggaa

SEQ ID NO: 447073 - RNA, 21 nt, Artificial Sequence
  Synthetic
cagaaauuaaaaaaaaaggaa

SEQ ID NO: 447074 - RNA, 22 nt, Artificial Sequence
  Synthetic
acagaaauuaaaaaaaaaggaa

SEQ ID NO: 447075 - RNA, 23 nt, Artificial Sequence
  Synthetic
aacagaaauuaaaaaaaaaggaa

SEQ ID NO: 447076 - RNA, 24 nt, Artificial Sequence
  Synthetic
gaacagaaauuaaaaaaaaaggaa

SEQ ID NO: 447077 - RNA, 18 nt, Artificial Sequence
  Synthetic
caauaaaacaaaaaggaa

SEQ ID NO: 447078 - RNA, 19 nt, Artificial Sequence
  Synthetic
ucaauaaaacaaaaaggaa

SEQ ID NO: 447079 - RNA, 20 nt, Artificial Sequence
  Synthetic
cucaauaaaacaaaaaggaa

SEQ ID NO: 447080 - RNA, 21 nt, Artificial Sequence
  Synthetic
ccucaauaaaacaaaaaggaa

SEQ ID NO: 447081 - RNA, 22 nt, Artificial Sequence
  Synthetic
accucaauaaaacaaaaaggaa

SEQ ID NO: 447082 - RNA, 23 nt, Artificial Sequence
  Synthetic
uaccucaauaaaacaaaaaggaa

SEQ ID NO: 447083 - RNA, 24 nt, Artificial Sequence
  Synthetic
auaccucaauaaaacaaaaaggaa

SEQ ID NO: 447084 - RNA, 18 nt, Artificial Sequence
  Synthetic
gauaugagcaaaaaggaa

SEQ ID NO: 447085 - RNA, 19 nt, Artificial Sequence
  Synthetic
ugauaugagcaaaaaggaa

SEQ ID NO: 447086 - RNA, 20 nt, Artificial Sequence
  Synthetic
augauaugagcaaaaaggaa

SEQ ID NO: 447087 - RNA, 21 nt, Artificial Sequence
  Synthetic
aaugauaugagcaaaaaggaa

SEQ ID NO: 447088 - RNA, 22 nt, Artificial Sequence
  Synthetic
uaaugauaugagcaaaaaggaa

SEQ ID NO: 447089 - RNA, 23 nt, Artificial Sequence
  Synthetic
auaaugauaugagcaaaaaggaa

SEQ ID NO: 447090 - RNA, 24 nt, Artificial Sequence
  Synthetic
cauaaugauaugagcaaaaaggaa

SEQ ID NO: 447091 - RNA, 18 nt, Artificial Sequence
  Synthetic
auaaaaaggaaaaaggaa

SEQ ID NO: 447092 - RNA, 19 nt, Artificial Sequence
  Synthetic
cauaaaaaggaaaaaggaa

SEQ ID NO: 447093 - RNA, 20 nt, Artificial Sequence
  Synthetic
acauaaaaaggaaaaaggaa

SEQ ID NO: 447094 - RNA, 21 nt, Artificial Sequence
  Synthetic
uacauaaaaaggaaaaaggaa

SEQ ID NO: 447095 - RNA, 22 nt, Artificial Sequence
  Synthetic
auacauaaaaaggaaaaaggaa

SEQ ID NO: 447096 - RNA, 23 nt, Artificial Sequence
  Synthetic
aauacauaaaaaggaaaaaggaa

SEQ ID NO: 447097 - RNA, 24 nt, Artificial Sequence
  Synthetic
uaauacauaaaaaggaaaaaggaa

SEQ ID NO: 447098 - RNA, 18 nt, Artificial Sequence
  Synthetic
cuaaaaaauaaaaaggaa

SEQ ID NO: 447099 - RNA, 19 nt, Artificial Sequence
  Synthetic
ccuaaaaaauaaaaaggaa

SEQ ID NO: 447100 - RNA, 20 nt, Artificial Sequence
  Synthetic
uccuaaaaaauaaaaaggaa

SEQ ID NO: 447101 - RNA, 21 nt, Artificial Sequence
  Synthetic
auccuaaaaaauaaaaaggaa

SEQ ID NO: 447102 - RNA, 22 nt, Artificial Sequence
  Synthetic
aauccuaaaaaauaaaaaggaa

SEQ ID NO: 447103 - RNA, 23 nt, Artificial Sequence
  Synthetic
aaauccuaaaaaauaaaaaggaa

SEQ ID NO: 447104 - RNA, 24 nt, Artificial Sequence
  Synthetic
gaaauccuaaaaaauaaaaaggaa

SEQ ID NO: 447105 - RNA, 18 nt, Artificial Sequence
  Synthetic
aggaaagauaaaaaggaa

SEQ ID NO: 447106 - RNA, 19 nt, Artificial Sequence
  Synthetic
uaggaaagauaaaaaggaa

SEQ ID NO: 447107 - RNA, 20 nt, Artificial Sequence
  Synthetic
guaggaaagauaaaaaggaa

SEQ ID NO: 447108 - RNA, 21 nt, Artificial Sequence
  Synthetic
gguaggaaagauaaaaaggaa

SEQ ID NO: 447109 - RNA, 22 nt, Artificial Sequence
  Synthetic
ugguaggaaagauaaaaaggaa

SEQ ID NO: 447110 - RNA, 23 nt, Artificial Sequence
  Synthetic
augguaggaaagauaaaaaggaa

SEQ ID NO: 447111 - RNA, 24 nt, Artificial Sequence
  Synthetic
gaugguaggaaagauaaaaaggaa

SEQ ID NO: 447112 - RNA, 18 nt, Artificial Sequence
  Synthetic
aaggaaaaggaaaaggaa

SEQ ID NO: 447113 - RNA, 19 nt, Artificial Sequence
  Synthetic
aaaggaaaaggaaaaggaa

SEQ ID NO: 447114 - RNA, 20 nt, Artificial Sequence
  Synthetic
aaaaggaaaaggaaaaggaa

SEQ ID NO: 447115 - RNA, 21 nt, Artificial Sequence
  Synthetic
gaaaaggaaaaggaaaaggaa

SEQ ID NO: 447116 - RNA, 22 nt, Artificial Sequence
  Synthetic
ggaaaaggaaaaggaaaaggaa

SEQ ID NO: 447117 - RNA, 23 nt, Artificial Sequence
  Synthetic
aggaaaaggaaaaggaaaaggaa

SEQ ID NO: 447118 - RNA, 24 nt, Artificial Sequence
  Synthetic
aaggaaaaggaaaaggaaaaggaa

SEQ ID NO: 447119 - RNA, 20 nt, Artificial Sequence
  Synthetic
caaaggaaaaggaaaaggaa

SEQ ID NO: 447120 - RNA, 21 nt, Artificial Sequence
  Synthetic
gcaaaggaaaaggaaaaggaa

SEQ ID NO: 447121 - RNA, 22 nt, Artificial Sequence
  Synthetic
cgcaaaggaaaaggaaaaggaa

SEQ ID NO: 447122 - RNA, 23 nt, Artificial Sequence
  Synthetic
acgcaaaggaaaaggaaaaggaa

SEQ ID NO: 447123 - RNA, 24 nt, Artificial Sequence
  Synthetic
aacgcaaaggaaaaggaaaaggaa

SEQ ID NO: 447124 - RNA, 18 nt, Artificial Sequence
  Synthetic
aacgcaaaggaaaaggaa

SEQ ID NO: 447125 - RNA, 19 nt, Artificial Sequence
  Synthetic
gaacgcaaaggaaaaggaa

SEQ ID NO: 447126 - RNA, 20 nt, Artificial Sequence
  Synthetic
ggaacgcaaaggaaaaggaa

SEQ ID NO: 447127 - RNA, 21 nt, Artificial Sequence
  Synthetic
aggaacgcaaaggaaaaggaa

SEQ ID NO: 447128 - RNA, 22 nt, Artificial Sequence
  Synthetic
aaggaacgcaaaggaaaaggaa

SEQ ID NO: 447129 - RNA, 23 nt, Artificial Sequence
  Synthetic
aaaggaacgcaaaggaaaaggaa

SEQ ID NO: 447130 - RNA, 24 nt, Artificial Sequence
  Synthetic
caaaggaacgcaaaggaaaaggaa

SEQ ID NO: 447131 - RNA, 18 nt, Artificial Sequence
  Synthetic
aaggggcaagcaaaggaa

SEQ ID NO: 447132 - RNA, 19 nt, Artificial Sequence
  Synthetic
aaaggggcaagcaaaggaa

SEQ ID NO: 447133 - RNA, 20 nt, Artificial Sequence
  Synthetic
caaaggggcaagcaaaggaa

SEQ ID NO: 447134 - RNA, 21 nt, Artificial Sequence
  Synthetic
ucaaaggggcaagcaaaggaa

SEQ ID NO: 447135 - RNA, 22 nt, Artificial Sequence
  Synthetic
cucaaaggggcaagcaaaggaa

SEQ ID NO: 447136 - RNA, 23 nt, Artificial Sequence
  Synthetic
ucucaaaggggcaagcaaaggaa

SEQ ID NO: 447137 - RNA, 24 nt, Artificial Sequence
  Synthetic
cucucaaaggggcaagcaaaggaa

SEQ ID NO: 447138 - RNA, 18 nt, Artificial Sequence
  Synthetic
caaaggaacgcaaaggaa

SEQ ID NO: 447139 - RNA, 19 nt, Artificial Sequence
  Synthetic
gcaaaggaacgcaaaggaa

SEQ ID NO: 447140 - RNA, 20 nt, Artificial Sequence
  Synthetic
agcaaaggaacgcaaaggaa

SEQ ID NO: 447141 - RNA, 21 nt, Artificial Sequence
  Synthetic
aagcaaaggaacgcaaaggaa

SEQ ID NO: 447142 - RNA, 22 nt, Artificial Sequence
  Synthetic
aaagcaaaggaacgcaaaggaa

SEQ ID NO: 447143 - RNA, 23 nt, Artificial Sequence
  Synthetic
gaaagcaaaggaacgcaaaggaa

SEQ ID NO: 447144 - RNA, 24 nt, Artificial Sequence
  Synthetic
ggaaagcaaaggaacgcaaaggaa

SEQ ID NO: 447145 - RNA, 18 nt, Artificial Sequence
  Synthetic
uaagaauaaucaaaggaa

SEQ ID NO: 447146 - RNA, 19 nt, Artificial Sequence
  Synthetic
auaagaauaaucaaaggaa

SEQ ID NO: 447147 - RNA, 20 nt, Artificial Sequence
  Synthetic
cauaagaauaaucaaaggaa

SEQ ID NO: 447148 - RNA, 21 nt, Artificial Sequence
  Synthetic
ucauaagaauaaucaaaggaa

SEQ ID NO: 447149 - RNA, 22 nt, Artificial Sequence
  Synthetic
aucauaagaauaaucaaaggaa

SEQ ID NO: 447150 - RNA, 23 nt, Artificial Sequence
  Synthetic
uaucauaagaauaaucaaaggaa

SEQ ID NO: 447151 - RNA, 24 nt, Artificial Sequence
  Synthetic
guaucauaagaauaaucaaaggaa

SEQ ID NO: 447152 - RNA, 18 nt, Artificial Sequence
  Synthetic
ugugcagguucaaaggaa

SEQ ID NO: 447153 - RNA, 19 nt, Artificial Sequence
  Synthetic
gugugcagguucaaaggaa

SEQ ID NO: 447154 - RNA, 20 nt, Artificial Sequence
  Synthetic
agugugcagguucaaaggaa

SEQ ID NO: 447155 - RNA, 21 nt, Artificial Sequence
  Synthetic
cagugugcagguucaaaggaa

SEQ ID NO: 447156 - RNA, 22 nt, Artificial Sequence
  Synthetic
acagugugcagguucaaaggaa

SEQ ID NO: 447157 - RNA, 23 nt, Artificial Sequence
  Synthetic
aacagugugcagguucaaaggaa

SEQ ID NO: 447158 - RNA, 24 nt, Artificial Sequence
  Synthetic
aaacagugugcagguucaaaggaa

SEQ ID NO: 447159 - RNA, 18 nt, Artificial Sequence
  Synthetic
agaaacaaaagaaaggaa

SEQ ID NO: 447160 - RNA, 19 nt, Artificial Sequence
  Synthetic
aagaaacaaaagaaaggaa

SEQ ID NO: 447161 - RNA, 20 nt, Artificial Sequence
  Synthetic
gaagaaacaaaagaaaggaa

SEQ ID NO: 447162 - RNA, 21 nt, Artificial Sequence
  Synthetic
ggaagaaacaaaagaaaggaa

SEQ ID NO: 447163 - RNA, 22 nt, Artificial Sequence
  Synthetic
aggaagaaacaaaagaaaggaa

SEQ ID NO: 447164 - RNA, 23 nt, Artificial Sequence
  Synthetic
aaggaagaaacaaaagaaaggaa

SEQ ID NO: 447165 - RNA, 24 nt, Artificial Sequence
  Synthetic
gaaggaagaaacaaaagaaaggaa

SEQ ID NO: 447166 - RNA, 18 nt, Artificial Sequence
  Synthetic
gagguagaaagaaaggaa

SEQ ID NO: 447167 - RNA, 19 nt, Artificial Sequence
  Synthetic
agagguagaaagaaaggaa

SEQ ID NO: 447168 - RNA, 20 nt, Artificial Sequence
  Synthetic
gagagguagaaagaaaggaa

SEQ ID NO: 447169 - RNA, 21 nt, Artificial Sequence
  Synthetic
agagagguagaaagaaaggaa

SEQ ID NO: 447170 - RNA, 22 nt, Artificial Sequence
  Synthetic
gagagagguagaaagaaaggaa

SEQ ID NO: 447171 - RNA, 23 nt, Artificial Sequence
  Synthetic
ggagagagguagaaagaaaggaa

SEQ ID NO: 447172 - RNA, 24 nt, Artificial Sequence
  Synthetic
aggagagagguagaaagaaaggaa

SEQ ID NO: 447173 - RNA, 18 nt, Artificial Sequence
  Synthetic
gccacauccagaaaggaa

SEQ ID NO: 447174 - RNA, 19 nt, Artificial Sequence
  Synthetic
ggccacauccagaaaggaa

SEQ ID NO: 447175 - RNA, 20 nt, Artificial Sequence
  Synthetic
aggccacauccagaaaggaa

SEQ ID NO: 447176 - RNA, 21 nt, Artificial Sequence
  Synthetic
gaggccacauccagaaaggaa

SEQ ID NO: 447177 - RNA, 22 nt, Artificial Sequence
  Synthetic
ugaggccacauccagaaaggaa

SEQ ID NO: 447178 - RNA, 23 nt, Artificial Sequence
  Synthetic
gugaggccacauccagaaaggaa

SEQ ID NO: 447179 - RNA, 24 nt, Artificial Sequence
  Synthetic
ugugaggccacauccagaaaggaa

SEQ ID NO: 447180 - RNA, 18 nt, Artificial Sequence
  Synthetic
ugcuuggugagaaaggaa

SEQ ID NO: 447181 - RNA, 19 nt, Artificial Sequence
  Synthetic
augcuuggugagaaaggaa

SEQ ID NO: 447182 - RNA, 20 nt, Artificial Sequence
  Synthetic
gaugcuuggugagaaaggaa

SEQ ID NO: 447183 - RNA, 21 nt, Artificial Sequence
  Synthetic
ugaugcuuggugagaaaggaa

SEQ ID NO: 447184 - RNA, 22 nt, Artificial Sequence
  Synthetic
augaugcuuggugagaaaggaa

SEQ ID NO: 447185 - RNA, 23 nt, Artificial Sequence
  Synthetic
aaugaugcuuggugagaaaggaa

SEQ ID NO: 447186 - RNA, 24 nt, Artificial Sequence
  Synthetic
gaaugaugcuuggugagaaaggaa

SEQ ID NO: 447187 - RNA, 18 nt, Artificial Sequence
  Synthetic
aaagucaaacgaaaggaa

SEQ ID NO: 447188 - RNA, 19 nt, Artificial Sequence
  Synthetic
uaaagucaaacgaaaggaa

SEQ ID NO: 447189 - RNA, 20 nt, Artificial Sequence
  Synthetic
uuaaagucaaacgaaaggaa

SEQ ID NO: 447190 - RNA, 21 nt, Artificial Sequence
  Synthetic
cuuaaagucaaacgaaaggaa

SEQ ID NO: 447191 - RNA, 22 nt, Artificial Sequence
  Synthetic
acuuaaagucaaacgaaaggaa

SEQ ID NO: 447192 - RNA, 23 nt, Artificial Sequence
  Synthetic
uacuuaaagucaaacgaaaggaa

SEQ ID NO: 447193 - RNA, 24 nt, Artificial Sequence
  Synthetic
cuacuuaaagucaaacgaaaggaa

SEQ ID NO: 447194 - RNA, 18 nt, Artificial Sequence
  Synthetic
ggaacagaaggaaaggaa

SEQ ID NO: 447195 - RNA, 19 nt, Artificial Sequence
  Synthetic
aggaacagaaggaaaggaa

SEQ ID NO: 447196 - RNA, 20 nt, Artificial Sequence
  Synthetic
aaggaacagaaggaaaggaa

SEQ ID NO: 447197 - RNA, 21 nt, Artificial Sequence
  Synthetic
aaaggaacagaaggaaaggaa

SEQ ID NO: 447198 - RNA, 22 nt, Artificial Sequence
  Synthetic
aaaaggaacagaaggaaaggaa

SEQ ID NO: 447199 - RNA, 23 nt, Artificial Sequence
  Synthetic
gaaaaggaacagaaggaaaggaa

SEQ ID NO: 447200 - RNA, 24 nt, Artificial Sequence
  Synthetic
ggaaaaggaacagaaggaaaggaa

SEQ ID NO: 447201 - RNA, 18 nt, Artificial Sequence
  Synthetic
auuuauuagugaaaggaa

SEQ ID NO: 447202 - RNA, 19 nt, Artificial Sequence
  Synthetic
cauuuauuagugaaaggaa

SEQ ID NO: 447203 - RNA, 20 nt, Artificial Sequence
  Synthetic
ucauuuauuagugaaaggaa

SEQ ID NO: 447204 - RNA, 21 nt, Artificial Sequence
  Synthetic
aucauuuauuagugaaaggaa

SEQ ID NO: 447205 - RNA, 22 nt, Artificial Sequence
  Synthetic
aaucauuuauuagugaaaggaa

SEQ ID NO: 447206 - RNA, 23 nt, Artificial Sequence
  Synthetic
aaaucauuuauuagugaaaggaa

SEQ ID NO: 447207 - RNA, 24 nt, Artificial Sequence
  Synthetic
uaaaucauuuauuagugaaaggaa

SEQ ID NO: 447208 - RNA, 18 nt, Artificial Sequence
  Synthetic
gcuacuugaauaaaggaa

SEQ ID NO: 447209 - RNA, 19 nt, Artificial Sequence
  Synthetic
ugcuacuugaauaaaggaa

SEQ ID NO: 447210 - RNA, 20 nt, Artificial Sequence
  Synthetic
uugcuacuugaauaaaggaa

SEQ ID NO: 447211 - RNA, 21 nt, Artificial Sequence
  Synthetic
auugcuacuugaauaaaggaa

SEQ ID NO: 447212 - RNA, 22 nt, Artificial Sequence
  Synthetic
aauugcuacuugaauaaaggaa

SEQ ID NO: 447213 - RNA, 23 nt, Artificial Sequence
  Synthetic
aaauugcuacuugaauaaaggaa

SEQ ID NO: 447214 - RNA, 24 nt, Artificial Sequence
  Synthetic
aaaauugcuacuugaauaaaggaa

SEQ ID NO: 447215 - RNA, 18 nt, Artificial Sequence
  Synthetic
aauguuguuauaaaggaa

SEQ ID NO: 447216 - RNA, 19 nt, Artificial Sequence
  Synthetic
aaauguuguuauaaaggaa

SEQ ID NO: 447217 - RNA, 20 nt, Artificial Sequence
  Synthetic
aaaauguuguuauaaaggaa

SEQ ID NO: 447218 - RNA, 21 nt, Artificial Sequence
  Synthetic
gaaaauguuguuauaaaggaa

SEQ ID NO: 447219 - RNA, 22 nt, Artificial Sequence
  Synthetic
ugaaaauguuguuauaaaggaa

SEQ ID NO: 447220 - RNA, 23 nt, Artificial Sequence
  Synthetic
gugaaaauguuguuauaaaggaa

SEQ ID NO: 447221 - RNA, 24 nt, Artificial Sequence
  Synthetic
agugaaaauguuguuauaaaggaa

SEQ ID NO: 447222 - RNA, 18 nt, Artificial Sequence
  Synthetic
aaccgcaacuacaaggaa

SEQ ID NO: 447223 - RNA, 19 nt, Artificial Sequence
  Synthetic
uaaccgcaacuacaaggaa

SEQ ID NO: 447224 - RNA, 20 nt, Artificial Sequence
  Synthetic
auaaccgcaacuacaaggaa

SEQ ID NO: 447225 - RNA, 21 nt, Artificial Sequence
  Synthetic
cauaaccgcaacuacaaggaa

SEQ ID NO: 447226 - RNA, 22 nt, Artificial Sequence
  Synthetic
gcauaaccgcaacuacaaggaa

SEQ ID NO: 447227 - RNA, 23 nt, Artificial Sequence
  Synthetic
ugcauaaccgcaacuacaaggaa

SEQ ID NO: 447228 - RNA, 24 nt, Artificial Sequence
  Synthetic
augcauaaccgcaacuacaaggaa

SEQ ID NO: 447229 - RNA, 18 nt, Artificial Sequence
  Synthetic
uuuuagaguuacaaggaa

SEQ ID NO: 447230 - RNA, 19 nt, Artificial Sequence
  Synthetic
uuuuuagaguuacaaggaa

SEQ ID NO: 447231 - RNA, 20 nt, Artificial Sequence
  Synthetic
guuuuuagaguuacaaggaa

SEQ ID NO: 447232 - RNA, 21 nt, Artificial Sequence
  Synthetic
aguuuuuagaguuacaaggaa

SEQ ID NO: 447233 - RNA, 22 nt, Artificial Sequence
  Synthetic
uaguuuuuagaguuacaaggaa

SEQ ID NO: 447234 - RNA, 23 nt, Artificial Sequence
  Synthetic
guaguuuuuagaguuacaaggaa

SEQ ID NO: 447235 - RNA, 24 nt, Artificial Sequence
  Synthetic
aguaguuuuuagaguuacaaggaa

SEQ ID NO: 447236 - RNA, 18 nt, Artificial Sequence
  Synthetic
uccaugaaagccaaggaa

SEQ ID NO: 447237 - RNA, 19 nt, Artificial Sequence
  Synthetic
uuccaugaaagccaaggaa

SEQ ID NO: 447238 - RNA, 20 nt, Artificial Sequence
  Synthetic
guuccaugaaagccaaggaa

SEQ ID NO: 447239 - RNA, 21 nt, Artificial Sequence
  Synthetic
aguuccaugaaagccaaggaa

SEQ ID NO: 447240 - RNA, 22 nt, Artificial Sequence
  Synthetic
caguuccaugaaagccaaggaa

SEQ ID NO: 447241 - RNA, 23 nt, Artificial Sequence
  Synthetic
acaguuccaugaaagccaaggaa

SEQ ID NO: 447242 - RNA, 24 nt, Artificial Sequence
  Synthetic
aacaguuccaugaaagccaaggaa

SEQ ID NO: 447243 - RNA, 18 nt, Artificial Sequence
  Synthetic
ccucgccaagccaaggaa

SEQ ID NO: 447244 - RNA, 19 nt, Artificial Sequence
  Synthetic
cccucgccaagccaaggaa

SEQ ID NO: 447245 - RNA, 20 nt, Artificial Sequence
  Synthetic
gcccucgccaagccaaggaa

SEQ ID NO: 447246 - RNA, 21 nt, Artificial Sequence
  Synthetic
ugcccucgccaagccaaggaa

SEQ ID NO: 447247 - RNA, 22 nt, Artificial Sequence
  Synthetic
cugcccucgccaagccaaggaa

SEQ ID NO: 447248 - RNA, 23 nt, Artificial Sequence
  Synthetic
ucugcccucgccaagccaaggaa

SEQ ID NO: 447249 - RNA, 24 nt, Artificial Sequence
  Synthetic
uucugcccucgccaagccaaggaa

SEQ ID NO: 447250 - RNA, 18 nt, Artificial Sequence
  Synthetic
ggugggguugccaaggaa

SEQ ID NO: 447251 - RNA, 19 nt, Artificial Sequence
  Synthetic
uggugggguugccaaggaa

SEQ ID NO: 447252 - RNA, 20 nt, Artificial Sequence
  Synthetic
guggugggguugccaaggaa

SEQ ID NO: 447253 - RNA, 21 nt, Artificial Sequence
  Synthetic
aguggugggguugccaaggaa

SEQ ID NO: 447254 - RNA, 22 nt, Artificial Sequence
  Synthetic
uaguggugggguugccaaggaa

SEQ ID NO: 447255 - RNA, 23 nt, Artificial Sequence
  Synthetic
uuaguggugggguugccaaggaa

SEQ ID NO: 447256 - RNA, 24 nt, Artificial Sequence
  Synthetic
auuaguggugggguugccaaggaa

SEQ ID NO: 447257 - RNA, 18 nt, Artificial Sequence
  Synthetic
gguuaggggaagaaggaa

SEQ ID NO: 447258 - RNA, 19 nt, Artificial Sequence
  Synthetic
ggguuaggggaagaaggaa

SEQ ID NO: 447259 - RNA, 20 nt, Artificial Sequence
  Synthetic
gggguuaggggaagaaggaa

SEQ ID NO: 447260 - RNA, 21 nt, Artificial Sequence
  Synthetic
agggguuaggggaagaaggaa

SEQ ID NO: 447261 - RNA, 22 nt, Artificial Sequence
  Synthetic
uagggguuaggggaagaaggaa

SEQ ID NO: 447262 - RNA, 23 nt, Artificial Sequence
  Synthetic
guagggguuaggggaagaaggaa

SEQ ID NO: 447263 - RNA, 24 nt, Artificial Sequence
  Synthetic
gguagggguuaggggaagaaggaa

SEQ ID NO: 447264 - RNA, 18 nt, Artificial Sequence
  Synthetic
gugagaaaacagaaggaa

SEQ ID NO: 447265 - RNA, 19 nt, Artificial Sequence
  Synthetic
ggugagaaaacagaaggaa

SEQ ID NO: 447266 - RNA, 20 nt, Artificial Sequence
  Synthetic
aggugagaaaacagaaggaa

SEQ ID NO: 447267 - RNA, 21 nt, Artificial Sequence
  Synthetic
gaggugagaaaacagaaggaa

SEQ ID NO: 447268 - RNA, 22 nt, Artificial Sequence
  Synthetic
ggaggugagaaaacagaaggaa

SEQ ID NO: 447269 - RNA, 23 nt, Artificial Sequence
  Synthetic
gggaggugagaaaacagaaggaa

SEQ ID NO: 447270 - RNA, 24 nt, Artificial Sequence
  Synthetic
ggggaggugagaaaacagaaggaa

SEQ ID NO: 447271 - RNA, 18 nt, Artificial Sequence
  Synthetic
gaaaaggaacagaaggaa

SEQ ID NO: 447272 - RNA, 19 nt, Artificial Sequence
  Synthetic
ggaaaaggaacagaaggaa

SEQ ID NO: 447273 - RNA, 20 nt, Artificial Sequence
  Synthetic
aggaaaaggaacagaaggaa

SEQ ID NO: 447274 - RNA, 21 nt, Artificial Sequence
  Synthetic
aaggaaaaggaacagaaggaa

SEQ ID NO: 447275 - RNA, 22 nt, Artificial Sequence
  Synthetic
aaaggaaaaggaacagaaggaa

SEQ ID NO: 447276 - RNA, 23 nt, Artificial Sequence
  Synthetic
aaaaggaaaaggaacagaaggaa

SEQ ID NO: 447277 - RNA, 24 nt, Artificial Sequence
  Synthetic
gaaaaggaaaaggaacagaaggaa

SEQ ID NO: 447278 - RNA, 18 nt, Artificial Sequence
  Synthetic
ucuuuuucugagaaggaa

SEQ ID NO: 447279 - RNA, 19 nt, Artificial Sequence
  Synthetic
uucuuuuucugagaaggaa

SEQ ID NO: 447280 - RNA, 20 nt, Artificial Sequence
  Synthetic
uuucuuuuucugagaaggaa

SEQ ID NO: 447281 - RNA, 21 nt, Artificial Sequence
  Synthetic
uuuucuuuuucugagaaggaa

SEQ ID NO: 447282 - RNA, 22 nt, Artificial Sequence
  Synthetic
auuuucuuuuucugagaaggaa

SEQ ID NO: 447283 - RNA, 23 nt, Artificial Sequence
  Synthetic
aauuuucuuuuucugagaaggaa

SEQ ID NO: 447284 - RNA, 24 nt, Artificial Sequence
  Synthetic
caauuuucuuuuucugagaaggaa

SEQ ID NO: 447285 - RNA, 18 nt, Artificial Sequence
  Synthetic
gaggaagagaggaaggaa

SEQ ID NO: 447286 - RNA, 19 nt, Artificial Sequence
  Synthetic
ggaggaagagaggaaggaa

SEQ ID NO: 447287 - RNA, 20 nt, Artificial Sequence
  Synthetic
gggaggaagagaggaaggaa

SEQ ID NO: 447288 - RNA, 21 nt, Artificial Sequence
  Synthetic
agggaggaagagaggaaggaa

SEQ ID NO: 447289 - RNA, 22 nt, Artificial Sequence
  Synthetic
gagggaggaagagaggaaggaa

SEQ ID NO: 447290 - RNA, 23 nt, Artificial Sequence
  Synthetic
ggagggaggaagagaggaaggaa

SEQ ID NO: 447291 - RNA, 24 nt, Artificial Sequence
  Synthetic
cggagggaggaagagaggaaggaa

SEQ ID NO: 447292 - RNA, 18 nt, Artificial Sequence
  Synthetic
aguccaucugggaaggaa

SEQ ID NO: 447293 - RNA, 19 nt, Artificial Sequence
  Synthetic
aaguccaucugggaaggaa

SEQ ID NO: 447294 - RNA, 20 nt, Artificial Sequence
  Synthetic
uaaguccaucugggaaggaa

SEQ ID NO: 447295 - RNA, 21 nt, Artificial Sequence
  Synthetic
uuaaguccaucugggaaggaa

SEQ ID NO: 447296 - RNA, 22 nt, Artificial Sequence
  Synthetic
cuuaaguccaucugggaaggaa

SEQ ID NO: 447297 - RNA, 23 nt, Artificial Sequence
  Synthetic
acuuaaguccaucugggaaggaa

SEQ ID NO: 447298 - RNA, 24 nt, Artificial Sequence
  Synthetic
gacuuaaguccaucugggaaggaa

SEQ ID NO: 447299 - RNA, 18 nt, Artificial Sequence
  Synthetic
uuacuauacuggaaggaa

SEQ ID NO: 447300 - RNA, 19 nt, Artificial Sequence
  Synthetic
cuuacuauacuggaaggaa

SEQ ID NO: 447301 - RNA, 20 nt, Artificial Sequence
  Synthetic
ccuuacuauacuggaaggaa

SEQ ID NO: 447302 - RNA, 21 nt, Artificial Sequence
  Synthetic
cccuuacuauacuggaaggaa

SEQ ID NO: 447303 - RNA, 22 nt, Artificial Sequence
  Synthetic
gcccuuacuauacuggaaggaa

SEQ ID NO: 447304 - RNA, 23 nt, Artificial Sequence
  Synthetic
ugcccuuacuauacuggaaggaa

SEQ ID NO: 447305 - RNA, 24 nt, Artificial Sequence
  Synthetic
gugcccuuacuauacuggaaggaa

SEQ ID NO: 447306 - RNA, 18 nt, Artificial Sequence
  Synthetic
uuaauagguuggaaggaa

SEQ ID NO: 447307 - RNA, 19 nt, Artificial Sequence
  Synthetic
cuuaauagguuggaaggaa

SEQ ID NO: 447308 - RNA, 20 nt, Artificial Sequence
  Synthetic
ccuuaauagguuggaaggaa

SEQ ID NO: 447309 - RNA, 21 nt, Artificial Sequence
  Synthetic
accuuaauagguuggaaggaa

SEQ ID NO: 447310 - RNA, 22 nt, Artificial Sequence
  Synthetic
aaccuuaauagguuggaaggaa

SEQ ID NO: 447311 - RNA, 23 nt, Artificial Sequence
  Synthetic
gaaccuuaauagguuggaaggaa

SEQ ID NO: 447312 - RNA, 24 nt, Artificial Sequence
  Synthetic
ugaaccuuaauagguuggaaggaa

SEQ ID NO: 447313 - RNA, 18 nt, Artificial Sequence
  Synthetic
ugaagugaacugaaggaa

SEQ ID NO: 447314 - RNA, 19 nt, Artificial Sequence
  Synthetic
uugaagugaacugaaggaa

SEQ ID NO: 447315 - RNA, 20 nt, Artificial Sequence
  Synthetic
cuugaagugaacugaaggaa

SEQ ID NO: 447316 - RNA, 21 nt, Artificial Sequence
  Synthetic
ucuugaagugaacugaaggaa

SEQ ID NO: 447317 - RNA, 22 nt, Artificial Sequence
  Synthetic
uucuugaagugaacugaaggaa

SEQ ID NO: 447318 - RNA, 23 nt, Artificial Sequence
  Synthetic
cuucuugaagugaacugaaggaa

SEQ ID NO: 447319 - RNA, 24 nt, Artificial Sequence
  Synthetic
ccuucuugaagugaacugaaggaa

SEQ ID NO: 447320 - RNA, 18 nt, Artificial Sequence
  Synthetic
aaauugaagcugaaggaa

SEQ ID NO: 447321 - RNA, 19 nt, Artificial Sequence
  Synthetic
gaaauugaagcugaaggaa

SEQ ID NO: 447322 - RNA, 20 nt, Artificial Sequence
  Synthetic
agaaauugaagcugaaggaa

SEQ ID NO: 447323 - RNA, 21 nt, Artificial Sequence
  Synthetic
cagaaauugaagcugaaggaa

SEQ ID NO: 447324 - RNA, 22 nt, Artificial Sequence
  Synthetic
gcagaaauugaagcugaaggaa

SEQ ID NO: 447325 - RNA, 23 nt, Artificial Sequence
  Synthetic
ugcagaaauugaagcugaaggaa

SEQ ID NO: 447326 - RNA, 24 nt, Artificial Sequence
  Synthetic
gugcagaaauugaagcugaaggaa

SEQ ID NO: 447327 - RNA, 18 nt, Artificial Sequence
  Synthetic
aauaaagaucugaaggaa

SEQ ID NO: 447328 - RNA, 19 nt, Artificial Sequence
  Synthetic
aaauaaagaucugaaggaa

SEQ ID NO: 447329 - RNA, 20 nt, Artificial Sequence
  Synthetic
uaaauaaagaucugaaggaa

SEQ ID NO: 447330 - RNA, 21 nt, Artificial Sequence
  Synthetic
uuaaauaaagaucugaaggaa

SEQ ID NO: 447331 - RNA, 22 nt, Artificial Sequence
  Synthetic
uuuaaauaaagaucugaaggaa

SEQ ID NO: 447332 - RNA, 23 nt, Artificial Sequence
  Synthetic
auuuaaauaaagaucugaaggaa

SEQ ID NO: 447333 - RNA, 24 nt, Artificial Sequence
  Synthetic
uauuuaaauaaagaucugaaggaa

SEQ ID NO: 447334 - RNA, 18 nt, Artificial Sequence
  Synthetic
uggaacagaaauaaggaa

SEQ ID NO: 447335 - RNA, 19 nt, Artificial Sequence
  Synthetic
cuggaacagaaauaaggaa

SEQ ID NO: 447336 - RNA, 20 nt, Artificial Sequence
  Synthetic
ccuggaacagaaauaaggaa

SEQ ID NO: 447337 - RNA, 21 nt, Artificial Sequence
  Synthetic
uccuggaacagaaauaaggaa

SEQ ID NO: 447338 - RNA, 22 nt, Artificial Sequence
  Synthetic
auccuggaacagaaauaaggaa

SEQ ID NO: 447339 - RNA, 23 nt, Artificial Sequence
  Synthetic
gauccuggaacagaaauaaggaa

SEQ ID NO: 447340 - RNA, 24 nt, Artificial Sequence
  Synthetic
ugauccuggaacagaaauaaggaa

SEQ ID NO: 447341 - RNA, 18 nt, Artificial Sequence
  Synthetic
acaaagacauauaaggaa

SEQ ID NO: 447342 - RNA, 19 nt, Artificial Sequence
  Synthetic
uacaaagacauauaaggaa

SEQ ID NO: 447343 - RNA, 20 nt, Artificial Sequence
  Synthetic
auacaaagacauauaaggaa

SEQ ID NO: 447344 - RNA, 21 nt, Artificial Sequence
  Synthetic
cauacaaagacauauaaggaa

SEQ ID NO: 447345 - RNA, 22 nt, Artificial Sequence
  Synthetic
acauacaaagacauauaaggaa

SEQ ID NO: 447346 - RNA, 23 nt, Artificial Sequence
  Synthetic
gacauacaaagacauauaaggaa

SEQ ID NO: 447347 - RNA, 24 nt, Artificial Sequence
  Synthetic
ugacauacaaagacauauaaggaa

SEQ ID NO: 447348 - RNA, 18 nt, Artificial Sequence
  Synthetic
uggcgaaaugguaaggaa

SEQ ID NO: 447349 - RNA, 19 nt, Artificial Sequence
  Synthetic
uuggcgaaaugguaaggaa

SEQ ID NO: 447350 - RNA, 20 nt, Artificial Sequence
  Synthetic
uuuggcgaaaugguaaggaa

SEQ ID NO: 447351 - RNA, 21 nt, Artificial Sequence
  Synthetic
auuuggcgaaaugguaaggaa

SEQ ID NO: 447352 - RNA, 22 nt, Artificial Sequence
  Synthetic
aauuuggcgaaaugguaaggaa

SEQ ID NO: 447353 - RNA, 23 nt, Artificial Sequence
  Synthetic
gaauuuggcgaaaugguaaggaa

SEQ ID NO: 447354 - RNA, 24 nt, Artificial Sequence
  Synthetic
ugaauuuggcgaaaugguaaggaa

SEQ ID NO: 447355 - RNA, 18 nt, Artificial Sequence
  Synthetic
aaaacgcaguguaaggaa

SEQ ID NO: 447356 - RNA, 19 nt, Artificial Sequence
  Synthetic
uaaaacgcaguguaaggaa

SEQ ID NO: 447357 - RNA, 20 nt, Artificial Sequence
  Synthetic
uuaaaacgcaguguaaggaa

SEQ ID NO: 447358 - RNA, 21 nt, Artificial Sequence
  Synthetic
cuuaaaacgcaguguaaggaa

SEQ ID NO: 447359 - RNA, 22 nt, Artificial Sequence
  Synthetic
acuuaaaacgcaguguaaggaa

SEQ ID NO: 447360 - RNA, 23 nt, Artificial Sequence
  Synthetic
gacuuaaaacgcaguguaaggaa

SEQ ID NO: 447361 - RNA, 24 nt, Artificial Sequence
  Synthetic
agacuuaaaacgcaguguaaggaa

SEQ ID NO: 447362 - RNA, 18 nt, Artificial Sequence
  Synthetic
caucuccagauuaaggaa

SEQ ID NO: 447363 - RNA, 19 nt, Artificial Sequence
  Synthetic
gcaucuccagauuaaggaa

SEQ ID NO: 447364 - RNA, 20 nt, Artificial Sequence
  Synthetic
agcaucuccagauuaaggaa

SEQ ID NO: 447365 - RNA, 21 nt, Artificial Sequence
  Synthetic
uagcaucuccagauuaaggaa

SEQ ID NO: 447366 - RNA, 22 nt, Artificial Sequence
  Synthetic
uuagcaucuccagauuaaggaa

SEQ ID NO: 447367 - RNA, 23 nt, Artificial Sequence
  Synthetic
auuagcaucuccagauuaaggaa

SEQ ID NO: 447368 - RNA, 24 nt, Artificial Sequence
  Synthetic
uauuagcaucuccagauuaaggaa

SEQ ID NO: 447369 - RNA, 18 nt, Artificial Sequence
  Synthetic
uuuucuccccuuaaggaa

SEQ ID NO: 447370 - RNA, 19 nt, Artificial Sequence
  Synthetic
guuuucuccccuuaaggaa

SEQ ID NO: 447371 - RNA, 20 nt, Artificial Sequence
  Synthetic
aguuuucuccccuuaaggaa

SEQ ID NO: 447372 - RNA, 21 nt, Artificial Sequence
  Synthetic
caguuuucuccccuuaaggaa

SEQ ID NO: 447373 - RNA, 22 nt, Artificial Sequence
  Synthetic
ccaguuuucuccccuuaaggaa

SEQ ID NO: 447374 - RNA, 23 nt, Artificial Sequence
  Synthetic
gccaguuuucuccccuuaaggaa

SEQ ID NO: 447375 - RNA, 24 nt, Artificial Sequence
  Synthetic
ugccaguuuucuccccuuaaggaa

SEQ ID NO: 447376 - RNA, 18 nt, Artificial Sequence
  Synthetic
auaaagaaauuuaaggaa

SEQ ID NO: 447377 - RNA, 19 nt, Artificial Sequence
  Synthetic
uauaaagaaauuuaaggaa

SEQ ID NO: 447378 - RNA, 20 nt, Artificial Sequence
  Synthetic
auauaaagaaauuuaaggaa

SEQ ID NO: 447379 - RNA, 21 nt, Artificial Sequence
  Synthetic
cauauaaagaaauuuaaggaa

SEQ ID NO: 447380 - RNA, 22 nt, Artificial Sequence
  Synthetic
ccauauaaagaaauuuaaggaa

SEQ ID NO: 447381 - RNA, 23 nt, Artificial Sequence
  Synthetic
uccauauaaagaaauuuaaggaa

SEQ ID NO: 447382 - RNA, 24 nt, Artificial Sequence
  Synthetic
auccauauaaagaaauuuaaggaa

SEQ ID NO: 447383 - RNA, 18 nt, Artificial Sequence
  Synthetic
gcagacacguuuaaggaa

SEQ ID NO: 447384 - RNA, 19 nt, Artificial Sequence
  Synthetic
agcagacacguuuaaggaa

SEQ ID NO: 447385 - RNA, 20 nt, Artificial Sequence
  Synthetic
aagcagacacguuuaaggaa

SEQ ID NO: 447386 - RNA, 21 nt, Artificial Sequence
  Synthetic
gaagcagacacguuuaaggaa

SEQ ID NO: 447387 - RNA, 22 nt, Artificial Sequence
  Synthetic
agaagcagacacguuuaaggaa

SEQ ID NO: 447388 - RNA, 23 nt, Artificial Sequence
  Synthetic
uagaagcagacacguuuaaggaa

SEQ ID NO: 447389 - RNA, 24 nt, Artificial Sequence
  Synthetic
cuagaagcagacacguuuaaggaa

SEQ ID NO: 447390 - RNA, 18 nt, Artificial Sequence
  Synthetic
gcaggaaagaaacaggaa

SEQ ID NO: 447391 - RNA, 19 nt, Artificial Sequence
  Synthetic
agcaggaaagaaacaggaa

SEQ ID NO: 447392 - RNA, 20 nt, Artificial Sequence
  Synthetic
aagcaggaaagaaacaggaa

SEQ ID NO: 447393 - RNA, 21 nt, Artificial Sequence
  Synthetic
aaagcaggaaagaaacaggaa

SEQ ID NO: 447394 - RNA, 22 nt, Artificial Sequence
  Synthetic
uaaagcaggaaagaaacaggaa

SEQ ID NO: 447395 - RNA, 23 nt, Artificial Sequence
  Synthetic
auaaagcaggaaagaaacaggaa

SEQ ID NO: 447396 - RNA, 24 nt, Artificial Sequence
  Synthetic
gauaaagcaggaaagaaacaggaa

SEQ ID NO: 447397 - RNA, 18 nt, Artificial Sequence
  Synthetic
ggguagaaagaacaggaa

SEQ ID NO: 447398 - RNA, 19 nt, Artificial Sequence
  Synthetic
aggguagaaagaacaggaa

SEQ ID NO: 447399 - RNA, 20 nt, Artificial Sequence
  Synthetic
gaggguagaaagaacaggaa

SEQ ID NO: 447400 - RNA, 21 nt, Artificial Sequence
  Synthetic
ggaggguagaaagaacaggaa

SEQ ID NO: 447401 - RNA, 22 nt, Artificial Sequence
  Synthetic
gggaggguagaaagaacaggaa

SEQ ID NO: 447402 - RNA, 23 nt, Artificial Sequence
  Synthetic
ugggaggguagaaagaacaggaa

SEQ ID NO: 447403 - RNA, 24 nt, Artificial Sequence
  Synthetic
gugggaggguagaaagaacaggaa

SEQ ID NO: 447404 - RNA, 18 nt, Artificial Sequence
  Synthetic
auuuuauaagaacaggaa

SEQ ID NO: 447405 - RNA, 19 nt, Artificial Sequence
  Synthetic
gauuuuauaagaacaggaa

SEQ ID NO: 447406 - RNA, 20 nt, Artificial Sequence
  Synthetic
ugauuuuauaagaacaggaa

SEQ ID NO: 447407 - RNA, 21 nt, Artificial Sequence
  Synthetic
augauuuuauaagaacaggaa

SEQ ID NO: 447408 - RNA, 22 nt, Artificial Sequence
  Synthetic
caugauuuuauaagaacaggaa

SEQ ID NO: 447409 - RNA, 23 nt, Artificial Sequence
  Synthetic
ucaugauuuuauaagaacaggaa

SEQ ID NO: 447410 - RNA, 24 nt, Artificial Sequence
  Synthetic
uucaugauuuuauaagaacaggaa

SEQ ID NO: 447411 - RNA, 18 nt, Artificial Sequence
  Synthetic
cacuguagggaacaggaa

SEQ ID NO: 447412 - RNA, 19 nt, Artificial Sequence
  Synthetic
acacuguagggaacaggaa

SEQ ID NO: 447413 - RNA, 20 nt, Artificial Sequence
  Synthetic
aacacuguagggaacaggaa

SEQ ID NO: 447414 - RNA, 21 nt, Artificial Sequence
  Synthetic
aaacacuguagggaacaggaa

SEQ ID NO: 447415 - RNA, 22 nt, Artificial Sequence
  Synthetic
gaaacacuguagggaacaggaa

SEQ ID NO: 447416 - RNA, 23 nt, Artificial Sequence
  Synthetic
ggaaacacuguagggaacaggaa

SEQ ID NO: 447417 - RNA, 24 nt, Artificial Sequence
  Synthetic
aggaaacacuguagggaacaggaa

SEQ ID NO: 447418 - RNA, 18 nt, Artificial Sequence
  Synthetic
agcaaacuaacacaggaa

SEQ ID NO: 447419 - RNA, 23 nt, Artificial Sequence
  Synthetic
uucucagcaaacuaacacaggaa

SEQ ID NO: 447420 - RNA, 24 nt, Artificial Sequence
  Synthetic
auucucagcaaacuaacacaggaa

SEQ ID NO: 447421 - RNA, 19 nt, Artificial Sequence
  Synthetic
uagcaaacuaacacaggaa

SEQ ID NO: 447422 - RNA, 20 nt, Artificial Sequence
  Synthetic
uuagcaaacuaacacaggaa

SEQ ID NO: 447423 - RNA, 21 nt, Artificial Sequence
  Synthetic
cuuagcaaacuaacacaggaa

SEQ ID NO: 447424 - RNA, 22 nt, Artificial Sequence
  Synthetic
ucuuagcaaacuaacacaggaa

SEQ ID NO: 447425 - RNA, 23 nt, Artificial Sequence
  Synthetic
uucuuagcaaacuaacacaggaa

SEQ ID NO: 447426 - RNA, 24 nt, Artificial Sequence
  Synthetic
auucuuagcaaacuaacacaggaa

SEQ ID NO: 447427 - RNA, 18 nt, Artificial Sequence
  Synthetic
gauaaauggacacaggaa

SEQ ID NO: 447428 - RNA, 19 nt, Artificial Sequence
  Synthetic
ugauaaauggacacaggaa

SEQ ID NO: 447429 - RNA, 20 nt, Artificial Sequence
  Synthetic
uugauaaauggacacaggaa

SEQ ID NO: 447430 - RNA, 21 nt, Artificial Sequence
  Synthetic
auugauaaauggacacaggaa

SEQ ID NO: 447431 - RNA, 22 nt, Artificial Sequence
  Synthetic
cauugauaaauggacacaggaa

SEQ ID NO: 447432 - RNA, 23 nt, Artificial Sequence
  Synthetic
ucauugauaaauggacacaggaa

SEQ ID NO: 447433 - RNA, 24 nt, Artificial Sequence
  Synthetic
gucauugauaaauggacacaggaa

SEQ ID NO: 447434 - RNA, 18 nt, Artificial Sequence
  Synthetic
gaaucuuaaucacaggaa

SEQ ID NO: 447435 - RNA, 19 nt, Artificial Sequence
  Synthetic
agaaucuuaaucacaggaa

SEQ ID NO: 447436 - RNA, 20 nt, Artificial Sequence
  Synthetic
aagaaucuuaaucacaggaa

SEQ ID NO: 447437 - RNA, 21 nt, Artificial Sequence
  Synthetic
uaagaaucuuaaucacaggaa

SEQ ID NO: 447438 - RNA, 22 nt, Artificial Sequence
  Synthetic
auaagaaucuuaaucacaggaa

SEQ ID NO: 447439 - RNA, 23 nt, Artificial Sequence
  Synthetic
aauaagaaucuuaaucacaggaa

SEQ ID NO: 447440 - RNA, 24 nt, Artificial Sequence
  Synthetic
aaauaagaaucuuaaucacaggaa

SEQ ID NO: 447441 - RNA, 18 nt, Artificial Sequence
  Synthetic
aacacauggucacaggaa

SEQ ID NO: 447442 - RNA, 19 nt, Artificial Sequence
  Synthetic
gaacacauggucacaggaa

SEQ ID NO: 447443 - RNA, 20 nt, Artificial Sequence
  Synthetic
agaacacauggucacaggaa

SEQ ID NO: 447444 - RNA, 21 nt, Artificial Sequence
  Synthetic
gagaacacauggucacaggaa

SEQ ID NO: 447445 - RNA, 22 nt, Artificial Sequence
  Synthetic
ugagaacacauggucacaggaa

SEQ ID NO: 447446 - RNA, 23 nt, Artificial Sequence
  Synthetic
augagaacacauggucacaggaa

SEQ ID NO: 447447 - RNA, 24 nt, Artificial Sequence
  Synthetic
aaugagaacacauggucacaggaa

SEQ ID NO: 447448 - RNA, 18 nt, Artificial Sequence
  Synthetic
gggaaagcaagacaggaa

SEQ ID NO: 447449 - RNA, 19 nt, Artificial Sequence
  Synthetic
agggaaagcaagacaggaa

SEQ ID NO: 447450 - RNA, 20 nt, Artificial Sequence
  Synthetic
aagggaaagcaagacaggaa

SEQ ID NO: 447451 - RNA, 21 nt, Artificial Sequence
  Synthetic
aaagggaaagcaagacaggaa

SEQ ID NO: 447452 - RNA, 22 nt, Artificial Sequence
  Synthetic
aaaagggaaagcaagacaggaa

SEQ ID NO: 447453 - RNA, 23 nt, Artificial Sequence
  Synthetic
gaaaagggaaagcaagacaggaa

SEQ ID NO: 447454 - RNA, 24 nt, Artificial Sequence
  Synthetic
ggaaaagggaaagcaagacaggaa

SEQ ID NO: 447455 - RNA, 18 nt, Artificial Sequence
  Synthetic
acagugagaagacaggaa

SEQ ID NO: 447456 - RNA, 19 nt, Artificial Sequence
  Synthetic
uacagugagaagacaggaa

SEQ ID NO: 447457 - RNA, 20 nt, Artificial Sequence
  Synthetic
uuacagugagaagacaggaa

SEQ ID NO: 447458 - RNA, 21 nt, Artificial Sequence
  Synthetic
guuacagugagaagacaggaa

SEQ ID NO: 447459 - RNA, 22 nt, Artificial Sequence
  Synthetic
gguuacagugagaagacaggaa

SEQ ID NO: 447460 - RNA, 23 nt, Artificial Sequence
  Synthetic
agguuacagugagaagacaggaa

SEQ ID NO: 447461 - RNA, 24 nt, Artificial Sequence
  Synthetic
gagguuacagugagaagacaggaa

SEQ ID NO: 447462 - RNA, 18 nt, Artificial Sequence
  Synthetic
accacaugaauacaggaa

SEQ ID NO: 447463 - RNA, 19 nt, Artificial Sequence
  Synthetic
uaccacaugaauacaggaa

SEQ ID NO: 447464 - RNA, 20 nt, Artificial Sequence
  Synthetic
auaccacaugaauacaggaa

SEQ ID NO: 447465 - RNA, 21 nt, Artificial Sequence
  Synthetic
cauaccacaugaauacaggaa

SEQ ID NO: 447466 - RNA, 22 nt, Artificial Sequence
  Synthetic
acauaccacaugaauacaggaa

SEQ ID NO: 447467 - RNA, 23 nt, Artificial Sequence
  Synthetic
uacauaccacaugaauacaggaa

SEQ ID NO: 447468 - RNA, 24 nt, Artificial Sequence
  Synthetic
auacauaccacaugaauacaggaa

SEQ ID NO: 447469 - RNA, 18 nt, Artificial Sequence
  Synthetic
ccaucugcaaaccaggaa

SEQ ID NO: 447470 - RNA, 19 nt, Artificial Sequence
  Synthetic
gccaucugcaaaccaggaa

SEQ ID NO: 447471 - RNA, 20 nt, Artificial Sequence
  Synthetic
agccaucugcaaaccaggaa

SEQ ID NO: 447472 - RNA, 21 nt, Artificial Sequence
  Synthetic
aagccaucugcaaaccaggaa

SEQ ID NO: 447473 - RNA, 22 nt, Artificial Sequence
  Synthetic
gaagccaucugcaaaccaggaa

SEQ ID NO: 447474 - RNA, 23 nt, Artificial Sequence
  Synthetic
ggaagccaucugcaaaccaggaa

SEQ ID NO: 447475 - RNA, 24 nt, Artificial Sequence
  Synthetic
aggaagccaucugcaaaccaggaa

SEQ ID NO: 447476 - RNA, 18 nt, Artificial Sequence
  Synthetic
agucaucagacccaggaa

SEQ ID NO: 447477 - RNA, 19 nt, Artificial Sequence
  Synthetic
uagucaucagacccaggaa

SEQ ID NO: 447478 - RNA, 20 nt, Artificial Sequence
  Synthetic
auagucaucagacccaggaa

SEQ ID NO: 447479 - RNA, 21 nt, Artificial Sequence
  Synthetic
aauagucaucagacccaggaa

SEQ ID NO: 447480 - RNA, 22 nt, Artificial Sequence
  Synthetic
uaauagucaucagacccaggaa

SEQ ID NO: 447481 - RNA, 23 nt, Artificial Sequence
  Synthetic
auaauagucaucagacccaggaa

SEQ ID NO: 447482 - RNA, 24 nt, Artificial Sequence
  Synthetic
aauaauagucaucagacccaggaa

SEQ ID NO: 447483 - RNA, 18 nt, Artificial Sequence
  Synthetic
aacaaggauacccaggaa

SEQ ID NO: 447484 - RNA, 19 nt, Artificial Sequence
  Synthetic
caacaaggauacccaggaa

SEQ ID NO: 447485 - RNA, 20 nt, Artificial Sequence
  Synthetic
ucaacaaggauacccaggaa

SEQ ID NO: 447486 - RNA, 21 nt, Artificial Sequence
  Synthetic
gucaacaaggauacccaggaa

SEQ ID NO: 447487 - RNA, 22 nt, Artificial Sequence
  Synthetic
agucaacaaggauacccaggaa

SEQ ID NO: 447488 - RNA, 23 nt, Artificial Sequence
  Synthetic
aagucaacaaggauacccaggaa

SEQ ID NO: 447489 - RNA, 24 nt, Artificial Sequence
  Synthetic
aaagucaacaaggauacccaggaa

SEQ ID NO: 447490 - RNA, 18 nt, Artificial Sequence
  Synthetic
aucacuugaccccaggaa

SEQ ID NO: 447491 - RNA, 19 nt, Artificial Sequence
  Synthetic
aaucacuugaccccaggaa

SEQ ID NO: 447492 - RNA, 20 nt, Artificial Sequence
  Synthetic
gaaucacuugaccccaggaa

SEQ ID NO: 447493 - RNA, 21 nt, Artificial Sequence
  Synthetic
agaaucacuugaccccaggaa

SEQ ID NO: 447494 - RNA, 22 nt, Artificial Sequence
  Synthetic
gagaaucacuugaccccaggaa

SEQ ID NO: 447495 - RNA, 23 nt, Artificial Sequence
  Synthetic
ggagaaucacuugaccccaggaa

SEQ ID NO: 447496 - RNA, 24 nt, Artificial Sequence
  Synthetic
aggagaaucacuugaccccaggaa

SEQ ID NO: 447497 - RNA, 18 nt, Artificial Sequence
  Synthetic
ugugaaagcagccaggaa

SEQ ID NO: 447498 - RNA, 19 nt, Artificial Sequence
  Synthetic
cugugaaagcagccaggaa

SEQ ID NO: 447499 - RNA, 20 nt, Artificial Sequence
  Synthetic
ccugugaaagcagccaggaa

SEQ ID NO: 447500 - RNA, 21 nt, Artificial Sequence
  Synthetic
gccugugaaagcagccaggaa

SEQ ID NO: 447501 - RNA, 22 nt, Artificial Sequence
  Synthetic
agccugugaaagcagccaggaa

SEQ ID NO: 447502 - RNA, 23 nt, Artificial Sequence
  Synthetic
uagccugugaaagcagccaggaa

SEQ ID NO: 447503 - RNA, 24 nt, Artificial Sequence
  Synthetic
cuagccugugaaagcagccaggaa

SEQ ID NO: 447504 - RNA, 18 nt, Artificial Sequence
  Synthetic
uaaaagggauuccaggaa

SEQ ID NO: 447505 - RNA, 19 nt, Artificial Sequence
  Synthetic
uuaaaagggauuccaggaa

SEQ ID NO: 447506 - RNA, 20 nt, Artificial Sequence
  Synthetic
cuuaaaagggauuccaggaa

SEQ ID NO: 447507 - RNA, 21 nt, Artificial Sequence
  Synthetic
ucuuaaaagggauuccaggaa

SEQ ID NO: 447508 - RNA, 22 nt, Artificial Sequence
  Synthetic
aucuuaaaagggauuccaggaa

SEQ ID NO: 447509 - RNA, 23 nt, Artificial Sequence
  Synthetic
aaucuuaaaagggauuccaggaa

SEQ ID NO: 447510 - RNA, 24 nt, Artificial Sequence
  Synthetic
aaaucuuaaaagggauuccaggaa

SEQ ID NO: 447511 - RNA, 18 nt, Artificial Sequence
  Synthetic
uuaaauguguuccaggaa

SEQ ID NO: 447512 - RNA, 19 nt, Artificial Sequence
  Synthetic
cuuaaauguguuccaggaa

SEQ ID NO: 447513 - RNA, 20 nt, Artificial Sequence
  Synthetic
ucuuaaauguguuccaggaa

SEQ ID NO: 447514 - RNA, 21 nt, Artificial Sequence
  Synthetic
uucuuaaauguguuccaggaa

SEQ ID NO: 447515 - RNA, 22 nt, Artificial Sequence
  Synthetic
uuucuuaaauguguuccaggaa

SEQ ID NO: 447516 - RNA, 23 nt, Artificial Sequence
  Synthetic
uuuucuuaaauguguuccaggaa

SEQ ID NO: 447517 - RNA, 24 nt, Artificial Sequence
  Synthetic
cuuuucuuaaauguguuccaggaa

SEQ ID NO: 447518 - RNA, 18 nt, Artificial Sequence
  Synthetic
uaaaacaguuuccaggaa

SEQ ID NO: 447519 - RNA, 19 nt, Artificial Sequence
  Synthetic
uuaaaacaguuuccaggaa

SEQ ID NO: 447520 - RNA, 20 nt, Artificial Sequence
  Synthetic
uuuaaaacaguuuccaggaa

SEQ ID NO: 447521 - RNA, 21 nt, Artificial Sequence
  Synthetic
cuuuaaaacaguuuccaggaa

SEQ ID NO: 447522 - RNA, 22 nt, Artificial Sequence
  Synthetic
acuuuaaaacaguuuccaggaa

SEQ ID NO: 447523 - RNA, 23 nt, Artificial Sequence
  Synthetic
cacuuuaaaacaguuuccaggaa

SEQ ID NO: 447524 - RNA, 24 nt, Artificial Sequence
  Synthetic
gcacuuuaaaacaguuuccaggaa

SEQ ID NO: 447525 - RNA, 18 nt, Artificial Sequence
  Synthetic
aaauagcagaagcaggaa

SEQ ID NO: 447526 - RNA, 19 nt, Artificial Sequence
  Synthetic
gaaauagcagaagcaggaa

SEQ ID NO: 447527 - RNA, 20 nt, Artificial Sequence
  Synthetic
cgaaauagcagaagcaggaa

SEQ ID NO: 447528 - RNA, 21 nt, Artificial Sequence
  Synthetic
gcgaaauagcagaagcaggaa

SEQ ID NO: 447529 - RNA, 22 nt, Artificial Sequence
  Synthetic
ggcgaaauagcagaagcaggaa

SEQ ID NO: 447530 - RNA, 23 nt, Artificial Sequence
  Synthetic
cggcgaaauagcagaagcaggaa

SEQ ID NO: 447531 - RNA, 24 nt, Artificial Sequence
  Synthetic
ccggcgaaauagcagaagcaggaa

SEQ ID NO: 447532 - RNA, 18 nt, Artificial Sequence
  Synthetic
agcaaauuaacgcaggaa

SEQ ID NO: 447533 - RNA, 19 nt, Artificial Sequence
  Synthetic
aagcaaauuaacgcaggaa

SEQ ID NO: 447534 - RNA, 20 nt, Artificial Sequence
  Synthetic
uaagcaaauuaacgcaggaa

SEQ ID NO: 447535 - RNA, 21 nt, Artificial Sequence
  Synthetic
auaagcaaauuaacgcaggaa

SEQ ID NO: 447536 - RNA, 22 nt, Artificial Sequence
  Synthetic
cauaagcaaauuaacgcaggaa

SEQ ID NO: 447537 - RNA, 23 nt, Artificial Sequence
  Synthetic
ucauaagcaaauuaacgcaggaa

SEQ ID NO: 447538 - RNA, 24 nt, Artificial Sequence
  Synthetic
aucauaagcaaauuaacgcaggaa

SEQ ID NO: 447539 - RNA, 18 nt, Artificial Sequence
  Synthetic
aacaccuggacgcaggaa

SEQ ID NO: 447540 - RNA, 19 nt, Artificial Sequence
  Synthetic
gaacaccuggacgcaggaa

SEQ ID NO: 447541 - RNA, 20 nt, Artificial Sequence
  Synthetic
agaacaccuggacgcaggaa

SEQ ID NO: 447542 - RNA, 21 nt, Artificial Sequence
  Synthetic
gagaacaccuggacgcaggaa

SEQ ID NO: 447543 - RNA, 22 nt, Artificial Sequence
  Synthetic
ugagaacaccuggacgcaggaa

SEQ ID NO: 447544 - RNA, 23 nt, Artificial Sequence
  Synthetic
augagaacaccuggacgcaggaa

SEQ ID NO: 447545 - RNA, 24 nt, Artificial Sequence
  Synthetic
aaugagaacaccuggacgcaggaa

SEQ ID NO: 447546 - RNA, 18 nt, Artificial Sequence
  Synthetic
agcaaacuaaugcaggaa

SEQ ID NO: 447547 - RNA, 19 nt, Artificial Sequence
  Synthetic
uagcaaacuaaugcaggaa

SEQ ID NO: 447548 - RNA, 20 nt, Artificial Sequence
  Synthetic
uuagcaaacuaaugcaggaa

SEQ ID NO: 447549 - RNA, 21 nt, Artificial Sequence
  Synthetic
cuuagcaaacuaaugcaggaa

SEQ ID NO: 447550 - RNA, 22 nt, Artificial Sequence
  Synthetic
ccuuagcaaacuaaugcaggaa

SEQ ID NO: 447551 - RNA, 23 nt, Artificial Sequence
  Synthetic
uccuuagcaaacuaaugcaggaa

SEQ ID NO: 447552 - RNA, 24 nt, Artificial Sequence
  Synthetic
guccuuagcaaacuaaugcaggaa

SEQ ID NO: 447553 - RNA, 18 nt, Artificial Sequence
  Synthetic
aguaaaguaacucaggaa

SEQ ID NO: 447554 - RNA, 19 nt, Artificial Sequence
  Synthetic
aaguaaaguaacucaggaa

SEQ ID NO: 447555 - RNA, 20 nt, Artificial Sequence
  Synthetic
caaguaaaguaacucaggaa

SEQ ID NO: 447556 - RNA, 21 nt, Artificial Sequence
  Synthetic
ccaaguaaaguaacucaggaa

SEQ ID NO: 447557 - RNA, 22 nt, Artificial Sequence
  Synthetic
uccaaguaaaguaacucaggaa

SEQ ID NO: 447558 - RNA, 23 nt, Artificial Sequence
  Synthetic
uuccaaguaaaguaacucaggaa

SEQ ID NO: 447559 - RNA, 24 nt, Artificial Sequence
  Synthetic
auuccaaguaaaguaacucaggaa

SEQ ID NO: 447560 - RNA, 18 nt, Artificial Sequence
  Synthetic
agugaaguaacucaggaa

SEQ ID NO: 447561 - RNA, 19 nt, Artificial Sequence
  Synthetic
aagugaaguaacucaggaa

SEQ ID NO: 447562 - RNA, 20 nt, Artificial Sequence
  Synthetic
uaagugaaguaacucaggaa

SEQ ID NO: 447563 - RNA, 21 nt, Artificial Sequence
  Synthetic
guaagugaaguaacucaggaa

SEQ ID NO: 447564 - RNA, 22 nt, Artificial Sequence
  Synthetic
uguaagugaaguaacucaggaa

SEQ ID NO: 447565 - RNA, 23 nt, Artificial Sequence
  Synthetic
uuguaagugaaguaacucaggaa

SEQ ID NO: 447566 - RNA, 24 nt, Artificial Sequence
  Synthetic
auuguaagugaaguaacucaggaa

SEQ ID NO: 447567 - RNA, 18 nt, Artificial Sequence
  Synthetic
ugcuccucucuucaggaa

SEQ ID NO: 447568 - RNA, 19 nt, Artificial Sequence
  Synthetic
cugcuccucucuucaggaa

SEQ ID NO: 447569 - RNA, 20 nt, Artificial Sequence
  Synthetic
acugcuccucucuucaggaa

SEQ ID NO: 447570 - RNA, 21 nt, Artificial Sequence
  Synthetic
gacugcuccucucuucaggaa

SEQ ID NO: 447571 - RNA, 22 nt, Artificial Sequence
  Synthetic
agacugcuccucucuucaggaa

SEQ ID NO: 447572 - RNA, 23 nt, Artificial Sequence
  Synthetic
aagacugcuccucucuucaggaa

SEQ ID NO: 447573 - RNA, 24 nt, Artificial Sequence
  Synthetic
gaagacugcuccucucuucaggaa

SEQ ID NO: 447574 - RNA, 18 nt, Artificial Sequence
  Synthetic
caacaaaccgaagaggaa

SEQ ID NO: 447575 - RNA, 19 nt, Artificial Sequence
  Synthetic
acaacaaaccgaagaggaa

SEQ ID NO: 447576 - RNA, 20 nt, Artificial Sequence
  Synthetic
aacaacaaaccgaagaggaa

SEQ ID NO: 447577 - RNA, 21 nt, Artificial Sequence
  Synthetic
caacaacaaaccgaagaggaa

SEQ ID NO: 447578 - RNA, 22 nt, Artificial Sequence
  Synthetic
acaacaacaaaccgaagaggaa

SEQ ID NO: 447579 - RNA, 23 nt, Artificial Sequence
  Synthetic
gacaacaacaaaccgaagaggaa

SEQ ID NO: 447580 - RNA, 24 nt, Artificial Sequence
  Synthetic
cgacaacaacaaaccgaagaggaa

SEQ ID NO: 447581 - RNA, 18 nt, Artificial Sequence
  Synthetic
aaugucaaguaagaggaa

SEQ ID NO: 447582 - RNA, 19 nt, Artificial Sequence
  Synthetic
uaaugucaaguaagaggaa

SEQ ID NO: 447583 - RNA, 20 nt, Artificial Sequence
  Synthetic
auaaugucaaguaagaggaa

SEQ ID NO: 447584 - RNA, 21 nt, Artificial Sequence
  Synthetic
cauaaugucaaguaagaggaa

SEQ ID NO: 447585 - RNA, 22 nt, Artificial Sequence
  Synthetic
acauaaugucaaguaagaggaa

SEQ ID NO: 447586 - RNA, 23 nt, Artificial Sequence
  Synthetic
cacauaaugucaaguaagaggaa

SEQ ID NO: 447587 - RNA, 24 nt, Artificial Sequence
  Synthetic
ccacauaaugucaaguaagaggaa

SEQ ID NO: 447588 - RNA, 18 nt, Artificial Sequence
  Synthetic
agcaaacuaacagaggaa

SEQ ID NO: 447589 - RNA, 19 nt, Artificial Sequence
  Synthetic
cagcaaacuaacagaggaa

SEQ ID NO: 447590 - RNA, 20 nt, Artificial Sequence
  Synthetic
ucagcaaacuaacagaggaa

SEQ ID NO: 447591 - RNA, 21 nt, Artificial Sequence
  Synthetic
cucagcaaacuaacagaggaa

SEQ ID NO: 447592 - RNA, 22 nt, Artificial Sequence
  Synthetic
ucucagcaaacuaacagaggaa

SEQ ID NO: 447593 - RNA, 23 nt, Artificial Sequence
  Synthetic
uucucagcaaacuaacagaggaa

SEQ ID NO: 447594 - RNA, 24 nt, Artificial Sequence
  Synthetic
auucucagcaaacuaacagaggaa

SEQ ID NO: 447595 - RNA, 18 nt, Artificial Sequence
  Synthetic
gggggagaugcagaggaa

SEQ ID NO: 447596 - RNA, 19 nt, Artificial Sequence
  Synthetic
ugggggagaugcagaggaa

SEQ ID NO: 447597 - RNA, 20 nt, Artificial Sequence
  Synthetic
augggggagaugcagaggaa

SEQ ID NO: 447598 - RNA, 21 nt, Artificial Sequence
  Synthetic
gaugggggagaugcagaggaa

SEQ ID NO: 447599 - RNA, 22 nt, Artificial Sequence
  Synthetic
agaugggggagaugcagaggaa

SEQ ID NO: 447600 - RNA, 23 nt, Artificial Sequence
  Synthetic
aagaugggggagaugcagaggaa

SEQ ID NO: 447601 - RNA, 24 nt, Artificial Sequence
  Synthetic
uaagaugggggagaugcagaggaa

SEQ ID NO: 447602 - RNA, 18 nt, Artificial Sequence
  Synthetic
cuuagcgagucagaggaa

SEQ ID NO: 447603 - RNA, 19 nt, Artificial Sequence
  Synthetic
acuuagcgagucagaggaa

SEQ ID NO: 447604 - RNA, 20 nt, Artificial Sequence
  Synthetic
uacuuagcgagucagaggaa

SEQ ID NO: 447605 - RNA, 21 nt, Artificial Sequence
  Synthetic
auacuuagcgagucagaggaa

SEQ ID NO: 447606 - RNA, 22 nt, Artificial Sequence
  Synthetic
aauacuuagcgagucagaggaa

SEQ ID NO: 447607 - RNA, 23 nt, Artificial Sequence
  Synthetic
aaauacuuagcgagucagaggaa

SEQ ID NO: 447608 - RNA, 24 nt, Artificial Sequence
  Synthetic
gaaauacuuagcgagucagaggaa

SEQ ID NO: 447609 - RNA, 18 nt, Artificial Sequence
  Synthetic
gcauugaagagagaggaa

SEQ ID NO: 447610 - RNA, 19 nt, Artificial Sequence
  Synthetic
agcauugaagagagaggaa

SEQ ID NO: 447611 - RNA, 20 nt, Artificial Sequence
  Synthetic
aagcauugaagagagaggaa

SEQ ID NO: 447612 - RNA, 21 nt, Artificial Sequence
  Synthetic
aaagcauugaagagagaggaa

SEQ ID NO: 447613 - RNA, 22 nt, Artificial Sequence
  Synthetic
caaagcauugaagagagaggaa

SEQ ID NO: 447614 - RNA, 23 nt, Artificial Sequence
  Synthetic
acaaagcauugaagagagaggaa

SEQ ID NO: 447615 - RNA, 24 nt, Artificial Sequence
  Synthetic
aacaaagcauugaagagagaggaa

SEQ ID NO: 447616 - RNA, 18 nt, Artificial Sequence
  Synthetic
ggaguagggagagaggaa

SEQ ID NO: 447617 - RNA, 19 nt, Artificial Sequence
  Synthetic
gggaguagggagagaggaa

SEQ ID NO: 447618 - RNA, 20 nt, Artificial Sequence
  Synthetic
ggggaguagggagagaggaa

SEQ ID NO: 447619 - RNA, 21 nt, Artificial Sequence
  Synthetic
uggggaguagggagagaggaa

SEQ ID NO: 447620 - RNA, 22 nt, Artificial Sequence
  Synthetic
uuggggaguagggagagaggaa

SEQ ID NO: 447621 - RNA, 23 nt, Artificial Sequence
  Synthetic
auuggggaguagggagagaggaa

SEQ ID NO: 447622 - RNA, 24 nt, Artificial Sequence
  Synthetic
cauuggggaguagggagagaggaa

SEQ ID NO: 447623 - RNA, 24 nt, Artificial Sequence
  Synthetic
aauagggaggcccaaggagaggaa

SEQ ID NO: 447624 - RNA, 18 nt, Artificial Sequence
  Synthetic
aggaaaggaggagaggaa

SEQ ID NO: 447625 - RNA, 19 nt, Artificial Sequence
  Synthetic
caggaaaggaggagaggaa

SEQ ID NO: 447626 - RNA, 20 nt, Artificial Sequence
  Synthetic
acaggaaaggaggagaggaa

SEQ ID NO: 447627 - RNA, 21 nt, Artificial Sequence
  Synthetic
aacaggaaaggaggagaggaa

SEQ ID NO: 447628 - RNA, 22 nt, Artificial Sequence
  Synthetic
gaacaggaaaggaggagaggaa

SEQ ID NO: 447629 - RNA, 23 nt, Artificial Sequence
  Synthetic
ggaacaggaaaggaggagaggaa

SEQ ID NO: 447630 - RNA, 24 nt, Artificial Sequence
  Synthetic
gggaacaggaaaggaggagaggaa

SEQ ID NO: 447631 - RNA, 18 nt, Artificial Sequence
  Synthetic
aaaaaauuaggagaggaa

SEQ ID NO: 447632 - RNA, 19 nt, Artificial Sequence
  Synthetic
aaaaaaauuaggagaggaa

SEQ ID NO: 447633 - RNA, 20 nt, Artificial Sequence
  Synthetic
aaaaaaaauuaggagaggaa

SEQ ID NO: 447634 - RNA, 21 nt, Artificial Sequence
  Synthetic
gaaaaaaaauuaggagaggaa

SEQ ID NO: 447635 - RNA, 22 nt, Artificial Sequence
  Synthetic
agaaaaaaaauuaggagaggaa

SEQ ID NO: 447636 - RNA, 23 nt, Artificial Sequence
  Synthetic
cagaaaaaaaauuaggagaggaa

SEQ ID NO: 447637 - RNA, 24 nt, Artificial Sequence
  Synthetic
acagaaaaaaaauuaggagaggaa

SEQ ID NO: 447638 - RNA, 18 nt, Artificial Sequence
  Synthetic
uauucaagguuagaggaa

SEQ ID NO: 447639 - RNA, 19 nt, Artificial Sequence
  Synthetic
uuauucaagguuagaggaa

SEQ ID NO: 447640 - RNA, 20 nt, Artificial Sequence
  Synthetic
auuauucaagguuagaggaa

SEQ ID NO: 447641 - RNA, 21 nt, Artificial Sequence
  Synthetic
aauuauucaagguuagaggaa

SEQ ID NO: 447642 - RNA, 22 nt, Artificial Sequence
  Synthetic
aaauuauucaagguuagaggaa

SEQ ID NO: 447643 - RNA, 23 nt, Artificial Sequence
  Synthetic
aaaauuauucaagguuagaggaa

SEQ ID NO: 447644 - RNA, 24 nt, Artificial Sequence
  Synthetic
aaaaauuauucaagguuagaggaa

SEQ ID NO: 447645 - RNA, 18 nt, Artificial Sequence
  Synthetic
uaggguaaagacgaggaa

SEQ ID NO: 447646 - RNA, 19 nt, Artificial Sequence
  Synthetic
cuaggguaaagacgaggaa

SEQ ID NO: 447647 - RNA, 20 nt, Artificial Sequence
  Synthetic
ccuaggguaaagacgaggaa

SEQ ID NO: 447648 - RNA, 21 nt, Artificial Sequence
  Synthetic
uccuaggguaaagacgaggaa

SEQ ID NO: 447649 - RNA, 22 nt, Artificial Sequence
  Synthetic
uuccuaggguaaagacgaggaa

SEQ ID NO: 447650 - RNA, 23 nt, Artificial Sequence
  Synthetic
auuccuaggguaaagacgaggaa

SEQ ID NO: 447651 - RNA, 24 nt, Artificial Sequence
  Synthetic
uauuccuaggguaaagacgaggaa

SEQ ID NO: 447652 - RNA, 18 nt, Artificial Sequence
  Synthetic
uagaaaagagaggaggaa

SEQ ID NO: 447653 - RNA, 19 nt, Artificial Sequence
  Synthetic
guagaaaagagaggaggaa

SEQ ID NO: 447654 - RNA, 20 nt, Artificial Sequence
  Synthetic
gguagaaaagagaggaggaa

SEQ ID NO: 447655 - RNA, 21 nt, Artificial Sequence
  Synthetic
ugguagaaaagagaggaggaa

SEQ ID NO: 447656 - RNA, 22 nt, Artificial Sequence
  Synthetic
augguagaaaagagaggaggaa

SEQ ID NO: 447657 - RNA, 23 nt, Artificial Sequence
  Synthetic
caugguagaaaagagaggaggaa

SEQ ID NO: 447658 - RNA, 24 nt, Artificial Sequence
  Synthetic
acaugguagaaaagagaggaggaa

SEQ ID NO: 447659 - RNA, 18 nt, Artificial Sequence
  Synthetic
aagaaaagaagggaggaa

SEQ ID NO: 447660 - RNA, 19 nt, Artificial Sequence
  Synthetic
gaagaaaagaagggaggaa

SEQ ID NO: 447661 - RNA, 20 nt, Artificial Sequence
  Synthetic
ggaagaaaagaagggaggaa

SEQ ID NO: 447662 - RNA, 21 nt, Artificial Sequence
  Synthetic
aggaagaaaagaagggaggaa

SEQ ID NO: 447663 - RNA, 22 nt, Artificial Sequence
  Synthetic
gaggaagaaaagaagggaggaa

SEQ ID NO: 447664 - RNA, 23 nt, Artificial Sequence
  Synthetic
ggaggaagaaaagaagggaggaa

SEQ ID NO: 447665 - RNA, 24 nt, Artificial Sequence
  Synthetic
uggaggaagaaaagaagggaggaa

SEQ ID NO: 447666 - RNA, 18 nt, Artificial Sequence
  Synthetic
agaggaaggagggaggaa

SEQ ID NO: 447667 - RNA, 19 nt, Artificial Sequence
  Synthetic
cagaggaaggagggaggaa

SEQ ID NO: 447668 - RNA, 20 nt, Artificial Sequence
  Synthetic
acagaggaaggagggaggaa

SEQ ID NO: 447669 - RNA, 21 nt, Artificial Sequence
  Synthetic
uacagaggaaggagggaggaa

SEQ ID NO: 447670 - RNA, 22 nt, Artificial Sequence
  Synthetic
cuacagaggaaggagggaggaa

SEQ ID NO: 447671 - RNA, 23 nt, Artificial Sequence
  Synthetic
acuacagaggaaggagggaggaa

SEQ ID NO: 447672 - RNA, 24 nt, Artificial Sequence
  Synthetic
gacuacagaggaaggagggaggaa

SEQ ID NO: 447673 - RNA, 18 nt, Artificial Sequence
  Synthetic
aagaagcggagggaggaa

SEQ ID NO: 447674 - RNA, 19 nt, Artificial Sequence
  Synthetic
gaagaagcggagggaggaa

SEQ ID NO: 447675 - RNA, 20 nt, Artificial Sequence
  Synthetic
ggaagaagcggagggaggaa

SEQ ID NO: 447676 - RNA, 21 nt, Artificial Sequence
  Synthetic
gggaagaagcggagggaggaa

SEQ ID NO: 447677 - RNA, 22 nt, Artificial Sequence
  Synthetic
ggggaagaagcggagggaggaa

SEQ ID NO: 447678 - RNA, 23 nt, Artificial Sequence
  Synthetic
uggggaagaagcggagggaggaa

SEQ ID NO: 447679 - RNA, 24 nt, Artificial Sequence
  Synthetic
guggggaagaagcggagggaggaa

SEQ ID NO: 447680 - RNA, 18 nt, Artificial Sequence
  Synthetic
guguagaugggggaggaa

SEQ ID NO: 447681 - RNA, 19 nt, Artificial Sequence
  Synthetic
uguguagaugggggaggaa

SEQ ID NO: 447682 - RNA, 20 nt, Artificial Sequence
  Synthetic
guguguagaugggggaggaa

SEQ ID NO: 447683 - RNA, 21 nt, Artificial Sequence
  Synthetic
uguguguagaugggggaggaa

SEQ ID NO: 447684 - RNA, 22 nt, Artificial Sequence
  Synthetic
auguguguagaugggggaggaa

SEQ ID NO: 447685 - RNA, 23 nt, Artificial Sequence
  Synthetic
uauguguguagaugggggaggaa

SEQ ID NO: 447686 - RNA, 24 nt, Artificial Sequence
  Synthetic
guauguguguagaugggggaggaa

SEQ ID NO: 447687 - RNA, 18 nt, Artificial Sequence
  Synthetic
acauccgauugggaggaa

SEQ ID NO: 447688 - RNA, 19 nt, Artificial Sequence
  Synthetic
uacauccgauugggaggaa

SEQ ID NO: 447689 - RNA, 20 nt, Artificial Sequence
  Synthetic
uuacauccgauugggaggaa

SEQ ID NO: 447690 - RNA, 21 nt, Artificial Sequence
  Synthetic
cuuacauccgauugggaggaa

SEQ ID NO: 447691 - RNA, 22 nt, Artificial Sequence
  Synthetic
ccuuacauccgauugggaggaa

SEQ ID NO: 447692 - RNA, 23 nt, Artificial Sequence
  Synthetic
accuuacauccgauugggaggaa

SEQ ID NO: 447693 - RNA, 24 nt, Artificial Sequence
  Synthetic
gaccuuacauccgauugggaggaa

SEQ ID NO: 447694 - RNA, 18 nt, Artificial Sequence
  Synthetic
gacugugaaaaugaggaa

SEQ ID NO: 447695 - RNA, 19 nt, Artificial Sequence
  Synthetic
ugacugugaaaaugaggaa

SEQ ID NO: 447696 - RNA, 20 nt, Artificial Sequence
  Synthetic
augacugugaaaaugaggaa

SEQ ID NO: 447697 - RNA, 21 nt, Artificial Sequence
  Synthetic
aaugacugugaaaaugaggaa

SEQ ID NO: 447698 - RNA, 22 nt, Artificial Sequence
  Synthetic
aaaugacugugaaaaugaggaa

SEQ ID NO: 447699 - RNA, 23 nt, Artificial Sequence
  Synthetic
aaaaugacugugaaaaugaggaa

SEQ ID NO: 447700 - RNA, 24 nt, Artificial Sequence
  Synthetic
uaaaaugacugugaaaaugaggaa

SEQ ID NO: 447701 - RNA, 18 nt, Artificial Sequence
  Synthetic
aaauuuggaaaugaggaa

SEQ ID NO: 447702 - RNA, 19 nt, Artificial Sequence
  Synthetic
aaaauuuggaaaugaggaa

SEQ ID NO: 447703 - RNA, 20 nt, Artificial Sequence
  Synthetic
uaaaauuuggaaaugaggaa

SEQ ID NO: 447704 - RNA, 21 nt, Artificial Sequence
  Synthetic
auaaaauuuggaaaugaggaa

SEQ ID NO: 447705 - RNA, 22 nt, Artificial Sequence
  Synthetic
uauaaaauuuggaaaugaggaa

SEQ ID NO: 447706 - RNA, 23 nt, Artificial Sequence
  Synthetic
guauaaaauuuggaaaugaggaa

SEQ ID NO: 447707 - RNA, 24 nt, Artificial Sequence
  Synthetic
uguauaaaauuuggaaaugaggaa

SEQ ID NO: 447708 - RNA, 18 nt, Artificial Sequence
  Synthetic
gcaaugaagaaugaggaa

SEQ ID NO: 447709 - RNA, 19 nt, Artificial Sequence
  Synthetic
agcaaugaagaaugaggaa

SEQ ID NO: 447710 - RNA, 20 nt, Artificial Sequence
  Synthetic
gagcaaugaagaaugaggaa

SEQ ID NO: 447711 - RNA, 21 nt, Artificial Sequence
  Synthetic
agagcaaugaagaaugaggaa

SEQ ID NO: 447712 - RNA, 22 nt, Artificial Sequence
  Synthetic
aagagcaaugaagaaugaggaa

SEQ ID NO: 447713 - RNA, 23 nt, Artificial Sequence
  Synthetic
aaagagcaaugaagaaugaggaa

SEQ ID NO: 447714 - RNA, 24 nt, Artificial Sequence
  Synthetic
caaagagcaaugaagaaugaggaa

SEQ ID NO: 447715 - RNA, 18 nt, Artificial Sequence
  Synthetic
uuguuaauguaugaggaa

SEQ ID NO: 447716 - RNA, 19 nt, Artificial Sequence
  Synthetic
uuuguuaauguaugaggaa

SEQ ID NO: 447717 - RNA, 20 nt, Artificial Sequence
  Synthetic
uuuuguuaauguaugaggaa

SEQ ID NO: 447718 - RNA, 21 nt, Artificial Sequence
  Synthetic
cuuuuguuaauguaugaggaa

SEQ ID NO: 447719 - RNA, 22 nt, Artificial Sequence
  Synthetic
ucuuuuguuaauguaugaggaa

SEQ ID NO: 447720 - RNA, 23 nt, Artificial Sequence
  Synthetic
cucuuuuguuaauguaugaggaa

SEQ ID NO: 447721 - RNA, 24 nt, Artificial Sequence
  Synthetic
acucuuuuguuaauguaugaggaa

SEQ ID NO: 447722 - RNA, 18 nt, Artificial Sequence
  Synthetic
cagaaauggagugaggaa

SEQ ID NO: 447723 - RNA, 19 nt, Artificial Sequence
  Synthetic
ucagaaauggagugaggaa

SEQ ID NO: 447724 - RNA, 20 nt, Artificial Sequence
  Synthetic
uucagaaauggagugaggaa

SEQ ID NO: 447725 - RNA, 21 nt, Artificial Sequence
  Synthetic
guucagaaauggagugaggaa

SEQ ID NO: 447726 - RNA, 22 nt, Artificial Sequence
  Synthetic
aguucagaaauggagugaggaa

SEQ ID NO: 447727 - RNA, 23 nt, Artificial Sequence
  Synthetic
aaguucagaaauggagugaggaa

SEQ ID NO: 447728 - RNA, 24 nt, Artificial Sequence
  Synthetic
gaaguucagaaauggagugaggaa

SEQ ID NO: 447729 - RNA, 18 nt, Artificial Sequence
  Synthetic
aagauauucaaauaggaa

SEQ ID NO: 447730 - RNA, 19 nt, Artificial Sequence
  Synthetic
aaagauauucaaauaggaa

SEQ ID NO: 447731 - RNA, 20 nt, Artificial Sequence
  Synthetic
gaaagauauucaaauaggaa

SEQ ID NO: 447732 - RNA, 21 nt, Artificial Sequence
  Synthetic
agaaagauauucaaauaggaa

SEQ ID NO: 447733 - RNA, 22 nt, Artificial Sequence
  Synthetic
aagaaagauauucaaauaggaa

SEQ ID NO: 447734 - RNA, 23 nt, Artificial Sequence
  Synthetic
aaagaaagauauucaaauaggaa

SEQ ID NO: 447735 - RNA, 24 nt, Artificial Sequence
  Synthetic
gaaagaaagauauucaaauaggaa

SEQ ID NO: 447736 - RNA, 18 nt, Artificial Sequence
  Synthetic
cuguacucagaauaggaa

SEQ ID NO: 447737 - RNA, 19 nt, Artificial Sequence
  Synthetic
ucuguacucagaauaggaa

SEQ ID NO: 447738 - RNA, 20 nt, Artificial Sequence
  Synthetic
cucuguacucagaauaggaa

SEQ ID NO: 447739 - RNA, 21 nt, Artificial Sequence
  Synthetic
gcucuguacucagaauaggaa

SEQ ID NO: 447740 - RNA, 22 nt, Artificial Sequence
  Synthetic
ugcucuguacucagaauaggaa

SEQ ID NO: 447741 - RNA, 23 nt, Artificial Sequence
  Synthetic
augcucuguacucagaauaggaa

SEQ ID NO: 447742 - RNA, 24 nt, Artificial Sequence
  Synthetic
uaugcucuguacucagaauaggaa

SEQ ID NO: 447743 - RNA, 18 nt, Artificial Sequence
  Synthetic
ggugaaauaacauaggaa

SEQ ID NO: 447744 - RNA, 19 nt, Artificial Sequence
  Synthetic
aggugaaauaacauaggaa

SEQ ID NO: 447745 - RNA, 20 nt, Artificial Sequence
  Synthetic
uaggugaaauaacauaggaa

SEQ ID NO: 447746 - RNA, 21 nt, Artificial Sequence
  Synthetic
cuaggugaaauaacauaggaa

SEQ ID NO: 447747 - RNA, 22 nt, Artificial Sequence
  Synthetic
ccuaggugaaauaacauaggaa

SEQ ID NO: 447748 - RNA, 23 nt, Artificial Sequence
  Synthetic
uccuaggugaaauaacauaggaa

SEQ ID NO: 447749 - RNA, 24 nt, Artificial Sequence
  Synthetic
auccuaggugaaauaacauaggaa

SEQ ID NO: 447750 - RNA, 18 nt, Artificial Sequence
  Synthetic
aucacagaaggauaggaa

SEQ ID NO: 447751 - RNA, 19 nt, Artificial Sequence
  Synthetic
caucacagaaggauaggaa

SEQ ID NO: 447752 - RNA, 20 nt, Artificial Sequence
  Synthetic
ccaucacagaaggauaggaa

SEQ ID NO: 447753 - RNA, 21 nt, Artificial Sequence
  Synthetic
cccaucacagaaggauaggaa

SEQ ID NO: 447754 - RNA, 22 nt, Artificial Sequence
  Synthetic
ucccaucacagaaggauaggaa

SEQ ID NO: 447755 - RNA, 23 nt, Artificial Sequence
  Synthetic
uucccaucacagaaggauaggaa

SEQ ID NO: 447756 - RNA, 24 nt, Artificial Sequence
  Synthetic
uuucccaucacagaaggauaggaa

SEQ ID NO: 447757 - RNA, 18 nt, Artificial Sequence
  Synthetic
gagaaaugccuauaggaa

SEQ ID NO: 447758 - RNA, 19 nt, Artificial Sequence
  Synthetic
agagaaaugccuauaggaa

SEQ ID NO: 447759 - RNA, 20 nt, Artificial Sequence
  Synthetic
cagagaaaugccuauaggaa

SEQ ID NO: 447760 - RNA, 21 nt, Artificial Sequence
  Synthetic
gcagagaaaugccuauaggaa

SEQ ID NO: 447761 - RNA, 22 nt, Artificial Sequence
  Synthetic
ugcagagaaaugccuauaggaa

SEQ ID NO: 447762 - RNA, 23 nt, Artificial Sequence
  Synthetic
gugcagagaaaugccuauaggaa

SEQ ID NO: 447763 - RNA, 24 nt, Artificial Sequence
  Synthetic
agugcagagaaaugccuauaggaa

SEQ ID NO: 447764 - RNA, 18 nt, Artificial Sequence
  Synthetic
cacacaacaaacuaggaa

SEQ ID NO: 447765 - RNA, 19 nt, Artificial Sequence
  Synthetic
acacacaacaaacuaggaa

SEQ ID NO: 447766 - RNA, 20 nt, Artificial Sequence
  Synthetic
aacacacaacaaacuaggaa

SEQ ID NO: 447767 - RNA, 21 nt, Artificial Sequence
  Synthetic
aaacacacaacaaacuaggaa

SEQ ID NO: 447768 - RNA, 22 nt, Artificial Sequence
  Synthetic
aaaacacacaacaaacuaggaa

SEQ ID NO: 447769 - RNA, 23 nt, Artificial Sequence
  Synthetic
aaaaacacacaacaaacuaggaa

SEQ ID NO: 447770 - RNA, 24 nt, Artificial Sequence
  Synthetic
uaaaaacacacaacaaacuaggaa

SEQ ID NO: 447771 - RNA, 18 nt, Artificial Sequence
  Synthetic
ugagaaaggaccuaggaa

SEQ ID NO: 447772 - RNA, 19 nt, Artificial Sequence
  Synthetic
augagaaaggaccuaggaa

SEQ ID NO: 447773 - RNA, 20 nt, Artificial Sequence
  Synthetic
gaugagaaaggaccuaggaa

SEQ ID NO: 447774 - RNA, 21 nt, Artificial Sequence
  Synthetic
agaugagaaaggaccuaggaa

SEQ ID NO: 447775 - RNA, 22 nt, Artificial Sequence
  Synthetic
aagaugagaaaggaccuaggaa

SEQ ID NO: 447776 - RNA, 23 nt, Artificial Sequence
  Synthetic
gaagaugagaaaggaccuaggaa

SEQ ID NO: 447777 - RNA, 24 nt, Artificial Sequence
  Synthetic
ugaagaugagaaaggaccuaggaa

SEQ ID NO: 447778 - RNA, 18 nt, Artificial Sequence
  Synthetic
gcucagauaaaguaggaa

SEQ ID NO: 447779 - RNA, 19 nt, Artificial Sequence
  Synthetic
agcucagauaaaguaggaa

SEQ ID NO: 447780 - RNA, 20 nt, Artificial Sequence
  Synthetic
aagcucagauaaaguaggaa

SEQ ID NO: 447781 - RNA, 21 nt, Artificial Sequence
  Synthetic
uaagcucagauaaaguaggaa

SEQ ID NO: 447782 - RNA, 22 nt, Artificial Sequence
  Synthetic
auaagcucagauaaaguaggaa

SEQ ID NO: 447783 - RNA, 23 nt, Artificial Sequence
  Synthetic
gauaagcucagauaaaguaggaa

SEQ ID NO: 447784 - RNA, 24 nt, Artificial Sequence
  Synthetic
ggauaagcucagauaaaguaggaa

SEQ ID NO: 447785 - RNA, 18 nt, Artificial Sequence
  Synthetic
uuauuccagaaguaggaa

SEQ ID NO: 447786 - RNA, 19 nt, Artificial Sequence
  Synthetic
auuauuccagaaguaggaa

SEQ ID NO: 447787 - RNA, 20 nt, Artificial Sequence
  Synthetic
aauuauuccagaaguaggaa

SEQ ID NO: 447788 - RNA, 21 nt, Artificial Sequence
  Synthetic
uaauuauuccagaaguaggaa

SEQ ID NO: 447789 - RNA, 22 nt, Artificial Sequence
  Synthetic
auaauuauuccagaaguaggaa

SEQ ID NO: 447790 - RNA, 23 nt, Artificial Sequence
  Synthetic
gauaauuauuccagaaguaggaa

SEQ ID NO: 447791 - RNA, 24 nt, Artificial Sequence
  Synthetic
ugauaauuauuccagaaguaggaa

SEQ ID NO: 447792 - RNA, 18 nt, Artificial Sequence
  Synthetic
cagagcuggagguaggaa

SEQ ID NO: 447793 - RNA, 19 nt, Artificial Sequence
  Synthetic
acagagcuggagguaggaa

SEQ ID NO: 447794 - RNA, 20 nt, Artificial Sequence
  Synthetic
gacagagcuggagguaggaa

SEQ ID NO: 447795 - RNA, 21 nt, Artificial Sequence
  Synthetic
agacagagcuggagguaggaa

SEQ ID NO: 447796 - RNA, 22 nt, Artificial Sequence
  Synthetic
aagacagagcuggagguaggaa

SEQ ID NO: 447797 - RNA, 23 nt, Artificial Sequence
  Synthetic
uaagacagagcuggagguaggaa

SEQ ID NO: 447798 - RNA, 24 nt, Artificial Sequence
  Synthetic
guaagacagagcuggagguaggaa

SEQ ID NO: 447799 - RNA, 18 nt, Artificial Sequence
  Synthetic
guuucacugggguaggaa

SEQ ID NO: 447800 - RNA, 19 nt, Artificial Sequence
  Synthetic
uguuucacugggguaggaa

SEQ ID NO: 447801 - RNA, 20 nt, Artificial Sequence
  Synthetic
auguuucacugggguaggaa

SEQ ID NO: 447802 - RNA, 21 nt, Artificial Sequence
  Synthetic
uauguuucacugggguaggaa

SEQ ID NO: 447803 - RNA, 22 nt, Artificial Sequence
  Synthetic
cuauguuucacugggguaggaa

SEQ ID NO: 447804 - RNA, 23 nt, Artificial Sequence
  Synthetic
acuauguuucacugggguaggaa

SEQ ID NO: 447805 - RNA, 24 nt, Artificial Sequence
  Synthetic
uacuauguuucacugggguaggaa

SEQ ID NO: 447806 - RNA, 18 nt, Artificial Sequence
  Synthetic
aaugacuaauuguaggaa

SEQ ID NO: 447807 - RNA, 19 nt, Artificial Sequence
  Synthetic
uaaugacuaauuguaggaa

SEQ ID NO: 447808 - RNA, 20 nt, Artificial Sequence
  Synthetic
auaaugacuaauuguaggaa

SEQ ID NO: 447809 - RNA, 21 nt, Artificial Sequence
  Synthetic
uauaaugacuaauuguaggaa

SEQ ID NO: 447810 - RNA, 22 nt, Artificial Sequence
  Synthetic
auauaaugacuaauuguaggaa

SEQ ID NO: 447811 - RNA, 23 nt, Artificial Sequence
  Synthetic
uauauaaugacuaauuguaggaa

SEQ ID NO: 447812 - RNA, 24 nt, Artificial Sequence
  Synthetic
guauauaaugacuaauuguaggaa

SEQ ID NO: 447813 - RNA, 21 nt, Artificial Sequence
  Synthetic
uaaaggguauucaauuaggaa

SEQ ID NO: 447814 - RNA, 22 nt, Artificial Sequence
  Synthetic
auaaaggguauucaauuaggaa

SEQ ID NO: 447815 - RNA, 23 nt, Artificial Sequence
  Synthetic
aauaaaggguauucaauuaggaa

SEQ ID NO: 447816 - RNA, 24 nt, Artificial Sequence
  Synthetic
aaauaaaggguauucaauuaggaa

SEQ ID NO: 447817 - RNA, 18 nt, Artificial Sequence
  Synthetic
aggugaugacauuaggaa

SEQ ID NO: 447818 - RNA, 19 nt, Artificial Sequence
  Synthetic
aaggugaugacauuaggaa

SEQ ID NO: 447819 - RNA, 20 nt, Artificial Sequence
  Synthetic
caaggugaugacauuaggaa

SEQ ID NO: 447820 - RNA, 21 nt, Artificial Sequence
  Synthetic
ucaaggugaugacauuaggaa

SEQ ID NO: 447821 - RNA, 22 nt, Artificial Sequence
  Synthetic
cucaaggugaugacauuaggaa

SEQ ID NO: 447822 - RNA, 23 nt, Artificial Sequence
  Synthetic
ccucaaggugaugacauuaggaa

SEQ ID NO: 447823 - RNA, 24 nt, Artificial Sequence
  Synthetic
cccucaaggugaugacauuaggaa

SEQ ID NO: 447824 - RNA, 18 nt, Artificial Sequence
  Synthetic
gaggcuaguguuuaggaa

SEQ ID NO: 447825 - RNA, 19 nt, Artificial Sequence
  Synthetic
agaggcuaguguuuaggaa

SEQ ID NO: 447826 - RNA, 20 nt, Artificial Sequence
  Synthetic
cagaggcuaguguuuaggaa

SEQ ID NO: 447827 - RNA, 21 nt, Artificial Sequence
  Synthetic
acagaggcuaguguuuaggaa

SEQ ID NO: 447828 - RNA, 22 nt, Artificial Sequence
  Synthetic
uacagaggcuaguguuuaggaa

SEQ ID NO: 447829 - RNA, 23 nt, Artificial Sequence
  Synthetic
uuacagaggcuaguguuuaggaa

SEQ ID NO: 447830 - RNA, 24 nt, Artificial Sequence
  Synthetic
auuacagaggcuaguguuuaggaa

SEQ ID NO: 447831 - RNA, 18 nt, Artificial Sequence
  Synthetic
uaucccuuuguuuaggaa

SEQ ID NO: 447832 - RNA, 19 nt, Artificial Sequence
  Synthetic
cuaucccuuuguuuaggaa

SEQ ID NO: 447833 - RNA, 20 nt, Artificial Sequence
  Synthetic
ucuaucccuuuguuuaggaa

SEQ ID NO: 447834 - RNA, 21 nt, Artificial Sequence
  Synthetic
uucuaucccuuuguuuaggaa

SEQ ID NO: 447835 - RNA, 22 nt, Artificial Sequence
  Synthetic
uuucuaucccuuuguuuaggaa

SEQ ID NO: 447836 - RNA, 23 nt, Artificial Sequence
  Synthetic
uuuucuaucccuuuguuuaggaa

SEQ ID NO: 447837 - RNA, 24 nt, Artificial Sequence
  Synthetic
guuuucuaucccuuuguuuaggaa

SEQ ID NO: 447838 - RNA, 18 nt, Artificial Sequence
  Synthetic
augucaugcaaaacggaa

SEQ ID NO: 447839 - RNA, 19 nt, Artificial Sequence
  Synthetic
gaugucaugcaaaacggaa

SEQ ID NO: 447840 - RNA, 20 nt, Artificial Sequence
  Synthetic
agaugucaugcaaaacggaa

SEQ ID NO: 447841 - RNA, 21 nt, Artificial Sequence
  Synthetic
uagaugucaugcaaaacggaa

SEQ ID NO: 447842 - RNA, 22 nt, Artificial Sequence
  Synthetic
uuagaugucaugcaaaacggaa

SEQ ID NO: 447843 - RNA, 23 nt, Artificial Sequence
  Synthetic
uuuagaugucaugcaaaacggaa

SEQ ID NO: 447844 - RNA, 24 nt, Artificial Sequence
  Synthetic
auuuagaugucaugcaaaacggaa

SEQ ID NO: 447845 - RNA, 18 nt, Artificial Sequence
  Synthetic
acaccuggccaaacggaa

SEQ ID NO: 447846 - RNA, 19 nt, Artificial Sequence
  Synthetic
aacaccuggccaaacggaa

SEQ ID NO: 447847 - RNA, 20 nt, Artificial Sequence
  Synthetic
gaacaccuggccaaacggaa

SEQ ID NO: 447848 - RNA, 21 nt, Artificial Sequence
  Synthetic
ugaacaccuggccaaacggaa

SEQ ID NO: 447849 - RNA, 22 nt, Artificial Sequence
  Synthetic
cugaacaccuggccaaacggaa

SEQ ID NO: 447850 - RNA, 23 nt, Artificial Sequence
  Synthetic
ccugaacaccuggccaaacggaa

SEQ ID NO: 447851 - RNA, 24 nt, Artificial Sequence
  Synthetic
uccugaacaccuggccaaacggaa

SEQ ID NO: 447852 - RNA, 18 nt, Artificial Sequence
  Synthetic
auauauagaccaacggaa

SEQ ID NO: 447853 - RNA, 19 nt, Artificial Sequence
  Synthetic
gauauauagaccaacggaa

SEQ ID NO: 447854 - RNA, 20 nt, Artificial Sequence
  Synthetic
agauauauagaccaacggaa

SEQ ID NO: 447855 - RNA, 21 nt, Artificial Sequence
  Synthetic
cagauauauagaccaacggaa

SEQ ID NO: 447856 - RNA, 22 nt, Artificial Sequence
  Synthetic
acagauauauagaccaacggaa

SEQ ID NO: 447857 - RNA, 23 nt, Artificial Sequence
  Synthetic
aacagauauauagaccaacggaa

SEQ ID NO: 447858 - RNA, 24 nt, Artificial Sequence
  Synthetic
aaacagauauauagaccaacggaa

SEQ ID NO: 447859 - RNA, 18 nt, Artificial Sequence
  Synthetic
aacuccuugagcacggaa

SEQ ID NO: 447860 - RNA, 19 nt, Artificial Sequence
  Synthetic
aaacuccuugagcacggaa

SEQ ID NO: 447861 - RNA, 20 nt, Artificial Sequence
  Synthetic
gaaacuccuugagcacggaa

SEQ ID NO: 447862 - RNA, 21 nt, Artificial Sequence
  Synthetic
agaaacuccuugagcacggaa

SEQ ID NO: 447863 - RNA, 22 nt, Artificial Sequence
  Synthetic
aagaaacuccuugagcacggaa

SEQ ID NO: 447864 - RNA, 23 nt, Artificial Sequence
  Synthetic
caagaaacuccuugagcacggaa

SEQ ID NO: 447865 - RNA, 24 nt, Artificial Sequence
  Synthetic
acaagaaacuccuugagcacggaa

SEQ ID NO: 447866 - RNA, 18 nt, Artificial Sequence
  Synthetic
guucuguuugcuacggaa

SEQ ID NO: 447867 - RNA, 19 nt, Artificial Sequence
  Synthetic
gguucuguuugcuacggaa

SEQ ID NO: 447868 - RNA, 20 nt, Artificial Sequence
  Synthetic
cgguucuguuugcuacggaa

SEQ ID NO: 447869 - RNA, 21 nt, Artificial Sequence
  Synthetic
ucgguucuguuugcuacggaa

SEQ ID NO: 447870 - RNA, 22 nt, Artificial Sequence
  Synthetic
uucgguucuguuugcuacggaa

SEQ ID NO: 447871 - RNA, 23 nt, Artificial Sequence
  Synthetic
cuucgguucuguuugcuacggaa

SEQ ID NO: 447872 - RNA, 24 nt, Artificial Sequence
  Synthetic
ccuucgguucuguuugcuacggaa

SEQ ID NO: 447873 - RNA, 18 nt, Artificial Sequence
  Synthetic
gauucaagaaguacggaa

SEQ ID NO: 447874 - RNA, 19 nt, Artificial Sequence
  Synthetic
agauucaagaaguacggaa

SEQ ID NO: 447875 - RNA, 20 nt, Artificial Sequence
  Synthetic
aagauucaagaaguacggaa

SEQ ID NO: 447876 - RNA, 21 nt, Artificial Sequence
  Synthetic
aaagauucaagaaguacggaa

SEQ ID NO: 447877 - RNA, 22 nt, Artificial Sequence
  Synthetic
gaaagauucaagaaguacggaa

SEQ ID NO: 447878 - RNA, 23 nt, Artificial Sequence
  Synthetic
ugaaagauucaagaaguacggaa

SEQ ID NO: 447879 - RNA, 24 nt, Artificial Sequence
  Synthetic
augaaagauucaagaaguacggaa

SEQ ID NO: 447880 - RNA, 18 nt, Artificial Sequence
  Synthetic
aagagcucaguuacggaa

SEQ ID NO: 447881 - RNA, 19 nt, Artificial Sequence
  Synthetic
uaagagcucaguuacggaa

SEQ ID NO: 447882 - RNA, 20 nt, Artificial Sequence
  Synthetic
cuaagagcucaguuacggaa

SEQ ID NO: 447883 - RNA, 21 nt, Artificial Sequence
  Synthetic
ccuaagagcucaguuacggaa

SEQ ID NO: 447884 - RNA, 22 nt, Artificial Sequence
  Synthetic
cccuaagagcucaguuacggaa

SEQ ID NO: 447885 - RNA, 23 nt, Artificial Sequence
  Synthetic
acccuaagagcucaguuacggaa

SEQ ID NO: 447886 - RNA, 24 nt, Artificial Sequence
  Synthetic
gacccuaagagcucaguuacggaa

SEQ ID NO: 447887 - RNA, 18 nt, Artificial Sequence
  Synthetic
uuggauauauacccggaa

SEQ ID NO: 447888 - RNA, 19 nt, Artificial Sequence
  Synthetic
uuuggauauauacccggaa

SEQ ID NO: 447889 - RNA, 20 nt, Artificial Sequence
  Synthetic
uuuuggauauauacccggaa

SEQ ID NO: 447890 - RNA, 21 nt, Artificial Sequence
  Synthetic
cuuuuggauauauacccggaa

SEQ ID NO: 447891 - RNA, 22 nt, Artificial Sequence
  Synthetic
ucuuuuggauauauacccggaa

SEQ ID NO: 447892 - RNA, 23 nt, Artificial Sequence
  Synthetic
uucuuuuggauauauacccggaa

SEQ ID NO: 447893 - RNA, 24 nt, Artificial Sequence
  Synthetic
auucuuuuggauauauacccggaa

SEQ ID NO: 447894 - RNA, 18 nt, Artificial Sequence
  Synthetic
aaccaaaggccuccggaa

SEQ ID NO: 447895 - RNA, 19 nt, Artificial Sequence
  Synthetic
uaaccaaaggccuccggaa

SEQ ID NO: 447896 - RNA, 20 nt, Artificial Sequence
  Synthetic
uuaaccaaaggccuccggaa

SEQ ID NO: 447897 - RNA, 21 nt, Artificial Sequence
  Synthetic
uuuaaccaaaggccuccggaa

SEQ ID NO: 447898 - RNA, 22 nt, Artificial Sequence
  Synthetic
guuuaaccaaaggccuccggaa

SEQ ID NO: 447899 - RNA, 23 nt, Artificial Sequence
  Synthetic
gguuuaaccaaaggccuccggaa

SEQ ID NO: 447900 - RNA, 24 nt, Artificial Sequence
  Synthetic
ugguuuaaccaaaggccuccggaa

SEQ ID NO: 447901 - RNA, 18 nt, Artificial Sequence
  Synthetic
uacauggaaacagcggaa

SEQ ID NO: 447902 - RNA, 19 nt, Artificial Sequence
  Synthetic
cuacauggaaacagcggaa

SEQ ID NO: 447903 - RNA, 20 nt, Artificial Sequence
  Synthetic
ucuacauggaaacagcggaa

SEQ ID NO: 447904 - RNA, 21 nt, Artificial Sequence
  Synthetic
aucuacauggaaacagcggaa

SEQ ID NO: 447905 - RNA, 22 nt, Artificial Sequence
  Synthetic
caucuacauggaaacagcggaa

SEQ ID NO: 447906 - RNA, 23 nt, Artificial Sequence
  Synthetic
ucaucuacauggaaacagcggaa

SEQ ID NO: 447907 - RNA, 24 nt, Artificial Sequence
  Synthetic
gucaucuacauggaaacagcggaa

SEQ ID NO: 447908 - RNA, 18 nt, Artificial Sequence
  Synthetic
aaaguaauaucagcggaa

SEQ ID NO: 447909 - RNA, 19 nt, Artificial Sequence
  Synthetic
gaaaguaauaucagcggaa

SEQ ID NO: 447910 - RNA, 20 nt, Artificial Sequence
  Synthetic
ugaaaguaauaucagcggaa

SEQ ID NO: 447911 - RNA, 21 nt, Artificial Sequence
  Synthetic
augaaaguaauaucagcggaa

SEQ ID NO: 447912 - RNA, 22 nt, Artificial Sequence
  Synthetic
aaugaaaguaauaucagcggaa

SEQ ID NO: 447913 - RNA, 23 nt, Artificial Sequence
  Synthetic
aaaugaaaguaauaucagcggaa

SEQ ID NO: 447914 - RNA, 24 nt, Artificial Sequence
  Synthetic
aaaaugaaaguaauaucagcggaa

SEQ ID NO: 447915 - RNA, 18 nt, Artificial Sequence
  Synthetic
aguguuuuaaaugcggaa

SEQ ID NO: 447916 - RNA, 19 nt, Artificial Sequence
  Synthetic
aaguguuuuaaaugcggaa

SEQ ID NO: 447917 - RNA, 20 nt, Artificial Sequence
  Synthetic
caaguguuuuaaaugcggaa

SEQ ID NO: 447918 - RNA, 21 nt, Artificial Sequence
  Synthetic
ccaaguguuuuaaaugcggaa

SEQ ID NO: 447919 - RNA, 22 nt, Artificial Sequence
  Synthetic
cccaaguguuuuaaaugcggaa

SEQ ID NO: 447920 - RNA, 23 nt, Artificial Sequence
  Synthetic
acccaaguguuuuaaaugcggaa

SEQ ID NO: 447921 - RNA, 24 nt, Artificial Sequence
  Synthetic
cacccaaguguuuuaaaugcggaa

SEQ ID NO: 447922 - RNA, 18 nt, Artificial Sequence
  Synthetic
acaaaagucaaaucggaa

SEQ ID NO: 447923 - RNA, 19 nt, Artificial Sequence
  Synthetic
cacaaaagucaaaucggaa

SEQ ID NO: 447924 - RNA, 20 nt, Artificial Sequence
  Synthetic
gcacaaaagucaaaucggaa

SEQ ID NO: 447925 - RNA, 21 nt, Artificial Sequence
  Synthetic
ugcacaaaagucaaaucggaa

SEQ ID NO: 447926 - RNA, 22 nt, Artificial Sequence
  Synthetic
augcacaaaagucaaaucggaa

SEQ ID NO: 447927 - RNA, 23 nt, Artificial Sequence
  Synthetic
aaugcacaaaagucaaaucggaa

SEQ ID NO: 447928 - RNA, 24 nt, Artificial Sequence
  Synthetic
aaaugcacaaaagucaaaucggaa

SEQ ID NO: 447929 - RNA, 18 nt, Artificial Sequence
  Synthetic
cgcaggcuguucucggaa

SEQ ID NO: 447930 - RNA, 19 nt, Artificial Sequence
  Synthetic
ccgcaggcuguucucggaa

SEQ ID NO: 447931 - RNA, 20 nt, Artificial Sequence
  Synthetic
accgcaggcuguucucggaa

SEQ ID NO: 447932 - RNA, 21 nt, Artificial Sequence
  Synthetic
uaccgcaggcuguucucggaa

SEQ ID NO: 447933 - RNA, 22 nt, Artificial Sequence
  Synthetic
guaccgcaggcuguucucggaa

SEQ ID NO: 447934 - RNA, 23 nt, Artificial Sequence
  Synthetic
uguaccgcaggcuguucucggaa

SEQ ID NO: 447935 - RNA, 24 nt, Artificial Sequence
  Synthetic
guguaccgcaggcuguucucggaa

SEQ ID NO: 447936 - RNA, 18 nt, Artificial Sequence
  Synthetic
auguggcgaaaaagggaa

SEQ ID NO: 447937 - RNA, 19 nt, Artificial Sequence
  Synthetic
cauguggcgaaaaagggaa

SEQ ID NO: 447938 - RNA, 20 nt, Artificial Sequence
  Synthetic
gcauguggcgaaaaagggaa

SEQ ID NO: 447939 - RNA, 21 nt, Artificial Sequence
  Synthetic
ggcauguggcgaaaaagggaa

SEQ ID NO: 447940 - RNA, 22 nt, Artificial Sequence
  Synthetic
aggcauguggcgaaaaagggaa

SEQ ID NO: 447941 - RNA, 23 nt, Artificial Sequence
  Synthetic
gaggcauguggcgaaaaagggaa

SEQ ID NO: 447942 - RNA, 24 nt, Artificial Sequence
  Synthetic
agaggcauguggcgaaaaagggaa

SEQ ID NO: 447943 - RNA, 18 nt, Artificial Sequence
  Synthetic
uaugcuaagaaaagggaa

SEQ ID NO: 447944 - RNA, 19 nt, Artificial Sequence
  Synthetic
cuaugcuaagaaaagggaa

SEQ ID NO: 447945 - RNA, 20 nt, Artificial Sequence
  Synthetic
acuaugcuaagaaaagggaa

SEQ ID NO: 447946 - RNA, 21 nt, Artificial Sequence
  Synthetic
cacuaugcuaagaaaagggaa

SEQ ID NO: 447947 - RNA, 22 nt, Artificial Sequence
  Synthetic
ccacuaugcuaagaaaagggaa

SEQ ID NO: 447948 - RNA, 23 nt, Artificial Sequence
  Synthetic
uccacuaugcuaagaaaagggaa

SEQ ID NO: 447949 - RNA, 24 nt, Artificial Sequence
  Synthetic
uuccacuaugcuaagaaaagggaa

SEQ ID NO: 447950 - RNA, 18 nt, Artificial Sequence
  Synthetic
cugggaaggaaaagggaa

SEQ ID NO: 447951 - RNA, 19 nt, Artificial Sequence
  Synthetic
ucugggaaggaaaagggaa

SEQ ID NO: 447952 - RNA, 20 nt, Artificial Sequence
  Synthetic
aucugggaaggaaaagggaa

SEQ ID NO: 447953 - RNA, 21 nt, Artificial Sequence
  Synthetic
caucugggaaggaaaagggaa

SEQ ID NO: 447954 - RNA, 22 nt, Artificial Sequence
  Synthetic
ccaucugggaaggaaaagggaa

SEQ ID NO: 447955 - RNA, 23 nt, Artificial Sequence
  Synthetic
uccaucugggaaggaaaagggaa

SEQ ID NO: 447956 - RNA, 24 nt, Artificial Sequence
  Synthetic
guccaucugggaaggaaaagggaa

SEQ ID NO: 447957 - RNA, 18 nt, Artificial Sequence
  Synthetic
uuugucaaugaaagggaa

SEQ ID NO: 447958 - RNA, 19 nt, Artificial Sequence
  Synthetic
auuugucaaugaaagggaa

SEQ ID NO: 447959 - RNA, 20 nt, Artificial Sequence
  Synthetic
uauuugucaaugaaagggaa

SEQ ID NO: 447960 - RNA, 21 nt, Artificial Sequence
  Synthetic
auauuugucaaugaaagggaa

SEQ ID NO: 447961 - RNA, 22 nt, Artificial Sequence
  Synthetic
aauauuugucaaugaaagggaa

SEQ ID NO: 447962 - RNA, 23 nt, Artificial Sequence
  Synthetic
uaauauuugucaaugaaagggaa

SEQ ID NO: 447963 - RNA, 24 nt, Artificial Sequence
  Synthetic
auaauauuugucaaugaaagggaa

SEQ ID NO: 447964 - RNA, 18 nt, Artificial Sequence
  Synthetic
acaaguggugaaagggaa

SEQ ID NO: 447965 - RNA, 19 nt, Artificial Sequence
  Synthetic
aacaaguggugaaagggaa

SEQ ID NO: 447966 - RNA, 20 nt, Artificial Sequence
  Synthetic
aaacaaguggugaaagggaa

SEQ ID NO: 447967 - RNA, 21 nt, Artificial Sequence
  Synthetic
gaaacaaguggugaaagggaa

SEQ ID NO: 447968 - RNA, 22 nt, Artificial Sequence
  Synthetic
ugaaacaaguggugaaagggaa

SEQ ID NO: 447969 - RNA, 23 nt, Artificial Sequence
  Synthetic
uugaaacaaguggugaaagggaa

SEQ ID NO: 447970 - RNA, 24 nt, Artificial Sequence
  Synthetic
uuugaaacaaguggugaaagggaa

SEQ ID NO: 447971 - RNA, 18 nt, Artificial Sequence
  Synthetic
auuguaaaaucaagggaa

SEQ ID NO: 447972 - RNA, 19 nt, Artificial Sequence
  Synthetic
aauuguaaaaucaagggaa

SEQ ID NO: 447973 - RNA, 20 nt, Artificial Sequence
  Synthetic
aaauuguaaaaucaagggaa

SEQ ID NO: 447974 - RNA, 21 nt, Artificial Sequence
  Synthetic
gaaauuguaaaaucaagggaa

SEQ ID NO: 447975 - RNA, 22 nt, Artificial Sequence
  Synthetic
ugaaauuguaaaaucaagggaa

SEQ ID NO: 447976 - RNA, 23 nt, Artificial Sequence
  Synthetic
uugaaauuguaaaaucaagggaa

SEQ ID NO: 447977 - RNA, 24 nt, Artificial Sequence
  Synthetic
auugaaauuguaaaaucaagggaa

SEQ ID NO: 447978 - RNA, 18 nt, Artificial Sequence
  Synthetic
agggagagaggaagggaa

SEQ ID NO: 447979 - RNA, 19 nt, Artificial Sequence
  Synthetic
uagggagagaggaagggaa

SEQ ID NO: 447980 - RNA, 20 nt, Artificial Sequence
  Synthetic
guagggagagaggaagggaa

SEQ ID NO: 447981 - RNA, 21 nt, Artificial Sequence
  Synthetic
aguagggagagaggaagggaa

SEQ ID NO: 447982 - RNA, 22 nt, Artificial Sequence
  Synthetic
gaguagggagagaggaagggaa

SEQ ID NO: 447983 - RNA, 23 nt, Artificial Sequence
  Synthetic
ggaguagggagagaggaagggaa

SEQ ID NO: 447984 - RNA, 24 nt, Artificial Sequence
  Synthetic
gggaguagggagagaggaagggaa

SEQ ID NO: 447985 - RNA, 18 nt, Artificial Sequence
  Synthetic
ggagggaagggaagggaa

SEQ ID NO: 447986 - RNA, 19 nt, Artificial Sequence
  Synthetic
gggagggaagggaagggaa

SEQ ID NO: 447987 - RNA, 20 nt, Artificial Sequence
  Synthetic
ggggagggaagggaagggaa

SEQ ID NO: 447988 - RNA, 21 nt, Artificial Sequence
  Synthetic
aggggagggaagggaagggaa

SEQ ID NO: 447989 - RNA, 22 nt, Artificial Sequence
  Synthetic
gaggggagggaagggaagggaa

SEQ ID NO: 447990 - RNA, 23 nt, Artificial Sequence
  Synthetic
agaggggagggaagggaagggaa

SEQ ID NO: 447991 - RNA, 24 nt, Artificial Sequence
  Synthetic
gagaggggagggaagggaagggaa

SEQ ID NO: 447992 - RNA, 18 nt, Artificial Sequence
  Synthetic
agaggggagggaagggaa

SEQ ID NO: 447993 - RNA, 19 nt, Artificial Sequence
  Synthetic
gagaggggagggaagggaa

SEQ ID NO: 447994 - RNA, 20 nt, Artificial Sequence
  Synthetic
agagaggggagggaagggaa

SEQ ID NO: 447995 - RNA, 21 nt, Artificial Sequence
  Synthetic
gagagaggggagggaagggaa

SEQ ID NO: 447996 - RNA, 22 nt, Artificial Sequence
  Synthetic
ugagagaggggagggaagggaa

SEQ ID NO: 447997 - RNA, 23 nt, Artificial Sequence
  Synthetic
gugagagaggggagggaagggaa

SEQ ID NO: 447998 - RNA, 24 nt, Artificial Sequence
  Synthetic
ugugagagaggggagggaagggaa

SEQ ID NO: 447999 - RNA, 20 nt, Artificial Sequence
  Synthetic
ggagaggggagggaagggaa

SEQ ID NO: 448000 - RNA, 21 nt, Artificial Sequence
  Synthetic
aggagaggggagggaagggaa

SEQ ID NO: 448001 - RNA, 22 nt, Artificial Sequence
  Synthetic
aaggagaggggagggaagggaa

SEQ ID NO: 448002 - RNA, 23 nt, Artificial Sequence
  Synthetic
gaaggagaggggagggaagggaa

SEQ ID NO: 448003 - RNA, 24 nt, Artificial Sequence
  Synthetic
ggaaggagaggggagggaagggaa

SEQ ID NO: 448004 - RNA, 18 nt, Artificial Sequence
  Synthetic
ucaucuaugggaagggaa

SEQ ID NO: 448005 - RNA, 19 nt, Artificial Sequence
  Synthetic
gucaucuaugggaagggaa

SEQ ID NO: 448006 - RNA, 20 nt, Artificial Sequence
  Synthetic
ugucaucuaugggaagggaa

SEQ ID NO: 448007 - RNA, 21 nt, Artificial Sequence
  Synthetic
augucaucuaugggaagggaa

SEQ ID NO: 448008 - RNA, 22 nt, Artificial Sequence
  Synthetic
gaugucaucuaugggaagggaa

SEQ ID NO: 448009 - RNA, 23 nt, Artificial Sequence
  Synthetic
ugaugucaucuaugggaagggaa

SEQ ID NO: 448010 - RNA, 24 nt, Artificial Sequence
  Synthetic
augaugucaucuaugggaagggaa

SEQ ID NO: 448011 - RNA, 18 nt, Artificial Sequence
  Synthetic
aaucuaugaauaagggaa

SEQ ID NO: 448012 - RNA, 19 nt, Artificial Sequence
  Synthetic
gaaucuaugaauaagggaa

SEQ ID NO: 448013 - RNA, 20 nt, Artificial Sequence
  Synthetic
ugaaucuaugaauaagggaa

SEQ ID NO: 448014 - RNA, 21 nt, Artificial Sequence
  Synthetic
augaaucuaugaauaagggaa

SEQ ID NO: 448015 - RNA, 22 nt, Artificial Sequence
  Synthetic
caugaaucuaugaauaagggaa

SEQ ID NO: 448016 - RNA, 23 nt, Artificial Sequence
  Synthetic
gcaugaaucuaugaauaagggaa

SEQ ID NO: 448017 - RNA, 24 nt, Artificial Sequence
  Synthetic
cgcaugaaucuaugaauaagggaa

SEQ ID NO: 448018 - RNA, 18 nt, Artificial Sequence
  Synthetic
cauaaccguauaagggaa

SEQ ID NO: 448019 - RNA, 19 nt, Artificial Sequence
  Synthetic
gcauaaccguauaagggaa

SEQ ID NO: 448020 - RNA, 20 nt, Artificial Sequence
  Synthetic
ggcauaaccguauaagggaa

SEQ ID NO: 448021 - RNA, 21 nt, Artificial Sequence
  Synthetic
aggcauaaccguauaagggaa

SEQ ID NO: 448022 - RNA, 22 nt, Artificial Sequence
  Synthetic
aaggcauaaccguauaagggaa

SEQ ID NO: 448023 - RNA, 23 nt, Artificial Sequence
  Synthetic
aaaggcauaaccguauaagggaa

SEQ ID NO: 448024 - RNA, 24 nt, Artificial Sequence
  Synthetic
aaaaggcauaaccguauaagggaa

SEQ ID NO: 448025 - RNA, 18 nt, Artificial Sequence
  Synthetic
aauauaaagguaagggaa

SEQ ID NO: 448026 - RNA, 19 nt, Artificial Sequence
  Synthetic
aaauauaaagguaagggaa

SEQ ID NO: 448027 - RNA, 20 nt, Artificial Sequence
  Synthetic
aaaauauaaagguaagggaa

SEQ ID NO: 448028 - RNA, 21 nt, Artificial Sequence
  Synthetic
uaaaauauaaagguaagggaa

SEQ ID NO: 448029 - RNA, 22 nt, Artificial Sequence
  Synthetic
auaaaauauaaagguaagggaa

SEQ ID NO: 448030 - RNA, 23 nt, Artificial Sequence
  Synthetic
uauaaaauauaaagguaagggaa

SEQ ID NO: 448031 - RNA, 24 nt, Artificial Sequence
  Synthetic
auauaaaauauaaagguaagggaa

SEQ ID NO: 448032 - RNA, 18 nt, Artificial Sequence
  Synthetic
ggauacaucgacagggaa

SEQ ID NO: 448033 - RNA, 19 nt, Artificial Sequence
  Synthetic
aggauacaucgacagggaa

SEQ ID NO: 448034 - RNA, 20 nt, Artificial Sequence
  Synthetic
gaggauacaucgacagggaa

SEQ ID NO: 448035 - RNA, 21 nt, Artificial Sequence
  Synthetic
ugaggauacaucgacagggaa

SEQ ID NO: 448036 - RNA, 22 nt, Artificial Sequence
  Synthetic
augaggauacaucgacagggaa

SEQ ID NO: 448037 - RNA, 23 nt, Artificial Sequence
  Synthetic
uaugaggauacaucgacagggaa

SEQ ID NO: 448038 - RNA, 24 nt, Artificial Sequence
  Synthetic
auaugaggauacaucgacagggaa

SEQ ID NO: 448039 - RNA, 18 nt, Artificial Sequence
  Synthetic
auauuagcugccagggaa

SEQ ID NO: 448040 - RNA, 19 nt, Artificial Sequence
  Synthetic
aauauuagcugccagggaa

SEQ ID NO: 448041 - RNA, 20 nt, Artificial Sequence
  Synthetic
caauauuagcugccagggaa

SEQ ID NO: 448042 - RNA, 21 nt, Artificial Sequence
  Synthetic
acaauauuagcugccagggaa

SEQ ID NO: 448043 - RNA, 22 nt, Artificial Sequence
  Synthetic
uacaauauuagcugccagggaa

SEQ ID NO: 448044 - RNA, 23 nt, Artificial Sequence
  Synthetic
auacaauauuagcugccagggaa

SEQ ID NO: 448045 - RNA, 24 nt, Artificial Sequence
  Synthetic
aauacaauauuagcugccagggaa

SEQ ID NO: 448046 - RNA, 18 nt, Artificial Sequence
  Synthetic
cuacauggcagcagggaa

SEQ ID NO: 448047 - RNA, 19 nt, Artificial Sequence
  Synthetic
ucuacauggcagcagggaa

SEQ ID NO: 448048 - RNA, 20 nt, Artificial Sequence
  Synthetic
uucuacauggcagcagggaa

SEQ ID NO: 448049 - RNA, 21 nt, Artificial Sequence
  Synthetic
auucuacauggcagcagggaa

SEQ ID NO: 448050 - RNA, 22 nt, Artificial Sequence
  Synthetic
cauucuacauggcagcagggaa

SEQ ID NO: 448051 - RNA, 23 nt, Artificial Sequence
  Synthetic
acauucuacauggcagcagggaa

SEQ ID NO: 448052 - RNA, 24 nt, Artificial Sequence
  Synthetic
cacauucuacauggcagcagggaa

SEQ ID NO: 448053 - RNA, 18 nt, Artificial Sequence
  Synthetic
uuugucucuggcagggaa

SEQ ID NO: 448054 - RNA, 19 nt, Artificial Sequence
  Synthetic
uuuugucucuggcagggaa

SEQ ID NO: 448055 - RNA, 20 nt, Artificial Sequence
  Synthetic
auuuugucucuggcagggaa

SEQ ID NO: 448056 - RNA, 21 nt, Artificial Sequence
  Synthetic
cauuuugucucuggcagggaa

SEQ ID NO: 448057 - RNA, 22 nt, Artificial Sequence
  Synthetic
acauuuugucucuggcagggaa

SEQ ID NO: 448058 - RNA, 23 nt, Artificial Sequence
  Synthetic
aacauuuugucucuggcagggaa

SEQ ID NO: 448059 - RNA, 24 nt, Artificial Sequence
  Synthetic
aaacauuuugucucuggcagggaa

SEQ ID NO: 448060 - RNA, 18 nt, Artificial Sequence
  Synthetic
uuguugugucucagggaa

SEQ ID NO: 448061 - RNA, 19 nt, Artificial Sequence
  Synthetic
auuguugugucucagggaa

SEQ ID NO: 448062 - RNA, 20 nt, Artificial Sequence
  Synthetic
uauuguugugucucagggaa

SEQ ID NO: 448063 - RNA, 21 nt, Artificial Sequence
  Synthetic
auauuguugugucucagggaa

SEQ ID NO: 448064 - RNA, 22 nt, Artificial Sequence
  Synthetic
aauauuguugugucucagggaa

SEQ ID NO: 448065 - RNA, 23 nt, Artificial Sequence
  Synthetic
caauauuguugugucucagggaa

SEQ ID NO: 448066 - RNA, 24 nt, Artificial Sequence
  Synthetic
ucaauauuguugugucucagggaa

SEQ ID NO: 448067 - RNA, 18 nt, Artificial Sequence
  Synthetic
uuucuuacauucagggaa

SEQ ID NO: 448068 - RNA, 19 nt, Artificial Sequence
  Synthetic
guuucuuacauucagggaa

SEQ ID NO: 448069 - RNA, 20 nt, Artificial Sequence
  Synthetic
uguuucuuacauucagggaa

SEQ ID NO: 448070 - RNA, 21 nt, Artificial Sequence
  Synthetic
cuguuucuuacauucagggaa

SEQ ID NO: 448071 - RNA, 22 nt, Artificial Sequence
  Synthetic
ccuguuucuuacauucagggaa

SEQ ID NO: 448072 - RNA, 23 nt, Artificial Sequence
  Synthetic
accuguuucuuacauucagggaa

SEQ ID NO: 448073 - RNA, 24 nt, Artificial Sequence
  Synthetic
caccuguuucuuacauucagggaa

SEQ ID NO: 448074 - RNA, 18 nt, Artificial Sequence
  Synthetic
ggcauuuguuucagggaa

SEQ ID NO: 448075 - RNA, 19 nt, Artificial Sequence
  Synthetic
uggcauuuguuucagggaa

SEQ ID NO: 448076 - RNA, 20 nt, Artificial Sequence
  Synthetic
auggcauuuguuucagggaa

SEQ ID NO: 448077 - RNA, 21 nt, Artificial Sequence
  Synthetic
aauggcauuuguuucagggaa

SEQ ID NO: 448078 - RNA, 22 nt, Artificial Sequence
  Synthetic
uaauggcauuuguuucagggaa

SEQ ID NO: 448079 - RNA, 23 nt, Artificial Sequence
  Synthetic
uuaauggcauuuguuucagggaa

SEQ ID NO: 448080 - RNA, 24 nt, Artificial Sequence
  Synthetic
guuaauggcauuuguuucagggaa

SEQ ID NO: 448081 - RNA, 18 nt, Artificial Sequence
  Synthetic
cauggcacacagagggaa

SEQ ID NO: 448082 - RNA, 19 nt, Artificial Sequence
  Synthetic
ucauggcacacagagggaa

SEQ ID NO: 448083 - RNA, 20 nt, Artificial Sequence
  Synthetic
uucauggcacacagagggaa

SEQ ID NO: 448084 - RNA, 21 nt, Artificial Sequence
  Synthetic
auucauggcacacagagggaa

SEQ ID NO: 448085 - RNA, 22 nt, Artificial Sequence
  Synthetic
cauucauggcacacagagggaa

SEQ ID NO: 448086 - RNA, 23 nt, Artificial Sequence
  Synthetic
ucauucauggcacacagagggaa

SEQ ID NO: 448087 - RNA, 24 nt, Artificial Sequence
  Synthetic
aucauucauggcacacagagggaa

SEQ ID NO: 448088 - RNA, 18 nt, Artificial Sequence
  Synthetic
agggagagggagagggaa

SEQ ID NO: 448089 - RNA, 19 nt, Artificial Sequence
  Synthetic
cagggagagggagagggaa

SEQ ID NO: 448090 - RNA, 20 nt, Artificial Sequence
  Synthetic
acagggagagggagagggaa

SEQ ID NO: 448091 - RNA, 21 nt, Artificial Sequence
  Synthetic
gacagggagagggagagggaa

SEQ ID NO: 448092 - RNA, 22 nt, Artificial Sequence
  Synthetic
agacagggagagggagagggaa

SEQ ID NO: 448093 - RNA, 23 nt, Artificial Sequence
  Synthetic
gagacagggagagggagagggaa

SEQ ID NO: 448094 - RNA, 24 nt, Artificial Sequence
  Synthetic
agagacagggagagggagagggaa

SEQ ID NO: 448095 - RNA, 18 nt, Artificial Sequence
  Synthetic
gaaugagugaggagggaa

SEQ ID NO: 448096 - RNA, 19 nt, Artificial Sequence
  Synthetic
agaaugagugaggagggaa

SEQ ID NO: 448097 - RNA, 20 nt, Artificial Sequence
  Synthetic
gagaaugagugaggagggaa

SEQ ID NO: 448098 - RNA, 21 nt, Artificial Sequence
  Synthetic
ggagaaugagugaggagggaa

SEQ ID NO: 448099 - RNA, 22 nt, Artificial Sequence
  Synthetic
aggagaaugagugaggagggaa

SEQ ID NO: 448100 - RNA, 23 nt, Artificial Sequence
  Synthetic
aaggagaaugagugaggagggaa

SEQ ID NO: 448101 - RNA, 24 nt, Artificial Sequence
  Synthetic
gaaggagaaugagugaggagggaa

SEQ ID NO: 448102 - RNA, 18 nt, Artificial Sequence
  Synthetic
aaguaacuccggagggaa

SEQ ID NO: 448103 - RNA, 19 nt, Artificial Sequence
  Synthetic
uaaguaacuccggagggaa

SEQ ID NO: 448104 - RNA, 20 nt, Artificial Sequence
  Synthetic
cuaaguaacuccggagggaa

SEQ ID NO: 448105 - RNA, 21 nt, Artificial Sequence
  Synthetic
gcuaaguaacuccggagggaa

SEQ ID NO: 448106 - RNA, 22 nt, Artificial Sequence
  Synthetic
agcuaaguaacuccggagggaa

SEQ ID NO: 448107 - RNA, 23 nt, Artificial Sequence
  Synthetic
gagcuaaguaacuccggagggaa

SEQ ID NO: 448108 - RNA, 24 nt, Artificial Sequence
  Synthetic
agagcuaaguaacuccggagggaa

SEQ ID NO: 448109 - RNA, 18 nt, Artificial Sequence
  Synthetic
gugagagaggggagggaa

SEQ ID NO: 448110 - RNA, 19 nt, Artificial Sequence
  Synthetic
ugugagagaggggagggaa

SEQ ID NO: 448111 - RNA, 20 nt, Artificial Sequence
  Synthetic
gugugagagaggggagggaa

SEQ ID NO: 448112 - RNA, 21 nt, Artificial Sequence
  Synthetic
ugugugagagaggggagggaa

SEQ ID NO: 448113 - RNA, 22 nt, Artificial Sequence
  Synthetic
augugugagagaggggagggaa

SEQ ID NO: 448114 - RNA, 23 nt, Artificial Sequence
  Synthetic
aaugugugagagaggggagggaa

SEQ ID NO: 448115 - RNA, 24 nt, Artificial Sequence
  Synthetic
uaaugugugagagaggggagggaa

SEQ ID NO: 448116 - RNA, 18 nt, Artificial Sequence
  Synthetic
gaaggagaggggagggaa

SEQ ID NO: 448117 - RNA, 19 nt, Artificial Sequence
  Synthetic
ggaaggagaggggagggaa

SEQ ID NO: 448118 - RNA, 20 nt, Artificial Sequence
  Synthetic
gggaaggagaggggagggaa

SEQ ID NO: 448119 - RNA, 21 nt, Artificial Sequence
  Synthetic
agggaaggagaggggagggaa

SEQ ID NO: 448120 - RNA, 22 nt, Artificial Sequence
  Synthetic
aagggaaggagaggggagggaa

SEQ ID NO: 448121 - RNA, 23 nt, Artificial Sequence
  Synthetic
gaagggaaggagaggggagggaa

SEQ ID NO: 448122 - RNA, 24 nt, Artificial Sequence
  Synthetic
ggaagggaaggagaggggagggaa

SEQ ID NO: 448123 - RNA, 18 nt, Artificial Sequence
  Synthetic
caauuauauucuagggaa

SEQ ID NO: 448124 - RNA, 19 nt, Artificial Sequence
  Synthetic
ccaauuauauucuagggaa

SEQ ID NO: 448125 - RNA, 20 nt, Artificial Sequence
  Synthetic
accaauuauauucuagggaa

SEQ ID NO: 448126 - RNA, 21 nt, Artificial Sequence
  Synthetic
gaccaauuauauucuagggaa

SEQ ID NO: 448127 - RNA, 22 nt, Artificial Sequence
  Synthetic
ggaccaauuauauucuagggaa

SEQ ID NO: 448128 - RNA, 23 nt, Artificial Sequence
  Synthetic
uggaccaauuauauucuagggaa

SEQ ID NO: 448129 - RNA, 24 nt, Artificial Sequence
  Synthetic
cuggaccaauuauauucuagggaa

SEQ ID NO: 448130 - RNA, 18 nt, Artificial Sequence
  Synthetic
ggggacagaaguagggaa

SEQ ID NO: 448131 - RNA, 19 nt, Artificial Sequence
  Synthetic
aggggacagaaguagggaa

SEQ ID NO: 448132 - RNA, 20 nt, Artificial Sequence
  Synthetic
gaggggacagaaguagggaa

SEQ ID NO: 448133 - RNA, 21 nt, Artificial Sequence
  Synthetic
agaggggacagaaguagggaa

SEQ ID NO: 448134 - RNA, 22 nt, Artificial Sequence
  Synthetic
aagaggggacagaaguagggaa

SEQ ID NO: 448135 - RNA, 23 nt, Artificial Sequence
  Synthetic
uaagaggggacagaaguagggaa

SEQ ID NO: 448136 - RNA, 24 nt, Artificial Sequence
  Synthetic
auaagaggggacagaaguagggaa

SEQ ID NO: 448137 - RNA, 18 nt, Artificial Sequence
  Synthetic
aggaaacacuguagggaa

SEQ ID NO: 448138 - RNA, 19 nt, Artificial Sequence
  Synthetic
uaggaaacacuguagggaa

SEQ ID NO: 448139 - RNA, 20 nt, Artificial Sequence
  Synthetic
cuaggaaacacuguagggaa

SEQ ID NO: 448140 - RNA, 21 nt, Artificial Sequence
  Synthetic
ccuaggaaacacuguagggaa

SEQ ID NO: 448141 - RNA, 22 nt, Artificial Sequence
  Synthetic
uccuaggaaacacuguagggaa

SEQ ID NO: 448142 - RNA, 23 nt, Artificial Sequence
  Synthetic
auccuaggaaacacuguagggaa

SEQ ID NO: 448143 - RNA, 24 nt, Artificial Sequence
  Synthetic
gauccuaggaaacacuguagggaa

SEQ ID NO: 448144 - RNA, 18 nt, Artificial Sequence
  Synthetic
auuggaggagcccgggaa

SEQ ID NO: 448145 - RNA, 19 nt, Artificial Sequence
  Synthetic
gauuggaggagcccgggaa

SEQ ID NO: 448146 - RNA, 20 nt, Artificial Sequence
  Synthetic
ggauuggaggagcccgggaa

SEQ ID NO: 448147 - RNA, 21 nt, Artificial Sequence
  Synthetic
uggauuggaggagcccgggaa

SEQ ID NO: 448148 - RNA, 22 nt, Artificial Sequence
  Synthetic
auggauuggaggagcccgggaa

SEQ ID NO: 448149 - RNA, 23 nt, Artificial Sequence
  Synthetic
aauggauuggaggagcccgggaa

SEQ ID NO: 448150 - RNA, 24 nt, Artificial Sequence
  Synthetic
gaauggauuggaggagcccgggaa

SEQ ID NO: 448151 - RNA, 18 nt, Artificial Sequence
  Synthetic
gaagacccauggcgggaa

SEQ ID NO: 448152 - RNA, 19 nt, Artificial Sequence
  Synthetic
ggaagacccauggcgggaa

SEQ ID NO: 448153 - RNA, 20 nt, Artificial Sequence
  Synthetic
gggaagacccauggcgggaa

SEQ ID NO: 448154 - RNA, 21 nt, Artificial Sequence
  Synthetic
ggggaagacccauggcgggaa

SEQ ID NO: 448155 - RNA, 22 nt, Artificial Sequence
  Synthetic
aggggaagacccauggcgggaa

SEQ ID NO: 448156 - RNA, 23 nt, Artificial Sequence
  Synthetic
gaggggaagacccauggcgggaa

SEQ ID NO: 448157 - RNA, 24 nt, Artificial Sequence
  Synthetic
agaggggaagacccauggcgggaa

SEQ ID NO: 448158 - RNA, 18 nt, Artificial Sequence
  Synthetic
aagucaggaagucgggaa

SEQ ID NO: 448159 - RNA, 19 nt, Artificial Sequence
  Synthetic
caagucaggaagucgggaa

SEQ ID NO: 448160 - RNA, 20 nt, Artificial Sequence
  Synthetic
gcaagucaggaagucgggaa

SEQ ID NO: 448161 - RNA, 21 nt, Artificial Sequence
  Synthetic
ugcaagucaggaagucgggaa

SEQ ID NO: 448162 - RNA, 22 nt, Artificial Sequence
  Synthetic
cugcaagucaggaagucgggaa

SEQ ID NO: 448163 - RNA, 23 nt, Artificial Sequence
  Synthetic
ccugcaagucaggaagucgggaa

SEQ ID NO: 448164 - RNA, 24 nt, Artificial Sequence
  Synthetic
uccugcaagucaggaagucgggaa

SEQ ID NO: 448165 - RNA, 18 nt, Artificial Sequence
  Synthetic
cacacaaaaaaaggggaa

SEQ ID NO: 448166 - RNA, 19 nt, Artificial Sequence
  Synthetic
ucacacaaaaaaaggggaa

SEQ ID NO: 448167 - RNA, 20 nt, Artificial Sequence
  Synthetic
gucacacaaaaaaaggggaa

SEQ ID NO: 448168 - RNA, 21 nt, Artificial Sequence
  Synthetic
ugucacacaaaaaaaggggaa

SEQ ID NO: 448169 - RNA, 22 nt, Artificial Sequence
  Synthetic
cugucacacaaaaaaaggggaa

SEQ ID NO: 448170 - RNA, 23 nt, Artificial Sequence
  Synthetic
acugucacacaaaaaaaggggaa

SEQ ID NO: 448171 - RNA, 24 nt, Artificial Sequence
  Synthetic
uacugucacacaaaaaaaggggaa

SEQ ID NO: 448172 - RNA, 18 nt, Artificial Sequence
  Synthetic
acggaaaagaaaggggaa

SEQ ID NO: 448173 - RNA, 19 nt, Artificial Sequence
  Synthetic
aacggaaaagaaaggggaa

SEQ ID NO: 448174 - RNA, 20 nt, Artificial Sequence
  Synthetic
aaacggaaaagaaaggggaa

SEQ ID NO: 448175 - RNA, 21 nt, Artificial Sequence
  Synthetic
aaaacggaaaagaaaggggaa

SEQ ID NO: 448176 - RNA, 22 nt, Artificial Sequence
  Synthetic
caaaacggaaaagaaaggggaa

SEQ ID NO: 448177 - RNA, 23 nt, Artificial Sequence
  Synthetic
gcaaaacggaaaagaaaggggaa

SEQ ID NO: 448178 - RNA, 24 nt, Artificial Sequence
  Synthetic
ugcaaaacggaaaagaaaggggaa

SEQ ID NO: 448179 - RNA, 18 nt, Artificial Sequence
  Synthetic
gaugcugauggaggggaa

SEQ ID NO: 448180 - RNA, 19 nt, Artificial Sequence
  Synthetic
agaugcugauggaggggaa

SEQ ID NO: 448181 - RNA, 20 nt, Artificial Sequence
  Synthetic
aagaugcugauggaggggaa

SEQ ID NO: 448182 - RNA, 21 nt, Artificial Sequence
  Synthetic
aaagaugcugauggaggggaa

SEQ ID NO: 448183 - RNA, 22 nt, Artificial Sequence
  Synthetic
gaaagaugcugauggaggggaa

SEQ ID NO: 448184 - RNA, 23 nt, Artificial Sequence
  Synthetic
agaaagaugcugauggaggggaa

SEQ ID NO: 448185 - RNA, 24 nt, Artificial Sequence
  Synthetic
gagaaagaugcugauggaggggaa

SEQ ID NO: 448186 - RNA, 18 nt, Artificial Sequence
  Synthetic
ucuuccuuaauaggggaa

SEQ ID NO: 448187 - RNA, 19 nt, Artificial Sequence
  Synthetic
uucuuccuuaauaggggaa

SEQ ID NO: 448188 - RNA, 20 nt, Artificial Sequence
  Synthetic
cuucuuccuuaauaggggaa

SEQ ID NO: 448189 - RNA, 21 nt, Artificial Sequence
  Synthetic
ucuucuuccuuaauaggggaa

SEQ ID NO: 448190 - RNA, 22 nt, Artificial Sequence
  Synthetic
cucuucuuccuuaauaggggaa

SEQ ID NO: 448191 - RNA, 23 nt, Artificial Sequence
  Synthetic
acucuucuuccuuaauaggggaa

SEQ ID NO: 448192 - RNA, 24 nt, Artificial Sequence
  Synthetic
aacucuucuuccuuaauaggggaa

SEQ ID NO: 448193 - RNA, 18 nt, Artificial Sequence
  Synthetic
agcuaucacguaggggaa

SEQ ID NO: 448194 - RNA, 19 nt, Artificial Sequence
  Synthetic
gagcuaucacguaggggaa

SEQ ID NO: 448195 - RNA, 20 nt, Artificial Sequence
  Synthetic
ggagcuaucacguaggggaa

SEQ ID NO: 448196 - RNA, 21 nt, Artificial Sequence
  Synthetic
cggagcuaucacguaggggaa

SEQ ID NO: 448197 - RNA, 22 nt, Artificial Sequence
  Synthetic
acggagcuaucacguaggggaa

SEQ ID NO: 448198 - RNA, 23 nt, Artificial Sequence
  Synthetic
uacggagcuaucacguaggggaa

SEQ ID NO: 448199 - RNA, 24 nt, Artificial Sequence
  Synthetic
guacggagcuaucacguaggggaa

SEQ ID NO: 448200 - RNA, 18 nt, Artificial Sequence
  Synthetic
guggagagauuaggggaa

SEQ ID NO: 448201 - RNA, 19 nt, Artificial Sequence
  Synthetic
gguggagagauuaggggaa

SEQ ID NO: 448202 - RNA, 20 nt, Artificial Sequence
  Synthetic
agguggagagauuaggggaa

SEQ ID NO: 448203 - RNA, 21 nt, Artificial Sequence
  Synthetic
uagguggagagauuaggggaa

SEQ ID NO: 448204 - RNA, 22 nt, Artificial Sequence
  Synthetic
auagguggagagauuaggggaa

SEQ ID NO: 448205 - RNA, 23 nt, Artificial Sequence
  Synthetic
aauagguggagagauuaggggaa

SEQ ID NO: 448206 - RNA, 24 nt, Artificial Sequence
  Synthetic
aaauagguggagagauuaggggaa

SEQ ID NO: 448207 - RNA, 18 nt, Artificial Sequence
  Synthetic
ggguagugguagggggaa

SEQ ID NO: 448208 - RNA, 19 nt, Artificial Sequence
  Synthetic
aggguagugguagggggaa

SEQ ID NO: 448209 - RNA, 20 nt, Artificial Sequence
  Synthetic
aaggguagugguagggggaa

SEQ ID NO: 448210 - RNA, 21 nt, Artificial Sequence
  Synthetic
gaaggguagugguagggggaa

SEQ ID NO: 448211 - RNA, 22 nt, Artificial Sequence
  Synthetic
ggaaggguagugguagggggaa

SEQ ID NO: 448212 - RNA, 23 nt, Artificial Sequence
  Synthetic
gggaaggguagugguagggggaa

SEQ ID NO: 448213 - RNA, 24 nt, Artificial Sequence
  Synthetic
ugggaaggguagugguagggggaa

SEQ ID NO: 448214 - RNA, 18 nt, Artificial Sequence
  Synthetic
gcugugggguggggggaa

SEQ ID NO: 448215 - RNA, 19 nt, Artificial Sequence
  Synthetic
ugcugugggguggggggaa

SEQ ID NO: 448216 - RNA, 20 nt, Artificial Sequence
  Synthetic
cugcugugggguggggggaa

SEQ ID NO: 448217 - RNA, 21 nt, Artificial Sequence
  Synthetic
acugcugugggguggggggaa

SEQ ID NO: 448218 - RNA, 22 nt, Artificial Sequence
  Synthetic
gacugcugugggguggggggaa

SEQ ID NO: 448219 - RNA, 23 nt, Artificial Sequence
  Synthetic
ggacugcugugggguggggggaa

SEQ ID NO: 448220 - RNA, 24 nt, Artificial Sequence
  Synthetic
gggacugcugugggguggggggaa

SEQ ID NO: 448221 - RNA, 18 nt, Artificial Sequence
  Synthetic
gccugugaggugggggaa

SEQ ID NO: 448222 - RNA, 19 nt, Artificial Sequence
  Synthetic
ggccugugaggugggggaa

SEQ ID NO: 448223 - RNA, 20 nt, Artificial Sequence
  Synthetic
uggccugugaggugggggaa

SEQ ID NO: 448224 - RNA, 21 nt, Artificial Sequence
  Synthetic
uuggccugugaggugggggaa

SEQ ID NO: 448225 - RNA, 22 nt, Artificial Sequence
  Synthetic
auuggccugugaggugggggaa

SEQ ID NO: 448226 - RNA, 23 nt, Artificial Sequence
  Synthetic
uauuggccugugaggugggggaa

SEQ ID NO: 448227 - RNA, 24 nt, Artificial Sequence
  Synthetic
uuauuggccugugaggugggggaa

SEQ ID NO: 448228 - RNA, 18 nt, Artificial Sequence
  Synthetic
ugagaagacaauggggaa

SEQ ID NO: 448229 - RNA, 19 nt, Artificial Sequence
  Synthetic
augagaagacaauggggaa

SEQ ID NO: 448230 - RNA, 20 nt, Artificial Sequence
  Synthetic
aaugagaagacaauggggaa

SEQ ID NO: 448231 - RNA, 21 nt, Artificial Sequence
  Synthetic
gaaugagaagacaauggggaa

SEQ ID NO: 448232 - RNA, 22 nt, Artificial Sequence
  Synthetic
agaaugagaagacaauggggaa

SEQ ID NO: 448233 - RNA, 23 nt, Artificial Sequence
  Synthetic
uagaaugagaagacaauggggaa

SEQ ID NO: 448234 - RNA, 24 nt, Artificial Sequence
  Synthetic
guagaaugagaagacaauggggaa

SEQ ID NO: 448235 - RNA, 18 nt, Artificial Sequence
  Synthetic
agucaucagaauggggaa

SEQ ID NO: 448236 - RNA, 19 nt, Artificial Sequence
  Synthetic
gagucaucagaauggggaa

SEQ ID NO: 448237 - RNA, 20 nt, Artificial Sequence
  Synthetic
ggagucaucagaauggggaa

SEQ ID NO: 448238 - RNA, 21 nt, Artificial Sequence
  Synthetic
gggagucaucagaauggggaa

SEQ ID NO: 448239 - RNA, 22 nt, Artificial Sequence
  Synthetic
ugggagucaucagaauggggaa

SEQ ID NO: 448240 - RNA, 23 nt, Artificial Sequence
  Synthetic
uugggagucaucagaauggggaa

SEQ ID NO: 448241 - RNA, 24 nt, Artificial Sequence
  Synthetic
guugggagucaucagaauggggaa

SEQ ID NO: 448242 - RNA, 18 nt, Artificial Sequence
  Synthetic
cagagacgagauggggaa

SEQ ID NO: 448243 - RNA, 19 nt, Artificial Sequence
  Synthetic
acagagacgagauggggaa

SEQ ID NO: 448244 - RNA, 20 nt, Artificial Sequence
  Synthetic
aacagagacgagauggggaa

SEQ ID NO: 448245 - RNA, 21 nt, Artificial Sequence
  Synthetic
caacagagacgagauggggaa

SEQ ID NO: 448246 - RNA, 22 nt, Artificial Sequence
  Synthetic
gcaacagagacgagauggggaa

SEQ ID NO: 448247 - RNA, 23 nt, Artificial Sequence
  Synthetic
ggcaacagagacgagauggggaa

SEQ ID NO: 448248 - RNA, 24 nt, Artificial Sequence
  Synthetic
aggcaacagagacgagauggggaa

SEQ ID NO: 448249 - RNA, 18 nt, Artificial Sequence
  Synthetic
gagugaaaggauggggaa

SEQ ID NO: 448250 - RNA, 19 nt, Artificial Sequence
  Synthetic
ugagugaaaggauggggaa

SEQ ID NO: 448251 - RNA, 20 nt, Artificial Sequence
  Synthetic
gugagugaaaggauggggaa

SEQ ID NO: 448252 - RNA, 21 nt, Artificial Sequence
  Synthetic
agugagugaaaggauggggaa

SEQ ID NO: 448253 - RNA, 22 nt, Artificial Sequence
  Synthetic
aagugagugaaaggauggggaa

SEQ ID NO: 448254 - RNA, 23 nt, Artificial Sequence
  Synthetic
aaagugagugaaaggauggggaa

SEQ ID NO: 448255 - RNA, 24 nt, Artificial Sequence
  Synthetic
caaagugagugaaaggauggggaa

SEQ ID NO: 448256 - RNA, 18 nt, Artificial Sequence
  Synthetic
gggcacggguauggggaa

SEQ ID NO: 448257 - RNA, 19 nt, Artificial Sequence
  Synthetic
ugggcacggguauggggaa

SEQ ID NO: 448258 - RNA, 20 nt, Artificial Sequence
  Synthetic
gugggcacggguauggggaa

SEQ ID NO: 448259 - RNA, 21 nt, Artificial Sequence
  Synthetic
agugggcacggguauggggaa

SEQ ID NO: 448260 - RNA, 22 nt, Artificial Sequence
  Synthetic
gagugggcacggguauggggaa

SEQ ID NO: 448261 - RNA, 23 nt, Artificial Sequence
  Synthetic
ugagugggcacggguauggggaa

SEQ ID NO: 448262 - RNA, 24 nt, Artificial Sequence
  Synthetic
cugagugggcacggguauggggaa

SEQ ID NO: 448263 - RNA, 18 nt, Artificial Sequence
  Synthetic
uuucaguuuccuggggaa

SEQ ID NO: 448264 - RNA, 19 nt, Artificial Sequence
  Synthetic
auuucaguuuccuggggaa

SEQ ID NO: 448265 - RNA, 20 nt, Artificial Sequence
  Synthetic
uauuucaguuuccuggggaa

SEQ ID NO: 448266 - RNA, 21 nt, Artificial Sequence
  Synthetic
cuauuucaguuuccuggggaa

SEQ ID NO: 448267 - RNA, 22 nt, Artificial Sequence
  Synthetic
gcuauuucaguuuccuggggaa

SEQ ID NO: 448268 - RNA, 23 nt, Artificial Sequence
  Synthetic
ugcuauuucaguuuccuggggaa

SEQ ID NO: 448269 - RNA, 24 nt, Artificial Sequence
  Synthetic
cugcuauuucaguuuccuggggaa

SEQ ID NO: 448270 - RNA, 18 nt, Artificial Sequence
  Synthetic
uagaugagggcuggggaa

SEQ ID NO: 448271 - RNA, 19 nt, Artificial Sequence
  Synthetic
auagaugagggcuggggaa

SEQ ID NO: 448272 - RNA, 20 nt, Artificial Sequence
  Synthetic
aauagaugagggcuggggaa

SEQ ID NO: 448273 - RNA, 21 nt, Artificial Sequence
  Synthetic
aaauagaugagggcuggggaa

SEQ ID NO: 448274 - RNA, 22 nt, Artificial Sequence
  Synthetic
gaaauagaugagggcuggggaa

SEQ ID NO: 448275 - RNA, 23 nt, Artificial Sequence
  Synthetic
ugaaauagaugagggcuggggaa

SEQ ID NO: 448276 - RNA, 24 nt, Artificial Sequence
  Synthetic
gugaaauagaugagggcuggggaa

SEQ ID NO: 448277 - RNA, 18 nt, Artificial Sequence
  Synthetic
agugguggugcuggggaa

SEQ ID NO: 448278 - RNA, 19 nt, Artificial Sequence
  Synthetic
aagugguggugcuggggaa

SEQ ID NO: 448279 - RNA, 20 nt, Artificial Sequence
  Synthetic
aaagugguggugcuggggaa

SEQ ID NO: 448280 - RNA, 21 nt, Artificial Sequence
  Synthetic
uaaagugguggugcuggggaa

SEQ ID NO: 448281 - RNA, 22 nt, Artificial Sequence
  Synthetic
auaaagugguggugcuggggaa

SEQ ID NO: 448282 - RNA, 23 nt, Artificial Sequence
  Synthetic
cauaaagugguggugcuggggaa

SEQ ID NO: 448283 - RNA, 24 nt, Artificial Sequence
  Synthetic
ucauaaagugguggugcuggggaa

SEQ ID NO: 448284 - RNA, 18 nt, Artificial Sequence
  Synthetic
gauuacuaaucuggggaa

SEQ ID NO: 448285 - RNA, 19 nt, Artificial Sequence
  Synthetic
agauuacuaaucuggggaa

SEQ ID NO: 448286 - RNA, 20 nt, Artificial Sequence
  Synthetic
uagauuacuaaucuggggaa

SEQ ID NO: 448287 - RNA, 21 nt, Artificial Sequence
  Synthetic
guagauuacuaaucuggggaa

SEQ ID NO: 448288 - RNA, 22 nt, Artificial Sequence
  Synthetic
aguagauuacuaaucuggggaa

SEQ ID NO: 448289 - RNA, 23 nt, Artificial Sequence
  Synthetic
gaguagauuacuaaucuggggaa

SEQ ID NO: 448290 - RNA, 24 nt, Artificial Sequence
  Synthetic
ugaguagauuacuaaucuggggaa

SEQ ID NO: 448291 - RNA, 18 nt, Artificial Sequence
  Synthetic
uugcugcauuguggggaa

SEQ ID NO: 448292 - RNA, 19 nt, Artificial Sequence
  Synthetic
guugcugcauuguggggaa

SEQ ID NO: 448293 - RNA, 20 nt, Artificial Sequence
  Synthetic
uguugcugcauuguggggaa

SEQ ID NO: 448294 - RNA, 21 nt, Artificial Sequence
  Synthetic
uuguugcugcauuguggggaa

SEQ ID NO: 448295 - RNA, 22 nt, Artificial Sequence
  Synthetic
uuuguugcugcauuguggggaa

SEQ ID NO: 448296 - RNA, 23 nt, Artificial Sequence
  Synthetic
guuuguugcugcauuguggggaa

SEQ ID NO: 448297 - RNA, 24 nt, Artificial Sequence
  Synthetic
aguuuguugcugcauuguggggaa

SEQ ID NO: 448298 - RNA, 18 nt, Artificial Sequence
  Synthetic
cuugcaaauuuuggggaa

SEQ ID NO: 448299 - RNA, 19 nt, Artificial Sequence
  Synthetic
ccuugcaaauuuuggggaa

SEQ ID NO: 448300 - RNA, 20 nt, Artificial Sequence
  Synthetic
cccuugcaaauuuuggggaa

SEQ ID NO: 448301 - RNA, 21 nt, Artificial Sequence
  Synthetic
ccccuugcaaauuuuggggaa

SEQ ID NO: 448302 - RNA, 22 nt, Artificial Sequence
  Synthetic
uccccuugcaaauuuuggggaa

SEQ ID NO: 448303 - RNA, 23 nt, Artificial Sequence
  Synthetic
uuccccuugcaaauuuuggggaa

SEQ ID NO: 448304 - RNA, 24 nt, Artificial Sequence
  Synthetic
uuuccccuugcaaauuuuggggaa

SEQ ID NO: 448305 - RNA, 18 nt, Artificial Sequence
  Synthetic
aacaagaauuuuggggaa

SEQ ID NO: 448306 - RNA, 19 nt, Artificial Sequence
  Synthetic
gaacaagaauuuuggggaa

SEQ ID NO: 448307 - RNA, 20 nt, Artificial Sequence
  Synthetic
agaacaagaauuuuggggaa

SEQ ID NO: 448308 - RNA, 21 nt, Artificial Sequence
  Synthetic
aagaacaagaauuuuggggaa

SEQ ID NO: 448309 - RNA, 22 nt, Artificial Sequence
  Synthetic
gaagaacaagaauuuuggggaa

SEQ ID NO: 448310 - RNA, 23 nt, Artificial Sequence
  Synthetic
agaagaacaagaauuuuggggaa

SEQ ID NO: 448311 - RNA, 24 nt, Artificial Sequence
  Synthetic
gagaagaacaagaauuuuggggaa

SEQ ID NO: 448312 - RNA, 18 nt, Artificial Sequence
  Synthetic
aaguaacagaaaugggaa

SEQ ID NO: 448313 - RNA, 19 nt, Artificial Sequence
  Synthetic
gaaguaacagaaaugggaa

SEQ ID NO: 448314 - RNA, 20 nt, Artificial Sequence
  Synthetic
agaaguaacagaaaugggaa

SEQ ID NO: 448315 - RNA, 21 nt, Artificial Sequence
  Synthetic
aagaaguaacagaaaugggaa

SEQ ID NO: 448316 - RNA, 22 nt, Artificial Sequence
  Synthetic
uaagaaguaacagaaaugggaa

SEQ ID NO: 448317 - RNA, 23 nt, Artificial Sequence
  Synthetic
guaagaaguaacagaaaugggaa

SEQ ID NO: 448318 - RNA, 24 nt, Artificial Sequence
  Synthetic
uguaagaaguaacagaaaugggaa

SEQ ID NO: 448319 - RNA, 18 nt, Artificial Sequence
  Synthetic
auucauauauaaugggaa

SEQ ID NO: 448320 - RNA, 19 nt, Artificial Sequence
  Synthetic
cauucauauauaaugggaa

SEQ ID NO: 448321 - RNA, 20 nt, Artificial Sequence
  Synthetic
ccauucauauauaaugggaa

SEQ ID NO: 448322 - RNA, 21 nt, Artificial Sequence
  Synthetic
uccauucauauauaaugggaa

SEQ ID NO: 448323 - RNA, 22 nt, Artificial Sequence
  Synthetic
uuccauucauauauaaugggaa

SEQ ID NO: 448324 - RNA, 23 nt, Artificial Sequence
  Synthetic
uuuccauucauauauaaugggaa

SEQ ID NO: 448325 - RNA, 24 nt, Artificial Sequence
  Synthetic
auuuccauucauauauaaugggaa

SEQ ID NO: 448326 - RNA, 18 nt, Artificial Sequence
  Synthetic
gaaaauaaguaaugggaa

SEQ ID NO: 448327 - RNA, 19 nt, Artificial Sequence
  Synthetic
ugaaaauaaguaaugggaa

SEQ ID NO: 448328 - RNA, 20 nt, Artificial Sequence
  Synthetic
augaaaauaaguaaugggaa

SEQ ID NO: 448329 - RNA, 21 nt, Artificial Sequence
  Synthetic
uaugaaaauaaguaaugggaa

SEQ ID NO: 448330 - RNA, 22 nt, Artificial Sequence
  Synthetic
uuaugaaaauaaguaaugggaa

SEQ ID NO: 448331 - RNA, 23 nt, Artificial Sequence
  Synthetic
cuuaugaaaauaaguaaugggaa

SEQ ID NO: 448332 - RNA, 24 nt, Artificial Sequence
  Synthetic
ucuuaugaaaauaaguaaugggaa

SEQ ID NO: 448333 - RNA, 18 nt, Artificial Sequence
  Synthetic
gaauuuugguaaugggaa

SEQ ID NO: 448334 - RNA, 19 nt, Artificial Sequence
  Synthetic
ugaauuuugguaaugggaa

SEQ ID NO: 448335 - RNA, 20 nt, Artificial Sequence
  Synthetic
augaauuuugguaaugggaa

SEQ ID NO: 448336 - RNA, 21 nt, Artificial Sequence
  Synthetic
aaugaauuuugguaaugggaa

SEQ ID NO: 448337 - RNA, 22 nt, Artificial Sequence
  Synthetic
uaaugaauuuugguaaugggaa

SEQ ID NO: 448338 - RNA, 23 nt, Artificial Sequence
  Synthetic
auaaugaauuuugguaaugggaa

SEQ ID NO: 448339 - RNA, 24 nt, Artificial Sequence
  Synthetic
aauaaugaauuuugguaaugggaa

SEQ ID NO: 448340 - RNA, 18 nt, Artificial Sequence
  Synthetic
acuaccuguagaugggaa

SEQ ID NO: 448341 - RNA, 19 nt, Artificial Sequence
  Synthetic
uacuaccuguagaugggaa

SEQ ID NO: 448342 - RNA, 20 nt, Artificial Sequence
  Synthetic
auacuaccuguagaugggaa

SEQ ID NO: 448343 - RNA, 21 nt, Artificial Sequence
  Synthetic
gauacuaccuguagaugggaa

SEQ ID NO: 448344 - RNA, 22 nt, Artificial Sequence
  Synthetic
ugauacuaccuguagaugggaa

SEQ ID NO: 448345 - RNA, 23 nt, Artificial Sequence
  Synthetic
cugauacuaccuguagaugggaa

SEQ ID NO: 448346 - RNA, 24 nt, Artificial Sequence
  Synthetic
gcugauacuaccuguagaugggaa

SEQ ID NO: 448347 - RNA, 18 nt, Artificial Sequence
  Synthetic
gcuacuagcggaugggaa

SEQ ID NO: 448348 - RNA, 19 nt, Artificial Sequence
  Synthetic
ggcuacuagcggaugggaa

SEQ ID NO: 448349 - RNA, 20 nt, Artificial Sequence
  Synthetic
aggcuacuagcggaugggaa

SEQ ID NO: 448350 - RNA, 21 nt, Artificial Sequence
  Synthetic
gaggcuacuagcggaugggaa

SEQ ID NO: 448351 - RNA, 22 nt, Artificial Sequence
  Synthetic
agaggcuacuagcggaugggaa

SEQ ID NO: 448352 - RNA, 23 nt, Artificial Sequence
  Synthetic
cagaggcuacuagcggaugggaa

SEQ ID NO: 448353 - RNA, 24 nt, Artificial Sequence
  Synthetic
ccagaggcuacuagcggaugggaa

SEQ ID NO: 448354 - RNA, 18 nt, Artificial Sequence
  Synthetic
aaauaagggggaugggaa

SEQ ID NO: 448355 - RNA, 19 nt, Artificial Sequence
  Synthetic
gaaauaagggggaugggaa

SEQ ID NO: 448356 - RNA, 20 nt, Artificial Sequence
  Synthetic
ggaaauaagggggaugggaa

SEQ ID NO: 448357 - RNA, 21 nt, Artificial Sequence
  Synthetic
uggaaauaagggggaugggaa

SEQ ID NO: 448358 - RNA, 22 nt, Artificial Sequence
  Synthetic
guggaaauaagggggaugggaa

SEQ ID NO: 448359 - RNA, 23 nt, Artificial Sequence
  Synthetic
aguggaaauaagggggaugggaa

SEQ ID NO: 448360 - RNA, 24 nt, Artificial Sequence
  Synthetic
aaguggaaauaagggggaugggaa

SEQ ID NO: 448361 - RNA, 18 nt, Artificial Sequence
  Synthetic
gaaugcuuuugaugggaa

SEQ ID NO: 448362 - RNA, 19 nt, Artificial Sequence
  Synthetic
ugaaugcuuuugaugggaa

SEQ ID NO: 448363 - RNA, 20 nt, Artificial Sequence
  Synthetic
augaaugcuuuugaugggaa

SEQ ID NO: 448364 - RNA, 21 nt, Artificial Sequence
  Synthetic
caugaaugcuuuugaugggaa

SEQ ID NO: 448365 - RNA, 22 nt, Artificial Sequence
  Synthetic
ucaugaaugcuuuugaugggaa

SEQ ID NO: 448366 - RNA, 23 nt, Artificial Sequence
  Synthetic
uucaugaaugcuuuugaugggaa

SEQ ID NO: 448367 - RNA, 24 nt, Artificial Sequence
  Synthetic
cuucaugaaugcuuuugaugggaa

SEQ ID NO: 448368 - RNA, 18 nt, Artificial Sequence
  Synthetic
ugaugucaucuaugggaa

SEQ ID NO: 448369 - RNA, 19 nt, Artificial Sequence
  Synthetic
augaugucaucuaugggaa

SEQ ID NO: 448370 - RNA, 20 nt, Artificial Sequence
  Synthetic
aaugaugucaucuaugggaa

SEQ ID NO: 448371 - RNA, 21 nt, Artificial Sequence
  Synthetic
caaugaugucaucuaugggaa

SEQ ID NO: 448372 - RNA, 22 nt, Artificial Sequence
  Synthetic
gcaaugaugucaucuaugggaa

SEQ ID NO: 448373 - RNA, 23 nt, Artificial Sequence
  Synthetic
ugcaaugaugucaucuaugggaa

SEQ ID NO: 448374 - RNA, 24 nt, Artificial Sequence
  Synthetic
augcaaugaugucaucuaugggaa

SEQ ID NO: 448375 - RNA, 18 nt, Artificial Sequence
  Synthetic
uacaugaaaaccugggaa

SEQ ID NO: 448376 - RNA, 19 nt, Artificial Sequence
  Synthetic
cuacaugaaaaccugggaa

SEQ ID NO: 448377 - RNA, 20 nt, Artificial Sequence
  Synthetic
ccuacaugaaaaccugggaa

SEQ ID NO: 448378 - RNA, 21 nt, Artificial Sequence
  Synthetic
accuacaugaaaaccugggaa

SEQ ID NO: 448379 - RNA, 22 nt, Artificial Sequence
  Synthetic
uaccuacaugaaaaccugggaa

SEQ ID NO: 448380 - RNA, 23 nt, Artificial Sequence
  Synthetic
cuaccuacaugaaaaccugggaa

SEQ ID NO: 448381 - RNA, 24 nt, Artificial Sequence
  Synthetic
ucuaccuacaugaaaaccugggaa

SEQ ID NO: 448382 - RNA, 18 nt, Artificial Sequence
  Synthetic
agaaguugucgcugggaa

SEQ ID NO: 448383 - RNA, 19 nt, Artificial Sequence
  Synthetic
gagaaguugucgcugggaa

SEQ ID NO: 448384 - RNA, 20 nt, Artificial Sequence
  Synthetic
ugagaaguugucgcugggaa

SEQ ID NO: 448385 - RNA, 21 nt, Artificial Sequence
  Synthetic
augagaaguugucgcugggaa

SEQ ID NO: 448386 - RNA, 22 nt, Artificial Sequence
  Synthetic
gaugagaaguugucgcugggaa

SEQ ID NO: 448387 - RNA, 23 nt, Artificial Sequence
  Synthetic
agaugagaaguugucgcugggaa

SEQ ID NO: 448388 - RNA, 24 nt, Artificial Sequence
  Synthetic
gagaugagaaguugucgcugggaa

SEQ ID NO: 448389 - RNA, 18 nt, Artificial Sequence
  Synthetic
ucuguacacugcugggaa

SEQ ID NO: 448390 - RNA, 19 nt, Artificial Sequence
  Synthetic
aucuguacacugcugggaa

SEQ ID NO: 448391 - RNA, 20 nt, Artificial Sequence
  Synthetic
uaucuguacacugcugggaa

SEQ ID NO: 448392 - RNA, 21 nt, Artificial Sequence
  Synthetic
cuaucuguacacugcugggaa

SEQ ID NO: 448393 - RNA, 22 nt, Artificial Sequence
  Synthetic
ucuaucuguacacugcugggaa

SEQ ID NO: 448394 - RNA, 23 nt, Artificial Sequence
  Synthetic
aucuaucuguacacugcugggaa

SEQ ID NO: 448395 - RNA, 24 nt, Artificial Sequence
  Synthetic
caucuaucuguacacugcugggaa

SEQ ID NO: 448396 - RNA, 18 nt, Artificial Sequence
  Synthetic
cucacucguaagugggaa

SEQ ID NO: 448397 - RNA, 19 nt, Artificial Sequence
  Synthetic
ucucacucguaagugggaa

SEQ ID NO: 448398 - RNA, 20 nt, Artificial Sequence
  Synthetic
uucucacucguaagugggaa

SEQ ID NO: 448399 - RNA, 21 nt, Artificial Sequence
  Synthetic
guucucacucguaagugggaa

SEQ ID NO: 448400 - RNA, 22 nt, Artificial Sequence
  Synthetic
uguucucacucguaagugggaa

SEQ ID NO: 448401 - RNA, 23 nt, Artificial Sequence
  Synthetic
auguucucacucguaagugggaa

SEQ ID NO: 448402 - RNA, 24 nt, Artificial Sequence
  Synthetic
cauguucucacucguaagugggaa

SEQ ID NO: 448403 - RNA, 18 nt, Artificial Sequence
  Synthetic
aguggcucucagugggaa

SEQ ID NO: 448404 - RNA, 19 nt, Artificial Sequence
  Synthetic
aaguggcucucagugggaa

SEQ ID NO: 448405 - RNA, 20 nt, Artificial Sequence
  Synthetic
aaaguggcucucagugggaa

SEQ ID NO: 448406 - RNA, 21 nt, Artificial Sequence
  Synthetic
gaaaguggcucucagugggaa

SEQ ID NO: 448407 - RNA, 22 nt, Artificial Sequence
  Synthetic
ugaaaguggcucucagugggaa

SEQ ID NO: 448408 - RNA, 23 nt, Artificial Sequence
  Synthetic
augaaaguggcucucagugggaa

SEQ ID NO: 448409 - RNA, 24 nt, Artificial Sequence
  Synthetic
gaugaaaguggcucucagugggaa

SEQ ID NO: 448410 - RNA, 18 nt, Artificial Sequence
  Synthetic
auagguuuggagugggaa

SEQ ID NO: 448411 - RNA, 19 nt, Artificial Sequence
  Synthetic
aauagguuuggagugggaa

SEQ ID NO: 448412 - RNA, 20 nt, Artificial Sequence
  Synthetic
caauagguuuggagugggaa

SEQ ID NO: 448413 - RNA, 21 nt, Artificial Sequence
  Synthetic
ucaauagguuuggagugggaa

SEQ ID NO: 448414 - RNA, 22 nt, Artificial Sequence
  Synthetic
aucaauagguuuggagugggaa

SEQ ID NO: 448415 - RNA, 23 nt, Artificial Sequence
  Synthetic
caucaauagguuuggagugggaa

SEQ ID NO: 448416 - RNA, 24 nt, Artificial Sequence
  Synthetic
ccaucaauagguuuggagugggaa

SEQ ID NO: 448417 - RNA, 18 nt, Artificial Sequence
  Synthetic
cucacucacaggugggaa

SEQ ID NO: 448418 - RNA, 19 nt, Artificial Sequence
  Synthetic
ucucacucacaggugggaa

SEQ ID NO: 448419 - RNA, 20 nt, Artificial Sequence
  Synthetic
cucucacucacaggugggaa

SEQ ID NO: 448420 - RNA, 21 nt, Artificial Sequence
  Synthetic
acucucacucacaggugggaa

SEQ ID NO: 448421 - RNA, 22 nt, Artificial Sequence
  Synthetic
uacucucacucacaggugggaa

SEQ ID NO: 448422 - RNA, 23 nt, Artificial Sequence
  Synthetic
auacucucacucacaggugggaa

SEQ ID NO: 448423 - RNA, 24 nt, Artificial Sequence
  Synthetic
cauacucucacucacaggugggaa

SEQ ID NO: 448424 - RNA, 21 nt, Artificial Sequence
  Synthetic
auucucacucacaggugggaa

SEQ ID NO: 448425 - RNA, 22 nt, Artificial Sequence
  Synthetic
uauucucacucacaggugggaa

SEQ ID NO: 448426 - RNA, 23 nt, Artificial Sequence
  Synthetic
auauucucacucacaggugggaa

SEQ ID NO: 448427 - RNA, 24 nt, Artificial Sequence
  Synthetic
cauauucucacucacaggugggaa

SEQ ID NO: 448428 - RNA, 18 nt, Artificial Sequence
  Synthetic
aagcaaacgaggugggaa

SEQ ID NO: 448429 - RNA, 19 nt, Artificial Sequence
  Synthetic
caagcaaacgaggugggaa

SEQ ID NO: 448430 - RNA, 20 nt, Artificial Sequence
  Synthetic
gcaagcaaacgaggugggaa

SEQ ID NO: 448431 - RNA, 21 nt, Artificial Sequence
  Synthetic
ugcaagcaaacgaggugggaa

SEQ ID NO: 448432 - RNA, 22 nt, Artificial Sequence
  Synthetic
gugcaagcaaacgaggugggaa

SEQ ID NO: 448433 - RNA, 23 nt, Artificial Sequence
  Synthetic
ugugcaagcaaacgaggugggaa

SEQ ID NO: 448434 - RNA, 24 nt, Artificial Sequence
  Synthetic
gugugcaagcaaacgaggugggaa

SEQ ID NO: 448435 - RNA, 18 nt, Artificial Sequence
  Synthetic
auuuaggggaggugggaa

SEQ ID NO: 448436 - RNA, 19 nt, Artificial Sequence
  Synthetic
uauuuaggggaggugggaa

SEQ ID NO: 448437 - RNA, 20 nt, Artificial Sequence
  Synthetic
uuauuuaggggaggugggaa

SEQ ID NO: 448438 - RNA, 21 nt, Artificial Sequence
  Synthetic
uuuauuuaggggaggugggaa

SEQ ID NO: 448439 - RNA, 22 nt, Artificial Sequence
  Synthetic
uuuuauuuaggggaggugggaa

SEQ ID NO: 448440 - RNA, 23 nt, Artificial Sequence
  Synthetic
auuuuauuuaggggaggugggaa

SEQ ID NO: 448441 - RNA, 24 nt, Artificial Sequence
  Synthetic
aauuuuauuuaggggaggugggaa

SEQ ID NO: 448442 - RNA, 18 nt, Artificial Sequence
  Synthetic
cucacucauaggugggaa

SEQ ID NO: 448443 - RNA, 19 nt, Artificial Sequence
  Synthetic
ccucacucauaggugggaa

SEQ ID NO: 448444 - RNA, 20 nt, Artificial Sequence
  Synthetic
uccucacucauaggugggaa

SEQ ID NO: 448445 - RNA, 21 nt, Artificial Sequence
  Synthetic
guccucacucauaggugggaa

SEQ ID NO: 448446 - RNA, 22 nt, Artificial Sequence
  Synthetic
uguccucacucauaggugggaa

SEQ ID NO: 448447 - RNA, 23 nt, Artificial Sequence
  Synthetic
auguccucacucauaggugggaa

SEQ ID NO: 448448 - RNA, 24 nt, Artificial Sequence
  Synthetic
cauguccucacucauaggugggaa

SEQ ID NO: 448449 - RNA, 18 nt, Artificial Sequence
  Synthetic
cucgcucauaggugggaa

SEQ ID NO: 448450 - RNA, 19 nt, Artificial Sequence
  Synthetic
ucucgcucauaggugggaa

SEQ ID NO: 448451 - RNA, 20 nt, Artificial Sequence
  Synthetic
uucucgcucauaggugggaa

SEQ ID NO: 448452 - RNA, 21 nt, Artificial Sequence
  Synthetic
guucucgcucauaggugggaa

SEQ ID NO: 448453 - RNA, 22 nt, Artificial Sequence
  Synthetic
uguucucgcucauaggugggaa

SEQ ID NO: 448454 - RNA, 23 nt, Artificial Sequence
  Synthetic
auguucucgcucauaggugggaa

SEQ ID NO: 448455 - RNA, 24 nt, Artificial Sequence
  Synthetic
cauguucucgcucauaggugggaa

SEQ ID NO: 448456 - RNA, 18 nt, Artificial Sequence
  Synthetic
cucacucuuaggugggaa

SEQ ID NO: 448457 - RNA, 19 nt, Artificial Sequence
  Synthetic
ucucacucuuaggugggaa

SEQ ID NO: 448458 - RNA, 20 nt, Artificial Sequence
  Synthetic
uucucacucuuaggugggaa

SEQ ID NO: 448459 - RNA, 21 nt, Artificial Sequence
  Synthetic
guucucacucuuaggugggaa

SEQ ID NO: 448460 - RNA, 22 nt, Artificial Sequence
  Synthetic
uguucucacucuuaggugggaa

SEQ ID NO: 448461 - RNA, 23 nt, Artificial Sequence
  Synthetic
auguucucacucuuaggugggaa

SEQ ID NO: 448462 - RNA, 24 nt, Artificial Sequence
  Synthetic
cauguucucacucuuaggugggaa

SEQ ID NO: 448463 - RNA, 18 nt, Artificial Sequence
  Synthetic
ugaacaugugggugggaa

SEQ ID NO: 448464 - RNA, 19 nt, Artificial Sequence
  Synthetic
uugaacaugugggugggaa

SEQ ID NO: 448465 - RNA, 20 nt, Artificial Sequence
  Synthetic
cuugaacaugugggugggaa

SEQ ID NO: 448466 - RNA, 21 nt, Artificial Sequence
  Synthetic
acuugaacaugugggugggaa

SEQ ID NO: 448467 - RNA, 22 nt, Artificial Sequence
  Synthetic
aacuugaacaugugggugggaa

SEQ ID NO: 448468 - RNA, 23 nt, Artificial Sequence
  Synthetic
aaacuugaacaugugggugggaa

SEQ ID NO: 448469 - RNA, 24 nt, Artificial Sequence
  Synthetic
aaaacuugaacaugugggugggaa

SEQ ID NO: 448470 - RNA, 18 nt, Artificial Sequence
  Synthetic
augaagugagauugggaa

SEQ ID NO: 448471 - RNA, 19 nt, Artificial Sequence
  Synthetic
aaugaagugagauugggaa

SEQ ID NO: 448472 - RNA, 20 nt, Artificial Sequence
  Synthetic
aaaugaagugagauugggaa

SEQ ID NO: 448473 - RNA, 21 nt, Artificial Sequence
  Synthetic
aaaaugaagugagauugggaa

SEQ ID NO: 448474 - RNA, 22 nt, Artificial Sequence
  Synthetic
gaaaaugaagugagauugggaa

SEQ ID NO: 448475 - RNA, 23 nt, Artificial Sequence
  Synthetic
ggaaaaugaagugagauugggaa

SEQ ID NO: 448476 - RNA, 24 nt, Artificial Sequence
  Synthetic
gggaaaaugaagugagauugggaa

SEQ ID NO: 448477 - RNA, 18 nt, Artificial Sequence
  Synthetic
agaaaauaauauugggaa

SEQ ID NO: 448478 - RNA, 19 nt, Artificial Sequence
  Synthetic
uagaaaauaauauugggaa

SEQ ID NO: 448479 - RNA, 20 nt, Artificial Sequence
  Synthetic
uuagaaaauaauauugggaa

SEQ ID NO: 448480 - RNA, 21 nt, Artificial Sequence
  Synthetic
cuuagaaaauaauauugggaa

SEQ ID NO: 448481 - RNA, 22 nt, Artificial Sequence
  Synthetic
acuuagaaaauaauauugggaa

SEQ ID NO: 448482 - RNA, 23 nt, Artificial Sequence
  Synthetic
cacuuagaaaauaauauugggaa

SEQ ID NO: 448483 - RNA, 24 nt, Artificial Sequence
  Synthetic
ccacuuagaaaauaauauugggaa

SEQ ID NO: 448484 - RNA, 18 nt, Artificial Sequence
  Synthetic
auaaauccuuauugggaa

SEQ ID NO: 448485 - RNA, 19 nt, Artificial Sequence
  Synthetic
uauaaauccuuauugggaa

SEQ ID NO: 448486 - RNA, 20 nt, Artificial Sequence
  Synthetic
cuauaaauccuuauugggaa

SEQ ID NO: 448487 - RNA, 21 nt, Artificial Sequence
  Synthetic
ucuauaaauccuuauugggaa

SEQ ID NO: 448488 - RNA, 22 nt, Artificial Sequence
  Synthetic
uucuauaaauccuuauugggaa

SEQ ID NO: 448489 - RNA, 23 nt, Artificial Sequence
  Synthetic
guucuauaaauccuuauugggaa

SEQ ID NO: 448490 - RNA, 24 nt, Artificial Sequence
  Synthetic
uguucuauaaauccuuauugggaa

SEQ ID NO: 448491 - RNA, 18 nt, Artificial Sequence
  Synthetic
uucaugaacacuugggaa

SEQ ID NO: 448492 - RNA, 19 nt, Artificial Sequence
  Synthetic
cuucaugaacacuugggaa

SEQ ID NO: 448493 - RNA, 20 nt, Artificial Sequence
  Synthetic
gcuucaugaacacuugggaa

SEQ ID NO: 448494 - RNA, 21 nt, Artificial Sequence
  Synthetic
ugcuucaugaacacuugggaa

SEQ ID NO: 448495 - RNA, 22 nt, Artificial Sequence
  Synthetic
gugcuucaugaacacuugggaa

SEQ ID NO: 448496 - RNA, 23 nt, Artificial Sequence
  Synthetic
cgugcuucaugaacacuugggaa

SEQ ID NO: 448497 - RNA, 24 nt, Artificial Sequence
  Synthetic
acgugcuucaugaacacuugggaa

SEQ ID NO: 448498 - RNA, 18 nt, Artificial Sequence
  Synthetic
aagaauugggguugggaa

SEQ ID NO: 448499 - RNA, 19 nt, Artificial Sequence
  Synthetic
aaagaauugggguugggaa

SEQ ID NO: 448500 - RNA, 20 nt, Artificial Sequence
  Synthetic
gaaagaauugggguugggaa

SEQ ID NO: 448501 - RNA, 21 nt, Artificial Sequence
  Synthetic
agaaagaauugggguugggaa

SEQ ID NO: 448502 - RNA, 22 nt, Artificial Sequence
  Synthetic
aagaaagaauugggguugggaa

SEQ ID NO: 448503 - RNA, 23 nt, Artificial Sequence
  Synthetic
aaagaaagaauugggguugggaa

SEQ ID NO: 448504 - RNA, 24 nt, Artificial Sequence
  Synthetic
aaaagaaagaauugggguugggaa

SEQ ID NO: 448505 - RNA, 18 nt, Artificial Sequence
  Synthetic
aaaaaucaauuuugggaa

SEQ ID NO: 448506 - RNA, 19 nt, Artificial Sequence
  Synthetic
aaaaaaucaauuuugggaa

SEQ ID NO: 448507 - RNA, 20 nt, Artificial Sequence
  Synthetic
uaaaaaaucaauuuugggaa

SEQ ID NO: 448508 - RNA, 21 nt, Artificial Sequence
  Synthetic
uuaaaaaaucaauuuugggaa

SEQ ID NO: 448509 - RNA, 22 nt, Artificial Sequence
  Synthetic
cuuaaaaaaucaauuuugggaa

SEQ ID NO: 448510 - RNA, 23 nt, Artificial Sequence
  Synthetic
ccuuaaaaaaucaauuuugggaa

SEQ ID NO: 448511 - RNA, 24 nt, Artificial Sequence
  Synthetic
accuuaaaaaaucaauuuugggaa

SEQ ID NO: 448512 - RNA, 18 nt, Artificial Sequence
  Synthetic
augugauuacaaauggaa

SEQ ID NO: 448513 - RNA, 19 nt, Artificial Sequence
  Synthetic
aaugugauuacaaauggaa

SEQ ID NO: 448514 - RNA, 20 nt, Artificial Sequence
  Synthetic
uaaugugauuacaaauggaa

SEQ ID NO: 448515 - RNA, 21 nt, Artificial Sequence
  Synthetic
auaaugugauuacaaauggaa

SEQ ID NO: 448516 - RNA, 22 nt, Artificial Sequence
  Synthetic
gauaaugugauuacaaauggaa

SEQ ID NO: 448517 - RNA, 23 nt, Artificial Sequence
  Synthetic
ggauaaugugauuacaaauggaa

SEQ ID NO: 448518 - RNA, 24 nt, Artificial Sequence
  Synthetic
uggauaaugugauuacaaauggaa

SEQ ID NO: 448519 - RNA, 18 nt, Artificial Sequence
  Synthetic
aguauuauugaaauggaa

SEQ ID NO: 448520 - RNA, 19 nt, Artificial Sequence
  Synthetic
aaguauuauugaaauggaa

SEQ ID NO: 448521 - RNA, 20 nt, Artificial Sequence
  Synthetic
aaaguauuauugaaauggaa

SEQ ID NO: 448522 - RNA, 21 nt, Artificial Sequence
  Synthetic
uaaaguauuauugaaauggaa

SEQ ID NO: 448523 - RNA, 22 nt, Artificial Sequence
  Synthetic
uuaaaguauuauugaaauggaa

SEQ ID NO: 448524 - RNA, 23 nt, Artificial Sequence
  Synthetic
uuuaaaguauuauugaaauggaa

SEQ ID NO: 448525 - RNA, 24 nt, Artificial Sequence
  Synthetic
auuuaaaguauuauugaaauggaa

SEQ ID NO: 448526 - RNA, 18 nt, Artificial Sequence
  Synthetic
uuuauauccacaauggaa

SEQ ID NO: 448527 - RNA, 19 nt, Artificial Sequence
  Synthetic
guuuauauccacaauggaa

SEQ ID NO: 448528 - RNA, 20 nt, Artificial Sequence
  Synthetic
uguuuauauccacaauggaa

SEQ ID NO: 448529 - RNA, 21 nt, Artificial Sequence
  Synthetic
guguuuauauccacaauggaa

SEQ ID NO: 448530 - RNA, 22 nt, Artificial Sequence
  Synthetic
gguguuuauauccacaauggaa

SEQ ID NO: 448531 - RNA, 23 nt, Artificial Sequence
  Synthetic
ggguguuuauauccacaauggaa

SEQ ID NO: 448532 - RNA, 24 nt, Artificial Sequence
  Synthetic
aggguguuuauauccacaauggaa

SEQ ID NO: 448533 - RNA, 18 nt, Artificial Sequence
  Synthetic
agauauacaccaauggaa

SEQ ID NO: 448534 - RNA, 19 nt, Artificial Sequence
  Synthetic
gagauauacaccaauggaa

SEQ ID NO: 448535 - RNA, 20 nt, Artificial Sequence
  Synthetic
agagauauacaccaauggaa

SEQ ID NO: 448536 - RNA, 21 nt, Artificial Sequence
  Synthetic
cagagauauacaccaauggaa

SEQ ID NO: 448537 - RNA, 22 nt, Artificial Sequence
  Synthetic
acagagauauacaccaauggaa

SEQ ID NO: 448538 - RNA, 23 nt, Artificial Sequence
  Synthetic
aacagagauauacaccaauggaa

SEQ ID NO: 448539 - RNA, 24 nt, Artificial Sequence
  Synthetic
aaacagagauauacaccaauggaa

SEQ ID NO: 448540 - RNA, 18 nt, Artificial Sequence
  Synthetic
agauauagaccaauggaa

SEQ ID NO: 448541 - RNA, 19 nt, Artificial Sequence
  Synthetic
gagauauagaccaauggaa

SEQ ID NO: 448542 - RNA, 20 nt, Artificial Sequence
  Synthetic
agagauauagaccaauggaa

SEQ ID NO: 448543 - RNA, 21 nt, Artificial Sequence
  Synthetic
cagagauauagaccaauggaa

SEQ ID NO: 448544 - RNA, 22 nt, Artificial Sequence
  Synthetic
acagagauauagaccaauggaa

SEQ ID NO: 448545 - RNA, 23 nt, Artificial Sequence
  Synthetic
aacagagauauagaccaauggaa

SEQ ID NO: 448546 - RNA, 24 nt, Artificial Sequence
  Synthetic
aaacagagauauagaccaauggaa

SEQ ID NO: 448547 - RNA, 24 nt, Artificial Sequence
  Synthetic
aaacagauauauagaccaauggaa

SEQ ID NO: 448548 - RNA, 21 nt, Artificial Sequence
  Synthetic
cagagauauagaucaauggaa

SEQ ID NO: 448549 - RNA, 22 nt, Artificial Sequence
  Synthetic
acagagauauagaucaauggaa

SEQ ID NO: 448550 - RNA, 23 nt, Artificial Sequence
  Synthetic
aacagagauauagaucaauggaa

SEQ ID NO: 448551 - RNA, 24 nt, Artificial Sequence
  Synthetic
aaacagagauauagaucaauggaa

SEQ ID NO: 448552 - RNA, 18 nt, Artificial Sequence
  Synthetic
acauugcaaagaauggaa

SEQ ID NO: 448553 - RNA, 19 nt, Artificial Sequence
  Synthetic
cacauugcaaagaauggaa

SEQ ID NO: 448554 - RNA, 20 nt, Artificial Sequence
  Synthetic
acacauugcaaagaauggaa

SEQ ID NO: 448555 - RNA, 21 nt, Artificial Sequence
  Synthetic
uacacauugcaaagaauggaa

SEQ ID NO: 448556 - RNA, 22 nt, Artificial Sequence
  Synthetic
auacacauugcaaagaauggaa

SEQ ID NO: 448557 - RNA, 23 nt, Artificial Sequence
  Synthetic
uauacacauugcaaagaauggaa

SEQ ID NO: 448558 - RNA, 24 nt, Artificial Sequence
  Synthetic
auauacacauugcaaagaauggaa

SEQ ID NO: 448559 - RNA, 18 nt, Artificial Sequence
  Synthetic
gaaacuaggggaauggaa

SEQ ID NO: 448560 - RNA, 19 nt, Artificial Sequence
  Synthetic
agaaacuaggggaauggaa

SEQ ID NO: 448561 - RNA, 20 nt, Artificial Sequence
  Synthetic
cagaaacuaggggaauggaa

SEQ ID NO: 448562 - RNA, 21 nt, Artificial Sequence
  Synthetic
ucagaaacuaggggaauggaa

SEQ ID NO: 448563 - RNA, 22 nt, Artificial Sequence
  Synthetic
aucagaaacuaggggaauggaa

SEQ ID NO: 448564 - RNA, 23 nt, Artificial Sequence
  Synthetic
caucagaaacuaggggaauggaa

SEQ ID NO: 448565 - RNA, 24 nt, Artificial Sequence
  Synthetic
ccaucagaaacuaggggaauggaa

SEQ ID NO: 448566 - RNA, 18 nt, Artificial Sequence
  Synthetic
uuucuuuguugaauggaa

SEQ ID NO: 448567 - RNA, 19 nt, Artificial Sequence
  Synthetic
uuuucuuuguugaauggaa

SEQ ID NO: 448568 - RNA, 20 nt, Artificial Sequence
  Synthetic
uuuuucuuuguugaauggaa

SEQ ID NO: 448569 - RNA, 21 nt, Artificial Sequence
  Synthetic
auuuuucuuuguugaauggaa

SEQ ID NO: 448570 - RNA, 22 nt, Artificial Sequence
  Synthetic
uauuuuucuuuguugaauggaa

SEQ ID NO: 448571 - RNA, 23 nt, Artificial Sequence
  Synthetic
cuauuuuucuuuguugaauggaa

SEQ ID NO: 448572 - RNA, 24 nt, Artificial Sequence
  Synthetic
ucuauuuuucuuuguugaauggaa

SEQ ID NO: 448573 - RNA, 18 nt, Artificial Sequence
  Synthetic
gaagcgcuaaacauggaa

SEQ ID NO: 448574 - RNA, 19 nt, Artificial Sequence
  Synthetic
ggaagcgcuaaacauggaa

SEQ ID NO: 448575 - RNA, 20 nt, Artificial Sequence
  Synthetic
aggaagcgcuaaacauggaa

SEQ ID NO: 448576 - RNA, 21 nt, Artificial Sequence
  Synthetic
aaggaagcgcuaaacauggaa

SEQ ID NO: 448577 - RNA, 22 nt, Artificial Sequence
  Synthetic
gaaggaagcgcuaaacauggaa

SEQ ID NO: 448578 - RNA, 23 nt, Artificial Sequence
  Synthetic
ugaaggaagcgcuaaacauggaa

SEQ ID NO: 448579 - RNA, 24 nt, Artificial Sequence
  Synthetic
cugaaggaagcgcuaaacauggaa

SEQ ID NO: 448580 - RNA, 18 nt, Artificial Sequence
  Synthetic
cuuuuauagaacauggaa

SEQ ID NO: 448581 - RNA, 19 nt, Artificial Sequence
  Synthetic
acuuuuauagaacauggaa

SEQ ID NO: 448582 - RNA, 20 nt, Artificial Sequence
  Synthetic
uacuuuuauagaacauggaa

SEQ ID NO: 448583 - RNA, 21 nt, Artificial Sequence
  Synthetic
guacuuuuauagaacauggaa

SEQ ID NO: 448584 - RNA, 22 nt, Artificial Sequence
  Synthetic
uguacuuuuauagaacauggaa

SEQ ID NO: 448585 - RNA, 23 nt, Artificial Sequence
  Synthetic
guguacuuuuauagaacauggaa

SEQ ID NO: 448586 - RNA, 24 nt, Artificial Sequence
  Synthetic
aguguacuuuuauagaacauggaa

SEQ ID NO: 448587 - RNA, 18 nt, Artificial Sequence
  Synthetic
ccaauaacccacauggaa

SEQ ID NO: 448588 - RNA, 19 nt, Artificial Sequence
  Synthetic
uccaauaacccacauggaa

SEQ ID NO: 448589 - RNA, 20 nt, Artificial Sequence
  Synthetic
guccaauaacccacauggaa

SEQ ID NO: 448590 - RNA, 21 nt, Artificial Sequence
  Synthetic
aguccaauaacccacauggaa

SEQ ID NO: 448591 - RNA, 22 nt, Artificial Sequence
  Synthetic
caguccaauaacccacauggaa

SEQ ID NO: 448592 - RNA, 23 nt, Artificial Sequence
  Synthetic
acaguccaauaacccacauggaa

SEQ ID NO: 448593 - RNA, 24 nt, Artificial Sequence
  Synthetic
uacaguccaauaacccacauggaa

SEQ ID NO: 448594 - RNA, 18 nt, Artificial Sequence
  Synthetic
gacagugcagacauggaa

SEQ ID NO: 448595 - RNA, 19 nt, Artificial Sequence
  Synthetic
ugacagugcagacauggaa

SEQ ID NO: 448596 - RNA, 20 nt, Artificial Sequence
  Synthetic
augacagugcagacauggaa

SEQ ID NO: 448597 - RNA, 21 nt, Artificial Sequence
  Synthetic
gaugacagugcagacauggaa

SEQ ID NO: 448598 - RNA, 22 nt, Artificial Sequence
  Synthetic
ggaugacagugcagacauggaa

SEQ ID NO: 448599 - RNA, 23 nt, Artificial Sequence
  Synthetic
cggaugacagugcagacauggaa

SEQ ID NO: 448600 - RNA, 24 nt, Artificial Sequence
  Synthetic
gcggaugacagugcagacauggaa

SEQ ID NO: 448601 - RNA, 18 nt, Artificial Sequence
  Synthetic
ucuagaguugccauggaa

SEQ ID NO: 448602 - RNA, 19 nt, Artificial Sequence
  Synthetic
cucuagaguugccauggaa

SEQ ID NO: 448603 - RNA, 20 nt, Artificial Sequence
  Synthetic
ucucuagaguugccauggaa

SEQ ID NO: 448604 - RNA, 21 nt, Artificial Sequence
  Synthetic
uucucuagaguugccauggaa

SEQ ID NO: 448605 - RNA, 22 nt, Artificial Sequence
  Synthetic
cuucucuagaguugccauggaa

SEQ ID NO: 448606 - RNA, 23 nt, Artificial Sequence
  Synthetic
ccuucucuagaguugccauggaa

SEQ ID NO: 448607 - RNA, 24 nt, Artificial Sequence
  Synthetic
cccuucucuagaguugccauggaa

SEQ ID NO: 448608 - RNA, 18 nt, Artificial Sequence
  Synthetic
aaaaaaugaagcauggaa

SEQ ID NO: 448609 - RNA, 19 nt, Artificial Sequence
  Synthetic
aaaaaaaugaagcauggaa

SEQ ID NO: 448610 - RNA, 20 nt, Artificial Sequence
  Synthetic
gaaaaaaaugaagcauggaa

SEQ ID NO: 448611 - RNA, 21 nt, Artificial Sequence
  Synthetic
ggaaaaaaaugaagcauggaa

SEQ ID NO: 448612 - RNA, 22 nt, Artificial Sequence
  Synthetic
aggaaaaaaaugaagcauggaa

SEQ ID NO: 448613 - RNA, 23 nt, Artificial Sequence
  Synthetic
gaggaaaaaaaugaagcauggaa

SEQ ID NO: 448614 - RNA, 24 nt, Artificial Sequence
  Synthetic
agaggaaaaaaaugaagcauggaa

SEQ ID NO: 448615 - RNA, 18 nt, Artificial Sequence
  Synthetic
aauuagaagaggauggaa

SEQ ID NO: 448616 - RNA, 19 nt, Artificial Sequence
  Synthetic
caauuagaagaggauggaa

SEQ ID NO: 448617 - RNA, 20 nt, Artificial Sequence
  Synthetic
ucaauuagaagaggauggaa

SEQ ID NO: 448618 - RNA, 21 nt, Artificial Sequence
  Synthetic
cucaauuagaagaggauggaa

SEQ ID NO: 448619 - RNA, 22 nt, Artificial Sequence
  Synthetic
ccucaauuagaagaggauggaa

SEQ ID NO: 448620 - RNA, 23 nt, Artificial Sequence
  Synthetic
uccucaauuagaagaggauggaa

SEQ ID NO: 448621 - RNA, 24 nt, Artificial Sequence
  Synthetic
uuccucaauuagaagaggauggaa

SEQ ID NO: 448622 - RNA, 18 nt, Artificial Sequence
  Synthetic
gcaacaacauggauggaa

SEQ ID NO: 448623 - RNA, 19 nt, Artificial Sequence
  Synthetic
ugcaacaacauggauggaa

SEQ ID NO: 448624 - RNA, 20 nt, Artificial Sequence
  Synthetic
uugcaacaacauggauggaa

SEQ ID NO: 448625 - RNA, 21 nt, Artificial Sequence
  Synthetic
uuugcaacaacauggauggaa

SEQ ID NO: 448626 - RNA, 22 nt, Artificial Sequence
  Synthetic
auuugcaacaacauggauggaa

SEQ ID NO: 448627 - RNA, 23 nt, Artificial Sequence
  Synthetic
cauuugcaacaacauggauggaa

SEQ ID NO: 448628 - RNA, 24 nt, Artificial Sequence
  Synthetic
ucauuugcaacaacauggauggaa

SEQ ID NO: 448629 - RNA, 18 nt, Artificial Sequence
  Synthetic
gcaacaucauggauggaa

SEQ ID NO: 448630 - RNA, 19 nt, Artificial Sequence
  Synthetic
ugcaacaucauggauggaa

SEQ ID NO: 448631 - RNA, 20 nt, Artificial Sequence
  Synthetic
uugcaacaucauggauggaa

SEQ ID NO: 448632 - RNA, 21 nt, Artificial Sequence
  Synthetic
uuugcaacaucauggauggaa

SEQ ID NO: 448633 - RNA, 22 nt, Artificial Sequence
  Synthetic
auuugcaacaucauggauggaa

SEQ ID NO: 448634 - RNA, 23 nt, Artificial Sequence
  Synthetic
cauuugcaacaucauggauggaa

SEQ ID NO: 448635 - RNA, 24 nt, Artificial Sequence
  Synthetic
ucauuugcaacaucauggauggaa

SEQ ID NO: 448636 - RNA, 18 nt, Artificial Sequence
  Synthetic
aauugacuauggauggaa

SEQ ID NO: 448637 - RNA, 19 nt, Artificial Sequence
  Synthetic
caauugacuauggauggaa

SEQ ID NO: 448638 - RNA, 20 nt, Artificial Sequence
  Synthetic
acaauugacuauggauggaa

SEQ ID NO: 448639 - RNA, 21 nt, Artificial Sequence
  Synthetic
gacaauugacuauggauggaa

SEQ ID NO: 448640 - RNA, 22 nt, Artificial Sequence
  Synthetic
ugacaauugacuauggauggaa

SEQ ID NO: 448641 - RNA, 23 nt, Artificial Sequence
  Synthetic
uugacaauugacuauggauggaa

SEQ ID NO: 448642 - RNA, 24 nt, Artificial Sequence
  Synthetic
uuugacaauugacuauggauggaa

SEQ ID NO: 448643 - RNA, 18 nt, Artificial Sequence
  Synthetic
aaaagaaaguggauggaa

SEQ ID NO: 448644 - RNA, 19 nt, Artificial Sequence
  Synthetic
gaaaagaaaguggauggaa

SEQ ID NO: 448645 - RNA, 20 nt, Artificial Sequence
  Synthetic
agaaaagaaaguggauggaa

SEQ ID NO: 448646 - RNA, 21 nt, Artificial Sequence
  Synthetic
aagaaaagaaaguggauggaa

SEQ ID NO: 448647 - RNA, 22 nt, Artificial Sequence
  Synthetic
uaagaaaagaaaguggauggaa

SEQ ID NO: 448648 - RNA, 23 nt, Artificial Sequence
  Synthetic
uuaagaaaagaaaguggauggaa

SEQ ID NO: 448649 - RNA, 24 nt, Artificial Sequence
  Synthetic
auuaagaaaagaaaguggauggaa

SEQ ID NO: 448650 - RNA, 18 nt, Artificial Sequence
  Synthetic
gcaacaucuuggauggaa

SEQ ID NO: 448651 - RNA, 19 nt, Artificial Sequence
  Synthetic
ugcaacaucuuggauggaa

SEQ ID NO: 448652 - RNA, 20 nt, Artificial Sequence
  Synthetic
uugcaacaucuuggauggaa

SEQ ID NO: 448653 - RNA, 21 nt, Artificial Sequence
  Synthetic
uuugcaacaucuuggauggaa

SEQ ID NO: 448654 - RNA, 22 nt, Artificial Sequence
  Synthetic
auuugcaacaucuuggauggaa

SEQ ID NO: 448655 - RNA, 23 nt, Artificial Sequence
  Synthetic
cauuugcaacaucuuggauggaa

SEQ ID NO: 448656 - RNA, 24 nt, Artificial Sequence
  Synthetic
ucauuugcaacaucuuggauggaa

SEQ ID NO: 448657 - RNA, 18 nt, Artificial Sequence
  Synthetic
gaauacacuaugauggaa

SEQ ID NO: 448658 - RNA, 19 nt, Artificial Sequence
  Synthetic
ugaauacacuaugauggaa

SEQ ID NO: 448659 - RNA, 20 nt, Artificial Sequence
  Synthetic
uugaauacacuaugauggaa

SEQ ID NO: 448660 - RNA, 21 nt, Artificial Sequence
  Synthetic
auugaauacacuaugauggaa

SEQ ID NO: 448661 - RNA, 22 nt, Artificial Sequence
  Synthetic
uauugaauacacuaugauggaa

SEQ ID NO: 448662 - RNA, 23 nt, Artificial Sequence
  Synthetic
uuauugaauacacuaugauggaa

SEQ ID NO: 448663 - RNA, 24 nt, Artificial Sequence
  Synthetic
uuuauugaauacacuaugauggaa

SEQ ID NO: 448664 - RNA, 18 nt, Artificial Sequence
  Synthetic
uaccugcucuugauggaa

SEQ ID NO: 448665 - RNA, 19 nt, Artificial Sequence
  Synthetic
auaccugcucuugauggaa

SEQ ID NO: 448666 - RNA, 20 nt, Artificial Sequence
  Synthetic
uauaccugcucuugauggaa

SEQ ID NO: 448667 - RNA, 21 nt, Artificial Sequence
  Synthetic
uuauaccugcucuugauggaa

SEQ ID NO: 448668 - RNA, 22 nt, Artificial Sequence
  Synthetic
uuuauaccugcucuugauggaa

SEQ ID NO: 448669 - RNA, 23 nt, Artificial Sequence
  Synthetic
auuuauaccugcucuugauggaa

SEQ ID NO: 448670 - RNA, 24 nt, Artificial Sequence
  Synthetic
aauuuauaccugcucuugauggaa

SEQ ID NO: 448671 - RNA, 18 nt, Artificial Sequence
  Synthetic
acccaccauaauauggaa

SEQ ID NO: 448672 - RNA, 19 nt, Artificial Sequence
  Synthetic
cacccaccauaauauggaa

SEQ ID NO: 448673 - RNA, 20 nt, Artificial Sequence
  Synthetic
ucacccaccauaauauggaa

SEQ ID NO: 448674 - RNA, 21 nt, Artificial Sequence
  Synthetic
aucacccaccauaauauggaa

SEQ ID NO: 448675 - RNA, 22 nt, Artificial Sequence
  Synthetic
gaucacccaccauaauauggaa

SEQ ID NO: 448676 - RNA, 23 nt, Artificial Sequence
  Synthetic
agaucacccaccauaauauggaa

SEQ ID NO: 448677 - RNA, 24 nt, Artificial Sequence
  Synthetic
gagaucacccaccauaauauggaa

SEQ ID NO: 448678 - RNA, 18 nt, Artificial Sequence
  Synthetic
aaagauacugauauggaa

SEQ ID NO: 448679 - RNA, 19 nt, Artificial Sequence
  Synthetic
caaagauacugauauggaa

SEQ ID NO: 448680 - RNA, 20 nt, Artificial Sequence
  Synthetic
ucaaagauacugauauggaa

SEQ ID NO: 448681 - RNA, 21 nt, Artificial Sequence
  Synthetic
uucaaagauacugauauggaa

SEQ ID NO: 448682 - RNA, 22 nt, Artificial Sequence
  Synthetic
guucaaagauacugauauggaa

SEQ ID NO: 448683 - RNA, 23 nt, Artificial Sequence
  Synthetic
uguucaaagauacugauauggaa

SEQ ID NO: 448684 - RNA, 24 nt, Artificial Sequence
  Synthetic
auguucaaagauacugauauggaa

SEQ ID NO: 448685 - RNA, 18 nt, Artificial Sequence
  Synthetic
uaguuuucugcuauggaa

SEQ ID NO: 448686 - RNA, 19 nt, Artificial Sequence
  Synthetic
cuaguuuucugcuauggaa

SEQ ID NO: 448687 - RNA, 20 nt, Artificial Sequence
  Synthetic
ccuaguuuucugcuauggaa

SEQ ID NO: 448688 - RNA, 21 nt, Artificial Sequence
  Synthetic
uccuaguuuucugcuauggaa

SEQ ID NO: 448689 - RNA, 22 nt, Artificial Sequence
  Synthetic
guccuaguuuucugcuauggaa

SEQ ID NO: 448690 - RNA, 23 nt, Artificial Sequence
  Synthetic
aguccuaguuuucugcuauggaa

SEQ ID NO: 448691 - RNA, 24 nt, Artificial Sequence
  Synthetic
aaguccuaguuuucugcuauggaa

SEQ ID NO: 448692 - RNA, 18 nt, Artificial Sequence
  Synthetic
cauuccaugcuuauggaa

SEQ ID NO: 448693 - RNA, 19 nt, Artificial Sequence
  Synthetic
acauuccaugcuuauggaa

SEQ ID NO: 448694 - RNA, 20 nt, Artificial Sequence
  Synthetic
aacauuccaugcuuauggaa

SEQ ID NO: 448695 - RNA, 21 nt, Artificial Sequence
  Synthetic
aaacauuccaugcuuauggaa

SEQ ID NO: 448696 - RNA, 22 nt, Artificial Sequence
  Synthetic
aaaacauuccaugcuuauggaa

SEQ ID NO: 448697 - RNA, 23 nt, Artificial Sequence
  Synthetic
aaaaacauuccaugcuuauggaa

SEQ ID NO: 448698 - RNA, 24 nt, Artificial Sequence
  Synthetic
gaaaaacauuccaugcuuauggaa

SEQ ID NO: 448699 - RNA, 18 nt, Artificial Sequence
  Synthetic
agagagaagacacuggaa

SEQ ID NO: 448700 - RNA, 19 nt, Artificial Sequence
  Synthetic
cagagagaagacacuggaa

SEQ ID NO: 448701 - RNA, 20 nt, Artificial Sequence
  Synthetic
gcagagagaagacacuggaa

SEQ ID NO: 448702 - RNA, 21 nt, Artificial Sequence
  Synthetic
agcagagagaagacacuggaa

SEQ ID NO: 448703 - RNA, 22 nt, Artificial Sequence
  Synthetic
aagcagagagaagacacuggaa

SEQ ID NO: 448704 - RNA, 23 nt, Artificial Sequence
  Synthetic
aaagcagagagaagacacuggaa

SEQ ID NO: 448705 - RNA, 24 nt, Artificial Sequence
  Synthetic
aaaagcagagagaagacacuggaa

SEQ ID NO: 448706 - RNA, 18 nt, Artificial Sequence
  Synthetic
ucucucuugacacuggaa

SEQ ID NO: 448707 - RNA, 19 nt, Artificial Sequence
  Synthetic
aucucucuugacacuggaa

SEQ ID NO: 448708 - RNA, 20 nt, Artificial Sequence
  Synthetic
aaucucucuugacacuggaa

SEQ ID NO: 448709 - RNA, 21 nt, Artificial Sequence
  Synthetic
aaaucucucuugacacuggaa

SEQ ID NO: 448710 - RNA, 22 nt, Artificial Sequence
  Synthetic
aaaaucucucuugacacuggaa

SEQ ID NO: 448711 - RNA, 23 nt, Artificial Sequence
  Synthetic
gaaaaucucucuugacacuggaa

SEQ ID NO: 448712 - RNA, 24 nt, Artificial Sequence
  Synthetic
ggaaaaucucucuugacacuggaa

SEQ ID NO: 448713 - RNA, 18 nt, Artificial Sequence
  Synthetic
uaucaguugacacuggaa

SEQ ID NO: 448714 - RNA, 19 nt, Artificial Sequence
  Synthetic
uuaucaguugacacuggaa

SEQ ID NO: 448715 - RNA, 20 nt, Artificial Sequence
  Synthetic
uuuaucaguugacacuggaa

SEQ ID NO: 448716 - RNA, 21 nt, Artificial Sequence
  Synthetic
uuuuaucaguugacacuggaa

SEQ ID NO: 448717 - RNA, 22 nt, Artificial Sequence
  Synthetic
uuuuuaucaguugacacuggaa

SEQ ID NO: 448718 - RNA, 23 nt, Artificial Sequence
  Synthetic
auuuuuaucaguugacacuggaa

SEQ ID NO: 448719 - RNA, 24 nt, Artificial Sequence
  Synthetic
uauuuuuaucaguugacacuggaa

SEQ ID NO: 448720 - RNA, 18 nt, Artificial Sequence
  Synthetic
gccuauauauuacuggaa

SEQ ID NO: 448721 - RNA, 19 nt, Artificial Sequence
  Synthetic
ggccuauauauuacuggaa

SEQ ID NO: 448722 - RNA, 20 nt, Artificial Sequence
  Synthetic
aggccuauauauuacuggaa

SEQ ID NO: 448723 - RNA, 21 nt, Artificial Sequence
  Synthetic
uaggccuauauauuacuggaa

SEQ ID NO: 448724 - RNA, 22 nt, Artificial Sequence
  Synthetic
auaggccuauauauuacuggaa

SEQ ID NO: 448725 - RNA, 23 nt, Artificial Sequence
  Synthetic
gauaggccuauauauuacuggaa

SEQ ID NO: 448726 - RNA, 24 nt, Artificial Sequence
  Synthetic
ugauaggccuauauauuacuggaa

SEQ ID NO: 448727 - RNA, 18 nt, Artificial Sequence
  Synthetic
aauaaaguuuuacuggaa

SEQ ID NO: 448728 - RNA, 19 nt, Artificial Sequence
  Synthetic
aaauaaaguuuuacuggaa

SEQ ID NO: 448729 - RNA, 20 nt, Artificial Sequence
  Synthetic
uaaauaaaguuuuacuggaa

SEQ ID NO: 448730 - RNA, 21 nt, Artificial Sequence
  Synthetic
guaaauaaaguuuuacuggaa

SEQ ID NO: 448731 - RNA, 22 nt, Artificial Sequence
  Synthetic
uguaaauaaaguuuuacuggaa

SEQ ID NO: 448732 - RNA, 23 nt, Artificial Sequence
  Synthetic
uuguaaauaaaguuuuacuggaa

SEQ ID NO: 448733 - RNA, 24 nt, Artificial Sequence
  Synthetic
uuuguaaauaaaguuuuacuggaa

SEQ ID NO: 448734 - RNA, 18 nt, Artificial Sequence
  Synthetic
caagcaaaaaaccuggaa

SEQ ID NO: 448735 - RNA, 19 nt, Artificial Sequence
  Synthetic
ccaagcaaaaaaccuggaa

SEQ ID NO: 448736 - RNA, 20 nt, Artificial Sequence
  Synthetic
cccaagcaaaaaaccuggaa

SEQ ID NO: 448737 - RNA, 21 nt, Artificial Sequence
  Synthetic
ccccaagcaaaaaaccuggaa

SEQ ID NO: 448738 - RNA, 22 nt, Artificial Sequence
  Synthetic
cccccaagcaaaaaaccuggaa

SEQ ID NO: 448739 - RNA, 23 nt, Artificial Sequence
  Synthetic
ucccccaagcaaaaaaccuggaa

SEQ ID NO: 448740 - RNA, 24 nt, Artificial Sequence
  Synthetic
uucccccaagcaaaaaaccuggaa

SEQ ID NO: 448741 - RNA, 18 nt, Artificial Sequence
  Synthetic
uuuuaaaugacccuggaa

SEQ ID NO: 448742 - RNA, 19 nt, Artificial Sequence
  Synthetic
uuuuuaaaugacccuggaa

SEQ ID NO: 448743 - RNA, 20 nt, Artificial Sequence
  Synthetic
auuuuuaaaugacccuggaa

SEQ ID NO: 448744 - RNA, 21 nt, Artificial Sequence
  Synthetic
uauuuuuaaaugacccuggaa

SEQ ID NO: 448745 - RNA, 22 nt, Artificial Sequence
  Synthetic
uuauuuuuaaaugacccuggaa

SEQ ID NO: 448746 - RNA, 23 nt, Artificial Sequence
  Synthetic
guuauuuuuaaaugacccuggaa

SEQ ID NO: 448747 - RNA, 24 nt, Artificial Sequence
  Synthetic
aguuauuuuuaaaugacccuggaa

SEQ ID NO: 448748 - RNA, 18 nt, Artificial Sequence
  Synthetic
ucuacaggaauccuggaa

SEQ ID NO: 448749 - RNA, 19 nt, Artificial Sequence
  Synthetic
cucuacaggaauccuggaa

SEQ ID NO: 448750 - RNA, 20 nt, Artificial Sequence
  Synthetic
ucucuacaggaauccuggaa

SEQ ID NO: 448751 - RNA, 21 nt, Artificial Sequence
  Synthetic
aucucuacaggaauccuggaa

SEQ ID NO: 448752 - RNA, 22 nt, Artificial Sequence
  Synthetic
aaucucuacaggaauccuggaa

SEQ ID NO: 448753 - RNA, 23 nt, Artificial Sequence
  Synthetic
gaaucucuacaggaauccuggaa

SEQ ID NO: 448754 - RNA, 24 nt, Artificial Sequence
  Synthetic
ugaaucucuacaggaauccuggaa

SEQ ID NO: 448755 - RNA, 18 nt, Artificial Sequence
  Synthetic
uaaagagugauccuggaa

SEQ ID NO: 448756 - RNA, 19 nt, Artificial Sequence
  Synthetic
uuaaagagugauccuggaa

SEQ ID NO: 448757 - RNA, 20 nt, Artificial Sequence
  Synthetic
uuuaaagagugauccuggaa

SEQ ID NO: 448758 - RNA, 21 nt, Artificial Sequence
  Synthetic
guuuaaagagugauccuggaa

SEQ ID NO: 448759 - RNA, 22 nt, Artificial Sequence
  Synthetic
uguuuaaagagugauccuggaa

SEQ ID NO: 448760 - RNA, 23 nt, Artificial Sequence
  Synthetic
uuguuuaaagagugauccuggaa

SEQ ID NO: 448761 - RNA, 24 nt, Artificial Sequence
  Synthetic
cuuguuuaaagagugauccuggaa

SEQ ID NO: 448762 - RNA, 18 nt, Artificial Sequence
  Synthetic
cacaugcugaaucuggaa

SEQ ID NO: 448763 - RNA, 19 nt, Artificial Sequence
  Synthetic
ucacaugcugaaucuggaa

SEQ ID NO: 448764 - RNA, 20 nt, Artificial Sequence
  Synthetic
uucacaugcugaaucuggaa

SEQ ID NO: 448765 - RNA, 21 nt, Artificial Sequence
  Synthetic
cuucacaugcugaaucuggaa

SEQ ID NO: 448766 - RNA, 22 nt, Artificial Sequence
  Synthetic
acuucacaugcugaaucuggaa

SEQ ID NO: 448767 - RNA, 23 nt, Artificial Sequence
  Synthetic
uacuucacaugcugaaucuggaa

SEQ ID NO: 448768 - RNA, 24 nt, Artificial Sequence
  Synthetic
auacuucacaugcugaaucuggaa

SEQ ID NO: 448769 - RNA, 18 nt, Artificial Sequence
  Synthetic
uucaagugagaucuggaa

SEQ ID NO: 448770 - RNA, 19 nt, Artificial Sequence
  Synthetic
uuucaagugagaucuggaa

SEQ ID NO: 448771 - RNA, 20 nt, Artificial Sequence
  Synthetic
uuuucaagugagaucuggaa

SEQ ID NO: 448772 - RNA, 21 nt, Artificial Sequence
  Synthetic
guuuucaagugagaucuggaa

SEQ ID NO: 448773 - RNA, 22 nt, Artificial Sequence
  Synthetic
aguuuucaagugagaucuggaa

SEQ ID NO: 448774 - RNA, 23 nt, Artificial Sequence
  Synthetic
gaguuuucaagugagaucuggaa

SEQ ID NO: 448775 - RNA, 24 nt, Artificial Sequence
  Synthetic
agaguuuucaagugagaucuggaa

SEQ ID NO: 448776 - RNA, 18 nt, Artificial Sequence
  Synthetic
uuggugugugcucuggaa

SEQ ID NO: 448777 - RNA, 19 nt, Artificial Sequence
  Synthetic
uuuggugugugcucuggaa

SEQ ID NO: 448778 - RNA, 20 nt, Artificial Sequence
  Synthetic
auuuggugugugcucuggaa

SEQ ID NO: 448779 - RNA, 21 nt, Artificial Sequence
  Synthetic
gauuuggugugugcucuggaa

SEQ ID NO: 448780 - RNA, 22 nt, Artificial Sequence
  Synthetic
agauuuggugugugcucuggaa

SEQ ID NO: 448781 - RNA, 23 nt, Artificial Sequence
  Synthetic
aagauuuggugugugcucuggaa

SEQ ID NO: 448782 - RNA, 24 nt, Artificial Sequence
  Synthetic
uaagauuuggugugugcucuggaa

SEQ ID NO: 448783 - RNA, 18 nt, Artificial Sequence
  Synthetic
guauauaaaucucuggaa

SEQ ID NO: 448784 - RNA, 19 nt, Artificial Sequence
  Synthetic
gguauauaaaucucuggaa

SEQ ID NO: 448785 - RNA, 20 nt, Artificial Sequence
  Synthetic
ugguauauaaaucucuggaa

SEQ ID NO: 448786 - RNA, 21 nt, Artificial Sequence
  Synthetic
cugguauauaaaucucuggaa

SEQ ID NO: 448787 - RNA, 22 nt, Artificial Sequence
  Synthetic
ucugguauauaaaucucuggaa

SEQ ID NO: 448788 - RNA, 23 nt, Artificial Sequence
  Synthetic
cucugguauauaaaucucuggaa

SEQ ID NO: 448789 - RNA, 24 nt, Artificial Sequence
  Synthetic
acucugguauauaaaucucuggaa

SEQ ID NO: 448790 - RNA, 18 nt, Artificial Sequence
  Synthetic
uauuaugguggucuggaa

SEQ ID NO: 448791 - RNA, 19 nt, Artificial Sequence
  Synthetic
uuauuaugguggucuggaa

SEQ ID NO: 448792 - RNA, 20 nt, Artificial Sequence
  Synthetic
uuuauuaugguggucuggaa

SEQ ID NO: 448793 - RNA, 21 nt, Artificial Sequence
  Synthetic
cuuuauuaugguggucuggaa

SEQ ID NO: 448794 - RNA, 22 nt, Artificial Sequence
  Synthetic
acuuuauuaugguggucuggaa

SEQ ID NO: 448795 - RNA, 23 nt, Artificial Sequence
  Synthetic
cacuuuauuaugguggucuggaa

SEQ ID NO: 448796 - RNA, 24 nt, Artificial Sequence
  Synthetic
ucacuuuauuaugguggucuggaa

SEQ ID NO: 448797 - RNA, 18 nt, Artificial Sequence
  Synthetic
ucugacguaaaaguggaa

SEQ ID NO: 448798 - RNA, 19 nt, Artificial Sequence
  Synthetic
aucugacguaaaaguggaa

SEQ ID NO: 448799 - RNA, 20 nt, Artificial Sequence
  Synthetic
aaucugacguaaaaguggaa

SEQ ID NO: 448800 - RNA, 21 nt, Artificial Sequence
  Synthetic
caaucugacguaaaaguggaa

SEQ ID NO: 448801 - RNA, 22 nt, Artificial Sequence
  Synthetic
ucaaucugacguaaaaguggaa

SEQ ID NO: 448802 - RNA, 23 nt, Artificial Sequence
  Synthetic
uucaaucugacguaaaaguggaa

SEQ ID NO: 448803 - RNA, 24 nt, Artificial Sequence
  Synthetic
auucaaucugacguaaaaguggaa

SEQ ID NO: 448804 - RNA, 18 nt, Artificial Sequence
  Synthetic
gagaucuggaaaguggaa

SEQ ID NO: 448805 - RNA, 19 nt, Artificial Sequence
  Synthetic
agagaucuggaaaguggaa

SEQ ID NO: 448806 - RNA, 20 nt, Artificial Sequence
  Synthetic
gagagaucuggaaaguggaa

SEQ ID NO: 448807 - RNA, 21 nt, Artificial Sequence
  Synthetic
ugagagaucuggaaaguggaa

SEQ ID NO: 448808 - RNA, 22 nt, Artificial Sequence
  Synthetic
gugagagaucuggaaaguggaa

SEQ ID NO: 448809 - RNA, 23 nt, Artificial Sequence
  Synthetic
ugugagagaucuggaaaguggaa

SEQ ID NO: 448810 - RNA, 24 nt, Artificial Sequence
  Synthetic
uugugagagaucuggaaaguggaa

SEQ ID NO: 448811 - RNA, 18 nt, Artificial Sequence
  Synthetic
ucaguuacggaaguggaa

SEQ ID NO: 448812 - RNA, 19 nt, Artificial Sequence
  Synthetic
cucaguuacggaaguggaa

SEQ ID NO: 448813 - RNA, 20 nt, Artificial Sequence
  Synthetic
gcucaguuacggaaguggaa

SEQ ID NO: 448814 - RNA, 21 nt, Artificial Sequence
  Synthetic
agcucaguuacggaaguggaa

SEQ ID NO: 448815 - RNA, 22 nt, Artificial Sequence
  Synthetic
gagcucaguuacggaaguggaa

SEQ ID NO: 448816 - RNA, 23 nt, Artificial Sequence
  Synthetic
agagcucaguuacggaaguggaa

SEQ ID NO: 448817 - RNA, 24 nt, Artificial Sequence
  Synthetic
aagagcucaguuacggaaguggaa

SEQ ID NO: 448818 - RNA, 18 nt, Artificial Sequence
  Synthetic
ggagauagguaaguggaa

SEQ ID NO: 448819 - RNA, 19 nt, Artificial Sequence
  Synthetic
aggagauagguaaguggaa

SEQ ID NO: 448820 - RNA, 20 nt, Artificial Sequence
  Synthetic
aaggagauagguaaguggaa

SEQ ID NO: 448821 - RNA, 21 nt, Artificial Sequence
  Synthetic
aaaggagauagguaaguggaa

SEQ ID NO: 448822 - RNA, 22 nt, Artificial Sequence
  Synthetic
aaaaggagauagguaaguggaa

SEQ ID NO: 448823 - RNA, 23 nt, Artificial Sequence
  Synthetic
aaaaaggagauagguaaguggaa

SEQ ID NO: 448824 - RNA, 24 nt, Artificial Sequence
  Synthetic
gaaaaaggagauagguaaguggaa

SEQ ID NO: 448825 - RNA, 18 nt, Artificial Sequence
  Synthetic
agcuguugaacaguggaa

SEQ ID NO: 448826 - RNA, 19 nt, Artificial Sequence
  Synthetic
uagcuguugaacaguggaa

SEQ ID NO: 448827 - RNA, 20 nt, Artificial Sequence
  Synthetic
uuagcuguugaacaguggaa

SEQ ID NO: 448828 - RNA, 21 nt, Artificial Sequence
  Synthetic
auuagcuguugaacaguggaa

SEQ ID NO: 448829 - RNA, 22 nt, Artificial Sequence
  Synthetic
cauuagcuguugaacaguggaa

SEQ ID NO: 448830 - RNA, 23 nt, Artificial Sequence
  Synthetic
acauuagcuguugaacaguggaa

SEQ ID NO: 448831 - RNA, 24 nt, Artificial Sequence
  Synthetic
gacauuagcuguugaacaguggaa

SEQ ID NO: 448832 - RNA, 18 nt, Artificial Sequence
  Synthetic
ggcagaucuacaguggaa

SEQ ID NO: 448833 - RNA, 19 nt, Artificial Sequence
  Synthetic
aggcagaucuacaguggaa

SEQ ID NO: 448834 - RNA, 20 nt, Artificial Sequence
  Synthetic
gaggcagaucuacaguggaa

SEQ ID NO: 448835 - RNA, 21 nt, Artificial Sequence
  Synthetic
ggaggcagaucuacaguggaa

SEQ ID NO: 448836 - RNA, 22 nt, Artificial Sequence
  Synthetic
cggaggcagaucuacaguggaa

SEQ ID NO: 448837 - RNA, 23 nt, Artificial Sequence
  Synthetic
ucggaggcagaucuacaguggaa

SEQ ID NO: 448838 - RNA, 24 nt, Artificial Sequence
  Synthetic
aucggaggcagaucuacaguggaa

SEQ ID NO: 448839 - RNA, 18 nt, Artificial Sequence
  Synthetic
uuuccugagauaguggaa

SEQ ID NO: 448840 - RNA, 19 nt, Artificial Sequence
  Synthetic
cuuuccugagauaguggaa

SEQ ID NO: 448841 - RNA, 20 nt, Artificial Sequence
  Synthetic
ccuuuccugagauaguggaa

SEQ ID NO: 448842 - RNA, 21 nt, Artificial Sequence
  Synthetic
gccuuuccugagauaguggaa

SEQ ID NO: 448843 - RNA, 22 nt, Artificial Sequence
  Synthetic
agccuuuccugagauaguggaa

SEQ ID NO: 448844 - RNA, 23 nt, Artificial Sequence
  Synthetic
gagccuuuccugagauaguggaa

SEQ ID NO: 448845 - RNA, 24 nt, Artificial Sequence
  Synthetic
agagccuuuccugagauaguggaa

SEQ ID NO: 448846 - RNA, 18 nt, Artificial Sequence
  Synthetic
aaaucaccuauaguggaa

SEQ ID NO: 448847 - RNA, 19 nt, Artificial Sequence
  Synthetic
caaaucaccuauaguggaa

SEQ ID NO: 448848 - RNA, 20 nt, Artificial Sequence
  Synthetic
acaaaucaccuauaguggaa

SEQ ID NO: 448849 - RNA, 21 nt, Artificial Sequence
  Synthetic
uacaaaucaccuauaguggaa

SEQ ID NO: 448850 - RNA, 22 nt, Artificial Sequence
  Synthetic
auacaaaucaccuauaguggaa

SEQ ID NO: 448851 - RNA, 23 nt, Artificial Sequence
  Synthetic
cauacaaaucaccuauaguggaa

SEQ ID NO: 448852 - RNA, 24 nt, Artificial Sequence
  Synthetic
ucauacaaaucaccuauaguggaa

SEQ ID NO: 448853 - RNA, 18 nt, Artificial Sequence
  Synthetic
gggggacagcauguggaa

SEQ ID NO: 448854 - RNA, 19 nt, Artificial Sequence
  Synthetic
ugggggacagcauguggaa

SEQ ID NO: 448855 - RNA, 20 nt, Artificial Sequence
  Synthetic
gugggggacagcauguggaa

SEQ ID NO: 448856 - RNA, 21 nt, Artificial Sequence
  Synthetic
agugggggacagcauguggaa

SEQ ID NO: 448857 - RNA, 22 nt, Artificial Sequence
  Synthetic
cagugggggacagcauguggaa

SEQ ID NO: 448858 - RNA, 23 nt, Artificial Sequence
  Synthetic
ccagugggggacagcauguggaa

SEQ ID NO: 448859 - RNA, 24 nt, Artificial Sequence
  Synthetic
uccagugggggacagcauguggaa

SEQ ID NO: 448860 - RNA, 18 nt, Artificial Sequence
  Synthetic
ggcuaggacaguguggaa

SEQ ID NO: 448861 - RNA, 19 nt, Artificial Sequence
  Synthetic
cggcuaggacaguguggaa

SEQ ID NO: 448862 - RNA, 20 nt, Artificial Sequence
  Synthetic
ucggcuaggacaguguggaa

SEQ ID NO: 448863 - RNA, 21 nt, Artificial Sequence
  Synthetic
cucggcuaggacaguguggaa

SEQ ID NO: 448864 - RNA, 22 nt, Artificial Sequence
  Synthetic
ccucggcuaggacaguguggaa

SEQ ID NO: 448865 - RNA, 23 nt, Artificial Sequence
  Synthetic
accucggcuaggacaguguggaa

SEQ ID NO: 448866 - RNA, 24 nt, Artificial Sequence
  Synthetic
aaccucggcuaggacaguguggaa

SEQ ID NO: 448867 - RNA, 18 nt, Artificial Sequence
  Synthetic
uagugauaggguguggaa

SEQ ID NO: 448868 - RNA, 19 nt, Artificial Sequence
  Synthetic
uuagugauaggguguggaa

SEQ ID NO: 448869 - RNA, 20 nt, Artificial Sequence
  Synthetic
cuuagugauaggguguggaa

SEQ ID NO: 448870 - RNA, 21 nt, Artificial Sequence
  Synthetic
acuuagugauaggguguggaa

SEQ ID NO: 448871 - RNA, 22 nt, Artificial Sequence
  Synthetic
cacuuagugauaggguguggaa

SEQ ID NO: 448872 - RNA, 23 nt, Artificial Sequence
  Synthetic
ucacuuagugauaggguguggaa

SEQ ID NO: 448873 - RNA, 24 nt, Artificial Sequence
  Synthetic
gucacuuagugauaggguguggaa

SEQ ID NO: 448874 - RNA, 18 nt, Artificial Sequence
  Synthetic
cuuguggucauuguggaa

SEQ ID NO: 448875 - RNA, 19 nt, Artificial Sequence
  Synthetic
acuuguggucauuguggaa

SEQ ID NO: 448876 - RNA, 20 nt, Artificial Sequence
  Synthetic
aacuuguggucauuguggaa

SEQ ID NO: 448877 - RNA, 21 nt, Artificial Sequence
  Synthetic
uaacuuguggucauuguggaa

SEQ ID NO: 448878 - RNA, 22 nt, Artificial Sequence
  Synthetic
auaacuuguggucauuguggaa

SEQ ID NO: 448879 - RNA, 23 nt, Artificial Sequence
  Synthetic
uauaacuuguggucauuguggaa

SEQ ID NO: 448880 - RNA, 24 nt, Artificial Sequence
  Synthetic
guauaacuuguggucauuguggaa

SEQ ID NO: 448881 - RNA, 18 nt, Artificial Sequence
  Synthetic
accuggggaaaauuggaa

SEQ ID NO: 448882 - RNA, 19 nt, Artificial Sequence
  Synthetic
gaccuggggaaaauuggaa

SEQ ID NO: 448883 - RNA, 20 nt, Artificial Sequence
  Synthetic
agaccuggggaaaauuggaa

SEQ ID NO: 448884 - RNA, 21 nt, Artificial Sequence
  Synthetic
aagaccuggggaaaauuggaa

SEQ ID NO: 448885 - RNA, 22 nt, Artificial Sequence
  Synthetic
caagaccuggggaaaauuggaa

SEQ ID NO: 448886 - RNA, 23 nt, Artificial Sequence
  Synthetic
ucaagaccuggggaaaauuggaa

SEQ ID NO: 448887 - RNA, 24 nt, Artificial Sequence
  Synthetic
gucaagaccuggggaaaauuggaa

SEQ ID NO: 448888 - RNA, 18 nt, Artificial Sequence
  Synthetic
ccacguagacaauuggaa

SEQ ID NO: 448889 - RNA, 19 nt, Artificial Sequence
  Synthetic
gccacguagacaauuggaa

SEQ ID NO: 448890 - RNA, 20 nt, Artificial Sequence
  Synthetic
agccacguagacaauuggaa

SEQ ID NO: 448891 - RNA, 21 nt, Artificial Sequence
  Synthetic
uagccacguagacaauuggaa

SEQ ID NO: 448892 - RNA, 22 nt, Artificial Sequence
  Synthetic
uuagccacguagacaauuggaa

SEQ ID NO: 448893 - RNA, 23 nt, Artificial Sequence
  Synthetic
uuuagccacguagacaauuggaa

SEQ ID NO: 448894 - RNA, 24 nt, Artificial Sequence
  Synthetic
uuuuagccacguagacaauuggaa

SEQ ID NO: 448895 - RNA, 18 nt, Artificial Sequence
  Synthetic
uuguaccaucaauuggaa

SEQ ID NO: 448896 - RNA, 19 nt, Artificial Sequence
  Synthetic
uuuguaccaucaauuggaa

SEQ ID NO: 448897 - RNA, 20 nt, Artificial Sequence
  Synthetic
auuuguaccaucaauuggaa

SEQ ID NO: 448898 - RNA, 21 nt, Artificial Sequence
  Synthetic
aauuuguaccaucaauuggaa

SEQ ID NO: 448899 - RNA, 22 nt, Artificial Sequence
  Synthetic
aaauuuguaccaucaauuggaa

SEQ ID NO: 448900 - RNA, 23 nt, Artificial Sequence
  Synthetic
uaaauuuguaccaucaauuggaa

SEQ ID NO: 448901 - RNA, 24 nt, Artificial Sequence
  Synthetic
uuaaauuuguaccaucaauuggaa

SEQ ID NO: 448902 - RNA, 18 nt, Artificial Sequence
  Synthetic
ggcgauucagcauuggaa

SEQ ID NO: 448903 - RNA, 19 nt, Artificial Sequence
  Synthetic
aggcgauucagcauuggaa

SEQ ID NO: 448904 - RNA, 20 nt, Artificial Sequence
  Synthetic
aaggcgauucagcauuggaa

SEQ ID NO: 448905 - RNA, 21 nt, Artificial Sequence
  Synthetic
gaaggcgauucagcauuggaa

SEQ ID NO: 448906 - RNA, 22 nt, Artificial Sequence
  Synthetic
agaaggcgauucagcauuggaa

SEQ ID NO: 448907 - RNA, 23 nt, Artificial Sequence
  Synthetic
uagaaggcgauucagcauuggaa

SEQ ID NO: 448908 - RNA, 24 nt, Artificial Sequence
  Synthetic
uuagaaggcgauucagcauuggaa

SEQ ID NO: 448909 - RNA, 18 nt, Artificial Sequence
  Synthetic
uaagaaauaagauuggaa

SEQ ID NO: 448910 - RNA, 19 nt, Artificial Sequence
  Synthetic
auaagaaauaagauuggaa

SEQ ID NO: 448911 - RNA, 20 nt, Artificial Sequence
  Synthetic
aauaagaaauaagauuggaa

SEQ ID NO: 448912 - RNA, 21 nt, Artificial Sequence
  Synthetic
aaauaagaaauaagauuggaa

SEQ ID NO: 448913 - RNA, 22 nt, Artificial Sequence
  Synthetic
aaaauaagaaauaagauuggaa

SEQ ID NO: 448914 - RNA, 23 nt, Artificial Sequence
  Synthetic
uaaaauaagaaauaagauuggaa

SEQ ID NO: 448915 - RNA, 24 nt, Artificial Sequence
  Synthetic
guaaaauaagaaauaagauuggaa

SEQ ID NO: 448916 - RNA, 18 nt, Artificial Sequence
  Synthetic
aaggaguuuggauuggaa

SEQ ID NO: 448917 - RNA, 19 nt, Artificial Sequence
  Synthetic
caaggaguuuggauuggaa

SEQ ID NO: 448918 - RNA, 20 nt, Artificial Sequence
  Synthetic
gcaaggaguuuggauuggaa

SEQ ID NO: 448919 - RNA, 21 nt, Artificial Sequence
  Synthetic
cgcaaggaguuuggauuggaa

SEQ ID NO: 448920 - RNA, 22 nt, Artificial Sequence
  Synthetic
ccgcaaggaguuuggauuggaa

SEQ ID NO: 448921 - RNA, 23 nt, Artificial Sequence
  Synthetic
cccgcaaggaguuuggauuggaa

SEQ ID NO: 448922 - RNA, 24 nt, Artificial Sequence
  Synthetic
ucccgcaaggaguuuggauuggaa

SEQ ID NO: 448923 - RNA, 18 nt, Artificial Sequence
  Synthetic
uauuuuuacuuauuggaa

SEQ ID NO: 448924 - RNA, 19 nt, Artificial Sequence
  Synthetic
uuauuuuuacuuauuggaa

SEQ ID NO: 448925 - RNA, 20 nt, Artificial Sequence
  Synthetic
uuuauuuuuacuuauuggaa

SEQ ID NO: 448926 - RNA, 21 nt, Artificial Sequence
  Synthetic
auuuauuuuuacuuauuggaa

SEQ ID NO: 448927 - RNA, 22 nt, Artificial Sequence
  Synthetic
cauuuauuuuuacuuauuggaa

SEQ ID NO: 448928 - RNA, 23 nt, Artificial Sequence
  Synthetic
acauuuauuuuuacuuauuggaa

SEQ ID NO: 448929 - RNA, 24 nt, Artificial Sequence
  Synthetic
uacauuuauuuuuacuuauuggaa

SEQ ID NO: 448930 - RNA, 18 nt, Artificial Sequence
  Synthetic
cccugaguauccuuggaa

SEQ ID NO: 448931 - RNA, 19 nt, Artificial Sequence
  Synthetic
ucccugaguauccuuggaa

SEQ ID NO: 448932 - RNA, 20 nt, Artificial Sequence
  Synthetic
uucccugaguauccuuggaa

SEQ ID NO: 448933 - RNA, 21 nt, Artificial Sequence
  Synthetic
cuucccugaguauccuuggaa

SEQ ID NO: 448934 - RNA, 22 nt, Artificial Sequence
  Synthetic
ccuucccugaguauccuuggaa

SEQ ID NO: 448935 - RNA, 23 nt, Artificial Sequence
  Synthetic
gccuucccugaguauccuuggaa

SEQ ID NO: 448936 - RNA, 24 nt, Artificial Sequence
  Synthetic
ggccuucccugaguauccuuggaa

SEQ ID NO: 448937 - RNA, 18 nt, Artificial Sequence
  Synthetic
auuggaaauugcuuggaa

SEQ ID NO: 448938 - RNA, 19 nt, Artificial Sequence
  Synthetic
gauuggaaauugcuuggaa

SEQ ID NO: 448939 - RNA, 20 nt, Artificial Sequence
  Synthetic
agauuggaaauugcuuggaa

SEQ ID NO: 448940 - RNA, 21 nt, Artificial Sequence
  Synthetic
gagauuggaaauugcuuggaa

SEQ ID NO: 448941 - RNA, 22 nt, Artificial Sequence
  Synthetic
ggagauuggaaauugcuuggaa

SEQ ID NO: 448942 - RNA, 23 nt, Artificial Sequence
  Synthetic
aggagauuggaaauugcuuggaa

SEQ ID NO: 448943 - RNA, 24 nt, Artificial Sequence
  Synthetic
gaggagauuggaaauugcuuggaa

SEQ ID NO: 448944 - RNA, 18 nt, Artificial Sequence
  Synthetic
aaaagcgaggucuuggaa

SEQ ID NO: 448945 - RNA, 19 nt, Artificial Sequence
  Synthetic
uaaaagcgaggucuuggaa

SEQ ID NO: 448946 - RNA, 20 nt, Artificial Sequence
  Synthetic
uuaaaagcgaggucuuggaa

SEQ ID NO: 448947 - RNA, 21 nt, Artificial Sequence
  Synthetic
cuuaaaagcgaggucuuggaa

SEQ ID NO: 448948 - RNA, 22 nt, Artificial Sequence
  Synthetic
acuuaaaagcgaggucuuggaa

SEQ ID NO: 448949 - RNA, 23 nt, Artificial Sequence
  Synthetic
aacuuaaaagcgaggucuuggaa

SEQ ID NO: 448950 - RNA, 24 nt, Artificial Sequence
  Synthetic
uaacuuaaaagcgaggucuuggaa

SEQ ID NO: 448951 - RNA, 18 nt, Artificial Sequence
  Synthetic
ggugguauguucuuggaa

SEQ ID NO: 448952 - RNA, 19 nt, Artificial Sequence
  Synthetic
uggugguauguucuuggaa

SEQ ID NO: 448953 - RNA, 20 nt, Artificial Sequence
  Synthetic
auggugguauguucuuggaa

SEQ ID NO: 448954 - RNA, 21 nt, Artificial Sequence
  Synthetic
aauggugguauguucuuggaa

SEQ ID NO: 448955 - RNA, 22 nt, Artificial Sequence
  Synthetic
uaauggugguauguucuuggaa

SEQ ID NO: 448956 - RNA, 23 nt, Artificial Sequence
  Synthetic
auaauggugguauguucuuggaa

SEQ ID NO: 448957 - RNA, 24 nt, Artificial Sequence
  Synthetic
aauaauggugguauguucuuggaa

SEQ ID NO: 448958 - RNA, 18 nt, Artificial Sequence
  Synthetic
gaagaaucagaguuggaa

SEQ ID NO: 448959 - RNA, 19 nt, Artificial Sequence
  Synthetic
ugaagaaucagaguuggaa

SEQ ID NO: 448960 - RNA, 20 nt, Artificial Sequence
  Synthetic
cugaagaaucagaguuggaa

SEQ ID NO: 448961 - RNA, 21 nt, Artificial Sequence
  Synthetic
ucugaagaaucagaguuggaa

SEQ ID NO: 448962 - RNA, 22 nt, Artificial Sequence
  Synthetic
gucugaagaaucagaguuggaa

SEQ ID NO: 448963 - RNA, 23 nt, Artificial Sequence
  Synthetic
agucugaagaaucagaguuggaa

SEQ ID NO: 448964 - RNA, 24 nt, Artificial Sequence
  Synthetic
uagucugaagaaucagaguuggaa

SEQ ID NO: 448965 - RNA, 18 nt, Artificial Sequence
  Synthetic
uauggagaggaguuggaa

SEQ ID NO: 448966 - RNA, 19 nt, Artificial Sequence
  Synthetic
guauggagaggaguuggaa

SEQ ID NO: 448967 - RNA, 20 nt, Artificial Sequence
  Synthetic
uguauggagaggaguuggaa

SEQ ID NO: 448968 - RNA, 21 nt, Artificial Sequence
  Synthetic
guguauggagaggaguuggaa

SEQ ID NO: 448969 - RNA, 22 nt, Artificial Sequence
  Synthetic
uguguauggagaggaguuggaa

SEQ ID NO: 448970 - RNA, 23 nt, Artificial Sequence
  Synthetic
auguguauggagaggaguuggaa

SEQ ID NO: 448971 - RNA, 24 nt, Artificial Sequence
  Synthetic
aauguguauggagaggaguuggaa

SEQ ID NO: 448972 - RNA, 18 nt, Artificial Sequence
  Synthetic
uagaaauacagguuggaa

SEQ ID NO: 448973 - RNA, 19 nt, Artificial Sequence
  Synthetic
cuagaaauacagguuggaa

SEQ ID NO: 448974 - RNA, 20 nt, Artificial Sequence
  Synthetic
gcuagaaauacagguuggaa

SEQ ID NO: 448975 - RNA, 21 nt, Artificial Sequence
  Synthetic
ggcuagaaauacagguuggaa

SEQ ID NO: 448976 - RNA, 22 nt, Artificial Sequence
  Synthetic
gggcuagaaauacagguuggaa

SEQ ID NO: 448977 - RNA, 23 nt, Artificial Sequence
  Synthetic
agggcuagaaauacagguuggaa

SEQ ID NO: 448978 - RNA, 24 nt, Artificial Sequence
  Synthetic
uagggcuagaaauacagguuggaa

SEQ ID NO: 448979 - RNA, 18 nt, Artificial Sequence
  Synthetic
aacaacagcauguuggaa

SEQ ID NO: 448980 - RNA, 19 nt, Artificial Sequence
  Synthetic
caacaacagcauguuggaa

SEQ ID NO: 448981 - RNA, 20 nt, Artificial Sequence
  Synthetic
gcaacaacagcauguuggaa

SEQ ID NO: 448982 - RNA, 21 nt, Artificial Sequence
  Synthetic
agcaacaacagcauguuggaa

SEQ ID NO: 448983 - RNA, 22 nt, Artificial Sequence
  Synthetic
gagcaacaacagcauguuggaa

SEQ ID NO: 448984 - RNA, 23 nt, Artificial Sequence
  Synthetic
agagcaacaacagcauguuggaa

SEQ ID NO: 448985 - RNA, 24 nt, Artificial Sequence
  Synthetic
gagagcaacaacagcauguuggaa

SEQ ID NO: 448986 - RNA, 18 nt, Artificial Sequence
  Synthetic
gcaacaacauuguuggaa

SEQ ID NO: 448987 - RNA, 19 nt, Artificial Sequence
  Synthetic
ugcaacaacauuguuggaa

SEQ ID NO: 448988 - RNA, 20 nt, Artificial Sequence
  Synthetic
cugcaacaacauuguuggaa

SEQ ID NO: 448989 - RNA, 21 nt, Artificial Sequence
  Synthetic
ucugcaacaacauuguuggaa

SEQ ID NO: 448990 - RNA, 22 nt, Artificial Sequence
  Synthetic
aucugcaacaacauuguuggaa

SEQ ID NO: 448991 - RNA, 23 nt, Artificial Sequence
  Synthetic
caucugcaacaacauuguuggaa

SEQ ID NO: 448992 - RNA, 24 nt, Artificial Sequence
  Synthetic
ucaucugcaacaacauuguuggaa

SEQ ID NO: 448993 - RNA, 18 nt, Artificial Sequence
  Synthetic
ccagugcaaaauuuggaa

SEQ ID NO: 448994 - RNA, 19 nt, Artificial Sequence
  Synthetic
uccagugcaaaauuuggaa

SEQ ID NO: 448995 - RNA, 20 nt, Artificial Sequence
  Synthetic
cuccagugcaaaauuuggaa

SEQ ID NO: 448996 - RNA, 21 nt, Artificial Sequence
  Synthetic
ucuccagugcaaaauuuggaa

SEQ ID NO: 448997 - RNA, 22 nt, Artificial Sequence
  Synthetic
aucuccagugcaaaauuuggaa

SEQ ID NO: 448998 - RNA, 23 nt, Artificial Sequence
  Synthetic
caucuccagugcaaaauuuggaa

SEQ ID NO: 448999 - RNA, 24 nt, Artificial Sequence
  Synthetic
ccaucuccagugcaaaauuuggaa

SEQ ID NO: 449000 - RNA, 18 nt, Artificial Sequence
  Synthetic
cauguauaaaauuuggaa

SEQ ID NO: 449001 - RNA, 19 nt, Artificial Sequence
  Synthetic
ucauguauaaaauuuggaa

SEQ ID NO: 449002 - RNA, 20 nt, Artificial Sequence
  Synthetic
uucauguauaaaauuuggaa

SEQ ID NO: 449003 - RNA, 21 nt, Artificial Sequence
  Synthetic
cuucauguauaaaauuuggaa

SEQ ID NO: 449004 - RNA, 22 nt, Artificial Sequence
  Synthetic
ccuucauguauaaaauuuggaa

SEQ ID NO: 449005 - RNA, 23 nt, Artificial Sequence
  Synthetic
uccuucauguauaaaauuuggaa

SEQ ID NO: 449006 - RNA, 24 nt, Artificial Sequence
  Synthetic
uuccuucauguauaaaauuuggaa

SEQ ID NO: 449007 - RNA, 18 nt, Artificial Sequence
  Synthetic
aauacaucaaauuuggaa

SEQ ID NO: 449008 - RNA, 19 nt, Artificial Sequence
  Synthetic
aaauacaucaaauuuggaa

SEQ ID NO: 449009 - RNA, 20 nt, Artificial Sequence
  Synthetic
aaaauacaucaaauuuggaa

SEQ ID NO: 449010 - RNA, 21 nt, Artificial Sequence
  Synthetic
uaaaauacaucaaauuuggaa

SEQ ID NO: 449011 - RNA, 22 nt, Artificial Sequence
  Synthetic
auaaaauacaucaaauuuggaa

SEQ ID NO: 449012 - RNA, 23 nt, Artificial Sequence
  Synthetic
aauaaaauacaucaaauuuggaa

SEQ ID NO: 449013 - RNA, 24 nt, Artificial Sequence
  Synthetic
aaauaaaauacaucaaauuuggaa

SEQ ID NO: 449014 - RNA, 18 nt, Artificial Sequence
  Synthetic
aaccugacuaauuuggaa

SEQ ID NO: 449015 - RNA, 19 nt, Artificial Sequence
  Synthetic
uaaccugacuaauuuggaa

SEQ ID NO: 449016 - RNA, 20 nt, Artificial Sequence
  Synthetic
cuaaccugacuaauuuggaa

SEQ ID NO: 449017 - RNA, 21 nt, Artificial Sequence
  Synthetic
ccuaaccugacuaauuuggaa

SEQ ID NO: 449018 - RNA, 22 nt, Artificial Sequence
  Synthetic
gccuaaccugacuaauuuggaa

SEQ ID NO: 449019 - RNA, 23 nt, Artificial Sequence
  Synthetic
agccuaaccugacuaauuuggaa

SEQ ID NO: 449020 - RNA, 24 nt, Artificial Sequence
  Synthetic
uagccuaaccugacuaauuuggaa

SEQ ID NO: 449021 - RNA, 18 nt, Artificial Sequence
  Synthetic
cuagauuccccuuuggaa

SEQ ID NO: 449022 - RNA, 19 nt, Artificial Sequence
  Synthetic
ccuagauuccccuuuggaa

SEQ ID NO: 449023 - RNA, 20 nt, Artificial Sequence
  Synthetic
gccuagauuccccuuuggaa

SEQ ID NO: 449024 - RNA, 21 nt, Artificial Sequence
  Synthetic
ugccuagauuccccuuuggaa

SEQ ID NO: 449025 - RNA, 22 nt, Artificial Sequence
  Synthetic
cugccuagauuccccuuuggaa

SEQ ID NO: 449026 - RNA, 23 nt, Artificial Sequence
  Synthetic
gcugccuagauuccccuuuggaa

SEQ ID NO: 449027 - RNA, 24 nt, Artificial Sequence
  Synthetic
ugcugccuagauuccccuuuggaa

SEQ ID NO: 449028 - RNA, 18 nt, Artificial Sequence
  Synthetic
gaaaauaugaguuuggaa

SEQ ID NO: 449029 - RNA, 19 nt, Artificial Sequence
  Synthetic
ugaaaauaugaguuuggaa

SEQ ID NO: 449030 - RNA, 20 nt, Artificial Sequence
  Synthetic
gugaaaauaugaguuuggaa

SEQ ID NO: 449031 - RNA, 21 nt, Artificial Sequence
  Synthetic
ggugaaaauaugaguuuggaa

SEQ ID NO: 449032 - RNA, 22 nt, Artificial Sequence
  Synthetic
aggugaaaauaugaguuuggaa

SEQ ID NO: 449033 - RNA, 23 nt, Artificial Sequence
  Synthetic
caggugaaaauaugaguuuggaa

SEQ ID NO: 449034 - RNA, 24 nt, Artificial Sequence
  Synthetic
gcaggugaaaauaugaguuuggaa

SEQ ID NO: 449035 - RNA, 18 nt, Artificial Sequence
  Synthetic
caaagauaugguuuggaa

SEQ ID NO: 449036 - RNA, 19 nt, Artificial Sequence
  Synthetic
acaaagauaugguuuggaa

SEQ ID NO: 449037 - RNA, 20 nt, Artificial Sequence
  Synthetic
cacaaagauaugguuuggaa

SEQ ID NO: 449038 - RNA, 21 nt, Artificial Sequence
  Synthetic
ccacaaagauaugguuuggaa

SEQ ID NO: 449039 - RNA, 22 nt, Artificial Sequence
  Synthetic
uccacaaagauaugguuuggaa

SEQ ID NO: 449040 - RNA, 23 nt, Artificial Sequence
  Synthetic
auccacaaagauaugguuuggaa

SEQ ID NO: 449041 - RNA, 24 nt, Artificial Sequence
  Synthetic
uauccacaaagauaugguuuggaa

SEQ ID NO: 449042 - RNA, 18 nt, Artificial Sequence
  Synthetic
gaccuaaauauuuuggaa
